United States Patent Application Publication US 2022/0213167 A1 - sequence listing, part 28

SEQ ID NO: 590158 - protein, 14 aa, Homo sapiens
  CDR3 for beta chain variable domain of TCR clone 295079 (TRBV20-1, TRBJ2-5)
CSARLLAGVETQYF

SEQ ID NO: 590159 - protein, 13 aa, Homo sapiens
  CDR3 for alpha chain variable domain of TCR clone 295080 (TRAV12-2, TRAJ15)
CAVFNQAGTALIF

SEQ ID NO: 590160 - protein, 23 aa, Homo sapiens
  CDR3 for beta chain variable domain of TCR clone 295080 (TRBV7-8, TRBJ1-5)
RRTPPCVSVPAAGGGGADQPQHF

SEQ ID NO: 590161 - protein, 13 aa, Homo sapiens
  CDR3 for alpha chain variable domain of TCR clone 295081 (TRAV21, TRAJ20)
CAVGVFAYYKLSF

SEQ ID NO: 590162 - protein, 14 aa, Homo sapiens
  CDR3 for beta chain variable domain of TCR clone 295081 (TRBV4-2, TRBJ1-4)
CASSPSSGNEKLFF

SEQ ID NO: 590163 - protein, 13 aa, Homo sapiens
  CDR3 for alpha chain variable domain of TCR clone 295082 (TRAV16, TRAJ34)
CALISYNTDKLIF

SEQ ID NO: 590164 - protein, 14 aa, Homo sapiens
  CDR3 for beta chain variable domain of TCR clone 295082 (TRBV12-4, TRBJ1-1)
CASSLGTGGTEAFF

SEQ ID NO: 590165 - protein, 15 aa, Homo sapiens
  CDR3 for alpha chain variable domain of TCR clone 295083 (TRAV4, TRAJ10)
CLVGDEEGGGNKITF

SEQ ID NO: 590166 - protein, 15 aa, Homo sapiens
  CDR3 for beta chain variable domain of TCR clone 295083 (TRBV7-2, TRBJ2-7)
CASSLTGQGTYEQYF

SEQ ID NO: 590167 - protein, 10 aa, Homo sapiens
  CDR3 for alpha chain variable domain of TCR clone 295084 (TRAV16, TRAJ18)
CALRRAEAQP

SEQ ID NO: 590168 - protein, 14 aa, Homo sapiens
  CDR3 for beta chain variable domain of TCR clone 295084 (TRBV25-1, TRBJ1-1)
CASTHLGGNTEAFF

SEQ ID NO: 590169 - protein, 11 aa, Homo sapiens
  CDR3 for alpha chain variable domain of TCR clone 295085 (TRAV21, TRAJ34)
CAVTNTAKLIF

SEQ ID NO: 590170 - protein, 12 aa, Homo sapiens
  CDR3 for beta chain variable domain of TCR clone 295085 (TRBV7-9, TRBJ1-1)
CASSLVRGEAFF

SEQ ID NO: 590171 - protein, 14 aa, Homo sapiens
  CDR3 for alpha chain variable domain of TCR clone 295086 (TRAV23/DV6, TRAJ37)
CAASTSSNTGKLIF

SEQ ID NO: 590172 - protein, 11 aa, Homo sapiens
  CDR3 for beta chain variable domain of TCR clone 295086 (TRBV7-9, TRBJ2-5)
CASTYDETQYF

SEQ ID NO: 590173 - protein, 21 aa, Homo sapiens
  CDR3 for alpha chain variable domain of TCR clone 295087 (TRAV35, TRAJ52)
CWAGYADGPNAGGTSYGKLTF

SEQ ID NO: 590174 - protein, 15 aa, Homo sapiens
  CDR3 for beta chain variable domain of TCR clone 295087 (TRBV27, TRBJ2-1)
CASSNGGGSSNEQFF

SEQ ID NO: 590175 - protein, 16 aa, Homo sapiens
  CDR3 for alpha chain variable domain of TCR clone 295088 (TRAV20, TRAJ28)
CAVRDPSGAGSYQLTF

SEQ ID NO: 590176 - protein, 15 aa, Homo sapiens
  CDR3 for beta chain variable domain of TCR clone 295088 (TRBV13, TRBJ1-5)
CASSRTGRGHQPQHF

SEQ ID NO: 590177 - protein, 13 aa, Homo sapiens
  CDR3 for alpha chain variable domain of TCR clone 295089 (TRAV21, TRAJ20)
CAVGLRIDYKLSF

SEQ ID NO: 590178 - protein, 15 aa, Homo sapiens
  CDR3 for beta chain variable domain of TCR clone 295089 (TRBV29-1, TRBJ2-1)
CSVPTGLALYNEQFF

SEQ ID NO: 590179 - protein, 15 aa, Homo sapiens
  CDR3 for alpha chain variable domain of TCR clone 295090 (TRAV3, TRAJ4)
CAVRDGTGGYNKLFF

SEQ ID NO: 590180 - protein, 16 aa, Homo sapiens
  CDR3 for beta chain variable domain of TCR clone 295090 (TRBV27, TRBJ2-2)
CASSPSGVSKTGELFF

SEQ ID NO: 590181 - protein, 12 aa, Homo sapiens
  CDR3 for alpha chain variable domain of TCR clone 295091 (TRAV38-1, TRAJ42)
CSGGGSQGNLIF

SEQ ID NO: 590182 - protein, 17 aa, Homo sapiens
  CDR3 for beta chain variable domain of TCR clone 295091 (TRBV20-1, TRBJ2-1)
CSARDPLAGAWDNEQFF

SEQ ID NO: 590183 - protein, 14 aa, Homo sapiens
  CDR3 for alpha chain variable domain of TCR clone 295092 (TRAV12-2, TRAJ40)
CAVKIPSGSYKYIF

SEQ ID NO: 590184 - protein, 14 aa, Homo sapiens
  CDR3 for beta chain variable domain of TCR clone 295092 (TRBV18, TRBJ2-5)
CASSPLRVQETQYF

SEQ ID NO: 590185 - protein, 12 aa, Homo sapiens
  CDR3 for alpha chain variable domain of TCR clone 295093 (TRAV12-3, TRAJ17)
CAMTLTGNKLTF

SEQ ID NO: 590186 - protein, 15 aa, Homo sapiens
  CDR3 for beta chain variable domain of TCR clone 295093 (TRBV11-2, TRBJ2-2)
CASSSDRANAGELFF

SEQ ID NO: 590187 - protein, 17 aa, Homo sapiens
  CDR3 for alpha chain variable domain of TCR clone 295094 (TRAV4, TRAJ42)
CLVGVLNYGGSQGNLIF

SEQ ID NO: 590188 - protein, 12 aa, Homo sapiens
  CDR3 for beta chain variable domain of TCR clone 295094 (TRBV12-4, TRBJ1-3)
CASSFSGNTIYF

SEQ ID NO: 590189 - protein, 13 aa, Homo sapiens
  CDR3 for alpha chain variable domain of TCR clone 295095 (TRAV27, TRAJ42)
YAGARGSQGNLIF

SEQ ID NO: 590190 - protein, 15 aa, Homo sapiens
  CDR3 for beta chain variable domain of TCR clone 295095 (TRBV10-3, TRBJ2-2)
CAIRTDREDTGELFF

SEQ ID NO: 590191 - protein, 14 aa, Homo sapiens
  CDR3 for alpha chain variable domain of TCR clone 295096 (TRAV21, TRAJ3)
CAVTGYSSAFKIIF

SEQ ID NO: 590192 - protein, 17 aa, Homo sapiens
  CDR3 for beta chain variable domain of TCR clone 295096 (TRBV28, TRBJ2-5)
CASSRQGGLAGAETQYF

SEQ ID NO: 590193 - protein, 13 aa, Homo sapiens
  CDR3 for alpha chain variable domain of TCR clone 295097 (TRAV1-2, TRAJ9)
CAVLNTGGFKTIF

SEQ ID NO: 590194 - protein, 14 aa, Homo sapiens
  CDR3 for beta chain variable domain of TCR clone 295097 (TRBV20-1, TRBJ1-1)
CSAQTRIGGTEAFF

SEQ ID NO: 590195 - protein, 12 aa, Homo sapiens
  CDR3 for alpha chain variable domain of TCR clone 295098 (TRAV29/DV5, TRAJ49)
CAATDTGNQFYF

SEQ ID NO: 590196 - protein, 15 aa, Homo sapiens
  CDR3 for beta chain variable domain of TCR clone 295098 (TRBV9, TRBJ1-6)
CASSVAGTGDSPLHF

SEQ ID NO: 590197 - protein, 14 aa, Homo sapiens
  CDR3 for alpha chain variable domain of TCR clone 295099 (TRAV13-1, TRAJ12)
CSNYTMDSSYKLIF

SEQ ID NO: 590198 - protein, 11 aa, Homo sapiens
  CDR3 for beta chain variable domain of TCR clone 295099 (TRBV20-1, TRBJ2-1)
CSLASGSEQFF

SEQ ID NO: 590199 - protein, 15 aa, Homo sapiens
  CDR3 for alpha chain variable domain of TCR clone 295100 (TRAV3, TRAJ3)
CAVRDRRRRASKIIF

SEQ ID NO: 590200 - protein, 13 aa, Homo sapiens
  CDR3 for beta chain variable domain of TCR clone 295100 (TRBV9, TRBJ2-5)
CASSPAGLGTQYF

SEQ ID NO: 590201 - protein, 17 aa, Homo sapiens
  CDR3 for alpha chain variable domain of TCR clone 295101 (TRAV4, TRAJ18)
CLVGERSVGSTLARLYF

SEQ ID NO: 590202 - protein, 14 aa, Homo sapiens
  CDR3 for beta chain variable domain of TCR clone 295101 (TRBV6-5, TRBJ1-2)
CASSYDGTGGGYTF

SEQ ID NO: 590203 - protein, 12 aa, Homo sapiens
  CDR3 for alpha chain variable domain of TCR clone 295102 (TRAV21, TRAJ58)
CAAETSGSRLTF

SEQ ID NO: 590204 - protein, 15 aa, Homo sapiens
  CDR3 for beta chain variable domain of TCR clone 295102 (TRBV20-1, TRBJ2-7)
CSARDPVKGEGELYF

SEQ ID NO: 590205 - protein, 16 aa, Homo sapiens
  CDR3 for alpha chain variable domain of TCR clone 295103 (TRAV22, TRAJ45)
CAVERGKRGGADGLTF

SEQ ID NO: 590206 - protein, 14 aa, Homo sapiens
  CDR3 for beta chain variable domain of TCR clone 295103 (TRBV7-2, TRBJ2-7)
CASRSQGAAYEQYF

SEQ ID NO: 590207 - protein, 12 aa, Homo sapiens
  CDR3 for alpha chain variable domain of TCR clone 295104 (TRAV27, TRAJ9)
CAGESGGFKTIF

SEQ ID NO: 590208 - protein, 14 aa, Homo sapiens
  CDR3 for beta chain variable domain of TCR clone 295104 (TRBV7-2, TRBJ1-1)
CASSFLTGTTEAFF

SEQ ID NO: 590209 - protein, 11 aa, Homo sapiens
  CDR3 for alpha chain variable domain of TCR clone 295105 (TRAV1-2, TRAJ40)
CAVPGTYKYIF

SEQ ID NO: 590210 - protein, 14 aa, Homo sapiens
  CDR3 for beta chain variable domain of TCR clone 295105 (TRBV2, TRBJ2-1)
CASRTGSSYNEQFF

SEQ ID NO: 590211 - protein, 14 aa, Homo sapiens
  CDR3 for alpha chain variable domain of TCR clone 295106 (TRAV12-2, TRAJ17)
CAVNIKAAGNKLTF

SEQ ID NO: 590212 - protein, 13 aa, Homo sapiens
  CDR3 for beta chain variable domain of TCR clone 295106 (TRBV24-1, TRBJ2-2)
CATSDWSTGELFF

SEQ ID NO: 590213 - protein, 12 aa, Homo sapiens
  CDR3 for alpha chain variable domain of TCR clone 295107 (TRAV13-1, TRAJ49)
CAASPRGNQCYF

SEQ ID NO: 590214 - protein, 13 aa, Homo sapiens
  CDR3 for beta chain variable domain of TCR clone 295107 (TRBV20-1, TRBJ2-2)
CSASAAGTGELFF

SEQ ID NO: 590215 - protein, 13 aa, Homo sapiens
  CDR3 for alpha chain variable domain of TCR clone 295108 (TRAV17, TRAJ5)
CALRGTGRRALTF

SEQ ID NO: 590216 - protein, 13 aa, Homo sapiens
  CDR3 for beta chain variable domain of TCR clone 295108 (TRBV19, TRBJ1-2)
CASSVPGQDGYTF

SEQ ID NO: 590217 - protein, 15 aa, Homo sapiens
  CDR3 for alpha chain variable domain of TCR clone 295109 (TRAV26-2, TRAJ54)
CILRDVGKGAQKLVF

SEQ ID NO: 590218 - protein, 13 aa, Homo sapiens
  CDR3 for beta chain variable domain of TCR clone 295109 (TRBV7-9, TRBJ1-1)
CASSLAGVTEAFF

SEQ ID NO: 590219 - protein, 15 aa, Homo sapiens
  CDR3 for alpha chain variable domain of TCR clone 295110 (TRAV1-2, TRAJ15)
YAVDVMGSAGTALIF

SEQ ID NO: 590220 - protein, 13 aa, Homo sapiens
  CDR3 for beta chain variable domain of TCR clone 295110 (TRBV20-1, TRBJ1-1)
CSAFDRENTEAFF

SEQ ID NO: 590221 - protein, 17 aa, Homo sapiens
  CDR3 for alpha chain variable domain of TCR clone 295111 (TRAV27, TRAJ52)
CAGAGWAGGTSYGKLTF

SEQ ID NO: 590222 - protein, 16 aa, Homo sapiens
  CDR3 for beta chain variable domain of TCR clone 295111 (TRBV19, TRBJ2-1)
CASSKAGPSSSMSSSS

SEQ ID NO: 590223 - protein, 15 aa, Homo sapiens
  CDR3 for alpha chain variable domain of TCR clone 295112 (TRAV21, TRAJ24)
CAARSSTDSGGKFQF

SEQ ID NO: 590224 - protein, 13 aa, Homo sapiens
  CDR3 for beta chain variable domain of TCR clone 295112 (TRBV11-2, TRBJ2-5)
CASSSTGEETQYF

SEQ ID NO: 590225 - protein, 14 aa, Homo sapiens
  CDR3 for alpha chain variable domain of TCR clone 295113 (TRAV12-1, TRAJ17)
CVVNYKAAGNKLTF

SEQ ID NO: 590226 - protein, 19 aa, Homo sapiens
  CDR3 for beta chain variable domain of TCR clone 295113 (TRBV5-1, TRBJ2-3)
CASSLWLAGGITTTDTQYF

SEQ ID NO: 590227 - protein, 12 aa, Homo sapiens
  CDR3 for alpha chain variable domain of TCR clone 295114 (TRAV17, TRAJ39)
CAMGAAGNMLTF

SEQ ID NO: 590228 - protein, 14 aa, Homo sapiens
  CDR3 for beta chain variable domain of TCR clone 295114 (TRBV7-9, TRBJ1-2)
CASSRQGANYGYTF

SEQ ID NO: 590229 - protein, 15 aa, Homo sapiens
  CDR3 for alpha chain variable domain of TCR clone 295115 (TRAV21, TRAJ53)
CATLSSGGSNYKLTF

SEQ ID NO: 590230 - protein, 17 aa, Homo sapiens
  CDR3 for beta chain variable domain of TCR clone 295115 (TRBV7-8, TRBJ2-5)
CASSLASGGRFQETQYF

SEQ ID NO: 590231 - protein, 18 aa, Homo sapiens
  CDR3 for alpha chain variable domain of TCR clone 295116 (TRAV21, TRAJ52)
CAVRPSPVGGTSYGKLTF

SEQ ID NO: 590232 - protein, 17 aa, Homo sapiens
  CDR3 for beta chain variable domain of TCR clone 295116 (TRBV25-1, TRBJ2-1)
CASSAYGQGRGVYEQFF

SEQ ID NO: 590233 - protein, 15 aa, Homo sapiens
  CDR3 for alpha chain variable domain of TCR clone 295117 (TRAV1-1, TRAJ22)
CAVRVSSGSARQLTF

SEQ ID NO: 590234 - protein, 15 aa, Homo sapiens
  CDR3 for beta chain variable domain of TCR clone 295117 (TRBV20-1, TRBJ2-7)
CSARDRVSGMDEQYL

SEQ ID NO: 590235 - protein, 14 aa, Homo sapiens
  CDR3 for alpha chain variable domain of TCR clone 295118 (TRAV1-2, TRAJ8)
CAVREDTGFQNLVF

SEQ ID NO: 590236 - protein, 14 aa, Homo sapiens
  CDR3 for beta chain variable domain of TCR clone 295118 (TRBV7-9, TRBJ1-1)
CASTPLQSYTEAFF

SEQ ID NO: 590237 - protein, 17 aa, Homo sapiens
  CDR3 for alpha chain variable domain of TCR clone 295119 (TRAV2, TRAJ36)
CAVEDRGNWGKQPLLWD

SEQ ID NO: 590238 - protein, 16 aa, Homo sapiens
  CDR3 for beta chain variable domain of TCR clone 295119 (TRBV19, TRBJ2-2)
CASRSPGTGATGELFF

SEQ ID NO: 590239 - protein, 20 aa, Homo sapiens
  CDR3 for alpha chain variable domain of TCR clone 295120 (TRAV21, TRAJ30)
CAVRRRMTRSSLEKGHDFIF

SEQ ID NO: 590240 - protein, 16 aa, Homo sapiens
  CDR3 for beta chain variable domain of TCR clone 295120 (TRBV20-1, TRBJ1-1)
CSARALTQGMNTEAFF

SEQ ID NO: 590241 - protein, 14 aa, Homo sapiens
  CDR3 for alpha chain variable domain of TCR clone 295121 (TRAV1-2, TRAJ16)
CAVNRFSDGHKLLF

SEQ ID NO: 590242 - protein, 17 aa, Homo sapiens
  CDR3 for beta chain variable domain of TCR clone 295121 (TRBV28, TRBJ2-5)
CASSRQGGLAGAETQYF

SEQ ID NO: 590243 - protein, 13 aa, Homo sapiens
  CDR3 for alpha chain variable domain of TCR clone 295122 (TRAV21, TRAJ37)
CAVVAGNTGKLIF

SEQ ID NO: 590244 - protein, 14 aa, Homo sapiens
  CDR3 for beta chain variable domain of TCR clone 295122 (TRBV11-2, TRBJ2-3)
CASSRLARADTQYF

SEQ ID NO: 590245 - protein, 18 aa, Homo sapiens
  CDR3 for alpha chain variable domain of TCR clone 295123 (TRAV29/DV5, TRAJ52)
CAASGTNAGGTSYGKLTF

SEQ ID NO: 590246 - protein, 12 aa, Homo sapiens
  CDR3 for beta chain variable domain of TCR clone 295123 (TRBV28, TRBJ2-6)
CVIQAGANVLTF

SEQ ID NO: 590247 - protein, 15 aa, Homo sapiens
  CDR3 for alpha chain variable domain of TCR clone 295124 (TRAV8-6, TRAJ9)
CAVGDRDTGGFKTIF

SEQ ID NO: 590248 - protein, 16 aa, Homo sapiens
  CDR3 for beta chain variable domain of TCR clone 295124 (TRBV19, TRBJ2-3)
CASSPEWDRGTDTQYF

SEQ ID NO: 590249 - protein, 13 aa, Homo sapiens
  CDR3 for alpha chain variable domain of TCR clone 295125 (TRAV3, TRAJ31)
CAVREGNNARLMF

SEQ ID NO: 590250 - protein, 17 aa, Homo sapiens
  CDR3 for beta chain variable domain of TCR clone 295125 (TRBV20-1, TRBJ2-2)
CSASGSGQGGLTGELFF

SEQ ID NO: 590251 - protein, 15 aa, Homo sapiens
  CDR3 for alpha chain variable domain of TCR clone 295126 (TRAV8-1, TRAJ37)
CAVKKGSGNTGNLIF

SEQ ID NO: 590252 - protein, 17 aa, Homo sapiens
  CDR3 for beta chain variable domain of TCR clone 295126 (TRBV12-4, TRBJ1-1)
CASSLSGFRTMNTEAFF

SEQ ID NO: 590253 - protein, 13 aa, Homo sapiens
  CDR3 for alpha chain variable domain of TCR clone 295127 (TRAV12-3, TRAJ43)
CAMIRPNNNDMRF

SEQ ID NO: 590254 - protein, 13 aa, Homo sapiens
  CDR3 for beta chain variable domain of TCR clone 295127 (TRBV7-9, TRBJ1-2)
CASSLKQNYGYAF

SEQ ID NO: 590255 - protein, 14 aa, Homo sapiens
  CDR3 for alpha chain variable domain of TCR clone 295128 (TRAV8-2, TRAJ6)
CVVMSAGGSYIPTF

SEQ ID NO: 590256 - protein, 16 aa, Homo sapiens
  CDR3 for beta chain variable domain of TCR clone 295128 (TRBV7-6, TRBJ2-6)
CASSLPGLSGANVLTF

SEQ ID NO: 590257 - protein, 14 aa, Homo sapiens
  CDR3 for alpha chain variable domain of TCR clone 295129 (TRAV23/DV6, TRAJ24)
CAANLSDSWGKLQF

SEQ ID NO: 590258 - protein, 14 aa, Homo sapiens
  CDR3 for beta chain variable domain of TCR clone 295129 (TRBV28, TRBJ1-2)
CASRIQGANYGYTF

SEQ ID NO: 590259 - protein, 13 aa, Homo sapiens
  CDR3 for alpha chain variable domain of TCR clone 295130 (TRAV2, TRAJ40)
CAVVTSVTYKYIF

SEQ ID NO: 590260 - protein, 14 aa, Homo sapiens
  CDR3 for beta chain variable domain of TCR clone 295130 (TRBV19, TRBJ1-5)
CASRAPDSFLSQHF

SEQ ID NO: 590261 - protein, 14 aa, Homo sapiens
  CDR3 for alpha chain variable domain of TCR clone 295131 (TRAV12-2, TRAJ13)
CAVKKTGGYQKVTF

SEQ ID NO: 590262 - protein, 14 aa, Homo sapiens
  CDR3 for beta chain variable domain of TCR clone 295131 (TRBV19, TRBJ2-1)
CASPTVVLSSGQFF

SEQ ID NO: 590263 - protein, 18 aa, Homo sapiens
  CDR3 for alpha chain variable domain of TCR clone 295132 (TRAV26-2, TRAJ54)
CILRDVEVGIQGAQKLVF

SEQ ID NO: 590264 - protein, 16 aa, Homo sapiens
  CDR3 for beta chain variable domain of TCR clone 295132 (TRBV6-1, TRBJ2-5)
CASSETLDGGAETQYF

SEQ ID NO: 590265 - protein, 13 aa, Homo sapiens
  CDR3 for alpha chain variable domain of TCR clone 295133 (TRAV13-2, TRAJ8)
CAFMNTGFQKLVF

SEQ ID NO: 590266 - protein, 15 aa, Homo sapiens
  CDR3 for beta chain variable domain of TCR clone 295133 (TRBV19, TRBJ2-3)
CAAGDTNAPNETQYF

SEQ ID NO: 590267 - protein, 13 aa, Homo sapiens
  CDR3 for alpha chain variable domain of TCR clone 295134 (TRAV26-1, TRAJ54)
CIVRVKGAQKLVF

SEQ ID NO: 590268 - protein, 15 aa, Homo sapiens
  CDR3 for beta chain variable domain of TCR clone 295134 (TRBV20-1, TRBJ2-1)
CSAQPGSGPYNEQFF

SEQ ID NO: 590269 - protein, 13 aa, Homo sapiens
  CDR3 for alpha chain variable domain of TCR clone 295135 (TRAV17, TRAJ29)
CATDAFSKHTSCL

SEQ ID NO: 590270 - protein, 13 aa, Homo sapiens
  CDR3 for beta chain variable domain of TCR clone 295135 (TRBV7-3, TRBJ1-1)
CASSQDWGAEAFF

SEQ ID NO: 590271 - protein, 12 aa, Homo sapiens
  CDR3 for alpha chain variable domain of TCR clone 295136 (TRAV3, TRAJ31)
CAVRDGNARLMF

SEQ ID NO: 590272 - protein, 15 aa, Homo sapiens
  CDR3 for beta chain variable domain of TCR clone 295136 (TRBV5-5, TRBJ2-2)
CASSRQASGAGELFF

SEQ ID NO: 590273 - protein, 12 aa, Homo sapiens
  CDR3 for alpha chain variable domain of TCR clone 295137 (TRAV12-2, TRAJ3)
CAVWSSASKIIF

SEQ ID NO: 590274 - protein, 12 aa, Homo sapiens
  CDR3 for beta chain variable domain of TCR clone 295137 (TRBV11-2, TRBJ2-1)
CASSPGNNEQYF

SEQ ID NO: 590275 - protein, 10 aa, Homo sapiens
  CDR3 for alpha chain variable domain of TCR clone 295138 (TRAV25, TRAJ17)
CQAAGNKLTF

SEQ ID NO: 590276 - protein, 14 aa, Homo sapiens
  CDR3 for beta chain variable domain of TCR clone 295138 (TRBV11-2, TRBJ2-3)
CASSRLARTDTQYF

SEQ ID NO: 590277 - protein, 15 aa, Homo sapiens
  CDR3 for alpha chain variable domain of TCR clone 295139 (TRAV21, TRAJ53)
CATLNSGGSNYKLTF

SEQ ID NO: 590278 - protein, 14 aa, Homo sapiens
  CDR3 for beta chain variable domain of TCR clone 295139 (TRBV2, TRBJ1-2)
CASRKGALDYGYTF

SEQ ID NO: 590279 - protein, 11 aa, Homo sapiens
  CDR3 for alpha chain variable domain of TCR clone 295140 (TRAV16, TRAJ49)
CSLNTGKQFYF

SEQ ID NO: 590280 - protein, 12 aa, Homo sapiens
  CDR3 for beta chain variable domain of TCR clone 295140 (TRBV7-9, TRBJ1-4)
CASSTDREKLFF

SEQ ID NO: 590281 - protein, 15 aa, Homo sapiens
  CDR3 for alpha chain variable domain of TCR clone 295141 (TRAV12-1, TRAJ44)
CVADLPTGTASKLIF

SEQ ID NO: 590282 - protein, 13 aa, Homo sapiens
  CDR3 for beta chain variable domain of TCR clone 295141 (TRBV20-1, TRBJ2-5)
CSARGDYQETQYF

SEQ ID NO: 590283 - protein, 14 aa, Homo sapiens
  CDR3 for alpha chain variable domain of TCR clone 295142 (TRAV23/DV6, TRAJ17)
CAARGRDAGNKLTF

SEQ ID NO: 590284 - protein, 12 aa, Homo sapiens
  CDR3 for beta chain variable domain of TCR clone 295142 (TRBV7-9, TRBJ2-3)
CASSFITDTQYF

SEQ ID NO: 590285 - protein, 13 aa, Homo sapiens
  CDR3 for alpha chain variable domain of TCR clone 295143 (TRAV26-2, TRAJ43)
CILRAVNNNDMLF

SEQ ID NO: 590286 - protein, 11 aa, Homo sapiens
  CDR3 for beta chain variable domain of TCR clone 295143 (TRBV29-1, TRBJ2-5)
CSEDRTGTQYF

SEQ ID NO: 590287 - protein, 14 aa, Homo sapiens
  CDR3 for alpha chain variable domain of TCR clone 295144 (TRAV12-1, TRAJ17)
CVVNYKAAGNKPTF

SEQ ID NO: 590288 - protein, 16 aa, Homo sapiens
  CDR3 for beta chain variable domain of TCR clone 295144 (TRBV12-4, TRBJ1-5)
CASSRPVGGSNQPQHF

SEQ ID NO: 590289 - protein, 10 aa, Homo sapiens
  CDR3 for alpha chain variable domain of TCR clone 295145 (TRAV13-1, TRAJ7)
LIGGNNRLAF

SEQ ID NO: 590290 - protein, 16 aa, Homo sapiens
  CDR3 for beta chain variable domain of TCR clone 295145 (TRBV4-1, TRBJ1-2)
CASNQDAGQVLYGYTF

SEQ ID NO: 590291 - protein, 14 aa, Homo sapiens
  CDR3 for alpha chain variable domain of TCR clone 295146 (TRAV12-2, TRAJ17)
CAVNIKAAGNKLTF

SEQ ID NO: 590292 - protein, 17 aa, Homo sapiens
  CDR3 for beta chain variable domain of TCR clone 295146 (TRBV11-2, TRBJ2-1)
CASSLYPPGVEYNEQFF

SEQ ID NO: 590293 - protein, 18 aa, Homo sapiens
  CDR3 for alpha chain variable domain of TCR clone 295147 (TRAV13-1, TRAJ52)
CAAKNPNAGGTSYGKLTF

SEQ ID NO: 590294 - protein, 15 aa, Homo sapiens
  CDR3 for beta chain variable domain of TCR clone 295147 (TRBV28, TRBJ2-1)
CASSIVAGGRSEQFF

SEQ ID NO: 590295 - protein, 15 aa, Homo sapiens
  CDR3 for alpha chain variable domain of TCR clone 295148 (TRAV35, TRAJ40)
CAGQLGQAGTYKYIF

SEQ ID NO: 590296 - protein, 14 aa, Homo sapiens
  CDR3 for beta chain variable domain of TCR clone 295148 (TRBV7-3, TRBJ2-1)
CASGLTGGANEQFF

SEQ ID NO: 590297 - protein, 19 aa, Homo sapiens
  CDR3 for alpha chain variable domain of TCR clone 295149 (TRAV26-1, TRAJ38)
CIADNAGNNHIQNPDPAVY

SEQ ID NO: 590298 - protein, 13 aa, Homo sapiens
  CDR3 for beta chain variable domain of TCR clone 295149 (TRBV10-3, TRBJ2-7)
CASKLAVNYEQYF

SEQ ID NO: 590299 - protein, 17 aa, Homo sapiens
  CDR3 for alpha chain variable domain of TCR clone 295150 (TRAV35, TRAJ28)
CSGLQVYSGAGSYQLTF

SEQ ID NO: 590300 - protein, 15 aa, Homo sapiens
  CDR3 for beta chain variable domain of TCR clone 295150 (TRBV2, TRBJ1-2)
CASSEIGGANYGYTF

SEQ ID NO: 590301 - protein, 10 aa, Homo sapiens
  CDR3 for alpha chain variable domain of TCR clone 295151 (TRAV23/DV6, TRAJ57)
CAASSTLSQG

SEQ ID NO: 590302 - protein, 13 aa, Homo sapiens
  CDR3 for beta chain variable domain of TCR clone 295151 (TRBV25-1, TRBJ1-1)
CQHPPVGNTEAFF

SEQ ID NO: 590303 - protein, 11 aa, Homo sapiens
  CDR3 for alpha chain variable domain of TCR clone 295152 (TRAV12-2, TRAJ39)
CAVNNMLTFGG

SEQ ID NO: 590304 - protein, 15 aa, Homo sapiens
  CDR3 for beta chain variable domain of TCR clone 295152 (TRBV19, TRBJ2-1)
CASSTGTSSYNEQFF

SEQ ID NO: 590305 - protein, 14 aa, Homo sapiens
  CDR3 for alpha chain variable domain of TCR clone 295153 (TRAV26-1, TRAJ39)
CIVRGSRAGNMLTF

SEQ ID NO: 590306 - protein, 15 aa, Homo sapiens
  CDR3 for beta chain variable domain of TCR clone 295153 (TRBV28, TRBJ2-5)
CASSPGQGSIDTQYF

SEQ ID NO: 590307 - protein, 14 aa, Homo sapiens
  CDR3 for alpha chain variable domain of TCR clone 295154 (TRAV12-1, TRAJ23)
CVVIVYNQGGKLIF

SEQ ID NO: 590308 - protein, 15 aa, Homo sapiens
  CDR3 for beta chain variable domain of TCR clone 295154 (TRBV20-1, TRBJ1-5)
CSAKAPGQGPQPQHF

SEQ ID NO: 590309 - protein, 16 aa, Homo sapiens
  CDR3 for alpha chain variable domain of TCR clone 295155 (TRAV30, TRAJ24)
CGTEIVDADSWGKFQF

SEQ ID NO: 590310 - protein, 16 aa, Homo sapiens
  CDR3 for beta chain variable domain of TCR clone 295155 (TRBV4-1, TRBJ2-7)
CASSQEGTASSYEKYF

SEQ ID NO: 590311 - protein, 15 aa, Homo sapiens
  CDR3 for alpha chain variable domain of TCR clone 295156 (TRAV13-1, TRAJ28)
CAAKDAGAGSYQLTF

SEQ ID NO: 590312 - protein, 14 aa, Homo sapiens
  CDR3 for beta chain variable domain of TCR clone 295156 (TRBV6-1, TRBJ2-2)
CASSGQGRAGELFF

SEQ ID NO: 590313 - protein, 12 aa, Homo sapiens
  CDR3 for alpha chain variable domain of TCR clone 295157 (TRAV12-3, TRAJ5)
YAMDTGRRALTF

SEQ ID NO: 590314 - protein, 14 aa, Homo sapiens
  CDR3 for beta chain variable domain of TCR clone 295157 (TRBV20-1, TRBJ2-1)
CSAQIGGSANEQFF

SEQ ID NO: 590315 - protein, 16 aa, Homo sapiens
  CDR3 for alpha chain variable domain of TCR clone 295158 (TRAV3, TRAJ37)
CAVRGKGSGNTGKLIF

SEQ ID NO: 590316 - protein, 15 aa, Homo sapiens
  CDR3 for beta chain variable domain of TCR clone 295158 (TRBV7-2, TRBJ2-2)
CASRRPGQNTGELFF

SEQ ID NO: 590317 - protein, 14 aa, Homo sapiens
  CDR3 for alpha chain variable domain of TCR clone 295159 (TRAV23/DV6, TRAJ24)
CTASLSDSWGKLQF

SEQ ID NO: 590318 - protein, 16 aa, Homo sapiens
  CDR3 for beta chain variable domain of TCR clone 295159 (TRBV7-9, TRBJ2-6)
CASSLKGPLRANVLTF

SEQ ID NO: 590319 - protein, 11 aa, Homo sapiens
  CDR3 for alpha chain variable domain of TCR clone 295160 (TRAV12-3, TRAJ43)
CAVSVSNDMRF

SEQ ID NO: 590320 - protein, 11 aa, Homo sapiens
  CDR3 for beta chain variable domain of TCR clone 295160 (TRBV29-1, TRBJ2-5)
CSEDRTGTQYF

SEQ ID NO: 590321 - protein, 14 aa, Homo sapiens
  CDR3 for alpha chain variable domain of TCR clone 295161 (TRAV2, TRAJ9)
CAVADRCGGVKTIF

SEQ ID NO: 590322 - protein, 17 aa, Homo sapiens
  CDR3 for beta chain variable domain of TCR clone 295161 (TRBV13, TRBJ2-3)
CASSLSRVAGGRNTQYF

SEQ ID NO: 590323 - protein, 12 aa, Homo sapiens
  CDR3 for alpha chain variable domain of TCR clone 295162 (TRAV12-3, TRAJ17)
CAMALTGNKLTF

SEQ ID NO: 590324 - protein, 16 aa, Homo sapiens
  CDR3 for beta chain variable domain of TCR clone 295162 (TRBV7-3, TRBJ2-1)
CASSLEGYRSYNEQFF

SEQ ID NO: 590325 - protein, 13 aa, Homo sapiens
  CDR3 for alpha chain variable domain of TCR clone 295163 (TRAV13-2, TRAJ49)
CAEAPQTGNQFYF

SEQ ID NO: 590326 - protein, 14 aa, Homo sapiens
  CDR3 for beta chain variable domain of TCR clone 295163 (TRBV4-1, TRBJ2-2)
CASSQAVNTGELFF

SEQ ID NO: 590327 - protein, 13 aa, Homo sapiens
  CDR3 for alpha chain variable domain of TCR clone 295164 (TRAV21, TRAJ6)
CAVTTGGSYIPTF

SEQ ID NO: 590328 - protein, 14 aa, Homo sapiens
  CDR3 for beta chain variable domain of TCR clone 295164 (TRBV27, TRBJ2-7)
CASSPPDRFYEQYF

SEQ ID NO: 590329 - protein, 12 aa, Homo sapiens
  CDR3 for alpha chain variable domain of TCR clone 295165 (TRAV8-3, TRAJ26)
CAGDNYGQNFVF

SEQ ID NO: 590330 - protein, 17 aa, Homo sapiens
  CDR3 for beta chain variable domain of TCR clone 295165 (TRBV12-4, TRBJ1-1)
CASSLSGFRTMNTEAFF

SEQ ID NO: 590331 - protein, 17 aa, Homo sapiens
  CDR3 for alpha chain variable domain of TCR clone 295166 (TRAV27, TRAJ42)
CAERVTYYGGSQGNLIF

SEQ ID NO: 590332 - protein, 16 aa, Homo sapiens
  CDR3 for beta chain variable domain of TCR clone 295166 (TRBV25-1, TRBJ2-7)
CASSELTGGGIYEQYF

SEQ ID NO: 590333 - protein, 12 aa, Homo sapiens
  CDR3 for alpha chain variable domain of TCR clone 295167 (TRAV29/DV5, TRAJ49)
CAATDTGNQFYF

SEQ ID NO: 590334 - protein, 19 aa, Homo sapiens
  CDR3 for beta chain variable domain of TCR clone 295167 (TRBV25-1, TRBJ2-2)
CAILVYRVDRGRKTEELFF

SEQ ID NO: 590335 - protein, 14 aa, Homo sapiens
  CDR3 for alpha chain variable domain of TCR clone 295168 (TRAV12-1, TRAJ17)
CVVNYKAAGNKLTF

SEQ ID NO: 590336 - protein, 17 aa, Homo sapiens
  CDR3 for beta chain variable domain of TCR clone 295168 (TRBV20-1, TRBJ2-1)
CSASFSGLAGAYNEQFF

SEQ ID NO: 590337 - protein, 15 aa, Homo sapiens
  CDR3 for alpha chain variable domain of TCR clone 295169 (TRAV34, TRAJ44)
CGAVENTGTASKLTF

SEQ ID NO: 590338 - protein, 17 aa, Homo sapiens
  CDR3 for beta chain variable domain of TCR clone 295169 (TRBV7-9, TRBJ1-5)
CASSASQGGYSNQPQHF

SEQ ID NO: 590339 - protein, 12 aa, Homo sapiens
  CDR3 for alpha chain variable domain of TCR clone 295170 (TRAV3, TRAJ20)
CAVRDGDYKLSF

SEQ ID NO: 590340 - protein, 14 aa, Homo sapiens
  CDR3 for beta chain variable domain of TCR clone 295170 (TRBV10-3, TRBJ2-7)
CAISELPLVYEQYF

SEQ ID NO: 590341 - protein, 20 aa, Homo sapiens
  CDR3 for alpha chain variable domain of TCR clone 295171 (TRAV1-1, TRAJ4)
CLLLLRCEGFLSGGYNKLIF

SEQ ID NO: 590342 - protein, 15 aa, Homo sapiens
  CDR3 for beta chain variable domain of TCR clone 295171 (TRBV19, TRBJ2-4)
CASRGPRRGENIQYF

SEQ ID NO: 590343 - protein, 11 aa, Homo sapiens
  CDR3 for alpha chain variable domain of TCR clone 295172 (TRAV21, TRAJ34)
CAHYNTDKLIF

SEQ ID NO: 590344 - protein, 16 aa, Homo sapiens
  CDR3 for beta chain variable domain of TCR clone 295172 (TRBV3-1, TRBJ2-7)
CASSQGATGVAYEQYF

SEQ ID NO: 590345 - protein, 17 aa, Homo sapiens
  CDR3 for alpha chain variable domain of TCR clone 295173 (TRAV13-1, TRAJ28)
CAASPPYSGAGSYQLTF

SEQ ID NO: 590346 - protein, 14 aa, Homo sapiens
  CDR3 for beta chain variable domain of TCR clone 295173 (TRBV28, TRBJ1-1)
CASSSEQGYTEAFF

SEQ ID NO: 590347 - protein, 14 aa, Homo sapiens
  CDR3 for alpha chain variable domain of TCR clone 295174 (TRAV8-4, TRAJ9)
CAVLLNTGGFKTIF

SEQ ID NO: 590348 - protein, 11 aa, Homo sapiens
  CDR3 for beta chain variable domain of TCR clone 295174 (TRBV7-9, TRBJ2-6)
CASPRANVLTF

SEQ ID NO: 590349 - protein, 13 aa, Homo sapiens
  CDR3 for alpha chain variable domain of TCR clone 295175 (TRAV21, TRAJ49)
CAVRQSTCSQFYF

SEQ ID NO: 590350 - protein, 13 aa, Homo sapiens
  CDR3 for beta chain variable domain of TCR clone 295175 (TRBV6-6, TRBJ1-5)
CASRAYQDQPQHF

SEQ ID NO: 590351 - protein, 20 aa, Homo sapiens
  CDR3 for alpha chain variable domain of TCR clone 295176 (TRAV12-1, TRAJ42)
SSVIQPPTSVKGGSQGNLIF

SEQ ID NO: 590352 - protein, 18 aa, Homo sapiens
  CDR3 for beta chain variable domain of TCR clone 295176 (TRBV11-2, TRBJ2-3)
CASSLGGASRGARNTQYF

SEQ ID NO: 590353 - protein, 12 aa, Homo sapiens
  CDR3 for alpha chain variable domain of TCR clone 295177 (TRAV21, TRAJ37)
CAVRGNTVKLIF

SEQ ID NO: 590354 - protein, 15 aa, Homo sapiens
  CDR3 for beta chain variable domain of TCR clone 295177 (TRBV20-1, TRBJ2-1)
CSARGGTRYYNEQFF

SEQ ID NO: 590355 - protein, 14 aa, Homo sapiens
  CDR3 for alpha chain variable domain of TCR clone 295178 (TRAV12-2, TRAJ13)
CAVKKTGGYQKVTF

SEQ ID NO: 590356 - protein, 15 aa, Homo sapiens
  CDR3 for beta chain variable domain of TCR clone 295178 (TRBV4-1, TRBJ2-7)
CASSQQGQGFGEQYF

SEQ ID NO: 590357 - protein, 16 aa, Homo sapiens
  CDR3 for alpha chain variable domain of TCR clone 295179 (TRAV30, TRAJ24)
CGTEIVDADSWGKFQF

SEQ ID NO: 590358 - protein, 15 aa, Homo sapiens
  CDR3 for beta chain variable domain of TCR clone 295179 (TRBV3-1, TRBJ2-1)
CASSQVAGGPSEQFF

SEQ ID NO: 590359 - protein, 14 aa, Homo sapiens
  CDR3 for alpha chain variable domain of TCR clone 295180 (TRAV12-2, TRAJ13)
CAVKKTGGYQKVTF

SEQ ID NO: 590360 - protein, 16 aa, Homo sapiens
  CDR3 for beta chain variable domain of TCR clone 295180 (TRBV4-2, TRBJ2-7)
CASSQDGVERGYEQYF

SEQ ID NO: 590361 - protein, 13 aa, Homo sapiens
  CDR3 for alpha chain variable domain of TCR clone 295181 (TRAV8-1, TRAJ28)
CAVSGAGSYRLTF

SEQ ID NO: 590362 - protein, 14 aa, Homo sapiens
  CDR3 for beta chain variable domain of TCR clone 295181 (TRBV19, TRBJ2-5)
CASSMTGQQETQYF

SEQ ID NO: 590363 - protein, 15 aa, Homo sapiens
  CDR3 for alpha chain variable domain of TCR clone 295182 (TRAV38-2/DV8, TRAJ57)
CAYGRVFGKGTKLTV

SEQ ID NO: 590364 - protein, 15 aa, Homo sapiens
  CDR3 for beta chain variable domain of TCR clone 295182 (TRBV20-1, TRBJ2-7)
CSARDRVSGMDEQYF

SEQ ID NO: 590365 - protein, 12 aa, Homo sapiens
  CDR3 for alpha chain variable domain of TCR clone 295183 (TRAV29/DV5, TRAJ34)
CAARHNTDKLIF

SEQ ID NO: 590366 - protein, 15 aa, Homo sapiens
  CDR3 for beta chain variable domain of TCR clone 295183 (TRBV19, TRBJ2-7)
YASSPAGSGEALRYF

SEQ ID NO: 590367 - protein, 16 aa, Homo sapiens
  CDR3 for alpha chain variable domain of TCR clone 295184 (TRAV1-2, TRAJ10)
CAVRGVLTGGGNKLTF

SEQ ID NO: 590368 - protein, 14 aa, Homo sapiens
  CDR3 for beta chain variable domain of TCR clone 295184 (TRBV18, TRBJ1-2)
CASSPPGQAYGYTF

SEQ ID NO: 590369 - protein, 12 aa, Homo sapiens
  CDR3 for alpha chain variable domain of TCR clone 295185 (TRAV12-3, TRAJ17)
CAMALTGTKLTF

SEQ ID NO: 590370 - protein, 15 aa, Homo sapiens
  CDR3 for beta chain variable domain of TCR clone 295185 (TRBV20-1, TRBJ2-7)
CSARDRVSGMYEQYF

SEQ ID NO: 590371 - protein, 13 aa, Homo sapiens
  CDR3 for alpha chain variable domain of TCR clone 295186 (TRAV3, TRAJ20)
CCEAFCNDYKLTF

SEQ ID NO: 590372 - protein, 15 aa, Homo sapiens
  CDR3 for beta chain variable domain of TCR clone 295186 (TRBV19, TRBJ2-6)
CASVRRDSGANVLTF

SEQ ID NO: 590373 - protein, 14 aa, Homo sapiens
  CDR3 for alpha chain variable domain of TCR clone 295187 (TRAV8-3, TRAJ4)
CAVGAAGGYNKLIF

SEQ ID NO: 590374 - protein, 16 aa, Homo sapiens
  CDR3 for beta chain variable domain of TCR clone 295187 (TRBV29-1, TRBJ2-7)
CSVEVVGTSGSYEQYF

SEQ ID NO: 590375 - protein, 14 aa, Homo sapiens
  CDR3 for alpha chain variable domain of TCR clone 295188 (TRAV8-6, TRAJ53)
CAALVLGSNYKLSF

SEQ ID NO: 590376 - protein, 15 aa, Homo sapiens
  CDR3 for beta chain variable domain of TCR clone 295188 (TRBV20-1, TRBJ2-3)
CSAEPLAGHGDTQYF

SEQ ID NO: 590377 - protein, 12 aa, Homo sapiens
  CDR3 for alpha chain variable domain of TCR clone 295189 (TRAV4, TRAJ26)
CLVGDYGQNFVF

SEQ ID NO: 590378 - protein, 12 aa, Homo sapiens
  CDR3 for beta chain variable domain of TCR clone 295189 (TRBV11-2, TRBJ2-2)
CASSLPTGELFF

SEQ ID NO: 590379 - protein, 15 aa, Homo sapiens
  CDR3 for alpha chain variable domain of TCR clone 295190 (TRAV25, TRAJ43)
CAVFMRFGAGTRLTV

SEQ ID NO: 590380 - protein, 13 aa, Homo sapiens
  CDR3 for beta chain variable domain of TCR clone 295190 (TRBV7-9, TRBJ1-2)
RASSLKQNYGYTF

SEQ ID NO: 590381 - protein, 14 aa, Homo sapiens
  CDR3 for alpha chain variable domain of TCR clone 295191 (TRAV13-1, TRAJ44)
CAAKETGTASKLTF

SEQ ID NO: 590382 - protein, 15 aa, Homo sapiens
  CDR3 for beta chain variable domain of TCR clone 295191 (TRBV19, TRBJ2-1)
CASIKGRGPYNEQFF

SEQ ID NO: 590383 - protein, 11 aa, Homo sapiens
  CDR3 for alpha chain variable domain of TCR clone 295192 (TRAV1-2, TRAJ40)
CAVPGTYKYIF

SEQ ID NO: 590384 - protein, 15 aa, Homo sapiens
  CDR3 for beta chain variable domain of TCR clone 295192 (TRBV28, TRBJ1-3)
CASSLAVSSGNTIYF

SEQ ID NO: 590385 - protein, 13 aa, Homo sapiens
  CDR3 for alpha chain variable domain of TCR clone 295193 (TRAV21, TRAJ27)
CAARPGHAGKSTF

SEQ ID NO: 590386 - protein, 13 aa, Homo sapiens
  CDR3 for beta chain variable domain of TCR clone 295193 (TRBV7-3, TRBJ2-7)
CASSQAGGYEQYF

SEQ ID NO: 590387 - protein, 12 aa, Homo sapiens
  CDR3 for alpha chain variable domain of TCR clone 295194 (TRAV3, TRAJ43)
CAVRDPNNDMRF

SEQ ID NO: 590388 - protein, 14 aa, Homo sapiens
  CDR3 for beta chain variable domain of TCR clone 295194 (TRBV7-9, TRBJ1-4)
CAITEGEANEKLFF

SEQ ID NO: 590389 - protein, 13 aa, Homo sapiens
  CDR3 for alpha chain variable domain of TCR clone 295195 (TRAV17, TRAJ37)
CATVQGNTGKLIF

SEQ ID NO: 590390 - protein, 13 aa, Homo sapiens
  CDR3 for beta chain variable domain of TCR clone 295195 (TRBV4-1, TRBJ2-7)
CAGSQGQAYEQYF

SEQ ID NO: 590391 - protein, 12 aa, Homo sapiens
  CDR3 for alpha chain variable domain of TCR clone 295196 (TRAV27, TRAJ41)
CEGRNSGYALNF

SEQ ID NO: 590392 - protein, 15 aa, Homo sapiens
  CDR3 for beta chain variable domain of TCR clone 295196 (TRBV20-1, TRBJ1-5)
CSATSDRGLGQPQHF

SEQ ID NO: 590393 - protein, 13 aa, Homo sapiens
  CDR3 for alpha chain variable domain of TCR clone 295197 (TRAV17, TRAJ34)
CATDLYNTDKLIF

SEQ ID NO: 590394 - protein, 16 aa, Homo sapiens
  CDR3 for beta chain variable domain of TCR clone 295197 (TRBV12-5, TRBJ2-5)
CASGPRTSGNQETQYF

SEQ ID NO: 590395 - protein, 11 aa, Homo sapiens
  CDR3 for alpha chain variable domain of TCR clone 295198 (TRAV1-1, TRAJ37)
CAVSPQGKLIF

SEQ ID NO: 590396 - protein, 14 aa, Homo sapiens
  CDR3 for beta chain variable domain of TCR clone 295198 (TRBV7-2, TRBJ2-7)
CASRSQGAAYEQYF

SEQ ID NO: 590397 - protein, 13 aa, Homo sapiens
  CDR3 for alpha chain variable domain of TCR clone 295199 (TRAV12-1, TRAJ39)
CVALNNAGNMLTF

SEQ ID NO: 590398 - protein, 17 aa, Homo sapiens
  CDR3 for beta chain variable domain of TCR clone 295199 (TRBV6-1, TRBJ2-3)
CASSEFVTGGPTDTQYV

SEQ ID NO: 590399 - protein, 18 aa, Homo sapiens
  CDR3 for alpha chain variable domain of TCR clone 295200 (TRAV13-1, TRAJ52)
CAAKNPNAGGTSYEKLTF

SEQ ID NO: 590400 - protein, 14 aa, Homo sapiens
  CDR3 for beta chain variable domain of TCR clone 295200 (TRBV7-2, TRBJ1-2)
CASSQTGSTYGYTF

SEQ ID NO: 590401 - protein, 13 aa, Homo sapiens
  CDR3 for alpha chain variable domain of TCR clone 295201 (TRAV21, TRAJ57)
CAVTQGGSEKLVF

SEQ ID NO: 590402 - protein, 19 aa, Homo sapiens
  CDR3 for beta chain variable domain of TCR clone 295201 (TRBV11-3, TRBJ2-1)
CASSLGTRKARSSYNEQFF

SEQ ID NO: 590403 - protein, 15 aa, Homo sapiens
  CDR3 for alpha chain variable domain of TCR clone 295202 (TRAV36/DV7, TRAJ54)
CAVEKPVQGAQKLVF

SEQ ID NO: 590404 - protein, 11 aa, Homo sapiens
  CDR3 for beta chain variable domain of TCR clone 295202 (TRBV12-4, TRBJ2-3)
CASTATDTQYF

SEQ ID NO: 590405 - protein, 14 aa, Homo sapiens
  CDR3 for alpha chain variable domain of TCR clone 295203 (TRAV13-1, TRAJ3)
CAASKSSSASKIIF

SEQ ID NO: 590406 - protein, 13 aa, Homo sapiens
  CDR3 for beta chain variable domain of TCR clone 295203 (TRBV25-1, TRBJ2-5)
CTSSESGRETQYF

SEQ ID NO: 590407 - protein, 14 aa, Homo sapiens
  CDR3 for alpha chain variable domain of TCR clone 295204 (TRAV1-2, TRAJ8)
CAVREDTGFQKLVF

SEQ ID NO: 590408 - protein, 15 aa, Homo sapiens
  CDR3 for beta chain variable domain of TCR clone 295204 (TRBV28, TRBJ2-7)
CASSLISGGSYEQYF

SEQ ID NO: 590409 - protein, 12 aa, Homo sapiens
  CDR3 for alpha chain variable domain of TCR clone 295205 (TRAV4, TRAJ26)
CLVGDYCQNFVF

SEQ ID NO: 590410 - protein, 16 aa, Homo sapiens
  CDR3 for beta chain variable domain of TCR clone 295205 (TRBV7-2, TRBJ1-2)
CASSSNQDRRGHGYSF

SEQ ID NO: 590411 - protein, 16 aa, Homo sapiens
  CDR3 for alpha chain variable domain of TCR clone 295206 (TRAV30, TRAJ24)
CGTEIVDADSWGKFQF

SEQ ID NO: 590412 - protein, 15 aa, Homo sapiens
  CDR3 for beta chain variable domain of TCR clone 295206 (TRBV7-9, TRBJ1-4)
CASSRTGGFNEKLFS

SEQ ID NO: 590413 - protein, 14 aa, Homo sapiens
  CDR3 for alpha chain variable domain of TCR clone 295207 (TRAV9-2, TRAJ39)
CALYIYNAGNMLTF

SEQ ID NO: 590414 - protein, 15 aa, Homo sapiens
  CDR3 for beta chain variable domain of TCR clone 295207 (TRBV6-1, TRBJ2-1)
CASSEAAYSYNEQFF

SEQ ID NO: 590415 - protein, 13 aa, Homo sapiens
  CDR3 for alpha chain variable domain of TCR clone 295208 (TRAV3, TRAJ21)
CAVREPDFNKFYF

SEQ ID NO: 590416 - protein, 13 aa, Homo sapiens
  CDR3 for beta chain variable domain of TCR clone 295208 (TRBV6-4, TRBJ1-5)
CASSADLNQPQHF

SEQ ID NO: 590417 - protein, 15 aa, Homo sapiens
  CDR3 for alpha chain variable domain of TCR clone 295209 (TRAV21, TRAJ24)
CAARSSTDSWGKLQI

SEQ ID NO: 590418 - protein, 15 aa, Homo sapiens
  CDR3 for beta chain variable domain of TCR clone 295209 (TRBV4-1, TRBJ2-7)
CASSQNTGRLYEQYF

SEQ ID NO: 590419 - protein, 17 aa, Homo sapiens
  CDR3 for alpha chain variable domain of TCR clone 295210 (TRAV4, TRAJ18)
CLVGERSVGSTLGRLYF

SEQ ID NO: 590420 - protein, 12 aa, Homo sapiens
  CDR3 for beta chain variable domain of TCR clone 295210 (TRBV7-6, TRBJ2-3)
CASSTGTDTQYF

SEQ ID NO: 590421 - protein, 13 aa, Homo sapiens
  CDR3 for alpha chain variable domain of TCR clone 295211 (TRAV20, TRAJ45)
CAVKKRRCLRTHL

SEQ ID NO: 590422 - protein, 14 aa, Homo sapiens
  CDR3 for beta chain variable domain of TCR clone 295211 (TRBV15, TRBJ2-5)
CATSIGGLGETQYF

SEQ ID NO: 590423 - protein, 13 aa, Homo sapiens
  CDR3 for alpha chain variable domain of TCR clone 295212 (TRAV17, TRAJ22)
CAHHSGSARQLTF

SEQ ID NO: 590424 - protein, 14 aa, Homo sapiens
  CDR3 for beta chain variable domain of TCR clone 295212 (TRBV2, TRBJ2-7)
CASSLTSGGYEQYF

SEQ ID NO: 590425 - protein, 11 aa, Homo sapiens
  CDR3 for alpha chain variable domain of TCR clone 295213 (TRAV3, TRAJ21)
CAVGNFNKFYF

SEQ ID NO: 590426 - protein, 18 aa, Homo sapiens
  CDR3 for beta chain variable domain of TCR clone 295213 (TRBV4-1, TRBJ1-5)
CARSQDPRGQGLNQPQHF

SEQ ID NO: 590427 - protein, 13 aa, Homo sapiens
  CDR3 for alpha chain variable domain of TCR clone 295214 (TRAV8-6, TRAJ44)
CAVQTGTASKLTF

SEQ ID NO: 590428 - protein, 15 aa, Homo sapiens
  CDR3 for beta chain variable domain of TCR clone 295214 (TRBV7-9, TRBJ1-6)
CASSSPGRGNSPLHF

SEQ ID NO: 590429 - protein, 16 aa, Homo sapiens
  CDR3 for alpha chain variable domain of TCR clone 295215 (TRAV8-3, TRAJ13)
CAVGAYPSGGYQKVTF

SEQ ID NO: 590430 - protein, 15 aa, Homo sapiens
  CDR3 for beta chain variable domain of TCR clone 295215 (TRBV19, TRBJ1-5)
CASSIVWADNQPLHF

SEQ ID NO: 590431 - protein, 17 aa, Homo sapiens
  CDR3 for alpha chain variable domain of TCR clone 295216 (TRAV8-6, TRAJ58)
CAVSSWVGETRGSRLTL

SEQ ID NO: 590432 - protein, 14 aa, Homo sapiens
  CDR3 for beta chain variable domain of TCR clone 295216 (TRBV7-9, TRBJ2-1)
CASSSMLGFGEQFF

SEQ ID NO: 590433 - protein, 10 aa, Homo sapiens
  CDR3 for alpha chain variable domain of TCR clone 295217 (TRAV8-4, TRAJ43)
CAVSADDMRF

SEQ ID NO: 590434 - protein, 15 aa, Homo sapiens
  CDR3 for beta chain variable domain of TCR clone 295217 (TRBV5-1, TRBJ2-3)
CASSGTSGSTDTQYF

SEQ ID NO: 590435 - protein, 14 aa, Homo sapiens
  CDR3 for alpha chain variable domain of TCR clone 295218 (TRAV8-1, TRAJ5)
CAVRTDTGRRALTF

SEQ ID NO: 590436 - protein, 13 aa, Homo sapiens
  CDR3 for beta chain variable domain of TCR clone 295218 (TRBV11-3, TRBJ2-7)
CASSLAKLYEQYF

SEQ ID NO: 590437 - protein, 19 aa, Homo sapiens
  CDR3 for alpha chain variable domain of TCR clone 295219 (TRAV17, TRAJ40)
TASRAADTASYFCASKYIF

SEQ ID NO: 590438 - protein, 17 aa, Homo sapiens
  CDR3 for beta chain variable domain of TCR clone 295219 (TRBV11-2, TRBJ2-4)
CASSFLALGGAGDIQYL

SEQ ID NO: 590439 - protein, 18 aa, Homo sapiens
  CDR3 for alpha chain variable domain of TCR clone 295220 (TRAV29/DV5, TRAJ52)
CAAGFRGAGGTSYGKLTF

SEQ ID NO: 590440 - protein, 15 aa, Homo sapiens
  CDR3 for beta chain variable domain of TCR clone 295220 (TRBV7-3, TRBJ2-2)
CQSLKRGTLSGELFF

SEQ ID NO: 590441 - protein, 17 aa, Homo sapiens
  CDR3 for alpha chain variable domain of TCR clone 295221 (TRAV2, TRAJ22)
ILQVREADAAEQRQLTF

SEQ ID NO: 590442 - protein, 16 aa, Homo sapiens
  CDR3 for beta chain variable domain of TCR clone 295221 (TRBV2, TRBJ2-2)
CASSLKRGTLSGELFF

SEQ ID NO: 590443 - protein, 14 aa, Homo sapiens
  CDR3 for alpha chain variable domain of TCR clone 295222 (TRAV22, TRAJ57)
CAVVLQGGSEKLVF

SEQ ID NO: 590444 - protein, 15 aa, Homo sapiens
  CDR3 for beta chain variable domain of TCR clone 295222 (TRBV7-2, TRBJ2-3)
CASSSTVLETDTQYF

SEQ ID NO: 590445 - protein, 15 aa, Homo sapiens
  CDR3 for alpha chain variable domain of TCR clone 295223 (TRAV3, TRAJ5)
CAVRDLDTGRRALTF

SEQ ID NO: 590446 - protein, 14 aa, Homo sapiens
  CDR3 for beta chain variable domain of TCR clone 295223 (TRBV19, TRBJ1-5)
CASSLSGGSQPQHF

SEQ ID NO: 590447 - protein, 15 aa, Homo sapiens
  CDR3 for alpha chain variable domain of TCR clone 295224 (TRAV12-3, TRAJ47)
CAMTKVLEDGNKLAF

SEQ ID NO: 590448 - protein, 15 aa, Homo sapiens
  CDR3 for beta chain variable domain of TCR clone 295224 (TRBV5-4, TRBJ2-3)
CASTGGGRAIDTQYF

SEQ ID NO: 590449 - protein, 14 aa, Homo sapiens
  CDR3 for alpha chain variable domain of TCR clone 295225 (TRAV12-3, TRAJ10)
SHLPLTGGGNKLTF

SEQ ID NO: 590450 - protein, 15 aa, Homo sapiens
  CDR3 for beta chain variable domain of TCR clone 295225 (TRBV7-8, TRBJ2-7)
CASSLGTGNPYEQYF

SEQ ID NO: 590451 - protein, 15 aa, Homo sapiens
  CDR3 for alpha chain variable domain of TCR clone 295226 (TRAV3, TRAJ5)
CAVRDLDTGRRALTF

SEQ ID NO: 590452 - protein, 16 aa, Homo sapiens
  CDR3 for beta chain variable domain of TCR clone 295226 (TRBV11-2, TRBJ2-7)
CASSTVTAPKTCEQFL

SEQ ID NO: 590453 - protein, 13 aa, Homo sapiens
  CDR3 for alpha chain variable domain of TCR clone 295227 (TRAV30, TRAJ6)
CGFIEGGSYIPTF

SEQ ID NO: 590454 - protein, 14 aa, Homo sapiens
  CDR3 for beta chain variable domain of TCR clone 295227 (TRBV20-1, TRBJ2-1)
CSAQIGGSANEQFF

SEQ ID NO: 590455 - protein, 15 aa, Homo sapiens
  CDR3 for alpha chain variable domain of TCR clone 295228 (TRAV26-1, TRAJ29)
CIVRVEGSGNTPLVF

SEQ ID NO: 590456 - protein, 12 aa, Homo sapiens
  CDR3 for beta chain variable domain of TCR clone 295228 (TRBV7-9, TRBJ1-5)
CASSPQGQPQHF

SEQ ID NO: 590457 - protein, 12 aa, Homo sapiens
  CDR3 for alpha chain variable domain of TCR clone 295229 (TRAV3, TRAJ39)
CAVIEWGNMPTF

SEQ ID NO: 590458 - protein, 14 aa, Homo sapiens
  CDR3 for beta chain variable domain of TCR clone 295229 (TRBV7-8, TRBJ2-3)
CASSFPDGQDTHYF

SEQ ID NO: 590459 - protein, 14 aa, Homo sapiens
  CDR3 for alpha chain variable domain of TCR clone 295230 (TRAV12-2, TRAJ6)
CASKWGGGSYIPTF

SEQ ID NO: 590460 - protein, 15 aa, Homo sapiens
  CDR3 for beta chain variable domain of TCR clone 295230 (TRBV19, TRBJ2-1)
CASSRPGQNYNEQFF

SEQ ID NO: 590461 - protein, 16 aa, Homo sapiens
  CDR3 for alpha chain variable domain of TCR clone 295231 (TRAV12-3, TRAJ53)
CAMSPGSGGSNYKLTF

SEQ ID NO: 590462 - protein, 15 aa, Homo sapiens
  CDR3 for beta chain variable domain of TCR clone 295231 (TRBV4-2, TRBJ1-1)
CQQPSRVWMNTEAFF

SEQ ID NO: 590463 - protein, 13 aa, Homo sapiens
  CDR3 for alpha chain variable domain of TCR clone 295232 (TRAV21, TRAJ36)
FAVIKTGANNLFF

SEQ ID NO: 590464 - protein, 13 aa, Homo sapiens
  CDR3 for beta chain variable domain of TCR clone 295232 (TRBV29-1, TRBJ2-3)
CSATRGGRDTQYF

SEQ ID NO: 590465 - protein, 14 aa, Homo sapiens
  CDR3 for alpha chain variable domain of TCR clone 295233 (TRAV1-2, TRAJ16)
CAVNRFSDGQKLLF

SEQ ID NO: 590466 - protein, 14 aa, Homo sapiens
  CDR3 for beta chain variable domain of TCR clone 295233 (TRBV5-5, TRBJ1-2)
CASSLDPYNYGYSF

SEQ ID NO: 590467 - protein, 14 aa, Homo sapiens
  CDR3 for alpha chain variable domain of TCR clone 295234 (TRAV12-2, TRAJ40)
CAVKIPPGTYKYIF

SEQ ID NO: 590468 - protein, 15 aa, Homo sapiens
  CDR3 for beta chain variable domain of TCR clone 295234 (TRBV11-3, TRBJ2-3)
CASLKDGREGDTQYF

SEQ ID NO: 590469 - protein, 12 aa, Homo sapiens
  CDR3 for alpha chain variable domain of TCR clone 295235 (TRAV36/DV7, TRAJ37)
CACYGNTGKLIF

SEQ ID NO: 590470 - protein, 14 aa, Homo sapiens
  CDR3 for beta chain variable domain of TCR clone 295235 (TRBV6-3, TRBJ1-4)
CASSGQNLNEKLFF

SEQ ID NO: 590471 - protein, 14 aa, Homo sapiens
  CDR3 for alpha chain variable domain of TCR clone 295236 (TRAV1-2, TRAJ8)
CAVREDTGFQKLVF

SEQ ID NO: 590472 - protein, 12 aa, Homo sapiens
  CDR3 for beta chain variable domain of TCR clone 295236 (TRBV11-2, TRBJ2-1)
CAISPGNNEQFF

SEQ ID NO: 590473 - protein, 11 aa, Homo sapiens
  CDR3 for alpha chain variable domain of TCR clone 295237 (TRAV12-3, TRAJ27)
CAMANAGKSTF

SEQ ID NO: 590474 - protein, 15 aa, Homo sapiens
  CDR3 for beta chain variable domain of TCR clone 295237 (TRBV7-9, TRBJ1-5)
CASSQGHQPNQTQHF

SEQ ID NO: 590475 - protein, 14 aa, Homo sapiens
  CDR3 for alpha chain variable domain of TCR clone 295238 (TRAV4, TRAJ10)
CLVGDTGGGNKLIF

SEQ ID NO: 590476 - protein, 13 aa, Homo sapiens
  CDR3 for beta chain variable domain of TCR clone 295238 (TRBV10-2, TRBJ2-5)
CASSVGAQETQYF

SEQ ID NO: 590477 - protein, 11 aa, Homo sapiens
  CDR3 for alpha chain variable domain of TCR clone 295239 (TRAV26-1, TRAJ37)
CIVRVGRKLIF

SEQ ID NO: 590478 - protein, 12 aa, Homo sapiens
  CDR3 for beta chain variable domain of TCR clone 295239 (TRBV19, TRBJ2-1)
CASSMQDTEQFF

SEQ ID NO: 590479 - protein, 15 aa, Homo sapiens
  CDR3 for alpha chain variable domain of TCR clone 295240 (TRAV8-3, TRAJ23)
CAVGDRYNQGGKLIF

SEQ ID NO: 590480 - protein, 13 aa, Homo sapiens
  CDR3 for beta chain variable domain of TCR clone 295240 (TRBV7-9, TRBJ2-1)
CASSWESYNEQFF

SEQ ID NO: 590481 - protein, 16 aa, Homo sapiens
  CDR3 for alpha chain variable domain of TCR clone 295241 (TRAV16, TRAJ21)
CACGWATTSTNFTLDL

SEQ ID NO: 590482 - protein, 15 aa, Homo sapiens
  CDR3 for beta chain variable domain of TCR clone 295241 (TRBV19, TRBJ2-1)
CASNIQATSYNEQFF

SEQ ID NO: 590483 - protein, 11 aa, Homo sapiens
  CDR3 for alpha chain variable domain of TCR clone 295242 (TRAV17, TRAJ54)
CATDANQEPRS

SEQ ID NO: 590484 - protein, 12 aa, Homo sapiens
  CDR3 for beta chain variable domain of TCR clone 295242 (TRBV6-3, TRBJ2-1)
CASSGSYNEQFF

SEQ ID NO: 590485 - protein, 13 aa, Homo sapiens
  CDR3 for alpha chain variable domain of TCR clone 295243 (TRAV1-1, TRAJ9)
FAAKNTGGFKTIF

SEQ ID NO: 590486 - protein, 13 aa, Homo sapiens
  CDR3 for beta chain variable domain of TCR clone 295243 (TRBV7-9, TRBJ1-2)
CASSLKQNYGYTF

SEQ ID NO: 590487 - protein, 12 aa, Homo sapiens
  CDR3 for alpha chain variable domain of TCR clone 295244 (TRAV36/DV7, TRAJ40)
CAVGTGTYKYIF

SEQ ID NO: 590488 - protein, 15 aa, Homo sapiens
  CDR3 for beta chain variable domain of TCR clone 295244 (TRBV4-3, TRBJ1-5)
CASSPRWNSNQPQHF

SEQ ID NO: 590489 - protein, 14 aa, Homo sapiens
  CDR3 for alpha chain variable domain of TCR clone 295245 (TRAV8-6, TRAJ5)
CAVSVDTGRRALLL

SEQ ID NO: 590490 - protein, 11 aa, Homo sapiens
  CDR3 for beta chain variable domain of TCR clone 295245 (TRBV7-3, TRBJ2-5)
CASSLSETQYF

SEQ ID NO: 590491 - protein, 14 aa, Homo sapiens
  CDR3 for alpha chain variable domain of TCR clone 295246 (TRAV12-2, TRAJ13)
CAVRKTGGYKKVTF

SEQ ID NO: 590492 - protein, 15 aa, Homo sapiens
  CDR3 for beta chain variable domain of TCR clone 295246 (TRBV27, TRBJ2-1)
CASSNGGGSSNEQFF

SEQ ID NO: 590493 - protein, 12 aa, Homo sapiens
  CDR3 for alpha chain variable domain of TCR clone 295247 (TRAV12-3, TRAJ17)
CAMTLTGNKLTF

SEQ ID NO: 590494 - protein, 14 aa, Homo sapiens
  CDR3 for beta chain variable domain of TCR clone 295247 (TRBV19, TRBJ2-2)
CASSTGQGAGELFF

SEQ ID NO: 590495 - protein, 17 aa, Homo sapiens
  CDR3 for alpha chain variable domain of TCR clone 295248 (TRAV3, TRAJ6)
CAVRDGPRAGGSYIPTF

SEQ ID NO: 590496 - protein, 16 aa, Homo sapiens
  CDR3 for beta chain variable domain of TCR clone 295248 (TRBV20-1, TRBJ2-5)
CSPGGTSGGYMETQYF

SEQ ID NO: 590497 - protein, 11 aa, Homo sapiens
  CDR3 for alpha chain variable domain of TCR clone 295249 (TRAV17, TRAJ9)
CATTGGFKTIF

SEQ ID NO: 590498 - protein, 14 aa, Homo sapiens
  CDR3 for beta chain variable domain of TCR clone 295249 (TRBV7-9, TRBJ2-2)
CASSGLAHTGELFF

SEQ ID NO: 590499 - protein, 15 aa, Homo sapiens
  CDR3 for alpha chain variable domain of TCR clone 295250 (TRAV21, TRAJ40)
CAVRTQTSGTYKSIF

SEQ ID NO: 590500 - protein, 13 aa, Homo sapiens
  CDR3 for beta chain variable domain of TCR clone 295250 (TRBV7-2, TRBJ2-2)
CASSSVRAGELFF

SEQ ID NO: 590501 - protein, 11 aa, Homo sapiens
  CDR3 for alpha chain variable domain of TCR clone 295251 (TRAV13-1, TRAJ30)
CAASRDDKIIF

SEQ ID NO: 590502 - protein, 15 aa, Homo sapiens
  CDR3 for beta chain variable domain of TCR clone 295251 (TRBV18, TRBJ1-1)
CASSPSSWVNTEDFF

SEQ ID NO: 590503 - protein, 15 aa, Homo sapiens
  CDR3 for alpha chain variable domain of TCR clone 295252 (TRAV13-2, TRAJ29)
GDSAARDGGNTPLVF

SEQ ID NO: 590504 - protein, 15 aa, Homo sapiens
  CDR3 for beta chain variable domain of TCR clone 295252 (TRBV18, TRBJ2-3)
CASSPLAGETDTQYF

SEQ ID NO: 590505 - protein, 15 aa, Homo sapiens
  CDR3 for alpha chain variable domain of TCR clone 295253 (TRAV27, TRAJ38)
CAARRNAGNNRKPIR

SEQ ID NO: 590506 - protein, 13 aa, Homo sapiens
  CDR3 for beta chain variable domain of TCR clone 295253 (TRBV12-5, TRBJ2-3)
CASGDRQSDTQYF

SEQ ID NO: 590507 - protein, 14 aa, Homo sapiens
  CDR3 for alpha chain variable domain of TCR clone 295254 (TRAV13-1, TRAJ35)
CAASKGRFGNVLHC

SEQ ID NO: 590508 - protein, 14 aa, Homo sapiens
  CDR3 for beta chain variable domain of TCR clone 295254 (TRBV25-1, TRBJ1-1)
CASTHLGGNTEAFF

SEQ ID NO: 590509 - protein, 12 aa, Homo sapiens
  CDR3 for alpha chain variable domain of TCR clone 295255 (TRAV3, TRAJ20)
CAVRDHDYKLSF

SEQ ID NO: 590510 - protein, 12 aa, Homo sapiens
  CDR3 for beta chain variable domain of TCR clone 295255 (TRBV7-9, TRBJ2-7)
CASSIKREEQYF

SEQ ID NO: 590511 - protein, 17 aa, Homo sapiens
  CDR3 for alpha chain variable domain of TCR clone 295256 (TRAV3, TRAJ6)
CAVRDGPRAGGRYIPKF

SEQ ID NO: 590512 - protein, 14 aa, Homo sapiens
  CDR3 for beta chain variable domain of TCR clone 295256 (TRBV7-2, TRBJ2-7)
CASSPKTSFYEQYF

SEQ ID NO: 590513 - protein, 13 aa, Homo sapiens
  CDR3 for alpha chain variable domain of TCR clone 295257 (TRAV8-3, TRAJ36)
CAVGATGANNPFF

SEQ ID NO: 590514 - protein, 15 aa, Homo sapiens
  CDR3 for beta chain variable domain of TCR clone 295257 (TRBV5-1, TRBJ2-3)
CASSVTSGSTDTQYF

SEQ ID NO: 590515 - protein, 16 aa, Homo sapiens
  CDR3 for alpha chain variable domain of TCR clone 295258 (TRAV29/DV5, TRAJ36)
CAASAHYQSGANNIFF

SEQ ID NO: 590516 - protein, 12 aa, Homo sapiens
  CDR3 for beta chain variable domain of TCR clone 295258 (TRBV2, TRBJ1-2)
CASSGQTYGYTF

SEQ ID NO: 590517 - protein, 13 aa, Homo sapiens
  CDR3 for alpha chain variable domain of TCR clone 295259 (TRAV20, TRAJ48)
CAMQGVGNEKLTF

SEQ ID NO: 590518 - protein, 19 aa, Homo sapiens
  CDR3 for beta chain variable domain of TCR clone 295259 (TRBV2, TRBJ2-2)
WASSQPGLAGGGNTGELFF

SEQ ID NO: 590519 - protein, 17 aa, Homo sapiens
  CDR3 for alpha chain variable domain of TCR clone 295260 (TRAV8-1, TRAJ43)
SAVTNDMRFGAGTRLTV

SEQ ID NO: 590520 - protein, 17 aa, Homo sapiens
  CDR3 for beta chain variable domain of TCR clone 295260 (TRBV5-4, TRBJ2-1)
CASSSAGGRGPYNEQFF

SEQ ID NO: 590521 - protein, 13 aa, Homo sapiens
  CDR3 for alpha chain variable domain of TCR clone 295261 (TRAV13-1, TRAJ13)
CAASKGGYQKVTF

SEQ ID NO: 590522 - protein, 16 aa, Homo sapiens
  CDR3 for beta chain variable domain of TCR clone 295261 (TRBV18, TRBJ1-2)
CASSPPERVSIYGYTF

SEQ ID NO: 590523 - protein, 13 aa, Homo sapiens
  CDR3 for alpha chain variable domain of TCR clone 295262 (TRAV4, TRAJ20)
CLVGSSNDYKLSF

SEQ ID NO: 590524 - protein, 14 aa, Homo sapiens
  CDR3 for beta chain variable domain of TCR clone 295262 (TRBV25-1, TRBJ1-1)
CASTHLGGNTEAFF

SEQ ID NO: 590525 - protein, 15 aa, Homo sapiens
  CDR3 for alpha chain variable domain of TCR clone 295263 (TRAV3, TRAJ10)
CAVRDGTGGGNNPTF

SEQ ID NO: 590526 - protein, 15 aa, Homo sapiens
  CDR3 for beta chain variable domain of TCR clone 295263 (TRBV4-2, TRBJ1-4)
CASSLVQREVEKLFF

SEQ ID NO: 590527 - protein, 14 aa, Homo sapiens
  CDR3 for alpha chain variable domain of TCR clone 295264 (TRAV12-1, TRAJ40)
CVVNRVSGTYKYIF

SEQ ID NO: 590528 - protein, 13 aa, Homo sapiens
  CDR3 for beta chain variable domain of TCR clone 295264 (TRBV7-3, TRBJ1-1)
CASSQDWGAEAFF

SEQ ID NO: 590529 - protein, 18 aa, Homo sapiens
  CDR3 for alpha chain variable domain of TCR clone 295265 (TRAV13-1, TRAJ52)
CAAKNPNAGGTSYGKLTF

SEQ ID NO: 590530 - protein, 15 aa, Homo sapiens
  CDR3 for beta chain variable domain of TCR clone 295265 (TRBV5-1, TRBJ2-3)
CASSPGGARTDTQYF

SEQ ID NO: 590531 - protein, 13 aa, Homo sapiens
  CDR3 for alpha chain variable domain of TCR clone 295266 (TRAV13-1, TRAJ20)
CAARVSNDYKLSF

SEQ ID NO: 590532 - protein, 12 aa, Homo sapiens
  CDR3 for beta chain variable domain of TCR clone 295266 (TRBV20-1, TRBJ2-1)
YSARLGTDEQFF

SEQ ID NO: 590533 - protein, 13 aa, Homo sapiens
  CDR3 for alpha chain variable domain of TCR clone 295267 (TRAV2, TRAJ40)
CAVVTSVTYKYIF

SEQ ID NO: 590534 - protein, 17 aa, Homo sapiens
  CDR3 for beta chain variable domain of TCR clone 295267 (TRBV6-1, TRBJ1-1)
CASSPGTGGRIGTEAFF

SEQ ID NO: 590535 - protein, 15 aa, Homo sapiens
  CDR3 for alpha chain variable domain of TCR clone 295268 (TRAV16, TRAJ48)
CALFISNFGNEKLTF

SEQ ID NO: 590536 - protein, 13 aa, Homo sapiens
  CDR3 for beta chain variable domain of TCR clone 295268 (TRBV19, TRBJ1-3)
CASRVSLGNTIYF

SEQ ID NO: 590537 - protein, 11 aa, Homo sapiens
  CDR3 for alpha chain variable domain of TCR clone 295269 (TRAV27, TRAJ47)
CRSNQGNKLVF

SEQ ID NO: 590538 - protein, 16 aa, Homo sapiens
  CDR3 for beta chain variable domain of TCR clone 295269 (TRBV7-9, TRBJ2-1)
RASSDVAGGSYNEQFF

SEQ ID NO: 590539 - protein, 12 aa, Homo sapiens
  CDR3 for alpha chain variable domain of TCR clone 295270 (TRAV1-2, TRAJ17)
CAVRAAGDKLTF

SEQ ID NO: 590540 - protein, 16 aa, Homo sapiens
  CDR3 for beta chain variable domain of TCR clone 295270 (TRBV20-1, TRBJ2-1)
CSAPGLAGSYSDEQFF

SEQ ID NO: 590541 - protein, 15 aa, Homo sapiens
  CDR3 for alpha chain variable domain of TCR clone 295271 (TRAV12-1, TRAJ9)
CVVSFGDTGGFNTIF

SEQ ID NO: 590542 - protein, 19 aa, Homo sapiens
  CDR3 for beta chain variable domain of TCR clone 295271 (TRBV25-1, TRBJ2-2)
CAILVYRVDRGRKTGELFF

SEQ ID NO: 590543 - protein, 15 aa, Homo sapiens
  CDR3 for alpha chain variable domain of TCR clone 295272 (TRAV27, TRAJ38)
CAARRNAGKNRKRIW

SEQ ID NO: 590544 - protein, 15 aa, Homo sapiens
  CDR3 for beta chain variable domain of TCR clone 295272 (TRBV12-4, TRBJ2-5)
CASSPPTGLQETQYF

SEQ ID NO: 590545 - protein, 10 aa, Homo sapiens
  CDR3 for alpha chain variable domain of TCR clone 295273 (TRAV13-2, TRAJ49)
CADTGNQFSF

SEQ ID NO: 590546 - protein, 15 aa, Homo sapiens
  CDR3 for beta chain variable domain of TCR clone 295273 (TRBV9, TRBJ1-6)
CASSVAGTGDSTLHF

SEQ ID NO: 590547 - protein, 14 aa, Homo sapiens
  CDR3 for alpha chain variable domain of TCR clone 295274 (TRAV8-1, TRAJ5)
CAVRTDTGRRALTF

SEQ ID NO: 590548 - protein, 14 aa, Homo sapiens
  CDR3 for beta chain variable domain of TCR clone 295274 (TRBV15, TRBJ2-5)
CATSIGGLGETQYF

SEQ ID NO: 590549 - protein, 15 aa, Homo sapiens
  CDR3 for alpha chain variable domain of TCR clone 295275 (TRAV35, TRAJ40)
CAGRLGTSGTYKYIF

SEQ ID NO: 590550 - protein, 12 aa, Homo sapiens
  CDR3 for beta chain variable domain of TCR clone 295275 (TRBV7-8, TRBJ2-7)
CASILGDREQYF

SEQ ID NO: 590551 - protein, 14 aa, Homo sapiens
  CDR3 for alpha chain variable domain of TCR clone 295276 (TRAV21, TRAJ3)
CAVTGYRSASKIIF

SEQ ID NO: 590552 - protein, 15 aa, Homo sapiens
  CDR3 for beta chain variable domain of TCR clone 295276 (TRBV7-3, TRBJ2-3)
CASSLTSGETDTQYF

SEQ ID NO: 590553 - protein, 13 aa, Homo sapiens
  CDR3 for alpha chain variable domain of TCR clone 295277 (TRAV8-6, TRAJ50)
CAVIKTSYDKVIF

SEQ ID NO: 590554 - protein, 16 aa, Homo sapiens
  CDR3 for beta chain variable domain of TCR clone 295277 (TRBV27, TRBJ1-1)
CASSSRGRTGYTEAFF

SEQ ID NO: 590555 - protein, 12 aa, Homo sapiens
  CDR3 for alpha chain variable domain of TCR clone 295278 (TRAV12-3, TRAJ17)
RAMTLTGNKLTF

SEQ ID NO: 590556 - protein, 15 aa, Homo sapiens
  CDR3 for beta chain variable domain of TCR clone 295278 (TRBV20-1, TRBJ2-7)
CSARDRVSGMDAQYF

SEQ ID NO: 590557 - protein, 14 aa, Homo sapiens
  CDR3 for alpha chain variable domain of TCR clone 295279 (TRAV16, TRAJ37)
CALDISGNTGKLIF

SEQ ID NO: 590558 - protein, 16 aa, Homo sapiens
  CDR3 for beta chain variable domain of TCR clone 295279 (TRBV7-6, TRBJ1-6)
CASSSLPAGEYSPLHF

SEQ ID NO: 590559 - protein, 11 aa, Homo sapiens
  CDR3 for alpha chain variable domain of TCR clone 295280 (TRAV2, TRAJ13)
CASGGYQKVTF

SEQ ID NO: 590560 - protein, 16 aa, Homo sapiens
  CDR3 for beta chain variable domain of TCR clone 295280 (TRBV2, TRBJ2-1)
CASSDGGSLSYNEQFF

SEQ ID NO: 590561 - protein, 12 aa, Homo sapiens
  CDR3 for alpha chain variable domain of TCR clone 295281 (TRAV2, TRAJ10)
YASTGGGNKLTF

SEQ ID NO: 590562 - protein, 14 aa, Homo sapiens
  CDR3 for beta chain variable domain of TCR clone 295281 (TRBV7-2, TRBJ2-2)
CASRGQGAAGELFF

SEQ ID NO: 590563 - protein, 15 aa, Homo sapiens
  CDR3 for alpha chain variable domain of TCR clone 295282 (TRAV12-1, TRAJ9)
WVVSFGDTGGFKTIF

SEQ ID NO: 590564 - protein, 15 aa, Homo sapiens
  CDR3 for beta chain variable domain of TCR clone 295282 (TRBV20-1, TRBJ2-7)
CSARDRVSGMDEQYF

SEQ ID NO: 590565 - protein, 15 aa, Homo sapiens
  CDR3 for alpha chain variable domain of TCR clone 295283 (TRAV2, TRAJ22)
CAVPSRGGSARQLTY

SEQ ID NO: 590566 - protein, 11 aa, Homo sapiens
  CDR3 for beta chain variable domain of TCR clone 295283 (TRBV27, TRBJ2-3)
CASSLGDTQYF

SEQ ID NO: 590567 - protein, 12 aa, Homo sapiens
  CDR3 for alpha chain variable domain of TCR clone 295284 (TRAV26-2, TRAJ21)
CILKGNFNKFYF

SEQ ID NO: 590568 - protein, 13 aa, Homo sapiens
  CDR3 for beta chain variable domain of TCR clone 295284 (TRBV7-9, TRBJ1-1)
CRHPLQSYTEAFF

SEQ ID NO: 590569 - protein, 10 aa, Homo sapiens
  CDR3 for alpha chain variable domain of TCR clone 295285 (TRAV26-1, TRAJ22)
CIVSLNFFWF

SEQ ID NO: 590570 - protein, 14 aa, Homo sapiens
  CDR3 for beta chain variable domain of TCR clone 295285 (TRBV5-4, TRBJ1-1)
CASSLDSRRDEAFF

SEQ ID NO: 590571 - protein, 14 aa, Homo sapiens
  CDR3 for alpha chain variable domain of TCR clone 295286 (TRAV1-2, TRAJ8)
CAVREDTGFQKLVF

SEQ ID NO: 590572 - protein, 15 aa, Homo sapiens
  CDR3 for beta chain variable domain of TCR clone 295286 (TRBV7-9, TRBJ1-6)
CASSSPGRGNSHLHF

SEQ ID NO: 590573 - protein, 15 aa, Homo sapiens
  CDR3 for alpha chain variable domain of TCR clone 295287 (TRAV26-1, TRAJ29)
CIVRVEGSGNTPLVF

SEQ ID NO: 590574 - protein, 17 aa, Homo sapiens
  CDR3 for beta chain variable domain of TCR clone 295287 (TRBV4-1, TRBJ1-4)
CASSQEGPRGVEEKLFF

SEQ ID NO: 590575 - protein, 13 aa, Homo sapiens
  CDR3 for alpha chain variable domain of TCR clone 295288 (TRAV27, TRAJ41)
CAGEGNSGYALNF

SEQ ID NO: 590576 - protein, 13 aa, Homo sapiens
  CDR3 for beta chain variable domain of TCR clone 295288 (TRBV27, TRBJ2-7)
CASRFVSSYEQYF

SEQ ID NO: 590577 - protein, 11 aa, Homo sapiens
  CDR3 for alpha chain variable domain of TCR clone 295289 (TRAV3, TRAJ21)
CAVGNFNKFYF

SEQ ID NO: 590578 - protein, 13 aa, Homo sapiens
  CDR3 for beta chain variable domain of TCR clone 295289 (TRBV2, TRBJ1-6)
CADSGSYNSPLHF

SEQ ID NO: 590579 - protein, 13 aa, Homo sapiens
  CDR3 for alpha chain variable domain of TCR clone 295290 (TRAV36/DV7, TRAJ37)
CAVFSSNTGKLIF

SEQ ID NO: 590580 - protein, 15 aa, Homo sapiens
  CDR3 for beta chain variable domain of TCR clone 295290 (TRBV10-3, TRBJ2-3)
CAISLTSGGTDTQYF

SEQ ID NO: 590581 - protein, 12 aa, Homo sapiens
  CDR3 for alpha chain variable domain of TCR clone 295291 (TRAV12-3, TRAJ5)
CAMDTGRRALTF

SEQ ID NO: 590582 - protein, 13 aa, Homo sapiens
  CDR3 for beta chain variable domain of TCR clone 295291 (TRBV7-7, TRBJ2-2)
CASSLTRAGELFV

SEQ ID NO: 590583 - protein, 11 aa, Homo sapiens
  CDR3 for alpha chain variable domain of TCR clone 295292 (TRAV3, TRAJ21)
CAVGNFNKFYF

SEQ ID NO: 590584 - protein, 16 aa, Homo sapiens
  CDR3 for beta chain variable domain of TCR clone 295292 (TRBV7-3, TRBJ2-1)
CASSFTGRRSYNEQFF

SEQ ID NO: 590585 - protein, 13 aa, Homo sapiens
  CDR3 for alpha chain variable domain of TCR clone 295293 (TRAV21, TRAJ57)
CAVTQGGSEKLVF

SEQ ID NO: 590586 - protein, 14 aa, Homo sapiens
  CDR3 for beta chain variable domain of TCR clone 295293 (TRBV11-2, TRBJ2-3)
CASSRLARTDTQYF

SEQ ID NO: 590587 - protein, 14 aa, Homo sapiens
  CDR3 for alpha chain variable domain of TCR clone 295294 (TRAV27, TRAJ20)
CAGEGRSNDYKLSF

SEQ ID NO: 590588 - protein, 14 aa, Homo sapiens
  CDR3 for beta chain variable domain of TCR clone 295294 (TRBV19, TRBJ2-1)
CASPTFVLSGEQFF

SEQ ID NO: 590589 - protein, 13 aa, Homo sapiens
  CDR3 for alpha chain variable domain of TCR clone 295295 (TRAV13-1, TRAJ43)
CAASKNNNNDMRF

SEQ ID NO: 590590 - protein, 14 aa, Homo sapiens
  CDR3 for beta chain variable domain of TCR clone 295295 (TRBV14, TRBJ2-1)
CASSQFQGRGEQFF

SEQ ID NO: 590591 - protein, 17 aa, Homo sapiens
  CDR3 for alpha chain variable domain of TCR clone 295296 (TRAV8-3, TRAJ42)
CAVVNPEERRSQGNLIF

SEQ ID NO: 590592 - protein, 14 aa, Homo sapiens
  CDR3 for beta chain variable domain of TCR clone 295296 (TRBV15, TRBJ2-7)
CATSRVARGYEQYF

SEQ ID NO: 590593 - protein, 15 aa, Homo sapiens
  CDR3 for alpha chain variable domain of TCR clone 295297 (TRAV26-1, TRAJ29)
CIVRVEGSGNTPLVF

SEQ ID NO: 590594 - protein, 13 aa, Homo sapiens
  CDR3 for beta chain variable domain of TCR clone 295297 (TRBV7-9, TRBJ2-3)
CASSAAGSDTQYF

SEQ ID NO: 590595 - protein, 16 aa, Homo sapiens
  CDR3 for alpha chain variable domain of TCR clone 295298 (TRAV20, TRAJ53)
CAVRRGSGGSNYKLTF

SEQ ID NO: 590596 - protein, 17 aa, Homo sapiens
  CDR3 for beta chain variable domain of TCR clone 295298 (TRBV4-3, TRBJ2-1)
CASSQFSSGRASGEQFF

SEQ ID NO: 590597 - protein, 15 aa, Homo sapiens
  CDR3 for alpha chain variable domain of TCR clone 295299 (TRAV27, TRAJ38)
CAARRNAGNNRKLIW

SEQ ID NO: 590598 - protein, 12 aa, Homo sapiens
  CDR3 for beta chain variable domain of TCR clone 295299 (TRBV29-1, TRBJ2-3)
CSVTGGADTQYF

SEQ ID NO: 590599 - protein, 15 aa, Homo sapiens
  CDR3 for alpha chain variable domain of TCR clone 295300 (TRAV3, TRAJ5)
CAVRDLDTGRRALTF

SEQ ID NO: 590600 - protein, 15 aa, Homo sapiens
  CDR3 for beta chain variable domain of TCR clone 295300 (TRBV29-1, TRBJ2-7)
CSVEFFDRGSYEQYF

SEQ ID NO: 590601 - protein, 14 aa, Homo sapiens
  CDR3 for alpha chain variable domain of TCR clone 295301 (TRAV12-2, TRAJ13)
CAVKKTGGDQKVTF

SEQ ID NO: 590602 - protein, 18 aa, Homo sapiens
  CDR3 for beta chain variable domain of TCR clone 295301 (TRBV11-2, TRBJ2-3)
CASSLGGASRGAPNTQYF

SEQ ID NO: 590603 - protein, 11 aa, Homo sapiens
  CDR3 for alpha chain variable domain of TCR clone 295302 (TRAV35, TRAJ30)
CAGPGDDKIIF

SEQ ID NO: 590604 - protein, 13 aa, Homo sapiens
  CDR3 for beta chain variable domain of TCR clone 295302 (TRBV7-9, TRBJ1-2)
CASSLKQSYGYTF

SEQ ID NO: 590605 - protein, 19 aa, Homo sapiens
  CDR3 for alpha chain variable domain of TCR clone 295303 (TRAV2, )
CAVEEDIQNPDPAGYQLRD

SEQ ID NO: 590606 - protein, 14 aa, Homo sapiens
  CDR3 for beta chain variable domain of TCR clone 295303 (TRBV19, TRBJ1-2)
CASNPGQAPYGYTF

SEQ ID NO: 590607 - protein, 12 aa, Homo sapiens
  CDR3 for alpha chain variable domain of TCR clone 295304 (TRAV17, TRAJ57)
CATDGGSEKLVF

SEQ ID NO: 590608 - protein, 12 aa, Homo sapiens
  CDR3 for beta chain variable domain of TCR clone 295304 (TRBV29-1, TRBJ2-2)
CSVGKYTGELFF

SEQ ID NO: 590609 - protein, 13 aa, Homo sapiens
  CDR3 for alpha chain variable domain of TCR clone 295305 (TRAV8-3, TRAJ20)
CAVGAQDDYKLSF

SEQ ID NO: 590610 - protein, 16 aa, Homo sapiens
  CDR3 for beta chain variable domain of TCR clone 295305 (TRBV6-1, TRBJ1-2)
CASSGAWQGRSHGYTF

SEQ ID NO: 590611 - protein, 15 aa, Homo sapiens
  CDR3 for alpha chain variable domain of TCR clone 295306 (TRAV38-1, TRAJ37)
CAFIFGSGNTGKLIF

SEQ ID NO: 590612 - protein, 17 aa, Homo sapiens
  CDR3 for beta chain variable domain of TCR clone 295306 (TRBV28, TRBJ2-5)
CASSTPEGDALQEAQYF

SEQ ID NO: 590613 - protein, 16 aa, Homo sapiens
  CDR3 for alpha chain variable domain of TCR clone 295307 (TRAV4, TRAJ18)
CCVLLIGGPTLGRLYF

SEQ ID NO: 590614 - protein, 12 aa, Homo sapiens
  CDR3 for beta chain variable domain of TCR clone 295307 (TRBV6-3, TRBJ2-7)
CASSLTPYEQYL

SEQ ID NO: 590615 - protein, 10 aa, Homo sapiens
  CDR3 for alpha chain variable domain of TCR clone 295308 (TRAV23/DV6, TRAJ57)
CAASSTLSQG

SEQ ID NO: 590616 - protein, 13 aa, Homo sapiens
  CDR3 for beta chain variable domain of TCR clone 295308 (TRBV7-3, TRBJ1-2)
CASSLKRGYGYTF

SEQ ID NO: 590617 - protein, 18 aa, Homo sapiens
  CDR3 for alpha chain variable domain of TCR clone 295309 (TRAV3, TRAJ17)
CAVRARRGGRSCRQQANF

SEQ ID NO: 590618 - protein, 20 aa, Homo sapiens
  CDR3 for beta chain variable domain of TCR clone 295309 (TRBV28, TRBJ2-1)
CASTPIGRSPGLAGGNEQFF

SEQ ID NO: 590619 - protein, 13 aa, Homo sapiens
  CDR3 for alpha chain variable domain of TCR clone 295310 (TRAV13-1, TRAJ21)
CAANIYNFNKFYF

SEQ ID NO: 590620 - protein, 12 aa, Homo sapiens
  CDR3 for beta chain variable domain of TCR clone 295310 (TRBV11-2, TRBJ2-1)
CASSPGNNEQFF

SEQ ID NO: 590621 - protein, 13 aa, Homo sapiens
  CDR3 for alpha chain variable domain of TCR clone 295311 (TRAV8-3, TRAJ43)
CAVGPDITMTCAL

SEQ ID NO: 590622 - protein, 14 aa, Homo sapiens
  CDR3 for beta chain variable domain of TCR clone 295311 (TRBV19, TRBJ2-1)
CASPTFVLSGEQFF

SEQ ID NO: 590623 - protein, 14 aa, Homo sapiens
  CDR3 for alpha chain variable domain of TCR clone 295312 (TRAV12-2, TRAJ48)
SATYLFASNEKLTF

SEQ ID NO: 590624 - protein, 14 aa, Homo sapiens
  CDR3 for beta chain variable domain of TCR clone 295312 (TRBV5-1, TRBJ2-5)
CASSLAGKQETQYF

SEQ ID NO: 590625 - protein, 15 aa, Homo sapiens
  CDR3 for alpha chain variable domain of TCR clone 295313 (TRAV17, TRAJ4)
CATGTWSGGYNKLIF

SEQ ID NO: 590626 - protein, 13 aa, Homo sapiens
  CDR3 for beta chain variable domain of TCR clone 295313 (TRBV12-4, TRBJ2-7)
CASSPTETYEQYF

SEQ ID NO: 590627 - protein, 16 aa, Homo sapiens
  CDR3 for alpha chain variable domain of TCR clone 295314 (TRAV26-1, TRAJ53)
CIVRVAMGGSNYKLTF

SEQ ID NO: 590628 - protein, 15 aa, Homo sapiens
  CDR3 for beta chain variable domain of TCR clone 295314 (TRBV11-3, TRBJ2-5)
CASSDTSGGIETQYF

SEQ ID NO: 590629 - protein, 15 aa, Homo sapiens
  CDR3 for alpha chain variable domain of TCR clone 295315 (TRAV2, TRAJ11)
CAVGGRNSGYSTLAF

SEQ ID NO: 590630 - protein, 14 aa, Homo sapiens
  CDR3 for beta chain variable domain of TCR clone 295315 (TRBV20-1, TRBJ2-1)
CSAQISGSANEQFF

SEQ ID NO: 590631 - protein, 14 aa, Homo sapiens
  CDR3 for alpha chain variable domain of TCR clone 295316 (TRAV16, TRAJ8)
CALLMNTGFQKLVF

SEQ ID NO: 590632 - protein, 15 aa, Homo sapiens
  CDR3 for beta chain variable domain of TCR clone 295316 (TRBV5-1, TRBJ1-1)
CASSLAPRGNTEAFF

SEQ ID NO: 590633 - protein, 16 aa, Homo sapiens
  CDR3 for alpha chain variable domain of TCR clone 295317 (TRAV26-1, TRAJ38)
CIVRVSGASNNRKLIW

SEQ ID NO: 590634 - protein, 13 aa, Homo sapiens
  CDR3 for beta chain variable domain of TCR clone 295317 (TRBV14, TRBJ1-2)
CASSQDRRRGYTF

SEQ ID NO: 590635 - protein, 14 aa, Homo sapiens
  CDR3 for alpha chain variable domain of TCR clone 295318 (TRAV12-3, TRAJ58)
CAMSTETSGCRLTF

SEQ ID NO: 590636 - protein, 15 aa, Homo sapiens
  CDR3 for beta chain variable domain of TCR clone 295318 (TRBV4-1, TRBJ1-4)
CASSDTGGTNEKLFF

SEQ ID NO: 590637 - protein, 12 aa, Homo sapiens
  CDR3 for alpha chain variable domain of TCR clone 295319 (TRAV16, TRAJ49)
CALNEGGNQFYF

SEQ ID NO: 590638 - protein, 17 aa, Homo sapiens
  CDR3 for beta chain variable domain of TCR clone 295319 (TRBV11-2, TRBJ2-1)
CASSLYPPGVEYNEQFF

SEQ ID NO: 590639 - protein, 15 aa, Homo sapiens
  CDR3 for alpha chain variable domain of TCR clone 295320 (TRAV12-2, TRAJ42)
CAGNSHGGSQGNPIL

SEQ ID NO: 590640 - protein, 13 aa, Homo sapiens
  CDR3 for beta chain variable domain of TCR clone 295320 (TRBV27, TRBJ1-1)
CASSVSANTEAFF

SEQ ID NO: 590641 - protein, 15 aa, Homo sapiens
  CDR3 for alpha chain variable domain of TCR clone 295321 (TRAV17, TRAJ4)
CATGTWSGGYNKLIF

SEQ ID NO: 590642 - protein, 12 aa, Homo sapiens
  CDR3 for beta chain variable domain of TCR clone 295321 (TRBV2, TRBJ2-1)
CAKREGYNEQFF

SEQ ID NO: 590643 - protein, 16 aa, Homo sapiens
  CDR3 for alpha chain variable domain of TCR clone 295322 (TRAV3, TRAJ23)
FAVKIGIYNQGGKLIF

SEQ ID NO: 590644 - protein, 17 aa, Homo sapiens
  CDR3 for beta chain variable domain of TCR clone 295322 (TRBV10-3, TRBJ2-6)
CAISESTAPSGANVLTF

SEQ ID NO: 590645 - protein, 14 aa, Homo sapiens
  CDR3 for alpha chain variable domain of TCR clone 295323 (TRAV3, TRAJ27)
CAVRGDTIAGKSTF

SEQ ID NO: 590646 - protein, 15 aa, Homo sapiens
  CDR3 for beta chain variable domain of TCR clone 295323 (TRBV7-7, TRBJ2-2)
CATSKLAKNTGELFF

SEQ ID NO: 590647 - protein, 15 aa, Homo sapiens
  CDR3 for alpha chain variable domain of TCR clone 295324 (TRAV3, TRAJ9)
CAVRGSNTGGFKTIF

SEQ ID NO: 590648 - protein, 16 aa, Homo sapiens
  CDR3 for beta chain variable domain of TCR clone 295324 (TRBV15, TRBJ2-5)
CATSPTTGQGMETQYF

SEQ ID NO: 590649 - protein, 13 aa, Homo sapiens
  CDR3 for alpha chain variable domain of TCR clone 295325 (TRAV23/DV6, TRAJ47)
CAASSQYGNKLVF

SEQ ID NO: 590650 - protein, 15 aa, Homo sapiens
  CDR3 for beta chain variable domain of TCR clone 295325 (TRBV7-3, TRBJ2-1)
CASSLDGNSYTEQFF

SEQ ID NO: 590651 - protein, 14 aa, Homo sapiens
  CDR3 for alpha chain variable domain of TCR clone 295326 (TRAV13-1, TRAJ35)
CAASKGGFGNVLNW

SEQ ID NO: 590652 - protein, 13 aa, Homo sapiens
  CDR3 for beta chain variable domain of TCR clone 295326 (TRBV7-3, TRBJ1-1)
CASSQDWGAEAFF

SEQ ID NO: 590653 - protein, 12 aa, Homo sapiens
  CDR3 for alpha chain variable domain of TCR clone 295327 (TRAV13-1, TRAJ15)
CAASQAGTALIF

SEQ ID NO: 590654 - protein, 18 aa, Homo sapiens
  CDR3 for beta chain variable domain of TCR clone 295327 (TRBV11-2, TRBJ2-6)
CASSLNPFLGTGANVLTF

SEQ ID NO: 590655 - protein, 10 aa, Homo sapiens
  CDR3 for alpha chain variable domain of TCR clone 295328 (TRAV1-2, TRAJ20)
CALNDYKLSI

SEQ ID NO: 590656 - protein, 16 aa, Homo sapiens
  CDR3 for beta chain variable domain of TCR clone 295328 (TRBV20-1, TRBJ1-1)
CSARALTQGMNTEAVF

SEQ ID NO: 590657 - protein, 12 aa, Homo sapiens
  CDR3 for alpha chain variable domain of TCR clone 295329 (TRAV1-1, TRAJ9)
CAVDTGGFKTIF

SEQ ID NO: 590658 - protein, 14 aa, Homo sapiens
  CDR3 for beta chain variable domain of TCR clone 295329 (TRBV7-9, TRBJ2-1)
CASSPRDSLYEQFF

SEQ ID NO: 590659 - protein, 13 aa, Homo sapiens
  CDR3 for alpha chain variable domain of TCR clone 295330 (TRAV8-3, TRAJ44)
CAVVPGTARKLTF

SEQ ID NO: 590660 - protein, 13 aa, Homo sapiens
  CDR3 for beta chain variable domain of TCR clone 295330 (TRBV11-2, TRBJ2-5)
CASSRGPSETQYF

SEQ ID NO: 590661 - protein, 13 aa, Homo sapiens
  CDR3 for alpha chain variable domain of TCR clone 295331 (TRAV12-3, TRAJ33)
CAMSVNSNYQLIW

SEQ ID NO: 590662 - protein, 13 aa, Homo sapiens
  CDR3 for beta chain variable domain of TCR clone 295331 (TRBV5-1, TRBJ1-2)
CASSFQDGYGYTF

SEQ ID NO: 590663 - protein, 23 aa, Homo sapiens
  CDR3 for alpha chain variable domain of TCR clone 295332 (TRAV2, TRAJ13)
CASGGYQKVPLELEQSSKSSQIS

SEQ ID NO: 590664 - protein, 14 aa, Homo sapiens
  CDR3 for beta chain variable domain of TCR clone 295332 (TRBV20-1, TRBJ1-1)
CSAQTRIGGTEAFF

SEQ ID NO: 590665 - protein, 13 aa, Homo sapiens
  CDR3 for alpha chain variable domain of TCR clone 295333 (TRAV12-1, TRAJ40)
CVVPTSGTYKYIF

SEQ ID NO: 590666 - protein, 12 aa, Homo sapiens
  CDR3 for beta chain variable domain of TCR clone 295333 (TRBV29-1, TRBJ2-3)
CSVTGGADTQYF

SEQ ID NO: 590667 - protein, 15 aa, Homo sapiens
  CDR3 for alpha chain variable domain of TCR clone 295334 (TRAV3, TRAJ5)
CAVRDLDTGRRALTF

SEQ ID NO: 590668 - protein, 15 aa, Homo sapiens
  CDR3 for beta chain variable domain of TCR clone 295334 (TRBV27, TRBJ1-6)
CASSFDRGLGSPLHF

SEQ ID NO: 590669 - protein, 17 aa, Homo sapiens
  CDR3 for alpha chain variable domain of TCR clone 295335 (TRAV3, TRAJ6)
CAVIDGPRAGGSYIPNF

SEQ ID NO: 590670 - protein, 14 aa, Homo sapiens
  CDR3 for beta chain variable domain of TCR clone 295335 (TRBV7-2, TRBJ2-7)
CASSPKTSFYEQYF

SEQ ID NO: 590671 - protein, 11 aa, Homo sapiens
  CDR3 for alpha chain variable domain of TCR clone 295336 (TRAV21, TRAJ7)
CAAYGNNRLAF

SEQ ID NO: 590672 - protein, 16 aa, Homo sapiens
  CDR3 for beta chain variable domain of TCR clone 295336 (TRBV4-1, TRBJ2-7)
CASSRTGVAFESTSGR

SEQ ID NO: 590673 - protein, 13 aa, Homo sapiens
  CDR3 for alpha chain variable domain of TCR clone 295337 (TRAV3, TRAJ20)
CALRRLNDYKLSF

SEQ ID NO: 590674 - protein, 13 aa, Homo sapiens
  CDR3 for beta chain variable domain of TCR clone 295337 (TRBV7-3, TRBJ1-1)
CASSQDWGAEAFF

SEQ ID NO: 590675 - protein, 17 aa, Homo sapiens
  CDR3 for alpha chain variable domain of TCR clone 295338 (TRAV3, TRAJ6)
CAVRDGPRAGGSYLPTF

SEQ ID NO: 590676 - protein, 14 aa, Homo sapiens
  CDR3 for beta chain variable domain of TCR clone 295338 (TRBV5-1, TRBJ2-7)
CASSRGESLYEQYF

SEQ ID NO: 590677 - protein, 11 aa, Homo sapiens
  CDR3 for alpha chain variable domain of TCR clone 295339 (TRAV12-2, TRAJ26)
CPSQGGQNFVF

SEQ ID NO: 590678 - protein, 16 aa, Homo sapiens
  CDR3 for beta chain variable domain of TCR clone 295339 (TRBV5-1, TRBJ2-2)
CASSWQGATNTGELFF

SEQ ID NO: 590679 - protein, 23 aa, Homo sapiens
  CDR3 for alpha chain variable domain of TCR clone 295340 (TRAV12-2, TRAJ22)
CAVSFRVHPGPPIVSGSASQLTF

SEQ ID NO: 590680 - protein, 13 aa, Homo sapiens
  CDR3 for beta chain variable domain of TCR clone 295340 (TRBV12-4, TRBJ1-2)
CASSLDSNYGYTF

SEQ ID NO: 590681 - protein, 12 aa, Homo sapiens
  CDR3 for alpha chain variable domain of TCR clone 295341 (TRAV3, TRAJ26)
CAVRDYGRNFVF

SEQ ID NO: 590682 - protein, 16 aa, Homo sapiens
  CDR3 for beta chain variable domain of TCR clone 295341 (TRBV11-2, TRBJ1-2)
CASSPSGREANYGYTF

SEQ ID NO: 590683 - protein, 14 aa, Homo sapiens
  CDR3 for alpha chain variable domain of TCR clone 295342 (TRAV13-1, TRAJ35)
CAASKGGFGNVLHW

SEQ ID NO: 590684 - protein, 15 aa, Homo sapiens
  CDR3 for beta chain variable domain of TCR clone 295342 (TRBV7-3, TRBJ2-1)
CASSLGQGPFGEQFF

SEQ ID NO: 590685 - protein, 16 aa, Homo sapiens
  CDR3 for alpha chain variable domain of TCR clone 295343 (TRAV1-2, TRAJ26)
CLLPLSVRYYGQNFVF

SEQ ID NO: 590686 - protein, 15 aa, Homo sapiens
  CDR3 for beta chain variable domain of TCR clone 295343 (TRBV28, TRBJ2-1)
CASSIIAGGRSEQFF

SEQ ID NO: 590687 - protein, 15 aa, Homo sapiens
  CDR3 for alpha chain variable domain of TCR clone 295344 (TRAV17, TRAJ56)
CATEHFTGATSKLTF

SEQ ID NO: 590688 - protein, 15 aa, Homo sapiens
  CDR3 for beta chain variable domain of TCR clone 295344 (TRBV28, TRBJ1-5)
CASSRTGGYVQPQHF

SEQ ID NO: 590689 - protein, 15 aa, Homo sapiens
  CDR3 for alpha chain variable domain of TCR clone 295345 (TRAV3, TRAJ36)
CAVKASQTGANNLFF

SEQ ID NO: 590690 - protein, 13 aa, Homo sapiens
  CDR3 for beta chain variable domain of TCR clone 295345 (TRBV10-3, TRBJ1-2)
CAISERDSYGYTF

SEQ ID NO: 590691 - protein, 16 aa, Homo sapiens
  CDR3 for alpha chain variable domain of TCR clone 295346 (TRAV30, TRAJ24)
CVTEIVDADSWGKFQF

SEQ ID NO: 590692 - protein, 15 aa, Homo sapiens
  CDR3 for beta chain variable domain of TCR clone 295346 (TRBV7-9, TRBJ1-1)
CASSRPGTANTEAFF

SEQ ID NO: 590693 - protein, 14 aa, Homo sapiens
  CDR3 for alpha chain variable domain of TCR clone 295347 (TRAV38-2/DV8, TRAJ54)
AAMYQIQGAQKLVF

SEQ ID NO: 590694 - protein, 17 aa, Homo sapiens
  CDR3 for beta chain variable domain of TCR clone 295347 (TRBV7-8, TRBJ2-1)
CASSPPTGTLAYNEQFF

SEQ ID NO: 590695 - protein, 16 aa, Homo sapiens
  CDR3 for alpha chain variable domain of TCR clone 295348 (TRAV12-1, TRAJ42)
CVVTPYYGGSQGNLIF

SEQ ID NO: 590696 - protein, 12 aa, Homo sapiens
  CDR3 for beta chain variable domain of TCR clone 295348 (TRBV6-3, TRBJ2-7)
CASSLTPYEQYF

SEQ ID NO: 590697 - protein, 11 aa, Homo sapiens
  CDR3 for alpha chain variable domain of TCR clone 295349 (TRAV27, TRAJ45)
CAGAQEEVLTD

SEQ ID NO: 590698 - protein, 17 aa, Homo sapiens
  CDR3 for beta chain variable domain of TCR clone 295349 (TRBV11-2, TRBJ2-1)
CTSSLYPPGVEYNEQFF

SEQ ID NO: 590699 - protein, 15 aa, Homo sapiens
  CDR3 for alpha chain variable domain of TCR clone 295350 (TRAV2, TRAJ13)
CATPSYSGGYQKVTF

SEQ ID NO: 590700 - protein, 16 aa, Homo sapiens
  CDR3 for beta chain variable domain of TCR clone 295350 (TRBV7-7, TRBJ2-1)
CASSLASGTSYNEQFF

SEQ ID NO: 590701 - protein, 14 aa, Homo sapiens
  CDR3 for alpha chain variable domain of TCR clone 295351 (TRAV8-1, TRAJ5)
CAVRTDTGRRALTF

SEQ ID NO: 590702 - protein, 15 aa, Homo sapiens
  CDR3 for beta chain variable domain of TCR clone 295351 (TRBV7-3, TRBJ2-1)
CASSPTGGGEVEEFF

SEQ ID NO: 590703 - protein, 14 aa, Homo sapiens
  CDR3 for alpha chain variable domain of TCR clone 295352 (TRAV13-1, TRAJ40)
RAASMTSGTYKYIF

SEQ ID NO: 590704 - protein, 15 aa, Homo sapiens
  CDR3 for beta chain variable domain of TCR clone 295352 (TRBV7-3, TRBJ2-1)
CASSPTGGGEVEQFF

SEQ ID NO: 590705 - protein, 12 aa, Homo sapiens
  CDR3 for alpha chain variable domain of TCR clone 295353 (TRAV8-4, TRAJ37)
CAKSSNKGKLIF

SEQ ID NO: 590706 - protein, 15 aa, Homo sapiens
  CDR3 for beta chain variable domain of TCR clone 295353 (TRBV7-9, TRBJ2-7)
CASSSSGLAVYEQYF

SEQ ID NO: 590707 - protein, 14 aa, Homo sapiens
  CDR3 for alpha chain variable domain of TCR clone 295354 (TRAV16, TRAJ33)
CALSAMDSNYQLIW

SEQ ID NO: 590708 - protein, 15 aa, Homo sapiens
  CDR3 for beta chain variable domain of TCR clone 295354 (TRBV6-1, TRBJ2-5)
CASPRWGTEGQTQYF

SEQ ID NO: 590709 - protein, 14 aa, Homo sapiens
  CDR3 for alpha chain variable domain of TCR clone 295355 (TRAV38-1, TRAJ40)
CALRPTSGTYKYIF

SEQ ID NO: 590710 - protein, 18 aa, Homo sapiens
  CDR3 for beta chain variable domain of TCR clone 295355 (TRBV11-2, TRBJ2-3)
CARSLGGASRGAPNTQYF

SEQ ID NO: 590711 - protein, 13 aa, Homo sapiens
  CDR3 for alpha chain variable domain of TCR clone 295356 (TRAV21, TRAJ27)
CAALNTNAGKSTF

SEQ ID NO: 590712 - protein, 14 aa, Homo sapiens
  CDR3 for beta chain variable domain of TCR clone 295356 (TRBV27, TRBJ1-1)
RASSLLSGLSEAFF

SEQ ID NO: 590713 - protein, 15 aa, Homo sapiens
  CDR3 for alpha chain variable domain of TCR clone 295357 (TRAV8-3, TRAJ45)
CASSYSGGGADGLTF

SEQ ID NO: 590714 - protein, 12 aa, Homo sapiens
  CDR3 for beta chain variable domain of TCR clone 295357 (TRBV29-1, TRBJ2-3)
CSVTGAADTQYF

SEQ ID NO: 590715 - protein, 17 aa, Homo sapiens
  CDR3 for alpha chain variable domain of TCR clone 295358 (TRAV3, TRAJ6)
CAVRDGPRAGGSHIPTF

SEQ ID NO: 590716 - protein, 16 aa, Homo sapiens
  CDR3 for beta chain variable domain of TCR clone 295358 (TRBV5-1, TRBJ1-3)
CASSPWAPSSGNTIYF

SEQ ID NO: 590717 - protein, 14 aa, Homo sapiens
  CDR3 for alpha chain variable domain of TCR clone 295359 (TRAV38-1, TRAJ29)
CAFITPPGNTPLVF

SEQ ID NO: 590718 - protein, 15 aa, Homo sapiens
  CDR3 for beta chain variable domain of TCR clone 295359 (TRBV5-1, TRBJ2-1)
CASSPPRAPYNEQFF

SEQ ID NO: 590719 - protein, 12 aa, Homo sapiens
  CDR3 for alpha chain variable domain of TCR clone 295360 (TRAV26-2, TRAJ47)
CIRGEYGNKLVL

SEQ ID NO: 590720 - protein, 14 aa, Homo sapiens
  CDR3 for beta chain variable domain of TCR clone 295360 (TRBV7-2, TRBJ1-1)
CASSFLTGTTEAFF

SEQ ID NO: 590721 - protein, 12 aa, Homo sapiens
  CDR3 for alpha chain variable domain of TCR clone 295361 (TRAV3, TRAJ43)
CAVRDPNNDMRF

SEQ ID NO: 590722 - protein, 17 aa, Homo sapiens
  CDR3 for beta chain variable domain of TCR clone 295361 (TRBV7-8, TRBJ2-6)
YASSAGTGGAGANVLTF

SEQ ID NO: 590723 - protein, 13 aa, Homo sapiens
  CDR3 for alpha chain variable domain of TCR clone 295362 (TRAV2, TRAJ21)
CAVDDLNFNNFYF

SEQ ID NO: 590724 - protein, 15 aa, Homo sapiens
  CDR3 for beta chain variable domain of TCR clone 295362 (TRBV28, TRBJ2-5)
CASSPGQGSIETQYF

SEQ ID NO: 590725 - protein, 20 aa, Homo sapiens
  CDR3 for alpha chain variable domain of TCR clone 295363 (TRAV4, TRAJ31)
CLVGERLQQCQTHGWRWNSA

SEQ ID NO: 590726 - protein, 19 aa, Homo sapiens
  CDR3 for beta chain variable domain of TCR clone 295363 (TRBV12-4, TRBJ2-1)
CASTLAFDPRDKEANEQFF

SEQ ID NO: 590727 - protein, 13 aa, Homo sapiens
  CDR3 for alpha chain variable domain of TCR clone 295364 (TRAV20, TRAJ34)
CAVRSYKTDKLIF

SEQ ID NO: 590728 - protein, 14 aa, Homo sapiens
  CDR3 for beta chain variable domain of TCR clone 295364 (TRBV27, TRBJ1-3)
CQQSSPGSGNTIYF

SEQ ID NO: 590729 - protein, 13 aa, Homo sapiens
  CDR3 for alpha chain variable domain of TCR clone 295365 (TRAV13-2, TRAJ48)
CAEMDFGDEKLTF

SEQ ID NO: 590730 - protein, 16 aa, Homo sapiens
  CDR3 for beta chain variable domain of TCR clone 295365 (TRBV7-9, TRBJ2-1)
CASSDVAGGSYNEQFL

SEQ ID NO: 590731 - protein, 14 aa, Homo sapiens
  CDR3 for alpha chain variable domain of TCR clone 295366 (TRAV9-2, TRAJ48)
CALSSNFGNEKLTF

SEQ ID NO: 590732 - protein, 15 aa, Homo sapiens
  CDR3 for beta chain variable domain of TCR clone 295366 (TRBV20-1, TRBJ1-2)
CSAAGEGARIYGYTF

SEQ ID NO: 590733 - protein, 14 aa, Homo sapiens
  CDR3 for alpha chain variable domain of TCR clone 295367 (TRAV12-2, TRAJ40)
CAVKIPSGTYKYIF

SEQ ID NO: 590734 - protein, 20 aa, Homo sapiens
  CDR3 for beta chain variable domain of TCR clone 295367 (TRBV28, TRBJ2-1)
CASTTIGRSPGLAGGNEQFF

SEQ ID NO: 590735 - protein, 12 aa, Homo sapiens
  CDR3 for alpha chain variable domain of TCR clone 295368 (TRAV10, TRAJ9)
CVVVRVGNDMRF

SEQ ID NO: 590736 - protein, 14 aa, Homo sapiens
  CDR3 for beta chain variable domain of TCR clone 295368 (TRBV7-9, TRBJ2-2)
CASSGLADTGELFF

SEQ ID NO: 590737 - protein, 13 aa, Homo sapiens
  CDR3 for alpha chain variable domain of TCR clone 295369 (TRAV17, TRAJ9)
CATDYTGGFKTIF

SEQ ID NO: 590738 - protein, 13 aa, Homo sapiens
  CDR3 for beta chain variable domain of TCR clone 295369 (TRBV18, TRBJ2-2)
CASSPTRGGELFF

SEQ ID NO: 590739 - protein, 13 aa, Homo sapiens
  CDR3 for alpha chain variable domain of TCR clone 295370 (TRAV2, TRAJ40)
CAVVTSGTYTYIF

SEQ ID NO: 590740 - protein, 14 aa, Homo sapiens
  CDR3 for beta chain variable domain of TCR clone 295370 (TRBV19, TRBJ2-1)
CASPTSVLSGEQFF

SEQ ID NO: 590741 - protein, 16 aa, Homo sapiens
  CDR3 for alpha chain variable domain of TCR clone 295371 (TRAV1-2, TRAJ10)
CAVRGVLTGGGNKLTF

SEQ ID NO: 590742 - protein, 13 aa, Homo sapiens
  CDR3 for beta chain variable domain of TCR clone 295371 (TRBV11-2, TRBJ2-2)
CASGRDREEELFF

SEQ ID NO: 590743 - protein, 13 aa, Homo sapiens
  CDR3 for alpha chain variable domain of TCR clone 295372 (TRAV12-3, TRAJ33)
CAMSVNSNYQLIW

SEQ ID NO: 590744 - protein, 19 aa, Homo sapiens
  CDR3 for beta chain variable domain of TCR clone 295372 (TRBV5-7, TRBJ2-4)
CASSLEGFASGGAKNIQYF

SEQ ID NO: 590745 - protein, 11 aa, Homo sapiens
  CDR3 for alpha chain variable domain of TCR clone 295373 (TRAV2, TRAJ31)
CAAGPPARLMF

SEQ ID NO: 590746 - protein, 17 aa, Homo sapiens
  CDR3 for beta chain variable domain of TCR clone 295373 (TRBV11-2, TRBJ2-1)
CASSLYPPGVEYNEQFF

SEQ ID NO: 590747 - protein, 12 aa, Homo sapiens
  CDR3 for alpha chain variable domain of TCR clone 295374 (TRAV38-1, TRAJ32)
CAPLGATNKLIF

SEQ ID NO: 590748 - protein, 14 aa, Homo sapiens
  CDR3 for beta chain variable domain of TCR clone 295374 (TRBV29-1, TRBJ2-5)
CSVETSGSGETLYF

SEQ ID NO: 590749 - protein, 10 aa, Homo sapiens
  CDR3 for alpha chain variable domain of TCR clone 295375 (TRAV23/DV6, TRAJ57)
CSASSTLSQG

SEQ ID NO: 590750 - protein, 14 aa, Homo sapiens
  CDR3 for beta chain variable domain of TCR clone 295375 (TRBV25-1, TRBJ1-1)
CASTPLGGNTEAFF

SEQ ID NO: 590751 - protein, 13 aa, Homo sapiens
  CDR3 for alpha chain variable domain of TCR clone 295376 (TRAV27, TRAJ45)
CRSSGGGADGLTF

SEQ ID NO: 590752 - protein, 15 aa, Homo sapiens
  CDR3 for beta chain variable domain of TCR clone 295376 (TRBV12-4, TRBJ2-5)
CASSAPTGLQETQYF

SEQ ID NO: 590753 - protein, 13 aa, Homo sapiens
  CDR3 for alpha chain variable domain of TCR clone 295377 (TRAV2, TRAJ40)
CAVVTSGTYKYIF

SEQ ID NO: 590754 - protein, 15 aa, Homo sapiens
  CDR3 for beta chain variable domain of TCR clone 295377 (TRBV7-2, TRBJ1-1)
CASSPQGGANTEAFF

SEQ ID NO: 590755 - protein, 14 aa, Homo sapiens
  CDR3 for alpha chain variable domain of TCR clone 295378 (TRAV12-2, TRAJ11)
CAVEGGSGYSTLTF

SEQ ID NO: 590756 - protein, 14 aa, Homo sapiens
  CDR3 for beta chain variable domain of TCR clone 295378 (TRBV6-1, TRBJ2-2)
CASVEHIESGELFF

SEQ ID NO: 590757 - protein, 16 aa, Homo sapiens
  CDR3 for alpha chain variable domain of TCR clone 295379 (TRAV30, TRAJ44)
CGTEDKRTGTASKLTF

SEQ ID NO: 590758 - protein, 16 aa, Homo sapiens
  CDR3 for beta chain variable domain of TCR clone 295379 (TRBV10-2, TRBJ2-7)
CASSESPGSSGFEQYV

SEQ ID NO: 590759 - protein, 14 aa, Homo sapiens
  CDR3 for alpha chain variable domain of TCR clone 295380 (TRAV12-3, TRAJ42)
CAMNYVGSQGNLIF

SEQ ID NO: 590760 - protein, 13 aa, Homo sapiens
  CDR3 for beta chain variable domain of TCR clone 295380 (TRBV20-1, TRBJ1-6)
CSAPLGVGSPLHF

SEQ ID NO: 590761 - protein, 17 aa, Homo sapiens
  CDR3 for alpha chain variable domain of TCR clone 295381 (TRAV12-2, TRAJ52)
CAVNPYAGGTSYGKLTF

SEQ ID NO: 590762 - protein, 16 aa, Homo sapiens
  CDR3 for beta chain variable domain of TCR clone 295381 (TRBV5-7, TRBJ2-2)
CASSGRREGATGELFF

SEQ ID NO: 590763 - protein, 14 aa, Homo sapiens
  CDR3 for alpha chain variable domain of TCR clone 295382 (TRAV12-2, TRAJ40)
CAVKIPSGTYKYIF

SEQ ID NO: 590764 - protein, 13 aa, Homo sapiens
  CDR3 for beta chain variable domain of TCR clone 295382 (TRBV7-8, TRBJ2-1)
CASSAGTGNEQFF

SEQ ID NO: 590765 - protein, 14 aa, Homo sapiens
  CDR3 for alpha chain variable domain of TCR clone 295383 (TRAV26-1, TRAJ38)
CIADNAGNNRKLIW

SEQ ID NO: 590766 - protein, 13 aa, Homo sapiens
  CDR3 for beta chain variable domain of TCR clone 295383 (TRBV20-1, TRBJ1-1)
CSARGGGNTETFF

SEQ ID NO: 590767 - protein, 13 aa, Homo sapiens
  CDR3 for alpha chain variable domain of TCR clone 295384 (TRAV23/DV6, TRAJ21)
CAASREKLQQILL

SEQ ID NO: 590768 - protein, 16 aa, Homo sapiens
  CDR3 for beta chain variable domain of TCR clone 295384 (TRBV20-1, TRBJ2-3)
CSAVRDRGPIADTQYF

SEQ ID NO: 590769 - protein, 13 aa, Homo sapiens
  CDR3 for alpha chain variable domain of TCR clone 295385 (TRAV12-2, TRAJ4)
CAGLSGGYNKLIF

SEQ ID NO: 590770 - protein, 12 aa, Homo sapiens
  CDR3 for beta chain variable domain of TCR clone 295385 (TRBV11-2, TRBJ2-2)
CASSLGGGELFF

SEQ ID NO: 590771 - protein, 11 aa, Homo sapiens
  CDR3 for alpha chain variable domain of TCR clone 295386 (TRAV21, TRAJ34)
CAVTTTDKLIF

SEQ ID NO: 590772 - protein, 17 aa, Homo sapiens
  CDR3 for beta chain variable domain of TCR clone 295386 (TRBV20-1, TRBJ2-1)
CSARSPSGGPPTMSSSS

SEQ ID NO: 590773 - protein, 12 aa, Homo sapiens
  CDR3 for alpha chain variable domain of TCR clone 295387 (TRAV3, TRAJ20)
CAVRDPDYKLSF

SEQ ID NO: 590774 - protein, 13 aa, Homo sapiens
  CDR3 for beta chain variable domain of TCR clone 295387 (TRBV9, TRBJ2-1)
SASSVGQGGEQFF

SEQ ID NO: 590775 - protein, 14 aa, Homo sapiens
  CDR3 for alpha chain variable domain of TCR clone 295388 (TRAV23/DV6, TRAJ22)
CADISSGSARQLPF

SEQ ID NO: 590776 - protein, 13 aa, Homo sapiens
  CDR3 for beta chain variable domain of TCR clone 295388 (TRBV7-9, TRBJ1-2)
CASSLKQNYGYTF

SEQ ID NO: 590777 - protein, 18 aa, Homo sapiens
  CDR3 for alpha chain variable domain of TCR clone 295389 (TRAV12-1, TRAJ15)
CVVSPAGQPGRNCSDLLE

SEQ ID NO: 590778 - protein, 13 aa, Homo sapiens
  CDR3 for beta chain variable domain of TCR clone 295389 (TRBV7-2, TRBJ2-4)
CASSREHANIQYF

SEQ ID NO: 590779 - protein, 15 aa, Homo sapiens
  CDR3 for alpha chain variable domain of TCR clone 295390 (TRAV2, TRAJ37)
CAVEDGSSNTGKLIF

SEQ ID NO: 590780 - protein, 15 aa, Homo sapiens
  CDR3 for beta chain variable domain of TCR clone 295390 (TRBV20-1, TRBJ1-6)
CSTFREGNSPLHLGM

SEQ ID NO: 590781 - protein, 15 aa, Homo sapiens
  CDR3 for alpha chain variable domain of TCR clone 295391 (TRAV17, TRAJ48)
CATDETNFRNEKLTF

SEQ ID NO: 590782 - protein, 14 aa, Homo sapiens
  CDR3 for beta chain variable domain of TCR clone 295391 (TRBV10-3, TRBJ1-3)
CAIRGQRAGNTIYF

SEQ ID NO: 590783 - protein, 15 aa, Homo sapiens
  CDR3 for alpha chain variable domain of TCR clone 295392 (TRAV9-2, TRAJ4)
CALAPSSGGYNKLIF

SEQ ID NO: 590784 - protein, 15 aa, Homo sapiens
  CDR3 for beta chain variable domain of TCR clone 295392 (TRBV2, TRBJ2-2)
CASSRETVGTGELFF

SEQ ID NO: 590785 - protein, 15 aa, Homo sapiens
  CDR3 for alpha chain variable domain of TCR clone 295393 (TRAV12-1, TRAJ41)
CVVNSRTGSGYALHF

SEQ ID NO: 590786 - protein, 11 aa, Homo sapiens
  CDR3 for beta chain variable domain of TCR clone 295393 (TRBV6-4, TRBJ2-1)
CASSDSYAQFF

SEQ ID NO: 590787 - protein, 15 aa, Homo sapiens
  CDR3 for alpha chain variable domain of TCR clone 295394 (TRAV29/DV5, TRAJ29)
CAASERSSGNTPLVF

SEQ ID NO: 590788 - protein, 17 aa, Homo sapiens
  CDR3 for beta chain variable domain of TCR clone 295394 (TRBV4-1, TRBJ1-4)
CASSQEVPRGVEEKLFF

SEQ ID NO: 590789 - protein, 13 aa, Homo sapiens
  CDR3 for alpha chain variable domain of TCR clone 295395 (TRAV13-1, TRAJ6)
CAASRGGTYIPTF

SEQ ID NO: 590790 - protein, 15 aa, Homo sapiens
  CDR3 for beta chain variable domain of TCR clone 295395 (TRBV25-1, TRBJ2-5)
CASSDTGTHQETQYF

SEQ ID NO: 590791 - protein, 14 aa, Homo sapiens
  CDR3 for alpha chain variable domain of TCR clone 295396 (TRAV12-2, TRAJ44)
CAVNPAGTASKLTF

SEQ ID NO: 590792 - protein, 15 aa, Homo sapiens
  CDR3 for beta chain variable domain of TCR clone 295396 (TRBV2, TRBJ2-1)
CASSELAGGHNEQFF

SEQ ID NO: 590793 - protein, 14 aa, Homo sapiens
  CDR3 for alpha chain variable domain of TCR clone 295397 (TRAV12-1, TRAJ6)
CVVPTSGGSYIPTF

SEQ ID NO: 590794 - protein, 16 aa, Homo sapiens
  CDR3 for beta chain variable domain of TCR clone 295397 (TRBV12-5, TRBJ2-5)
CASGPRTSGNQGTQYF

SEQ ID NO: 590795 - protein, 13 aa, Homo sapiens
  CDR3 for alpha chain variable domain of TCR clone 295398 (TRAV27, TRAJ53)
CAGQGGSNHKLTF

SEQ ID NO: 590796 - protein, 13 aa, Homo sapiens
  CDR3 for beta chain variable domain of TCR clone 295398 (TRBV29-1, TRBJ1-1)
CSVESGFGTEAFF

SEQ ID NO: 590797 - protein, 16 aa, Homo sapiens
  CDR3 for alpha chain variable domain of TCR clone 295399 (TRAV14/DV4, TRAJ53)
CAMREGGGGSNYKLTF

SEQ ID NO: 590798 - protein, 11 aa, Homo sapiens
  CDR3 for beta chain variable domain of TCR clone 295399 (TRBV6-3, TRBJ2-3)
CATGQADTQYF

SEQ ID NO: 590799 - protein, 14 aa, Homo sapiens
  CDR3 for alpha chain variable domain of TCR clone 295400 (TRAV12-2, TRAJ10)
CAVTPTGGGNKLTF

SEQ ID NO: 590800 - protein, 18 aa, Homo sapiens
  CDR3 for beta chain variable domain of TCR clone 295400 (TRBV2, TRBJ2-1)
CASSEGGTSVRGHNEQFF

SEQ ID NO: 590801 - protein, 14 aa, Homo sapiens
  CDR3 for alpha chain variable domain of TCR clone 295401 (TRAV13-2, TRAJ17)
CAENSKAAGNKLTF

SEQ ID NO: 590802 - protein, 14 aa, Homo sapiens
  CDR3 for beta chain variable domain of TCR clone 295401 (TRBV19, TRBJ2-1)
CASPTSVLSGEQFF

SEQ ID NO: 590803 - protein, 15 aa, Homo sapiens
  CDR3 for alpha chain variable domain of TCR clone 295402 (TRAV21, TRAJ53)
CATLNSGGSNYKLTF

SEQ ID NO: 590804 - protein, 15 aa, Homo sapiens
  CDR3 for beta chain variable domain of TCR clone 295402 (TRBV5-7, TRBJ1-5)
CASSYGKLWDQPQHF

SEQ ID NO: 590805 - protein, 13 aa, Homo sapiens
  CDR3 for alpha chain variable domain of TCR clone 295403 (TRAV2, TRAJ40)
CAVVTSGTYKYIF

SEQ ID NO: 590806 - protein, 14 aa, Homo sapiens
  CDR3 for beta chain variable domain of TCR clone 295403 (TRBV19, TRBJ2-1)
CASPTVVLIGEQFF

SEQ ID NO: 590807 - protein, 14 aa, Homo sapiens
  CDR3 for alpha chain variable domain of TCR clone 295404 (TRAV9-2, TRAJ39)
FALYIYNAGNMLTF

SEQ ID NO: 590808 - protein, 14 aa, Homo sapiens
  CDR3 for beta chain variable domain of TCR clone 295404 (TRBV7-2, TRBJ2-7)
CASRSQGAAYEQYF

SEQ ID NO: 590809 - protein, 14 aa, Homo sapiens
  CDR3 for alpha chain variable domain of TCR clone 295405 (TRAV13-1, TRAJ9)
CAASALTGGFKTIF

SEQ ID NO: 590810 - protein, 13 aa, Homo sapiens
  CDR3 for beta chain variable domain of TCR clone 295405 (TRBV20-1, TRBJ1-1)
CSAGTVGNTVAFF

SEQ ID NO: 590811 - protein, 14 aa, Homo sapiens
  CDR3 for alpha chain variable domain of TCR clone 295406 (TRAV21, TRAJ37)
CAVKGSSNTGKLIF

SEQ ID NO: 590812 - protein, 14 aa, Homo sapiens
  CDR3 for beta chain variable domain of TCR clone 295406 (TRBV7-2, TRBJ2-1)
CASSRGGAGNEQFF

SEQ ID NO: 590813 - protein, 17 aa, Homo sapiens
  CDR3 for alpha chain variable domain of TCR clone 295407 (TRAV3, TRAJ6)
CAVRDGPRAGGSYIPTF

SEQ ID NO: 590814 - protein, 12 aa, Homo sapiens
  CDR3 for beta chain variable domain of TCR clone 295407 (TRBV18, TRBJ2-1)
CASSPGTSEGFF

SEQ ID NO: 590815 - protein, 11 aa, Homo sapiens
  CDR3 for alpha chain variable domain of TCR clone 295408 (TRAV12-3, TRAJ27)
CAMANAGKSTF

SEQ ID NO: 590816 - protein, 15 aa, Homo sapiens
  CDR3 for beta chain variable domain of TCR clone 295408 (TRBV19, TRBJ1-5)
CASSIVWADNQPQHF

SEQ ID NO: 590817 - protein, 11 aa, Homo sapiens
  CDR3 for alpha chain variable domain of TCR clone 295409 (TRAV3, TRAJ21)
CAVGNFNKFYF

SEQ ID NO: 590818 - protein, 15 aa, Homo sapiens
  CDR3 for beta chain variable domain of TCR clone 295409 (TRBV7-6, TRBJ2-1)
CQQRSGPSSYNEQFF

SEQ ID NO: 590819 - protein, 12 aa, Homo sapiens
  CDR3 for alpha chain variable domain of TCR clone 295410 (TRAV13-1, TRAJ48)
CAANFGNEKLTF

SEQ ID NO: 590820 - protein, 13 aa, Homo sapiens
  CDR3 for beta chain variable domain of TCR clone 295410 (TRBV7-3, TRBJ1-1)
CASSQDWGAEAFV

SEQ ID NO: 590821 - protein, 12 aa, Homo sapiens
  CDR3 for alpha chain variable domain of TCR clone 295411 (TRAV13-1, TRAJ21)
CAAKEGFNKFYF

SEQ ID NO: 590822 - protein, 15 aa, Homo sapiens
  CDR3 for beta chain variable domain of TCR clone 295411 (TRBV12-4, TRBJ2-5)
CASSPPTGLQETQYF

SEQ ID NO: 590823 - protein, 14 aa, Homo sapiens
  CDR3 for alpha chain variable domain of TCR clone 295412 (TRAV8-6, TRAJ40)
CAVSATAGTYKYIF

SEQ ID NO: 590824 - protein, 16 aa, Homo sapiens
  CDR3 for beta chain variable domain of TCR clone 295412 (TRBV4-2, TRBJ2-7)
CASSQDGGSLRGEQYF

SEQ ID NO: 590825 - protein, 11 aa, Homo sapiens
  CDR3 for alpha chain variable domain of TCR clone 295413 (TRAV1-1, TRAJ23)
CAVRQGGKLIF

SEQ ID NO: 590826 - protein, 14 aa, Homo sapiens
  CDR3 for beta chain variable domain of TCR clone 295413 (TRBV19, TRBJ2-1)
CASPTFVLSVEQFF

SEQ ID NO: 590827 - protein, 12 aa, Homo sapiens
  CDR3 for alpha chain variable domain of TCR clone 295414 (TRAV1-2, TRAJ9)
CAGYTGGSKTIF

SEQ ID NO: 590828 - protein, 15 aa, Homo sapiens
  CDR3 for beta chain variable domain of TCR clone 295414 (TRBV11-2, TRBJ2-1)
CASSPAGQSLNEQFF

SEQ ID NO: 590829 - protein, 14 aa, Homo sapiens
  CDR3 for alpha chain variable domain of TCR clone 295415 (TRAV1-2, TRAJ33)
CAVRAPDSNYQLIW

SEQ ID NO: 590830 - protein, 14 aa, Homo sapiens
  CDR3 for beta chain variable domain of TCR clone 295415 (TRBV7-8, TRBJ2-7)
CASSQTQGADEQYF

SEQ ID NO: 590831 - protein, 15 aa, Homo sapiens
  CDR3 for alpha chain variable domain of TCR clone 295416 (TRAV12-1, TRAJ44)
CVADLPTGTASKLTF

SEQ ID NO: 590832 - protein, 14 aa, Homo sapiens
  CDR3 for beta chain variable domain of TCR clone 295416 (TRBV12-5, TRBJ2-5)
CASGSRTHQETQYF

SEQ ID NO: 590833 - protein, 13 aa, Homo sapiens
  CDR3 for alpha chain variable domain of TCR clone 295417 (TRAV2, TRAJ9)
CAVSGTGGFKTIF

SEQ ID NO: 590834 - protein, 14 aa, Homo sapiens
  CDR3 for beta chain variable domain of TCR clone 295417 (TRBV5-4, TRBJ1-2)
CASTRQTDNYGYTF

SEQ ID NO: 590835 - protein, 15 aa, Homo sapiens
  CDR3 for alpha chain variable domain of TCR clone 295418 (TRAV34, TRAJ38)
CGADFSPGNNRKLIW

SEQ ID NO: 590836 - protein, 16 aa, Homo sapiens
  CDR3 for beta chain variable domain of TCR clone 295418 (TRBV12-5, TRBJ2-5)
CASGPRTSGNQETQYF

SEQ ID NO: 590837 - protein, 14 aa, Homo sapiens
  CDR3 for alpha chain variable domain of TCR clone 295419 (TRAV12-2, TRAJ48)
CAVNAFFGNEKLTF

SEQ ID NO: 590838 - protein, 13 aa, Homo sapiens
  CDR3 for beta chain variable domain of TCR clone 295419 (TRBV28, TRBJ2-7)
CAEAQQGLDEQYF

SEQ ID NO: 590839 - protein, 12 aa, Homo sapiens
  CDR3 for alpha chain variable domain of TCR clone 295420 (TRAV21, TRAJ11)
CAATSGYSTLTF

SEQ ID NO: 590840 - protein, 12 aa, Homo sapiens
  CDR3 for beta chain variable domain of TCR clone 295420 (TRBV12-4, TRBJ2-1)
CASSLQGSEQFF

SEQ ID NO: 590841 - protein, 14 aa, Homo sapiens
  CDR3 for alpha chain variable domain of TCR clone 295421 (TRAV12-1, TRAJ17)
CVVNYTAAGNKPTF

SEQ ID NO: 590842 - protein, 17 aa, Homo sapiens
  CDR3 for beta chain variable domain of TCR clone 295421 (TRBV20-1, TRBJ2-1)
CSASSSGLAGSYNEQFF

SEQ ID NO: 590843 - protein, 13 aa, Homo sapiens
  CDR3 for alpha chain variable domain of TCR clone 295422 (TRAV12-3, TRAJ7)
CAMSASGNHRLAF

SEQ ID NO: 590844 - protein, 14 aa, Homo sapiens
  CDR3 for beta chain variable domain of TCR clone 295422 (TRBV13, TRBJ2-5)
CASSLGPRGETQYF

SEQ ID NO: 590845 - protein, 14 aa, Homo sapiens
  CDR3 for alpha chain variable domain of TCR clone 295423 (TRAV29/DV5, TRAJ36)
CAARRKTGANNTFF

SEQ ID NO: 590846 - protein, 12 aa, Homo sapiens
  CDR3 for beta chain variable domain of TCR clone 295423 (TRBV14, TRBJ2-5)
CASSQLKETQYF

SEQ ID NO: 590847 - protein, 16 aa, Homo sapiens
  CDR3 for alpha chain variable domain of TCR clone 295424 (TRAV30, TRAJ24)
CGTEIVDADSWGNFQF

SEQ ID NO: 590848 - protein, 17 aa, Homo sapiens
  CDR3 for beta chain variable domain of TCR clone 295424 (TRBV13, TRBJ2-3)
CASSLSRVAGGRNTQYF

SEQ ID NO: 590849 - protein, 16 aa, Homo sapiens
  CDR3 for alpha chain variable domain of TCR clone 295425 (TRAV26-1, TRAJ47)
CIVGVVLSQYGNKLVF

SEQ ID NO: 590850 - protein, 16 aa, Homo sapiens
  CDR3 for beta chain variable domain of TCR clone 295425 (TRBV5-1, TRBJ2-1)
CASSFGVSGSYNEQFF

SEQ ID NO: 590851 - protein, 19 aa, Homo sapiens
  CDR3 for alpha chain variable domain of TCR clone 295426 (TRAV26-1, TRAJ28)
CIVRVAHAYSGAGSYQPTF

SEQ ID NO: 590852 - protein, 15 aa, Homo sapiens
  CDR3 for beta chain variable domain of TCR clone 295426 (TRBV5-1, TRBJ1-3)
CASSSKTGAGNTIYF

SEQ ID NO: 590853 - protein, 17 aa, Homo sapiens
  CDR3 for alpha chain variable domain of TCR clone 295427 (TRAV8-6, TRAJ58)
FAVSSWVGETSGPRLTF

SEQ ID NO: 590854 - protein, 14 aa, Homo sapiens
  CDR3 for beta chain variable domain of TCR clone 295427 (TRBV4-2, TRBJ2-1)
CASGLDRAYNEQFF

SEQ ID NO: 590855 - protein, 13 aa, Homo sapiens
  CDR3 for alpha chain variable domain of TCR clone 295428 (TRAV27, TRAJ49)
CAPRPYTGNQFYF

SEQ ID NO: 590856 - protein, 16 aa, Homo sapiens
  CDR3 for beta chain variable domain of TCR clone 295428 (TRBV4-1, TRBJ1-2)
CASSQDAGRVLYGYTF

SEQ ID NO: 590857 - protein, 14 aa, Homo sapiens
  CDR3 for alpha chain variable domain of TCR clone 295429 (TRAV17, TRAJ6)
CATDERRGSYIPTF

SEQ ID NO: 590858 - protein, 13 aa, Homo sapiens
  CDR3 for beta chain variable domain of TCR clone 295429 (TRBV27, TRBJ2-1)
CASSVGRIWGQFF

SEQ ID NO: 590859 - protein, 14 aa, Homo sapiens
  CDR3 for alpha chain variable domain of TCR clone 295430 (TRAV26-1, TRAJ34)
CIVRVAYNTAKLIF

SEQ ID NO: 590860 - protein, 12 aa, Homo sapiens
  CDR3 for beta chain variable domain of TCR clone 295430 (TRBV5-1, TRBJ2-5)
CASSLGLETQYF

SEQ ID NO: 590861 - protein, 16 aa, Homo sapiens
  CDR3 for alpha chain variable domain of TCR clone 295431 (TRAV26-1, TRAJ37)
CIVRGDGSGNTGKLIF

SEQ ID NO: 590862 - protein, 14 aa, Homo sapiens
  CDR3 for beta chain variable domain of TCR clone 295431 (TRBV12-4, TRBJ2-3)
CASSLGQGTDTQYF

SEQ ID NO: 590863 - protein, 13 aa, Homo sapiens
  CDR3 for alpha chain variable domain of TCR clone 295432 (TRAV36/DV7, TRAJ34)
CAVGEVNTDKLIF

SEQ ID NO: 590864 - protein, 13 aa, Homo sapiens
  CDR3 for beta chain variable domain of TCR clone 295432 (TRBV19, TRBJ1-2)
CASSVPGQDGYTF

SEQ ID NO: 590865 - protein, 14 aa, Homo sapiens
  CDR3 for alpha chain variable domain of TCR clone 295433 (TRAV2, TRAJ9)
CAVEDRSGGFKTIF

SEQ ID NO: 590866 - protein, 18 aa, Homo sapiens
  CDR3 for beta chain variable domain of TCR clone 295433 (TRBV20-1, TRBJ2-5)
CSQTVDSGRLGGKETQYF

SEQ ID NO: 590867 - protein, 15 aa, Homo sapiens
  CDR3 for alpha chain variable domain of TCR clone 295434 (TRAV26-1, TRAJ40)
CIVRAVPSGTSKYIF

SEQ ID NO: 590868 - protein, 14 aa, Homo sapiens
  CDR3 for beta chain variable domain of TCR clone 295434 (TRBV19, TRBJ2-1)
CASKDPGLANEQFF

SEQ ID NO: 590869 - protein, 11 aa, Homo sapiens
  CDR3 for alpha chain variable domain of TCR clone 295435 (TRAV27, TRAJ20)
CAGLNDYKLSF

SEQ ID NO: 590870 - protein, 14 aa, Homo sapiens
  CDR3 for beta chain variable domain of TCR clone 295435 (TRBV6-1, TRBJ1-3)
CASVQGGGGNTIYF

SEQ ID NO: 590871 - protein, 15 aa, Homo sapiens
  CDR3 for alpha chain variable domain of TCR clone 295436 (TRAV12-1, TRAJ45)
CVVLSGGGGADGLTF

SEQ ID NO: 590872 - protein, 15 aa, Homo sapiens
  CDR3 for beta chain variable domain of TCR clone 295436 (TRBV7-9, TRBJ1-4)
CASSARTGGNEKLFF

SEQ ID NO: 590873 - protein, 16 aa, Homo sapiens
  CDR3 for alpha chain variable domain of TCR clone 295437 (TRAV35, TRAJ37)
CWAFLRGSSHTGKLIF

SEQ ID NO: 590874 - protein, 13 aa, Homo sapiens
  CDR3 for beta chain variable domain of TCR clone 295437 (TRBV2, TRBJ1-2)
CASSVRGNYGYTF

SEQ ID NO: 590875 - protein, 12 aa, Homo sapiens
  CDR3 for alpha chain variable domain of TCR clone 295438 (TRAV21, TRAJ49)
CAVNDGGNQFYF

SEQ ID NO: 590876 - protein, 14 aa, Homo sapiens
  CDR3 for beta chain variable domain of TCR clone 295438 (TRBV18, TRBJ2-7)
CSSSPRGGSYEQYF

SEQ ID NO: 590877 - protein, 13 aa, Homo sapiens
  CDR3 for alpha chain variable domain of TCR clone 295439 (TRAV21, TRAJ27)
CAARPGKAGKSTF

SEQ ID NO: 590878 - protein, 14 aa, Homo sapiens
  CDR3 for beta chain variable domain of TCR clone 295439 (TRBV20-1, TRBJ2-3)
CRAYSGGRTDTQYF

SEQ ID NO: 590879 - protein, 13 aa, Homo sapiens
  CDR3 for alpha chain variable domain of TCR clone 295440 (TRAV2, TRAJ23)
CAVMGNQGGKLIF

SEQ ID NO: 590880 - protein, 15 aa, Homo sapiens
  CDR3 for beta chain variable domain of TCR clone 295440 (TRBV11-2, TRBJ2-1)
CASSSSTIAYNEQFF

SEQ ID NO: 590881 - protein, 10 aa, Homo sapiens
  CDR3 for alpha chain variable domain of TCR clone 295441 (TRAV13-1, TRAJ8)
CAAPFQKLVF

SEQ ID NO: 590882 - protein, 20 aa, Homo sapiens
  CDR3 for beta chain variable domain of TCR clone 295441 (TRBV3-1, TRBJ2-6)
CANSSRPGREGGGGANDLTF

SEQ ID NO: 590883 - protein, 19 aa, Homo sapiens
  CDR3 for alpha chain variable domain of TCR clone 295442 (TRAV1-2, TRAJ26)
CLLPLCCERPDNYGQNFVF

SEQ ID NO: 590884 - protein, 12 aa, Homo sapiens
  CDR3 for beta chain variable domain of TCR clone 295442 (TRBV20-1, TRBJ2-1)
CSARLGTDEQFF

SEQ ID NO: 590885 - protein, 15 aa, Homo sapiens
  CDR3 for alpha chain variable domain of TCR clone 295443 (TRAV17, TRAJ45)
TSVLRTGGGADGLTF

SEQ ID NO: 590886 - protein, 14 aa, Homo sapiens
  CDR3 for beta chain variable domain of TCR clone 295443 (TRBV6-1, TRBJ1-3)
CASVQGGGGNTIYF

SEQ ID NO: 590887 - protein, 12 aa, Homo sapiens
  CDR3 for alpha chain variable domain of TCR clone 295444 (TRAV17, TRAJ30)
CVPERRDDKIIF

SEQ ID NO: 590888 - protein, 11 aa, Homo sapiens
  CDR3 for beta chain variable domain of TCR clone 295444 (TRBV20-1, TRBJ1-2)
CSAQGAGGYTF

SEQ ID NO: 590889 - protein, 11 aa, Homo sapiens
  CDR3 for alpha chain variable domain of TCR clone 295445 (TRAV26-1, TRAJ27)
CIDPNAGKSTF

SEQ ID NO: 590890 - protein, 18 aa, Homo sapiens
  CDR3 for beta chain variable domain of TCR clone 295445 (TRBV7-9, TRBJ2-6)
CASSFPGAGISGANVLSF

SEQ ID NO: 590891 - protein, 12 aa, Homo sapiens
  CDR3 for alpha chain variable domain of TCR clone 295446 (TRAV12-3, TRAJ17)
CAMTLTGNKLTF

SEQ ID NO: 590892 - protein, 11 aa, Homo sapiens
  CDR3 for beta chain variable domain of TCR clone 295446 (TRBV29-1, TRBJ2-5)
CREDRTGTQYF

SEQ ID NO: 590893 - protein, 15 aa, Homo sapiens
  CDR3 for alpha chain variable domain of TCR clone 295447 (TRAV3, TRAJ42)
CAVRGGTGSQGNLIF

SEQ ID NO: 590894 - protein, 14 aa, Homo sapiens
  CDR3 for beta chain variable domain of TCR clone 295447 (TRBV19, TRBJ1-2)
CAGSSLFARDVYTF

SEQ ID NO: 590895 - protein, 14 aa, Homo sapiens
  CDR3 for alpha chain variable domain of TCR clone 295448 (TRAV1-2, TRAJ16)
CAVNRFSDGEKLLF

SEQ ID NO: 590896 - protein, 17 aa, Homo sapiens
  CDR3 for beta chain variable domain of TCR clone 295448 (TRBV20-1, TRBJ2-2)
CSASGSGQGGLTGELFF

SEQ ID NO: 590897 - protein, 14 aa, Homo sapiens
  CDR3 for alpha chain variable domain of TCR clone 295449 (TRAV22, TRAJ6)
CAGVGPGGSYIPTF

SEQ ID NO: 590898 - protein, 14 aa, Homo sapiens
  CDR3 for beta chain variable domain of TCR clone 295449 (TRBV25-1, TRBJ1-1)
CASTHLGGNTEAFF

SEQ ID NO: 590899 - protein, 13 aa, Homo sapiens
  CDR3 for alpha chain variable domain of TCR clone 295450 (TRAV27, TRAJ6)
CAGGIRGSYIPTF

SEQ ID NO: 590900 - protein, 15 aa, Homo sapiens
  CDR3 for beta chain variable domain of TCR clone 295450 (TRBV11-2, TRBJ1-3)
CASSLSPLVRDTIYF

SEQ ID NO: 590901 - protein, 13 aa, Homo sapiens
  CDR3 for alpha chain variable domain of TCR clone 295451 (TRAV20, TRAJ35)
CAVQEGFGHVPHC

SEQ ID NO: 590902 - protein, 14 aa, Homo sapiens
  CDR3 for beta chain variable domain of TCR clone 295451 (TRBV5-1, TRBJ1-1)
CASSSATGGTEAFF

SEQ ID NO: 590903 - protein, 13 aa, Homo sapiens
  CDR3 for alpha chain variable domain of TCR clone 295452 (TRAV21, TRAJ47)
CAVSGLYGNKLVF

SEQ ID NO: 590904 - protein, 17 aa, Homo sapiens
  CDR3 for beta chain variable domain of TCR clone 295452 (TRBV15, TRBJ2-3)
CATSGATSEEGTDTQYF

SEQ ID NO: 590905 - protein, 13 aa, Homo sapiens
  CDR3 for alpha chain variable domain of TCR clone 295453 (TRAV16, TRAJ7)
CAPLLGGNNRLAF

SEQ ID NO: 590906 - protein, 13 aa, Homo sapiens
  CDR3 for beta chain variable domain of TCR clone 295453 (TRBV2, TRBJ1-1)
CASSEGGNTEAFF

SEQ ID NO: 590907 - protein, 14 aa, Homo sapiens
  CDR3 for alpha chain variable domain of TCR clone 295454 (TRAV29/DV5, TRAJ44)
CAASATGTASKLTF

SEQ ID NO: 590908 - protein, 20 aa, Homo sapiens
  CDR3 for beta chain variable domain of TCR clone 295454 (TRBV7-8, TRBJ2-2)
CASSHLFPGPTIHITGELFF

SEQ ID NO: 590909 - protein, 17 aa, Homo sapiens
  CDR3 for alpha chain variable domain of TCR clone 295455 (TRAV16, TRAJ58)
CITVLSNGETSGFRLTF

SEQ ID NO: 590910 - protein, 13 aa, Homo sapiens
  CDR3 for beta chain variable domain of TCR clone 295455 (TRBV20-1, TRBJ2-2)
CSASAAGTGELFF

SEQ ID NO: 590911 - protein, 10 aa, Homo sapiens
  CDR3 for alpha chain variable domain of TCR clone 295456 (TRAV17, TRAJ36)
CATVAGNLFF

SEQ ID NO: 590912 - protein, 13 aa, Homo sapiens
  CDR3 for beta chain variable domain of TCR clone 295456 (TRBV4-1, TRBJ2-7)
CASSQGQAYEQYF

SEQ ID NO: 590913 - protein, 17 aa, Homo sapiens
  CDR3 for alpha chain variable domain of TCR clone 295457 (TRAV1-1, TRAJ10)
EASNTVILTGGGNKLTF

SEQ ID NO: 590914 - protein, 13 aa, Homo sapiens
  CDR3 for beta chain variable domain of TCR clone 295457 (TRBV7-9, TRBJ1-2)
CASSLKQNYGYTF

SEQ ID NO: 590915 - protein, 11 aa, Homo sapiens
  CDR3 for alpha chain variable domain of TCR clone 295458 (TRAV17, TRAJ9)
CATTGGFKTIF

SEQ ID NO: 590916 - protein, 14 aa, Homo sapiens
  CDR3 for beta chain variable domain of TCR clone 295458 (TRBV7-9, TRBJ2-2)
CASSGTADTGELFF

SEQ ID NO: 590917 - protein, 15 aa, Homo sapiens
  CDR3 for alpha chain variable domain of TCR clone 295459 (TRAV26-1, TRAJ44)
CIVRIGTGTASRLTF

SEQ ID NO: 590918 - protein, 15 aa, Homo sapiens
  CDR3 for beta chain variable domain of TCR clone 295459 (TRBV7-6, TRBJ2-1)
CASSSLAGEGNEQFF

SEQ ID NO: 590919 - protein, 11 aa, Homo sapiens
  CDR3 for alpha chain variable domain of TCR clone 295460 (TRAV2, TRAJ13)
CASGGYQKVTL

SEQ ID NO: 590920 - protein, 11 aa, Homo sapiens
  CDR3 for beta chain variable domain of TCR clone 295460 (TRBV5-6, TRBJ2-5)
CASSLERTQYF

SEQ ID NO: 590921 - protein, 12 aa, Homo sapiens
  CDR3 for alpha chain variable domain of TCR clone 295461 (TRAV12-1, TRAJ40)
CVVYSGTYKYVF

SEQ ID NO: 590922 - protein, 18 aa, Homo sapiens
  CDR3 for beta chain variable domain of TCR clone 295461 (TRBV11-3, TRBJ2-3)
CASSLGGASRGAPNTQYF

SEQ ID NO: 590923 - protein, 14 aa, Homo sapiens
  CDR3 for alpha chain variable domain of TCR clone 295462 (TRAV13-2, TRAJ43)
CAEIPTYNNNYIRF

SEQ ID NO: 590924 - protein, 15 aa, Homo sapiens
  CDR3 for beta chain variable domain of TCR clone 295462 (TRBV7-9, TRBJ2-2)
CASGPLDTFPGELFF

SEQ ID NO: 590925 - protein, 14 aa, Homo sapiens
  CDR3 for alpha chain variable domain of TCR clone 295463 (TRAV12-3, TRAJ10)
SHLPLTGGGNKLTF

SEQ ID NO: 590926 - protein, 12 aa, Homo sapiens
  CDR3 for beta chain variable domain of TCR clone 295463 (TRBV18, TRBJ2-1)
CASSLQGNEQFF

SEQ ID NO: 590927 - protein, 10 aa, Homo sapiens
  CDR3 for alpha chain variable domain of TCR clone 295464 (TRAV8-1, TRAJ21)
CAVNGTKFDF

SEQ ID NO: 590928 - protein, 16 aa, Homo sapiens
  CDR3 for beta chain variable domain of TCR clone 295464 (TRBV7-2, TRBJ1-5)
CASSPWGPEGNQPQHF

SEQ ID NO: 590929 - protein, 12 aa, Homo sapiens
  CDR3 for alpha chain variable domain of TCR clone 295465 (TRAV17, TRAJ57)
CATDGGSEKLVF

SEQ ID NO: 590930 - protein, 13 aa, Homo sapiens
  CDR3 for beta chain variable domain of TCR clone 295465 (TRBV7-9, TRBJ2-7)
CACSVAGAYEQYF

SEQ ID NO: 590931 - protein, 19 aa, Homo sapiens
  CDR3 for alpha chain variable domain of TCR clone 295466 (TRAV2, TRAJ20)
ILQVREADAAVYRDCKLSF

SEQ ID NO: 590932 - protein, 15 aa, Homo sapiens
  CDR3 for beta chain variable domain of TCR clone 295466 (TRBV19, TRBJ2-2)
CASRQTGADTGELFF

SEQ ID NO: 590933 - protein, 12 aa, Homo sapiens
  CDR3 for alpha chain variable domain of TCR clone 295467 (TRAV29/DV5, TRAJ49)
CAATDTGNQFYF

SEQ ID NO: 590934 - protein, 12 aa, Homo sapiens
  CDR3 for beta chain variable domain of TCR clone 295467 (TRBV28, TRBJ2-3)
CASSLYRDTQYF

SEQ ID NO: 590935 - protein, 14 aa, Homo sapiens
  CDR3 for alpha chain variable domain of TCR clone 295468 (TRAV2, TRAJ9)
CAVEDRGGGFKTIF

SEQ ID NO: 590936 - protein, 15 aa, Homo sapiens
  CDR3 for beta chain variable domain of TCR clone 295468 (TRBV12-4, TRBJ2-5)
CASSLSGAFQETQYF

SEQ ID NO: 590937 - protein, 14 aa, Homo sapiens
  CDR3 for alpha chain variable domain of TCR clone 295469 (TRAV20, TRAJ56)
CAVQFGGANSKLTF

SEQ ID NO: 590938 - protein, 20 aa, Homo sapiens
  CDR3 for beta chain variable domain of TCR clone 295469 (TRBV19, TRBJ2-1)
CASSISRTVTSTRLNNEQFF

SEQ ID NO: 590939 - protein, 12 aa, Homo sapiens
  CDR3 for alpha chain variable domain of TCR clone 295470 (TRAV8-3, TRAJ20)
CAVDFNDYKLSF

SEQ ID NO: 590940 - protein, 13 aa, Homo sapiens
  CDR3 for beta chain variable domain of TCR clone 295470 (TRBV19, TRBJ2-7)
CASRKAGGSEQYF

SEQ ID NO: 590941 - protein, 17 aa, Homo sapiens
  CDR3 for alpha chain variable domain of TCR clone 295471 (TRAV26-1, TRAJ37)
CIVRVITVSSNTGKLIF

SEQ ID NO: 590942 - protein, 15 aa, Homo sapiens
  CDR3 for beta chain variable domain of TCR clone 295471 (TRBV11-2, TRBJ1-3)
CASGAHSSSGNTIYF

SEQ ID NO: 590943 - protein, 16 aa, Homo sapiens
  CDR3 for alpha chain variable domain of TCR clone 295472 (TRAV3, TRAJ10)
CAVRDMRAGGGNKLTF

SEQ ID NO: 590944 - protein, 15 aa, Homo sapiens
  CDR3 for beta chain variable domain of TCR clone 295472 (TRBV15, TRBJ1-5)
CATSTTGVVTQPQHF

SEQ ID NO: 590945 - protein, 15 aa, Homo sapiens
  CDR3 for alpha chain variable domain of TCR clone 295473 (TRAV3, TRAJ22)
CAVRDRGGSARQLTF

SEQ ID NO: 590946 - protein, 13 aa, Homo sapiens
  CDR3 for beta chain variable domain of TCR clone 295473 (TRBV7-3, TRBJ2-1)
CASSPVAYTEQFF

SEQ ID NO: 590947 - protein, 14 aa, Homo sapiens
  CDR3 for alpha chain variable domain of TCR clone 295474 (TRAV12-3, TRAJ10)
SHLSLTGGGNKLTF

SEQ ID NO: 590948 - protein, 12 aa, Homo sapiens
  CDR3 for beta chain variable domain of TCR clone 295474 (TRBV11-2, TRBJ2-2)
CASSLGGGELFF

SEQ ID NO: 590949 - protein, 15 aa, Homo sapiens
  CDR3 for alpha chain variable domain of TCR clone 295475 (TRAV1-2, TRAJ30)
CAVRPHGNRDDKIIF

SEQ ID NO: 590950 - protein, 13 aa, Homo sapiens
  CDR3 for beta chain variable domain of TCR clone 295475 (TRBV4-1, TRBJ2-7)
CASSKGQAYEQYF

SEQ ID NO: 590951 - protein, 16 aa, Homo sapiens
  CDR3 for alpha chain variable domain of TCR clone 295476 (TRAV30, TRAJ24)
CGTEIVDADSWGKFQF

SEQ ID NO: 590952 - protein, 16 aa, Homo sapiens
  CDR3 for beta chain variable domain of TCR clone 295476 (TRBV7-3, TRBJ2-2)
CASSLKRGTLSGELCF

SEQ ID NO: 590953 - protein, 16 aa, Homo sapiens
  CDR3 for alpha chain variable domain of TCR clone 295477 (TRAV3, TRAJ37)
CAVRGKGSGNTGKLIF

SEQ ID NO: 590954 - protein, 18 aa, Homo sapiens
  CDR3 for beta chain variable domain of TCR clone 295477 (TRBV4-1, TRBJ1-5)
CASSQDPRGQGLNQPQHF

SEQ ID NO: 590955 - protein, 13 aa, Homo sapiens
  CDR3 for alpha chain variable domain of TCR clone 295478 (TRAV27, TRAJ45)
CRSSGGGADGLTF

SEQ ID NO: 590956 - protein, 12 aa, Homo sapiens
  CDR3 for beta chain variable domain of TCR clone 295478 (TRBV12-4, TRBJ1-2)
CASSFIWLHLRF

SEQ ID NO: 590957 - protein, 10 aa, Homo sapiens
  CDR3 for alpha chain variable domain of TCR clone 295479 (TRAV38-2/DV8, TRAJ40)
CASGTYKYIF

SEQ ID NO: 590958 - protein, 14 aa, Homo sapiens
  CDR3 for beta chain variable domain of TCR clone 295479 (TRBV7-9, TRBJ2-1)
CASSPRDSLDEQFF

SEQ ID NO: 590959 - protein, 11 aa, Homo sapiens
  CDR3 for alpha chain variable domain of TCR clone 295480 (TRAV13-1, TRAJ41)
CDRVLRNALNF

SEQ ID NO: 590960 - protein, 14 aa, Homo sapiens
  CDR3 for beta chain variable domain of TCR clone 295480 (TRBV7-8, TRBJ2-1)
CATERERSYNEQFF

SEQ ID NO: 590961 - protein, 11 aa, Homo sapiens
  CDR3 for alpha chain variable domain of TCR clone 295481 (TRAV26-1, TRAJ37)
CIVRVGRKLIF

SEQ ID NO: 590962 - protein, 13 aa, Homo sapiens
  CDR3 for beta chain variable domain of TCR clone 295481 (TRBV14, TRBJ1-2)
CASSEDRHYGYTF

SEQ ID NO: 590963 - protein, 13 aa, Homo sapiens
  CDR3 for alpha chain variable domain of TCR clone 295482 (TRAV8-3, TRAJ43)
CAVGPDNKNDMRF

SEQ ID NO: 590964 - protein, 12 aa, Homo sapiens
  CDR3 for beta chain variable domain of TCR clone 295482 (TRBV7-2, TRBJ1-6)
CASSLSSSPLHF

SEQ ID NO: 590965 - protein, 14 aa, Homo sapiens
  CDR3 for alpha chain variable domain of TCR clone 295483 (TRAV17, TRAJ5)
CATVALTGRRAITF

SEQ ID NO: 590966 - protein, 14 aa, Homo sapiens
  CDR3 for beta chain variable domain of TCR clone 295483 (TRBV28, TRBJ2-7)
CASSPYGMAYEQYF

SEQ ID NO: 590967 - protein, 13 aa, Homo sapiens
  CDR3 for alpha chain variable domain of TCR clone 295484 (TRAV21, TRAJ20)
CAVGLRVDYKLSF

SEQ ID NO: 590968 - protein, 15 aa, Homo sapiens
  CDR3 for beta chain variable domain of TCR clone 295484 (TRBV20-1, TRBJ2-6)
CSAYGQVSGANVLTF

SEQ ID NO: 590969 - protein, 12 aa, Homo sapiens
  CDR3 for alpha chain variable domain of TCR clone 295485 (TRAV21, TRAJ27)
CAANTDAGKSTF

SEQ ID NO: 590970 - protein, 15 aa, Homo sapiens
  CDR3 for beta chain variable domain of TCR clone 295485 (TRBV29-1, TRBJ1-4)
CSVVGIGDINEKLFF

SEQ ID NO: 590971 - protein, 15 aa, Homo sapiens
  CDR3 for alpha chain variable domain of TCR clone 295486 (TRAV23/DV6, TRAJ28)
CAALLAYPGAGSYQL

SEQ ID NO: 590972 - protein, 13 aa, Homo sapiens
  CDR3 for beta chain variable domain of TCR clone 295486 (TRBV4-2, TRBJ2-3)
CASSQGNTDTQYF

SEQ ID NO: 590973 - protein, 16 aa, Homo sapiens
  CDR3 for alpha chain variable domain of TCR clone 295487 (TRAV3, TRAJ37)
CAVRPHGSGNTGKLIF

SEQ ID NO: 590974 - protein, 14 aa, Homo sapiens
  CDR3 for beta chain variable domain of TCR clone 295487 (TRBV7-8, TRBJ2-3)
CASSLEAGTDTQYF

SEQ ID NO: 590975 - protein, 14 aa, Homo sapiens
  CDR3 for alpha chain variable domain of TCR clone 295488 (TRAV12-2, TRAJ40)
CAVKIPSGPYNYIF

SEQ ID NO: 590976 - protein, 14 aa, Homo sapiens
  CDR3 for beta chain variable domain of TCR clone 295488 (TRBV20-1, TRBJ1-1)
CSAQTRIGGTEAFF

SEQ ID NO: 590977 - protein, 14 aa, Homo sapiens
  CDR3 for alpha chain variable domain of TCR clone 295489 (TRAV26-1, TRAJ45)
CIVRVVGGADGLTF

SEQ ID NO: 590978 - protein, 16 aa, Homo sapiens
  CDR3 for beta chain variable domain of TCR clone 295489 (TRBV7-9, TRBJ1-1)
CASSFTQVRSNTEAFF

SEQ ID NO: 590979 - protein, 14 aa, Homo sapiens
  CDR3 for alpha chain variable domain of TCR clone 295490 (TRAV1-2, TRAJ6)
CAVSLSGGSYIPTF

SEQ ID NO: 590980 - protein, 14 aa, Homo sapiens
  CDR3 for beta chain variable domain of TCR clone 295490 (TRBV6-1, TRBJ1-3)
CASVQGGGGNTIYF

SEQ ID NO: 590981 - protein, 13 aa, Homo sapiens
  CDR3 for alpha chain variable domain of TCR clone 295491 (TRAV5, TRAJ30)
CAEIANRDDKIIF

SEQ ID NO: 590982 - protein, 16 aa, Homo sapiens
  CDR3 for beta chain variable domain of TCR clone 295491 (TRBV7-3, TRBJ2-2)
CASSLKRGTLSGELFF

SEQ ID NO: 590983 - protein, 13 aa, Homo sapiens
  CDR3 for alpha chain variable domain of TCR clone 295492 (TRAV27, TRAJ53)
CAGQRGSNYKLTF

SEQ ID NO: 590984 - protein, 13 aa, Homo sapiens
  CDR3 for beta chain variable domain of TCR clone 295492 (TRBV29-1, TRBJ1-1)
CSVESGFGTEAFF

SEQ ID NO: 590985 - protein, 11 aa, Homo sapiens
  CDR3 for alpha chain variable domain of TCR clone 295493 (TRAV26-1, TRAJ37)
CIVRVGRKLIF

SEQ ID NO: 590986 - protein, 13 aa, Homo sapiens
  CDR3 for beta chain variable domain of TCR clone 295493 (TRBV14, TRBJ1-2)
CARSEDRRYGYAF

SEQ ID NO: 590987 - protein, 12 aa, Homo sapiens
  CDR3 for alpha chain variable domain of TCR clone 295494 (TRAV12-3, TRAJ20)
CAMVRGDYKLSF

SEQ ID NO: 590988 - protein, 15 aa, Homo sapiens
  CDR3 for beta chain variable domain of TCR clone 295494 (TRBV6-1, TRBJ2-1)
CASSELRGQYNEQFF

SEQ ID NO: 590989 - protein, 12 aa, Homo sapiens
  CDR3 for alpha chain variable domain of TCR clone 295495 (TRAV1-1, TRAJ24)
CAATDSWGKLQF

SEQ ID NO: 590990 - protein, 13 aa, Homo sapiens
  CDR3 for beta chain variable domain of TCR clone 295495 (TRBV7-9, TRBJ1-2)
CASSLKQNYGYTF

SEQ ID NO: 590991 - protein, 14 aa, Homo sapiens
  CDR3 for alpha chain variable domain of TCR clone 295496 (TRAV35, TRAJ50)
CAGHRKTSYDKVLF

SEQ ID NO: 590992 - protein, 13 aa, Homo sapiens
  CDR3 for beta chain variable domain of TCR clone 295496 (TRBV7-7, TRBJ2-3)
CASSLSRADTQDF

SEQ ID NO: 590993 - protein, 12 aa, Homo sapiens
  CDR3 for alpha chain variable domain of TCR clone 295497 (TRAV12-3, TRAJ17)
CAMTLTVNKLTF

SEQ ID NO: 590994 - protein, 14 aa, Homo sapiens
  CDR3 for beta chain variable domain of TCR clone 295497 (TRBV19, TRBJ2-1)
CASPTFVLSGEQFF

SEQ ID NO: 590995 - protein, 14 aa, Homo sapiens
  CDR3 for alpha chain variable domain of TCR clone 295498 (TRAV12-2, TRAJ17)
CAVLFKAAGNKLTF

SEQ ID NO: 590996 - protein, 17 aa, Homo sapiens
  CDR3 for beta chain variable domain of TCR clone 295498 (TRBV20-1, TRBJ2-2)
CSASGSGEGGLTGELFF

SEQ ID NO: 590997 - protein, 13 aa, Homo sapiens
  CDR3 for alpha chain variable domain of TCR clone 295499 (TRAV12-3, TRAJ4)
CNEQDGGYNKLIF

SEQ ID NO: 590998 - protein, 15 aa, Homo sapiens
  CDR3 for beta chain variable domain of TCR clone 295499 (TRBV5-1, TRBJ1-1)
CASSLSDLGGTEAFF

SEQ ID NO: 590999 - protein, 13 aa, Homo sapiens
  CDR3 for alpha chain variable domain of TCR clone 295500 (TRAV12-3, TRAJ9)
CAMRNTGVFKTIF

SEQ ID NO: 591000 - protein, 15 aa, Homo sapiens
  CDR3 for beta chain variable domain of TCR clone 295500 (TRBV20-1, TRBJ2-7)
CSARDRVSGMDEQYF

SEQ ID NO: 591001 - protein, 13 aa, Homo sapiens
  CDR3 for alpha chain variable domain of TCR clone 295501 (TRAV20, TRAJ6)
CAVSAGGSYIPTF

SEQ ID NO: 591002 - protein, 15 aa, Homo sapiens
  CDR3 for beta chain variable domain of TCR clone 295501 (TRBV7-3, TRBJ2-2)
CASSETGQGTGELFF

SEQ ID NO: 591003 - protein, 12 aa, Homo sapiens
  CDR3 for alpha chain variable domain of TCR clone 295502 (TRAV12-1, TRAJ23)
CVVNNQGGKLIF

SEQ ID NO: 591004 - protein, 16 aa, Homo sapiens
  CDR3 for beta chain variable domain of TCR clone 295502 (TRBV11-1, TRBJ2-7)
CASSAQTGTLSYEQYC

SEQ ID NO: 591005 - protein, 16 aa, Homo sapiens
  CDR3 for alpha chain variable domain of TCR clone 295503 (TRAV20, TRAJ22)
CAVQASSSGSARQLTF

SEQ ID NO: 591006 - protein, 16 aa, Homo sapiens
  CDR3 for beta chain variable domain of TCR clone 295503 (TRBV12-5, TRBJ2-5)
CASGPRTSGNQETQYF

SEQ ID NO: 591007 - protein, 14 aa, Homo sapiens
  CDR3 for alpha chain variable domain of TCR clone 295504 (TRAV29/DV5, TRAJ20)
CAASAPIEDYKLSF

SEQ ID NO: 591008 - protein, 13 aa, Homo sapiens
  CDR3 for beta chain variable domain of TCR clone 295504 (TRBV25-1, TRBJ2-5)
CASSESGRETQYF

SEQ ID NO: 591009 - protein, 14 aa, Homo sapiens
  CDR3 for alpha chain variable domain of TCR clone 295505 (TRAV1-2, TRAJ16)
CAVNRFSDGQKLLF

SEQ ID NO: 591010 - protein, 17 aa, Homo sapiens
  CDR3 for beta chain variable domain of TCR clone 295505 (TRBV28, TRBJ2-5)
CASSTPEGDGLQETQYF

SEQ ID NO: 591011 - protein, 15 aa, Homo sapiens
  CDR3 for alpha chain variable domain of TCR clone 295506 (TRAV25, TRAJ52)
CAGRPVGTSYGKLTF

SEQ ID NO: 591012 - protein, 17 aa, Homo sapiens
  CDR3 for beta chain variable domain of TCR clone 295506 (TRBV7-8, TRBJ2-6)
CASSAGTGGAGANVLIF

SEQ ID NO: 591013 - protein, 16 aa, Homo sapiens
  CDR3 for alpha chain variable domain of TCR clone 295507 (TRAV12-3, TRAJ53)
CAMSPGSGGSNYKLTF

SEQ ID NO: 591014 - protein, 20 aa, Homo sapiens
  CDR3 for beta chain variable domain of TCR clone 295507 (TRBV7-8, TRBJ2-2)
CASSHLFPGTTIHITGELFF

SEQ ID NO: 591015 - protein, 14 aa, Homo sapiens
  CDR3 for alpha chain variable domain of TCR clone 295508 (TRAV1-2, TRAJ16)
CAVNRFSDGQKLLL

SEQ ID NO: 591016 - protein, 14 aa, Homo sapiens
  CDR3 for beta chain variable domain of TCR clone 295508 (TRBV7-2, TRBJ2-1)
CASSLGVGYNEQFF

SEQ ID NO: 591017 - protein, 14 aa, Homo sapiens
  CDR3 for alpha chain variable domain of TCR clone 295509 (TRAV12-2, TRAJ45)
CAVNKGGGADGLTF

SEQ ID NO: 591018 - protein, 14 aa, Homo sapiens
  CDR3 for beta chain variable domain of TCR clone 295509 (TRBV7-9, TRBJ2-4)
CASSLAMGGNIQYF

SEQ ID NO: 591019 - protein, 13 aa, Homo sapiens
  CDR3 for alpha chain variable domain of TCR clone 295510 (TRAV3, TRAJ4)
CAVRDGCYNKLIF

SEQ ID NO: 591020 - protein, 14 aa, Homo sapiens
  CDR3 for beta chain variable domain of TCR clone 295510 (TRBV12-4, TRBJ1-2)
CASSSSAAGSSYSF

SEQ ID NO: 591021 - protein, 14 aa, Homo sapiens
  CDR3 for alpha chain variable domain of TCR clone 295511 (TRAV34, TRAJ44)
CGADGTGTASKLTF

SEQ ID NO: 591022 - protein, 15 aa, Homo sapiens
  CDR3 for beta chain variable domain of TCR clone 295511 (TRBV5-1, TRBJ2-1)
GAGSPPRAPYNEQFF

SEQ ID NO: 591023 - protein, 15 aa, Homo sapiens
  CDR3 for alpha chain variable domain of TCR clone 295512 (TRAV21, TRAJ45)
CAVSYSGGGADGLTF

SEQ ID NO: 591024 - protein, 15 aa, Homo sapiens
  CDR3 for beta chain variable domain of TCR clone 295512 (TRBV4-1, TRBJ1-4)
CASSLATATNEKLFF

SEQ ID NO: 591025 - protein, 13 aa, Homo sapiens
  CDR3 for alpha chain variable domain of TCR clone 295513 (TRAV3, TRAJ21)
CAVATSTNFTLDL

SEQ ID NO: 591026 - protein, 16 aa, Homo sapiens
  CDR3 for beta chain variable domain of TCR clone 295513 (TRBV19, TRBJ2-1)
CASSNAGPSSYNEQFF

SEQ ID NO: 591027 - protein, 16 aa, Homo sapiens
  CDR3 for alpha chain variable domain of TCR clone 295514 (TRAV3, TRAJ18)
CAVRDGRGSTLGRLYF

SEQ ID NO: 591028 - protein, 14 aa, Homo sapiens
  CDR3 for beta chain variable domain of TCR clone 295514 (TRBV7-6, TRBJ2-3)
CASSLGTVTDTQYF

SEQ ID NO: 591029 - protein, 14 aa, Homo sapiens
  CDR3 for alpha chain variable domain of TCR clone 295515 (TRAV12-1, TRAJ42)
CVVSYGGSQGNLIF

SEQ ID NO: 591030 - protein, 17 aa, Homo sapiens
  CDR3 for beta chain variable domain of TCR clone 295515 (TRBV3-1, TRBJ2-6)
CASSPNTGPAGANVLTF

SEQ ID NO: 591031 - protein, 10 aa, Homo sapiens
  CDR3 for alpha chain variable domain of TCR clone 295516 (TRAV8-4, TRAJ43)
CAVSADGMRF

SEQ ID NO: 591032 - protein, 13 aa, Homo sapiens
  CDR3 for beta chain variable domain of TCR clone 295516 (TRBV10-3, TRBJ2-7)
CASKLAVNYEQYF

SEQ ID NO: 591033 - protein, 14 aa, Homo sapiens
  CDR3 for alpha chain variable domain of TCR clone 295517 (TRAV8-1, TRAJ9)
CAVNAWTGGFKTIF

SEQ ID NO: 591034 - protein, 15 aa, Homo sapiens
  CDR3 for beta chain variable domain of TCR clone 295517 (TRBV7-3, TRBJ2-2)
CASSLEVLPTGELFF

SEQ ID NO: 591035 - protein, 18 aa, Homo sapiens
  CDR3 for alpha chain variable domain of TCR clone 295518 (TRAV21, TRAJ52)
CAVRPSPSGGTSYGKLTF

SEQ ID NO: 591036 - protein, 13 aa, Homo sapiens
  CDR3 for beta chain variable domain of TCR clone 295518 (TRBV20-1, TRBJ1-1)
CSARVGGNTEAFF

SEQ ID NO: 591037 - protein, 15 aa, Homo sapiens
  CDR3 for alpha chain variable domain of TCR clone 295519 (TRAV20, TRAJ43)
CAVQAGKSSNNDMRF

SEQ ID NO: 591038 - protein, 14 aa, Homo sapiens
  CDR3 for beta chain variable domain of TCR clone 295519 (TRBV27, TRBJ2-1)
CASRHLGGGKERFF

SEQ ID NO: 591039 - protein, 15 aa, Homo sapiens
  CDR3 for alpha chain variable domain of TCR clone 295520 (TRAV38-1, TRAJ57)
CAFMDSQGGSEKLVF

SEQ ID NO: 591040 - protein, 13 aa, Homo sapiens
  CDR3 for beta chain variable domain of TCR clone 295520 (TRBV7-2, TRBJ2-4)
CASSREHANIQYF

SEQ ID NO: 591041 - protein, 15 aa, Homo sapiens
  CDR3 for alpha chain variable domain of TCR clone 295521 (TRAV3, TRAJ5)
CAVSDSKTGRRALTF

SEQ ID NO: 591042 - protein, 15 aa, Homo sapiens
  CDR3 for beta chain variable domain of TCR clone 295521 (TRBV7-8, TRBJ2-1)
CASSLADSLYNEQFF

SEQ ID NO: 591043 - protein, 12 aa, Homo sapiens
  CDR3 for alpha chain variable domain of TCR clone 295522 (TRAV38-1, TRAJ20)
CAFIWNDYKLSF

SEQ ID NO: 591044 - protein, 15 aa, Homo sapiens
  CDR3 for beta chain variable domain of TCR clone 295522 (TRBV18, TRBJ1-1)
CASSPRQGENTEAFF

SEQ ID NO: 591045 - protein, 17 aa, Homo sapiens
  CDR3 for alpha chain variable domain of TCR clone 295523 (TRAV3, TRAJ12)
CAVRDGGRMDSSYTLIF

SEQ ID NO: 591046 - protein, 14 aa, Homo sapiens
  CDR3 for beta chain variable domain of TCR clone 295523 (TRBV7-9, TRBJ1-2)
CASSRQGANYGYTF

SEQ ID NO: 591047 - protein, 14 aa, Homo sapiens
  CDR3 for alpha chain variable domain of TCR clone 295524 (TRAV1-2, TRAJ8)
CAVREDTAFQKLVF

SEQ ID NO: 591048 - protein, 12 aa, Homo sapiens
  CDR3 for beta chain variable domain of TCR clone 295524 (TRBV11-2, TRBJ2-2)
CASSLPTGELFF

SEQ ID NO: 591049 - protein, 14 aa, Homo sapiens
  CDR3 for alpha chain variable domain of TCR clone 295525 (TRAV1-2, TRAJ8)
CAVREDTGFQKLVF

SEQ ID NO: 591050 - protein, 16 aa, Homo sapiens
  CDR3 for beta chain variable domain of TCR clone 295525 (TRBV5-7, TRBJ2-7)
CASSSPGGRTPYEQYF

SEQ ID NO: 591051 - protein, 13 aa, Homo sapiens
  CDR3 for alpha chain variable domain of TCR clone 295526 (TRAV12-1, TRAJ15)
CVAPNQAGTALIF

SEQ ID NO: 591052 - protein, 12 aa, Homo sapiens
  CDR3 for beta chain variable domain of TCR clone 295526 (TRBV20-1, TRBJ2-2)
CSARARPGELFF

SEQ ID NO: 591053 - protein, 10 aa, Homo sapiens
  CDR3 for alpha chain variable domain of TCR clone 295527 (TRAV16, TRAJ22)
SAMYLRQLTF

SEQ ID NO: 591054 - protein, 16 aa, Homo sapiens
  CDR3 for beta chain variable domain of TCR clone 295527 (TRBV15, TRBJ1-2)
CATSRGPRTGGGGYTF

SEQ ID NO: 591055 - protein, 14 aa, Homo sapiens
  CDR3 for alpha chain variable domain of TCR clone 295528 (TRAV12-1, TRAJ30)
CVVNIGGRDDKIIL

SEQ ID NO: 591056 - protein, 13 aa, Homo sapiens
  CDR3 for beta chain variable domain of TCR clone 295528 (TRBV29-1, TRBJ1-1)
CSVGDSRNTEAFF

SEQ ID NO: 591057 - protein, 12 aa, Homo sapiens
  CDR3 for alpha chain variable domain of TCR clone 295529 (TRAV12-3, TRAJ5)
CAMGTGRRVLTF

SEQ ID NO: 591058 - protein, 14 aa, Homo sapiens
  CDR3 for beta chain variable domain of TCR clone 295529 (TRBV7-2, TRBJ2-7)
CASSPKTSFYEQYF

SEQ ID NO: 591059 - protein, 12 aa, Homo sapiens
  CDR3 for alpha chain variable domain of TCR clone 295530 (TRAV26-2, TRAJ21)
CILKGNFNKFYF

SEQ ID NO: 591060 - protein, 14 aa, Homo sapiens
  CDR3 for beta chain variable domain of TCR clone 295530 (TRBV7-9, TRBJ1-1)
SASTPLQSYTEAFF

SEQ ID NO: 591061 - protein, 13 aa, Homo sapiens
  CDR3 for alpha chain variable domain of TCR clone 295531 (TRAV13-1, TRAJ9)
CAASGTGGFKTIF

SEQ ID NO: 591062 - protein, 13 aa, Homo sapiens
  CDR3 for beta chain variable domain of TCR clone 295531 (TRBV4-2, TRBJ1-1)
CASSQAGNTEAFF

SEQ ID NO: 591063 - protein, 14 aa, Homo sapiens
  CDR3 for alpha chain variable domain of TCR clone 295532 (TRAV12-3, TRAJ9)
CAMSPNTGGFKTIF

SEQ ID NO: 591064 - protein, 12 aa, Homo sapiens
  CDR3 for beta chain variable domain of TCR clone 295532 (TRBV19, TRBJ1-5)
CASSIAQQLQHF

SEQ ID NO: 591065 - protein, 17 aa, Homo sapiens
  CDR3 for alpha chain variable domain of TCR clone 295533 (TRAV8-1, TRAJ43)
CAVTNDMRFGAGTRLTV

SEQ ID NO: 591066 - protein, 16 aa, Homo sapiens
  CDR3 for beta chain variable domain of TCR clone 295533 (TRBV4-2, TRBJ2-7)
CASSQDGVERGYEQYF

SEQ ID NO: 591067 - protein, 14 aa, Homo sapiens
  CDR3 for alpha chain variable domain of TCR clone 295534 (TRAV14/DV4, TRAJ15)
CAMRRDQAGTALIF

SEQ ID NO: 591068 - protein, 11 aa, Homo sapiens
  CDR3 for beta chain variable domain of TCR clone 295534 (TRBV7-2, TRBJ2-7)
RASSSGLWQYF

SEQ ID NO: 591069 - protein, 11 aa, Homo sapiens
  CDR3 for alpha chain variable domain of TCR clone 295535 (TRAV12-1, TRAJ21)
CVVNNFNKFYF

SEQ ID NO: 591070 - protein, 11 aa, Homo sapiens
  CDR3 for beta chain variable domain of TCR clone 295535 (TRBV11-2, TRBJ2-2)
CASSLPGELFF

SEQ ID NO: 591071 - protein, 14 aa, Homo sapiens
  CDR3 for alpha chain variable domain of TCR clone 295536 (TRAV12-3, TRAJ10)
SHLPLTGGGDKLTF

SEQ ID NO: 591072 - protein, 15 aa, Homo sapiens
  CDR3 for beta chain variable domain of TCR clone 295536 (TRBV10-3, TRBJ1-3)
CAISDSQGAGNTIYF

SEQ ID NO: 591073 - protein, 16 aa, Homo sapiens
  CDR3 for alpha chain variable domain of TCR clone 295537 (TRAV2, TRAJ22)
LQVWEADAAEQRQLTF

SEQ ID NO: 591074 - protein, 16 aa, Homo sapiens
  CDR3 for beta chain variable domain of TCR clone 295537 (TRBV2, TRBJ2-5)
CASSETQGLGEETHYF

SEQ ID NO: 591075 - protein, 14 aa, Homo sapiens
  CDR3 for alpha chain variable domain of TCR clone 295538 (TRAV9-2, TRAJ38)
CALSRAGNNRKLIW

SEQ ID NO: 591076 - protein, 13 aa, Homo sapiens
  CDR3 for beta chain variable domain of TCR clone 295538 (TRBV7-9, TRBJ1-2)
CASSLKQNYGYTF

SEQ ID NO: 591077 - protein, 13 aa, Homo sapiens
  CDR3 for alpha chain variable domain of TCR clone 295539 (TRAV2, TRAJ40)
CAVVTSGTYKYIF

SEQ ID NO: 591078 - protein, 12 aa, Homo sapiens
  CDR3 for beta chain variable domain of TCR clone 295539 (TRBV7-9, TRBJ2-1)
CASSMQDTEQFF

SEQ ID NO: 591079 - protein, 12 aa, Homo sapiens
  CDR3 for alpha chain variable domain of TCR clone 295540 (TRAV26-1, TRAJ17)
CIVRSAGNKLTF

SEQ ID NO: 591080 - protein, 15 aa, Homo sapiens
  CDR3 for beta chain variable domain of TCR clone 295540 (TRBV9, TRBJ1-6)
CASSVAGTGDSPLHF

SEQ ID NO: 591081 - protein, 14 aa, Homo sapiens
  CDR3 for alpha chain variable domain of TCR clone 295541 (TRAV1-2, TRAJ8)
CAVREDTGFQKLVF

SEQ ID NO: 591082 - protein, 13 aa, Homo sapiens
  CDR3 for beta chain variable domain of TCR clone 295541 (TRBV7-2, TRBJ1-2)
CASSPAGGEGYTF

SEQ ID NO: 591083 - protein, 13 aa, Homo sapiens
  CDR3 for alpha chain variable domain of TCR clone 295542 (TRAV8-3, TRAJ28)
CAVGAVGSYQLTF

SEQ ID NO: 591084 - protein, 16 aa, Homo sapiens
  CDR3 for beta chain variable domain of TCR clone 295542 (TRBV11-2, TRBJ2-3)
CASSSRTSGGAGTQYF

SEQ ID NO: 591085 - protein, 17 aa, Homo sapiens
  CDR3 for alpha chain variable domain of TCR clone 295543 (TRAV23/DV6, TRAJ57)
CAASSTLSQGGSEKLCF

SEQ ID NO: 591086 - protein, 14 aa, Homo sapiens
  CDR3 for beta chain variable domain of TCR clone 295543 (TRBV25-1, TRBJ1-1)
CASTHLGGNTEAFF

SEQ ID NO: 591087 - protein, 16 aa, Homo sapiens
  CDR3 for alpha chain variable domain of TCR clone 295544 (TRAV3, TRAJ37)
CAVRGKGSGNTGKLIF

SEQ ID NO: 591088 - protein, 16 aa, Homo sapiens
  CDR3 for beta chain variable domain of TCR clone 295544 (TRBV7-9, TRBJ2-1)
CASSSLRQPDYNEQFF

SEQ ID NO: 591089 - protein, 11 aa, Homo sapiens
  CDR3 for alpha chain variable domain of TCR clone 295545 (TRAV17, TRAJ9)
CATTGGFKTIF

SEQ ID NO: 591090 - protein, 19 aa, Homo sapiens
  CDR3 for beta chain variable domain of TCR clone 295545 (TRBV6-5, TRBJ1-1)
CTSGPAVTSGTAPVGEAFF

SEQ ID NO: 591091 - protein, 14 aa, Homo sapiens
  CDR3 for alpha chain variable domain of TCR clone 295546 (TRAV21, TRAJ45)
CAVSSGGGADGLTF

SEQ ID NO: 591092 - protein, 15 aa, Homo sapiens
  CDR3 for beta chain variable domain of TCR clone 295546 (TRBV6-1, TRBJ2-4)
CPSSEAVWTINIQYF

SEQ ID NO: 591093 - protein, 15 aa, Homo sapiens
  CDR3 for alpha chain variable domain of TCR clone 295547 (TRAV8-2, TRAJ16)
CVVSDGVSDGEKRLF

SEQ ID NO: 591094 - protein, 15 aa, Homo sapiens
  CDR3 for beta chain variable domain of TCR clone 295547 (TRBV12-4, TRBJ2-5)
CASSPPTGLQETQYF

SEQ ID NO: 591095 - protein, 14 aa, Homo sapiens
  CDR3 for alpha chain variable domain of TCR clone 295548 (TRAV26-1, TRAJ38)
CIADNAGNNRKRIG

SEQ ID NO: 591096 - protein, 14 aa, Homo sapiens
  CDR3 for beta chain variable domain of TCR clone 295548 (TRBV7-3, TRBJ1-1)
CASSLGTGYTEAFF

SEQ ID NO: 591097 - protein, 14 aa, Homo sapiens
  CDR3 for alpha chain variable domain of TCR clone 295549 (TRAV12-1, TRAJ45)
CVVNSGGGADGLTF

SEQ ID NO: 591098 - protein, 16 aa, Homo sapiens
  CDR3 for beta chain variable domain of TCR clone 295549 (TRBV12-5, TRBJ2-5)
CASGPRTSGNQEAQYF

SEQ ID NO: 591099 - protein, 14 aa, Homo sapiens
  CDR3 for alpha chain variable domain of TCR clone 295550 (TRAV16, TRAJ33)
CALSAMDSNYQLIW

SEQ ID NO: 591100 - protein, 14 aa, Homo sapiens
  CDR3 for beta chain variable domain of TCR clone 295550 (TRBV7-2, TRBJ1-1)
CASSFLTGTTEAFF

SEQ ID NO: 591101 - protein, 13 aa, Homo sapiens
  CDR3 for alpha chain variable domain of TCR clone 295551 (TRAV20, TRAJ34)
CAVRSYNTDKLIF

SEQ ID NO: 591102 - protein, 12 aa, Homo sapiens
  CDR3 for beta chain variable domain of TCR clone 295551 (TRBV11-2, TRBJ2-1)
CASSPGNDEQFF

SEQ ID NO: 591103 - protein, 14 aa, Homo sapiens
  CDR3 for alpha chain variable domain of TCR clone 295552 (TRAV26-1, TRAJ34)
CIVRVAYNTDKIIF

SEQ ID NO: 591104 - protein, 14 aa, Homo sapiens
  CDR3 for beta chain variable domain of TCR clone 295552 (TRBV20-1, TRBJ2-7)
CSAWTALSSYEQYF

SEQ ID NO: 591105 - protein, 15 aa, Homo sapiens
  CDR3 for alpha chain variable domain of TCR clone 295553 (TRAV12-2, TRAJ43)
CAFDMRFGAGTSLTV

SEQ ID NO: 591106 - protein, 18 aa, Homo sapiens
  CDR3 for beta chain variable domain of TCR clone 295553 (TRBV20-1, TRBJ2-3)
CSASGLAGGPWTTDTQYF

SEQ ID NO: 591107 - protein, 13 aa, Homo sapiens
  CDR3 for alpha chain variable domain of TCR clone 295554 (TRAV17, TRAJ5)
CAPMDTGRRALTF

SEQ ID NO: 591108 - protein, 13 aa, Homo sapiens
  CDR3 for beta chain variable domain of TCR clone 295554 (TRBV7-9, TRBJ1-2)
CASSLKRNYGYTF

SEQ ID NO: 591109 - protein, 14 aa, Homo sapiens
  CDR3 for alpha chain variable domain of TCR clone 295555 (TRAV12-1, TRAJ9)
CVVNIITGGFKTIF

SEQ ID NO: 591110 - protein, 14 aa, Homo sapiens
  CDR3 for beta chain variable domain of TCR clone 295555 (TRBV28, TRBJ1-2)
CASRIQGANYGYTF

SEQ ID NO: 591111 - protein, 14 aa, Homo sapiens
  CDR3 for alpha chain variable domain of TCR clone 295556 (TRAV2, TRAJ3)
CAVRPYSSASKIIF

SEQ ID NO: 591112 - protein, 16 aa, Homo sapiens
  CDR3 for beta chain variable domain of TCR clone 295556 (TRBV11-3, TRBJ2-1)
CQQLSEYKSSYNEQFF

SEQ ID NO: 591113 - protein, 19 aa, Homo sapiens
  CDR3 for alpha chain variable domain of TCR clone 295557 (TRAV17, TRAJ57)
CFLLLCYGPLPAGSEKLVF

SEQ ID NO: 591114 - protein, 11 aa, Homo sapiens
  CDR3 for beta chain variable domain of TCR clone 295557 (TRBV29-1, TRBJ2-5)
CSEDRTGTQYF

SEQ ID NO: 591115 - protein, 14 aa, Homo sapiens
  CDR3 for alpha chain variable domain of TCR clone 295558 (TRAV13-2, TRAJ43)
CAEIPTYNNNDMRF

SEQ ID NO: 591116 - protein, 15 aa, Homo sapiens
  CDR3 for beta chain variable domain of TCR clone 295558 (TRBV7-9, TRBJ2-2)
CASGPVDSFPGELFF

SEQ ID NO: 591117 - protein, 13 aa, Homo sapiens
  CDR3 for alpha chain variable domain of TCR clone 295559 (TRAV3, TRAJ4)
CAVRDGGYNTLIF

SEQ ID NO: 591118 - protein, 14 aa, Homo sapiens
  CDR3 for beta chain variable domain of TCR clone 295559 (TRBV12-4, TRBJ1-2)
CASSSSAAGSSYTF

SEQ ID NO: 591119 - protein, 14 aa, Homo sapiens
  CDR3 for alpha chain variable domain of TCR clone 295560 (TRAV12-2, TRAJ45)
CAVNIGGGADGLTF

SEQ ID NO: 591120 - protein, 13 aa, Homo sapiens
  CDR3 for beta chain variable domain of TCR clone 295560 (TRBV19, TRBJ2-2)
CASQEGIHGELFF

SEQ ID NO: 591121 - protein, 14 aa, Homo sapiens
  CDR3 for alpha chain variable domain of TCR clone 295561 (TRAV12-2, TRAJ13)
CAVNPSGGYQKVTF

SEQ ID NO: 591122 - protein, 13 aa, Homo sapiens
  CDR3 for beta chain variable domain of TCR clone 295561 (TRBV20-1, TRBJ1-6)
CSAKLGGTSPLHV

SEQ ID NO: 591123 - protein, 21 aa, Homo sapiens
  CDR3 for alpha chain variable domain of TCR clone 295562 (TRAV1-1, TRAJ6)
CLLLLRCERLERTGGSYIPTF

SEQ ID NO: 591124 - protein, 13 aa, Homo sapiens
  CDR3 for beta chain variable domain of TCR clone 295562 (TRBV2, TRBJ1-1)
CARNPTGGFHAFF

SEQ ID NO: 591125 - protein, 17 aa, Homo sapiens
  CDR3 for alpha chain variable domain of TCR clone 295563 (TRAV38-2/DV8, TRAJ38)
CAYMSARGAGNNRKLIW

SEQ ID NO: 591126 - protein, 13 aa, Homo sapiens
  CDR3 for beta chain variable domain of TCR clone 295563 (TRBV6-5, TRBJ2-1)
CASRGRVGNEQFF

SEQ ID NO: 591127 - protein, 15 aa, Homo sapiens
  CDR3 for alpha chain variable domain of TCR clone 295564 (TRAV25, TRAJ41)
CAGPWNSNAGYALNF

SEQ ID NO: 591128 - protein, 13 aa, Homo sapiens
  CDR3 for beta chain variable domain of TCR clone 295564 (TRBV15, TRBJ1-1)
CATSRGIQARAFF

SEQ ID NO: 591129 - protein, 10 aa, Homo sapiens
  CDR3 for alpha chain variable domain of TCR clone 295565 (TRAV30, TRAJ48)
CGIGNEKLTF

SEQ ID NO: 591130 - protein, 15 aa, Homo sapiens
  CDR3 for beta chain variable domain of TCR clone 295565 (TRBV25-1, TRBJ1-4)
CASSPGDSTNEKLFF

SEQ ID NO: 591131 - protein, 14 aa, Homo sapiens
  CDR3 for alpha chain variable domain of TCR clone 295566 (TRAV1-2, TRAJ16)
CAVNRVSDGQKLLF

SEQ ID NO: 591132 - protein, 16 aa, Homo sapiens
  CDR3 for beta chain variable domain of TCR clone 295566 (TRBV29-1, TRBJ2-7)
CSVEDAEDGTAYEQYF

SEQ ID NO: 591133 - protein, 14 aa, Homo sapiens
  CDR3 for alpha chain variable domain of TCR clone 295567 (TRAV1-2, TRAJ16)
CAVNWFSDGQKLLF

SEQ ID NO: 591134 - protein, 13 aa, Homo sapiens
  CDR3 for beta chain variable domain of TCR clone 295567 (TRBV4-1, TRBJ2-1)
CASSQAGGDEQFF

SEQ ID NO: 591135 - protein, 12 aa, Homo sapiens
  CDR3 for alpha chain variable domain of TCR clone 295568 (TRAV29/DV5, TRAJ34)
CAASGNTDKLIF

SEQ ID NO: 591136 - protein, 14 aa, Homo sapiens
  CDR3 for beta chain variable domain of TCR clone 295568 (TRBV12-4, TRBJ1-1)
CASSLGTGGTEAFF

SEQ ID NO: 591137 - protein, 14 aa, Homo sapiens
  CDR3 for alpha chain variable domain of TCR clone 295569 (TRAV1-2, TRAJ16)
CAVNRFSDGQKLLF

SEQ ID NO: 591138 - protein, 15 aa, Homo sapiens
  CDR3 for beta chain variable domain of TCR clone 295569 (TRBV7-3, TRBJ2-1)
CASSPAGGGEVEQFF

SEQ ID NO: 591139 - protein, 15 aa, Homo sapiens
  CDR3 for alpha chain variable domain of TCR clone 295570 (TRAV14/DV4, TRAJ53)
CNERGGGGSNYKLTF

SEQ ID NO: 591140 - protein, 14 aa, Homo sapiens
  CDR3 for beta chain variable domain of TCR clone 295570 (TRBV19, TRBJ2-1)
CASSRLASINEQFF

SEQ ID NO: 591141 - protein, 14 aa, Homo sapiens
  CDR3 for alpha chain variable domain of TCR clone 295571 (TRAV1-2, TRAJ16)
CAVNRFSDGQELLF

SEQ ID NO: 591142 - protein, 14 aa, Homo sapiens
  CDR3 for beta chain variable domain of TCR clone 295571 (TRBV4-1, TRBJ2-2)
CASSQAVKTGELFF

SEQ ID NO: 591143 - protein, 14 aa, Homo sapiens
  CDR3 for alpha chain variable domain of TCR clone 295572 (TRAV17, TRAJ34)
YATDSLEGTDRLIF

SEQ ID NO: 591144 - protein, 14 aa, Homo sapiens
  CDR3 for beta chain variable domain of TCR clone 295572 (TRBV2, TRBJ2-7)
CASSLTSGGYEQYF

SEQ ID NO: 591145 - protein, 11 aa, Homo sapiens
  CDR3 for alpha chain variable domain of TCR clone 295573 (TRAV13-2, TRAJ20)
CADSNDYKLSF

SEQ ID NO: 591146 - protein, 14 aa, Homo sapiens
  CDR3 for beta chain variable domain of TCR clone 295573 (TRBV4-1, TRBJ2-2)
CASSQYPDTGELFF

SEQ ID NO: 591147 - protein, 15 aa, Homo sapiens
  CDR3 for alpha chain variable domain of TCR clone 295574 (TRAV21, TRAJ53)
CATLNSGGSNFKLTF

SEQ ID NO: 591148 - protein, 14 aa, Homo sapiens
  CDR3 for beta chain variable domain of TCR clone 295574 (TRBV7-2, TRBJ2-7)
CASRSQGAAYEQYF

SEQ ID NO: 591149 - protein, 12 aa, Homo sapiens
  CDR3 for alpha chain variable domain of TCR clone 295575 (TRAV1-2, TRAJ29)
CAVPSGNTPLVF

SEQ ID NO: 591150 - protein, 13 aa, Homo sapiens
  CDR3 for beta chain variable domain of TCR clone 295575 (TRBV7-3, TRBJ1-1)
CASSQDWGAEAFF

SEQ ID NO: 591151 - protein, 14 aa, Homo sapiens
  CDR3 for alpha chain variable domain of TCR clone 295576 (TRAV12-3, TRAJ10)
SHLPLTGGGSKLTF

SEQ ID NO: 591152 - protein, 13 aa, Homo sapiens
  CDR3 for beta chain variable domain of TCR clone 295576 (TRBV4-1, TRBJ2-2)
CAGSQENTGELFF

SEQ ID NO: 591153 - protein, 16 aa, Homo sapiens
  CDR3 for alpha chain variable domain of TCR clone 295577 (TRAV26-1, TRAJ52)
CIVSNAGGTSYGKLTS

SEQ ID NO: 591154 - protein, 16 aa, Homo sapiens
  CDR3 for beta chain variable domain of TCR clone 295577 (TRBV5-1, TRBJ2-1)
CASSLEGRGLYNEQFF

SEQ ID NO: 591155 - protein, 17 aa, Homo sapiens
  CDR3 for alpha chain variable domain of TCR clone 295578 (TRAV8-6, TRAJ58)
CAVSSWVGETRGSRLTF

SEQ ID NO: 591156 - protein, 12 aa, Homo sapiens
  CDR3 for beta chain variable domain of TCR clone 295578 (TRBV28, TRBJ2-3)
CASSLYRDTQYF

SEQ ID NO: 591157 - protein, 16 aa, Homo sapiens
  CDR3 for alpha chain variable domain of TCR clone 295579 (TRAV17, TRAJ52)
CATGIIGGTSYVKLTF

SEQ ID NO: 591158 - protein, 12 aa, Homo sapiens
  CDR3 for beta chain variable domain of TCR clone 295579 (TRBV7-3, TRBJ2-1)
CASSFINNEQFF

SEQ ID NO: 591159 - protein, 13 aa, Homo sapiens
  CDR3 for alpha chain variable domain of TCR clone 295580 (TRAV13-1, TRAJ21)
CAASIYNCNKFYF

SEQ ID NO: 591160 - protein, 13 aa, Homo sapiens
  CDR3 for beta chain variable domain of TCR clone 295580 (TRBV27, TRBJ1-4)
CASSLMGDEKLLF

SEQ ID NO: 591161 - protein, 15 aa, Homo sapiens
  CDR3 for alpha chain variable domain of TCR clone 295581 (TRAV26-1, TRAJ29)
GIVRVEGSGNTPLVV

SEQ ID NO: 591162 - protein, 15 aa, Homo sapiens
  CDR3 for beta chain variable domain of TCR clone 295581 (TRBV7-9, TRBJ1-5)
CASSQGHQPNQPQHF

SEQ ID NO: 591163 - protein, 12 aa, Homo sapiens
  CDR3 for alpha chain variable domain of TCR clone 295582 (TRAV21, TRAJ39)
CAADNAGNMLTF

SEQ ID NO: 591164 - protein, 15 aa, Homo sapiens
  CDR3 for beta chain variable domain of TCR clone 295582 (TRBV27, TRBJ2-1)
CASSNGGGYSNEQFF

SEQ ID NO: 591165 - protein, 13 aa, Homo sapiens
  CDR3 for alpha chain variable domain of TCR clone 295583 (TRAV2, TRAJ15)
CAVASQAGTALIF

SEQ ID NO: 591166 - protein, 16 aa, Homo sapiens
  CDR3 for beta chain variable domain of TCR clone 295583 (TRBV5-1, TRBJ1-1)
CAISSGGNSLNTEAFF

SEQ ID NO: 591167 - protein, 14 aa, Homo sapiens
  CDR3 for alpha chain variable domain of TCR clone 295584 (TRAV1-2, TRAJ6)
CAVSLLGGSYIPTF

SEQ ID NO: 591168 - protein, 11 aa, Homo sapiens
  CDR3 for beta chain variable domain of TCR clone 295584 (TRBV6-3, TRBJ2-3)
CATGQADTQYF

SEQ ID NO: 591169 - protein, 23 aa, Homo sapiens
  CDR3 for alpha chain variable domain of TCR clone 295585 (TRAV26-1, TRAJ38)
CIADNAGNNHIQNPDPAVYQLID

SEQ ID NO: 591170 - protein, 15 aa, Homo sapiens
  CDR3 for beta chain variable domain of TCR clone 295585 (TRBV27, TRBJ2-1)
CASSNGGGSSNEQFF

SEQ ID NO: 591171 - protein, 13 aa, Homo sapiens
  CDR3 for alpha chain variable domain of TCR clone 295586 (TRAV3, TRAJ7)
CAVSSYGNNRLAF

SEQ ID NO: 591172 - protein, 14 aa, Homo sapiens
  CDR3 for beta chain variable domain of TCR clone 295586 (TRBV19, TRBJ2-5)
CASSMTGQQETQYF

SEQ ID NO: 591173 - protein, 16 aa, Homo sapiens
  CDR3 for alpha chain variable domain of TCR clone 295587 (TRAV1-2, TRAJ10)
CAVRGVLTGGGNKLTF

SEQ ID NO: 591174 - protein, 21 aa, Homo sapiens
  CDR3 for beta chain variable domain of TCR clone 295587 (TRBV7-3, TRBJ2-1)
GGTQPCISVPAAGRSYNEQFF

SEQ ID NO: 591175 - protein, 15 aa, Homo sapiens
  CDR3 for alpha chain variable domain of TCR clone 295588 (TRAV12-1, TRAJ15)
CVVTRANQAGTALIF

SEQ ID NO: 591176 - protein, 14 aa, Homo sapiens
  CDR3 for beta chain variable domain of TCR clone 295588 (TRBV5-1, TRBJ1-1)
CASSLVSINTDAFF

SEQ ID NO: 591177 - protein, 15 aa, Homo sapiens
  CDR3 for alpha chain variable domain of TCR clone 295589 (TRAV12-2, TRAJ9)
CAVNNERTGGFKTIF

SEQ ID NO: 591178 - protein, 14 aa, Homo sapiens
  CDR3 for beta chain variable domain of TCR clone 295589 (TRBV4-1, TRBJ1-4)
CASSQDRKNEKLFF

SEQ ID NO: 591179 - protein, 13 aa, Homo sapiens
  CDR3 for alpha chain variable domain of TCR clone 295590 (TRAV12-1, TRAJ26)
SATYPYYGQNFVF

SEQ ID NO: 591180 - protein, 15 aa, Homo sapiens
  CDR3 for beta chain variable domain of TCR clone 295590 (TRBV5-1, TRBJ2-6)
RASSLDPSGANVLTF

SEQ ID NO: 591181 - protein, 17 aa, Homo sapiens
  CDR3 for alpha chain variable domain of TCR clone 295591 (TRAV26-1, TRAJ53)
CIVRVDDSGGSNYKLTF

SEQ ID NO: 591182 - protein, 15 aa, Homo sapiens
  CDR3 for beta chain variable domain of TCR clone 295591 (TRBV20-1, TRBJ2-7)
CSAIVPAAYFYEQYF

SEQ ID NO: 591183 - protein, 12 aa, Homo sapiens
  CDR3 for alpha chain variable domain of TCR clone 295592 (TRAV13-2, TRAJ23)
CAERHRGGKLIF

SEQ ID NO: 591184 - protein, 13 aa, Homo sapiens
  CDR3 for beta chain variable domain of TCR clone 295592 (TRBV12-4, TRBJ1-2)
CTSVPAVSYGYTF

SEQ ID NO: 591185 - protein, 16 aa, Homo sapiens
  CDR3 for alpha chain variable domain of TCR clone 295593 (TRAV12-2, TRAJ28)
CAVITDSGAGSYQVTF

SEQ ID NO: 591186 - protein, 14 aa, Homo sapiens
  CDR3 for beta chain variable domain of TCR clone 295593 (TRBV25-1, TRBJ1-1)
CASTHLGGNTEAFF

SEQ ID NO: 591187 - protein, 16 aa, Homo sapiens
  CDR3 for alpha chain variable domain of TCR clone 295594 (TRAV3, TRAJ37)
CALSPHGSGNTGKLIF

SEQ ID NO: 591188 - protein, 16 aa, Homo sapiens
  CDR3 for beta chain variable domain of TCR clone 295594 (TRBV9, TRBJ1-2)
CASSVEEKVSPYGYTF

SEQ ID NO: 591189 - protein, 14 aa, Homo sapiens
  CDR3 for alpha chain variable domain of TCR clone 295595 (TRAV12-3, TRAJ10)
SHLPLTGGGNKLTF

SEQ ID NO: 591190 - protein, 14 aa, Homo sapiens
  CDR3 for beta chain variable domain of TCR clone 295595 (TRBV28, TRBJ2-5)
CASSLYRGTETQYF

SEQ ID NO: 591191 - protein, 15 aa, Homo sapiens
  CDR3 for alpha chain variable domain of TCR clone 295596 (TRAV12-1, TRAJ45)
CVVLSGGGGADGLTF

SEQ ID NO: 591192 - protein, 13 aa, Homo sapiens
  CDR3 for beta chain variable domain of TCR clone 295596 (TRBV7-9, TRBJ2-7)
CASSFAGAYEQYF

SEQ ID NO: 591193 - protein, 14 aa, Homo sapiens
  CDR3 for alpha chain variable domain of TCR clone 295597 (TRAV13-1, TRAJ35)
CAASKGGFGNVLHC

SEQ ID NO: 591194 - protein, 20 aa, Homo sapiens
  CDR3 for beta chain variable domain of TCR clone 295597 (TRBV6-4, TRBJ2-7)
CASSDSSVSGQVPTSYEQYF

SEQ ID NO: 591195 - protein, 15 aa, Homo sapiens
  CDR3 for alpha chain variable domain of TCR clone 295598 (TRAV23/DV6, TRAJ37)
CAAGEGSSNTGKLIF

SEQ ID NO: 591196 - protein, 15 aa, Homo sapiens
  CDR3 for beta chain variable domain of TCR clone 295598 (TRBV2, TRBJ2-7)
CASSEGLARSYEQYF

SEQ ID NO: 591197 - protein, 18 aa, Homo sapiens
  CDR3 for alpha chain variable domain of TCR clone 295599 (TRAV12-3, TRAJ52)
CAMSVGGAGGTSYGKLTF

SEQ ID NO: 591198 - protein, 13 aa, Homo sapiens
  CDR3 for beta chain variable domain of TCR clone 295599 (TRBV7-2, TRBJ2-4)
CASSREHANIQYF

SEQ ID NO: 591199 - protein, 14 aa, Homo sapiens
  CDR3 for alpha chain variable domain of TCR clone 295600 (TRAV21, TRAJ52)
CGRAGGTSYGKLRF

SEQ ID NO: 591200 - protein, 14 aa, Homo sapiens
  CDR3 for beta chain variable domain of TCR clone 295600 (TRBV19, TRBJ1-2)
CASSVLGYNYGYTF

SEQ ID NO: 591201 - protein, 14 aa, Homo sapiens
  CDR3 for alpha chain variable domain of TCR clone 295601 (TRAV13-2, TRAJ43)
CAEIPTYNNNDMRF

SEQ ID NO: 591202 - protein, 15 aa, Homo sapiens
  CDR3 for beta chain variable domain of TCR clone 295601 (TRBV5-5, TRBJ1-5)
CASSLKGGGEQPQHF

SEQ ID NO: 591203 - protein, 18 aa, Homo sapiens
  CDR3 for alpha chain variable domain of TCR clone 295602 (TRAV29/DV5, TRAJ52)
QCTSVQQADGTSYGKLTF

SEQ ID NO: 591204 - protein, 13 aa, Homo sapiens
  CDR3 for beta chain variable domain of TCR clone 295602 (TRBV7-2, TRBJ1-1)
CDSNLKGAKVAFF

SEQ ID NO: 591205 - protein, 15 aa, Homo sapiens
  CDR3 for alpha chain variable domain of TCR clone 295603 (TRAV29/DV5, TRAJ29)
CSASERSSGNTPLVF

SEQ ID NO: 591206 - protein, 17 aa, Homo sapiens
  CDR3 for beta chain variable domain of TCR clone 295603 (TRBV4-1, TRBJ1-4)
CASSQEGPRGVEENLFF

SEQ ID NO: 591207 - protein, 13 aa, Homo sapiens
  CDR3 for alpha chain variable domain of TCR clone 295604 (TRAV8-6, TRAJ16)
CAVSRWVGQTLPV

SEQ ID NO: 591208 - protein, 15 aa, Homo sapiens
  CDR3 for beta chain variable domain of TCR clone 295604 (TRBV12-4, TRBJ2-1)
CASSLSTGVSNEQFF

SEQ ID NO: 591209 - protein, 14 aa, Homo sapiens
  CDR3 for alpha chain variable domain of TCR clone 295605 (TRAV2, TRAJ9)
CAVEDRSGGFKTIF

SEQ ID NO: 591210 - protein, 14 aa, Homo sapiens
  CDR3 for beta chain variable domain of TCR clone 295605 (TRBV12-5, TRBJ2-5)
CASGSRAHQETQYF

SEQ ID NO: 591211 - protein, 18 aa, Homo sapiens
  CDR3 for alpha chain variable domain of TCR clone 295606 (TRAV12-3, TRAJ52)
CAMSRTNAGGTSYGKLTF

SEQ ID NO: 591212 - protein, 16 aa, Homo sapiens
  CDR3 for beta chain variable domain of TCR clone 295606 (TRBV27, TRBJ2-2)
CASSFRGLVRTGELFF

SEQ ID NO: 591213 - protein, 13 aa, Homo sapiens
  CDR3 for alpha chain variable domain of TCR clone 295607 (TRAV21, TRAJ27)
CAARPVNTGKSTF

SEQ ID NO: 591214 - protein, 14 aa, Homo sapiens
  CDR3 for beta chain variable domain of TCR clone 295607 (TRBV7-6, TRBJ2-3)
CASSLGTVTDTQYF

SEQ ID NO: 591215 - protein, 17 aa, Homo sapiens
  CDR3 for alpha chain variable domain of TCR clone 295608 (TRAV3, TRAJ6)
CAVRDGPRAGGSYIPTF

SEQ ID NO: 591216 - protein, 20 aa, Homo sapiens
  CDR3 for beta chain variable domain of TCR clone 295608 (TRBV7-8, TRBJ2-2)
CASSHLFPGPTIHITGALFF

SEQ ID NO: 591217 - protein, 16 aa, Homo sapiens
  CDR3 for alpha chain variable domain of TCR clone 295609 (TRAV3, TRAJ37)
CAVRPHGYGNTGKLIF

SEQ ID NO: 591218 - protein, 17 aa, Homo sapiens
  CDR3 for beta chain variable domain of TCR clone 295609 (TRBV5-1, TRBJ2-5)
CASSPVALGQNQETQYF

SEQ ID NO: 591219 - protein, 16 aa, Homo sapiens
  CDR3 for alpha chain variable domain of TCR clone 295610 (TRAV26-1, TRAJ42)
CIVRVATGGSQGNLIF

SEQ ID NO: 591220 - protein, 16 aa, Homo sapiens
  CDR3 for beta chain variable domain of TCR clone 295610 (TRBV13, TRBJ2-2)
CASSPRTGEHTGELFF

SEQ ID NO: 591221 - protein, 12 aa, Homo sapiens
  CDR3 for alpha chain variable domain of TCR clone 295611 (TRAV2, TRAJ9)
CAVGAGGFKTIF

SEQ ID NO: 591222 - protein, 15 aa, Homo sapiens
  CDR3 for beta chain variable domain of TCR clone 295611 (TRBV28, TRBJ1-3)
CASSMGWASGNTIYF

SEQ ID NO: 591223 - protein, 13 aa, Homo sapiens
  CDR3 for alpha chain variable domain of TCR clone 295612 (TRAV2, TRAJ24)
CDLQLTAGGNASL

SEQ ID NO: 591224 - protein, 13 aa, Homo sapiens
  CDR3 for beta chain variable domain of TCR clone 295612 (TRBV7-9, TRBJ1-2)
CASSLKQNYGYTF

SEQ ID NO: 591225 - protein, 14 aa, Homo sapiens
  CDR3 for alpha chain variable domain of TCR clone 295613 (TRAV1-1, TRAJ28)
CAAPSGAGSYQLTF

SEQ ID NO: 591226 - protein, 15 aa, Homo sapiens
  CDR3 for beta chain variable domain of TCR clone 295613 (TRBV7-2, TRBJ1-2)
CASSLVSVGDYGYTF

SEQ ID NO: 591227 - protein, 12 aa, Homo sapiens
  CDR3 for alpha chain variable domain of TCR clone 295614 (TRAV27, TRAJ16)
CAGEPDGQKLLF

SEQ ID NO: 591228 - protein, 15 aa, Homo sapiens
  CDR3 for beta chain variable domain of TCR clone 295614 (TRBV5-1, TRBJ2-1)
CASSYRDPRMSEQFF

SEQ ID NO: 591229 - protein, 16 aa, Homo sapiens
  CDR3 for alpha chain variable domain of TCR clone 295615 (TRAV3, TRAJ28)
CAVLPRSGAGSYQLPF

SEQ ID NO: 591230 - protein, 13 aa, Homo sapiens
  CDR3 for beta chain variable domain of TCR clone 295615 (TRBV12-4, TRBJ2-5)
YASRLAVQETQYF

SEQ ID NO: 591231 - protein, 15 aa, Homo sapiens
  CDR3 for alpha chain variable domain of TCR clone 295616 (TRAV21, TRAJ45)
YAVSYSGGGADGLTF

SEQ ID NO: 591232 - protein, 15 aa, Homo sapiens
  CDR3 for beta chain variable domain of TCR clone 295616 (TRBV20-1, TRBJ2-7)
CSARGPLAGGREQYF

SEQ ID NO: 591233 - protein, 15 aa, Homo sapiens
  CDR3 for alpha chain variable domain of TCR clone 295617 (TRAV3, TRAJ3)
CAVRDGHSSASKIIF

SEQ ID NO: 591234 - protein, 13 aa, Homo sapiens
  CDR3 for beta chain variable domain of TCR clone 295617 (TRBV7-9, TRBJ1-2)
CASSLKQNYGYTF

SEQ ID NO: 591235 - protein, 18 aa, Homo sapiens
  CDR3 for alpha chain variable domain of TCR clone 295618 (TRAV29/DV5, TRAJ53)
CSVLLCSKRGGSNYKLTF

SEQ ID NO: 591236 - protein, 17 aa, Homo sapiens
  CDR3 for beta chain variable domain of TCR clone 295618 (TRBV7-8, TRBJ2-6)
CVSSAGTGGAGANVLTF

SEQ ID NO: 591237 - protein, 14 aa, Homo sapiens
  CDR3 for alpha chain variable domain of TCR clone 295619 (TRAV38-1, TRAJ40)
CALRPTSGTYKYIF

SEQ ID NO: 591238 - protein, 14 aa, Homo sapiens
  CDR3 for beta chain variable domain of TCR clone 295619 (TRBV25-1, TRBJ1-1)
CASTHLGANTEAFF

SEQ ID NO: 591239 - protein, 16 aa, Homo sapiens
  CDR3 for alpha chain variable domain of TCR clone 295620 (TRAV12-2, TRAJ6)
FAAPLAGSGGSYIPTF

SEQ ID NO: 591240 - protein, 10 aa, Homo sapiens
  CDR3 for beta chain variable domain of TCR clone 295620 (TRBV28, TRBJ1-2)
CASSSDRAVF

SEQ ID NO: 591241 - protein, 14 aa, Homo sapiens
  CDR3 for alpha chain variable domain of TCR clone 295621 (TRAV8-2, TRAJ45)
CVGSAGGGADGLTF

SEQ ID NO: 591242 - protein, 12 aa, Homo sapiens
  CDR3 for beta chain variable domain of TCR clone 295621 (TRBV12-4, TRBJ2-1)
CASSLVRGEQFF

SEQ ID NO: 591243 - protein, 13 aa, Homo sapiens
  CDR3 for alpha chain variable domain of TCR clone 295622 (TRAV13-1, TRAJ40)
CAAISPGNYKYIF

SEQ ID NO: 591244 - protein, 13 aa, Homo sapiens
  CDR3 for beta chain variable domain of TCR clone 295622 (TRBV10-3, TRBJ2-7)
CAIRAGGPHEQYF

SEQ ID NO: 591245 - protein, 20 aa, Homo sapiens
  CDR3 for alpha chain variable domain of TCR clone 295623 (TRAV12-3, TRAJ41)
SLFIRDSQPSYSATPEALNF

SEQ ID NO: 591246 - protein, 15 aa, Homo sapiens
  CDR3 for beta chain variable domain of TCR clone 295623 (TRBV5-1, TRBJ2-7)
CASSLDLTSSYEQYF

SEQ ID NO: 591247 - protein, 13 aa, Homo sapiens
  CDR3 for alpha chain variable domain of TCR clone 295624 (TRAV13-2, TRAJ11)
CAENYSGYSTLTF

SEQ ID NO: 591248 - protein, 14 aa, Homo sapiens
  CDR3 for beta chain variable domain of TCR clone 295624 (TRBV15, TRBJ2-5)
CATSGDRGQETQYS

SEQ ID NO: 591249 - protein, 11 aa, Homo sapiens
  CDR3 for alpha chain variable domain of TCR clone 295625 (TRAV12-2, TRAJ29)
CAVTLRSPLVF

SEQ ID NO: 591250 - protein, 16 aa, Homo sapiens
  CDR3 for beta chain variable domain of TCR clone 295625 (TRBV5-1, TRBJ2-2)
CASSLGGTGSTGELFV

SEQ ID NO: 591251 - protein, 12 aa, Homo sapiens
  CDR3 for alpha chain variable domain of TCR clone 295626 (TRAV8-3, TRAJ6)
CAVAGGSYIHTF

SEQ ID NO: 591252 - protein, 14 aa, Homo sapiens
  CDR3 for beta chain variable domain of TCR clone 295626 (TRBV27, TRBJ2-7)
CASATGTERREQYF

SEQ ID NO: 591253 - protein, 15 aa, Homo sapiens
  CDR3 for alpha chain variable domain of TCR clone 295627 (TRAV1-1, TRAJ23)
CAVREGDNQGGKIIF

SEQ ID NO: 591254 - protein, 13 aa, Homo sapiens
  CDR3 for beta chain variable domain of TCR clone 295627 (TRBV10-3, TRBJ2-7)
CAISEKGVYEQYF

SEQ ID NO: 591255 - protein, 14 aa, Homo sapiens
  CDR3 for alpha chain variable domain of TCR clone 295628 (TRAV1-2, TRAJ16)
CAVNRFSDGHKLLF

SEQ ID NO: 591256 - protein, 15 aa, Homo sapiens
  CDR3 for beta chain variable domain of TCR clone 295628 (TRBV7-9, TRBJ2-2)
CASGPLDTFPGELFF

SEQ ID NO: 591257 - protein, 11 aa, Homo sapiens
  CDR3 for alpha chain variable domain of TCR clone 295629 (TRAV22, TRAJ20)
CAPLHDYKLSF

SEQ ID NO: 591258 - protein, 15 aa, Homo sapiens
  CDR3 for beta chain variable domain of TCR clone 295629 (TRBV19, TRBJ1-1)
CASTSGQIQNTEAFF

SEQ ID NO: 591259 - protein, 14 aa, Homo sapiens
  CDR3 for alpha chain variable domain of TCR clone 295630 (TRAV12-2, TRAJ13)
CAVKKTVGYQKVTF

SEQ ID NO: 591260 - protein, 14 aa, Homo sapiens
  CDR3 for beta chain variable domain of TCR clone 295630 (TRBV7-3, TRBJ1-1)
CASSLGTGYTEAFF

SEQ ID NO: 591261 - protein, 14 aa, Homo sapiens
  CDR3 for alpha chain variable domain of TCR clone 295631 (TRAV13-1, TRAJ40)
CAAHPTSGTSKYIF

SEQ ID NO: 591262 - protein, 15 aa, Homo sapiens
  CDR3 for beta chain variable domain of TCR clone 295631 (TRBV25-1, TRBJ1-4)
CASSKRIATNEKLFF

SEQ ID NO: 591263 - protein, 16 aa, Homo sapiens
  CDR3 for alpha chain variable domain of TCR clone 295632 (TRAV8-3, TRAJ10)
CVVGPILTGGGNKLTF

SEQ ID NO: 591264 - protein, 16 aa, Homo sapiens
  CDR3 for beta chain variable domain of TCR clone 295632 (TRBV7-2, TRBJ2-5)
CASSSKWLSGQETQYF

SEQ ID NO: 591265 - protein, 15 aa, Homo sapiens
  CDR3 for alpha chain variable domain of TCR clone 295633 (TRAV8-6, TRAJ49)
CAVSEGTDTGNQFYF

SEQ ID NO: 591266 - protein, 13 aa, Homo sapiens
  CDR3 for beta chain variable domain of TCR clone 295633 (TRBV20-1, TRBJ2-7)
CSASRSSSYEQYF

SEQ ID NO: 591267 - protein, 13 aa, Homo sapiens
  CDR3 for alpha chain variable domain of TCR clone 295634 (TRAV8-2, TRAJ44)
CSRGAGTASQLTF

SEQ ID NO: 591268 - protein, 13 aa, Homo sapiens
  CDR3 for beta chain variable domain of TCR clone 295634 (TRBV12-4, TRBJ2-7)
CASSRQAYYEQYF

SEQ ID NO: 591269 - protein, 13 aa, Homo sapiens
  CDR3 for alpha chain variable domain of TCR clone 295635 (TRAV26-2, TRAJ43)
CILRAVNNNDMRF

SEQ ID NO: 591270 - protein, 13 aa, Homo sapiens
  CDR3 for beta chain variable domain of TCR clone 295635 (TRBV7-3, TRBJ1-2)
CASSLKRGYGYTF

SEQ ID NO: 591271 - protein, 17 aa, Homo sapiens
  CDR3 for alpha chain variable domain of TCR clone 295636 (TRAV3, TRAJ38)
CAVRDCLNAGNNRKLIW

SEQ ID NO: 591272 - protein, 15 aa, Homo sapiens
  CDR3 for beta chain variable domain of TCR clone 295636 (TRBV9, TRBJ2-1)
CAGSLAGSSYNEQFF

SEQ ID NO: 591273 - protein, 14 aa, Homo sapiens
  CDR3 for alpha chain variable domain of TCR clone 295637 (TRAV27, TRAJ36)
CAGPPKRGANNLFF

SEQ ID NO: 591274 - protein, 15 aa, Homo sapiens
  CDR3 for beta chain variable domain of TCR clone 295637 (TRBV18, TRBJ2-7)
CASSPASIPNYEQYF

SEQ ID NO: 591275 - protein, 14 aa, Homo sapiens
  CDR3 for alpha chain variable domain of TCR clone 295638 (TRAV1-1, TRAJ27)
CAVIYNTNAGKSTF

SEQ ID NO: 591276 - protein, 15 aa, Homo sapiens
  CDR3 for beta chain variable domain of TCR clone 295638 (TRBV7-2, TRBJ2-1)
CASSLASGRVNEQFF

SEQ ID NO: 591277 - protein, 10 aa, Homo sapiens
  CDR3 for alpha chain variable domain of TCR clone 295639 (TRAV5, TRAJ34)
CAEDTDKLIF

SEQ ID NO: 591278 - protein, 15 aa, Homo sapiens
  CDR3 for beta chain variable domain of TCR clone 295639 (TRBV6-1, TRBJ2-2)
CASSRLRGDTGELFF

SEQ ID NO: 591279 - protein, 16 aa, Homo sapiens
  CDR3 for alpha chain variable domain of TCR clone 295640 (TRAV3, TRAJ10)
CAVRDMRAGGGNKLTF

SEQ ID NO: 591280 - protein, 16 aa, Homo sapiens
  CDR3 for beta chain variable domain of TCR clone 295640 (TRBV19, TRBJ2-3)
CASSPGAASRADTQYF

SEQ ID NO: 591281 - protein, 11 aa, Homo sapiens
  CDR3 for alpha chain variable domain of TCR clone 295641 (TRAV21, TRAJ7)
CAAYGNNRLAF

SEQ ID NO: 591282 - protein, 14 aa, Homo sapiens
  CDR3 for beta chain variable domain of TCR clone 295641 (TRBV4-1, TRBJ2-7)
CASSRTRVAFEQYF

SEQ ID NO: 591283 - protein, 14 aa, Homo sapiens
  CDR3 for alpha chain variable domain of TCR clone 295642 (TRAV1-1, TRAJ27)
CAVIYNTNAGKSTF

SEQ ID NO: 591284 - protein, 15 aa, Homo sapiens
  CDR3 for beta chain variable domain of TCR clone 295642 (TRBV7-2, TRBJ2-1)
RASSSGLAGDNEQFF

SEQ ID NO: 591285 - protein, 11 aa, Homo sapiens
  CDR3 for alpha chain variable domain of TCR clone 295643 (TRAV3, TRAJ21)
CTVGNSNKFYF

SEQ ID NO: 591286 - protein, 16 aa, Homo sapiens
  CDR3 for beta chain variable domain of TCR clone 295643 (TRBV19, TRBJ2-1)
CASSKAGPSSYNEQFF

SEQ ID NO: 591287 - protein, 15 aa, Homo sapiens
  CDR3 for alpha chain variable domain of TCR clone 295644 (TRAV27, TRAJ33)
CAGAAIMDSNYQLIW

SEQ ID NO: 591288 - protein, 13 aa, Homo sapiens
  CDR3 for beta chain variable domain of TCR clone 295644 (TRBV28, TRBJ1-2)
CASSLQGRGGYTF

SEQ ID NO: 591289 - protein, 14 aa, Homo sapiens
  CDR3 for alpha chain variable domain of TCR clone 295645 (TRAV16, TRAJ33)
CALSAMDSNCQLIW

SEQ ID NO: 591290 - protein, 16 aa, Homo sapiens
  CDR3 for beta chain variable domain of TCR clone 295645 (TRBV25-1, TRBJ2-7)
CASSELTGGGIYEQYF

SEQ ID NO: 591291 - protein, 16 aa, Homo sapiens
  CDR3 for alpha chain variable domain of TCR clone 295646 (TRAV26-1, TRAJ31)
CIVRPPVLNNNARLMF

SEQ ID NO: 591292 - protein, 12 aa, Homo sapiens
  CDR3 for beta chain variable domain of TCR clone 295646 (TRBV12-4, TRBJ2-7)
CASSVGGYEQYF

SEQ ID NO: 591293 - protein, 16 aa, Homo sapiens
  CDR3 for alpha chain variable domain of TCR clone 295647 (TRAV12-3, TRAJ53)
CAMSVGSGGSNYNLTF

SEQ ID NO: 591294 - protein, 13 aa, Homo sapiens
  CDR3 for beta chain variable domain of TCR clone 295647 (TRBV7-6, TRBJ1-2)
CASSLVADYGYTF

SEQ ID NO: 591295 - protein, 14 aa, Homo sapiens
  CDR3 for alpha chain variable domain of TCR clone 295648 (TRAV9-2, TRAJ39)
CALYIYNAGNMLTF

SEQ ID NO: 591296 - protein, 14 aa, Homo sapiens
  CDR3 for beta chain variable domain of TCR clone 295648 (TRBV9, TRBJ2-7)
CASSPLRAVGKQYF

SEQ ID NO: 591297 - protein, 14 aa, Homo sapiens
  CDR3 for alpha chain variable domain of TCR clone 295649 (TRAV13-1, TRAJ40)
CAARSTTGTYKYIF

SEQ ID NO: 591298 - protein, 15 aa, Homo sapiens
  CDR3 for beta chain variable domain of TCR clone 295649 (TRBV18, TRBJ1-5)
CASSETGGNNQPQHF

SEQ ID NO: 591299 - protein, 13 aa, Homo sapiens
  CDR3 for alpha chain variable domain of TCR clone 295650 (TRAV20, TRAJ34)
CAVSSYNTDKLIY

SEQ ID NO: 591300 - protein, 13 aa, Homo sapiens
  CDR3 for beta chain variable domain of TCR clone 295650 (TRBV7-9, TRBJ1-2)
CASSLKQNYGYTF

SEQ ID NO: 591301 - protein, 17 aa, Homo sapiens
  CDR3 for alpha chain variable domain of TCR clone 295651 (TRAV26-2, TRAJ42)
CILRDVGYGGSQVNLIF

SEQ ID NO: 591302 - protein, 16 aa, Homo sapiens
  CDR3 for beta chain variable domain of TCR clone 295651 (TRBV12-4, TRBJ2-7)
CASSLIGGTGTYEQYF

SEQ ID NO: 591303 - protein, 11 aa, Homo sapiens
  CDR3 for alpha chain variable domain of TCR clone 295652 (TRAV17, TRAJ31)
CATSNNARLMF

SEQ ID NO: 591304 - protein, 14 aa, Homo sapiens
  CDR3 for beta chain variable domain of TCR clone 295652 (TRBV18, TRBJ2-7)
CASSTRGGAYEQYF

SEQ ID NO: 591305 - protein, 14 aa, Homo sapiens
  CDR3 for alpha chain variable domain of TCR clone 295653 (TRAV12-2, TRAJ13)
CAVKKTGGYQKVTF

SEQ ID NO: 591306 - protein, 14 aa, Homo sapiens
  CDR3 for beta chain variable domain of TCR clone 295653 (TRBV10-3, TRBJ2-1)
CAISCDLAYNEQFF

SEQ ID NO: 591307 - protein, 15 aa, Homo sapiens
  CDR3 for alpha chain variable domain of TCR clone 295654 (TRAV3, TRAJ29)
CAVRAPLSGNTPLVF

SEQ ID NO: 591308 - protein, 15 aa, Homo sapiens
  CDR3 for beta chain variable domain of TCR clone 295654 (TRBV28, TRBJ1-1)
CASRIKGGLNAEAFL

SEQ ID NO: 591309 - protein, 13 aa, Homo sapiens
  CDR3 for alpha chain variable domain of TCR clone 295655 (TRAV12-2, TRAJ52)
CNAGGTSYGKLTF

SEQ ID NO: 591310 - protein, 16 aa, Homo sapiens
  CDR3 for beta chain variable domain of TCR clone 295655 (TRBV12-5, TRBJ2-5)
CASGPRTSGNQETQYF

SEQ ID NO: 591311 - protein, 13 aa, Homo sapiens
  CDR3 for alpha chain variable domain of TCR clone 295656 (TRAV12-2, TRAJ20)
CAVYPSNDYKLSF

SEQ ID NO: 591312 - protein, 16 aa, Homo sapiens
  CDR3 for beta chain variable domain of TCR clone 295656 (TRBV24-1, TRBJ2-1)
CATSGVAGANYNEQFF

SEQ ID NO: 591313 - protein, 14 aa, Homo sapiens
  CDR3 for alpha chain variable domain of TCR clone 295657 (TRAV38-1, TRAJ45)
CAYYSGGGADGLTF

SEQ ID NO: 591314 - protein, 20 aa, Homo sapiens
  CDR3 for beta chain variable domain of TCR clone 295657 (TRBV28, TRBJ2-1)
CASTPFGRSPGLAGGNEQFF

SEQ ID NO: 591315 - protein, 12 aa, Homo sapiens
  CDR3 for alpha chain variable domain of TCR clone 295658 (TRAV8-3, TRAJ20)
CAVGANDYKLSF

SEQ ID NO: 591316 - protein, 15 aa, Homo sapiens
  CDR3 for beta chain variable domain of TCR clone 295658 (TRBV7-2, TRBJ1-1)
CASSFAGDRDTEAFF

SEQ ID NO: 591317 - protein, 12 aa, Homo sapiens
  CDR3 for alpha chain variable domain of TCR clone 295659 (TRAV30, TRAJ39)
CGRGNAGNMLTF

SEQ ID NO: 591318 - protein, 17 aa, Homo sapiens
  CDR3 for beta chain variable domain of TCR clone 295659 (TRBV18, TRBJ1-5)
CASSPTMGQGTNQPQHF

SEQ ID NO: 591319 - protein, 10 aa, Homo sapiens
  CDR3 for alpha chain variable domain of TCR clone 295660 (TRAV1-2, TRAJ35)
CAVRGLTIGF

SEQ ID NO: 591320 - protein, 13 aa, Homo sapiens
  CDR3 for beta chain variable domain of TCR clone 295660 (TRBV6-6, TRBJ2-1)
CASSLHQGDEQFF

SEQ ID NO: 591321 - protein, 10 aa, Homo sapiens
  CDR3 for alpha chain variable domain of TCR clone 295661 (TRAV1-2, TRAJ31)
CAFFDARLMF

SEQ ID NO: 591322 - protein, 15 aa, Homo sapiens
  CDR3 for beta chain variable domain of TCR clone 295661 (TRBV27, TRBJ2-1)
CASSNGGGSSNEQFF

SEQ ID NO: 591323 - protein, 15 aa, Homo sapiens
  CDR3 for alpha chain variable domain of TCR clone 295662 (TRAV8-4, TRAJ8)
CAVSDLNTGFQKLVF

SEQ ID NO: 591324 - protein, 14 aa, Homo sapiens
  CDR3 for beta chain variable domain of TCR clone 295662 (TRBV7-8, TRBJ2-3)
CASSLEAGTDTQYF

SEQ ID NO: 591325 - protein, 16 aa, Homo sapiens
  CDR3 for alpha chain variable domain of TCR clone 295663 (TRAV12-2, TRAJ10)
CAVIRVLTGGGNKLTF

SEQ ID NO: 591326 - protein, 12 aa, Homo sapiens
  CDR3 for beta chain variable domain of TCR clone 295663 (TRBV28, TRBJ2-7)
CASSFSSYEQYF

SEQ ID NO: 591327 - protein, 12 aa, Homo sapiens
  CDR3 for alpha chain variable domain of TCR clone 295664 (TRAV3, TRAJ20)
CAVRDPDYKLSF

SEQ ID NO: 591328 - protein, 15 aa, Homo sapiens
  CDR3 for beta chain variable domain of TCR clone 295664 (TRBV9, TRBJ2-1)
CASSLAGSSYNEQFF

SEQ ID NO: 591329 - protein, 12 aa, Homo sapiens
  CDR3 for alpha chain variable domain of TCR clone 295665 (TRAV16, TRAJ27)
CAKEDQCRQIYL

SEQ ID NO: 591330 - protein, 15 aa, Homo sapiens
  CDR3 for beta chain variable domain of TCR clone 295665 (TRBV18, TRBJ2-1)
CASSPPSASYNEQFF

SEQ ID NO: 591331 - protein, 16 aa, Homo sapiens
  CDR3 for alpha chain variable domain of TCR clone 295666 (TRAV16, TRAJ52)
CALSAAGGTSYGKLTF

SEQ ID NO: 591332 - protein, 13 aa, Homo sapiens
  CDR3 for beta chain variable domain of TCR clone 295666 (TRBV20-1, TRBJ1-1)
CSAPLGGGTEAFF

SEQ ID NO: 591333 - protein, 13 aa, Homo sapiens
  CDR3 for alpha chain variable domain of TCR clone 295667 (TRAV2, TRAJ20)
CAVEDPSEYKLSF

SEQ ID NO: 591334 - protein, 16 aa, Homo sapiens
  CDR3 for beta chain variable domain of TCR clone 295667 (TRBV25-1, TRBJ2-7)
CASSELAGGGIDEQYF

SEQ ID NO: 591335 - protein, 13 aa, Homo sapiens
  CDR3 for alpha chain variable domain of TCR clone 295668 (TRAV27, TRAJ3)
ASLRGSSASKIIF

SEQ ID NO: 591336 - protein, 16 aa, Homo sapiens
  CDR3 for beta chain variable domain of TCR clone 295668 (TRBV7-8, TRBJ2-4)
CASSAERTLAKNIQYF

SEQ ID NO: 591337 - protein, 14 aa, Homo sapiens
  CDR3 for alpha chain variable domain of TCR clone 295669 (TRAV12-3, TRAJ10)
SHLPLTGGGNKLTF

SEQ ID NO: 591338 - protein, 16 aa, Homo sapiens
  CDR3 for beta chain variable domain of TCR clone 295669 (TRBV10-3, TRBJ2-1)
CAISGVGDGGGREQFF

SEQ ID NO: 591339 - protein, 12 aa, Homo sapiens
  CDR3 for alpha chain variable domain of TCR clone 295670 (TRAV13-2, TRAJ13)
CAENIPEVGSYL

SEQ ID NO: 591340 - protein, 14 aa, Homo sapiens
  CDR3 for beta chain variable domain of TCR clone 295670 (TRBV20-1, TRBJ1-5)
CSARDDGGNQPQHF

SEQ ID NO: 591341 - protein, 13 aa, Homo sapiens
  CDR3 for alpha chain variable domain of TCR clone 295671 (TRAV35, TRAJ42)
CAGFPGSKGNLIF

SEQ ID NO: 591342 - protein, 14 aa, Homo sapiens
  CDR3 for beta chain variable domain of TCR clone 295671 (TRBV4-1, TRBJ2-2)
CASSQAVNTGELFF

SEQ ID NO: 591343 - protein, 15 aa, Homo sapiens
  CDR3 for alpha chain variable domain of TCR clone 295672 (TRAV26-1, TRAJ29)
CIVRVEGSGNTPLVF

SEQ ID NO: 591344 - protein, 15 aa, Homo sapiens
  CDR3 for beta chain variable domain of TCR clone 295672 (TRBV7-9, TRBJ2-2)
CASSPETGAGGELFF

SEQ ID NO: 591345 - protein, 14 aa, Homo sapiens
  CDR3 for alpha chain variable domain of TCR clone 295673 (TRAV3, TRAJ33)
CAVRDMGSNYQLIW

SEQ ID NO: 591346 - protein, 12 aa, Homo sapiens
  CDR3 for beta chain variable domain of TCR clone 295673 (TRBV7-9, TRBJ1-5)
CASSPQGQPQHF

SEQ ID NO: 591347 - protein, 18 aa, Homo sapiens
  CDR3 for alpha chain variable domain of TCR clone 295674 (TRAV13-1, TRAJ52)
CAAKNPNAGGTSYGKLTF

SEQ ID NO: 591348 - protein, 15 aa, Homo sapiens
  CDR3 for beta chain variable domain of TCR clone 295674 (TRBV7-9, TRBJ1-5)
CASSHGHQPNQPQHF

SEQ ID NO: 591349 - protein, 14 aa, Homo sapiens
  CDR3 for alpha chain variable domain of TCR clone 295675 (TRAV13-1, TRAJ12)
CAASYMDSSYKLIS

SEQ ID NO: 591350 - protein, 13 aa, Homo sapiens
  CDR3 for beta chain variable domain of TCR clone 295675 (TRBV2, TRBJ2-5)
CASSDGIQETQYF

SEQ ID NO: 591351 - protein, 18 aa, Homo sapiens
  CDR3 for alpha chain variable domain of TCR clone 295676 (TRAV21, TRAJ52)
CAVRPSPAGGTSYGKMTS

SEQ ID NO: 591352 - protein, 13 aa, Homo sapiens
  CDR3 for beta chain variable domain of TCR clone 295676 (TRBV7-3, TRBJ1-1)
CASSQDWGAEAFF

SEQ ID NO: 591353 - protein, 14 aa, Homo sapiens
  CDR3 for alpha chain variable domain of TCR clone 295677 (TRAV13-1, TRAJ30)
CAASPQNRDDKIIF

SEQ ID NO: 591354 - protein, 15 aa, Homo sapiens
  CDR3 for beta chain variable domain of TCR clone 295677 (TRBV7-2, TRBJ2-1)
CASSSGLAGGNEQFF

SEQ ID NO: 591355 - protein, 19 aa, Homo sapiens
  CDR3 for alpha chain variable domain of TCR clone 295678 (TRAV2, TRAJ20)
ILQVREADAAVYRDCKLSF

SEQ ID NO: 591356 - protein, 12 aa, Homo sapiens
  CDR3 for beta chain variable domain of TCR clone 295678 (TRBV11-2, TRBJ2-2)
CASSRGGGELFF

SEQ ID NO: 591357 - protein, 13 aa, Homo sapiens
  CDR3 for alpha chain variable domain of TCR clone 295679 (TRAV8-3, TRAJ4)
WVFYSGGYNQLIF

SEQ ID NO: 591358 - protein, 14 aa, Homo sapiens
  CDR3 for beta chain variable domain of TCR clone 295679 (TRBV7-9, TRBJ2-3)
CASSLEDGTDTQYF

SEQ ID NO: 591359 - protein, 14 aa, Homo sapiens
  CDR3 for alpha chain variable domain of TCR clone 295680 (TRAV13-2, TRAJ10)
CAETFTGGGNKLTF

SEQ ID NO: 591360 - protein, 16 aa, Homo sapiens
  CDR3 for beta chain variable domain of TCR clone 295680 (TRBV18, TRBJ2-7)
CAGSPRSQGISYEQYF

SEQ ID NO: 591361 - protein, 14 aa, Homo sapiens
  CDR3 for alpha chain variable domain of TCR clone 295681 (TRAV12-2, TRAJ13)
WAVKKTGGYQKVTF

SEQ ID NO: 591362 - protein, 16 aa, Homo sapiens
  CDR3 for beta chain variable domain of TCR clone 295681 (TRBV12-4, TRBJ1-5)
CASSSGPRGSNQPQHF

SEQ ID NO: 591363 - protein, 15 aa, Homo sapiens
  CDR3 for alpha chain variable domain of TCR clone 295682 (TRAV27, TRAJ38)
CAARRNAGHNRKPIW

SEQ ID NO: 591364 - protein, 13 aa, Homo sapiens
  CDR3 for beta chain variable domain of TCR clone 295682 (TRBV12-5, TRBJ2-3)
CASGDRQSDTQYF

SEQ ID NO: 591365 - protein, 15 aa, Homo sapiens
  CDR3 for alpha chain variable domain of TCR clone 295683 (TRAV12-2, TRAJ53)
CAVNGGGGSNYKLTF

SEQ ID NO: 591366 - protein, 15 aa, Homo sapiens
  CDR3 for beta chain variable domain of TCR clone 295683 (TRBV7-6, TRBJ2-5)
CASSKPTGPQETQYF

SEQ ID NO: 591367 - protein, 15 aa, Homo sapiens
  CDR3 for alpha chain variable domain of TCR clone 295684 (TRAV26-1, TRAJ48)
CIARWSWFGNEKLTF

SEQ ID NO: 591368 - protein, 14 aa, Homo sapiens
  CDR3 for beta chain variable domain of TCR clone 295684 (TRBV7-2, TRBJ2-7)
CASSPKTSFYEPYF

SEQ ID NO: 591369 - protein, 12 aa, Homo sapiens
  CDR3 for alpha chain variable domain of TCR clone 295685 (TRAV13-1, TRAJ21)
CAAKEGFNKFYF

SEQ ID NO: 591370 - protein, 14 aa, Homo sapiens
  CDR3 for beta chain variable domain of TCR clone 295685 (TRBV20-1, TRBJ2-1)
CSARRLAEANEQFF

SEQ ID NO: 591371 - protein, 15 aa, Homo sapiens
  CDR3 for alpha chain variable domain of TCR clone 295686 (TRAV38-1, TRAJ37)
CAFIHGSGNTGKLIF

SEQ ID NO: 591372 - protein, 12 aa, Homo sapiens
  CDR3 for beta chain variable domain of TCR clone 295686 (TRBV7-9, TRBJ2-7)
CDSSFGSYEQYF

SEQ ID NO: 591373 - protein, 16 aa, Homo sapiens
  CDR3 for alpha chain variable domain of TCR clone 295687 (TRAV30, TRAJ24)
CGTEIVDADSWGKYQF

SEQ ID NO: 591374 - protein, 15 aa, Homo sapiens
  CDR3 for beta chain variable domain of TCR clone 295687 (TRBV20-1, TRBJ2-6)
CSARDRGPGANVLTF

SEQ ID NO: 591375 - protein, 13 aa, Homo sapiens
  CDR3 for alpha chain variable domain of TCR clone 295688 (TRAV8-3, TRAJ44)
RAVVPGTASKLTF

SEQ ID NO: 591376 - protein, 14 aa, Homo sapiens
  CDR3 for beta chain variable domain of TCR clone 295688 (TRBV11-2, TRBJ2-3)
CASRRLARTDTQYF

SEQ ID NO: 591377 - protein, 15 aa, Homo sapiens
  CDR3 for alpha chain variable domain of TCR clone 295689 (TRAV16, TRAJ17)
CALSGNKAAGNKLTF

SEQ ID NO: 591378 - protein, 16 aa, Homo sapiens
  CDR3 for beta chain variable domain of TCR clone 295689 (TRBV7-6, TRBJ1-6)
CASSSLPAGEYSHLHF

SEQ ID NO: 591379 - protein, 10 aa, Homo sapiens
  CDR3 for alpha chain variable domain of TCR clone 295690 (TRAV8-4, TRAJ43)
CAVSADDMRF

SEQ ID NO: 591380 - protein, 15 aa, Homo sapiens
  CDR3 for beta chain variable domain of TCR clone 295690 (TRBV5-1, TRBJ1-4)
CASSSWTGREEKLFF

SEQ ID NO: 591381 - protein, 15 aa, Homo sapiens
  CDR3 for alpha chain variable domain of TCR clone 295691 (TRAV38-2/DV8, TRAJ48)
CAYRSGGVGNEKLTV

SEQ ID NO: 591382 - protein, 16 aa, Homo sapiens
  CDR3 for beta chain variable domain of TCR clone 295691 (TRBV28, TRBJ2-7)
CASSPWVATGDLSQYF

SEQ ID NO: 591383 - protein, 13 aa, Homo sapiens
  CDR3 for alpha chain variable domain of TCR clone 295692 (TRAV2, TRAJ40)
CAVVTSGTYKYIF

SEQ ID NO: 591384 - protein, 16 aa, Homo sapiens
  CDR3 for beta chain variable domain of TCR clone 295692 (TRBV7-9, TRBJ1-3)
CASSLGAGSSANTIYF

SEQ ID NO: 591385 - protein, 11 aa, Homo sapiens
  CDR3 for alpha chain variable domain of TCR clone 295693 (TRAV2, TRAJ33)
CAVDSNYQLIW

SEQ ID NO: 591386 - protein, 15 aa, Homo sapiens
  CDR3 for beta chain variable domain of TCR clone 295693 (TRBV19, TRBJ1-2)
CARSVGQVLNYGYTF

SEQ ID NO: 591387 - protein, 11 aa, Homo sapiens
  CDR3 for alpha chain variable domain of TCR clone 295694 (TRAV1-2, TRAJ20)
CAVANDYKLSF

SEQ ID NO: 591388 - protein, 16 aa, Homo sapiens
  CDR3 for beta chain variable domain of TCR clone 295694 (TRBV4-3, TRBJ1-6)
CASSQDPGVYNSPLDF

SEQ ID NO: 591389 - protein, 15 aa, Homo sapiens
  CDR3 for alpha chain variable domain of TCR clone 295695 (TRAV9-2, TRAJ44)
CALSDGPGTASKLTW

SEQ ID NO: 591390 - protein, 18 aa, Homo sapiens
  CDR3 for beta chain variable domain of TCR clone 295695 (TRBV4-1, TRBJ1-4)
CASSPRTGGAWTNEKLFF

SEQ ID NO: 591391 - protein, 14 aa, Homo sapiens
  CDR3 for alpha chain variable domain of TCR clone 295696 (TRAV13-1, TRAJ9)
CAASALTGGFKTIF

SEQ ID NO: 591392 - protein, 13 aa, Homo sapiens
  CDR3 for beta chain variable domain of TCR clone 295696 (TRBV9, TRBJ2-7)
CASSVAEYYEQYF

SEQ ID NO: 591393 - protein, 15 aa, Homo sapiens
  CDR3 for alpha chain variable domain of TCR clone 295697 (TRAV21, TRAJ24)
CAARSSTDSWGKLQF

SEQ ID NO: 591394 - protein, 15 aa, Homo sapiens
  CDR3 for beta chain variable domain of TCR clone 295697 (TRBV9, TRBJ2-1)
CASSLAGSSYNEQFF

SEQ ID NO: 591395 - protein, 14 aa, Homo sapiens
  CDR3 for alpha chain variable domain of TCR clone 295698 (TRAV1-2, TRAJ16)
CAVNRFSDGQKLLF

SEQ ID NO: 591396 - protein, 13 aa, Homo sapiens
  CDR3 for beta chain variable domain of TCR clone 295698 (TRBV25-1, TRBJ2-6)
CASRGPGANVLTF

SEQ ID NO: 591397 - protein, 11 aa, Homo sapiens
  CDR3 for alpha chain variable domain of TCR clone 295699 (TRAV1-2, TRAJ20)
CAVDNDYKLSF

SEQ ID NO: 591398 - protein, 18 aa, Homo sapiens
  CDR3 for beta chain variable domain of TCR clone 295699 (TRBV20-1, TRBJ2-6)
CSAETTPTHGSWANVLTF

SEQ ID NO: 591399 - protein, 10 aa, Homo sapiens
  CDR3 for alpha chain variable domain of TCR clone 295700 (TRAV12-3, TRAJ49)
CAMNDDQFYF

SEQ ID NO: 591400 - protein, 15 aa, Homo sapiens
  CDR3 for beta chain variable domain of TCR clone 295700 (TRBV27, TRBJ2-1)
CASSNGGVSSNEQFF

SEQ ID NO: 591401 - protein, 12 aa, Homo sapiens
  CDR3 for alpha chain variable domain of TCR clone 295701 (TRAV9-2, TRAJ20)
CALSGGDYKLSF

SEQ ID NO: 591402 - protein, 13 aa, Homo sapiens
  CDR3 for beta chain variable domain of TCR clone 295701 (TRBV11-2, TRBJ1-6)
CASSLAGVSPLHF

SEQ ID NO: 591403 - protein, 14 aa, Homo sapiens
  CDR3 for alpha chain variable domain of TCR clone 295702 (TRAV16, TRAJ48)
CALTPGFGREKLTF

SEQ ID NO: 591404 - protein, 14 aa, Homo sapiens
  CDR3 for beta chain variable domain of TCR clone 295702 (TRBV7-2, TRBJ2-7)
CASSSISGFSEQYF

SEQ ID NO: 591405 - protein, 10 aa, Homo sapiens
  CDR3 for alpha chain variable domain of TCR clone 295703 (TRAV27, TRAJ58)
PETSGSRLTF

SEQ ID NO: 591406 - protein, 13 aa, Homo sapiens
  CDR3 for beta chain variable domain of TCR clone 295703 (TRBV10-3, TRBJ2-7)
CASKLAVNYEQYF

SEQ ID NO: 591407 - protein, 15 aa, Homo sapiens
  CDR3 for alpha chain variable domain of TCR clone 295704 (TRAV17, TRAJ37)
CATDGGSSNTGKLIV

SEQ ID NO: 591408 - protein, 15 aa, Homo sapiens
  CDR3 for beta chain variable domain of TCR clone 295704 (TRBV28, TRBJ2-5)
CASSSGRTIQETQYF

SEQ ID NO: 591409 - protein, 14 aa, Homo sapiens
  CDR3 for alpha chain variable domain of TCR clone 295705 (TRAV12-2, TRAJ44)
CAVNPAGTASKLTV

SEQ ID NO: 591410 - protein, 15 aa, Homo sapiens
  CDR3 for beta chain variable domain of TCR clone 295705 (TRBV28, TRBJ2-7)
CASSVRQVSSYEQYF

SEQ ID NO: 591411 - protein, 13 aa, Homo sapiens
  CDR3 for alpha chain variable domain of TCR clone 295706 (TRAV20, TRAJ37)
CAGCSSNTGKLIF

SEQ ID NO: 591412 - protein, 11 aa, Homo sapiens
  CDR3 for beta chain variable domain of TCR clone 295706 (TRBV12-4, TRBJ2-3)
CASTSTDTQYF

SEQ ID NO: 591413 - protein, 14 aa, Homo sapiens
  CDR3 for alpha chain variable domain of TCR clone 295707 (TRAV16, TRAJ54)
CALRLIQGAQKLVS

SEQ ID NO: 591414 - protein, 15 aa, Homo sapiens
  CDR3 for beta chain variable domain of TCR clone 295707 (TRBV20-1, TRBJ2-7)
CSARDRVSGMDEQYF

SEQ ID NO: 591415 - protein, 18 aa, Homo sapiens
  CDR3 for alpha chain variable domain of TCR clone 295708 (TRAV12-3, TRAJ52)
CAMSALNAGGTSYGKLTF

SEQ ID NO: 591416 - protein, 13 aa, Homo sapiens
  CDR3 for beta chain variable domain of TCR clone 295708 (TRBV27, TRBJ1-1)
CASSVSIGAEAFF

SEQ ID NO: 591417 - protein, 14 aa, Homo sapiens
  CDR3 for alpha chain variable domain of TCR clone 295709 (TRAV35, TRAJ13)
CAGSPSGGYQKVTY

SEQ ID NO: 591418 - protein, 13 aa, Homo sapiens
  CDR3 for beta chain variable domain of TCR clone 295709 (TRBV29-1, TRBJ1-1)
CSVGDSRNTEAFF

SEQ ID NO: 591419 - protein, 13 aa, Homo sapiens
  CDR3 for alpha chain variable domain of TCR clone 295710 (TRAV13-1, TRAJ36)
CAASNSGANNLFF

SEQ ID NO: 591420 - protein, 13 aa, Homo sapiens
  CDR3 for beta chain variable domain of TCR clone 295710 (TRBV19, TRBJ2-7)
CASSTKQGYEQYF

SEQ ID NO: 591421 - protein, 13 aa, Homo sapiens
  CDR3 for alpha chain variable domain of TCR clone 295711 (TRAV21, TRAJ20)
CAVGLRVGYKLSF

SEQ ID NO: 591422 - protein, 17 aa, Homo sapiens
  CDR3 for beta chain variable domain of TCR clone 295711 (TRBV13, TRBJ2-3)
CASSLSRVAGGRNTQYF

SEQ ID NO: 591423 - protein, 14 aa, Homo sapiens
  CDR3 for alpha chain variable domain of TCR clone 295712 (TRAV1-2, TRAJ16)
CSVNRFSDGQKLLF

SEQ ID NO: 591424 - protein, 12 aa, Homo sapiens
  CDR3 for beta chain variable domain of TCR clone 295712 (TRBV20-1, TRBJ2-5)
CSAPRSQETQYF

SEQ ID NO: 591425 - protein, 12 aa, Homo sapiens
  CDR3 for alpha chain variable domain of TCR clone 295713 (TRAV20, TRAJ20)
CCAVGRDYKLSF

SEQ ID NO: 591426 - protein, 12 aa, Homo sapiens
  CDR3 for beta chain variable domain of TCR clone 295713 (TRBV7-9, TRBJ2-7)
CASSFVSYEQYF

SEQ ID NO: 591427 - protein, 14 aa, Homo sapiens
  CDR3 for alpha chain variable domain of TCR clone 295714 (TRAV1-1, TRAJ27)
CAVIYNNNAGKSTF

SEQ ID NO: 591428 - protein, 17 aa, Homo sapiens
  CDR3 for beta chain variable domain of TCR clone 295714 (TRBV7-3, TRBJ2-3)
CASSLMKRMRGADTQYF

SEQ ID NO: 591429 - protein, 17 aa, Homo sapiens
  CDR3 for alpha chain variable domain of TCR clone 295715 (TRAV23/DV6, TRAJ57)
CAASSTLSQVGSEKLVF

SEQ ID NO: 591430 - protein, 14 aa, Homo sapiens
  CDR3 for beta chain variable domain of TCR clone 295715 (TRBV25-1, TRBJ1-1)
CASTHLGGNTVAFF

SEQ ID NO: 591431 - protein, 17 aa, Homo sapiens
  CDR3 for alpha chain variable domain of TCR clone 295716 (TRAV8-4, TRAJ11)
CAVSDRGENSGYRTLTF

SEQ ID NO: 591432 - protein, 14 aa, Homo sapiens
  CDR3 for beta chain variable domain of TCR clone 295716 (TRBV20-1, TRBJ2-1)
CSPNDEASYNEQFF

SEQ ID NO: 591433 - protein, 13 aa, Homo sapiens
  CDR3 for alpha chain variable domain of TCR clone 295717 (TRAV21, TRAJ57)
CAVTQGGSEKLVF

SEQ ID NO: 591434 - protein, 16 aa, Homo sapiens
  CDR3 for beta chain variable domain of TCR clone 295717 (TRBV5-1, TRBJ2-2)
CASSLWDTTNTGELFF

SEQ ID NO: 591435 - protein, 12 aa, Homo sapiens
  CDR3 for alpha chain variable domain of TCR clone 295718 (TRAV36/DV7, TRAJ54)
CAVVRGAQKLVF

SEQ ID NO: 591436 - protein, 14 aa, Homo sapiens
  CDR3 for beta chain variable domain of TCR clone 295718 (TRBV7-3, TRBJ1-1)
CASSLMGGNTEAFF

SEQ ID NO: 591437 - protein, 12 aa, Homo sapiens
  CDR3 for alpha chain variable domain of TCR clone 295719 (TRAV12-3, TRAJ41)
FAMSYSGYALNF

SEQ ID NO: 591438 - protein, 13 aa, Homo sapiens
  CDR3 for beta chain variable domain of TCR clone 295719 (TRBV7-3, TRBJ2-1)
CASSLDSYNEQFF

SEQ ID NO: 591439 - protein, 13 aa, Homo sapiens
  CDR3 for alpha chain variable domain of TCR clone 295720 (TRAV20, TRAJ21)
CAVEGYNFNKFYF

SEQ ID NO: 591440 - protein, 13 aa, Homo sapiens
  CDR3 for beta chain variable domain of TCR clone 295720 (TRBV7-2, TRBJ2-2)
CASSLAVTGELFF

SEQ ID NO: 591441 - protein, 11 aa, Homo sapiens
  CDR3 for alpha chain variable domain of TCR clone 295721 (TRAV27, TRAJ47)
SIVEYGNKLVF

SEQ ID NO: 591442 - protein, 14 aa, Homo sapiens
  CDR3 for beta chain variable domain of TCR clone 295721 (TRBV6-1, TRBJ1-3)
CASVQGGGGNTIYF

SEQ ID NO: 591443 - protein, 17 aa, Homo sapiens
  CDR3 for alpha chain variable domain of TCR clone 295722 (TRAV3, TRAJ6)
CAVRDGPRAGGSYTPTF

SEQ ID NO: 591444 - protein, 16 aa, Homo sapiens
  CDR3 for beta chain variable domain of TCR clone 295722 (TRBV7-2, TRBJ2-5)
CASSPFPTGGEETQYF

SEQ ID NO: 591445 - protein, 11 aa, Homo sapiens
  CDR3 for alpha chain variable domain of TCR clone 295723 (TRAV21, TRAJ11)
CAVNGYSTLTF

SEQ ID NO: 591446 - protein, 11 aa, Homo sapiens
  CDR3 for beta chain variable domain of TCR clone 295723 (TRBV19, TRBJ1-1)
CASSIGSEAFV

SEQ ID NO: 591447 - protein, 14 aa, Homo sapiens
  CDR3 for alpha chain variable domain of TCR clone 295724 (TRAV12-3, TRAJ42)
CAMNYGGSQGNLIF

SEQ ID NO: 591448 - protein, 17 aa, Homo sapiens
  CDR3 for beta chain variable domain of TCR clone 295724 (TRBV4-3, TRBJ2-3)
CASSHDPLAGAVDTQYF

SEQ ID NO: 591449 - protein, 14 aa, Homo sapiens
  CDR3 for alpha chain variable domain of TCR clone 295725 (TRAV12-3, TRAJ10)
SHLPLTGGGNKLTF

SEQ ID NO: 591450 - protein, 15 aa, Homo sapiens
  CDR3 for beta chain variable domain of TCR clone 295725 (TRBV7-9, TRBJ1-4)
CASSRTVGFNEKLFF

SEQ ID NO: 591451 - protein, 14 aa, Homo sapiens
  CDR3 for alpha chain variable domain of TCR clone 295726 (TRAV12-2, TRAJ45)
CAVYSGGGADGLTF

SEQ ID NO: 591452 - protein, 15 aa, Homo sapiens
  CDR3 for beta chain variable domain of TCR clone 295726 (TRBV6-5, TRBJ1-2)
CASSYSQAFNYGYTF

SEQ ID NO: 591453 - protein, 16 aa, Homo sapiens
  CDR3 for alpha chain variable domain of TCR clone 295727 (TRAV3, TRAJ10)
CAVRDMRAGGGNKLTL

SEQ ID NO: 591454 - protein, 14 aa, Homo sapiens
  CDR3 for beta chain variable domain of TCR clone 295727 (TRBV7-2, TRBJ1-4)
CASSVVEGGEKLFF

SEQ ID NO: 591455 - protein, 14 aa, Homo sapiens
  CDR3 for alpha chain variable domain of TCR clone 295728 (TRAV1-2, TRAJ8)
CSVREDTGFQKLVF

SEQ ID NO: 591456 - protein, 16 aa, Homo sapiens
  CDR3 for beta chain variable domain of TCR clone 295728 (TRBV29-1, TRBJ2-6)
CSVEDITYSGANVLTF

SEQ ID NO: 591457 - protein, 13 aa, Homo sapiens
  CDR3 for alpha chain variable domain of TCR clone 295729 (TRAV27, TRAJ6)
CAGGTRGSYIPTF

SEQ ID NO: 591458 - protein, 16 aa, Homo sapiens
  CDR3 for beta chain variable domain of TCR clone 295729 (TRBV5-7, TRBJ2-7)
CASSSPGGRTPYEQYF

SEQ ID NO: 591459 - protein, 14 aa, Homo sapiens
  CDR3 for alpha chain variable domain of TCR clone 295730 (TRAV25, TRAJ44)
CPVFPTGTASKLTF

SEQ ID NO: 591460 - protein, 14 aa, Homo sapiens
  CDR3 for beta chain variable domain of TCR clone 295730 (TRBV19, TRBJ1-1)
CASTGHRLNTEAFF

SEQ ID NO: 591461 - protein, 14 aa, Homo sapiens
  CDR3 for alpha chain variable domain of TCR clone 295731 (TRAV12-2, TRAJ13)
CAVKKTGGYQKVTF

SEQ ID NO: 591462 - protein, 13 aa, Homo sapiens
  CDR3 for beta chain variable domain of TCR clone 295731 (TRBV19, TRBJ1-5)
CASSIGGNQPQHF

SEQ ID NO: 591463 - protein, 21 aa, Homo sapiens
  CDR3 for alpha chain variable domain of TCR clone 295732 (TRAV12-3, TRAJ18)
CAMSAEAQPWGGYPLEEELSL

SEQ ID NO: 591464 - protein, 13 aa, Homo sapiens
  CDR3 for beta chain variable domain of TCR clone 295732 (TRBV15, TRBJ1-6)
CATSGGLNSPLHF

SEQ ID NO: 591465 - protein, 14 aa, Homo sapiens
  CDR3 for alpha chain variable domain of TCR clone 295733 (TRAV3, TRAJ34)
CAVGDINNTDKLIF

SEQ ID NO: 591466 - protein, 14 aa, Homo sapiens
  CDR3 for beta chain variable domain of TCR clone 295733 (TRBV7-2, TRBJ2-2)
CAISLGQNTGELFF

SEQ ID NO: 591467 - protein, 18 aa, Homo sapiens
  CDR3 for alpha chain variable domain of TCR clone 295734 (TRAV21, TRAJ52)
CAVRPSPAGGTSYGKMTF

SEQ ID NO: 591468 - protein, 16 aa, Homo sapiens
  CDR3 for beta chain variable domain of TCR clone 295734 (TRBV7-3, TRBJ2-1)
CASSLEGYRSYNEQFF

SEQ ID NO: 591469 - protein, 17 aa, Homo sapiens
  CDR3 for alpha chain variable domain of TCR clone 295735 (TRAV8-3, TRAJ28)
CAVGATLGLGVTNSLSG

SEQ ID NO: 591470 - protein, 14 aa, Homo sapiens
  CDR3 for beta chain variable domain of TCR clone 295735 (TRBV7-2, TRBJ2-1)
CASSLGVGYNEQFL

SEQ ID NO: 591471 - protein, 17 aa, Homo sapiens
  CDR3 for alpha chain variable domain of TCR clone 295736 (TRAV19, TRAJ58)
CALRGLRVGTSGSRLTF

SEQ ID NO: 591472 - protein, 15 aa, Homo sapiens
  CDR3 for beta chain variable domain of TCR clone 295736 (TRBV19, TRBJ1-1)
CASTSGQIQNTEAFF

SEQ ID NO: 591473 - protein, 12 aa, Homo sapiens
  CDR3 for alpha chain variable domain of TCR clone 295737 (TRAV24, TRAJ40)
CAFMPGTYKYIF

SEQ ID NO: 591474 - protein, 11 aa, Homo sapiens
  CDR3 for beta chain variable domain of TCR clone 295737 (TRBV10-1, TRBJ2-3)
FASSDSDTQYF

SEQ ID NO: 591475 - protein, 11 aa, Homo sapiens
  CDR3 for alpha chain variable domain of TCR clone 295738 (TRAV29/DV5, TRAJ37)
CATSNKGKLIF

SEQ ID NO: 591476 - protein, 12 aa, Homo sapiens
  CDR3 for beta chain variable domain of TCR clone 295738 (TRBV11-2, TRBJ2-1)
CASSPGNNEQFF

SEQ ID NO: 591477 - protein, 14 aa, Homo sapiens
  CDR3 for alpha chain variable domain of TCR clone 295739 (TRAV27, TRAJ13)
CRSSNSGGYQKVTF

SEQ ID NO: 591478 - protein, 14 aa, Homo sapiens
  CDR3 for beta chain variable domain of TCR clone 295739 (TRBV19, TRBJ2-2)
CASSTLHRSGELFF

SEQ ID NO: 591479 - protein, 16 aa, Homo sapiens
  CDR3 for alpha chain variable domain of TCR clone 295740 (TRAV1-2, TRAJ10)
CAVRGVLTGRGNKRTF

SEQ ID NO: 591480 - protein, 12 aa, Homo sapiens
  CDR3 for beta chain variable domain of TCR clone 295740 (TRBV7-8, TRBJ2-7)
CASSLGDREQYF

SEQ ID NO: 591481 - protein, 16 aa, Homo sapiens
  CDR3 for alpha chain variable domain of TCR clone 295741 (TRAV13-1, TRAJ22)
CAAKGVRSGSARQLTF

SEQ ID NO: 591482 - protein, 15 aa, Homo sapiens
  CDR3 for beta chain variable domain of TCR clone 295741 (TRBV9, TRBJ1-6)
CASSVAGTGDSPLHF

SEQ ID NO: 591483 - protein, 13 aa, Homo sapiens
  CDR3 for alpha chain variable domain of TCR clone 295742 (TRAV30, TRAJ24)
CGTEGNGWGKFQF

SEQ ID NO: 591484 - protein, 14 aa, Homo sapiens
  CDR3 for beta chain variable domain of TCR clone 295742 (TRBV7-2, TRBJ2-7)
CASSPKTSFYEQYF

SEQ ID NO: 591485 - protein, 17 aa, Homo sapiens
  CDR3 for alpha chain variable domain of TCR clone 295743 (TRAV26-1, TRAJ37)
CIVRVITASSNTGKLIF

SEQ ID NO: 591486 - protein, 13 aa, Homo sapiens
  CDR3 for beta chain variable domain of TCR clone 295743 (TRBV2, TRBJ1-4)
CASSERAGEKLFF

SEQ ID NO: 591487 - protein, 15 aa, Homo sapiens
  CDR3 for alpha chain variable domain of TCR clone 295744 (TRAV35, TRAJ20)
CAGQLVGSNDYKPSF

SEQ ID NO: 591488 - protein, 13 aa, Homo sapiens
  CDR3 for beta chain variable domain of TCR clone 295744 (TRBV19, TRBJ2-7)
CASSKTGTHEQYF

SEQ ID NO: 591489 - protein, 17 aa, Homo sapiens
  CDR3 for alpha chain variable domain of TCR clone 295745 (TRAV17, TRAJ7)
CATLGRLVFGKGNQVVV

SEQ ID NO: 591490 - protein, 13 aa, Homo sapiens
  CDR3 for beta chain variable domain of TCR clone 295745 (TRBV12-4, TRBJ2-7)
CASSLERVREQYF

SEQ ID NO: 591491 - protein, 16 aa, Homo sapiens
  CDR3 for alpha chain variable domain of TCR clone 295746 (TRAV20, TRAJ10)
CAVLRGLTGGGNKLTF

SEQ ID NO: 591492 - protein, 14 aa, Homo sapiens
  CDR3 for beta chain variable domain of TCR clone 295746 (TRBV19, TRBJ1-5)
CASRAPDSFLPQHF

SEQ ID NO: 591493 - protein, 14 aa, Homo sapiens
  CDR3 for alpha chain variable domain of TCR clone 295747 (TRAV1-2, TRAJ16)
CAVNRFSDGQKLLL

SEQ ID NO: 591494 - protein, 10 aa, Homo sapiens
  CDR3 for beta chain variable domain of TCR clone 295747 (TRBV20-1, TRBJ2-7)
RVSGMDEQYF

SEQ ID NO: 591495 - protein, 13 aa, Homo sapiens
  CDR3 for alpha chain variable domain of TCR clone 295748 (TRAV12-2, TRAJ39)
CAVNNNAGNMLTF

SEQ ID NO: 591496 - protein, 12 aa, Homo sapiens
  CDR3 for beta chain variable domain of TCR clone 295748 (TRBV5-1, TRBJ2-7)
CASSVRGYEQYF

SEQ ID NO: 591497 - protein, 17 aa, Homo sapiens
  CDR3 for alpha chain variable domain of TCR clone 295749 (TRAV8-1, TRAJ43)
CAVTNDMRFGAGTRLTV

SEQ ID NO: 591498 - protein, 17 aa, Homo sapiens
  CDR3 for beta chain variable domain of TCR clone 295749 (TRBV5-4, TRBJ2-1)
CASISAGGRGPYNEQFF

SEQ ID NO: 591499 - protein, 11 aa, Homo sapiens
  CDR3 for alpha chain variable domain of TCR clone 295750 (TRAV2, TRAJ13)
CASGGYQKFTF

SEQ ID NO: 591500 - protein, 17 aa, Homo sapiens
  CDR3 for beta chain variable domain of TCR clone 295750 (TRBV20-1, TRBJ2-2)
CSASGSGQGGLTGELFF

SEQ ID NO: 591501 - protein, 13 aa, Homo sapiens
  CDR3 for alpha chain variable domain of TCR clone 295751 (TRAV13-1, TRAJ39)
CSKYSNAGNMLTF

SEQ ID NO: 591502 - protein, 15 aa, Homo sapiens
  CDR3 for beta chain variable domain of TCR clone 295751 (TRBV29-1, TRBJ2-1)
CSVGRHALFYNEQFF

SEQ ID NO: 591503 - protein, 13 aa, Homo sapiens
  CDR3 for alpha chain variable domain of TCR clone 295752 (TRAV12-1, TRAJ34)
CVVNERNTDKLIF

SEQ ID NO: 591504 - protein, 17 aa, Homo sapiens
  CDR3 for beta chain variable domain of TCR clone 295752 (TRBV4-1, TRBJ1-5)
CASSQHPPTVANQPQHF

SEQ ID NO: 591505 - protein, 17 aa, Homo sapiens
  CDR3 for alpha chain variable domain of TCR clone 295753 (TRAV26-1, TRAJ58)
CIVRVGAEETSGSRLTC

SEQ ID NO: 591506 - protein, 13 aa, Homo sapiens
  CDR3 for beta chain variable domain of TCR clone 295753 (TRBV12-5, TRBJ1-2)
CASGVRTGNGYTF

SEQ ID NO: 591507 - protein, 13 aa, Homo sapiens
  CDR3 for alpha chain variable domain of TCR clone 295754 (TRAV12-2, TRAJ9)
CAVLETGGVKTIF

SEQ ID NO: 591508 - protein, 15 aa, Homo sapiens
  CDR3 for beta chain variable domain of TCR clone 295754 (TRBV6-3, TRBJ2-7)
CASSRTGVNLYEQYF

SEQ ID NO: 591509 - protein, 18 aa, Homo sapiens
  CDR3 for alpha chain variable domain of TCR clone 295755 (TRAV26-1, TRAJ52)
CIVRAAGAGGTSYGKLTF

SEQ ID NO: 591510 - protein, 13 aa, Homo sapiens
  CDR3 for beta chain variable domain of TCR clone 295755 (TRBV7-8, TRBJ1-2)
CASSAQSYYGYTF

SEQ ID NO: 591511 - protein, 14 aa, Homo sapiens
  CDR3 for alpha chain variable domain of TCR clone 295756 (TRAV36/DV7, TRAJ54)
CCGETGSGSQKLVF

SEQ ID NO: 591512 - protein, 14 aa, Homo sapiens
  CDR3 for beta chain variable domain of TCR clone 295756 (TRBV4-3, TRBJ2-2)
CASSQGHVTGELFC

SEQ ID NO: 591513 - protein, 13 aa, Homo sapiens
  CDR3 for alpha chain variable domain of TCR clone 295757 (TRAV12-2, TRAJ10)
CAVPTGGGNKLTF

SEQ ID NO: 591514 - protein, 13 aa, Homo sapiens
  CDR3 for beta chain variable domain of TCR clone 295757 (TRBV20-1, TRBJ1-1)
CSARGGGNTEAFF

SEQ ID NO: 591515 - protein, 16 aa, Homo sapiens
  CDR3 for alpha chain variable domain of TCR clone 295758 (TRAV12-2, TRAJ52)
CRLANAGGTSYGKLTF

SEQ ID NO: 591516 - protein, 13 aa, Homo sapiens
  CDR3 for beta chain variable domain of TCR clone 295758 (TRBV10-3, TRBJ2-7)
CASKRAVNYEQYF

SEQ ID NO: 591517 - protein, 12 aa, Homo sapiens
  CDR3 for alpha chain variable domain of TCR clone 295759 (TRAV17, TRAJ30)
CVPERRDDKIIF

SEQ ID NO: 591518 - protein, 15 aa, Homo sapiens
  CDR3 for beta chain variable domain of TCR clone 295759 (TRBV19, TRBJ1-1)
CASTSGQIQNTEAFF

SEQ ID NO: 591519 - protein, 13 aa, Homo sapiens
  CDR3 for alpha chain variable domain of TCR clone 295760 (TRAV13-1, TRAJ6)
CARGSGGSYIPTF

SEQ ID NO: 591520 - protein, 14 aa, Homo sapiens
  CDR3 for beta chain variable domain of TCR clone 295760 (TRBV7-9, TRBJ2-2)
CASSLVQDTGELFF

SEQ ID NO: 591521 - protein, 13 aa, Homo sapiens
  CDR3 for alpha chain variable domain of TCR clone 295761 (TRAV12-1, TRAJ33)
CGDAPDSNYQLIW

SEQ ID NO: 591522 - protein, 11 aa, Homo sapiens
  CDR3 for beta chain variable domain of TCR clone 295761 (TRBV12-4, TRBJ2-2)
CASSLTGELFF

SEQ ID NO: 591523 - protein, 15 aa, Homo sapiens
  CDR3 for alpha chain variable domain of TCR clone 295762 (TRAV12-3, TRAJ6)
CAMSTTTGGSYIPTF

SEQ ID NO: 591524 - protein, 17 aa, Homo sapiens
  CDR3 for beta chain variable domain of TCR clone 295762 (TRBV11-2, TRBJ2-1)
CASSLYPPGVEYNEQFF

SEQ ID NO: 591525 - protein, 15 aa, Homo sapiens
  CDR3 for alpha chain variable domain of TCR clone 295763 (TRAV8-4, TRAJ48)
CAVSAAYFGNEKLTF

SEQ ID NO: 591526 - protein, 12 aa, Homo sapiens
  CDR3 for beta chain variable domain of TCR clone 295763 (TRBV3-1, TRBJ2-5)
CASSQRGETKYF

SEQ ID NO: 591527 - protein, 14 aa, Homo sapiens
  CDR3 for alpha chain variable domain of TCR clone 295764 (TRAV12-2, TRAJ33)
CAVKRARSNYKLIW

SEQ ID NO: 591528 - protein, 14 aa, Homo sapiens
  CDR3 for beta chain variable domain of TCR clone 295764 (TRBV13, TRBJ2-7)
CASSLKGASYEQYF

SEQ ID NO: 591529 - protein, 17 aa, Homo sapiens
  CDR3 for alpha chain variable domain of TCR clone 295765 (TRAV3, TRAJ6)
CAVRDGPRAGGSYIPPV

SEQ ID NO: 591530 - protein, 14 aa, Homo sapiens
  CDR3 for beta chain variable domain of TCR clone 295765 (TRBV7-2, TRBJ2-7)
CASSPKTSFYEQYF

SEQ ID NO: 591531 - protein, 13 aa, Homo sapiens
  CDR3 for alpha chain variable domain of TCR clone 295766 (TRAV12-1, TRAJ26)
CVVIDNYGQNFVF

SEQ ID NO: 591532 - protein, 14 aa, Homo sapiens
  CDR3 for beta chain variable domain of TCR clone 295766 (TRBV6-1, TRBJ2-2)
CASSLFVGGGELFF

SEQ ID NO: 591533 - protein, 13 aa, Homo sapiens
  CDR3 for alpha chain variable domain of TCR clone 295767 (TRAV2, TRAJ40)
CAVVTSGTYKYIF

SEQ ID NO: 591534 - protein, 15 aa, Homo sapiens
  CDR3 for beta chain variable domain of TCR clone 295767 (TRBV18, TRBJ2-1)
CASSLTTAVYNEQFF

SEQ ID NO: 591535 - protein, 18 aa, Homo sapiens
  CDR3 for alpha chain variable domain of TCR clone 295768 (TRAV21, TRAJ52)
CAVRPSPAGGTSYGKLTF

SEQ ID NO: 591536 - protein, 12 aa, Homo sapiens
  CDR3 for beta chain variable domain of TCR clone 295768 (TRBV2, TRBJ2-7)
CASKRGSYEQYF

SEQ ID NO: 591537 - protein, 13 aa, Homo sapiens
  CDR3 for alpha chain variable domain of TCR clone 295769 (TRAV3, TRAJ27)
CAVRPLGAGKSTF

SEQ ID NO: 591538 - protein, 15 aa, Homo sapiens
  CDR3 for beta chain variable domain of TCR clone 295769 (TRBV10-3, TRBJ2-3)
CAISLTSGGTDTQYF

SEQ ID NO: 591539 - protein, 15 aa, Homo sapiens
  CDR3 for alpha chain variable domain of TCR clone 295770 (TRAV2, TRAJ15)
RAVEDREQAGTALIF

SEQ ID NO: 591540 - protein, 17 aa, Homo sapiens
  CDR3 for beta chain variable domain of TCR clone 295770 (TRBV7-8, TRBJ2-6)
CASSAGTGGAGANVLTF

SEQ ID NO: 591541 - protein, 15 aa, Homo sapiens
  CDR3 for alpha chain variable domain of TCR clone 295771 (TRAV20, TRAJ53)
CAVQERGGSNYKLTF

SEQ ID NO: 591542 - protein, 12 aa, Homo sapiens
  CDR3 for beta chain variable domain of TCR clone 295771 (TRBV7-2, TRBJ2-2)
CASSLPTGELFF

SEQ ID NO: 591543 - protein, 12 aa, Homo sapiens
  CDR3 for alpha chain variable domain of TCR clone 295772 (TRAV27, TRAJ41)
CAGRNSGYALNF

SEQ ID NO: 591544 - protein, 15 aa, Homo sapiens
  CDR3 for beta chain variable domain of TCR clone 295772 (TRBV20-1, TRBJ1-5)
CSATSDRGLGQPQHL

SEQ ID NO: 591545 - protein, 13 aa, Homo sapiens
  CDR3 for alpha chain variable domain of TCR clone 295773 (TRAV12-3, TRAJ7)
CAMTPYGNNRLAF

SEQ ID NO: 591546 - protein, 15 aa, Homo sapiens
  CDR3 for beta chain variable domain of TCR clone 295773 (TRBV7-2, TRBJ2-7)
CASSLKGALTYEQYF

SEQ ID NO: 591547 - protein, 12 aa, Homo sapiens
  CDR3 for alpha chain variable domain of TCR clone 295774 (TRAV16, TRAJ27)
CALNTNAGKYTF

SEQ ID NO: 591548 - protein, 14 aa, Homo sapiens
  CDR3 for beta chain variable domain of TCR clone 295774 (TRBV5-1, TRBJ2-7)
CASSLGVRAYEQYF

SEQ ID NO: 591549 - protein, 13 aa, Homo sapiens
  CDR3 for alpha chain variable domain of TCR clone 295775 (TRAV3, TRAJ27)
CAVRHLGAGKSTF

SEQ ID NO: 591550 - protein, 13 aa, Homo sapiens
  CDR3 for beta chain variable domain of TCR clone 295775 (TRBV7-9, TRBJ2-3)
CASSPRSTDTQYF

SEQ ID NO: 591551 - protein, 13 aa, Homo sapiens
  CDR3 for alpha chain variable domain of TCR clone 295776 (TRAV1-1, TRAJ38)
CASNAGNNRELIW

SEQ ID NO: 591552 - protein, 14 aa, Homo sapiens
  CDR3 for beta chain variable domain of TCR clone 295776 (TRBV15, TRBJ2-1)
CATSGVEDYNEQFF

SEQ ID NO: 591553 - protein, 19 aa, Homo sapiens
  CDR3 for alpha chain variable domain of TCR clone 295777 (TRAV26-1, TRAJ28)
CIVRVAHAYSGAGSYRLTF

SEQ ID NO: 591554 - protein, 15 aa, Homo sapiens
  CDR3 for beta chain variable domain of TCR clone 295777 (TRBV19, TRBJ1-2)
CASSVGQVLNYGYTF

SEQ ID NO: 591555 - protein, 10 aa, Homo sapiens
  CDR3 for alpha chain variable domain of TCR clone 295778 (TRAV25, TRAJ53)
CAGSNYKLTF

SEQ ID NO: 591556 - protein, 14 aa, Homo sapiens
  CDR3 for beta chain variable domain of TCR clone 295778 (TRBV7-7, TRBJ2-7)
CASSLGRGVGEQYV

SEQ ID NO: 591557 - protein, 14 aa, Homo sapiens
  CDR3 for alpha chain variable domain of TCR clone 295779 (TRAV23/DV6, TRAJ17)
FAASVQAAGNKLTF

SEQ ID NO: 591558 - protein, 18 aa, Homo sapiens
  CDR3 for beta chain variable domain of TCR clone 295779 (TRBV20-1, TRBJ2-7)
CSAGLPPRSGGSPYEQYF

SEQ ID NO: 591559 - protein, 14 aa, Homo sapiens
  CDR3 for alpha chain variable domain of TCR clone 295780 (TRAV12-2, TRAJ13)
CAVKKTGGYQKGTF

SEQ ID NO: 591560 - protein, 12 aa, Homo sapiens
  CDR3 for beta chain variable domain of TCR clone 295780 (TRBV7-9, TRBJ2-7)
CASSLEGYEQYF

SEQ ID NO: 591561 - protein, 17 aa, Homo sapiens
  CDR3 for alpha chain variable domain of TCR clone 295781 (TRAV3, TRAJ6)
CAVRDGPRAGGSYIPTF

SEQ ID NO: 591562 - protein, 18 aa, Homo sapiens
  CDR3 for beta chain variable domain of TCR clone 295781 (TRBV7-3, TRBJ2-3)
CASSSTGTYPGSTYTQYF

SEQ ID NO: 591563 - protein, 12 aa, Homo sapiens
  CDR3 for alpha chain variable domain of TCR clone 295782 (TRAV4, TRAJ6)
CLAPGGSYIPTF

SEQ ID NO: 591564 - protein, 15 aa, Homo sapiens
  CDR3 for beta chain variable domain of TCR clone 295782 (TRBV7-9, TRBJ1-4)
CASSRTGGFNEKLFF

SEQ ID NO: 591565 - protein, 13 aa, Homo sapiens
  CDR3 for alpha chain variable domain of TCR clone 295783 (TRAV12-1, TRAJ34)
CVVTGYNTDKLIF

SEQ ID NO: 591566 - protein, 13 aa, Homo sapiens
  CDR3 for beta chain variable domain of TCR clone 295783 (TRBV28, TRBJ2-7)
CDSKAGGVYEQYF

SEQ ID NO: 591567 - protein, 14 aa, Homo sapiens
  CDR3 for alpha chain variable domain of TCR clone 295784 (TRAV26-1, TRAJ45)
CIEVTGGGADGLTF

SEQ ID NO: 591568 - protein, 14 aa, Homo sapiens
  CDR3 for beta chain variable domain of TCR clone 295784 (TRBV7-8, TRBJ2-7)
CASSPRDRVYEQYF

SEQ ID NO: 591569 - protein, 14 aa, Homo sapiens
  CDR3 for alpha chain variable domain of TCR clone 295785 (TRAV8-4, TRAJ9)
CAVTFNTGGFKTIF

SEQ ID NO: 591570 - protein, 14 aa, Homo sapiens
  CDR3 for beta chain variable domain of TCR clone 295785 (TRBV7-2, TRBJ2-7)
CASSLYPGRYEQYF

SEQ ID NO: 591571 - protein, 14 aa, Homo sapiens
  CDR3 for alpha chain variable domain of TCR clone 295786 (TRAV12-2, TRAJ53)
CAVKGGGSNYKLTF

SEQ ID NO: 591572 - protein, 14 aa, Homo sapiens
  CDR3 for beta chain variable domain of TCR clone 295786 (TRBV5-4, TRBJ1-1)
CASSLDSRRDEDFF

SEQ ID NO: 591573 - protein, 16 aa, Homo sapiens
  CDR3 for alpha chain variable domain of TCR clone 295787 (TRAV30, TRAJ24)
CVTEIVDADSWGKFQF

SEQ ID NO: 591574 - protein, 17 aa, Homo sapiens
  CDR3 for beta chain variable domain of TCR clone 295787 (TRBV28, TRBJ2-5)
CASSRQGGLAGAETQYF

SEQ ID NO: 591575 - protein, 12 aa, Homo sapiens
  CDR3 for alpha chain variable domain of TCR clone 295788 (TRAV29/DV5, TRAJ49)
CAATDTGNQFYF

SEQ ID NO: 591576 - protein, 16 aa, Homo sapiens
  CDR3 for beta chain variable domain of TCR clone 295788 (TRBV10-3, TRBJ2-1)
CATSGVGDGGGGEQFF

SEQ ID NO: 591577 - protein, 13 aa, Homo sapiens
  CDR3 for alpha chain variable domain of TCR clone 295789 (TRAV20, TRAJ34)
CAVSSYNTDKLIF

SEQ ID NO: 591578 - protein, 15 aa, Homo sapiens
  CDR3 for beta chain variable domain of TCR clone 295789 (TRBV20-1, TRBJ1-2)
WSAAGEGARIYGYTF

SEQ ID NO: 591579 - protein, 16 aa, Homo sapiens
  CDR3 for alpha chain variable domain of TCR clone 295790 (TRAV38-1, TRAJ56)
CAFMKRQTGANSKLTF

SEQ ID NO: 591580 - protein, 14 aa, Homo sapiens
  CDR3 for beta chain variable domain of TCR clone 295790 (TRBV6-1, TRBJ1-3)
CASVRGGGGNTIYF

SEQ ID NO: 591581 - protein, 12 aa, Homo sapiens
  CDR3 for alpha chain variable domain of TCR clone 295791 (TRAV3, TRAJ20)
CAVRDGDYKLSF

SEQ ID NO: 591582 - protein, 15 aa, Homo sapiens
  CDR3 for beta chain variable domain of TCR clone 295791 (TRBV11-2, TRBJ2-1)
CASSKNRGLIYEQFF

SEQ ID NO: 591583 - protein, 12 aa, Homo sapiens
  CDR3 for alpha chain variable domain of TCR clone 295792 (TRAV12-3, TRAJ17)
CVMTLTGNKLTF

SEQ ID NO: 591584 - protein, 14 aa, Homo sapiens
  CDR3 for beta chain variable domain of TCR clone 295792 (TRBV19, TRBJ2-2)
CASSTLHRSGELFF

SEQ ID NO: 591585 - protein, 17 aa, Homo sapiens
  CDR3 for alpha chain variable domain of TCR clone 295793 (TRAV3, TRAJ6)
SAVRDGPRAGGSYLPTF

SEQ ID NO: 591586 - protein, 14 aa, Homo sapiens
  CDR3 for beta chain variable domain of TCR clone 295793 (TRBV7-2, TRBJ2-7)
CASSPKTSFYEQYF

SEQ ID NO: 591587 - protein, 15 aa, Homo sapiens
  CDR3 for alpha chain variable domain of TCR clone 295794 (TRAV3, TRAJ20)
CAVRDSRSNDYKLIF

SEQ ID NO: 591588 - protein, 14 aa, Homo sapiens
  CDR3 for beta chain variable domain of TCR clone 295794 (TRBV20-1, TRBJ2-7)
CSARRGNGIYEQYF

SEQ ID NO: 591589 - protein, 17 aa, Homo sapiens
  CDR3 for alpha chain variable domain of TCR clone 295795 (TRAV3, TRAJ12)
CAVRDGGRMDSSYKLIF

SEQ ID NO: 591590 - protein, 16 aa, Homo sapiens
  CDR3 for beta chain variable domain of TCR clone 295795 (TRBV2, TRBJ2-6)
CASSEVGGAGANVLTF

SEQ ID NO: 591591 - protein, 13 aa, Homo sapiens
  CDR3 for alpha chain variable domain of TCR clone 295796 (TRAV21, TRAJ27)
CAARPGNAGKSTF

SEQ ID NO: 591592 - protein, 16 aa, Homo sapiens
  CDR3 for beta chain variable domain of TCR clone 295796 (TRBV20-1, TRBJ1-2)
CSASMGQGVANYGYTC

SEQ ID NO: 591593 - protein, 13 aa, Homo sapiens
  CDR3 for alpha chain variable domain of TCR clone 295797 (TRAV27, TRAJ45)
CRSSGGGADGLTF

SEQ ID NO: 591594 - protein, 13 aa, Homo sapiens
  CDR3 for beta chain variable domain of TCR clone 295797 (TRBV19, TRBJ2-1)
CATSRGVYNEQFF

SEQ ID NO: 591595 - protein, 19 aa, Homo sapiens
  CDR3 for alpha chain variable domain of TCR clone 295798 (TRAV1-2, TRAJ26)
CLLPLCCERPDNYGQNFVF

SEQ ID NO: 591596 - protein, 18 aa, Homo sapiens
  CDR3 for beta chain variable domain of TCR clone 295798 (TRBV25-1, TRBJ1-2)
CASSGLQNGQGLIFGYTF

SEQ ID NO: 591597 - protein, 15 aa, Homo sapiens
  CDR3 for alpha chain variable domain of TCR clone 295799 (TRAV26-1, TRAJ3)
CIVRSGYSSASKIIF

SEQ ID NO: 591598 - protein, 15 aa, Homo sapiens
  CDR3 for beta chain variable domain of TCR clone 295799 (TRBV7-9, TRBJ1-4)
CASSARTGGNEKLFF

SEQ ID NO: 591599 - protein, 11 aa, Homo sapiens
  CDR3 for alpha chain variable domain of TCR clone 295800 (TRAV13-1, TRAJ15)
CAATPGTALIF

SEQ ID NO: 591600 - protein, 12 aa, Homo sapiens
  CDR3 for beta chain variable domain of TCR clone 295800 (TRBV7-3, TRBJ2-1)
CASSFINNEQFF

SEQ ID NO: 591601 - protein, 18 aa, Homo sapiens
  CDR3 for alpha chain variable domain of TCR clone 295801 (TRAV13-1, TRAJ52)
CAASKRSAGGTSYGKLTF

SEQ ID NO: 591602 - protein, 12 aa, Homo sapiens
  CDR3 for beta chain variable domain of TCR clone 295801 (TRBV12-4, TRBJ1-2)
CQQFTTGKGYAF

SEQ ID NO: 591603 - protein, 13 aa, Homo sapiens
  CDR3 for alpha chain variable domain of TCR clone 295802 (TRAV8-1, TRAJ28)
CAVSGAGSYQLTF

SEQ ID NO: 591604 - protein, 14 aa, Homo sapiens
  CDR3 for beta chain variable domain of TCR clone 295802 (TRBV7-2, TRBJ2-2)
CASRGQGAAGELFV

SEQ ID NO: 591605 - protein, 15 aa, Homo sapiens
  CDR3 for alpha chain variable domain of TCR clone 295803 (TRAV12-2, TRAJ53)
CAVNGGGGSNYKLTF

SEQ ID NO: 591606 - protein, 12 aa, Homo sapiens
  CDR3 for beta chain variable domain of TCR clone 295803 (TRBV29-1, TRBJ2-3)
CSVTGGADTQYF

SEQ ID NO: 591607 - protein, 14 aa, Homo sapiens
  CDR3 for alpha chain variable domain of TCR clone 295804 (TRAV12-3, TRAJ10)
SHLPLTGGGSKLTF

SEQ ID NO: 591608 - protein, 16 aa, Homo sapiens
  CDR3 for beta chain variable domain of TCR clone 295804 (TRBV10-3, TRBJ2-1)
CAISGVGDGGGGEQFF

SEQ ID NO: 591609 - protein, 15 aa, Homo sapiens
  CDR3 for alpha chain variable domain of TCR clone 295805 (TRAV21, TRAJ21)
CAVRRRASTNFTLDL

SEQ ID NO: 591610 - protein, 15 aa, Homo sapiens
  CDR3 for beta chain variable domain of TCR clone 295805 (TRBV2, TRBJ2-1)
CASSELAGGHNEQFF

SEQ ID NO: 591611 - protein, 14 aa, Homo sapiens
  CDR3 for alpha chain variable domain of TCR clone 295806 (TRAV12-2, TRAJ40)
CAVKIPSGTYKYIF

SEQ ID NO: 591612 - protein, 14 aa, Homo sapiens
  CDR3 for beta chain variable domain of TCR clone 295806 (TRBV20-1, TRBJ1-1)
CSAQTRIGGTEDFS

SEQ ID NO: 591613 - protein, 15 aa, Homo sapiens
  CDR3 for alpha chain variable domain of TCR clone 295807 (TRAV34, TRAJ38)
CGADFTPGNNRKLIW

SEQ ID NO: 591614 - protein, 15 aa, Homo sapiens
  CDR3 for beta chain variable domain of TCR clone 295807 (TRBV6-6, TRBJ1-1)
CASSPRGDVETEAFF

SEQ ID NO: 591615 - protein, 14 aa, Homo sapiens
  CDR3 for alpha chain variable domain of TCR clone 295808 (TRAV35, TRAJ44)
CAGRPSRTASKLPF

SEQ ID NO: 591616 - protein, 14 aa, Homo sapiens
  CDR3 for beta chain variable domain of TCR clone 295808 (TRBV7-2, TRBJ1-3)
CASSRGGTGNTIYF

SEQ ID NO: 591617 - protein, 13 aa, Homo sapiens
  CDR3 for alpha chain variable domain of TCR clone 295809 (TRAV12-1, TRAJ6)
CVVFPGGSYIPTF

SEQ ID NO: 591618 - protein, 14 aa, Homo sapiens
  CDR3 for beta chain variable domain of TCR clone 295809 (TRBV7-9, TRBJ2-5)
CASSLDTAQETQYF

SEQ ID NO: 591619 - protein, 20 aa, Homo sapiens
  CDR3 for alpha chain variable domain of TCR clone 295810 (TRAV25, TRAJ21)
TATQTTDVGTYPLSFNKFYF

SEQ ID NO: 591620 - protein, 11 aa, Homo sapiens
  CDR3 for beta chain variable domain of TCR clone 295810 (TRBV29-1, TRBJ2-5)
CSEDRTGTQYF

SEQ ID NO: 591621 - protein, 15 aa, Homo sapiens
  CDR3 for alpha chain variable domain of TCR clone 295811 (TRAV8-3, TRAJ45)
CASSYSGGGADGLTF

SEQ ID NO: 591622 - protein, 16 aa, Homo sapiens
  CDR3 for beta chain variable domain of TCR clone 295811 (TRBV7-8, TRBJ1-2)
CASSLGFSSGEDGYTF

SEQ ID NO: 591623 - protein, 19 aa, Homo sapiens
  CDR3 for alpha chain variable domain of TCR clone 295812 (TRAV3, TRAJ37)
CAVGDIVGGYPSNTGKLIF

SEQ ID NO: 591624 - protein, 14 aa, Homo sapiens
  CDR3 for beta chain variable domain of TCR clone 295812 (TRBV7-8, TRBJ2-3)
CASSLEAGTDTQYF

SEQ ID NO: 591625 - protein, 12 aa, Homo sapiens
  CDR3 for alpha chain variable domain of TCR clone 295813 (TRAV17, TRAJ57)
CATDGGSEKLVF

SEQ ID NO: 591626 - protein, 13 aa, Homo sapiens
  CDR3 for beta chain variable domain of TCR clone 295813 (TRBV7-9, TRBJ2-7)
CSSSVAGAYEQYF

SEQ ID NO: 591627 - protein, 15 aa, Homo sapiens
  CDR3 for alpha chain variable domain of TCR clone 295814 (TRAV12-2, TRAJ53)
CAVNGGGGSNYKLTL

SEQ ID NO: 591628 - protein, 12 aa, Homo sapiens
  CDR3 for beta chain variable domain of TCR clone 295814 (TRBV27, TRBJ1-6)
CTIKLFQGPLHF

SEQ ID NO: 591629 - protein, 15 aa, Homo sapiens
  CDR3 for alpha chain variable domain of TCR clone 295815 (TRAV17, TRAJ4)
CATGTWSGGYNKLIF

SEQ ID NO: 591630 - protein, 13 aa, Homo sapiens
  CDR3 for beta chain variable domain of TCR clone 295815 (TRBV6-6, TRBJ2-7)
CASAPKHLAEQYF

SEQ ID NO: 591631 - protein, 22 aa, Homo sapiens
  CDR3 for alpha chain variable domain of TCR clone 295816 (TRAV2, TRAJ9)
CAVEDRSGGFKTILEQEQDYLL

SEQ ID NO: 591632 - protein, 18 aa, Homo sapiens
  CDR3 for beta chain variable domain of TCR clone 295816 (TRBV20-1, TRBJ2-5)
CSQTGDSGRLGGKETQYF

SEQ ID NO: 591633 - protein, 15 aa, Homo sapiens
  CDR3 for alpha chain variable domain of TCR clone 295817 (TRAV29/DV5, TRAJ29)
CAASERSSGNTALVF

SEQ ID NO: 591634 - protein, 17 aa, Homo sapiens
  CDR3 for beta chain variable domain of TCR clone 295817 (TRBV4-1, TRBJ1-4)
CASSQEGPRGVEEKLFF

SEQ ID NO: 591635 - protein, 12 aa, Homo sapiens
  CDR3 for alpha chain variable domain of TCR clone 295818 (TRAV21, TRAJ11)
CAATSGYRTPTF

SEQ ID NO: 591636 - protein, 13 aa, Homo sapiens
  CDR3 for beta chain variable domain of TCR clone 295818 (TRBV20-1, TRBJ1-1)
CSARGGGNTEAFF

SEQ ID NO: 591637 - protein, 10 aa, Homo sapiens
  CDR3 for alpha chain variable domain of TCR clone 295819 (TRAV38-2/DV8, TRAJ40)
CASGTYKHIF

SEQ ID NO: 591638 - protein, 14 aa, Homo sapiens
  CDR3 for beta chain variable domain of TCR clone 295819 (TRBV7-9, TRBJ2-1)
CASSPRDSLYEQFF

SEQ ID NO: 591639 - protein, 11 aa, Homo sapiens
  CDR3 for alpha chain variable domain of TCR clone 295820 (TRAV13-1, TRAJ52)
PGGTSYGKLTF

SEQ ID NO: 591640 - protein, 16 aa, Homo sapiens
  CDR3 for beta chain variable domain of TCR clone 295820 (TRBV28, TRBJ2-7)
CATSPWVATGDLSQYF

SEQ ID NO: 591641 - protein, 16 aa, Homo sapiens
  CDR3 for alpha chain variable domain of TCR clone 295821 (TRAV3, TRAJ10)
CAVRDMRAGGGNKLTF

SEQ ID NO: 591642 - protein, 14 aa, Homo sapiens
  CDR3 for beta chain variable domain of TCR clone 295821 (TRBV28, TRBJ2-1)
CASSLNGRNNEQFF

SEQ ID NO: 591643 - protein, 12 aa, Homo sapiens
  CDR3 for alpha chain variable domain of TCR clone 295822 (TRAV21, TRAJ33)
CAKMDSNYQLIL

SEQ ID NO: 591644 - protein, 15 aa, Homo sapiens
  CDR3 for beta chain variable domain of TCR clone 295822 (TRBV9, TRBJ1-6)
CASSVAGTGDSPLHF

SEQ ID NO: 591645 - protein, 14 aa, Homo sapiens
  CDR3 for alpha chain variable domain of TCR clone 295823 (TRAV13-1, TRAJ35)
CAASKGGFGNVLHC

SEQ ID NO: 591646 - protein, 13 aa, Homo sapiens
  CDR3 for beta chain variable domain of TCR clone 295823 (TRBV7-3, TRBJ2-1)
CASSLDSYNEQFF

SEQ ID NO: 591647 - protein, 10 aa, Homo sapiens
  CDR3 for alpha chain variable domain of TCR clone 295824 (TRAV36/DV7, TRAJ48)
CAVGNEKLTF

SEQ ID NO: 591648 - protein, 14 aa, Homo sapiens
  CDR3 for beta chain variable domain of TCR clone 295824 (TRBV20-1, TRBJ1-1)
CSAQTRIGGTEAFF

SEQ ID NO: 591649 - protein, 16 aa, Homo sapiens
  CDR3 for alpha chain variable domain of TCR clone 295825 (TRAV20, TRAJ53)
CAVQAESGGSNYKLTF

SEQ ID NO: 591650 - protein, 14 aa, Homo sapiens
  CDR3 for beta chain variable domain of TCR clone 295825 (TRBV27, TRBJ2-5)
CASSRTVLVDTQYF

SEQ ID NO: 591651 - protein, 15 aa, Homo sapiens
  CDR3 for alpha chain variable domain of TCR clone 295826 (TRAV14/DV4, TRAJ46)
CAMREKKSSGDKLTF

SEQ ID NO: 591652 - protein, 17 aa, Homo sapiens
  CDR3 for beta chain variable domain of TCR clone 295826 (TRBV13, TRBJ2-3)
CASSLSRVAGGRNTQYF

SEQ ID NO: 591653 - protein, 13 aa, Homo sapiens
  CDR3 for alpha chain variable domain of TCR clone 295827 (TRAV8-1, TRAJ32)
CAADGGATNNLIF

SEQ ID NO: 591654 - protein, 18 aa, Homo sapiens
  CDR3 for beta chain variable domain of TCR clone 295827 (TRBV18, TRBJ2-3)
CASSYTSGAAGGTDTQYF

SEQ ID NO: 591655 - protein, 12 aa, Homo sapiens
  CDR3 for alpha chain variable domain of TCR clone 295828 (TRAV25, TRAJ29)
CAGPRGNTPLVF

SEQ ID NO: 591656 - protein, 15 aa, Homo sapiens
  CDR3 for beta chain variable domain of TCR clone 295828 (TRBV19, TRBJ1-1)
CASSGNSHPNTEAFF

SEQ ID NO: 591657 - protein, 14 aa, Homo sapiens
  CDR3 for alpha chain variable domain of TCR clone 295829 (TRAV34, TRAJ22)
CGAETSGSARQLTF

SEQ ID NO: 591658 - protein, 14 aa, Homo sapiens
  CDR3 for beta chain variable domain of TCR clone 295829 (TRBV7-2, TRBJ2-7)
CASRSQGAAYEQYF

SEQ ID NO: 591659 - protein, 15 aa, Homo sapiens
  CDR3 for alpha chain variable domain of TCR clone 295830 (TRAV8-3, TRAJ27)
CAVGPSKTNAGKSTF

SEQ ID NO: 591660 - protein, 16 aa, Homo sapiens
  CDR3 for beta chain variable domain of TCR clone 295830 (TRBV6-6, TRBJ2-1)
CASSLLSDSSYNEQFL

SEQ ID NO: 591661 - protein, 15 aa, Homo sapiens
  CDR3 for alpha chain variable domain of TCR clone 295831 (TRAV12-3, TRAJ49)
CAMAVTPNTGNQFYF

SEQ ID NO: 591662 - protein, 17 aa, Homo sapiens
  CDR3 for beta chain variable domain of TCR clone 295831 (TRBV4-1, TRBJ1-5)
RQQPRPPGQGLNQTQHF

SEQ ID NO: 591663 - protein, 12 aa, Homo sapiens
  CDR3 for alpha chain variable domain of TCR clone 295832 (TRAV12-1, TRAJ40)
CVVNGETYKYIF

SEQ ID NO: 591664 - protein, 14 aa, Homo sapiens
  CDR3 for beta chain variable domain of TCR clone 295832 (TRBV7-9, TRBJ1-1)
CASSSTKGSTEAFF

SEQ ID NO: 591665 - protein, 14 aa, Homo sapiens
  CDR3 for alpha chain variable domain of TCR clone 295833 (TRAV13-1, TRAJ20)
CAARPGSNDYKLSF

SEQ ID NO: 591666 - protein, 12 aa, Homo sapiens
  CDR3 for beta chain variable domain of TCR clone 295833 (TRBV7-3, TRBJ2-1)
CASSFINNEQFF

SEQ ID NO: 591667 - protein, 14 aa, Homo sapiens
  CDR3 for alpha chain variable domain of TCR clone 295834 (TRAV20, TRAJ42)
CAVQAEGSQGNLIF

SEQ ID NO: 591668 - protein, 14 aa, Homo sapiens
  CDR3 for beta chain variable domain of TCR clone 295834 (TRBV28, TRBJ1-2)
CASRIQGANYGYTF

SEQ ID NO: 591669 - protein, 11 aa, Homo sapiens
  CDR3 for alpha chain variable domain of TCR clone 295835 (TRAV12-2, TRAJ49)
CAVNTGHQFYF

SEQ ID NO: 591670 - protein, 12 aa, Homo sapiens
  CDR3 for beta chain variable domain of TCR clone 295835 (TRBV2, TRBJ2-3)
CASSGRFDTQYF

SEQ ID NO: 591671 - protein, 15 aa, Homo sapiens
  CDR3 for alpha chain variable domain of TCR clone 295836 (TRAV3, TRAJ4)
CAVRDGTGGYNKLIF

SEQ ID NO: 591672 - protein, 14 aa, Homo sapiens
  CDR3 for beta chain variable domain of TCR clone 295836 (TRBV20-1, TRBJ2-1)
CSAHPGLPYNEQFF

SEQ ID NO: 591673 - protein, 15 aa, Homo sapiens
  CDR3 for alpha chain variable domain of TCR clone 295837 (TRAV25, TRAJ52)
CAGTSGGTSYGKLTF

SEQ ID NO: 591674 - protein, 16 aa, Homo sapiens
  CDR3 for beta chain variable domain of TCR clone 295837 (TRBV15, TRBJ1-2)
CATSRGPRTGGGSYTF

SEQ ID NO: 591675 - protein, 12 aa, Homo sapiens
  CDR3 for alpha chain variable domain of TCR clone 295838 (TRAV13-1, TRAJ49)
CAASPTGNQFYF

SEQ ID NO: 591676 - protein, 14 aa, Homo sapiens
  CDR3 for beta chain variable domain of TCR clone 295838 (TRBV20-1, TRBJ2-7)
CSAKRGRSSYEQYF

SEQ ID NO: 591677 - protein, 12 aa, Homo sapiens
  CDR3 for alpha chain variable domain of TCR clone 295839 (TRAV23/DV6, TRAJ30)
WAASKGDDKIIF

SEQ ID NO: 591678 - protein, 13 aa, Homo sapiens
  CDR3 for beta chain variable domain of TCR clone 295839 (TRBV19, TRBJ1-2)
CASSVPGQDGYTF

SEQ ID NO: 591679 - protein, 13 aa, Homo sapiens
  CDR3 for alpha chain variable domain of TCR clone 295840 (TRAV27, TRAJ45)
CRSSGGGADGLTF

SEQ ID NO: 591680 - protein, 17 aa, Homo sapiens
  CDR3 for beta chain variable domain of TCR clone 295840 (TRBV28, TRBJ2-5)
CASSRQGGLAGAETQYF

SEQ ID NO: 591681 - protein, 14 aa, Homo sapiens
  CDR3 for alpha chain variable domain of TCR clone 295841 (TRAV13-1, TRAJ40)
CAASMTSGTCKYIF

SEQ ID NO: 591682 - protein, 13 aa, Homo sapiens
  CDR3 for beta chain variable domain of TCR clone 295841 (TRBV4-1, TRBJ2-5)
CASSQEVQETQYF

SEQ ID NO: 591683 - protein, 14 aa, Homo sapiens
  CDR3 for alpha chain variable domain of TCR clone 295842 (TRAV1-2, TRAJ16)
CAVNRFSDGQKLLF

SEQ ID NO: 591684 - protein, 11 aa, Homo sapiens
  CDR3 for beta chain variable domain of TCR clone 295842 (TRBV18, TRBJ1-2)
CASSPLNGYTF

SEQ ID NO: 591685 - protein, 14 aa, Homo sapiens
  CDR3 for alpha chain variable domain of TCR clone 295843 (TRAV1-2, TRAJ16)
CAVNRFSDGQKLLF

SEQ ID NO: 591686 - protein, 12 aa, Homo sapiens
  CDR3 for beta chain variable domain of TCR clone 295843 (TRBV4-1, TRBJ2-1)
RSSQAGGDEQFF

SEQ ID NO: 591687 - protein, 18 aa, Homo sapiens
  CDR3 for alpha chain variable domain of TCR clone 295844 (TRAV9-2, TRAJ52)
CAVSRHNAGGTSYGKLTF

SEQ ID NO: 591688 - protein, 13 aa, Homo sapiens
  CDR3 for beta chain variable domain of TCR clone 295844 (TRBV7-9, TRBJ1-2)
CASSLKQNYGCSF

SEQ ID NO: 591689 - protein, 14 aa, Homo sapiens
  CDR3 for alpha chain variable domain of TCR clone 295845 (TRAV1-2, TRAJ8)
CAVREATGFQKLVF

SEQ ID NO: 591690 - protein, 16 aa, Homo sapiens
  CDR3 for beta chain variable domain of TCR clone 295845 (TRBV12-4, TRBJ1-5)
CASSRPVGGSNQPQHF

SEQ ID NO: 591691 - protein, 14 aa, Homo sapiens
  CDR3 for alpha chain variable domain of TCR clone 295846 (TRAV26-1, TRAJ45)
CIEVTGGGADGLTF

SEQ ID NO: 591692 - protein, 13 aa, Homo sapiens
  CDR3 for beta chain variable domain of TCR clone 295846 (TRBV7-6, TRBJ1-2)
CACSLVADYGYTF

SEQ ID NO: 591693 - protein, 15 aa, Homo sapiens
  CDR3 for alpha chain variable domain of TCR clone 295847 (TRAV17, TRAJ13)
CATVPNSGGYQKVTF

SEQ ID NO: 591694 - protein, 13 aa, Homo sapiens
  CDR3 for beta chain variable domain of TCR clone 295847 (TRBV6-6, TRBJ2-1)
CASTRQVYNEQFF

SEQ ID NO: 591695 - protein, 14 aa, Homo sapiens
  CDR3 for alpha chain variable domain of TCR clone 295848 (TRAV12-3, TRAJ22)
CAMSLFGCARQLTF

SEQ ID NO: 591696 - protein, 14 aa, Homo sapiens
  CDR3 for beta chain variable domain of TCR clone 295848 (TRBV7-2, TRBJ2-7)
CASSPKTSFYEQYF

SEQ ID NO: 591697 - protein, 14 aa, Homo sapiens
  CDR3 for alpha chain variable domain of TCR clone 295849 (TRAV13-2, TRAJ42)
CGEWVGGSQGNLIF

SEQ ID NO: 591698 - protein, 14 aa, Homo sapiens
  CDR3 for beta chain variable domain of TCR clone 295849 (TRBV11-2, TRBJ1-5)
CASSPRTGNQPQHF

SEQ ID NO: 591699 - protein, 13 aa, Homo sapiens
  CDR3 for alpha chain variable domain of TCR clone 295850 (TRAV19, TRAJ57)
CALLQGGSEKLVF

SEQ ID NO: 591700 - protein, 18 aa, Homo sapiens
  CDR3 for beta chain variable domain of TCR clone 295850 (TRBV7-2, TRBJ2-2)
CASSLESGPRMNTGELFF

SEQ ID NO: 591701 - protein, 12 aa, Homo sapiens
  CDR3 for alpha chain variable domain of TCR clone 295851 (TRAV12-2, TRAJ10)
WGVTGGGNKLTF

SEQ ID NO: 591702 - protein, 14 aa, Homo sapiens
  CDR3 for beta chain variable domain of TCR clone 295851 (TRBV12-4, TRBJ2-7)
CASATGTERREQYF

SEQ ID NO: 591703 - protein, 14 aa, Homo sapiens
  CDR3 for alpha chain variable domain of TCR clone 295852 (TRAV26-1, TRAJ45)
CIDLSGGGADGLTF

SEQ ID NO: 591704 - protein, 15 aa, Homo sapiens
  CDR3 for beta chain variable domain of TCR clone 295852 (TRBV7-8, TRBJ2-7)
CASSAPRTGNYEQYF

SEQ ID NO: 591705 - protein, 12 aa, Homo sapiens
  CDR3 for alpha chain variable domain of TCR clone 295853 (TRAV38-2/DV8, TRAJ48)
CALLSGNEKLTF

SEQ ID NO: 591706 - protein, 15 aa, Homo sapiens
  CDR3 for beta chain variable domain of TCR clone 295853 (TRBV6-1, TRBJ2-1)
CDSSELRGQYNEQFF

SEQ ID NO: 591707 - protein, 23 aa, Homo sapiens
  CDR3 for alpha chain variable domain of TCR clone 295854 (TRAV12-2, TRAJ42)
CAVKGGEEAKEISSLEKALNSLL

SEQ ID NO: 591708 - protein, 14 aa, Homo sapiens
  CDR3 for beta chain variable domain of TCR clone 295854 (TRBV11-2, TRBJ2-5)
CASSRTGGIETQYF

SEQ ID NO: 591709 - protein, 11 aa, Homo sapiens
  CDR3 for alpha chain variable domain of TCR clone 295855 (TRAV2, TRAJ13)
CASGGYQKGTF

SEQ ID NO: 591710 - protein, 14 aa, Homo sapiens
  CDR3 for beta chain variable domain of TCR clone 295855 (TRBV19, TRBJ2-1)
CASPTFVLSGEQFF

SEQ ID NO: 591711 - protein, 13 aa, Homo sapiens
  CDR3 for alpha chain variable domain of TCR clone 295856 (TRAV35, TRAJ44)
CAVLSGTASNLTF

SEQ ID NO: 591712 - protein, 17 aa, Homo sapiens
  CDR3 for beta chain variable domain of TCR clone 295856 (TRBV7-8, TRBJ1-2)
CASSLRPLQGHLYGYTF

SEQ ID NO: 591713 - protein, 11 aa, Homo sapiens
  CDR3 for alpha chain variable domain of TCR clone 295857 (TRAV30, TRAJ24)
WMLTAGGKFQF

SEQ ID NO: 591714 - protein, 17 aa, Homo sapiens
  CDR3 for beta chain variable domain of TCR clone 295857 (TRBV20-1, TRBJ2-1)
CSASSSGLAGSYNEQFF

SEQ ID NO: 591715 - protein, 14 aa, Homo sapiens
  CDR3 for alpha chain variable domain of TCR clone 295858 (TRAV1-2, TRAJ16)
CAVNRFSDGQKLLF

SEQ ID NO: 591716 - protein, 15 aa, Homo sapiens
  CDR3 for beta chain variable domain of TCR clone 295858 (TRBV6-1, TRBJ2-6)
CASSSRPSGANVLTF

SEQ ID NO: 591717 - protein, 14 aa, Homo sapiens
  CDR3 for alpha chain variable domain of TCR clone 295859 (TRAV26-1, TRAJ21)
CIVRHPYNFNKFYF

SEQ ID NO: 591718 - protein, 14 aa, Homo sapiens
  CDR3 for beta chain variable domain of TCR clone 295859 (TRBV19, TRBJ2-1)
CASPTFVLSGEQFF

SEQ ID NO: 591719 - protein, 14 aa, Homo sapiens
  CDR3 for alpha chain variable domain of TCR clone 295860 (TRAV1-2, TRAJ8)
CAVREDTGFQKLVF

SEQ ID NO: 591720 - protein, 15 aa, Homo sapiens
  CDR3 for beta chain variable domain of TCR clone 295860 (TRBV5-5, TRBJ1-5)
CASSLKGGGEQPQHF

SEQ ID NO: 591721 - protein, 14 aa, Homo sapiens
  CDR3 for alpha chain variable domain of TCR clone 295861 (TRAV12-2, TRAJ13)
CAVKQTGGYQKVTF

SEQ ID NO: 591722 - protein, 15 aa, Homo sapiens
  CDR3 for beta chain variable domain of TCR clone 295861 (TRBV27, TRBJ2-1)
CASSNVGGSSNEQFF

SEQ ID NO: 591723 - protein, 15 aa, Homo sapiens
  CDR3 for alpha chain variable domain of TCR clone 295862 (TRAV3, TRAJ17)
CAVRDTGAAGNKLTF

SEQ ID NO: 591724 - protein, 14 aa, Homo sapiens
  CDR3 for beta chain variable domain of TCR clone 295862 (TRBV6-3, TRBJ1-1)
CASCNLLPGAEAFF

SEQ ID NO: 591725 - protein, 18 aa, Homo sapiens
  CDR3 for alpha chain variable domain of TCR clone 295863 (TRAV3, TRAJ32)
CAVRDIRGYGGATKKLIF

SEQ ID NO: 591726 - protein, 10 aa, Homo sapiens
  CDR3 for beta chain variable domain of TCR clone 295863 (TRBV12-4, TRBJ2-2)
CASSLGVRHT

SEQ ID NO: 591727 - protein, 14 aa, Homo sapiens
  CDR3 for alpha chain variable domain of TCR clone 295864 (TRAV17, TRAJ6)
CATNPAGGSYIPTF

SEQ ID NO: 591728 - protein, 15 aa, Homo sapiens
  CDR3 for beta chain variable domain of TCR clone 295864 (TRBV7-2, TRBJ2-3)
CASSLEQGGTDTQYF

SEQ ID NO: 591729 - protein, 14 aa, Homo sapiens
  CDR3 for alpha chain variable domain of TCR clone 295865 (TRAV13-2, TRAJ17)
CAENSKAAGNKLTF

SEQ ID NO: 591730 - protein, 16 aa, Homo sapiens
  CDR3 for beta chain variable domain of TCR clone 295865 (TRBV19, TRBJ2-1)
CASSKAGPSSYNEQFF

SEQ ID NO: 591731 - protein, 14 aa, Homo sapiens
  CDR3 for alpha chain variable domain of TCR clone 295866 (TRAV26-1, TRAJ38)
CIADNAGNNSKLIW

SEQ ID NO: 591732 - protein, 13 aa, Homo sapiens
  CDR3 for beta chain variable domain of TCR clone 295866 (TRBV7-9, TRBJ2-3)
CASSPGSTDTQYF

SEQ ID NO: 591733 - protein, 11 aa, Homo sapiens
  CDR3 for alpha chain variable domain of TCR clone 295867 (TRAV23/DV6, TRAJ4)
APAGGYNKLIF

SEQ ID NO: 591734 - protein, 15 aa, Homo sapiens
  CDR3 for beta chain variable domain of TCR clone 295867 (TRBV5-1, TRBJ2-6)
CASSLEGSGANVLTF

SEQ ID NO: 591735 - protein, 11 aa, Homo sapiens
  CDR3 for alpha chain variable domain of TCR clone 295868 (TRAV1-2, TRAJ20)
CAVSNDYKLSF

SEQ ID NO: 591736 - protein, 17 aa, Homo sapiens
  CDR3 for beta chain variable domain of TCR clone 295868 (TRBV7-8, TRBJ2-6)
CASSAGTGGAGANVLSF

SEQ ID NO: 591737 - protein, 17 aa, Homo sapiens
  CDR3 for alpha chain variable domain of TCR clone 295869 (TRAV3, TRAJ38)
CAVRDCLNAGNNRKLIW

SEQ ID NO: 591738 - protein, 14 aa, Homo sapiens
  CDR3 for beta chain variable domain of TCR clone 295869 (TRBV5-7, TRBJ1-5)
CASSGQGVDQPQHF

SEQ ID NO: 591739 - protein, 14 aa, Homo sapiens
  CDR3 for alpha chain variable domain of TCR clone 295870 (TRAV20, TRAJ56)
CAVQFGGANSKLTF

SEQ ID NO: 591740 - protein, 17 aa, Homo sapiens
  CDR3 for beta chain variable domain of TCR clone 295870 (TRBV7-9, TRBJ2-3)
CASSPTVAGDLTDTQYF

SEQ ID NO: 591741 - protein, 11 aa, Homo sapiens
  CDR3 for alpha chain variable domain of TCR clone 295871 (TRAV2, TRAJ33)
CAVDSNYQLIW

SEQ ID NO: 591742 - protein, 15 aa, Homo sapiens
  CDR3 for beta chain variable domain of TCR clone 295871 (TRBV5-8, TRBJ2-2)
CASSLDRGATGELFF

SEQ ID NO: 591743 - protein, 10 aa, Homo sapiens
  CDR3 for alpha chain variable domain of TCR clone 295872 (TRAV12-2, TRAJ20)
CAVYLYKLSF

SEQ ID NO: 591744 - protein, 11 aa, Homo sapiens
  CDR3 for beta chain variable domain of TCR clone 295872 (TRBV28, TRBJ2-1)
CASRRVNEQFF

SEQ ID NO: 591745 - protein, 14 aa, Homo sapiens
  CDR3 for alpha chain variable domain of TCR clone 295873 (TRAV39, TRAJ42)
RAVDIARSQGNLIF

SEQ ID NO: 591746 - protein, 12 aa, Homo sapiens
  CDR3 for beta chain variable domain of TCR clone 295873 (TRBV20-1, TRBJ2-5)
CSAGGAGETQYF

SEQ ID NO: 591747 - protein, 13 aa, Homo sapiens
  CDR3 for alpha chain variable domain of TCR clone 295874 (TRAV13-1, TRAJ49)
CAASIGTGNQFYF

SEQ ID NO: 591748 - protein, 15 aa, Homo sapiens
  CDR3 for beta chain variable domain of TCR clone 295874 (TRBV5-1, TRBJ2-7)
CASSLDLTSSYEQYF

SEQ ID NO: 591749 - protein, 14 aa, Homo sapiens
  CDR3 for alpha chain variable domain of TCR clone 295875 (TRAV12-3, TRAJ10)
SHLPLTGGGNKLTF

SEQ ID NO: 591750 - protein, 14 aa, Homo sapiens
  CDR3 for beta chain variable domain of TCR clone 295875 (TRBV7-2, TRBJ2-2)
CASSLNSSTGELFF

SEQ ID NO: 591751 - protein, 15 aa, Homo sapiens
  CDR3 for alpha chain variable domain of TCR clone 295876 (TRAV29/DV5, TRAJ29)
CAASERSSGNTPLVF

SEQ ID NO: 591752 - protein, 13 aa, Homo sapiens
  CDR3 for beta chain variable domain of TCR clone 295876 (TRBV20-1, TRBJ1-1)
CSARLGQGTEAFF

SEQ ID NO: 591753 - protein, 14 aa, Homo sapiens
  CDR3 for alpha chain variable domain of TCR clone 295877 (TRAV12-2, TRAJ24)
CAVTPADSWGKLQC

SEQ ID NO: 591754 - protein, 15 aa, Homo sapiens
  CDR3 for beta chain variable domain of TCR clone 295877 (TRBV15, TRBJ2-1)
CATSIPGQGLHEQFF

SEQ ID NO: 591755 - protein, 16 aa, Homo sapiens
  CDR3 for alpha chain variable domain of TCR clone 295878 (TRAV12-2, TRAJ32)
CAVNLGQGGATNKLIF

SEQ ID NO: 591756 - protein, 15 aa, Homo sapiens
  CDR3 for beta chain variable domain of TCR clone 295878 (TRBV20-1, TRBJ2-7)
CSARGPLAGGREQSF

SEQ ID NO: 591757 - protein, 13 aa, Homo sapiens
  CDR3 for alpha chain variable domain of TCR clone 295879 (TRAV8-4, TRAJ46)
CAVKKSSGDKLTF

SEQ ID NO: 591758 - protein, 15 aa, Homo sapiens
  CDR3 for beta chain variable domain of TCR clone 295879 (TRBV19, TRBJ1-2)
CASSVGQVLNYGCTF

SEQ ID NO: 591759 - protein, 14 aa, Homo sapiens
  CDR3 for alpha chain variable domain of TCR clone 295880 (TRAV17, TRAJ57)
CATDPQGGSEKLGF

SEQ ID NO: 591760 - protein, 16 aa, Homo sapiens
  CDR3 for beta chain variable domain of TCR clone 295880 (TRBV4-1, TRBJ1-1)
CASSQDAVIGNTEAFF

SEQ ID NO: 591761 - protein, 12 aa, Homo sapiens
  CDR3 for alpha chain variable domain of TCR clone 295881 (TRAV21, TRAJ33)
CAKMDSNYQLIW

SEQ ID NO: 591762 - protein, 15 aa, Homo sapiens
  CDR3 for beta chain variable domain of TCR clone 295881 (TRBV19, TRBJ2-1)
CASSLETSGYNEQFF

SEQ ID NO: 591763 - protein, 14 aa, Homo sapiens
  CDR3 for alpha chain variable domain of TCR clone 295882 (TRAV17, TRAJ6)
CATPAMGGCYIPTF

SEQ ID NO: 591764 - protein, 14 aa, Homo sapiens
  CDR3 for beta chain variable domain of TCR clone 295882 (TRBV7-6, TRBJ2-3)
CASSLGTVTDTQYF

SEQ ID NO: 591765 - protein, 16 aa, Homo sapiens
  CDR3 for alpha chain variable domain of TCR clone 295883 (TRAV12-2, TRAJ40)
CAVIRGGTSGTYKYIF

SEQ ID NO: 591766 - protein, 14 aa, Homo sapiens
  CDR3 for beta chain variable domain of TCR clone 295883 (TRBV20-1, TRBJ2-5)
CSARGGRAGETQYF

SEQ ID NO: 591767 - protein, 13 aa, Homo sapiens
  CDR3 for alpha chain variable domain of TCR clone 295884 (TRAV12-3, TRAJ13)
CAMRTGGYQKVTF

SEQ ID NO: 591768 - protein, 14 aa, Homo sapiens
  CDR3 for beta chain variable domain of TCR clone 295884 (TRBV7-2, TRBJ2-5)
CASSTGGELKTQYF

SEQ ID NO: 591769 - protein, 12 aa, Homo sapiens
  CDR3 for alpha chain variable domain of TCR clone 295885 (TRAV12-1, TRAJ40)
CVVYSGTYKYIF

SEQ ID NO: 591770 - protein, 12 aa, Homo sapiens
  CDR3 for beta chain variable domain of TCR clone 295885 (TRBV7-8, TRBJ2-7)
CASSLGDREQYL

SEQ ID NO: 591771 - protein, 15 aa, Homo sapiens
  CDR3 for alpha chain variable domain of TCR clone 295886 (TRAV38-1, TRAJ37)
CAFIFGSGNTGKPIF

SEQ ID NO: 591772 - protein, 15 aa, Homo sapiens
  CDR3 for beta chain variable domain of TCR clone 295886 (TRBV4-3, TRBJ2-7)
CASSQGGRGIYEQYF

SEQ ID NO: 591773 - protein, 10 aa, Homo sapiens
  CDR3 for alpha chain variable domain of TCR clone 295887 (TRAV35, TRAJ34)
LGEEHHKLIF

SEQ ID NO: 591774 - protein, 14 aa, Homo sapiens
  CDR3 for beta chain variable domain of TCR clone 295887 (TRBV5-1, TRBJ2-7)
CASSRGESLYEQYF

SEQ ID NO: 591775 - protein, 13 aa, Homo sapiens
  CDR3 for alpha chain variable domain of TCR clone 295888 (TRAV13-2, TRAJ13)
CAEMDFGNEKLNF

SEQ ID NO: 591776 - protein, 15 aa, Homo sapiens
  CDR3 for beta chain variable domain of TCR clone 295888 (TRBV7-9, TRBJ1-6)
CASSSPGRGNSPLHF

SEQ ID NO: 591777 - protein, 16 aa, Homo sapiens
  CDR3 for alpha chain variable domain of TCR clone 295889 (TRAV3, TRAJ37)
CAVRGKGSGNTGKLIF

SEQ ID NO: 591778 - protein, 13 aa, Homo sapiens
  CDR3 for beta chain variable domain of TCR clone 295889 (TRBV19, TRBJ1-2)
CASSFPGQDGYTF

SEQ ID NO: 591779 - protein, 18 aa, Homo sapiens
  CDR3 for alpha chain variable domain of TCR clone 295890 (TRAV12-3, TRAJ52)
CAMSRTTAGGTSYGKLTF

SEQ ID NO: 591780 - protein, 17 aa, Homo sapiens
  CDR3 for beta chain variable domain of TCR clone 295890 (TRBV7-3, TRBJ2-3)
CASSLMKGMRGADTQYF

SEQ ID NO: 591781 - protein, 14 aa, Homo sapiens
  CDR3 for alpha chain variable domain of TCR clone 295891 (TRAV38-1, TRAJ45)
CASHSGGGADGLTF

SEQ ID NO: 591782 - protein, 14 aa, Homo sapiens
  CDR3 for beta chain variable domain of TCR clone 295891 (TRBV19, TRBJ2-1)
CASSTFVLSGEQFF

SEQ ID NO: 591783 - protein, 14 aa, Homo sapiens
  CDR3 for alpha chain variable domain of TCR clone 295892 (TRAV3, TRAJ21)
CAVRDKYNFNKFYF

SEQ ID NO: 591784 - protein, 13 aa, Homo sapiens
  CDR3 for beta chain variable domain of TCR clone 295892 (TRBV27, TRBJ2-3)
CQQRQPITDTQYF

SEQ ID NO: 591785 - protein, 14 aa, Homo sapiens
  CDR3 for alpha chain variable domain of TCR clone 295893 (TRAV13-2, TRAJ11)
CAETGNSGYSTLTF

SEQ ID NO: 591786 - protein, 15 aa, Homo sapiens
  CDR3 for beta chain variable domain of TCR clone 295893 (TRBV18, TRBJ2-1)
CASSPPSASYNEQFF

SEQ ID NO: 591787 - protein, 13 aa, Homo sapiens
  CDR3 for alpha chain variable domain of TCR clone 295894 (TRAV13-1, TRAJ43)
CAASLNNNNDMRF

SEQ ID NO: 591788 - protein, 15 aa, Homo sapiens
  CDR3 for beta chain variable domain of TCR clone 295894 (TRBV5-1, TRBJ2-1)
YASSQAGYWWNEQFF

SEQ ID NO: 591789 - protein, 16 aa, Homo sapiens
  CDR3 for alpha chain variable domain of TCR clone 295895 (TRAV8-1, TRAJ39)
CAVNVPSYNAGNMLTF

SEQ ID NO: 591790 - protein, 15 aa, Homo sapiens
  CDR3 for beta chain variable domain of TCR clone 295895 (TRBV4-1, TRBJ2-3)
CDSRSTRAGTDTQYF

SEQ ID NO: 591791 - protein, 12 aa, Homo sapiens
  CDR3 for alpha chain variable domain of TCR clone 295896 (TRAV35, TRAJ40)
CAGRAGTYEYIF

SEQ ID NO: 591792 - protein, 14 aa, Homo sapiens
  CDR3 for beta chain variable domain of TCR clone 295896 (TRBV7-2, TRBJ1-3)
CASSRGGTGNTIYF

SEQ ID NO: 591793 - protein, 15 aa, Homo sapiens
  CDR3 for alpha chain variable domain of TCR clone 295897 (TRAV12-1, TRAJ44)
CLVFVNTGTASKPTF

SEQ ID NO: 591794 - protein, 17 aa, Homo sapiens
  CDR3 for beta chain variable domain of TCR clone 295897 (TRBV7-8, TRBJ2-6)
CASSAGTGGAGANVLTF

SEQ ID NO: 591795 - protein, 12 aa, Homo sapiens
  CDR3 for alpha chain variable domain of TCR clone 295898 (TRAV13-2, TRAJ8)
CAPWLGFQKLVF

SEQ ID NO: 591796 - protein, 14 aa, Homo sapiens
  CDR3 for beta chain variable domain of TCR clone 295898 (TRBV5-1, TRBJ1-1)
CASSFTGRNTEAFF

SEQ ID NO: 591797 - protein, 13 aa, Homo sapiens
  CDR3 for alpha chain variable domain of TCR clone 295899 (TRAV12-3, TRAJ9)
CAMRNTGGFKTIF

SEQ ID NO: 591798 - protein, 15 aa, Homo sapiens
  CDR3 for beta chain variable domain of TCR clone 295899 (TRBV20-1, TRBJ2-7)
CSARDRVSGMDEQHF

SEQ ID NO: 591799 - protein, 15 aa, Homo sapiens
  CDR3 for alpha chain variable domain of TCR clone 295900 (TRAV8-6, TRAJ10)
CAVSDQAGGGNKLTV

SEQ ID NO: 591800 - protein, 13 aa, Homo sapiens
  CDR3 for beta chain variable domain of TCR clone 295900 (TRBV7-3, TRBJ1-1)
CASSQDWGAEAFF

SEQ ID NO: 591801 - protein, 17 aa, Homo sapiens
  CDR3 for alpha chain variable domain of TCR clone 295901 (TRAV26-2, TRAJ42)
CILRDVGYGGSQGNLIF

SEQ ID NO: 591802 - protein, 11 aa, Homo sapiens
  CDR3 for beta chain variable domain of TCR clone 295901 (TRBV12-4, TRBJ2-3)
CASTATDTQYF

SEQ ID NO: 591803 - protein, 15 aa, Homo sapiens
  CDR3 for alpha chain variable domain of TCR clone 295902 (TRAV38-1, TRAJ37)
CAFIFGSGNTGKLIF

SEQ ID NO: 591804 - protein, 14 aa, Homo sapiens
  CDR3 for beta chain variable domain of TCR clone 295902 (TRBV2, TRBJ1-5)
CVSSGTGFNQPQHF

SEQ ID NO: 591805 - protein, 12 aa, Homo sapiens
  CDR3 for alpha chain variable domain of TCR clone 295903 (TRAV13-2, TRAJ23)
CAERHRGGKLIF

SEQ ID NO: 591806 - protein, 17 aa, Homo sapiens
  CDR3 for beta chain variable domain of TCR clone 295903 (TRBV20-1, TRBJ2-3)
CSASLLGRGGSADTQYF

SEQ ID NO: 591807 - protein, 14 aa, Homo sapiens
  CDR3 for alpha chain variable domain of TCR clone 295904 (TRAV1-2, TRAJ8)
CAVREDTGFQKLVF

SEQ ID NO: 591808 - protein, 13 aa, Homo sapiens
  CDR3 for beta chain variable domain of TCR clone 295904 (TRBV24-1, TRBJ2-2)
CATSDWSTVELFF

SEQ ID NO: 591809 - protein, 14 aa, Homo sapiens
  CDR3 for alpha chain variable domain of TCR clone 295905 (TRAV12-2, TRAJ3)
CAVSLYTSASKIIF

SEQ ID NO: 591810 - protein, 14 aa, Homo sapiens
  CDR3 for beta chain variable domain of TCR clone 295905 (TRBV27, TRBJ2-1)
CAGSIAETYNEQFF

SEQ ID NO: 591811 - protein, 22 aa, Homo sapiens
  CDR3 for alpha chain variable domain of TCR clone 295906 (TRAV21, TRAJ39)
AASQPGDSATPKGATAGNMLTF

SEQ ID NO: 591812 - protein, 14 aa, Homo sapiens
  CDR3 for beta chain variable domain of TCR clone 295906 (TRBV11-2, TRBJ2-7)
CASSLGAGAYEQYF

SEQ ID NO: 591813 - protein, 14 aa, Homo sapiens
  CDR3 for alpha chain variable domain of TCR clone 295907 (TRAV12-2, TRAJ13)
CAVKKTGGYQKVTF

SEQ ID NO: 591814 - protein, 16 aa, Homo sapiens
  CDR3 for beta chain variable domain of TCR clone 295907 (TRBV29-1, TRBJ2-7)
CSVEDAEDGTAYEQYL

SEQ ID NO: 591815 - protein, 18 aa, Homo sapiens
  CDR3 for alpha chain variable domain of TCR clone 295908 (TRAV21, TRAJ52)
CAVRPSPAGGSSYGKLTF

SEQ ID NO: 591816 - protein, 13 aa, Homo sapiens
  CDR3 for beta chain variable domain of TCR clone 295908 (TRBV7-3, TRBJ1-1)
CASSQDWGAEAFF

SEQ ID NO: 591817 - protein, 15 aa, Homo sapiens
  CDR3 for alpha chain variable domain of TCR clone 295909 (TRAV26-1, TRAJ23)
CIVRVLNNQGGELIF

SEQ ID NO: 591818 - protein, 15 aa, Homo sapiens
  CDR3 for beta chain variable domain of TCR clone 295909 (TRBV7-3, TRBJ2-1)
CASSFGQSNYNEQFF

SEQ ID NO: 591819 - protein, 15 aa, Homo sapiens
  CDR3 for alpha chain variable domain of TCR clone 295910 (TRAV2, TRAJ15)
CAVEDRGQAGTALIF

SEQ ID NO: 591820 - protein, 13 aa, Homo sapiens
  CDR3 for beta chain variable domain of TCR clone 295910 (TRBV19, TRBJ1-2)
CASSVPGQDGYTF

SEQ ID NO: 591821 - protein, 13 aa, Homo sapiens
  CDR3 for alpha chain variable domain of TCR clone 295911 (TRAV3, TRAJ9)
CAFWNTGGFKTIF

SEQ ID NO: 591822 - protein, 15 aa, Homo sapiens
  CDR3 for beta chain variable domain of TCR clone 295911 (TRBV28, TRBJ1-1)
CASTSTRGLNTEAFF

SEQ ID NO: 591823 - protein, 18 aa, Homo sapiens
  CDR3 for alpha chain variable domain of TCR clone 295912 (TRAV21, TRAJ52)
CAVRPSPAGGTSYGKLTF

SEQ ID NO: 591824 - protein, 17 aa, Homo sapiens
  CDR3 for beta chain variable domain of TCR clone 295912 (TRBV4-1, TRBJ2-7)
CASSRDPLGVRGGEQYF

SEQ ID NO: 591825 - protein, 14 aa, Homo sapiens
  CDR3 for alpha chain variable domain of TCR clone 295913 (TRAV8-3, TRAJ39)
CAVGANNEGNMLTF

SEQ ID NO: 591826 - protein, 12 aa, Homo sapiens
  CDR3 for beta chain variable domain of TCR clone 295913 (TRBV28, TRBJ1-3)
CASVSSGNTMYF

SEQ ID NO: 591827 - protein, 14 aa, Homo sapiens
  CDR3 for alpha chain variable domain of TCR clone 295914 (TRAV8-2, TRAJ45)
GVVSAGGGADGLTF

SEQ ID NO: 591828 - protein, 12 aa, Homo sapiens
  CDR3 for beta chain variable domain of TCR clone 295914 (TRBV12-4, TRBJ2-1)
CASSLVRVEQFF

SEQ ID NO: 591829 - protein, 13 aa, Homo sapiens
  CDR3 for alpha chain variable domain of TCR clone 295915 (TRAV20, TRAJ37)
CAGCSSNTGKLIF

SEQ ID NO: 591830 - protein, 14 aa, Homo sapiens
  CDR3 for beta chain variable domain of TCR clone 295915 (TRBV12-4, TRBJ1-1)
CASSLGTGGTEAFF

SEQ ID NO: 591831 - protein, 15 aa, Homo sapiens
  CDR3 for alpha chain variable domain of TCR clone 295916 (TRAV13-1, TRAJ45)
CATSGSGGGADGLTF

SEQ ID NO: 591832 - protein, 14 aa, Homo sapiens
  CDR3 for beta chain variable domain of TCR clone 295916 (TRBV12-4, TRBJ1-2)
CASSFVGTAYGYTF

SEQ ID NO: 591833 - protein, 14 aa, Homo sapiens
  CDR3 for alpha chain variable domain of TCR clone 295917 (TRAV26-2, TRAJ31)
CILIPGNNNARLMF

SEQ ID NO: 591834 - protein, 14 aa, Homo sapiens
  CDR3 for beta chain variable domain of TCR clone 295917 (TRBV15, TRBJ2-5)
CATSIGGLGETQYF

SEQ ID NO: 591835 - protein, 13 aa, Homo sapiens
  CDR3 for alpha chain variable domain of TCR clone 295918 (TRAV12-3, TRAJ9)
CAMRNTGGFKTIF

SEQ ID NO: 591836 - protein, 14 aa, Homo sapiens
  CDR3 for beta chain variable domain of TCR clone 295918 (TRBV11-2, TRBJ2-7)
CASSSTGECYEQYF

SEQ ID NO: 591837 - protein, 14 aa, Homo sapiens
  CDR3 for alpha chain variable domain of TCR clone 295919 (TRAV2, TRAJ22)
CAVAVKRAARQLTF

SEQ ID NO: 591838 - protein, 14 aa, Homo sapiens
  CDR3 for beta chain variable domain of TCR clone 295919 (TRBV19, TRBJ2-2)
CASTPGYSGGELFF

SEQ ID NO: 591839 - protein, 14 aa, Homo sapiens
  CDR3 for alpha chain variable domain of TCR clone 295920 (TRAV8-2, TRAJ4)
CVVSPSGGYNKLIF

SEQ ID NO: 591840 - protein, 23 aa, Homo sapiens
  CDR3 for beta chain variable domain of TCR clone 295920 (TRBV10-2, TRBJ2-5)
PLSDICVFLRQQGKRGPQETQYF

SEQ ID NO: 591841 - protein, 17 aa, Homo sapiens
  CDR3 for alpha chain variable domain of TCR clone 295921 (TRAV13-1, TRAJ52)
CAAGRNDGGTSYGKLTF

SEQ ID NO: 591842 - protein, 13 aa, Homo sapiens
  CDR3 for beta chain variable domain of TCR clone 295921 (TRBV7-2, TRBJ1-1)
CASNLKGAKVAFF

SEQ ID NO: 591843 - protein, 11 aa, Homo sapiens
  CDR3 for alpha chain variable domain of TCR clone 295922 (TRAV12-1, TRAJ34)
CVVKKGRELIF

SEQ ID NO: 591844 - protein, 12 aa, Homo sapiens
  CDR3 for beta chain variable domain of TCR clone 295922 (TRBV2, TRBJ2-1)
CAYGPPGNEQFF

SEQ ID NO: 591845 - protein, 18 aa, Homo sapiens
  CDR3 for alpha chain variable domain of TCR clone 295923 (TRAV26-2, TRAJ45)
CILRDRVDQEEVLTDTPL

SEQ ID NO: 591846 - protein, 15 aa, Homo sapiens
  CDR3 for beta chain variable domain of TCR clone 295923 (TRBV7-6, TRBJ2-5)
CASSKPTGPQETQYF

SEQ ID NO: 591847 - protein, 13 aa, Homo sapiens
  CDR3 for alpha chain variable domain of TCR clone 295924 (TRAV27, TRAJ43)
CAGAGNNNNDMRF

SEQ ID NO: 591848 - protein, 14 aa, Homo sapiens
  CDR3 for beta chain variable domain of TCR clone 295924 (TRBV7-2, TRBJ2-7)
FASRSQGAAYEQYF

SEQ ID NO: 591849 - protein, 16 aa, Homo sapiens
  CDR3 for alpha chain variable domain of TCR clone 295925 (TRAV35, TRAJ52)
CAGQGSGGTSYRKLTF

SEQ ID NO: 591850 - protein, 17 aa, Homo sapiens
  CDR3 for beta chain variable domain of TCR clone 295925 (TRBV13, TRBJ2-3)
CASSLSRVAGGRNTQYF

SEQ ID NO: 591851 - protein, 16 aa, Homo sapiens
  CDR3 for alpha chain variable domain of TCR clone 295926 (TRAV3, TRAJ10)
CAVRDMRAGGGNKLPF

SEQ ID NO: 591852 - protein, 14 aa, Homo sapiens
  CDR3 for beta chain variable domain of TCR clone 295926 (TRBV7-8, TRBJ2-3)
CASSLEAGTDTQYF

SEQ ID NO: 591853 - protein, 18 aa, Homo sapiens
  CDR3 for alpha chain variable domain of TCR clone 295927 (TRAV21, TRAJ52)
CAVRPSPAGGTSHGKLTF

SEQ ID NO: 591854 - protein, 17 aa, Homo sapiens
  CDR3 for beta chain variable domain of TCR clone 295927 (TRBV14, TRBJ2-3)
CASSQEPSGLSTDTQYF

SEQ ID NO: 591855 - protein, 14 aa, Homo sapiens
  CDR3 for alpha chain variable domain of TCR clone 295928 (TRAV16, TRAJ32)
CALKSGGATNKLIF

SEQ ID NO: 591856 - protein, 14 aa, Homo sapiens
  CDR3 for beta chain variable domain of TCR clone 295928 (TRBV7-9, TRBJ1-1)
CASTPLQSYTEAFF

SEQ ID NO: 591857 - protein, 14 aa, Homo sapiens
  CDR3 for alpha chain variable domain of TCR clone 295929 (TRAV3, TRAJ9)
CAVRGNTGGFKTIF

SEQ ID NO: 591858 - protein, 13 aa, Homo sapiens
  CDR3 for beta chain variable domain of TCR clone 295929 (TRBV7-9, TRBJ2-2)
CASSLDPTGELFF

SEQ ID NO: 591859 - protein, 15 aa, Homo sapiens
  CDR3 for alpha chain variable domain of TCR clone 295930 (TRAV8-6, TRAJ6)
CAVSGEAGGSYIPTF

SEQ ID NO: 591860 - protein, 14 aa, Homo sapiens
  CDR3 for beta chain variable domain of TCR clone 295930 (TRBV7-9, TRBJ2-1)
CASSSMVGFGEQFF

SEQ ID NO: 591861 - protein, 14 aa, Homo sapiens
  CDR3 for alpha chain variable domain of TCR clone 295931 (TRAV21, TRAJ35)
CVVMPIGFGSVLHC

SEQ ID NO: 591862 - protein, 12 aa, Homo sapiens
  CDR3 for beta chain variable domain of TCR clone 295931 (TRBV7-9, TRBJ2-7)
CASSIKREEQYF

SEQ ID NO: 591863 - protein, 12 aa, Homo sapiens
  CDR3 for alpha chain variable domain of TCR clone 295932 (TRAV40, TRAJ20)
CLRGLNDYKLSF

SEQ ID NO: 591864 - protein, 14 aa, Homo sapiens
  CDR3 for beta chain variable domain of TCR clone 295932 (TRBV19, TRBJ2-1)
CASRSGRDYNEQFF

SEQ ID NO: 591865 - protein, 16 aa, Homo sapiens
  CDR3 for alpha chain variable domain of TCR clone 295933 (TRAV21, TRAJ37)
CAVRPRGSINTGKLIF

SEQ ID NO: 591866 - protein, 13 aa, Homo sapiens
  CDR3 for beta chain variable domain of TCR clone 295933 (TRBV20-1, TRBJ2-2)
CSALSGGAGELFF

SEQ ID NO: 591867 - protein, 23 aa, Homo sapiens
  CDR3 for alpha chain variable domain of TCR clone 295934 (TRAV8-1, TRAJ36)
CAVNSPTGANNLFLGLDRDSPSF

SEQ ID NO: 591868 - protein, 15 aa, Homo sapiens
  CDR3 for beta chain variable domain of TCR clone 295934 (TRBV7-2, TRBJ2-3)
CASSLEQGGTDTQYF

SEQ ID NO: 591869 - protein, 16 aa, Homo sapiens
  CDR3 for alpha chain variable domain of TCR clone 295935 (TRAV14/DV4, TRAJ12)
CAMREVLMDSSYKLNF

SEQ ID NO: 591870 - protein, 14 aa, Homo sapiens
  CDR3 for beta chain variable domain of TCR clone 295935 (TRBV7-2, TRBJ2-5)
CASSFTQGQETQYF

SEQ ID NO: 591871 - protein, 17 aa, Homo sapiens
  CDR3 for alpha chain variable domain of TCR clone 295936 (TRAV3, TRAJ6)
CAVRDGPRAGGSYIPTF

SEQ ID NO: 591872 - protein, 11 aa, Homo sapiens
  CDR3 for beta chain variable domain of TCR clone 295936 (TRBV19, TRBJ2-4)
CASSNKNMQYF

SEQ ID NO: 591873 - protein, 12 aa, Homo sapiens
  CDR3 for alpha chain variable domain of TCR clone 295937 (TRAV1-2, TRAJ26)
CAVSPYGQNFVF

SEQ ID NO: 591874 - protein, 14 aa, Homo sapiens
  CDR3 for beta chain variable domain of TCR clone 295937 (TRBV5-1, TRBJ2-7)
CASSFASGVNGQYF

SEQ ID NO: 591875 - protein, 14 aa, Homo sapiens
  CDR3 for alpha chain variable domain of TCR clone 295938 (TRAV22, TRAJ6)
CAGVGPGGSYIPTF

SEQ ID NO: 591876 - protein, 11 aa, Homo sapiens
  CDR3 for beta chain variable domain of TCR clone 295938 (TRBV20-1, TRBJ2-1)
CRLSSGSEQFF

SEQ ID NO: 591877 - protein, 14 aa, Homo sapiens
  CDR3 for alpha chain variable domain of TCR clone 295939 (TRAV12-2, TRAJ40)
CAVKIPSGTYQYIF

SEQ ID NO: 591878 - protein, 13 aa, Homo sapiens
  CDR3 for beta chain variable domain of TCR clone 295939 (TRBV20-1, TRBJ1-3)
CSARVQGRDTIYF

SEQ ID NO: 591879 - protein, 16 aa, Homo sapiens
  CDR3 for alpha chain variable domain of TCR clone 295940 (TRAV8-2, TRAJ45)
CVVSEGTGGGADGLTF

SEQ ID NO: 591880 - protein, 14 aa, Homo sapiens
  CDR3 for beta chain variable domain of TCR clone 295940 (TRBV7-6, TRBJ2-3)
CASSLGTVTDTQYF

SEQ ID NO: 591881 - protein, 14 aa, Homo sapiens
  CDR3 for alpha chain variable domain of TCR clone 295941 (TRAV26-1, TRAJ38)
CIADNAGNNRKLIW

SEQ ID NO: 591882 - protein, 14 aa, Homo sapiens
  CDR3 for beta chain variable domain of TCR clone 295941 (TRBV6-1, TRBJ2-1)
CASAKDGFYNEQFF

SEQ ID NO: 591883 - protein, 16 aa, Homo sapiens
  CDR3 for alpha chain variable domain of TCR clone 295942 (TRAV21, TRAJ17)
CAVRPGEEAAGNKLTF

SEQ ID NO: 591884 - protein, 14 aa, Homo sapiens
  CDR3 for beta chain variable domain of TCR clone 295942 (TRBV12-5, TRBJ2-5)
CASGSRTHQETQYF

SEQ ID NO: 591885 - protein, 17 aa, Homo sapiens
  CDR3 for alpha chain variable domain of TCR clone 295943 (TRAV12-2, TRAJ4)
CAVNVRPVSGGYNNLTF

SEQ ID NO: 591886 - protein, 17 aa, Homo sapiens
  CDR3 for beta chain variable domain of TCR clone 295943 (TRBV6-3, TRBJ2-1)
CASSYSSGTRGLDEQFF

SEQ ID NO: 591887 - protein, 14 aa, Homo sapiens
  CDR3 for alpha chain variable domain of TCR clone 295944 (TRAV8-6, TRAJ30)
CAVRPVNRDDKIIF

SEQ ID NO: 591888 - protein, 17 aa, Homo sapiens
  CDR3 for beta chain variable domain of TCR clone 295944 (TRBV7-8, TRBJ2-6)
CASSAGTGGAGASVLTF

SEQ ID NO: 591889 - protein, 14 aa, Homo sapiens
  CDR3 for alpha chain variable domain of TCR clone 295945 (TRAV20, TRAJ29)
CAVQAWVGNTPLVF

SEQ ID NO: 591890 - protein, 15 aa, Homo sapiens
  CDR3 for beta chain variable domain of TCR clone 295945 (TRBV29-1, TRBJ2-7)
CSVELFDRGSYEQYF

SEQ ID NO: 591891 - protein, 12 aa, Homo sapiens
  CDR3 for alpha chain variable domain of TCR clone 295946 (TRAV13-1, TRAJ53)
AASGGSNYKLTF

SEQ ID NO: 591892 - protein, 15 aa, Homo sapiens
  CDR3 for beta chain variable domain of TCR clone 295946 (TRBV5-1, TRBJ2-1)
FASSPPRAPYNEQFF

SEQ ID NO: 591893 - protein, 13 aa, Homo sapiens
  CDR3 for alpha chain variable domain of TCR clone 295947 (TRAV12-1, TRAJ6)
CVVFPGGSYIPTF

SEQ ID NO: 591894 - protein, 15 aa, Homo sapiens
  CDR3 for beta chain variable domain of TCR clone 295947 (TRBV7-9, TRBJ2-7)
CISVSEAPPMNEQYF

SEQ ID NO: 591895 - protein, 13 aa, Homo sapiens
  CDR3 for alpha chain variable domain of TCR clone 295948 (TRAV9-2, TRAJ53)
CALSGGSNYKLTF

SEQ ID NO: 591896 - protein, 14 aa, Homo sapiens
  CDR3 for beta chain variable domain of TCR clone 295948 (TRBV23-1, TRBJ2-5)
CASSFLRSQETQYF

SEQ ID NO: 591897 - protein, 12 aa, Homo sapiens
  CDR3 for alpha chain variable domain of TCR clone 295949 (TRAV13-1, TRAJ21)
CSAKEGFNKFYF

SEQ ID NO: 591898 - protein, 15 aa, Homo sapiens
  CDR3 for beta chain variable domain of TCR clone 295949 (TRBV15, TRBJ1-5)
CATSRDPVSNQHQHF

SEQ ID NO: 591899 - protein, 14 aa, Homo sapiens
  CDR3 for alpha chain variable domain of TCR clone 295950 (TRAV1-2, TRAJ8)
CAVREDTGFQKLVF

SEQ ID NO: 591900 - protein, 13 aa, Homo sapiens
  CDR3 for beta chain variable domain of TCR clone 295950 (TRBV7-3, TRBJ2-5)
CASSLTAGETQYF

SEQ ID NO: 591901 - protein, 14 aa, Homo sapiens
  CDR3 for alpha chain variable domain of TCR clone 295951 (TRAV12-2, TRAJ45)
CAVYSGGGADGLTF

SEQ ID NO: 591902 - protein, 14 aa, Homo sapiens
  CDR3 for beta chain variable domain of TCR clone 295951 (TRBV13, TRBJ2-5)
CASSLGPRGETQYF

SEQ ID NO: 591903 - protein, 13 aa, Homo sapiens
  CDR3 for alpha chain variable domain of TCR clone 295952 (TRAV3, TRAJ17)
CAVPRAAGNKLTF

SEQ ID NO: 591904 - protein, 16 aa, Homo sapiens
  CDR3 for beta chain variable domain of TCR clone 295952 (TRBV4-3, TRBJ2-1)
CASSPALDRGVNEQFF

SEQ ID NO: 591905 - protein, 18 aa, Homo sapiens
  CDR3 for alpha chain variable domain of TCR clone 295953 (TRAV21, TRAJ52)
CAVRPSPAGGTRYGKLTF

SEQ ID NO: 591906 - protein, 18 aa, Homo sapiens
  CDR3 for beta chain variable domain of TCR clone 295953 (TRBV25-1, TRBJ1-2)
CASSGLQNGQGLIFGYTF

SEQ ID NO: 591907 - protein, 13 aa, Homo sapiens
  CDR3 for alpha chain variable domain of TCR clone 295954 (TRAV3, TRAJ20)
CCEAFCNDYKLSF

SEQ ID NO: 591908 - protein, 14 aa, Homo sapiens
  CDR3 for beta chain variable domain of TCR clone 295954 (TRBV7-2, TRBJ2-7)
CASSPKTSFYEQYF

SEQ ID NO: 591909 - protein, 12 aa, Homo sapiens
  CDR3 for alpha chain variable domain of TCR clone 295955 (TRAV12-2, TRAJ20)
CAVRPSDYKLSF

SEQ ID NO: 591910 - protein, 16 aa, Homo sapiens
  CDR3 for beta chain variable domain of TCR clone 295955 (TRBV19, TRBJ2-1)
CASSKAGPSSYNEQFF

SEQ ID NO: 591911 - protein, 11 aa, Homo sapiens
  CDR3 for alpha chain variable domain of TCR clone 295956 (TRAV17, TRAJ43)
CPTPRSNDMRF

SEQ ID NO: 591912 - protein, 15 aa, Homo sapiens
  CDR3 for beta chain variable domain of TCR clone 295956 (TRBV11-2, TRBJ2-1)
CASSLGTSGLNEQFF

SEQ ID NO: 591913 - protein, 11 aa, Homo sapiens
  CDR3 for alpha chain variable domain of TCR clone 295957 (TRAV3, TRAJ21)
CAVGNFNKFYF

SEQ ID NO: 591914 - protein, 18 aa, Homo sapiens
  CDR3 for beta chain variable domain of TCR clone 295957 (TRBV4-1, TRBJ1-5)
CASSQDPRGQGLNQPQHF

SEQ ID NO: 591915 - protein, 18 aa, Homo sapiens
  CDR3 for alpha chain variable domain of TCR clone 295958 (TRAV26-1, TRAJ23)
CIVRVGLEVWNQGGKLIF

SEQ ID NO: 591916 - protein, 16 aa, Homo sapiens
  CDR3 for beta chain variable domain of TCR clone 295958 (TRBV12-4, TRBJ2-1)
CASSFFVRGRQETQYF

SEQ ID NO: 591917 - protein, 14 aa, Homo sapiens
  CDR3 for alpha chain variable domain of TCR clone 295959 (TRAV20, TRAJ29)
CAVQAWVGNTPLVF

SEQ ID NO: 591918 - protein, 15 aa, Homo sapiens
  CDR3 for beta chain variable domain of TCR clone 295959 (TRBV29-1, TRBJ2-7)
CRVEFFDRGSYEQYF

SEQ ID NO: 591919 - protein, 14 aa, Homo sapiens
  CDR3 for alpha chain variable domain of TCR clone 295960 (TRAV1-2, TRAJ8)
CDVREDTGFQKLVF

SEQ ID NO: 591920 - protein, 15 aa, Homo sapiens
  CDR3 for beta chain variable domain of TCR clone 295960 (TRBV7-3, TRBJ2-2)
CASSETGQGTGELFF

SEQ ID NO: 591921 - protein, 15 aa, Homo sapiens
  CDR3 for alpha chain variable domain of TCR clone 295961 (TRAV12-3, TRAJ13)
CAMSARSGGYQKVTF

SEQ ID NO: 591922 - protein, 18 aa, Homo sapiens
  CDR3 for beta chain variable domain of TCR clone 295961 (TRBV3-1, TRBJ2-7)
CASSQEGGGRSCHYEQYF

SEQ ID NO: 591923 - protein, 15 aa, Homo sapiens
  CDR3 for alpha chain variable domain of TCR clone 295962 (TRAV8-3, TRAJ45)
CASSYSGGGADGLTF

SEQ ID NO: 591924 - protein, 18 aa, Homo sapiens
  CDR3 for beta chain variable domain of TCR clone 295962 (TRBV18, TRBJ1-3)
CASSPRGGAGPSGNTVYF

SEQ ID NO: 591925 - protein, 15 aa, Homo sapiens
  CDR3 for alpha chain variable domain of TCR clone 295963 (TRAV35, TRAJ50)
CAGQLRKTSYDKVTF

SEQ ID NO: 591926 - protein, 12 aa, Homo sapiens
  CDR3 for beta chain variable domain of TCR clone 295963 (TRBV5-1, TRBJ2-5)
CASSLGLETQYF

SEQ ID NO: 591927 - protein, 17 aa, Homo sapiens
  CDR3 for alpha chain variable domain of TCR clone 295964 (TRAV13-1, TRAJ52)
CAASSGAGGTSNGKRTF

SEQ ID NO: 591928 - protein, 15 aa, Homo sapiens
  CDR3 for beta chain variable domain of TCR clone 295964 (TRBV2, TRBJ2-1)
CASSELAGSYNEQFF

SEQ ID NO: 591929 - protein, 13 aa, Homo sapiens
  CDR3 for alpha chain variable domain of TCR clone 295965 (TRAV8-3, TRAJ34)
CAVGPYNTDKLIF

SEQ ID NO: 591930 - protein, 15 aa, Homo sapiens
  CDR3 for beta chain variable domain of TCR clone 295965 (TRBV11-2, TRBJ2-1)
CASSLTSGGYNEQFF

SEQ ID NO: 591931 - protein, 14 aa, Homo sapiens
  CDR3 for alpha chain variable domain of TCR clone 295966 (TRAV2, TRAJ22)
RAVGRGGSARQLTF

SEQ ID NO: 591932 - protein, 12 aa, Homo sapiens
  CDR3 for beta chain variable domain of TCR clone 295966 (TRBV19, TRBJ2-1)
CASSMQDTEQFF

SEQ ID NO: 591933 - protein, 12 aa, Homo sapiens
  CDR3 for alpha chain variable domain of TCR clone 295967 (TRAV1-1, TRAJ24)
CAATDSWGKLQF

SEQ ID NO: 591934 - protein, 13 aa, Homo sapiens
  CDR3 for beta chain variable domain of TCR clone 295967 (TRBV7-8, TRBJ2-7)
CASSPGPGSEQYF

SEQ ID NO: 591935 - protein, 14 aa, Homo sapiens
  CDR3 for alpha chain variable domain of TCR clone 295968 (TRAV12-1, TRAJ17)
CVVNYKAAGNKLTF

SEQ ID NO: 591936 - protein, 12 aa, Homo sapiens
  CDR3 for beta chain variable domain of TCR clone 295968 (TRBV20-1, TRBJ2-1)
CSAQYTYNEQFF

SEQ ID NO: 591937 - protein, 14 aa, Homo sapiens
  CDR3 for alpha chain variable domain of TCR clone 295969 (TRAV17, TRAJ31)
CATVLRTNNARLMF

SEQ ID NO: 591938 - protein, 14 aa, Homo sapiens
  CDR3 for beta chain variable domain of TCR clone 295969 (TRBV12-4, TRBJ2-5)
CASSLWQKQETQYF

SEQ ID NO: 591939 - protein, 14 aa, Homo sapiens
  CDR3 for alpha chain variable domain of TCR clone 295970 (TRAV13-1, TRAJ35)
CAASKGGFRNVLHC

SEQ ID NO: 591940 - protein, 12 aa, Homo sapiens
  CDR3 for beta chain variable domain of TCR clone 295970 (TRBV7-9, TRBJ2-7)
CASSLQGYEQYF

SEQ ID NO: 591941 - protein, 15 aa, Homo sapiens
  CDR3 for alpha chain variable domain of TCR clone 295971 (TRAV12-3, TRAJ11)
CAMSEENSGYSTLTF

SEQ ID NO: 591942 - protein, 13 aa, Homo sapiens
  CDR3 for beta chain variable domain of TCR clone 295971 (TRBV7-2, TRBJ1-1)
CASSVQGYTEAFF

SEQ ID NO: 591943 - protein, 13 aa, Homo sapiens
  CDR3 for alpha chain variable domain of TCR clone 295972 (TRAV3, TRAJ21)
CAVREPDFNKFYF

SEQ ID NO: 591944 - protein, 16 aa, Homo sapiens
  CDR3 for beta chain variable domain of TCR clone 295972 (TRBV5-1, TRBJ2-4)
CASSFPTSGRVDQKHS

SEQ ID NO: 591945 - protein, 19 aa, Homo sapiens
  CDR3 for alpha chain variable domain of TCR clone 295973 (TRAV2, TRAJ20)
ILQVREADAAVYRDCKLSF

SEQ ID NO: 591946 - protein, 15 aa, Homo sapiens
  CDR3 for beta chain variable domain of TCR clone 295973 (TRBV5-1, TRBJ2-2)
CASSSQGGNTGELFF

SEQ ID NO: 591947 - protein, 12 aa, Homo sapiens
  CDR3 for alpha chain variable domain of TCR clone 295974 (TRAV23/DV6, TRAJ30)
CAASKGDDKIIF

SEQ ID NO: 591948 - protein, 13 aa, Homo sapiens
  CDR3 for beta chain variable domain of TCR clone 295974 (TRBV18, TRBJ1-2)
CASSASATEGYAF

SEQ ID NO: 591949 - protein, 13 aa, Homo sapiens
  CDR3 for alpha chain variable domain of TCR clone 295975 (TRAV20, TRAJ37)
CAGCSSNTGKQIF

SEQ ID NO: 591950 - protein, 11 aa, Homo sapiens
  CDR3 for beta chain variable domain of TCR clone 295975 (TRBV12-4, TRBJ2-3)
CAITATDTQYF

SEQ ID NO: 591951 - protein, 14 aa, Homo sapiens
  CDR3 for alpha chain variable domain of TCR clone 295976 (TRAV1-2, TRAJ8)
CAVREDTGFQKPVF

SEQ ID NO: 591952 - protein, 15 aa, Homo sapiens
  CDR3 for beta chain variable domain of TCR clone 295976 (TRBV28, TRBJ2-4)
CAAGSGTLLMGIQYF

SEQ ID NO: 591953 - protein, 14 aa, Homo sapiens
  CDR3 for alpha chain variable domain of TCR clone 295977 (TRAV1-2, TRAJ8)
CAVREVTGFQKLVF

SEQ ID NO: 591954 - protein, 17 aa, Homo sapiens
  CDR3 for beta chain variable domain of TCR clone 295977 (TRBV11-2, TRBJ2-1)
CASSLYPPGVEYNEQFF

SEQ ID NO: 591955 - protein, 14 aa, Homo sapiens
  CDR3 for alpha chain variable domain of TCR clone 295978 (TRAV12-2, TRAJ17)
CAVLFKAAGNKLTF

SEQ ID NO: 591956 - protein, 17 aa, Homo sapiens
  CDR3 for beta chain variable domain of TCR clone 295978 (TRBV20-1, TRBJ2-2)
CRASGSGQGGVTGELFF

SEQ ID NO: 591957 - protein, 14 aa, Homo sapiens
  CDR3 for alpha chain variable domain of TCR clone 295979 (TRAV12-1, TRAJ30)
CVVNIGGRDDKIIF

SEQ ID NO: 591958 - protein, 14 aa, Homo sapiens
  CDR3 for beta chain variable domain of TCR clone 295979 (TRBV20-1, TRBJ2-1)
CSARIGGSANEQFF

SEQ ID NO: 591959 - protein, 12 aa, Homo sapiens
  CDR3 for alpha chain variable domain of TCR clone 295980 (TRAV21, TRAJ58)
CAAETSGSRLTF

SEQ ID NO: 591960 - protein, 15 aa, Homo sapiens
  CDR3 for beta chain variable domain of TCR clone 295980 (TRBV20-1, TRBJ2-7)
CSARDPVKGECEQYF

SEQ ID NO: 591961 - protein, 15 aa, Homo sapiens
  CDR3 for alpha chain variable domain of TCR clone 295981 (TRAV8-3, TRAJ48)
CAVGASNFGNEKLTF

SEQ ID NO: 591962 - protein, 17 aa, Homo sapiens
  CDR3 for beta chain variable domain of TCR clone 295981 (TRBV7-3, TRBJ2-3)
CASSLMKRMRGADTQYF

SEQ ID NO: 591963 - protein, 18 aa, Homo sapiens
  CDR3 for alpha chain variable domain of TCR clone 295982 (TRAV13-1, TRAJ52)
CAAKNPNAGGTSYGKLTF

SEQ ID NO: 591964 - protein, 14 aa, Homo sapiens
  CDR3 for beta chain variable domain of TCR clone 295982 (TRBV4-1, TRBJ2-2)
CASSQAVNTGELVF

SEQ ID NO: 591965 - protein, 15 aa, Homo sapiens
  CDR3 for alpha chain variable domain of TCR clone 295983 (TRAV8-3, TRAJ11)
CALGLLNSGYGTLTF

SEQ ID NO: 591966 - protein, 23 aa, Homo sapiens
  CDR3 for beta chain variable domain of TCR clone 295983 (TRBV7-9, TRBJ1-2)
EAQLEKSRLLSDRFSSGEDGYTF

SEQ ID NO: 591967 - protein, 11 aa, Homo sapiens
  CDR3 for alpha chain variable domain of TCR clone 295984 (TRAV2, TRAJ33)
CAVESNYQLSG

SEQ ID NO: 591968 - protein, 15 aa, Homo sapiens
  CDR3 for beta chain variable domain of TCR clone 295984 (TRBV19, TRBJ1-1)
CASTSGQIQNTEAFF

SEQ ID NO: 591969 - protein, 15 aa, Homo sapiens
  CDR3 for alpha chain variable domain of TCR clone 295985 (TRAV21, TRAJ53)
CATLNSGGSNYRMTF

SEQ ID NO: 591970 - protein, 16 aa, Homo sapiens
  CDR3 for beta chain variable domain of TCR clone 295985 (TRBV9, TRBJ2-1)
CASSVGGGGNYNEQFF

SEQ ID NO: 591971 - protein, 16 aa, Homo sapiens
  CDR3 for alpha chain variable domain of TCR clone 295986 (TRAV26-1, TRAJ52)
CIVSNAGGTNYGKLTF

SEQ ID NO: 591972 - protein, 16 aa, Homo sapiens
  CDR3 for beta chain variable domain of TCR clone 295986 (TRBV5-1, TRBJ2-1)
CASSLEGRGLYNEQFF

SEQ ID NO: 591973 - protein, 11 aa, Homo sapiens
  CDR3 for alpha chain variable domain of TCR clone 295987 (TRAV39, TRAJ49)
CAVDISTQFYF

SEQ ID NO: 591974 - protein, 13 aa, Homo sapiens
  CDR3 for beta chain variable domain of TCR clone 295987 (TRBV10-3, TRBJ2-7)
CASKLAVNYEQYF

SEQ ID NO: 591975 - protein, 11 aa, Homo sapiens
  CDR3 for alpha chain variable domain of TCR clone 295988 (TRAV3, TRAJ21)
CAVGNFNKFYF

SEQ ID NO: 591976 - protein, 15 aa, Homo sapiens
  CDR3 for beta chain variable domain of TCR clone 295988 (TRBV7-9, TRBJ1-4)
CASSTRTGGNETLFF

SEQ ID NO: 591977 - protein, 17 aa, Homo sapiens
  CDR3 for alpha chain variable domain of TCR clone 295989 (TRAV12-2, TRAJ42)
CAVNILNYGGSQGNLIF

SEQ ID NO: 591978 - protein, 11 aa, Homo sapiens
  CDR3 for beta chain variable domain of TCR clone 295989 (TRBV11-2, TRBJ1-1)
CASSINPEAFF

SEQ ID NO: 591979 - protein, 14 aa, Homo sapiens
  CDR3 for alpha chain variable domain of TCR clone 295990 (TRAV23/DV6, TRAJ8)
CAASKNTGFQKLVF

SEQ ID NO: 591980 - protein, 16 aa, Homo sapiens
  CDR3 for beta chain variable domain of TCR clone 295990 (TRBV4-1, TRBJ2-6)
CASSQVGDPGANILTF

SEQ ID NO: 591981 - protein, 16 aa, Homo sapiens
  CDR3 for alpha chain variable domain of TCR clone 295991 (TRAV20, TRAJ22)
CAVQASSSGSARQLTF

SEQ ID NO: 591982 - protein, 13 aa, Homo sapiens
  CDR3 for beta chain variable domain of TCR clone 295991 (TRBV7-2, TRBJ2-5)
FASSQTSVETQYF

SEQ ID NO: 591983 - protein, 10 aa, Homo sapiens
  CDR3 for alpha chain variable domain of TCR clone 295992 (TRAV21, TRAJ31)
CAVDNDRLMF

SEQ ID NO: 591984 - protein, 13 aa, Homo sapiens
  CDR3 for beta chain variable domain of TCR clone 295992 (TRBV4-1, TRBJ1-1)
CASSRKMNTEAFF

SEQ ID NO: 591985 - protein, 12 aa, Homo sapiens
  CDR3 for alpha chain variable domain of TCR clone 295993 (TRAV21, TRAJ24)
CAVLDSWGQLQF

SEQ ID NO: 591986 - protein, 16 aa, Homo sapiens
  CDR3 for beta chain variable domain of TCR clone 295993 (TRBV13, TRBJ2-2)
GASSEVFGANPGELFF

SEQ ID NO: 591987 - protein, 14 aa, Homo sapiens
  CDR3 for alpha chain variable domain of TCR clone 295994 (TRAV17, TRAJ22)
YATSPSGSARQLTF

SEQ ID NO: 591988 - protein, 15 aa, Homo sapiens
  CDR3 for beta chain variable domain of TCR clone 295994 (TRBV7-9, TRBJ1-6)
CASSSPGRGNSPLHF

SEQ ID NO: 591989 - protein, 17 aa, Homo sapiens
  CDR3 for alpha chain variable domain of TCR clone 295995 (TRAV20, TRAJ28)
CAVQGGYSGAGSYQLTF

SEQ ID NO: 591990 - protein, 15 aa, Homo sapiens
  CDR3 for beta chain variable domain of TCR clone 295995 (TRBV9, TRBJ1-6)
CASSVAGTGDSPLHF

SEQ ID NO: 591991 - protein, 16 aa, Homo sapiens
  CDR3 for alpha chain variable domain of TCR clone 295996 (TRAV30, TRAJ24)
CGTEIVDADSRGKFQF

SEQ ID NO: 591992 - protein, 14 aa, Homo sapiens
  CDR3 for beta chain variable domain of TCR clone 295996 (TRBV12-5, TRBJ2-5)
CASGARTHQETQYF

SEQ ID NO: 591993 - protein, 17 aa, Homo sapiens
  CDR3 for alpha chain variable domain of TCR clone 295997 (TRAV12-2, TRAJ4)
CAVNVRPVSGGYNKLIF

SEQ ID NO: 591994 - protein, 17 aa, Homo sapiens
  CDR3 for beta chain variable domain of TCR clone 295997 (TRBV6-3, TRBJ2-1)
CGSSYSSGTRGLDEQFF

SEQ ID NO: 591995 - protein, 12 aa, Homo sapiens
  CDR3 for alpha chain variable domain of TCR clone 295998 (TRAV2, TRAJ9)
RAVGAGGVKTIF

SEQ ID NO: 591996 - protein, 16 aa, Homo sapiens
  CDR3 for beta chain variable domain of TCR clone 295998 (TRBV13, TRBJ2-2)
CASSPRTGEHTGELFF

SEQ ID NO: 591997 - protein, 14 aa, Homo sapiens
  CDR3 for alpha chain variable domain of TCR clone 295999 (TRAV8-4, TRAJ43)
CAVSDPRNKNDMRF

SEQ ID NO: 591998 - protein, 15 aa, Homo sapiens
  CDR3 for beta chain variable domain of TCR clone 295999 (TRBV4-2, TRBJ1-2)
CASSQRTGGRDGYTF

SEQ ID NO: 591999 - protein, 11 aa, Homo sapiens
  CDR3 for alpha chain variable domain of TCR clone 296000 (TRAV21, TRAJ27)
CAVRMQANQPL

SEQ ID NO: 592000 - protein, 13 aa, Homo sapiens
  CDR3 for beta chain variable domain of TCR clone 296000 (TRBV11-3, TRBJ2-7)
CASSLDKLCEQYF

SEQ ID NO: 592001 - protein, 15 aa, Homo sapiens
  CDR3 for alpha chain variable domain of TCR clone 296001 (TRAV1-1, TRAJ24)
CALSGGNDSWGKFKF

SEQ ID NO: 592002 - protein, 16 aa, Homo sapiens
  CDR3 for beta chain variable domain of TCR clone 296001 (TRBV2, TRBJ2-7)
CASSEPWTGPSYEQYF

SEQ ID NO: 592003 - protein, 12 aa, Homo sapiens
  CDR3 for alpha chain variable domain of TCR clone 296002 (TRAV16, TRAJ56)
CSYTGANSKLTF

SEQ ID NO: 592004 - protein, 18 aa, Homo sapiens
  CDR3 for beta chain variable domain of TCR clone 296002 (TRBV7-2, TRBJ2-7)
CASSLAQGLRDSSYEQYF

SEQ ID NO: 592005 - protein, 14 aa, Homo sapiens
  CDR3 for alpha chain variable domain of TCR clone 296003 (TRAV26-1, TRAJ48)
CIVRVARGNEKLTF

SEQ ID NO: 592006 - protein, 15 aa, Homo sapiens
  CDR3 for beta chain variable domain of TCR clone 296003 (TRBV7-9, TRBJ2-7)
CASSLALAEAYEQYF

SEQ ID NO: 592007 - protein, 16 aa, Homo sapiens
  CDR3 for alpha chain variable domain of TCR clone 296004 (TRAV3, TRAJ37)
CAVRGKGSGNTGKLIF

SEQ ID NO: 592008 - protein, 15 aa, Homo sapiens
  CDR3 for beta chain variable domain of TCR clone 296004 (TRBV18, TRBJ2-1)
CASSPPGASYNEQFF

SEQ ID NO: 592009 - protein, 14 aa, Homo sapiens
  CDR3 for alpha chain variable domain of TCR clone 296005 (TRAV12-2, TRAJ45)
CALPERGGADGLTF

SEQ ID NO: 592010 - protein, 20 aa, Homo sapiens
  CDR3 for beta chain variable domain of TCR clone 296005 (TRBV7-8, TRBJ2-2)
CASSHLFPGPTIHITGELFF

SEQ ID NO: 592011 - protein, 14 aa, Homo sapiens
  CDR3 for alpha chain variable domain of TCR clone 296006 (TRAV12-2, TRAJ13)
CAVKKTGGYQKVTF

SEQ ID NO: 592012 - protein, 13 aa, Homo sapiens
  CDR3 for beta chain variable domain of TCR clone 296006 (TRBV19, TRBJ2-5)
CASSIPYGETQYF

SEQ ID NO: 592013 - protein, 16 aa, Homo sapiens
  CDR3 for alpha chain variable domain of TCR clone 296007 (TRAV30, TRAJ4)
CGTEIVDADSWGKFQF

SEQ ID NO: 592014 - protein, 14 aa, Homo sapiens
  CDR3 for beta chain variable domain of TCR clone 296007 (TRBV12-5, TRBJ2-5)
CASGSRTHQETQYF

SEQ ID NO: 592015 - protein, 11 aa, Homo sapiens
  CDR3 for alpha chain variable domain of TCR clone 296008 (TRAV25, TRAJ47)
CAGLYGNKLVF

SEQ ID NO: 592016 - protein, 19 aa, Homo sapiens
  CDR3 for beta chain variable domain of TCR clone 296008 (TRBV25-1, TRBJ2-2)
CAILVYRVDRGRKTGELFF

SEQ ID NO: 592017 - protein, 13 aa, Homo sapiens
  CDR3 for alpha chain variable domain of TCR clone 296009 (TRAV8-3, TRAJ44)
RAVVPGTASKLTF

SEQ ID NO: 592018 - protein, 12 aa, Homo sapiens
  CDR3 for beta chain variable domain of TCR clone 296009 (TRBV14, TRBJ2-5)
CASSQLKETQYF

SEQ ID NO: 592019 - protein, 16 aa, Homo sapiens
  CDR3 for alpha chain variable domain of TCR clone 296010 (TRAV16, TRAJ52)
CALSTAGGTSYGKLTF

SEQ ID NO: 592020 - protein, 17 aa, Homo sapiens
  CDR3 for beta chain variable domain of TCR clone 296010 (TRBV11-2, TRBJ2-1)
CASSLYPPGVEYNEQFF

SEQ ID NO: 592021 - protein, 16 aa, Homo sapiens
  CDR3 for alpha chain variable domain of TCR clone 296011 (TRAV30, TRAJ24)
CGTEIVAADSWGTFQF

SEQ ID NO: 592022 - protein, 16 aa, Homo sapiens
  CDR3 for beta chain variable domain of TCR clone 296011 (TRBV7-3, TRBJ2-1)
CASSLEGYRSYNEQFF

SEQ ID NO: 592023 - protein, 18 aa, Homo sapiens
  CDR3 for alpha chain variable domain of TCR clone 296012 (TRAV13-1, TRAJ52)
CAAKNPNAGGTSYGKLTF

SEQ ID NO: 592024 - protein, 12 aa, Homo sapiens
  CDR3 for beta chain variable domain of TCR clone 296012 (TRBV2, TRBJ2-1)
CAKREGYNAQFF

SEQ ID NO: 592025 - protein, 11 aa, Homo sapiens
  CDR3 for alpha chain variable domain of TCR clone 296013 (TRAV39, TRAJ49)
CAVDISTQFYF

SEQ ID NO: 592026 - protein, 11 aa, Homo sapiens
  CDR3 for beta chain variable domain of TCR clone 296013 (TRBV7-8, TRBJ2-7)
CASRLPLEQYF

SEQ ID NO: 592027 - protein, 14 aa, Homo sapiens
  CDR3 for alpha chain variable domain of TCR clone 296014 (TRAV12-3, TRAJ10)
SHLPLTGGGNKLTF

SEQ ID NO: 592028 - protein, 16 aa, Homo sapiens
  CDR3 for beta chain variable domain of TCR clone 296014 (TRBV20-1, TRBJ1-2)
CSASMGQGVANYGDTF

SEQ ID NO: 592029 - protein, 14 aa, Homo sapiens
  CDR3 for alpha chain variable domain of TCR clone 296015 (TRAV8-4, TRAJ9)
CAVRINTGGFKTIF

SEQ ID NO: 592030 - protein, 17 aa, Homo sapiens
  CDR3 for beta chain variable domain of TCR clone 296015 (TRBV20-1, TRBJ2-1)
CSARDPLAGVWDNEQFF

SEQ ID NO: 592031 - protein, 10 aa, Homo sapiens
  CDR3 for alpha chain variable domain of TCR clone 296016 (TRAV1-2, TRAJ31)
CAFFDARLMF

SEQ ID NO: 592032 - protein, 15 aa, Homo sapiens
  CDR3 for beta chain variable domain of TCR clone 296016 (TRBV5-5, TRBJ1-5)
CASSSTPGSNQPQHF

SEQ ID NO: 592033 - protein, 14 aa, Homo sapiens
  CDR3 for alpha chain variable domain of TCR clone 296017 (TRAV12-1, TRAJ17)
CVVNYKAAGNKLTF

SEQ ID NO: 592034 - protein, 11 aa, Homo sapiens
  CDR3 for beta chain variable domain of TCR clone 296017 (TRBV12-4, TRBJ2-5)
CASSLSETQYF

SEQ ID NO: 592035 - protein, 14 aa, Homo sapiens
  CDR3 for alpha chain variable domain of TCR clone 296018 (TRAV8-4, TRAJ9)
CAVRRNTGGFKTIF

SEQ ID NO: 592036 - protein, 15 aa, Homo sapiens
  CDR3 for beta chain variable domain of TCR clone 296018 (TRBV19, TRBJ1-1)
CASTSGQIQNTEDFF

SEQ ID NO: 592037 - protein, 15 aa, Homo sapiens
  CDR3 for alpha chain variable domain of TCR clone 296019 (TRAV23/DV6, TRAJ18)
CAARYRGSTLGRLYF

SEQ ID NO: 592038 - protein, 13 aa, Homo sapiens
  CDR3 for beta chain variable domain of TCR clone 296019 (TRBV7-2, TRBJ2-7)
RASSSPSGSEQYF

SEQ ID NO: 592039 - protein, 12 aa, Homo sapiens
  CDR3 for alpha chain variable domain of TCR clone 296020 (TRAV38-1, TRAJ20)
CAFIWNDYKLSF

SEQ ID NO: 592040 - protein, 15 aa, Homo sapiens
  CDR3 for beta chain variable domain of TCR clone 296020 (TRBV11-2, TRBJ1-3)
CASSLDGTVGNTIYF

SEQ ID NO: 592041 - protein, 14 aa, Homo sapiens
  CDR3 for alpha chain variable domain of TCR clone 296021 (TRAV9-2, TRAJ39)
CAPYIYNAGNMLTF

SEQ ID NO: 592042 - protein, 13 aa, Homo sapiens
  CDR3 for beta chain variable domain of TCR clone 296021 (TRBV2, TRBJ1-1)
CASSEGGNTEAFF

SEQ ID NO: 592043 - protein, 14 aa, Homo sapiens
  CDR3 for alpha chain variable domain of TCR clone 296022 (TRAV13-1, TRAJ35)
CAASKGGFGNVLHC

SEQ ID NO: 592044 - protein, 13 aa, Homo sapiens
  CDR3 for beta chain variable domain of TCR clone 296022 (TRBV7-3, TRBJ1-1)
CASSQDWGAEAFY

SEQ ID NO: 592045 - protein, 12 aa, Homo sapiens
  CDR3 for alpha chain variable domain of TCR clone 296023 (TRAV27, TRAJ41)
CAGRNSGYALNF

SEQ ID NO: 592046 - protein, 15 aa, Homo sapiens
  CDR3 for beta chain variable domain of TCR clone 296023 (TRBV20-1, TRBJ1-5)
CSATSDSGLGQPQHF

SEQ ID NO: 592047 - protein, 16 aa, Homo sapiens
  CDR3 for alpha chain variable domain of TCR clone 296024 (TRAV12-2, TRAJ50)
CAGGTATKTSYDKVIF

SEQ ID NO: 592048 - protein, 12 aa, Homo sapiens
  CDR3 for beta chain variable domain of TCR clone 296024 (TRBV12-4, TRBJ1-5)
CASSLGRQHQHF

SEQ ID NO: 592049 - protein, 17 aa, Homo sapiens
  CDR3 for alpha chain variable domain of TCR clone 296025 (TRAV3, TRAJ12)
CAVSDGGRMDSSYKLIF

SEQ ID NO: 592050 - protein, 14 aa, Homo sapiens
  CDR3 for beta chain variable domain of TCR clone 296025 (TRBV7-9, TRBJ1-2)
CASSRQGANHGYTF

SEQ ID NO: 592051 - protein, 15 aa, Homo sapiens
  CDR3 for alpha chain variable domain of TCR clone 296026 (TRAV8-3, TRAJ45)
CASSYSGGGADGPTF

SEQ ID NO: 592052 - protein, 15 aa, Homo sapiens
  CDR3 for beta chain variable domain of TCR clone 296026 (TRBV7-9, TRBJ1-2)
CASSLDREPNYGYTF

SEQ ID NO: 592053 - protein, 14 aa, Homo sapiens
  CDR3 for alpha chain variable domain of TCR clone 296027 (TRAV13-1, TRAJ5)
CAAHPDTGRRALTF

SEQ ID NO: 592054 - protein, 12 aa, Homo sapiens
  CDR3 for beta chain variable domain of TCR clone 296027 (TRBV11-2, TRBJ2-2)
CASSLGGGELFF

SEQ ID NO: 592055 - protein, 16 aa, Homo sapiens
  CDR3 for alpha chain variable domain of TCR clone 296028 (TRAV13-1, TRAJ18)
CAASRMRGSTLGRLYC

SEQ ID NO: 592056 - protein, 16 aa, Homo sapiens
  CDR3 for beta chain variable domain of TCR clone 296028 (TRBV27, TRBJ1-1)
CASSSRGRTGYTEAFF

SEQ ID NO: 592057 - protein, 13 aa, Homo sapiens
  CDR3 for alpha chain variable domain of TCR clone 296029 (TRAV3, TRAJ29)
CAVRDIIDTPLVF

SEQ ID NO: 592058 - protein, 14 aa, Homo sapiens
  CDR3 for beta chain variable domain of TCR clone 296029 (TRBV27, TRBJ2-1)
CASSATGGYNEQFF

SEQ ID NO: 592059 - protein, 16 aa, Homo sapiens
  CDR3 for alpha chain variable domain of TCR clone 296030 (TRAV3, TRAJ10)
CAARDMRAGGGNKLTF

SEQ ID NO: 592060 - protein, 17 aa, Homo sapiens
  CDR3 for beta chain variable domain of TCR clone 296030 (TRBV13, TRBJ2-3)
CASSLSRVAGGRNTQYF

SEQ ID NO: 592061 - protein, 10 aa, Homo sapiens
  CDR3 for alpha chain variable domain of TCR clone 296031 (TRAV21, TRAJ31)
CAVDNARLTF

SEQ ID NO: 592062 - protein, 17 aa, Homo sapiens
  CDR3 for beta chain variable domain of TCR clone 296031 (TRBV20-1, TRBJ1-5)
CSASLSPGQGGNQPQHF

SEQ ID NO: 592063 - protein, 11 aa, Homo sapiens
  CDR3 for alpha chain variable domain of TCR clone 296032 (TRAV2, TRAJ21)
CAVFNFNKFYF

SEQ ID NO: 592064 - protein, 16 aa, Homo sapiens
  CDR3 for beta chain variable domain of TCR clone 296032 (TRBV19, TRBJ2-7)
CASSTPGQASSYEQYF

SEQ ID NO: 592065 - protein, 11 aa, Homo sapiens
  CDR3 for alpha chain variable domain of TCR clone 296033 (TRAV8-3, TRAJ15)
FAVGPGTALIF

SEQ ID NO: 592066 - protein, 18 aa, Homo sapiens
  CDR3 for beta chain variable domain of TCR clone 296033 (TRBV18, TRBJ2-3)
CASSYTSGAAGGTDTQYF

SEQ ID NO: 592067 - protein, 15 aa, Homo sapiens
  CDR3 for alpha chain variable domain of TCR clone 296034 (TRAV8-2, TRAJ40)
CVVLGTTSGTYKYIF

SEQ ID NO: 592068 - protein, 15 aa, Homo sapiens
  CDR3 for beta chain variable domain of TCR clone 296034 (TRBV11-3, TRBJ2-7)
CASSPGPASSYEQYF

SEQ ID NO: 592069 - protein, 13 aa, Homo sapiens
  CDR3 for alpha chain variable domain of TCR clone 296035 (TRAV16, TRAJ31)
CAISAHNNARLMF

SEQ ID NO: 592070 - protein, 13 aa, Homo sapiens
  CDR3 for beta chain variable domain of TCR clone 296035 (TRBV4-2, TRBJ1-1)
CASSQAGNTEAFF

SEQ ID NO: 592071 - protein, 11 aa, Homo sapiens
  CDR3 for alpha chain variable domain of TCR clone 296036 (TRAV12-1, TRAJ15)
CVVNAGTALIF

SEQ ID NO: 592072 - protein, 16 aa, Homo sapiens
  CDR3 for beta chain variable domain of TCR clone 296036 (TRBV28, TRBJ2-7)
CASSSRVRDSYNEQYF

SEQ ID NO: 592073 - protein, 14 aa, Homo sapiens
  CDR3 for alpha chain variable domain of TCR clone 296037 (TRAV8-3, TRAJ31)
CAVGRGLNNARLLF

SEQ ID NO: 592074 - protein, 15 aa, Homo sapiens
  CDR3 for beta chain variable domain of TCR clone 296037 (TRBV7-2, TRBJ2-2)
CASSLAGGLTGELFF

SEQ ID NO: 592075 - protein, 15 aa, Homo sapiens
  CDR3 for alpha chain variable domain of TCR clone 296038 (TRAV12-3, TRAJ6)
CAMSATTGGSYIPTF

SEQ ID NO: 592076 - protein, 16 aa, Homo sapiens
  CDR3 for beta chain variable domain of TCR clone 296038 (TRBV5-1, TRBJ2-2)
CASSLWDTTNTGELFF

SEQ ID NO: 592077 - protein, 15 aa, Homo sapiens
  CDR3 for alpha chain variable domain of TCR clone 296039 (TRAV23/DV6, TRAJ40)
CAAWPGGGGYQTVTF

SEQ ID NO: 592078 - protein, 15 aa, Homo sapiens
  CDR3 for beta chain variable domain of TCR clone 296039 (TRBV7-9, TRBJ2-7)
CASSPGGGLTYEQYF

SEQ ID NO: 592079 - protein, 14 aa, Homo sapiens
  CDR3 for alpha chain variable domain of TCR clone 296040 (TRAV1-2, TRAJ8)
CAVREDTGFQKLVF

SEQ ID NO: 592080 - protein, 15 aa, Homo sapiens
  CDR3 for beta chain variable domain of TCR clone 296040 (TRBV7-9, TRBJ1-4)
CACSARTGGNEKLFF

SEQ ID NO: 592081 - protein, 18 aa, Homo sapiens
  CDR3 for alpha chain variable domain of TCR clone 296041 (TRAV12-3, TRAJ52)
CAMSVGGAGGTSYGKLTF

SEQ ID NO: 592082 - protein, 12 aa, Homo sapiens
  CDR3 for beta chain variable domain of TCR clone 296041 (TRBV7-9, TRBJ2-7)
CASSFGSYEQYF

SEQ ID NO: 592083 - protein, 14 aa, Homo sapiens
  CDR3 for alpha chain variable domain of TCR clone 296042 (TRAV12-2, TRAJ13)
CSVKKTGGYQKVTF

SEQ ID NO: 592084 - protein, 16 aa, Homo sapiens
  CDR3 for beta chain variable domain of TCR clone 296042 (TRBV7-6, TRBJ2-6)
CASSLPGLSGANVLTF

SEQ ID NO: 592085 - protein, 17 aa, Homo sapiens
  CDR3 for alpha chain variable domain of TCR clone 296043 (TRAV8-3, TRAJ42)
CAGGNPEERRSQGNLIF

SEQ ID NO: 592086 - protein, 14 aa, Homo sapiens
  CDR3 for beta chain variable domain of TCR clone 296043 (TRBV15, TRBJ2-7)
CATSRVARGYEQYF

SEQ ID NO: 592087 - protein, 11 aa, Homo sapiens
  CDR3 for alpha chain variable domain of TCR clone 296044 (TRAV23/DV6, TRAJ58)
CAARLLRGETS

SEQ ID NO: 592088 - protein, 11 aa, Homo sapiens
  CDR3 for beta chain variable domain of TCR clone 296044 (TRBV11-2, TRBJ2-2)
CASSLPGELFF

SEQ ID NO: 592089 - protein, 13 aa, Homo sapiens
  CDR3 for alpha chain variable domain of TCR clone 296045 (TRAV17, TRAJ5)
CALRGTGRRALTF

SEQ ID NO: 592090 - protein, 14 aa, Homo sapiens
  CDR3 for beta chain variable domain of TCR clone 296045 (TRBV7-2, TRBJ2-7)
CASSLKTSFYEQYF

SEQ ID NO: 592091 - protein, 13 aa, Homo sapiens
  CDR3 for alpha chain variable domain of TCR clone 296046 (TRAV1-2, TRAJ36)
CAVDQTGENNLFF

SEQ ID NO: 592092 - protein, 14 aa, Homo sapiens
  CDR3 for beta chain variable domain of TCR clone 296046 (TRBV20-1, TRBJ2-5)
CSAREMTKQETQYF

SEQ ID NO: 592093 - protein, 15 aa, Homo sapiens
  CDR3 for alpha chain variable domain of TCR clone 296047 (TRAV34, TRAJ38)
CGADFTPGNNRKLIW

SEQ ID NO: 592094 - protein, 15 aa, Homo sapiens
  CDR3 for beta chain variable domain of TCR clone 296047 (TRBV7-8, TRBJ2-1)
CASSLAGGLYNEQFF

SEQ ID NO: 592095 - protein, 15 aa, Homo sapiens
  CDR3 for alpha chain variable domain of TCR clone 296048 (TRAV8-3, TRAJ45)
CSSSYSVGGADGLTF

SEQ ID NO: 592096 - protein, 13 aa, Homo sapiens
  CDR3 for beta chain variable domain of TCR clone 296048 (TRBV10-3, TRBJ2-7)
CASKLAVNYEQYF

SEQ ID NO: 592097 - protein, 14 aa, Homo sapiens
  CDR3 for alpha chain variable domain of TCR clone 296049 (TRAV12-2, TRAJ13)
CAVKKTGGYQKVTF

SEQ ID NO: 592098 - protein, 13 aa, Homo sapiens
  CDR3 for beta chain variable domain of TCR clone 296049 (TRBV18, TRBJ2-5)
CASSPAGKETQYF

SEQ ID NO: 592099 - protein, 15 aa, Homo sapiens
  CDR3 for alpha chain variable domain of TCR clone 296050 (TRAV26-1, TRAJ29)
CIVRVEGSGNTPLVF

SEQ ID NO: 592100 - protein, 15 aa, Homo sapiens
  CDR3 for beta chain variable domain of TCR clone 296050 (TRBV7-9, TRBJ1-5)
CASSQGHQPTQHQHF

SEQ ID NO: 592101 - protein, 14 aa, Homo sapiens
  CDR3 for alpha chain variable domain of TCR clone 296051 (TRAV12-2, TRAJ40)
CAVKIPSGTYKYIF

SEQ ID NO: 592102 - protein, 13 aa, Homo sapiens
  CDR3 for beta chain variable domain of TCR clone 296051 (TRBV7-9, TRBJ2-1)
CASSWESYNEQFF

SEQ ID NO: 592103 - protein, 15 aa, Homo sapiens
  CDR3 for alpha chain variable domain of TCR clone 296052 (TRAV26-1, TRAJ29)
CIVRVEGSGNTPLVF

SEQ ID NO: 592104 - protein, 15 aa, Homo sapiens
  CDR3 for beta chain variable domain of TCR clone 296052 (TRBV7-9, TRBJ1-5)
CTSSQGHQPNQHQHF

SEQ ID NO: 592105 - protein, 13 aa, Homo sapiens
  CDR3 for alpha chain variable domain of TCR clone 296053 (TRAV30, TRAJ6)
CGTEAGGSYIPTF

SEQ ID NO: 592106 - protein, 13 aa, Homo sapiens
  CDR3 for beta chain variable domain of TCR clone 296053 (TRBV7-2, TRBJ2-2)
CASSLAVTGELFF

SEQ ID NO: 592107 - protein, 15 aa, Homo sapiens
  CDR3 for alpha chain variable domain of TCR clone 296054 (TRAV2, TRAJ44)
CAVEAYTGTASKLTF

SEQ ID NO: 592108 - protein, 13 aa, Homo sapiens
  CDR3 for beta chain variable domain of TCR clone 296054 (TRBV11-2, TRBJ2-1)
CQQPRQQDNEQFF

SEQ ID NO: 592109 - protein, 15 aa, Homo sapiens
  CDR3 for alpha chain variable domain of TCR clone 296055 (TRAV1-1, TRAJ4)
CAVRAFSGGYNKLIF

SEQ ID NO: 592110 - protein, 16 aa, Homo sapiens
  CDR3 for beta chain variable domain of TCR clone 296055 (TRBV7-3, TRBJ2-2)
CASSLKRGTLSGELFF

SEQ ID NO: 592111 - protein, 11 aa, Homo sapiens
  CDR3 for alpha chain variable domain of TCR clone 296056 (TRAV2, TRAJ13)
CASGGYQKVTF

SEQ ID NO: 592112 - protein, 15 aa, Homo sapiens
  CDR3 for beta chain variable domain of TCR clone 296056 (TRBV28, TRBJ2-5)
CASSPPWSYQETQYL

SEQ ID NO: 592113 - protein, 15 aa, Homo sapiens
  CDR3 for alpha chain variable domain of TCR clone 296057 (TRAV13-1, TRAJ52)
KNPNADGTSYGKLTF

SEQ ID NO: 592114 - protein, 15 aa, Homo sapiens
  CDR3 for beta chain variable domain of TCR clone 296057 (TRBV6-1, TRBJ2-3)
CASSERGGITDTQYF

SEQ ID NO: 592115 - protein, 12 aa, Homo sapiens
  CDR3 for alpha chain variable domain of TCR clone 296058 (TRAV38-1, TRAJ47)
CAFETYGNKLVF

SEQ ID NO: 592116 - protein, 12 aa, Homo sapiens
  CDR3 for beta chain variable domain of TCR clone 296058 (TRBV14, TRBJ2-7)
CASSLYKDEQYF

SEQ ID NO: 592117 - protein, 12 aa, Homo sapiens
  CDR3 for alpha chain variable domain of TCR clone 296059 (TRAV16, TRAJ49)
CALNEGGNQFYF

SEQ ID NO: 592118 - protein, 14 aa, Homo sapiens
  CDR3 for beta chain variable domain of TCR clone 296059 (TRBV7-9, TRBJ2-1)
CSSRPTGLRNEQFF

SEQ ID NO: 592119 - protein, 16 aa, Homo sapiens
  CDR3 for alpha chain variable domain of TCR clone 296060 (TRAV4, TRAJ8)
CLVSDSGKKGFQKLVF

SEQ ID NO: 592120 - protein, 15 aa, Homo sapiens
  CDR3 for beta chain variable domain of TCR clone 296060 (TRBV15, TRBJ1-2)
CATSRVRASGSGYTF

SEQ ID NO: 592121 - protein, 14 aa, Homo sapiens
  CDR3 for alpha chain variable domain of TCR clone 296061 (TRAV12-3, TRAJ47)
CAMSVREYRNTLVF

SEQ ID NO: 592122 - protein, 15 aa, Homo sapiens
  CDR3 for beta chain variable domain of TCR clone 296061 (TRBV20-1, TRBJ2-2)
CSARDTRLNTGELFF

SEQ ID NO: 592123 - protein, 11 aa, Homo sapiens
  CDR3 for alpha chain variable domain of TCR clone 296062 (TRAV13-1, TRAJ15)
CAATPGTALIF

SEQ ID NO: 592124 - protein, 17 aa, Homo sapiens
  CDR3 for beta chain variable domain of TCR clone 296062 (TRBV13, TRBJ2-3)
CASSLSRVAGGGNTQYF

SEQ ID NO: 592125 - protein, 16 aa, Homo sapiens
  CDR3 for alpha chain variable domain of TCR clone 296063 (TRAV30, TRAJ24)
CGTEIVDTDGWGKFQF

SEQ ID NO: 592126 - protein, 16 aa, Homo sapiens
  CDR3 for beta chain variable domain of TCR clone 296063 (TRBV4-1, TRBJ2-7)
CASSQEGTASSYEQYF

SEQ ID NO: 592127 - protein, 16 aa, Homo sapiens
  CDR3 for alpha chain variable domain of TCR clone 296064 (TRAV21, TRAJ37)
CAVRTAGYSNTGKLIF

SEQ ID NO: 592128 - protein, 13 aa, Homo sapiens
  CDR3 for beta chain variable domain of TCR clone 296064 (TRBV7-9, TRBJ2-5)
CASLPSGREAQYF

SEQ ID NO: 592129 - protein, 14 aa, Homo sapiens
  CDR3 for alpha chain variable domain of TCR clone 296065 (TRAV1-2, TRAJ16)
CAVNRFSDGQKLPF

SEQ ID NO: 592130 - protein, 14 aa, Homo sapiens
  CDR3 for beta chain variable domain of TCR clone 296065 (TRBV7-3, TRBJ2-1)
CASSLAGGTNEQFF

SEQ ID NO: 592131 - protein, 14 aa, Homo sapiens
  CDR3 for alpha chain variable domain of TCR clone 296066 (TRAV12-3, TRAJ33)
CAMSGRDSNYQLIC

SEQ ID NO: 592132 - protein, 14 aa, Homo sapiens
  CDR3 for beta chain variable domain of TCR clone 296066 (TRBV25-1, TRBJ1-1)
CASTHLGGNTEAFF

SEQ ID NO: 592133 - protein, 16 aa, Homo sapiens
  CDR3 for alpha chain variable domain of TCR clone 296067 (TRAV12-2, TRAJ52)
CRLANAGGTSYGKLTF

SEQ ID NO: 592134 - protein, 16 aa, Homo sapiens
  CDR3 for beta chain variable domain of TCR clone 296067 (TRBV7-2, TRBJ1-3)
CASSSGRVLSGNTIYF

SEQ ID NO: 592135 - protein, 12 aa, Homo sapiens
  CDR3 for alpha chain variable domain of TCR clone 296068 (TRAV12-1, TRAJ8)
CVVNKGFQKLVF

SEQ ID NO: 592136 - protein, 15 aa, Homo sapiens
  CDR3 for beta chain variable domain of TCR clone 296068 (TRBV11-3, TRBJ2-3)
CASLKDGREGDTQYF

SEQ ID NO: 592137 - protein, 11 aa, Homo sapiens
  CDR3 for alpha chain variable domain of TCR clone 296069 (TRAV1-2, TRAJ20)
CAVSKDYKLSF

SEQ ID NO: 592138 - protein, 16 aa, Homo sapiens
  CDR3 for beta chain variable domain of TCR clone 296069 (TRBV29-1, TRBJ2-6)
CSVEDITYSGANVLTF

SEQ ID NO: 592139 - protein, 13 aa, Homo sapiens
  CDR3 for alpha chain variable domain of TCR clone 296070 (TRAV36/DV7, TRAJ54)
CAVLIQGAQKLVF

SEQ ID NO: 592140 - protein, 13 aa, Homo sapiens
  CDR3 for beta chain variable domain of TCR clone 296070 (TRBV29-1, TRBJ2-4)
CSVGEGTKNTQYF

SEQ ID NO: 592141 - protein, 14 aa, Homo sapiens
  CDR3 for alpha chain variable domain of TCR clone 296071 (TRAV12-1, TRAJ17)
CVVNYKAAGNKLTF

SEQ ID NO: 592142 - protein, 17 aa, Homo sapiens
  CDR3 for beta chain variable domain of TCR clone 296071 (TRBV20-1, TRBJ2-1)
CSASSSGLAGSYNEQFC

SEQ ID NO: 592143 - protein, 13 aa, Homo sapiens
  CDR3 for alpha chain variable domain of TCR clone 296072 (TRAV12-1, TRAJ33)
CGDAPDSNYQLIC

SEQ ID NO: 592144 - protein, 13 aa, Homo sapiens
  CDR3 for beta chain variable domain of TCR clone 296072 (TRBV7-3, TRBJ1-1)
CASSQDWGAEAFF

SEQ ID NO: 592145 - protein, 14 aa, Homo sapiens
  CDR3 for alpha chain variable domain of TCR clone 296073 (TRAV12-3, TRAJ10)
SHLPLTGGGNKLTF

SEQ ID NO: 592146 - protein, 14 aa, Homo sapiens
  CDR3 for beta chain variable domain of TCR clone 296073 (TRBV6-1, TRBJ1-3)
CASVQGGGGKNIYF

SEQ ID NO: 592147 - protein, 14 aa, Homo sapiens
  CDR3 for alpha chain variable domain of TCR clone 296074 (TRAV12-2, TRAJ49)
CAVTLGMYGNQFYF

SEQ ID NO: 592148 - protein, 15 aa, Homo sapiens
  CDR3 for beta chain variable domain of TCR clone 296074 (TRBV6-1, TRBJ2-1)
CASSELRGQYNEQFF

SEQ ID NO: 592149 - protein, 14 aa, Homo sapiens
  CDR3 for alpha chain variable domain of TCR clone 296075 (TRAV26-1, TRAJ34)
RIVRVAYNTDKPIF

SEQ ID NO: 592150 - protein, 15 aa, Homo sapiens
  CDR3 for beta chain variable domain of TCR clone 296075 (TRBV20-1, TRBJ2-7)
CSARVPAAYFYEQYF

SEQ ID NO: 592151 - protein, 12 aa, Homo sapiens
  CDR3 for alpha chain variable domain of TCR clone 296076 (TRAV2, TRAJ33)
CAVWGSNYQLIW

SEQ ID NO: 592152 - protein, 16 aa, Homo sapiens
  CDR3 for beta chain variable domain of TCR clone 296076 (TRBV20-1, TRBJ1-4)
CSATGQGLLTNEKLFF

SEQ ID NO: 592153 - protein, 14 aa, Homo sapiens
  CDR3 for alpha chain variable domain of TCR clone 296077 (TRAV13-1, TRAJ13)
CAASRAGGYQKVTF

SEQ ID NO: 592154 - protein, 14 aa, Homo sapiens
  CDR3 for beta chain variable domain of TCR clone 296077 (TRBV5-1, TRBJ2-7)
CASSATGGYDEQYF

SEQ ID NO: 592155 - protein, 15 aa, Homo sapiens
  CDR3 for alpha chain variable domain of TCR clone 296078 (TRAV26-1, TRAJ12)
IASPELMDSSYKLIF

SEQ ID NO: 592156 - protein, 11 aa, Homo sapiens
  CDR3 for beta chain variable domain of TCR clone 296078 (TRBV7-9, TRBJ2-3)
CASSPPDTQYF

SEQ ID NO: 592157 - protein, 16 aa, Homo sapiens
  CDR3 for alpha chain variable domain of TCR clone 296079 (TRAV3, TRAJ37)
CAVRGKRSGNTGKLIF

SEQ ID NO: 592158 - protein, 13 aa, Homo sapiens
  CDR3 for beta chain variable domain of TCR clone 296079 (TRBV19, TRBJ1-2)
CASSVPGQDGYTF

SEQ ID NO: 592159 - protein, 14 aa, Homo sapiens
  CDR3 for alpha chain variable domain of TCR clone 296080 (TRAV12-2, TRAJ17)
CAVLFKAAVTKLTF

SEQ ID NO: 592160 - protein, 17 aa, Homo sapiens
  CDR3 for beta chain variable domain of TCR clone 296080 (TRBV20-1, TRBJ2-2)
CSASGSGQGGLTGELFF

SEQ ID NO: 592161 - protein, 13 aa, Homo sapiens
  CDR3 for alpha chain variable domain of TCR clone 296081 (TRAV26-1, TRAJ34)
CIVRPWITDKLIF

SEQ ID NO: 592162 - protein, 14 aa, Homo sapiens
  CDR3 for beta chain variable domain of TCR clone 296081 (TRBV7-2, TRBJ2-7)
CTSRPQGAAYEQYF

SEQ ID NO: 592163 - protein, 14 aa, Homo sapiens
  CDR3 for alpha chain variable domain of TCR clone 296082 (TRAV38-1, TRAJ29)
CAFITPSGNTPLVF

SEQ ID NO: 592164 - protein, 14 aa, Homo sapiens
  CDR3 for beta chain variable domain of TCR clone 296082 (TRBV7-8, TRBJ2-3)
CASSFKSSTDTQYF

SEQ ID NO: 592165 - protein, 12 aa, Homo sapiens
  CDR3 for alpha chain variable domain of TCR clone 296083 (TRAV26-2, TRAJ21)
CILKGNFNKFYF

SEQ ID NO: 592166 - protein, 15 aa, Homo sapiens
  CDR3 for beta chain variable domain of TCR clone 296083 (TRBV7-9, TRBJ1-5)
CASSQGHQPNQPQHF

SEQ ID NO: 592167 - protein, 16 aa, Homo sapiens
  CDR3 for alpha chain variable domain of TCR clone 296084 (TRAV30, TRAJ24)
CGTEIVDADSWGKFQF

SEQ ID NO: 592168 - protein, 13 aa, Homo sapiens
  CDR3 for beta chain variable domain of TCR clone 296084 (TRBV11-2, TRBJ2-5)
CASSSTGEETQYL

SEQ ID NO: 592169 - protein, 13 aa, Homo sapiens
  CDR3 for alpha chain variable domain of TCR clone 296085 (TRAV2, TRAJ40)
SAVVTSGTYKYIF

SEQ ID NO: 592170 - protein, 15 aa, Homo sapiens
  CDR3 for beta chain variable domain of TCR clone 296085 (TRBV18, TRBJ2-1)
CASSPPSASYNEQFF

SEQ ID NO: 592171 - protein, 12 aa, Homo sapiens
  CDR3 for alpha chain variable domain of TCR clone 296086 (TRAV13-1, TRAJ21)
CAAKEGFNKFYF

SEQ ID NO: 592172 - protein, 13 aa, Homo sapiens
  CDR3 for beta chain variable domain of TCR clone 296086 (TRBV2, TRBJ2-7)
CASSVGGSGEQYF

SEQ ID NO: 592173 - protein, 11 aa, Homo sapiens
  CDR3 for alpha chain variable domain of TCR clone 296087 (TRAV3, TRAJ49)
CASITGNQFYF

SEQ ID NO: 592174 - protein, 16 aa, Homo sapiens
  CDR3 for beta chain variable domain of TCR clone 296087 (TRBV5-1, TRBJ2-3)
CASSVFPMSSTDTQYF

SEQ ID NO: 592175 - protein, 15 aa, Homo sapiens
  CDR3 for alpha chain variable domain of TCR clone 296088 (TRAV25, TRAJ53)
CAATGGGGSNYKLTF

SEQ ID NO: 592176 - protein, 19 aa, Homo sapiens
  CDR3 for beta chain variable domain of TCR clone 296088 (TRBV7-2, TRBJ2-3)
CASSFLSRNWGVGTDTQYF

SEQ ID NO: 592177 - protein, 14 aa, Homo sapiens
  CDR3 for alpha chain variable domain of TCR clone 296089 (TRAV9-2, TRAJ39)
CALHIYNAGNMLTF

SEQ ID NO: 592178 - protein, 13 aa, Homo sapiens
  CDR3 for beta chain variable domain of TCR clone 296089 (TRBV11-3, TRBJ1-1)
CASSRQPNTEAFF

SEQ ID NO: 592179 - protein, 12 aa, Homo sapiens
  CDR3 for alpha chain variable domain of TCR clone 296090 (TRAV1-2, TRAJ26)
CAVSPYGQNFVF

SEQ ID NO: 592180 - protein, 14 aa, Homo sapiens
  CDR3 for beta chain variable domain of TCR clone 296090 (TRBV2, TRBJ2-2)
CASSLFGGNGELFF

SEQ ID NO: 592181 - protein, 14 aa, Homo sapiens
  CDR3 for alpha chain variable domain of TCR clone 296091 (TRAV1-2, TRAJ8)
FAVREDTGFQKLVF

SEQ ID NO: 592182 - protein, 12 aa, Homo sapiens
  CDR3 for beta chain variable domain of TCR clone 296091 (TRBV11-2, TRBJ2-2)
CASSLPTGELFF

SEQ ID NO: 592183 - protein, 12 aa, Homo sapiens
  CDR3 for alpha chain variable domain of TCR clone 296092 (TRAV25, TRAJ38)
CAGTGNNRKLIW

SEQ ID NO: 592184 - protein, 14 aa, Homo sapiens
  CDR3 for beta chain variable domain of TCR clone 296092 (TRBV5-4, TRBJ1-1)
CASSLDSRRDEDFF

SEQ ID NO: 592185 - protein, 14 aa, Homo sapiens
  CDR3 for alpha chain variable domain of TCR clone 296093 (TRAV3, TRAJ37)
CAVKESGNTGKLIF

SEQ ID NO: 592186 - protein, 13 aa, Homo sapiens
  CDR3 for beta chain variable domain of TCR clone 296093 (TRBV10-3, TRBJ2-7)
CASKLAVNYEQYF

SEQ ID NO: 592187 - protein, 13 aa, Homo sapiens
  CDR3 for alpha chain variable domain of TCR clone 296094 (TRAV13-1, TRAJ43)
CAASKNNDNDMRF

SEQ ID NO: 592188 - protein, 17 aa, Homo sapiens
  CDR3 for beta chain variable domain of TCR clone 296094 (TRBV27, TRBJ2-6)
CASSLTGFASGANVLTF

SEQ ID NO: 592189 - protein, 13 aa, Homo sapiens
  CDR3 for alpha chain variable domain of TCR clone 296095 (TRAV12-2, TRAJ9)
CAGGNTGGFKTIF

SEQ ID NO: 592190 - protein, 18 aa, Homo sapiens
  CDR3 for beta chain variable domain of TCR clone 296095 (TRBV2, TRBJ2-3)
CASSDLDRGRQIRSILAQ

SEQ ID NO: 592191 - protein, 12 aa, Homo sapiens
  CDR3 for alpha chain variable domain of TCR clone 296096 (TRAV13-1, TRAJ21)
CAAKEGFNKFYF

SEQ ID NO: 592192 - protein, 15 aa, Homo sapiens
  CDR3 for beta chain variable domain of TCR clone 296096 (TRBV4-3, TRBJ1-5)
CASSREAVGGQPQHF

SEQ ID NO: 592193 - protein, 14 aa, Homo sapiens
  CDR3 for alpha chain variable domain of TCR clone 296097 (TRAV38-1, TRAJ29)
WSFITPSGNTPLVF

SEQ ID NO: 592194 - protein, 14 aa, Homo sapiens
  CDR3 for beta chain variable domain of TCR clone 296097 (TRBV18, TRBJ2-7)
CASSPRGGAYEQYF

SEQ ID NO: 592195 - protein, 15 aa, Homo sapiens
  CDR3 for alpha chain variable domain of TCR clone 296098 (TRAV3, TRAJ42)
CAVRGGTGNQGNLIF

SEQ ID NO: 592196 - protein, 14 aa, Homo sapiens
  CDR3 for beta chain variable domain of TCR clone 296098 (TRBV19, TRBJ1-2)
CASSSLFARDVYTF

SEQ ID NO: 592197 - protein, 15 aa, Homo sapiens
  CDR3 for alpha chain variable domain of TCR clone 296099 (TRAV17, TRAJ57)
CATGPSQGGSEKLVF

SEQ ID NO: 592198 - protein, 18 aa, Homo sapiens
  CDR3 for beta chain variable domain of TCR clone 296099 (TRBV7-9, TRBJ2-7)
CASSLTTSGSRTWYEQYL

SEQ ID NO: 592199 - protein, 21 aa, Homo sapiens
  CDR3 for alpha chain variable domain of TCR clone 296100 (TRAV12-1, TRAJ32)
SSVIQPPTSLNYGGATNKLIF

SEQ ID NO: 592200 - protein, 15 aa, Homo sapiens
  CDR3 for beta chain variable domain of TCR clone 296100 (TRBV7-9, TRBJ2-2)
CASGPLDTFPGELFF

SEQ ID NO: 592201 - protein, 12 aa, Homo sapiens
  CDR3 for alpha chain variable domain of TCR clone 296101 (TRAV21, TRAJ42)
CAVGGSQGNLIF

SEQ ID NO: 592202 - protein, 19 aa, Homo sapiens
  CDR3 for beta chain variable domain of TCR clone 296101 (TRBV5-1, TRBJ2-3)
CASSLTRVAADWSTDTQYF

SEQ ID NO: 592203 - protein, 23 aa, Homo sapiens
  CDR3 for alpha chain variable domain of TCR clone 296102 (TRAV23/DV6, TRAJ15)
PSLETQPPTSVQPSQPAGTALIF

SEQ ID NO: 592204 - protein, 14 aa, Homo sapiens
  CDR3 for beta chain variable domain of TCR clone 296102 (TRBV19, TRBJ2-1)
CASPTFVLSGEQFF

SEQ ID NO: 592205 - protein, 13 aa, Homo sapiens
  CDR3 for alpha chain variable domain of TCR clone 296103 (TRAV36/DV7, TRAJ54)
CAVLIQGAQKLAF

SEQ ID NO: 592206 - protein, 13 aa, Homo sapiens
  CDR3 for beta chain variable domain of TCR clone 296103 (TRBV29-1, TRBJ2-4)
CSVGEGTKNIQYF

SEQ ID NO: 592207 - protein, 15 aa, Homo sapiens
  CDR3 for alpha chain variable domain of TCR clone 296104 (TRAV3, TRAJ3)
CPVRDRDSSASKIIF

SEQ ID NO: 592208 - protein, 18 aa, Homo sapiens
  CDR3 for beta chain variable domain of TCR clone 296104 (TRBV25-1, TRBJ1-2)
CASSGLQNGQGLIFGYTF

SEQ ID NO: 592209 - protein, 17 aa, Homo sapiens
  CDR3 for alpha chain variable domain of TCR clone 296105 (TRAV26-1, TRAJ37)
CIVRVITVSSNTGKLIF

SEQ ID NO: 592210 - protein, 15 aa, Homo sapiens
  CDR3 for beta chain variable domain of TCR clone 296105 (TRBV10-3, TRBJ2-3)
CVISLTSGGTDTQYF

SEQ ID NO: 592211 - protein, 15 aa, Homo sapiens
  CDR3 for alpha chain variable domain of TCR clone 296106 (TRAV2, TRAJ9)
CAVEDRGTGGFKTIF

SEQ ID NO: 592212 - protein, 15 aa, Homo sapiens
  CDR3 for beta chain variable domain of TCR clone 296106 (TRBV18, TRBJ2-7)
CASSPLQGRTYEQYF

SEQ ID NO: 592213 - protein, 18 aa, Homo sapiens
  CDR3 for alpha chain variable domain of TCR clone 296107 (TRAV26-1, TRAJ5)
CIVRVVPPRDTARRALTF

SEQ ID NO: 592214 - protein, 15 aa, Homo sapiens
  CDR3 for beta chain variable domain of TCR clone 296107 (TRBV7-9, TRBJ2-7)
CASSLPMGQANEQYF

SEQ ID NO: 592215 - protein, 15 aa, Homo sapiens
  CDR3 for alpha chain variable domain of TCR clone 296108 (TRAV3, TRAJ22)
CAVRDRGGSARQLTF

SEQ ID NO: 592216 - protein, 17 aa, Homo sapiens
  CDR3 for beta chain variable domain of TCR clone 296108 (TRBV7-6, TRBJ2-5)
CASSPGLADPWGETQYF

SEQ ID NO: 592217 - protein, 15 aa, Homo sapiens
  CDR3 for alpha chain variable domain of TCR clone 296109 (TRAV12-3, TRAJ23)
CAMILIYIQGGRLIF

SEQ ID NO: 592218 - protein, 14 aa, Homo sapiens
  CDR3 for beta chain variable domain of TCR clone 296109 (TRBV27, TRBJ1-5)
CASSLDPRNQPQHF

SEQ ID NO: 592219 - protein, 12 aa, Homo sapiens
  CDR3 for alpha chain variable domain of TCR clone 296110 (TRAV1-1, TRAJ8)
CAGGTGFQKLVF

SEQ ID NO: 592220 - protein, 13 aa, Homo sapiens
  CDR3 for beta chain variable domain of TCR clone 296110 (TRBV7-6, TRBJ2-1)
CQQLGGGADEQFF

SEQ ID NO: 592221 - protein, 10 aa, Homo sapiens
  CDR3 for alpha chain variable domain of TCR clone 296111 (TRAV1-2, TRAJ31)
CVSEDARLMF

SEQ ID NO: 592222 - protein, 14 aa, Homo sapiens
  CDR3 for beta chain variable domain of TCR clone 296111 (TRBV19, TRBJ2-1)
CASPTFVLSGGQFF

SEQ ID NO: 592223 - protein, 21 aa, Homo sapiens
  CDR3 for alpha chain variable domain of TCR clone 296112 (TRAV12-1, TRAJ37)
CVVNGGLWQHRQTNLWARDNF

SEQ ID NO: 592224 - protein, 12 aa, Homo sapiens
  CDR3 for beta chain variable domain of TCR clone 296112 (TRBV20-1, TRBJ1-2)
CSAPGFNYGYTV

SEQ ID NO: 592225 - protein, 22 aa, Homo sapiens
  CDR3 for alpha chain variable domain of TCR clone 296113 (TRAV27, TRAJ41)
CAVRTQIPDIQNPDPAVDQLRD

SEQ ID NO: 592226 - protein, 16 aa, Homo sapiens
  CDR3 for beta chain variable domain of TCR clone 296113 (TRBV5-1, TRBJ2-3)
CASSLGLAVYTDTQYF

SEQ ID NO: 592227 - protein, 10 aa, Homo sapiens
  CDR3 for alpha chain variable domain of TCR clone 296114 (TRAV26-1, TRAJ22)
RSGSARQLTF

SEQ ID NO: 592228 - protein, 13 aa, Homo sapiens
  CDR3 for beta chain variable domain of TCR clone 296114 (TRBV7-9, TRBJ1-2)
CASNLKQNYGYTF

SEQ ID NO: 592229 - protein, 12 aa, Homo sapiens
  CDR3 for alpha chain variable domain of TCR clone 296115 (TRAV13-1, TRAJ15)
CAASQAGTALIF

SEQ ID NO: 592230 - protein, 12 aa, Homo sapiens
  CDR3 for beta chain variable domain of TCR clone 296115 (TRBV12-4, TRBJ2-1)
CASSPGRNEQFF

SEQ ID NO: 592231 - protein, 11 aa, Homo sapiens
  CDR3 for alpha chain variable domain of TCR clone 296116 (TRAV1-1, TRAJ23)
CAVRQGGELSF

SEQ ID NO: 592232 - protein, 20 aa, Homo sapiens
  CDR3 for beta chain variable domain of TCR clone 296116 (TRBV7-8, TRBJ2-2)
CASSHLFPGPTIHITGELFF

SEQ ID NO: 592233 - protein, 14 aa, Homo sapiens
  CDR3 for alpha chain variable domain of TCR clone 296117 (TRAV1-2, TRAJ16)
CAVNRFSDGQKLPF

SEQ ID NO: 592234 - protein, 14 aa, Homo sapiens
  CDR3 for beta chain variable domain of TCR clone 296117 (TRBV7-2, TRBJ2-7)
CASSPKTSFYEQYF

SEQ ID NO: 592235 - protein, 15 aa, Homo sapiens
  CDR3 for alpha chain variable domain of TCR clone 296118 (TRAV8-3, TRAJ45)
WASSYSGGGADGLTF

SEQ ID NO: 592236 - protein, 16 aa, Homo sapiens
  CDR3 for beta chain variable domain of TCR clone 296118 (TRBV27, TRBJ2-2)
CASSFRGLVRTGELFF

SEQ ID NO: 592237 - protein, 15 aa, Homo sapiens
  CDR3 for alpha chain variable domain of TCR clone 296119 (TRAV12-1, TRAJ8)
CVVNVENTGFQKLVF

SEQ ID NO: 592238 - protein, 15 aa, Homo sapiens
  CDR3 for beta chain variable domain of TCR clone 296119 (TRBV5-5, TRBJ2-7)
CASSWEAGGPYEQYF

SEQ ID NO: 592239 - protein, 15 aa, Homo sapiens
  CDR3 for alpha chain variable domain of TCR clone 296120 (TRAV34, TRAJ38)
CGADFTPGNNRKLIW

SEQ ID NO: 592240 - protein, 14 aa, Homo sapiens
  CDR3 for beta chain variable domain of TCR clone 296120 (TRBV11-1, TRBJ2-7)
CASSFRQGSYEQYF

SEQ ID NO: 592241 - protein, 18 aa, Homo sapiens
  CDR3 for alpha chain variable domain of TCR clone 296121 (TRAV26-2, TRAJ45)
CILRVDKYSGGGADGLTF

SEQ ID NO: 592242 - protein, 14 aa, Homo sapiens
  CDR3 for beta chain variable domain of TCR clone 296121 (TRBV7-2, TRBJ2-7)
CASRSQGSAYEQYF

SEQ ID NO: 592243 - protein, 13 aa, Homo sapiens
  CDR3 for alpha chain variable domain of TCR clone 296122 (TRAV13-1, TRAJ6)
CARGSGGSYIPTF

SEQ ID NO: 592244 - protein, 15 aa, Homo sapiens
  CDR3 for beta chain variable domain of TCR clone 296122 (TRBV11-2, TRBJ2-1)
CASSKNRGLIYEQFF

SEQ ID NO: 592245 - protein, 16 aa, Homo sapiens
  CDR3 for alpha chain variable domain of TCR clone 296123 (TRAV21, TRAJ52)
CAVTNAGRTSYGKLTF

SEQ ID NO: 592246 - protein, 11 aa, Homo sapiens
  CDR3 for beta chain variable domain of TCR clone 296123 (TRBV2, TRBJ1-1)
CASREGTEAFF

SEQ ID NO: 592247 - protein, 16 aa, Homo sapiens
  CDR3 for alpha chain variable domain of TCR clone 296124 (TRAV4, TRAJ29)
CLVGAYRSQETHLLSL

SEQ ID NO: 592248 - protein, 17 aa, Homo sapiens
  CDR3 for beta chain variable domain of TCR clone 296124 (TRBV25-1, TRBJ2-7)
CASSDARVVFSSYEQYF

SEQ ID NO: 592249 - protein, 12 aa, Homo sapiens
  CDR3 for alpha chain variable domain of TCR clone 296125 (TRAV2, TRAJ23)
CAVEDVGVKLIF

SEQ ID NO: 592250 - protein, 13 aa, Homo sapiens
  CDR3 for beta chain variable domain of TCR clone 296125 (TRBV5-1, TRBJ2-4)
CASSLEGGMNQYF

SEQ ID NO: 592251 - protein, 14 aa, Homo sapiens
  CDR3 for alpha chain variable domain of TCR clone 296126 (TRAV38-2/DV8, TRAJ39)
CAYEGWNAGNMLTF

SEQ ID NO: 592252 - protein, 13 aa, Homo sapiens
  CDR3 for beta chain variable domain of TCR clone 296126 (TRBV7-2, TRBJ2-2)
CASSLAVTGELFF

SEQ ID NO: 592253 - protein, 14 aa, Homo sapiens
  CDR3 for alpha chain variable domain of TCR clone 296127 (TRAV12-3, TRAJ10)
SHLPLTGGGNKLTF

SEQ ID NO: 592254 - protein, 14 aa, Homo sapiens
  CDR3 for beta chain variable domain of TCR clone 296127 (TRBV7-2, TRBJ2-1)
CASSRGGARNEQFF

SEQ ID NO: 592255 - protein, 14 aa, Homo sapiens
  CDR3 for alpha chain variable domain of TCR clone 296128 (TRAV12-2, TRAJ17)
CAVLFKAAGNKLSF

SEQ ID NO: 592256 - protein, 14 aa, Homo sapiens
  CDR3 for beta chain variable domain of TCR clone 296128 (TRBV28, TRBJ1-2)
CASSRDRKNYGYTF

SEQ ID NO: 592257 - protein, 17 aa, Homo sapiens
  CDR3 for alpha chain variable domain of TCR clone 296129 (TRAV13-1, TRAJ28)
CAASPPYSGAGCYQLTF

SEQ ID NO: 592258 - protein, 15 aa, Homo sapiens
  CDR3 for beta chain variable domain of TCR clone 296129 (TRBV6-3, TRBJ2-2)
CASSFLATLTGELFF

SEQ ID NO: 592259 - protein, 12 aa, Homo sapiens
  CDR3 for alpha chain variable domain of TCR clone 296130 (TRAV12-2, TRAJ47)
CAVAEDGKKLVF

SEQ ID NO: 592260 - protein, 15 aa, Homo sapiens
  CDR3 for beta chain variable domain of TCR clone 296130 (TRBV28, TRBJ2-1)
CASSIIAGGRSEQFF

SEQ ID NO: 592261 - protein, 14 aa, Homo sapiens
  CDR3 for alpha chain variable domain of TCR clone 296131 (TRAV1-2, TRAJ8)
CAVREDTGFKKLVF

SEQ ID NO: 592262 - protein, 13 aa, Homo sapiens
  CDR3 for beta chain variable domain of TCR clone 296131 (TRBV10-3, TRBJ1-2)
CAISERDSYGYTF

SEQ ID NO: 592263 - protein, 19 aa, Homo sapiens
  CDR3 for alpha chain variable domain of TCR clone 296132 (TRAV1-2, TRAJ18)
CLLPPCCERRGSTLGRLYF

SEQ ID NO: 592264 - protein, 16 aa, Homo sapiens
  CDR3 for beta chain variable domain of TCR clone 296132 (TRBV12-4, TRBJ1-5)
CASSRPVGGSNQPQHF

SEQ ID NO: 592265 - protein, 13 aa, Homo sapiens
  CDR3 for alpha chain variable domain of TCR clone 296133 (TRAV21, TRAJ27)
CAARPGNAGKSTF

SEQ ID NO: 592266 - protein, 15 aa, Homo sapiens
  CDR3 for beta chain variable domain of TCR clone 296133 (TRBV20-1, TRBJ2-3)
CSARPSGFYTDTQYF

SEQ ID NO: 592267 - protein, 16 aa, Homo sapiens
  CDR3 for alpha chain variable domain of TCR clone 296134 (TRAV21, TRAJ52)
CAVTNAGGTSYGKLTF

SEQ ID NO: 592268 - protein, 17 aa, Homo sapiens
  CDR3 for beta chain variable domain of TCR clone 296134 (TRBV28, TRBJ2-5)
CASSRQGGLAGGETQYF

SEQ ID NO: 592269 - protein, 12 aa, Homo sapiens
  CDR3 for alpha chain variable domain of TCR clone 296135 (TRAV27, TRAJ13)
CAGVRGYQKVTF

SEQ ID NO: 592270 - protein, 16 aa, Homo sapiens
  CDR3 for beta chain variable domain of TCR clone 296135 (TRBV28, TRBJ2-1)
YASSSSYSGSLNEQFF

SEQ ID NO: 592271 - protein, 14 aa, Homo sapiens
  CDR3 for alpha chain variable domain of TCR clone 296136 (TRAV8-6, TRAJ30)
CAVSEQNRDDKIIF

SEQ ID NO: 592272 - protein, 17 aa, Homo sapiens
  CDR3 for beta chain variable domain of TCR clone 296136 (TRBV3-1, TRBJ2-5)
CASSNWGGTSGQETQYF

SEQ ID NO: 592273 - protein, 12 aa, Homo sapiens
  CDR3 for alpha chain variable domain of TCR clone 296137 (TRAV12-2, TRAJ30)
CAVRNRDDEIIF

SEQ ID NO: 592274 - protein, 15 aa, Homo sapiens
  CDR3 for beta chain variable domain of TCR clone 296137 (TRBV6-3, TRBJ1-5)
CASRVDRWSNQPQHF

SEQ ID NO: 592275 - protein, 16 aa, Homo sapiens
  CDR3 for alpha chain variable domain of TCR clone 296138 (TRAV8-3, TRAJ13)
CAVGAYPSGGYQNVTF

SEQ ID NO: 592276 - protein, 15 aa, Homo sapiens
  CDR3 for beta chain variable domain of TCR clone 296138 (TRBV19, TRBJ1-5)
SASSIVWADNQPQHF

SEQ ID NO: 592277 - protein, 13 aa, Homo sapiens
  CDR3 for alpha chain variable domain of TCR clone 296139 (TRAV12-2, TRAJ13)
CREEDWGYQKVTF

SEQ ID NO: 592278 - protein, 14 aa, Homo sapiens
  CDR3 for beta chain variable domain of TCR clone 296139 (TRBV25-1, TRBJ1-1)
CASTHLGGNTEAFF

SEQ ID NO: 592279 - protein, 23 aa, Homo sapiens
  CDR3 for alpha chain variable domain of TCR clone 296140 (TRAV12-2, TRAJ43)
SLLIRDSQPSDSATSLCAFDMRF

SEQ ID NO: 592280 - protein, 18 aa, Homo sapiens
  CDR3 for beta chain variable domain of TCR clone 296140 (TRBV20-1, TRBJ2-3)
CSASGLAGGPGTTDTQYF

SEQ ID NO: 592281 - protein, 16 aa, Homo sapiens
  CDR3 for alpha chain variable domain of TCR clone 296141 (TRAV3, TRAJ37)
CAVRVKGSGNTGKLIF

SEQ ID NO: 592282 - protein, 13 aa, Homo sapiens
  CDR3 for beta chain variable domain of TCR clone 296141 (TRBV7-2, TRBJ2-2)
CASSSVRAGELCV

SEQ ID NO: 592283 - protein, 14 aa, Homo sapiens
  CDR3 for alpha chain variable domain of TCR clone 296142 (TRAV2, TRAJ9)
CAADPNTGGFKTIF

SEQ ID NO: 592284 - protein, 13 aa, Homo sapiens
  CDR3 for beta chain variable domain of TCR clone 296142 (TRBV20-1, TRBJ2-1)
CSASTGTSNEQFF

SEQ ID NO: 592285 - protein, 16 aa, Homo sapiens
  CDR3 for alpha chain variable domain of TCR clone 296143 (TRAV8-3, TRAJ44)
CAVGNTGTAVNSPLGL

SEQ ID NO: 592286 - protein, 15 aa, Homo sapiens
  CDR3 for beta chain variable domain of TCR clone 296143 (TRBV28, TRBJ2-7)
CASSFRGQGRYEQYF

SEQ ID NO: 592287 - protein, 15 aa, Homo sapiens
  CDR3 for alpha chain variable domain of TCR clone 296144 (TRAV38-2/DV8, TRAJ48)
CAYRSPESGNEKLTL

SEQ ID NO: 592288 - protein, 13 aa, Homo sapiens
  CDR3 for beta chain variable domain of TCR clone 296144 (TRBV4-2, TRBJ1-2)
CASSLSASWGYTF

SEQ ID NO: 592289 - protein, 16 aa, Homo sapiens
  CDR3 for alpha chain variable domain of TCR clone 296145 (TRAV26-1, TRAJ53)
CIVRVAMGGSNYKLTF

SEQ ID NO: 592290 - protein, 15 aa, Homo sapiens
  CDR3 for beta chain variable domain of TCR clone 296145 (TRBV7-3, TRBJ2-1)
CASSPTGGGEVEQFF

SEQ ID NO: 592291 - protein, 22 aa, Homo sapiens
  CDR3 for alpha chain variable domain of TCR clone 296146 (TRAV23/DV6, TRAJ17)
IAYHGFPAWRLSHLLLCNKLTF

SEQ ID NO: 592292 - protein, 12 aa, Homo sapiens
  CDR3 for beta chain variable domain of TCR clone 296146 (TRBV11-2, TRBJ2-2)
CASSLPTGELFF

SEQ ID NO: 592293 - protein, 16 aa, Homo sapiens
  CDR3 for alpha chain variable domain of TCR clone 296147 (TRAV3, TRAJ10)
CAVRDMRAGGGNKLTF

SEQ ID NO: 592294 - protein, 14 aa, Homo sapiens
  CDR3 for beta chain variable domain of TCR clone 296147 (TRBV7-9, TRBJ2-1)
CASRPTGLRNEQFF

SEQ ID NO: 592295 - protein, 14 aa, Homo sapiens
  CDR3 for alpha chain variable domain of TCR clone 296148 (TRAV1-2, TRAJ16)
CAVNRFSDGQKLLF

SEQ ID NO: 592296 - protein, 15 aa, Homo sapiens
  CDR3 for beta chain variable domain of TCR clone 296148 (TRBV18, TRBJ2-1)
YASSPPSASYNEQFF

SEQ ID NO: 592297 - protein, 14 aa, Homo sapiens
  CDR3 for alpha chain variable domain of TCR clone 296149 (TRAV8-2, TRAJ4)
CVVSPSGGSNKLIF

SEQ ID NO: 592298 - protein, 12 aa, Homo sapiens
  CDR3 for beta chain variable domain of TCR clone 296149 (TRBV11-2, TRBJ2-2)
CASSLGGGELFF

SEQ ID NO: 592299 - protein, 16 aa, Homo sapiens
  CDR3 for alpha chain variable domain of TCR clone 296150 (TRAV16, TRAJ57)
CAPYLITQGGSEKLVF

SEQ ID NO: 592300 - protein, 17 aa, Homo sapiens
  CDR3 for beta chain variable domain of TCR clone 296150 (TRBV24-1, TRBJ2-4)
RATSDAEARGVRNSQYF

SEQ ID NO: 592301 - protein, 14 aa, Homo sapiens
  CDR3 for alpha chain variable domain of TCR clone 296151 (TRAV12-3, TRAJ53)
CAMRSGGSNYKLTF

SEQ ID NO: 592302 - protein, 14 aa, Homo sapiens
  CDR3 for beta chain variable domain of TCR clone 296151 (TRBV18, TRBJ2-7)
CASSPPAGAHEQYF

SEQ ID NO: 592303 - protein, 17 aa, Homo sapiens
  CDR3 for alpha chain variable domain of TCR clone 296152 (TRAV3, TRAJ6)
CAVRDGPRAGGSYIPTF

SEQ ID NO: 592304 - protein, 13 aa, Homo sapiens
  CDR3 for beta chain variable domain of TCR clone 296152 (TRBV12-5, TRBJ2-3)
CSSGDRQSDTQYF

SEQ ID NO: 592305 - protein, 13 aa, Homo sapiens
  CDR3 for alpha chain variable domain of TCR clone 296153 (TRAV36/DV7, TRAJ53)
CALGGGSNYKLTF

SEQ ID NO: 592306 - protein, 13 aa, Homo sapiens
  CDR3 for beta chain variable domain of TCR clone 296153 (TRBV28, TRBJ2-7)
CASSLPSRYEQYF

SEQ ID NO: 592307 - protein, 15 aa, Homo sapiens
  CDR3 for alpha chain variable domain of TCR clone 296154 (TRAV12-3, TRAJ6)
CAMSATTGGSYIPTF

SEQ ID NO: 592308 - protein, 14 aa, Homo sapiens
  CDR3 for beta chain variable domain of TCR clone 296154 (TRBV27, TRBJ2-3)
CASRKGGRTDTQYF

SEQ ID NO: 592309 - protein, 13 aa, Homo sapiens
  CDR3 for alpha chain variable domain of TCR clone 296155 (TRAV21, TRAJ27)
CAARPGNAGKSTF

SEQ ID NO: 592310 - protein, 14 aa, Homo sapiens
  CDR3 for beta chain variable domain of TCR clone 296155 (TRBV5-5, TRBJ1-5)
CASSGQGVDQPQHF

SEQ ID NO: 592311 - protein, 14 aa, Homo sapiens
  CDR3 for alpha chain variable domain of TCR clone 296156 (TRAV38-1, TRAJ35)
CAFLTIGFGNVLHC

SEQ ID NO: 592312 - protein, 17 aa, Homo sapiens
  CDR3 for beta chain variable domain of TCR clone 296156 (TRBV28, TRBJ1-1)
CASSGDLRTESNTEAFY

SEQ ID NO: 592313 - protein, 10 aa, Homo sapiens
  CDR3 for alpha chain variable domain of TCR clone 296157 (TRAV12-2, TRAJ22)
CAVNETQLTF

SEQ ID NO: 592314 - protein, 15 aa, Homo sapiens
  CDR3 for beta chain variable domain of TCR clone 296157 (TRBV28, TRBJ2-1)
CASSIIAGGRSEQFF

SEQ ID NO: 592315 - protein, 14 aa, Homo sapiens
  CDR3 for alpha chain variable domain of TCR clone 296158 (TRAV17, TRAJ6)
CATNPAGGSYIPTF

SEQ ID NO: 592316 - protein, 15 aa, Homo sapiens
  CDR3 for beta chain variable domain of TCR clone 296158 (TRBV28, TRBJ2-4)
CAAGSGTLLMGIQYF

SEQ ID NO: 592317 - protein, 14 aa, Homo sapiens
  CDR3 for alpha chain variable domain of TCR clone 296159 (TRAV27, TRAJ45)
CAGAQEEVLTDTPL

SEQ ID NO: 592318 - protein, 14 aa, Homo sapiens
  CDR3 for beta chain variable domain of TCR clone 296159 (TRBV7-9, TRBJ2-1)
CASSSMVGFGEQFF

SEQ ID NO: 592319 - protein, 15 aa, Homo sapiens
  CDR3 for alpha chain variable domain of TCR clone 296160 (TRAV8-3, TRAJ15)
CSVGAPNQAGTALIF

SEQ ID NO: 592320 - protein, 14 aa, Homo sapiens
  CDR3 for beta chain variable domain of TCR clone 296160 (TRBV20-1, TRBJ2-1)
CSPNDEASYNEQFF

SEQ ID NO: 592321 - protein, 14 aa, Homo sapiens
  CDR3 for alpha chain variable domain of TCR clone 296161 (TRAV10, TRAJ36)
CVVKYEGGVNNLFF

SEQ ID NO: 592322 - protein, 16 aa, Homo sapiens
  CDR3 for beta chain variable domain of TCR clone 296161 (TRBV7-3, TRBJ2-2)
CASSLKRGTLSGELFF

SEQ ID NO: 592323 - protein, 12 aa, Homo sapiens
  CDR3 for alpha chain variable domain of TCR clone 296162 (TRAV8-3, TRAJ20)
CAVDFNDYKLSF

SEQ ID NO: 592324 - protein, 13 aa, Homo sapiens
  CDR3 for beta chain variable domain of TCR clone 296162 (TRBV5-7, TRBJ2-3)
CASSLGRSDTQYF

SEQ ID NO: 592325 - protein, 13 aa, Homo sapiens
  CDR3 for alpha chain variable domain of TCR clone 296163 (TRAV2, TRAJ40)
CAVVTSGTYKYIF

SEQ ID NO: 592326 - protein, 16 aa, Homo sapiens
  CDR3 for beta chain variable domain of TCR clone 296163 (TRBV5-4, TRBJ2-3)
CASQQPGAGGADTQYF

SEQ ID NO: 592327 - protein, 14 aa, Homo sapiens
  CDR3 for alpha chain variable domain of TCR clone 296164 (TRAV26-1, TRAJ34)
CTVRVAYNTDKLIF

SEQ ID NO: 592328 - protein, 19 aa, Homo sapiens
  CDR3 for beta chain variable domain of TCR clone 296164 (TRBV25-1, TRBJ2-2)
CATLVYRVDRGRKTGELFF

SEQ ID NO: 592329 - protein, 13 aa, Homo sapiens
  CDR3 for alpha chain variable domain of TCR clone 296165 (TRAV17, TRAJ40)
CACALGGTYKYIF

SEQ ID NO: 592330 - protein, 18 aa, Homo sapiens
  CDR3 for beta chain variable domain of TCR clone 296165 (TRBV7-2, TRBJ1-4)
CASSLAPGRRDEKLFLAV

SEQ ID NO: 592331 - protein, 13 aa, Homo sapiens
  CDR3 for alpha chain variable domain of TCR clone 296166 (TRAV21, TRAJ40)
CAVRPSRAYKYIF

SEQ ID NO: 592332 - protein, 15 aa, Homo sapiens
  CDR3 for beta chain variable domain of TCR clone 296166 (TRBV5-1, TRBJ2-7)
CASSLYPDGGYEQYF

SEQ ID NO: 592333 - protein, 11 aa, Homo sapiens
  CDR3 for alpha chain variable domain of TCR clone 296167 (TRAV35, TRAJ30)
CAPAGDDKIIF

SEQ ID NO: 592334 - protein, 15 aa, Homo sapiens
  CDR3 for beta chain variable domain of TCR clone 296167 (TRBV9, TRBJ1-6)
CASSVAGTGDSPLHF

SEQ ID NO: 592335 - protein, 15 aa, Homo sapiens
  CDR3 for alpha chain variable domain of TCR clone 296168 (TRAV12-1, TRAJ52)
CVGNAGGTSYGKLTF

SEQ ID NO: 592336 - protein, 14 aa, Homo sapiens
  CDR3 for beta chain variable domain of TCR clone 296168 (TRBV7-3, TRBJ2-2)
CASSPEPSGRELFF

SEQ ID NO: 592337 - protein, 13 aa, Homo sapiens
  CDR3 for alpha chain variable domain of TCR clone 296169 (TRAV12-1, TRAJ11)
CVVTRGGYSTLTF

SEQ ID NO: 592338 - protein, 13 aa, Homo sapiens
  CDR3 for beta chain variable domain of TCR clone 296169 (TRBV20-1, TRBJ1-2)
CSARDQGAYGCTF

SEQ ID NO: 592339 - protein, 20 aa, Homo sapiens
  CDR3 for alpha chain variable domain of TCR clone 296170 (TRAV4, TRAJ29)
CRVLLPRGCVPFSGNTPLVF

SEQ ID NO: 592340 - protein, 17 aa, Homo sapiens
  CDR3 for beta chain variable domain of TCR clone 296170 (TRBV25-1, TRBJ2-7)
CASSDARVFFSSYEQYF

SEQ ID NO: 592341 - protein, 14 aa, Homo sapiens
  CDR3 for alpha chain variable domain of TCR clone 296171 (TRAV1-2, TRAJ16)
CAVNRFSDGQKLLF

SEQ ID NO: 592342 - protein, 13 aa, Homo sapiens
  CDR3 for beta chain variable domain of TCR clone 296171 (TRBV20-1, TRBJ1-1)
SSARGGGNTEAFF

SEQ ID NO: 592343 - protein, 16 aa, Homo sapiens
  CDR3 for alpha chain variable domain of TCR clone 296172 (TRAV27, TRAJ48)
TAAQPGDTGLYLPLTF

SEQ ID NO: 592344 - protein, 14 aa, Homo sapiens
  CDR3 for beta chain variable domain of TCR clone 296172 (TRBV7-2, TRBJ2-7)
CASSPKTSFYEQYF

SEQ ID NO: 592345 - protein, 15 aa, Homo sapiens
  CDR3 for alpha chain variable domain of TCR clone 296173 (TRAV8-4, TRAJ53)
CAVSDGGGSNYKLPV

SEQ ID NO: 592346 - protein, 14 aa, Homo sapiens
  CDR3 for beta chain variable domain of TCR clone 296173 (TRBV19, TRBJ2-1)
CASPTFVLSGEQFF

SEQ ID NO: 592347 - protein, 14 aa, Homo sapiens
  CDR3 for alpha chain variable domain of TCR clone 296174 (TRAV12-3, TRAJ57)
CAMSAWGGSEKLVF

SEQ ID NO: 592348 - protein, 15 aa, Homo sapiens
  CDR3 for beta chain variable domain of TCR clone 296174 (TRBV6-5, TRBJ2-1)
CASSYDAGAGNEQFF

SEQ ID NO: 592349 - protein, 13 aa, Homo sapiens
  CDR3 for alpha chain variable domain of TCR clone 296175 (TRAV17, TRAJ39)
CAISTNAGNMLTF

SEQ ID NO: 592350 - protein, 15 aa, Homo sapiens
  CDR3 for beta chain variable domain of TCR clone 296175 (TRBV20-1, TRBJ1-5)
CSAFKNGQRNQPQHF

SEQ ID NO: 592351 - protein, 14 aa, Homo sapiens
  CDR3 for alpha chain variable domain of TCR clone 296176 (TRAV12-3, TRAJ10)
SHLPLTGGGNKLTF

SEQ ID NO: 592352 - protein, 14 aa, Homo sapiens
  CDR3 for beta chain variable domain of TCR clone 296176 (TRBV10-3, TRBJ1-1)
CAISDGSGVTEAFF

SEQ ID NO: 592353 - protein, 12 aa, Homo sapiens
  CDR3 for alpha chain variable domain of TCR clone 296177 (TRAV1-1, TRAJ8)
CAVRPGFQKLVF

SEQ ID NO: 592354 - protein, 14 aa, Homo sapiens
  CDR3 for beta chain variable domain of TCR clone 296177 (TRBV11-3, TRBJ2-2)
CASSPRRDTGGLFF

SEQ ID NO: 592355 - protein, 14 aa, Homo sapiens
  CDR3 for alpha chain variable domain of TCR clone 296178 (TRAV12-3, TRAJ10)
SHLPLTGGGNKLTF

SEQ ID NO: 592356 - protein, 17 aa, Homo sapiens
  CDR3 for beta chain variable domain of TCR clone 296178 (TRBV5-1, TRBJ2-3)
CASSMGRTGPATDTQYF

SEQ ID NO: 592357 - protein, 14 aa, Homo sapiens
  CDR3 for alpha chain variable domain of TCR clone 296179 (TRAV1-2, TRAJ6)
CAVSLSGGSYIPTF

SEQ ID NO: 592358 - protein, 15 aa, Homo sapiens
  CDR3 for beta chain variable domain of TCR clone 296179 (TRBV28, TRBJ2-7)
CASNPGGRGFYEQYF

SEQ ID NO: 592359 - protein, 14 aa, Homo sapiens
  CDR3 for alpha chain variable domain of TCR clone 296180 (TRAV17, TRAJ53)
CATDAGGSNYKLTF

SEQ ID NO: 592360 - protein, 16 aa, Homo sapiens
  CDR3 for beta chain variable domain of TCR clone 296180 (TRBV15, TRBJ1-2)
CATSRGPRTGGGGYTF

SEQ ID NO: 592361 - protein, 11 aa, Homo sapiens
  CDR3 for alpha chain variable domain of TCR clone 296181 (TRAV35, TRAJ34)
CWARNTDKLIF

SEQ ID NO: 592362 - protein, 14 aa, Homo sapiens
  CDR3 for beta chain variable domain of TCR clone 296181 (TRBV5-1, TRBJ2-5)
CASSRGESLYEQYF

SEQ ID NO: 592363 - protein, 19 aa, Homo sapiens
  CDR3 for alpha chain variable domain of TCR clone 296182 (TRAV27, TRAJ53)
ASTSVQSRNSGGSNYNLTF

SEQ ID NO: 592364 - protein, 14 aa, Homo sapiens
  CDR3 for beta chain variable domain of TCR clone 296182 (TRBV6-1, TRBJ1-3)
CASVQGGGGNTIYF

SEQ ID NO: 592365 - protein, 15 aa, Homo sapiens
  CDR3 for alpha chain variable domain of TCR clone 296183 (TRAV17, TRAJ57)
CATGPSQGGSEKLVF

SEQ ID NO: 592366 - protein, 16 aa, Homo sapiens
  CDR3 for beta chain variable domain of TCR clone 296183 (TRBV28, TRBJ1-5)
CASSLTGQGWNQPQHF

SEQ ID NO: 592367 - protein, 14 aa, Homo sapiens
  CDR3 for alpha chain variable domain of TCR clone 296184 (TRAV1-1, TRAJ27)
CAVIYNTNAGKSTF

SEQ ID NO: 592368 - protein, 17 aa, Homo sapiens
  CDR3 for beta chain variable domain of TCR clone 296184 (TRBV4-1, TRBJ2-3)
CASSQGYVSGGTDTQYF

SEQ ID NO: 592369 - protein, 15 aa, Homo sapiens
  CDR3 for alpha chain variable domain of TCR clone 296185 (TRAV12-3, TRAJ6)
CAMSATTGGSYIPTF

SEQ ID NO: 592370 - protein, 13 aa, Homo sapiens
  CDR3 for beta chain variable domain of TCR clone 296185 (TRBV7-9, TRBJ2-3)
CASSPGSTDTQYF

SEQ ID NO: 592371 - protein, 17 aa, Homo sapiens
  CDR3 for alpha chain variable domain of TCR clone 296186 (TRAV13-1, TRAJ31)
CAPRDRLMFGDGTQLVV

SEQ ID NO: 592372 - protein, 12 aa, Homo sapiens
  CDR3 for beta chain variable domain of TCR clone 296186 (TRBV7-9, TRBJ2-1)
CASSLEGYEQYF

SEQ ID NO: 592373 - protein, 17 aa, Homo sapiens
  CDR3 for alpha chain variable domain of TCR clone 296187 (TRAV13-1, TRAJ31)
CAPRDRLMFGDGTQLVV

SEQ ID NO: 592374 - protein, 12 aa, Homo sapiens
  CDR3 for beta chain variable domain of TCR clone 296187 (TRBV7-9, TRBJ2-5)
CASSLEGYEQYF

SEQ ID NO: 592375 - protein, 15 aa, Homo sapiens
  CDR3 for alpha chain variable domain of TCR clone 296188 (TRAV8-4, TRAJ12)
CAVSDRVDSSYKLIF

SEQ ID NO: 592376 - protein, 15 aa, Homo sapiens
  CDR3 for beta chain variable domain of TCR clone 296188 (TRBV11-3, TRBJ2-1)
CTSSLAGQTYNEQFF

SEQ ID NO: 592377 - protein, 16 aa, Homo sapiens
  CDR3 for alpha chain variable domain of TCR clone 296189 (TRAV21, TRAJ37)
CAVRPRGSSNTGKLIF

SEQ ID NO: 592378 - protein, 13 aa, Homo sapiens
  CDR3 for beta chain variable domain of TCR clone 296189 (TRBV13, TRBJ2-1)
CASILGGRGEQFF

SEQ ID NO: 592379 - protein, 17 aa, Homo sapiens
  CDR3 for alpha chain variable domain of TCR clone 296190 (TRAV3, TRAJ12)
CSVRDGGRMDSSYKLIF

SEQ ID NO: 592380 - protein, 13 aa, Homo sapiens
  CDR3 for beta chain variable domain of TCR clone 296190 (TRBV12-4, TRBJ1-2)
CASSLRQGKGYTF

SEQ ID NO: 592381 - protein, 13 aa, Homo sapiens
  CDR3 for alpha chain variable domain of TCR clone 296191 (TRAV2, TRAJ21)
CAVEDLNFDKFYF

SEQ ID NO: 592382 - protein, 15 aa, Homo sapiens
  CDR3 for beta chain variable domain of TCR clone 296191 (TRBV28, TRBJ2-5)
CASSQGQGSIETQYF

SEQ ID NO: 592383 - protein, 16 aa, Homo sapiens
  CDR3 for alpha chain variable domain of TCR clone 296192 (TRAV3, TRAJ37)
CAVRGKGSGNTGKLIL

SEQ ID NO: 592384 - protein, 15 aa, Homo sapiens
  CDR3 for beta chain variable domain of TCR clone 296192 (TRBV20-1, TRBJ2-1)
CSARGGTRYYNEQFF

SEQ ID NO: 592385 - protein, 11 aa, Homo sapiens
  CDR3 for alpha chain variable domain of TCR clone 296193 (TRAV1-1, TRAJ20)
CAVFNDYKLSF

SEQ ID NO: 592386 - protein, 16 aa, Homo sapiens
  CDR3 for beta chain variable domain of TCR clone 296193 (TRBV29-1, TRBJ2-2)
CSVEQTSEGNTGELFF

SEQ ID NO: 592387 - protein, 16 aa, Homo sapiens
  CDR3 for alpha chain variable domain of TCR clone 296194 (TRAV23/DV6, TRAJ9)
CATSIGGNTGGFKTIF

SEQ ID NO: 592388 - protein, 13 aa, Homo sapiens
  CDR3 for beta chain variable domain of TCR clone 296194 (TRBV7-9, TRBJ1-2)
CASSLKQNYGYTF

SEQ ID NO: 592389 - protein, 17 aa, Homo sapiens
  CDR3 for alpha chain variable domain of TCR clone 296195 (TRAV26-1, TRAJ28)
CIVRVPDSGAGSYQLAF

SEQ ID NO: 592390 - protein, 17 aa, Homo sapiens
  CDR3 for beta chain variable domain of TCR clone 296195 (TRBV28, TRBJ2-7)
CASSPRPAGGKSYEQYF

SEQ ID NO: 592391 - protein, 11 aa, Homo sapiens
  CDR3 for alpha chain variable domain of TCR clone 296196 (TRAV21, TRAJ34)
CAHYNTDKLTF

SEQ ID NO: 592392 - protein, 12 aa, Homo sapiens
  CDR3 for beta chain variable domain of TCR clone 296196 (TRBV7-2, TRBJ1-6)
CASSLSSSPLHF

SEQ ID NO: 592393 - protein, 14 aa, Homo sapiens
  CDR3 for alpha chain variable domain of TCR clone 296197 (TRAV1-2, TRAJ16)
CSVNRFSDGQKLLF

SEQ ID NO: 592394 - protein, 15 aa, Homo sapiens
  CDR3 for beta chain variable domain of TCR clone 296197 (TRBV7-9, TRBJ1-6)
CASSSPGRGNSPLHL

SEQ ID NO: 592395 - protein, 15 aa, Homo sapiens
  CDR3 for alpha chain variable domain of TCR clone 296198 (TRAV25, TRAJ52)
CAGRPGGTNYGKLTF

SEQ ID NO: 592396 - protein, 17 aa, Homo sapiens
  CDR3 for beta chain variable domain of TCR clone 296198 (TRBV7-8, TRBJ2-6)
CDSSAGTGGAGANVLTF

SEQ ID NO: 592397 - protein, 13 aa, Homo sapiens
  CDR3 for alpha chain variable domain of TCR clone 296199 (TRAV4, TRAJ42)
CLVGGGSQGNLIF

SEQ ID NO: 592398 - protein, 16 aa, Homo sapiens
  CDR3 for beta chain variable domain of TCR clone 296199 (TRBV12-5, TRBJ2-5)
CASGPRTSGNQETQYF

SEQ ID NO: 592399 - protein, 13 aa, Homo sapiens
  CDR3 for alpha chain variable domain of TCR clone 296200 (TRAV8-3, TRAJ43)
CAVGPDNNNDMLF

SEQ ID NO: 592400 - protein, 12 aa, Homo sapiens
  CDR3 for beta chain variable domain of TCR clone 296200 (TRBV7-2, TRBJ1-6)
CASSLSSSPLHF

SEQ ID NO: 592401 - protein, 12 aa, Homo sapiens
  CDR3 for alpha chain variable domain of TCR clone 296201 (TRAV12-2, TRAJ31)
CAVNTPDARLIF

SEQ ID NO: 592402 - protein, 12 aa, Homo sapiens
  CDR3 for beta chain variable domain of TCR clone 296201 (TRBV7-8, TRBJ2-7)
CASSLGDREQYF

SEQ ID NO: 592403 - protein, 13 aa, Homo sapiens
  CDR3 for alpha chain variable domain of TCR clone 296202 (TRAV12-3, TRAJ41)
CAIAPNSGYALNF

SEQ ID NO: 592404 - protein, 14 aa, Homo sapiens
  CDR3 for beta chain variable domain of TCR clone 296202 (TRBV7-2, TRBJ1-3)
CAGSLGTAGNTIYF

SEQ ID NO: 592405 - protein, 13 aa, Homo sapiens
  CDR3 for alpha chain variable domain of TCR clone 296203 (TRAV2, TRAJ40)
CAVVTSGNYKYIV

SEQ ID NO: 592406 - protein, 15 aa, Homo sapiens
  CDR3 for beta chain variable domain of TCR clone 296203 (TRBV11-3, TRBJ2-3)
CASLKDGREGDTQYF

SEQ ID NO: 592407 - protein, 22 aa, Homo sapiens
  CDR3 for alpha chain variable domain of TCR clone 296204 (TRAV1-2, TRAJ34)
DLLLKELQMKDSASPNTDKLIF

SEQ ID NO: 592408 - protein, 20 aa, Homo sapiens
  CDR3 for beta chain variable domain of TCR clone 296204 (TRBV7-8, TRBJ2-2)
CASSHLFPGPTIHITGELFF

SEQ ID NO: 592409 - protein, 13 aa, Homo sapiens
  CDR3 for alpha chain variable domain of TCR clone 296205 (TRAV8-6, TRAJ49)
CAVIPNTGNQFYF

SEQ ID NO: 592410 - protein, 17 aa, Homo sapiens
  CDR3 for beta chain variable domain of TCR clone 296205 (TRBV11-2, TRBJ2-1)
CASSLYPPGVEYNEQFF

SEQ ID NO: 592411 - protein, 15 aa, Homo sapiens
  CDR3 for alpha chain variable domain of TCR clone 296206 (TRAV1-2, TRAJ15)
CAVDVMGSAGTALIC

SEQ ID NO: 592412 - protein, 13 aa, Homo sapiens
  CDR3 for beta chain variable domain of TCR clone 296206 (TRBV20-1, TRBJ1-1)
CSAFDRENTDAFF

SEQ ID NO: 592413 - protein, 10 aa, Homo sapiens
  CDR3 for alpha chain variable domain of TCR clone 296207 (TRAV6, TRAJ24)
CALDRAQLTA

SEQ ID NO: 592414 - protein, 14 aa, Homo sapiens
  CDR3 for beta chain variable domain of TCR clone 296207 (TRBV12-4, TRBJ2-2)
CASNQGANTGELFF

SEQ ID NO: 592415 - protein, 14 aa, Homo sapiens
  CDR3 for alpha chain variable domain of TCR clone 296208 (TRAV38-1, TRAJ40)
CALRPTSGTYKYIF

SEQ ID NO: 592416 - protein, 16 aa, Homo sapiens
  CDR3 for beta chain variable domain of TCR clone 296208 (TRBV11-2, TRBJ2-7)
CASSPLAGGPRYEQYF

SEQ ID NO: 592417 - protein, 14 aa, Homo sapiens
  CDR3 for alpha chain variable domain of TCR clone 296209 (TRAV26-1, TRAJ38)
CIADHAGINRQLIW

SEQ ID NO: 592418 - protein, 13 aa, Homo sapiens
  CDR3 for beta chain variable domain of TCR clone 296209 (TRBV20-1, TRBJ1-1)
CSARGGGNTEAFF

SEQ ID NO: 592419 - protein, 15 aa, Homo sapiens
  CDR3 for alpha chain variable domain of TCR clone 296210 (TRAV27, TRAJ38)
CAGRFNAGNNRKRIW

SEQ ID NO: 592420 - protein, 15 aa, Homo sapiens
  CDR3 for beta chain variable domain of TCR clone 296210 (TRBV7-3, TRBJ2-3)
CASSLGLTLGDTQYF

SEQ ID NO: 592421 - protein, 14 aa, Homo sapiens
  CDR3 for alpha chain variable domain of TCR clone 296211 (TRAV3, TRAJ21)
CAVESQANFNKFYF

SEQ ID NO: 592422 - protein, 13 aa, Homo sapiens
  CDR3 for beta chain variable domain of TCR clone 296211 (TRBV12-4, TRBJ2-3)
CASSLGAVDTQYF

SEQ ID NO: 592423 - protein, 15 aa, Homo sapiens
  CDR3 for alpha chain variable domain of TCR clone 296212 (TRAV12-1, TRAJ4)
CVVNPFSGGYNKLIF

SEQ ID NO: 592424 - protein, 16 aa, Homo sapiens
  CDR3 for beta chain variable domain of TCR clone 296212 (TRBV5-1, TRBJ1-1)
CASSKRGTEVGTEAFF

SEQ ID NO: 592425 - protein, 15 aa, Homo sapiens
  CDR3 for alpha chain variable domain of TCR clone 296213 (TRAV21, TRAJ45)
CAVSYSGGGAYGLTF

SEQ ID NO: 592426 - protein, 13 aa, Homo sapiens
  CDR3 for beta chain variable domain of TCR clone 296213 (TRBV20-1, TRBJ2-5)
CSAATELQETQYF

SEQ ID NO: 592427 - protein, 22 aa, Homo sapiens
  CDR3 for alpha chain variable domain of TCR clone 296214 (TRAV27, TRAJ38)
CAARRNAGNNHIQTPDPAVYQL

SEQ ID NO: 592428 - protein, 16 aa, Homo sapiens
  CDR3 for beta chain variable domain of TCR clone 296214 (TRBV20-1, TRBJ1-2)
CSASMGQGVANYGYTF

SEQ ID NO: 592429 - protein, 13 aa, Homo sapiens
  CDR3 for alpha chain variable domain of TCR clone 296215 (TRAV12-2, TRAJ52)
CAVSGTSYGKLTF

SEQ ID NO: 592430 - protein, 17 aa, Homo sapiens
  CDR3 for beta chain variable domain of TCR clone 296215 (TRBV11-2, TRBJ2-1)
CASSLYPPGAEYNEQFF

SEQ ID NO: 592431 - protein, 11 aa, Homo sapiens
  CDR3 for alpha chain variable domain of TCR clone 296216 (TRAV2, TRAJ13)
CASGGYQKVTF

SEQ ID NO: 592432 - protein, 15 aa, Homo sapiens
  CDR3 for beta chain variable domain of TCR clone 296216 (TRBV19, TRBJ1-5)
CASSIPGGAGQPQHF

SEQ ID NO: 592433 - protein, 15 aa, Homo sapiens
  CDR3 for alpha chain variable domain of TCR clone 296217 (TRAV38-2/DV8, TRAJ47)
CAYRSAKGYGKKLVF

SEQ ID NO: 592434 - protein, 15 aa, Homo sapiens
  CDR3 for beta chain variable domain of TCR clone 296217 (TRBV6-6, TRBJ2-7)
CASSYSYGGSYEQYF

SEQ ID NO: 592435 - protein, 18 aa, Homo sapiens
  CDR3 for alpha chain variable domain of TCR clone 296218 (TRAV26-1, TRAJ22)
CIVRGALISSGSARQLTF

SEQ ID NO: 592436 - protein, 13 aa, Homo sapiens
  CDR3 for beta chain variable domain of TCR clone 296218 (TRBV13, TRBJ2-5)
CASSPEVGETQYF

SEQ ID NO: 592437 - protein, 12 aa, Homo sapiens
  CDR3 for alpha chain variable domain of TCR clone 296219 (TRAV23/DV6, TRAJ32)
CSMPCATNKLIF

SEQ ID NO: 592438 - protein, 17 aa, Homo sapiens
  CDR3 for beta chain variable domain of TCR clone 296219 (TRBV13, TRBJ2-3)
CASSSLGTSGLTDTQYF

SEQ ID NO: 592439 - protein, 13 aa, Homo sapiens
  CDR3 for alpha chain variable domain of TCR clone 296220 (TRAV13-2, TRAJ48)
CAEMDFENEKLTF

SEQ ID NO: 592440 - protein, 13 aa, Homo sapiens
  CDR3 for beta chain variable domain of TCR clone 296220 (TRBV7-9, TRBJ1-2)
CASSLKQNYGYTF

SEQ ID NO: 592441 - protein, 12 aa, Homo sapiens
  CDR3 for alpha chain variable domain of TCR clone 296221 (TRAV13-1, TRAJ21)
CAAKEGFNKFYF

SEQ ID NO: 592442 - protein, 15 aa, Homo sapiens
  CDR3 for beta chain variable domain of TCR clone 296221 (TRBV7-9, TRBJ1-6)
CASSSPGSGNSPLHF

SEQ ID NO: 592443 - protein, 13 aa, Homo sapiens
  CDR3 for alpha chain variable domain of TCR clone 296222 (TRAV29/DV5, TRAJ31)
CTASRNNIARLMF

SEQ ID NO: 592444 - protein, 12 aa, Homo sapiens
  CDR3 for beta chain variable domain of TCR clone 296222 (TRBV14, TRBJ2-5)
CASSQLKETQYF

SEQ ID NO: 592445 - protein, 15 aa, Homo sapiens
  CDR3 for alpha chain variable domain of TCR clone 296223 (TRAV3, TRAJ22)
CAVRDRGGSARQLTF

SEQ ID NO: 592446 - protein, 13 aa, Homo sapiens
  CDR3 for beta chain variable domain of TCR clone 296223 (TRBV2, TRBJ1-1)
CASSVSGYTEAFF

SEQ ID NO: 592447 - protein, 12 aa, Homo sapiens
  CDR3 for alpha chain variable domain of TCR clone 296224 (TRAV12-3, TRAJ17)
CAMTLTGNKLTF

SEQ ID NO: 592448 - protein, 14 aa, Homo sapiens
  CDR3 for beta chain variable domain of TCR clone 296224 (TRBV7-8, TRBJ2-3)
CASSLEAGTDAQYF

SEQ ID NO: 592449 - protein, 14 aa, Homo sapiens
  CDR3 for alpha chain variable domain of TCR clone 296225 (TRAV13-1, TRAJ40)
CAASMTSGTYKYIF

SEQ ID NO: 592450 - protein, 13 aa, Homo sapiens
  CDR3 for beta chain variable domain of TCR clone 296225 (TRBV24-1, TRBJ2-2)
CATSDWSTGELFF

SEQ ID NO: 592451 - protein, 12 aa, Homo sapiens
  CDR3 for alpha chain variable domain of TCR clone 296226 (TRAV17, TRAJ20)
FATDRYYYKLSF

SEQ ID NO: 592452 - protein, 14 aa, Homo sapiens
  CDR3 for beta chain variable domain of TCR clone 296226 (TRBV19, TRBJ2-1)
CASPTFVLSGEQFF

SEQ ID NO: 592453 - protein, 12 aa, Homo sapiens
  CDR3 for alpha chain variable domain of TCR clone 296227 (TRAV2, TRAJ24)
CAATDSWGKFQF

SEQ ID NO: 592454 - protein, 22 aa, Homo sapiens
  CDR3 for beta chain variable domain of TCR clone 296227 (TRBV5-8, TRBJ1-1)
GAGGLGPVSLGQQLGGGTEAFF

SEQ ID NO: 592455 - protein, 13 aa, Homo sapiens
  CDR3 for alpha chain variable domain of TCR clone 296228 (TRAV1-2, TRAJ9)
CAALNTGGFKTIF

SEQ ID NO: 592456 - protein, 15 aa, Homo sapiens
  CDR3 for beta chain variable domain of TCR clone 296228 (TRBV6-3, TRBJ2-7)
CASSSRGTVFYEQYF

SEQ ID NO: 592457 - protein, 14 aa, Homo sapiens
  CDR3 for alpha chain variable domain of TCR clone 296229 (TRAV12-1, TRAJ12)
CVVTRMDSSYKLIF

SEQ ID NO: 592458 - protein, 18 aa, Homo sapiens
  CDR3 for beta chain variable domain of TCR clone 296229 (TRBV20-1, TRBJ2-6)
GSAETTPTHGSGANVLTF

SEQ ID NO: 592459 - protein, 15 aa, Homo sapiens
  CDR3 for alpha chain variable domain of TCR clone 296230 (TRAV23/DV6, TRAJ30)
CAASSQESRDAKIIF

SEQ ID NO: 592460 - protein, 17 aa, Homo sapiens
  CDR3 for beta chain variable domain of TCR clone 296230 (TRBV4-3, TRBJ2-1)
CASSQFSSGRASGEQFF

SEQ ID NO: 592461 - protein, 13 aa, Homo sapiens
  CDR3 for alpha chain variable domain of TCR clone 296231 (TRAV12-2, TRAJ24)
CAVSTYSWGKLQF

SEQ ID NO: 592462 - protein, 15 aa, Homo sapiens
  CDR3 for beta chain variable domain of TCR clone 296231 (TRBV7-2, TRBJ2-2)
CASSPTGANTGELFF

SEQ ID NO: 592463 - protein, 14 aa, Homo sapiens
  CDR3 for alpha chain variable domain of TCR clone 296232 (TRAV12-2, TRAJ13)
CAVKQTGGYQKVTF

SEQ ID NO: 592464 - protein, 15 aa, Homo sapiens
  CDR3 for beta chain variable domain of TCR clone 296232 (TRBV27, TRBJ2-1)
CAGSNGGGSSNEQFF

SEQ ID NO: 592465 - protein, 12 aa, Homo sapiens
  CDR3 for alpha chain variable domain of TCR clone 296233 (TRAV16, TRAJ27)
YALNTNAGKSTF

SEQ ID NO: 592466 - protein, 14 aa, Homo sapiens
  CDR3 for beta chain variable domain of TCR clone 296233 (TRBV5-1, TRBJ2-7)
CASSLGVRAYEQYF

SEQ ID NO: 592467 - protein, 13 aa, Homo sapiens
  CDR3 for alpha chain variable domain of TCR clone 296234 (TRAV13-2, TRAJ11)
CAENYSGYSTLTF

SEQ ID NO: 592468 - protein, 13 aa, Homo sapiens
  CDR3 for beta chain variable domain of TCR clone 296234 (TRBV7-3, TRBJ1-1)
CASSQDWGAEAFF

SEQ ID NO: 592469 - protein, 12 aa, Homo sapiens
  CDR3 for alpha chain variable domain of TCR clone 296235 (TRAV20, TRAJ56)
CAVTGANSKLTF

SEQ ID NO: 592470 - protein, 14 aa, Homo sapiens
  CDR3 for beta chain variable domain of TCR clone 296235 (TRBV20-1, TRBJ2-5)
CSALGPGCQETQYF

SEQ ID NO: 592471 - protein, 19 aa, Homo sapiens
  CDR3 for alpha chain variable domain of TCR clone 296236 (TRAV27, TRAJ49)
TAAQPGDTGLYPTSNQVYF

SEQ ID NO: 592472 - protein, 14 aa, Homo sapiens
  CDR3 for beta chain variable domain of TCR clone 296236 (TRBV9, TRBJ2-3)
CASSNDWGRDTQYF

SEQ ID NO: 592473 - protein, 16 aa, Homo sapiens
  CDR3 for alpha chain variable domain of TCR clone 296237 (TRAV12-3, TRAJ53)
CAMSVGSGGSNYKMTF

SEQ ID NO: 592474 - protein, 13 aa, Homo sapiens
  CDR3 for beta chain variable domain of TCR clone 296237 (TRBV7-6, TRBJ1-2)
CASSLVADYGYTF

SEQ ID NO: 592475 - protein, 17 aa, Homo sapiens
  CDR3 for alpha chain variable domain of TCR clone 296238 (TRAV3, TRAJ6)
CAVRDGHRAGGGYIPTF

SEQ ID NO: 592476 - protein, 14 aa, Homo sapiens
  CDR3 for beta chain variable domain of TCR clone 296238 (TRBV7-2, TRBJ2-7)
CASSPKTSFYEQYF

SEQ ID NO: 592477 - protein, 16 aa, Homo sapiens
  CDR3 for alpha chain variable domain of TCR clone 296239 (TRAV22, TRAJ45)
CAVERGKRGGADVLTF

SEQ ID NO: 592478 - protein, 14 aa, Homo sapiens
  CDR3 for beta chain variable domain of TCR clone 296239 (TRBV7-2, TRBJ1-1)
CASSFLTGTTEAFF

SEQ ID NO: 592479 - protein, 14 aa, Homo sapiens
  CDR3 for alpha chain variable domain of TCR clone 296240 (TRAV27, TRAJ12)
CAGARMDSSDKLIF

SEQ ID NO: 592480 - protein, 18 aa, Homo sapiens
  CDR3 for beta chain variable domain of TCR clone 296240 (TRBV10-3, TRBJ2-7)
CAISESGRPSGGRVEQYF

SEQ ID NO: 592481 - protein, 12 aa, Homo sapiens
  CDR3 for alpha chain variable domain of TCR clone 296241 (TRAV13-1, TRAJ21)
CAAKEGFNKFYF

SEQ ID NO: 592482 - protein, 15 aa, Homo sapiens
  CDR3 for beta chain variable domain of TCR clone 296241 (TRBV28, TRBJ1-3)
CASSLAESSGNTIYF

SEQ ID NO: 592483 - protein, 13 aa, Homo sapiens
  CDR3 for alpha chain variable domain of TCR clone 296242 (TRAV8-3, TRAJ28)
CAVGAVGGYQLTF

SEQ ID NO: 592484 - protein, 14 aa, Homo sapiens
  CDR3 for beta chain variable domain of TCR clone 296242 (TRBV25-1, TRBJ1-1)
CASTHLGGNTEAFF

SEQ ID NO: 592485 - protein, 14 aa, Homo sapiens
  CDR3 for alpha chain variable domain of TCR clone 296243 (TRAV13-2, TRAJ17)
CAENSKAAGNKLTF

SEQ ID NO: 592486 - protein, 13 aa, Homo sapiens
  CDR3 for beta chain variable domain of TCR clone 296243 (TRBV25-1, TRBJ2-6)
CASRGPGANVLIF

SEQ ID NO: 592487 - protein, 14 aa, Homo sapiens
  CDR3 for alpha chain variable domain of TCR clone 296244 (TRAV17, TRAJ16)
CATADFSNGQKLLF

SEQ ID NO: 592488 - protein, 12 aa, Homo sapiens
  CDR3 for beta chain variable domain of TCR clone 296244 (TRBV24-1, TRBJ1-1)
CATLYPDTEAFF

SEQ ID NO: 592489 - protein, 13 aa, Homo sapiens
  CDR3 for alpha chain variable domain of TCR clone 296245 (TRAV13-2, TRAJ48)
CAEMDFGNEKLTF

SEQ ID NO: 592490 - protein, 13 aa, Homo sapiens
  CDR3 for beta chain variable domain of TCR clone 296245 (TRBV7-2, TRBJ2-1)
CASSLVTGNEQFF

SEQ ID NO: 592491 - protein, 11 aa, Homo sapiens
  CDR3 for alpha chain variable domain of TCR clone 296246 (TRAV2, TRAJ13)
CASGGYQKVTC

SEQ ID NO: 592492 - protein, 13 aa, Homo sapiens
  CDR3 for beta chain variable domain of TCR clone 296246 (TRBV20-1, TRBJ2-2)
CSASAAGTGELFF

SEQ ID NO: 592493 - protein, 15 aa, Homo sapiens
  CDR3 for alpha chain variable domain of TCR clone 296247 (TRAV21, TRAJ53)
CATLNRGGSNYKLTF

SEQ ID NO: 592494 - protein, 16 aa, Homo sapiens
  CDR3 for beta chain variable domain of TCR clone 296247 (TRBV19, TRBJ1-5)
CASSTWTGGGNQPQHF

SEQ ID NO: 592495 - protein, 11 aa, Homo sapiens
  CDR3 for alpha chain variable domain of TCR clone 296248 (TRAV12-2, TRAJ39)
CAVNNMLTFGG

SEQ ID NO: 592496 - protein, 12 aa, Homo sapiens
  CDR3 for beta chain variable domain of TCR clone 296248 (TRBV11-2, TRBJ2-2)
CASSLGGGELFF

SEQ ID NO: 592497 - protein, 13 aa, Homo sapiens
  CDR3 for alpha chain variable domain of TCR clone 296249 (TRAV12-2, TRAJ20)
CAVYPSNDYKLSF

SEQ ID NO: 592498 - protein, 15 aa, Homo sapiens
  CDR3 for beta chain variable domain of TCR clone 296249 (TRBV27, TRBJ2-5)
SASSLYPRGGETQYF

SEQ ID NO: 592499 - protein, 14 aa, Homo sapiens
  CDR3 for alpha chain variable domain of TCR clone 296250 (TRAV23/DV6, TRAJ4)
CAANLSGGSNKLIF

SEQ ID NO: 592500 - protein, 17 aa, Homo sapiens
  CDR3 for beta chain variable domain of TCR clone 296250 (TRBV4-1, TRBJ1-3)
CASSPQRGIRFGNTIYF

SEQ ID NO: 592501 - protein, 15 aa, Homo sapiens
  CDR3 for alpha chain variable domain of TCR clone 296251 (TRAV34, TRAJ38)
CGADFTPGNNRKLIW

SEQ ID NO: 592502 - protein, 12 aa, Homo sapiens
  CDR3 for beta chain variable domain of TCR clone 296251 (TRBV11-2, TRBJ2-1)
CASSPGNNEQFF

SEQ ID NO: 592503 - protein, 12 aa, Homo sapiens
  CDR3 for alpha chain variable domain of TCR clone 296252 (TRAV1-1, TRAJ39)
CAVPVVGNMPTF

SEQ ID NO: 592504 - protein, 13 aa, Homo sapiens
  CDR3 for beta chain variable domain of TCR clone 296252 (TRBV4-1, TRBJ1-1)
CASSRKMNTEAFF

SEQ ID NO: 592505 - protein, 15 aa, Homo sapiens
  CDR3 for alpha chain variable domain of TCR clone 296253 (TRAV26-2, TRAJ57)
CILRDIRGGSEKLVF

SEQ ID NO: 592506 - protein, 15 aa, Homo sapiens
  CDR3 for beta chain variable domain of TCR clone 296253 (TRBV2, TRBJ2-1)
CASDIGLAREGEQFF

SEQ ID NO: 592507 - protein, 13 aa, Homo sapiens
  CDR3 for alpha chain variable domain of TCR clone 296254 (TRAV17, TRAJ5)
CALRGTGRRALTF

SEQ ID NO: 592508 - protein, 17 aa, Homo sapiens
  CDR3 for beta chain variable domain of TCR clone 296254 (TRBV7-9, TRBJ2-3)
CASSPTVAGDLTDTQYF

SEQ ID NO: 592509 - protein, 12 aa, Homo sapiens
  CDR3 for alpha chain variable domain of TCR clone 296255 (TRAV8-6, TRAJ57)
CAVQGGSGKLVF

SEQ ID NO: 592510 - protein, 11 aa, Homo sapiens
  CDR3 for beta chain variable domain of TCR clone 296255 (TRBV19, TRBJ1-1)
CASSIGSEAFF

SEQ ID NO: 592511 - protein, 11 aa, Homo sapiens
  CDR3 for alpha chain variable domain of TCR clone 296256 (TRAV17, TRAJ36)
FAPTGANNLFF

SEQ ID NO: 592512 - protein, 13 aa, Homo sapiens
  CDR3 for beta chain variable domain of TCR clone 296256 (TRBV20-1, TRBJ1-1)
CSAPPGGHTEAFF

SEQ ID NO: 592513 - protein, 18 aa, Homo sapiens
  CDR3 for alpha chain variable domain of TCR clone 296257 (TRAV21, TRAJ52)
CAVRPSPAGGTSYGKLTF

SEQ ID NO: 592514 - protein, 17 aa, Homo sapiens
  CDR3 for beta chain variable domain of TCR clone 296257 (TRBV28, TRBJ2-1)
CASSSARQALTYNEQFF

SEQ ID NO: 592515 - protein, 22 aa, Homo sapiens
  CDR3 for alpha chain variable domain of TCR clone 296258 (TRAV21, TRAJ39)
AASQPGDSATPKGAKAGNMLTF

SEQ ID NO: 592516 - protein, 14 aa, Homo sapiens
  CDR3 for beta chain variable domain of TCR clone 296258 (TRBV11-2, TRBJ2-3)
CASSLGGGANTQYF

SEQ ID NO: 592517 - protein, 14 aa, Homo sapiens
  CDR3 for alpha chain variable domain of TCR clone 296259 (TRAV26-1, TRAJ45)
CIVRVVGGADGLTF

SEQ ID NO: 592518 - protein, 15 aa, Homo sapiens
  CDR3 for beta chain variable domain of TCR clone 296259 (TRBV28, TRBJ2-1)
CASSIIAGGRSEQFF

SEQ ID NO: 592519 - protein, 13 aa, Homo sapiens
  CDR3 for alpha chain variable domain of TCR clone 296260 (TRAV3, TRAJ20)
CAVRSLNDYKLSF

SEQ ID NO: 592520 - protein, 13 aa, Homo sapiens
  CDR3 for beta chain variable domain of TCR clone 296260 (TRBV7-3, TRBJ1-1)
CASSQDWGVEAFF

SEQ ID NO: 592521 - protein, 15 aa, Homo sapiens
  CDR3 for alpha chain variable domain of TCR clone 296261 (TRAV8-3, TRAJ27)
CAVGPSKTNAGKSTF

SEQ ID NO: 592522 - protein, 13 aa, Homo sapiens
  CDR3 for beta chain variable domain of TCR clone 296261 (TRBV24-1, TRBJ1-4)
CATNNGRSEKLFF

SEQ ID NO: 592523 - protein, 15 aa, Homo sapiens
  CDR3 for alpha chain variable domain of TCR clone 296262 (TRAV2, TRAJ11)
CAVEDLNSGYSTLTF

SEQ ID NO: 592524 - protein, 15 aa, Homo sapiens
  CDR3 for beta chain variable domain of TCR clone 296262 (TRBV20-1, TRBJ2-7)
CSARDRVSGMDEQYF

SEQ ID NO: 592525 - protein, 13 aa, Homo sapiens
  CDR3 for alpha chain variable domain of TCR clone 296263 (TRAV23/DV6, TRAJ58)
CAATGTSGSRFTF

SEQ ID NO: 592526 - protein, 13 aa, Homo sapiens
  CDR3 for beta chain variable domain of TCR clone 296263 (TRBV5-5, TRBJ1-2)
CASSFWRGEDYTF

SEQ ID NO: 592527 - protein, 14 aa, Homo sapiens
  CDR3 for alpha chain variable domain of TCR clone 296264 (TRAV27, TRAJ22)
CAGVVPGSARQLTF

SEQ ID NO: 592528 - protein, 17 aa, Homo sapiens
  CDR3 for beta chain variable domain of TCR clone 296264 (TRBV20-1, TRBJ2-1)
CSARDPLAGVWDNEQFF

SEQ ID NO: 592529 - protein, 15 aa, Homo sapiens
  CDR3 for alpha chain variable domain of TCR clone 296265 (TRAV23/DV6, TRAJ13)
CAAWPGGGGYQKVTF

SEQ ID NO: 592530 - protein, 14 aa, Homo sapiens
  CDR3 for beta chain variable domain of TCR clone 296265 (TRBV6-1, TRBJ2-1)
CASAGWAIKNEQFF

SEQ ID NO: 592531 - protein, 13 aa, Homo sapiens
  CDR3 for alpha chain variable domain of TCR clone 296266 (TRAV36/DV7, TRAJ54)
GAGDIQGAQKLVF

SEQ ID NO: 592532 - protein, 14 aa, Homo sapiens
  CDR3 for beta chain variable domain of TCR clone 296266 (TRBV19, TRBJ2-7)
CSSNFRDTFTGMYF

SEQ ID NO: 592533 - protein, 16 aa, Homo sapiens
  CDR3 for alpha chain variable domain of TCR clone 296267 (TRAV30, TRAJ24)
CGTESVDADSWGKFQF

SEQ ID NO: 592534 - protein, 15 aa, Homo sapiens
  CDR3 for beta chain variable domain of TCR clone 296267 (TRBV5-1, TRBJ1-1)
CASSLAPRGNTEAFF

SEQ ID NO: 592535 - protein, 15 aa, Homo sapiens
  CDR3 for alpha chain variable domain of TCR clone 296268 (TRAV26-1, TRAJ22)
CIVRVSFWFCKATDL

SEQ ID NO: 592536 - protein, 13 aa, Homo sapiens
  CDR3 for beta chain variable domain of TCR clone 296268 (TRBV11-2, TRBJ2-5)
CASSSTGEETQYF

SEQ ID NO: 592537 - protein, 12 aa, Homo sapiens
  CDR3 for alpha chain variable domain of TCR clone 296269 (TRAV13-1, TRAJ49)
CAASMWGNQFYF

SEQ ID NO: 592538 - protein, 14 aa, Homo sapiens
  CDR3 for beta chain variable domain of TCR clone 296269 (TRBV12-4, TRBJ1-1)
CASSLDGLNTEAFF

SEQ ID NO: 592539 - protein, 18 aa, Homo sapiens
  CDR3 for alpha chain variable domain of TCR clone 296270 (TRAV13-1, TRAJ28)
CAASPVPILWGWELPTHF

SEQ ID NO: 592540 - protein, 13 aa, Homo sapiens
  CDR3 for beta chain variable domain of TCR clone 296270 (TRBV15, TRBJ2-7)
CAPSTTGHYEQYF

SEQ ID NO: 592541 - protein, 13 aa, Homo sapiens
  CDR3 for alpha chain variable domain of TCR clone 296271 (TRAV27, TRAJ29)
CAGAHSGNTHLVF

SEQ ID NO: 592542 - protein, 16 aa, Homo sapiens
  CDR3 for beta chain variable domain of TCR clone 296271 (TRBV19, TRBJ2-1)
CASSKAGPSSYNEQFF

SEQ ID NO: 592543 - protein, 14 aa, Homo sapiens
  CDR3 for alpha chain variable domain of TCR clone 296272 (TRAV26-1, TRAJ34)
CIVRIAYNTDKPIF

SEQ ID NO: 592544 - protein, 15 aa, Homo sapiens
  CDR3 for beta chain variable domain of TCR clone 296272 (TRBV20-1, TRBJ2-7)
CSARVPAAYFYEQYF

SEQ ID NO: 592545 - protein, 13 aa, Homo sapiens
  CDR3 for alpha chain variable domain of TCR clone 296273 (TRAV13-2, TRAJ53)
CAENMGSNYKLTF

SEQ ID NO: 592546 - protein, 17 aa, Homo sapiens
  CDR3 for beta chain variable domain of TCR clone 296273 (TRBV4-3, TRBJ2-7)
CASSQDGGGTPTYEQYF

SEQ ID NO: 592547 - protein, 16 aa, Homo sapiens
  CDR3 for alpha chain variable domain of TCR clone 296274 (TRAV8-3, TRAJ44)
CAVGASNTGTASRLTF

SEQ ID NO: 592548 - protein, 14 aa, Homo sapiens
  CDR3 for beta chain variable domain of TCR clone 296274 (TRBV7-6, TRBJ2-3)
CASSLGTVTDTQYF

SEQ ID NO: 592549 - protein, 13 aa, Homo sapiens
  CDR3 for alpha chain variable domain of TCR clone 296275 (TRAV12-3, TRAJ50)
CARGGTSYDKVIV

SEQ ID NO: 592550 - protein, 16 aa, Homo sapiens
  CDR3 for beta chain variable domain of TCR clone 296275 (TRBV6-1, TRBJ2-5)
CASSETLDRGAETQYF

SEQ ID NO: 592551 - protein, 14 aa, Homo sapiens
  CDR3 for alpha chain variable domain of TCR clone 296276 (TRAV26-2, TRAJ32)
CCVGYGGATNKLIF

SEQ ID NO: 592552 - protein, 14 aa, Homo sapiens
  CDR3 for beta chain variable domain of TCR clone 296276 (TRBV2, TRBJ2-3)
CASTAQTSTDTQYF

SEQ ID NO: 592553 - protein, 13 aa, Homo sapiens
  CDR3 for alpha chain variable domain of TCR clone 296277 (TRAV12-2, TRAJ42)
CAVKRGSQGNLIF

SEQ ID NO: 592554 - protein, 14 aa, Homo sapiens
  CDR3 for beta chain variable domain of TCR clone 296277 (TRBV7-6, TRBJ2-4)
CIAVPAAREGIQYF

SEQ ID NO: 592555 - protein, 17 aa, Homo sapiens
  CDR3 for alpha chain variable domain of TCR clone 296278 (TRAV3, TRAJ38)
CAVRDCINAGNNRKLIW

SEQ ID NO: 592556 - protein, 15 aa, Homo sapiens
  CDR3 for beta chain variable domain of TCR clone 296278 (TRBV27, TRBJ2-1)
CASSNGGGSSNEQFF

SEQ ID NO: 592557 - protein, 12 aa, Homo sapiens
  CDR3 for alpha chain variable domain of TCR clone 296279 (TRAV8-4, TRAJ43)
CAVSVNNNDMRF

SEQ ID NO: 592558 - protein, 16 aa, Homo sapiens
  CDR3 for beta chain variable domain of TCR clone 296279 (TRBV19, TRBJ2-2)
CASRSPGTGATGELFF

SEQ ID NO: 592559 - protein, 16 aa, Homo sapiens
  CDR3 for alpha chain variable domain of TCR clone 296280 (TRAV1-2, TRAJ10)
CAVRGVLTGGGNKLTF

SEQ ID NO: 592560 - protein, 20 aa, Homo sapiens
  CDR3 for beta chain variable domain of TCR clone 296280 (TRBV7-8, TRBJ2-2)
WASSHLFPGPTIHITGELFF

SEQ ID NO: 592561 - protein, 14 aa, Homo sapiens
  CDR3 for alpha chain variable domain of TCR clone 296281 (TRAV12-2, TRAJ13)
CAVKKTGGNQKVTF

SEQ ID NO: 592562 - protein, 14 aa, Homo sapiens
  CDR3 for beta chain variable domain of TCR clone 296281 (TRBV5-1, TRBJ2-7)
CASSRGESLYEQYF

SEQ ID NO: 592563 - protein, 11 aa, Homo sapiens
  CDR3 for alpha chain variable domain of TCR clone 296282 (TRAV12-3, TRAJ43)
CAMSVSNDMRF

SEQ ID NO: 592564 - protein, 15 aa, Homo sapiens
  CDR3 for beta chain variable domain of TCR clone 296282 (TRBV28, TRBJ2-5)
CASSAPRQVQETQYF

SEQ ID NO: 592565 - protein, 13 aa, Homo sapiens
  CDR3 for alpha chain variable domain of TCR clone 296283 (TRAV12-3, TRAJ56)
CALATGANSKLTF

SEQ ID NO: 592566 - protein, 17 aa, Homo sapiens
  CDR3 for beta chain variable domain of TCR clone 296283 (TRBV7-8, TRBJ2-6)
CASSAGTGGAGANVLTF

SEQ ID NO: 592567 - protein, 15 aa, Homo sapiens
  CDR3 for alpha chain variable domain of TCR clone 296284 (TRAV21, TRAJ38)
CAVRKDAGNNRKLIW

SEQ ID NO: 592568 - protein, 16 aa, Homo sapiens
  CDR3 for beta chain variable domain of TCR clone 296284 (TRBV4-2, TRBJ1-1)
CASRPLDGGGDTEAFF

SEQ ID NO: 592569 - protein, 13 aa, Homo sapiens
  CDR3 for alpha chain variable domain of TCR clone 296285 (TRAV17, TRAJ5)
CAPMDTGRIALTF

SEQ ID NO: 592570 - protein, 13 aa, Homo sapiens
  CDR3 for beta chain variable domain of TCR clone 296285 (TRBV7-9, TRBJ1-2)
CASSLKQNYGYTF

SEQ ID NO: 592571 - protein, 14 aa, Homo sapiens
  CDR3 for alpha chain variable domain of TCR clone 296286 (TRAV13-1, TRAJ24)
CAASPADSWGKFQF

SEQ ID NO: 592572 - protein, 13 aa, Homo sapiens
  CDR3 for beta chain variable domain of TCR clone 296286 (TRBV19, TRBJ2-2)
CASSQRATGELFF

SEQ ID NO: 592573 - protein, 15 aa, Homo sapiens
  CDR3 for alpha chain variable domain of TCR clone 296287 (TRAV27, TRAJ38)
CAARRNAGNNRKLSW

SEQ ID NO: 592574 - protein, 13 aa, Homo sapiens
  CDR3 for beta chain variable domain of TCR clone 296287 (TRBV12-5, TRBJ2-3)
CASGDRQSDTPYF

SEQ ID NO: 592575 - protein, 16 aa, Homo sapiens
  CDR3 for alpha chain variable domain of TCR clone 296288 (TRAV4, TRAJ5)
CLVGPDHGHGQESTYF

SEQ ID NO: 592576 - protein, 15 aa, Homo sapiens
  CDR3 for beta chain variable domain of TCR clone 296288 (TRBV7-9, TRBJ1-6)
CASSSPGRGNSPLHF

SEQ ID NO: 592577 - protein, 14 aa, Homo sapiens
  CDR3 for alpha chain variable domain of TCR clone 296289 (TRAV21, TRAJ32)
CAVWDGGATNKLIF

SEQ ID NO: 592578 - protein, 16 aa, Homo sapiens
  CDR3 for beta chain variable domain of TCR clone 296289 (TRBV27, TRBJ2-5)
CASSSQTSGFQETQYF

SEQ ID NO: 592579 - protein, 14 aa, Homo sapiens
  CDR3 for alpha chain variable domain of TCR clone 296290 (TRAV13-2, TRAJ29)
GAEGTVEPNTPRVF

SEQ ID NO: 592580 - protein, 13 aa, Homo sapiens
  CDR3 for beta chain variable domain of TCR clone 296290 (TRBV2, TRBJ1-1)
CASNLLRNTEAFF

SEQ ID NO: 592581 - protein, 17 aa, Homo sapiens
  CDR3 for alpha chain variable domain of TCR clone 296291 (TRAV26-1, TRAJ37)
CIVRVITVSSNTGKLIF

SEQ ID NO: 592582 - protein, 11 aa, Homo sapiens
  CDR3 for beta chain variable domain of TCR clone 296291 (TRBV27, TRBJ2-3)
CASSLGDTQYF

SEQ ID NO: 592583 - protein, 13 aa, Homo sapiens
  CDR3 for alpha chain variable domain of TCR clone 296292 (TRAV1-1, TRAJ23)
CAVVANQGGKLIF

SEQ ID NO: 592584 - protein, 15 aa, Homo sapiens
  CDR3 for beta chain variable domain of TCR clone 296292 (TRBV5-7, TRBJ2-1)
CASSRRLAGDNEQFF

SEQ ID NO: 592585 - protein, 13 aa, Homo sapiens
  CDR3 for alpha chain variable domain of TCR clone 296293 (TRAV8-6, TRAJ20)
CAVRTADDYKRSF

SEQ ID NO: 592586 - protein, 15 aa, Homo sapiens
  CDR3 for beta chain variable domain of TCR clone 296293 (TRBV11-1, TRBJ2-3)
CASSLLLASTDTQYF

SEQ ID NO: 592587 - protein, 12 aa, Homo sapiens
  CDR3 for alpha chain variable domain of TCR clone 296294 (TRAV12-2, TRAJ9)
CAVYNGGFKTIF

SEQ ID NO: 592588 - protein, 15 aa, Homo sapiens
  CDR3 for beta chain variable domain of TCR clone 296294 (TRBV20-1, TRBJ2-7)
CSARDRVSGMDEQYF

SEQ ID NO: 592589 - protein, 13 aa, Homo sapiens
  CDR3 for alpha chain variable domain of TCR clone 296295 (TRAV29/DV5, TRAJ34)
CSARVDNTDQLIF

SEQ ID NO: 592590 - protein, 17 aa, Homo sapiens
  CDR3 for beta chain variable domain of TCR clone 296295 (TRBV7-3, TRBJ2-5)
CASSLGSGRSGSETQYF

SEQ ID NO: 592591 - protein, 15 aa, Homo sapiens
  CDR3 for alpha chain variable domain of TCR clone 296296 (TRAV3, TRAJ17)
CAVSPKESAGNKLTF

SEQ ID NO: 592592 - protein, 12 aa, Homo sapiens
  CDR3 for beta chain variable domain of TCR clone 296296 (TRBV7-9, TRBJ1-6)
CASSLMTSPLHF

SEQ ID NO: 592593 - protein, 16 aa, Homo sapiens
  CDR3 for alpha chain variable domain of TCR clone 296297 (TRAV35, TRAJ28)
CAGYLYSGAGCYQLTF

SEQ ID NO: 592594 - protein, 16 aa, Homo sapiens
  CDR3 for beta chain variable domain of TCR clone 296297 (TRBV5-1, TRBJ2-1)
CASSHGLAGPQNEQFF

SEQ ID NO: 592595 - protein, 13 aa, Homo sapiens
  CDR3 for alpha chain variable domain of TCR clone 296298 (TRAV36/DV7, TRAJ34)
CAVGEVNTDKLIF

SEQ ID NO: 592596 - protein, 14 aa, Homo sapiens
  CDR3 for beta chain variable domain of TCR clone 296298 (TRBV7-2, TRBJ2-7)
CASSPKTSFYEQYF

SEQ ID NO: 592597 - protein, 14 aa, Homo sapiens
  CDR3 for alpha chain variable domain of TCR clone 296299 (TRAV3, TRAJ17)
CAVRDAAAGNKPTF

SEQ ID NO: 592598 - protein, 16 aa, Homo sapiens
  CDR3 for beta chain variable domain of TCR clone 296299 (TRBV20-1, TRBJ1-2)
CSALMGQGVANYGYTF

SEQ ID NO: 592599 - protein, 14 aa, Homo sapiens
  CDR3 for alpha chain variable domain of TCR clone 296300 (TRAV17, TRAJ57)
CATDPQGGSKKLVF

SEQ ID NO: 592600 - protein, 16 aa, Homo sapiens
  CDR3 for beta chain variable domain of TCR clone 296300 (TRBV20-1, TRBJ1-4)
CSAPGQGLLTNEELFF

SEQ ID NO: 592601 - protein, 16 aa, Homo sapiens
  CDR3 for alpha chain variable domain of TCR clone 296301 (TRAV8-3, TRAJ18)
CAVALDKGSTLGRLYF

SEQ ID NO: 592602 - protein, 11 aa, Homo sapiens
  CDR3 for beta chain variable domain of TCR clone 296301 (TRBV29-1, TRBJ1-1)
CSVEILTEAFF

SEQ ID NO: 592603 - protein, 14 aa, Homo sapiens
  CDR3 for alpha chain variable domain of TCR clone 296302 (TRAV12-2, TRAJ40)
CAVKIPSGTYKYIF

SEQ ID NO: 592604 - protein, 18 aa, Homo sapiens
  CDR3 for beta chain variable domain of TCR clone 296302 (TRBV11-2, TRBJ2-3)
CTSSLGGASRGAPNTQYF

SEQ ID NO: 592605 - protein, 13 aa, Homo sapiens
  CDR3 for alpha chain variable domain of TCR clone 296303 (TRAV16, TRAJ9)
CALPNTGGFKTIF

SEQ ID NO: 592606 - protein, 14 aa, Homo sapiens
  CDR3 for beta chain variable domain of TCR clone 296303 (TRBV5-1, TRBJ2-1)
CASSLEGPVYEQFF

SEQ ID NO: 592607 - protein, 11 aa, Homo sapiens
  CDR3 for alpha chain variable domain of TCR clone 296304 (TRAV12-2, TRAJ23)
CARGWGGKLIF

SEQ ID NO: 592608 - protein, 14 aa, Homo sapiens
  CDR3 for beta chain variable domain of TCR clone 296304 (TRBV28, TRBJ2-5)
CASSLGDRAETQYF

SEQ ID NO: 592609 - protein, 16 aa, Homo sapiens
  CDR3 for alpha chain variable domain of TCR clone 296305 (TRAV30, TRAJ24)
CGTEIVDADSWGQFQF

SEQ ID NO: 592610 - protein, 17 aa, Homo sapiens
  CDR3 for beta chain variable domain of TCR clone 296305 (TRBV20-1, TRBJ2-1)
CSASSSGLAGSYNEQFF

SEQ ID NO: 592611 - protein, 12 aa, Homo sapiens
  CDR3 for alpha chain variable domain of TCR clone 296306 (TRAV16, TRAJ9)
CALRGGGFKTIF

SEQ ID NO: 592612 - protein, 14 aa, Homo sapiens
  CDR3 for beta chain variable domain of TCR clone 296306 (TRBV11-2, TRBJ2-7)
CASSLGAGAYEQYF

SEQ ID NO: 592613 - protein, 12 aa, Homo sapiens
  CDR3 for alpha chain variable domain of TCR clone 296307 (TRAV3, TRAJ43)
CAVRDPNTDIRF

SEQ ID NO: 592614 - protein, 13 aa, Homo sapiens
  CDR3 for beta chain variable domain of TCR clone 296307 (TRBV19, TRBJ1-2)
CASSVPGQDGYTF

SEQ ID NO: 592615 - protein, 17 aa, Homo sapiens
  CDR3 for alpha chain variable domain of TCR clone 296308 (TRAV8-6, TRAJ58)
CAVSSWVGETSGSRLTF

SEQ ID NO: 592616 - protein, 15 aa, Homo sapiens
  CDR3 for beta chain variable domain of TCR clone 296308 (TRBV6-5, TRBJ2-1)
RASSYDAGAGNEQFF

SEQ ID NO: 592617 - protein, 10 aa, Homo sapiens
  CDR3 for alpha chain variable domain of TCR clone 296309 (TRAV12-2, TRAJ48)
CAVTSEKLTF

SEQ ID NO: 592618 - protein, 17 aa, Homo sapiens
  CDR3 for beta chain variable domain of TCR clone 296309 (TRBV11-1, TRBJ2-1)
CASSLTGSFGLDYEQYF

SEQ ID NO: 592619 - protein, 13 aa, Homo sapiens
  CDR3 for alpha chain variable domain of TCR clone 296310 (TRAV13-2, TRAJ15)
CAAKNQAGTALIF

SEQ ID NO: 592620 - protein, 15 aa, Homo sapiens
  CDR3 for beta chain variable domain of TCR clone 296310 (TRBV29-1, TRBJ2-5)
CSVAPGQGARETQYF

SEQ ID NO: 592621 - protein, 15 aa, Homo sapiens
  CDR3 for alpha chain variable domain of TCR clone 296311 (TRAV3, TRAJ5)
CAVRDLDTGRRALTF

SEQ ID NO: 592622 - protein, 13 aa, Homo sapiens
  CDR3 for beta chain variable domain of TCR clone 296311 (TRBV12-4, TRBJ2-7)
CASRPTEPYEQYF

SEQ ID NO: 592623 - protein, 13 aa, Homo sapiens
  CDR3 for alpha chain variable domain of TCR clone 296312 (TRAV21, TRAJ3)
CCEPYSSASKIIF

SEQ ID NO: 592624 - protein, 12 aa, Homo sapiens
  CDR3 for beta chain variable domain of TCR clone 296312 (TRBV7-8, TRBJ2-7)
CASSLGDREQYF

SEQ ID NO: 592625 - protein, 11 aa, Homo sapiens
  CDR3 for alpha chain variable domain of TCR clone 296313 (TRAV1-2, TRAJ40)
CAVPGTYKYIF

SEQ ID NO: 592626 - protein, 14 aa, Homo sapiens
  CDR3 for beta chain variable domain of TCR clone 296313 (TRBV7-2, TRBJ1-1)
CASSFLTGTTEAFF

SEQ ID NO: 592627 - protein, 17 aa, Homo sapiens
  CDR3 for alpha chain variable domain of TCR clone 296314 (TRAV3, TRAJ6)
CAVRDGPRAGGSYIPTF

SEQ ID NO: 592628 - protein, 14 aa, Homo sapiens
  CDR3 for beta chain variable domain of TCR clone 296314 (TRBV20-1, TRBJ2-7)
CSAKRGRSSYEQHF

SEQ ID NO: 592629 - protein, 13 aa, Homo sapiens
  CDR3 for alpha chain variable domain of TCR clone 296315 (TRAV21, TRAJ20)
CAVGLRGDYKPSF

SEQ ID NO: 592630 - protein, 13 aa, Homo sapiens
  CDR3 for beta chain variable domain of TCR clone 296315 (TRBV6-1, TRBJ1-1)
CASSRQGNTEAFF

SEQ ID NO: 592631 - protein, 15 aa, Homo sapiens
  CDR3 for alpha chain variable domain of TCR clone 296316 (TRAV8-3, TRAJ11)
CAVGLLNSGYSTLTF

SEQ ID NO: 592632 - protein, 15 aa, Homo sapiens
  CDR3 for beta chain variable domain of TCR clone 296316 (TRBV7-9, TRBJ1-2)
CQQLGFSSGEDGYTF

SEQ ID NO: 592633 - protein, 17 aa, Homo sapiens
  CDR3 for alpha chain variable domain of TCR clone 296317 (TRAV3, TRAJ38)
CAVRDCLNAGNNRKLIW

SEQ ID NO: 592634 - protein, 16 aa, Homo sapiens
  CDR3 for beta chain variable domain of TCR clone 296317 (TRBV20-1, TRBJ1-4)
CSARPYGGELNEKLSF

SEQ ID NO: 592635 - protein, 14 aa, Homo sapiens
  CDR3 for alpha chain variable domain of TCR clone 296318 (TRAV12-2, TRAJ40)
CAVKIPSGTYKYIF

SEQ ID NO: 592636 - protein, 15 aa, Homo sapiens
  CDR3 for beta chain variable domain of TCR clone 296318 (TRBV27, TRBJ1-6)
CASSFDRGLGSPLHF

SEQ ID NO: 592637 - protein, 15 aa, Homo sapiens
  CDR3 for alpha chain variable domain of TCR clone 296319 (TRAV13-2, TRAJ32)
CAENTHGGATNKLIF

SEQ ID NO: 592638 - protein, 16 aa, Homo sapiens
  CDR3 for beta chain variable domain of TCR clone 296319 (TRBV12-5, TRBJ2-5)
CASGPRTSGNQETQYF

SEQ ID NO: 592639 - protein, 12 aa, Homo sapiens
  CDR3 for alpha chain variable domain of TCR clone 296320 (TRAV12-3, TRAJ17)
CAMTLTGNKLTF

SEQ ID NO: 592640 - protein, 15 aa, Homo sapiens
  CDR3 for beta chain variable domain of TCR clone 296320 (TRBV20-1, TRBJ2-7)
CSARDCVSGMDEQYF

SEQ ID NO: 592641 - protein, 15 aa, Homo sapiens
  CDR3 for alpha chain variable domain of TCR clone 296321 (TRAV12-3, TRAJ22)
CAMRTISGSSRQLTF

SEQ ID NO: 592642 - protein, 16 aa, Homo sapiens
  CDR3 for beta chain variable domain of TCR clone 296321 (TRBV20-1, TRBJ2-2)
CSARRPGTGNTGGLFF

SEQ ID NO: 592643 - protein, 15 aa, Homo sapiens
  CDR3 for alpha chain variable domain of TCR clone 296322 (TRAV27, TRAJ38)
CAARRNAGNNRKLIW

SEQ ID NO: 592644 - protein, 13 aa, Homo sapiens
  CDR3 for beta chain variable domain of TCR clone 296322 (TRBV12-5, TRBJ2-3)
CASGDRQSETQYL

SEQ ID NO: 592645 - protein, 14 aa, Homo sapiens
  CDR3 for alpha chain variable domain of TCR clone 296323 (TRAV12-3, TRAJ13)
CAMRNSGGYQKVYL

SEQ ID NO: 592646 - protein, 14 aa, Homo sapiens
  CDR3 for beta chain variable domain of TCR clone 296323 (TRBV4-1, TRBJ1-6)
CASSPGSDSSPLHF

SEQ ID NO: 592647 - protein, 10 aa, Homo sapiens
  CDR3 for alpha chain variable domain of TCR clone 296324 (TRAV23/DV6, TRAJ57)
CAASATLSQG

SEQ ID NO: 592648 - protein, 14 aa, Homo sapiens
  CDR3 for beta chain variable domain of TCR clone 296324 (TRBV25-1, TRBJ1-1)
FASTHLGGNTEAFF

SEQ ID NO: 592649 - protein, 14 aa, Homo sapiens
  CDR3 for alpha chain variable domain of TCR clone 296325 (TRAV21, TRAJ16)
CAVNRFSDGQKLLF

SEQ ID NO: 592650 - protein, 14 aa, Homo sapiens
  CDR3 for beta chain variable domain of TCR clone 296325 (TRBV12-5, TRBJ2-5)
CASGSRTHQETQYF

SEQ ID NO: 592651 - protein, 13 aa, Homo sapiens
  CDR3 for alpha chain variable domain of TCR clone 296326 (TRAV21, TRAJ27)
CAARPGNAGKSTF

SEQ ID NO: 592652 - protein, 15 aa, Homo sapiens
  CDR3 for beta chain variable domain of TCR clone 296326 (TRBV20-1, TRBJ2-7)
CSAESGTSGAYEQYF

SEQ ID NO: 592653 - protein, 10 aa, Homo sapiens
  CDR3 for alpha chain variable domain of TCR clone 296327 (TRAV9-2, TRAJ34)
CALSDDKRIF

SEQ ID NO: 592654 - protein, 14 aa, Homo sapiens
  CDR3 for beta chain variable domain of TCR clone 296327 (TRBV7-8, TRBJ2-7)
CASSVGQGAYEQYF

SEQ ID NO: 592655 - protein, 14 aa, Homo sapiens
  CDR3 for alpha chain variable domain of TCR clone 296328 (TRAV2, TRAJ9)
CAVEDRSGGSKTIF

SEQ ID NO: 592656 - protein, 13 aa, Homo sapiens
  CDR3 for beta chain variable domain of TCR clone 296328 (TRBV27, TRBJ1-1)
CASSLSIGAEAFF

SEQ ID NO: 592657 - protein, 14 aa, Homo sapiens
  CDR3 for alpha chain variable domain of TCR clone 296329 (TRAV26-1, TRAJ38)
CIADNAGNNRKLIW

SEQ ID NO: 592658 - protein, 15 aa, Homo sapiens
  CDR3 for beta chain variable domain of TCR clone 296329 (TRBV15, TRBJ2-2)
CATSRGLADTGELFF

SEQ ID NO: 592659 - protein, 11 aa, Homo sapiens
  CDR3 for alpha chain variable domain of TCR clone 296330 (TRAV8-4, TRAJ26)
CAGGEGQNFVF

SEQ ID NO: 592660 - protein, 17 aa, Homo sapiens
  CDR3 for beta chain variable domain of TCR clone 296330 (TRBV7-9, TRBJ2-3)
CASGPTVAGDLTDTQYF

SEQ ID NO: 592661 - protein, 10 aa, Homo sapiens
  CDR3 for alpha chain variable domain of TCR clone 296331 (TRAV3, TRAJ30)
CAVREIEIIF

SEQ ID NO: 592662 - protein, 14 aa, Homo sapiens
  CDR3 for beta chain variable domain of TCR clone 296331 (TRBV15, TRBJ2-3)
CATRGGTSTDTQYF

SEQ ID NO: 592663 - protein, 18 aa, Homo sapiens
  CDR3 for alpha chain variable domain of TCR clone 296332 (TRAV17, TRAJ45)
CATSLDLYSGGGSDGLTF

SEQ ID NO: 592664 - protein, 13 aa, Homo sapiens
  CDR3 for beta chain variable domain of TCR clone 296332 (TRBV10-3, TRBJ2-7)
CASKLAVNYEQYL

SEQ ID NO: 592665 - protein, 15 aa, Homo sapiens
  CDR3 for alpha chain variable domain of TCR clone 296333 (TRAV26-1, TRAJ29)
CIVRVEGSGNTPLVF

SEQ ID NO: 592666 - protein, 10 aa, Homo sapiens
  CDR3 for beta chain variable domain of TCR clone 296333 (TRBV18, TRBJ2-2)
CASSLNQPGQ

SEQ ID NO: 592667 - protein, 14 aa, Homo sapiens
  CDR3 for alpha chain variable domain of TCR clone 296334 (TRAV2, TRAJ23)
CAVGLRNQGGKLIL

SEQ ID NO: 592668 - protein, 15 aa, Homo sapiens
  CDR3 for beta chain variable domain of TCR clone 296334 (TRBV6-5, TRBJ2-5)
CASSPLAGGIETQYF

SEQ ID NO: 592669 - protein, 12 aa, Homo sapiens
  CDR3 for alpha chain variable domain of TCR clone 296335 (TRAV13-1, TRAJ39)
CAASNAGNMLTF

SEQ ID NO: 592670 - protein, 15 aa, Homo sapiens
  CDR3 for beta chain variable domain of TCR clone 296335 (TRBV20-1, TRBJ2-7)
CSARDRVSGMDEQYF

SEQ ID NO: 592671 - protein, 16 aa, Homo sapiens
  CDR3 for alpha chain variable domain of TCR clone 296336 (TRAV23/DV6, TRAJ48)
CAASVVVNFGNEKLTF

SEQ ID NO: 592672 - protein, 15 aa, Homo sapiens
  CDR3 for beta chain variable domain of TCR clone 296336 (TRBV20-1, TRBJ2-5)
CSAGLAGVSQETQYF

SEQ ID NO: 592673 - protein, 15 aa, Homo sapiens
  CDR3 for alpha chain variable domain of TCR clone 296337 (TRAV23/DV6, TRAJ32)
CAASKMGGATNKPIF

SEQ ID NO: 592674 - protein, 15 aa, Homo sapiens
  CDR3 for beta chain variable domain of TCR clone 296337 (TRBV4-3, TRBJ1-2)
CASSRGQGRNYGYTF

SEQ ID NO: 592675 - protein, 14 aa, Homo sapiens
  CDR3 for alpha chain variable domain of TCR clone 296338 (TRAV21, TRAJ8)
CALQRDTGFQKLVF

SEQ ID NO: 592676 - protein, 14 aa, Homo sapiens
  CDR3 for beta chain variable domain of TCR clone 296338 (TRBV12-5, TRBJ2-5)
CASGSRTHQETQYF

SEQ ID NO: 592677 - protein, 13 aa, Homo sapiens
  CDR3 for alpha chain variable domain of TCR clone 296339 (TRAV29/DV5, TRAJ30)
CAASPNRDDKIIF

SEQ ID NO: 592678 - protein, 16 aa, Homo sapiens
  CDR3 for beta chain variable domain of TCR clone 296339 (TRBV20-1, TRBJ2-1)
CSARDLKQGMNNEQFF

SEQ ID NO: 592679 - protein, 10 aa, Homo sapiens
  CDR3 for alpha chain variable domain of TCR clone 296340 (TRAV23/DV6, TRAJ31)
CARGGARLMF

SEQ ID NO: 592680 - protein, 14 aa, Homo sapiens
  CDR3 for beta chain variable domain of TCR clone 296340 (TRBV7-8, TRBJ1-2)
CASSPDSFSYGYTF

SEQ ID NO: 592681 - protein, 16 aa, Homo sapiens
  CDR3 for alpha chain variable domain of TCR clone 296341 (TRAV16, TRAJ52)
CALSAAGGTSYGKLTF

SEQ ID NO: 592682 - protein, 15 aa, Homo sapiens
  CDR3 for beta chain variable domain of TCR clone 296341 (TRBV4-1, TRBJ1-4)
CASSDTGGTNEKLFF

SEQ ID NO: 592683 - protein, 15 aa, Homo sapiens
  CDR3 for alpha chain variable domain of TCR clone 296342 (TRAV1-2, TRAJ17)
CAVRGYGAAGNKLTF

SEQ ID NO: 592684 - protein, 23 aa, Homo sapiens
  CDR3 for beta chain variable domain of TCR clone 296342 (TRBV11-2, TRBJ2-5)
CASSSPAGEGAASRDPVLRARHA

SEQ ID NO: 592685 - protein, 12 aa, Homo sapiens
  CDR3 for alpha chain variable domain of TCR clone 296343 (TRAV27, TRAJ13)
CAGAGGYQKVTF

SEQ ID NO: 592686 - protein, 15 aa, Homo sapiens
  CDR3 for beta chain variable domain of TCR clone 296343 (TRBV20-1, TRBJ2-6)
CSARDRGPGANVLIF

SEQ ID NO: 592687 - protein, 13 aa, Homo sapiens
  CDR3 for alpha chain variable domain of TCR clone 296344 (TRAV1-1, TRAJ9)
CAATNTGGFKTLF

SEQ ID NO: 592688 - protein, 14 aa, Homo sapiens
  CDR3 for beta chain variable domain of TCR clone 296344 (TRBV20-1, TRBJ2-1)
CSAQIGGSANEQFF

SEQ ID NO: 592689 - protein, 11 aa, Homo sapiens
  CDR3 for alpha chain variable domain of TCR clone 296345 (TRAV3, TRAJ21)
CAVGNFNNFYF

SEQ ID NO: 592690 - protein, 16 aa, Homo sapiens
  CDR3 for beta chain variable domain of TCR clone 296345 (TRBV19, TRBJ2-1)
CASSRAGPSAYNEQFF

SEQ ID NO: 592691 - protein, 12 aa, Homo sapiens
  CDR3 for alpha chain variable domain of TCR clone 296346 (TRAV4, TRAJ6)
CLAPGGSYIPTF

SEQ ID NO: 592692 - protein, 16 aa, Homo sapiens
  CDR3 for beta chain variable domain of TCR clone 296346 (TRBV11-2, TRBJ2-7)
CASSPTTGGVSYEQYF

SEQ ID NO: 592693 - protein, 15 aa, Homo sapiens
  CDR3 for alpha chain variable domain of TCR clone 296347 (TRAV17, TRAJ23)
CATDAEDNQGGKLIF

SEQ ID NO: 592694 - protein, 12 aa, Homo sapiens
  CDR3 for beta chain variable domain of TCR clone 296347 (TRBV2, TRBJ2-1)
CAKREDYNEQFF

SEQ ID NO: 592695 - protein, 15 aa, Homo sapiens
  CDR3 for alpha chain variable domain of TCR clone 296348 (TRAV25, TRAJ52)
CAGLPGGTSYGKLTF

SEQ ID NO: 592696 - protein, 12 aa, Homo sapiens
  CDR3 for beta chain variable domain of TCR clone 296348 (TRBV7-8, TRBJ2-7)
CASSLGDREQYF

SEQ ID NO: 592697 - protein, 11 aa, Homo sapiens
  CDR3 for alpha chain variable domain of TCR clone 296349 (TRAV3, TRAJ21)
CAVGNFNKFYF

SEQ ID NO: 592698 - protein, 15 aa, Homo sapiens
  CDR3 for beta chain variable domain of TCR clone 296349 (TRBV11-2, TRBJ2-1)
CASSPAGQSLNEQFF

SEQ ID NO: 592699 - protein, 14 aa, Homo sapiens
  CDR3 for alpha chain variable domain of TCR clone 296350 (TRAV1-2, TRAJ16)
CAVNRFSDGQKLLF

SEQ ID NO: 592700 - protein, 14 aa, Homo sapiens
  CDR3 for beta chain variable domain of TCR clone 296350 (TRBV11-1, TRBJ2-7)
CASSFRQGSDEQYF

SEQ ID NO: 592701 - protein, 14 aa, Homo sapiens
  CDR3 for alpha chain variable domain of TCR clone 296351 (TRAV1-2, TRAJ16)
CAVNRFSDGQKLLF

SEQ ID NO: 592702 - protein, 13 aa, Homo sapiens
  CDR3 for beta chain variable domain of TCR clone 296351 (TRBV20-1, TRBJ1-5)
QCPRDRGWSAQHF

SEQ ID NO: 592703 - protein, 16 aa, Homo sapiens
  CDR3 for alpha chain variable domain of TCR clone 296352 (TRAV38-1, TRAJ45)
CAFMKGSGGGADGLTF

SEQ ID NO: 592704 - protein, 15 aa, Homo sapiens
  CDR3 for beta chain variable domain of TCR clone 296352 (TRBV20-1, TRBJ2-7)
CSAREGRDSLYKQYF

SEQ ID NO: 592705 - protein, 14 aa, Homo sapiens
  CDR3 for alpha chain variable domain of TCR clone 296353 (TRAV13-1, TRAJ44)
CAAKATGTASKLTF

SEQ ID NO: 592706 - protein, 13 aa, Homo sapiens
  CDR3 for beta chain variable domain of TCR clone 296353 (TRBV11-2, TRBJ1-3)
CASSPTGGNTIYF

SEQ ID NO: 592707 - protein, 15 aa, Homo sapiens
  CDR3 for alpha chain variable domain of TCR clone 296354 (TRAV17, TRAJ57)
CATGPSPGGSDKLVF

SEQ ID NO: 592708 - protein, 16 aa, Homo sapiens
  CDR3 for beta chain variable domain of TCR clone 296354 (TRBV12-4, TRBJ1-5)
CASSRPVGGSNQPQHF

SEQ ID NO: 592709 - protein, 14 aa, Homo sapiens
  CDR3 for alpha chain variable domain of TCR clone 296355 (TRAV1-2, TRAJ8)
CAVREDTGFQKLVF

SEQ ID NO: 592710 - protein, 17 aa, Homo sapiens
  CDR3 for beta chain variable domain of TCR clone 296355 (TRBV11-2, TRBJ2-1)
CARSLYPPGVEYNEQFF

SEQ ID NO: 592711 - protein, 16 aa, Homo sapiens
  CDR3 for alpha chain variable domain of TCR clone 296356 (TRAV12-2, TRAJ18)
CAMTTDRGSTLGRLYF

SEQ ID NO: 592712 - protein, 13 aa, Homo sapiens
  CDR3 for beta chain variable domain of TCR clone 296356 (TRBV19, TRBJ2-3)
CATWDKITDTQYF

SEQ ID NO: 592713 - protein, 15 aa, Homo sapiens
  CDR3 for alpha chain variable domain of TCR clone 296357 (TRAV38-2/DV8, TRAJ45)
CAYWDSGGGADGLTF

SEQ ID NO: 592714 - protein, 15 aa, Homo sapiens
  CDR3 for beta chain variable domain of TCR clone 296357 (TRBV6-3, TRBJ2-7)
CASSSPGTVFYEQYF

SEQ ID NO: 592715 - protein, 15 aa, Homo sapiens
  CDR3 for alpha chain variable domain of TCR clone 296358 (TRAV13-1, TRAJ17)
CAASIERAAGNKLTF

SEQ ID NO: 592716 - protein, 15 aa, Homo sapiens
  CDR3 for beta chain variable domain of TCR clone 296358 (TRBV6-4, TRBJ2-1)
CASSDSTGGYNEQFF

SEQ ID NO: 592717 - protein, 11 aa, Homo sapiens
  CDR3 for alpha chain variable domain of TCR clone 296359 (TRAV21, TRAJ34)
CAHYNTDKLIF

SEQ ID NO: 592718 - protein, 15 aa, Homo sapiens
  CDR3 for beta chain variable domain of TCR clone 296359 (TRBV4-1, TRBJ2-7)
CASSQQGQGFDEQYF

SEQ ID NO: 592719 - protein, 12 aa, Homo sapiens
  CDR3 for alpha chain variable domain of TCR clone 296360 (TRAV12-2, TRAJ10)
WGVTGGDNKLTF

SEQ ID NO: 592720 - protein, 16 aa, Homo sapiens
  CDR3 for beta chain variable domain of TCR clone 296360 (TRBV6-4, TRBJ1-2)
CASSEAVGDPNYGYTF

SEQ ID NO: 592721 - protein, 16 aa, Homo sapiens
  CDR3 for alpha chain variable domain of TCR clone 296361 (TRAV16, TRAJ4)
CALSRMFSGVYNKLIF

SEQ ID NO: 592722 - protein, 16 aa, Homo sapiens
  CDR3 for beta chain variable domain of TCR clone 296361 (TRBV24-1, TRBJ2-3)
CATSGPGTGATDTQYF

SEQ ID NO: 592723 - protein, 16 aa, Homo sapiens
  CDR3 for alpha chain variable domain of TCR clone 296362 (TRAV3, TRAJ27)
CAVRDPQGTNAGKSTF

SEQ ID NO: 592724 - protein, 14 aa, Homo sapiens
  CDR3 for beta chain variable domain of TCR clone 296362 (TRBV12-5, TRBJ2-5)
CASGSRTHQETQYF

SEQ ID NO: 592725 - protein, 13 aa, Homo sapiens
  CDR3 for alpha chain variable domain of TCR clone 296363 (TRAV2, TRAJ40)
CAEVTSGTYKYIF

SEQ ID NO: 592726 - protein, 14 aa, Homo sapiens
  CDR3 for beta chain variable domain of TCR clone 296363 (TRBV19, TRBJ2-1)
CASPTLVLSGEQFF

SEQ ID NO: 592727 - protein, 12 aa, Homo sapiens
  CDR3 for alpha chain variable domain of TCR clone 296364 (TRAV17, TRAJ39)
CATGAAGNMLTF

SEQ ID NO: 592728 - protein, 14 aa, Homo sapiens
  CDR3 for beta chain variable domain of TCR clone 296364 (TRBV7-9, TRBJ1-2)
CASSRQGANYGDAF

SEQ ID NO: 592729 - protein, 15 aa, Homo sapiens
  CDR3 for alpha chain variable domain of TCR clone 296365 (TRAV26-2, TRAJ45)
CILRDRGDQEEVLTD

SEQ ID NO: 592730 - protein, 15 aa, Homo sapiens
  CDR3 for beta chain variable domain of TCR clone 296365 (TRBV7-6, TRBJ2-5)
CASSKPTGPQETQYF

SEQ ID NO: 592731 - protein, 21 aa, Homo sapiens
  CDR3 for alpha chain variable domain of TCR clone 296366 (TRAV36/DV7, TRAJ39)
TATQTGDSAIYLPTAGNMLTF

SEQ ID NO: 592732 - protein, 16 aa, Homo sapiens
  CDR3 for beta chain variable domain of TCR clone 296366 (TRBV19, TRBJ2-1)
CASSKAGPSSYNEQFF

SEQ ID NO: 592733 - protein, 14 aa, Homo sapiens
  CDR3 for alpha chain variable domain of TCR clone 296367 (TRAV12-1, TRAJ17)
CVVNYKAAGNMLTF

SEQ ID NO: 592734 - protein, 17 aa, Homo sapiens
  CDR3 for beta chain variable domain of TCR clone 296367 (TRBV20-1, TRBJ2-1)
CSASSSGLAGSYNEQFF

SEQ ID NO: 592735 - protein, 18 aa, Homo sapiens
  CDR3 for alpha chain variable domain of TCR clone 296368 (TRAV38-2/DV8, TRAJ42)
CAYRSADLTGGSQGNIIF

SEQ ID NO: 592736 - protein, 12 aa, Homo sapiens
  CDR3 for beta chain variable domain of TCR clone 296368 (TRBV11-2, TRBJ2-2)
CASSLGGGELFF

SEQ ID NO: 592737 - protein, 14 aa, Homo sapiens
  CDR3 for alpha chain variable domain of TCR clone 296369 (TRAV9-2, TRAJ39)
CALYIYNASNMLTF

SEQ ID NO: 592738 - protein, 13 aa, Homo sapiens
  CDR3 for beta chain variable domain of TCR clone 296369 (TRBV10-3, TRBJ2-7)
CASKLAVNYEQYF

SEQ ID NO: 592739 - protein, 16 aa, Homo sapiens
  CDR3 for alpha chain variable domain of TCR clone 296370 (TRAV3, TRAJ10)
YAVRDMRAGGGNKLTF

SEQ ID NO: 592740 - protein, 14 aa, Homo sapiens
  CDR3 for beta chain variable domain of TCR clone 296370 (TRBV25-1, TRBJ1-1)
CASTHLGGNTEAFF

SEQ ID NO: 592741 - protein, 15 aa, Homo sapiens
  CDR3 for alpha chain variable domain of TCR clone 296371 (TRAV25, TRAJ52)
CAGRPGGTSYGKLTF

SEQ ID NO: 592742 - protein, 16 aa, Homo sapiens
  CDR3 for beta chain variable domain of TCR clone 296371 (TRBV28, TRBJ2-2)
CASSLEGGSNTGELFF

SEQ ID NO: 592743 - protein, 14 aa, Homo sapiens
  CDR3 for alpha chain variable domain of TCR clone 296372 (TRAV1-2, TRAJ8)
CAVREDTGFQKLVF

SEQ ID NO: 592744 - protein, 12 aa, Homo sapiens
  CDR3 for beta chain variable domain of TCR clone 296372 (TRBV18, TRBJ1-4)
CASSPSREKLFF

SEQ ID NO: 592745 - protein, 16 aa, Homo sapiens
  CDR3 for alpha chain variable domain of TCR clone 296373 (TRAV27, TRAJ52)
CAGAGAGGTSYGKLTF

SEQ ID NO: 592746 - protein, 17 aa, Homo sapiens
  CDR3 for beta chain variable domain of TCR clone 296373 (TRBV24-1, TRBJ2-3)
CATSDLPSEEDTDTQYF

SEQ ID NO: 592747 - protein, 14 aa, Homo sapiens
  CDR3 for alpha chain variable domain of TCR clone 296374 (TRAV1-2, TRAJ8)
CAVSEDTGFQKLVF

SEQ ID NO: 592748 - protein, 15 aa, Homo sapiens
  CDR3 for beta chain variable domain of TCR clone 296374 (TRBV20-1, TRBJ2-7)
CSARDRVSGMDEQYF

SEQ ID NO: 592749 - protein, 12 aa, Homo sapiens
  CDR3 for alpha chain variable domain of TCR clone 296375 (TRAV38-1, TRAJ57)
WAFMKLPPTLVF

SEQ ID NO: 592750 - protein, 13 aa, Homo sapiens
  CDR3 for beta chain variable domain of TCR clone 296375 (TRBV19, TRBJ2-7)
CASSTSGSYEQYF

SEQ ID NO: 592751 - protein, 15 aa, Homo sapiens
  CDR3 for alpha chain variable domain of TCR clone 296376 (TRAV4, TRAJ10)
CLGVGEEGGGNKLTF

SEQ ID NO: 592752 - protein, 15 aa, Homo sapiens
  CDR3 for beta chain variable domain of TCR clone 296376 (TRBV7-2, TRBJ2-7)
CASSLTGQGTYEQYF

SEQ ID NO: 592753 - protein, 17 aa, Homo sapiens
  CDR3 for alpha chain variable domain of TCR clone 296377 (TRAV3, TRAJ12)
CAVRDGGRMDSSYKLIF

SEQ ID NO: 592754 - protein, 16 aa, Homo sapiens
  CDR3 for beta chain variable domain of TCR clone 296377 (TRBV2, TRBJ2-3)
CASSTSVEGVTDTQYF

SEQ ID NO: 592755 - protein, 16 aa, Homo sapiens
  CDR3 for alpha chain variable domain of TCR clone 296378 (TRAV20, TRAJ38)
CAVQASNAGNNRKPTW

SEQ ID NO: 592756 - protein, 16 aa, Homo sapiens
  CDR3 for beta chain variable domain of TCR clone 296378 (TRBV7-8, TRBJ2-6)
CASRVGDSSGANVLTF

SEQ ID NO: 592757 - protein, 14 aa, Homo sapiens
  CDR3 for alpha chain variable domain of TCR clone 296379 (TRAV16, TRAJ33)
CALSAMDSNYQLIW

SEQ ID NO: 592758 - protein, 15 aa, Homo sapiens
  CDR3 for beta chain variable domain of TCR clone 296379 (TRBV19, TRBJ1-1)
CASTSGQIQNTEAFS

SEQ ID NO: 592759 - protein, 14 aa, Homo sapiens
  CDR3 for alpha chain variable domain of TCR clone 296380 (TRAV13-1, TRAJ40)
CAASMTYGTYKYSF

SEQ ID NO: 592760 - protein, 15 aa, Homo sapiens
  CDR3 for beta chain variable domain of TCR clone 296380 (TRBV7-3, TRBJ2-1)
CASSPTGGGEVEQFF

SEQ ID NO: 592761 - protein, 13 aa, Homo sapiens
  CDR3 for alpha chain variable domain of TCR clone 296381 (TRAV27, TRAJ41)
CAGEGNSGYELNF

SEQ ID NO: 592762 - protein, 15 aa, Homo sapiens
  CDR3 for beta chain variable domain of TCR clone 296381 (TRBV6-3, TRBJ2-7)
CASSSPGTVFYEQYF

SEQ ID NO: 592763 - protein, 17 aa, Homo sapiens
  CDR3 for alpha chain variable domain of TCR clone 296382 (TRAV4, TRAJ18)
CLVGERSVGSTLGRLYF

SEQ ID NO: 592764 - protein, 20 aa, Homo sapiens
  CDR3 for beta chain variable domain of TCR clone 296382 (TRBV7-8, TRBJ2-2)
CASSHLFPGPTIHITGELFF

SEQ ID NO: 592765 - protein, 17 aa, Homo sapiens
  CDR3 for alpha chain variable domain of TCR clone 296383 (TRAV12-2, TRAJ48)
CASNEKLTFRTGTRLTI

SEQ ID NO: 592766 - protein, 14 aa, Homo sapiens
  CDR3 for beta chain variable domain of TCR clone 296383 (TRBV5-1, TRBJ2-5)
CASSLAGKQETQYF

SEQ ID NO: 592767 - protein, 14 aa, Homo sapiens
  CDR3 for alpha chain variable domain of TCR clone 296384 (TRAV8-3, TRAJ35)
CAVVPQGFGNVLHC

SEQ ID NO: 592768 - protein, 15 aa, Homo sapiens
  CDR3 for beta chain variable domain of TCR clone 296384 (TRBV7-2, TRBJ2-1)
CASSSGLAGGNEQFF

SEQ ID NO: 592769 - protein, 10 aa, Homo sapiens
  CDR3 for alpha chain variable domain of TCR clone 296385 (TRAV3, TRAJ3)
CAVVQQCFQD

SEQ ID NO: 592770 - protein, 15 aa, Homo sapiens
  CDR3 for beta chain variable domain of TCR clone 296385 (TRBV7-3, TRBJ2-2)
CASSETGQGTGELFF

SEQ ID NO: 592771 - protein, 13 aa, Homo sapiens
  CDR3 for alpha chain variable domain of TCR clone 296386 (TRAV17, TRAJ9)
CASAITGGFKTIF

SEQ ID NO: 592772 - protein, 16 aa, Homo sapiens
  CDR3 for beta chain variable domain of TCR clone 296386 (TRBV15, TRBJ2-1)
CATSRNLAGGYNEQFF

SEQ ID NO: 592773 - protein, 16 aa, Homo sapiens
  CDR3 for alpha chain variable domain of TCR clone 296387 (TRAV26-2, TRAJ45)
CTTASPIGGGADGLTF

SEQ ID NO: 592774 - protein, 20 aa, Homo sapiens
  CDR3 for beta chain variable domain of TCR clone 296387 (TRBV28, TRBJ2-1)
CASTPIGRSPGLAGGNEPFF

SEQ ID NO: 592775 - protein, 13 aa, Homo sapiens
  CDR3 for alpha chain variable domain of TCR clone 296388 (TRAV3, TRAJ36)
CAVSLGGANNLFF

SEQ ID NO: 592776 - protein, 16 aa, Homo sapiens
  CDR3 for beta chain variable domain of TCR clone 296388 (TRBV3-1, TRBJ2-5)
CASSQDWASGQETQYF

SEQ ID NO: 592777 - protein, 12 aa, Homo sapiens
  CDR3 for alpha chain variable domain of TCR clone 296389 (TRAV12-2, TRAJ20)
CAVNRNDYKLSF

SEQ ID NO: 592778 - protein, 16 aa, Homo sapiens
  CDR3 for beta chain variable domain of TCR clone 296389 (TRBV7-3, TRBJ1-2)
CSSSLGAPVPNYGYTF

SEQ ID NO: 592779 - protein, 15 aa, Homo sapiens
  CDR3 for alpha chain variable domain of TCR clone 296390 (TRAV3, TRAJ5)
CAVRDLDTGRRALTF

SEQ ID NO: 592780 - protein, 14 aa, Homo sapiens
  CDR3 for beta chain variable domain of TCR clone 296390 (TRBV25-1, TRBJ1-4)
CVSSGGGQPEKLFF

SEQ ID NO: 592781 - protein, 18 aa, Homo sapiens
  CDR3 for alpha chain variable domain of TCR clone 296391 (TRAV17, TRAJ22)
CFLLLCYEPFCSARQLTF

SEQ ID NO: 592782 - protein, 15 aa, Homo sapiens
  CDR3 for beta chain variable domain of TCR clone 296391 (TRBV4-1, TRBJ2-5)
CASSQWDLYQETQYF

SEQ ID NO: 592783 - protein, 14 aa, Homo sapiens
  CDR3 for alpha chain variable domain of TCR clone 296392 (TRAV8-4, TRAJ48)
CAVSETFGNEKLTF

SEQ ID NO: 592784 - protein, 19 aa, Homo sapiens
  CDR3 for beta chain variable domain of TCR clone 296392 (TRBV7-2, TRBJ2-3)
YASSFLSRNWGGGTDTQYF

SEQ ID NO: 592785 - protein, 12 aa, Homo sapiens
  CDR3 for alpha chain variable domain of TCR clone 296393 (TRAV13-2, TRAJ8)
CAPWLCFQKLVF

SEQ ID NO: 592786 - protein, 15 aa, Homo sapiens
  CDR3 for beta chain variable domain of TCR clone 296393 (TRBV2, TRBJ2-1)
CASSEARSAYNEQFF

SEQ ID NO: 592787 - protein, 10 aa, Homo sapiens
  CDR3 for alpha chain variable domain of TCR clone 296394 (TRAV16, TRAJ22)
PAMYLRHLTF

SEQ ID NO: 592788 - protein, 15 aa, Homo sapiens
  CDR3 for beta chain variable domain of TCR clone 296394 (TRBV7-9, TRBJ1-6)
CASSSPGRGNSPLHF

SEQ ID NO: 592789 - protein, 13 aa, Homo sapiens
  CDR3 for alpha chain variable domain of TCR clone 296395 (TRAV2, TRAJ40)
CAVVTAGTYKYIF

SEQ ID NO: 592790 - protein, 15 aa, Homo sapiens
  CDR3 for beta chain variable domain of TCR clone 296395 (TRBV11-3, TRBJ2-3)
CASLKGGREGDTQYF

SEQ ID NO: 592791 - protein, 14 aa, Homo sapiens
  CDR3 for alpha chain variable domain of TCR clone 296396 (TRAV20, TRAJ42)
CAVQAGGSQGNLIF

SEQ ID NO: 592792 - protein, 13 aa, Homo sapiens
  CDR3 for beta chain variable domain of TCR clone 296396 (TRBV7-2, TRBJ2-1)
CASSLGVYNEQFF

SEQ ID NO: 592793 - protein, 22 aa, Homo sapiens
  CDR3 for alpha chain variable domain of TCR clone 296397 (TRAV13-1, TRAJ35)
CAASKGGFGNVPHCGSGTPVIV

SEQ ID NO: 592794 - protein, 13 aa, Homo sapiens
  CDR3 for beta chain variable domain of TCR clone 296397 (TRBV7-3, TRBJ1-1)
CASSQDWGAEAFF

SEQ ID NO: 592795 - protein, 13 aa, Homo sapiens
  CDR3 for alpha chain variable domain of TCR clone 296398 (TRAV27, TRAJ6)
CAGGTRGSYIPTF

SEQ ID NO: 592796 - protein, 15 aa, Homo sapiens
  CDR3 for beta chain variable domain of TCR clone 296398 (TRBV27, TRBJ2-7)
CASSLFGTGLDEQYF

SEQ ID NO: 592797 - protein, 15 aa, Homo sapiens
  CDR3 for alpha chain variable domain of TCR clone 296399 (TRAV8-2, TRAJ44)
DAAEYFDGTARKLTF

SEQ ID NO: 592798 - protein, 14 aa, Homo sapiens
  CDR3 for beta chain variable domain of TCR clone 296399 (TRBV7-8, TRBJ2-3)
CASSLDRGTDTQYF

SEQ ID NO: 592799 - protein, 12 aa, Homo sapiens
  CDR3 for alpha chain variable domain of TCR clone 296400 (TRAV35, TRAJ54)
CADLQGAQKLVF

SEQ ID NO: 592800 - protein, 17 aa, Homo sapiens
  CDR3 for beta chain variable domain of TCR clone 296400 (TRBV20-1, TRBJ2-2)
CSASGSGQGGLTGELFF

SEQ ID NO: 592801 - protein, 14 aa, Homo sapiens
  CDR3 for alpha chain variable domain of TCR clone 296401 (TRAV1-2, TRAJ8)
CAVREDTGFQKLVF

SEQ ID NO: 592802 - protein, 13 aa, Homo sapiens
  CDR3 for beta chain variable domain of TCR clone 296401 (TRBV6-3, TRBJ2-3)
CASTLQGIDTQYF

SEQ ID NO: 592803 - protein, 13 aa, Homo sapiens
  CDR3 for alpha chain variable domain of TCR clone 296402 (TRAV21, TRAJ49)
CAVRQSTGNQFYF

SEQ ID NO: 592804 - protein, 13 aa, Homo sapiens
  CDR3 for beta chain variable domain of TCR clone 296402 (TRBV6-6, TRBJ1-5)
CARRAYQDQPQHF

SEQ ID NO: 592805 - protein, 13 aa, Homo sapiens
  CDR3 for alpha chain variable domain of TCR clone 296403 (TRAV8-3, TRAJ10)
WAILTGGGNKLTF

SEQ ID NO: 592806 - protein, 10 aa, Homo sapiens
  CDR3 for beta chain variable domain of TCR clone 296403 (TRBV20-1, TRBJ2-5)
RSARFETQYF

SEQ ID NO: 592807 - protein, 13 aa, Homo sapiens
  CDR3 for alpha chain variable domain of TCR clone 296404 (TRAV35, TRAJ32)
CAGVGGATNKLIF

SEQ ID NO: 592808 - protein, 17 aa, Homo sapiens
  CDR3 for beta chain variable domain of TCR clone 296404 (TRBV4-3, TRBJ2-1)
CASRQFSSGRASGEQFF

SEQ ID NO: 592809 - protein, 15 aa, Homo sapiens
  CDR3 for alpha chain variable domain of TCR clone 296405 (TRAV12-1, TRAJ8)
CVVNVENTGFQKLVF

SEQ ID NO: 592810 - protein, 16 aa, Homo sapiens
  CDR3 for beta chain variable domain of TCR clone 296405 (TRBV5-1, TRBJ1-1)
CASSSGGNSLNTEAFF

SEQ ID NO: 592811 - protein, 17 aa, Homo sapiens
  CDR3 for alpha chain variable domain of TCR clone 296406 (TRAV35, TRAJ52)
CAGQLAAGGTCYGKLTF

SEQ ID NO: 592812 - protein, 12 aa, Homo sapiens
  CDR3 for beta chain variable domain of TCR clone 296406 (TRBV20-1, TRBJ2-7)
CSAGRRQSEQYF

SEQ ID NO: 592813 - protein, 12 aa, Homo sapiens
  CDR3 for alpha chain variable domain of TCR clone 296407 (TRAV12-2, TRAJ8)
CAVNTGFQKLVF

SEQ ID NO: 592814 - protein, 15 aa, Homo sapiens
  CDR3 for beta chain variable domain of TCR clone 296407 (TRBV28, TRBJ2-1)
CASSIIAGGRSEQFF

SEQ ID NO: 592815 - protein, 15 aa, Homo sapiens
  CDR3 for alpha chain variable domain of TCR clone 296408 (TRAV3, TRAJ5)
CAVRDLDTGRRALTF

SEQ ID NO: 592816 - protein, 12 aa, Homo sapiens
  CDR3 for beta chain variable domain of TCR clone 296408 (TRBV6-1, TRBJ2-7)
CASSEPLYEQYF

SEQ ID NO: 592817 - protein, 14 aa, Homo sapiens
  CDR3 for alpha chain variable domain of TCR clone 296409 (TRAV1-2, TRAJ8)
CAVREDTGFQKLGF

SEQ ID NO: 592818 - protein, 15 aa, Homo sapiens
  CDR3 for beta chain variable domain of TCR clone 296409 (TRBV19, TRBJ1-1)
CASTSGQIQNTEAFF

SEQ ID NO: 592819 - protein, 14 aa, Homo sapiens
  CDR3 for alpha chain variable domain of TCR clone 296410 (TRAV12-3, TRAJ10)
SHLPLTGGGNKLTF

SEQ ID NO: 592820 - protein, 11 aa, Homo sapiens
  CDR3 for beta chain variable domain of TCR clone 296410 (TRBV24-1, TRBJ2-3)
CATASTDTQYF

SEQ ID NO: 592821 - protein, 15 aa, Homo sapiens
  CDR3 for alpha chain variable domain of TCR clone 296411 (TRAV30, TRAJ32)
CGTEILGGATNKLIF

SEQ ID NO: 592822 - protein, 13 aa, Homo sapiens
  CDR3 for beta chain variable domain of TCR clone 296411 (TRBV6-3, TRBJ2-7)
CTSSFSGGYEQYF

SEQ ID NO: 592823 - protein, 14 aa, Homo sapiens
  CDR3 for alpha chain variable domain of TCR clone 296412 (TRAV26-1, TRAJ38)
CIADNAGNNSTLIW

SEQ ID NO: 592824 - protein, 13 aa, Homo sapiens
  CDR3 for beta chain variable domain of TCR clone 296412 (TRBV20-1, TRBJ1-1)
CSARGEGNTEAFF

SEQ ID NO: 592825 - protein, 15 aa, Homo sapiens
  CDR3 for alpha chain variable domain of TCR clone 296413 (TRAV3, TRAJ5)
CAVRDLDTGRRALTF

SEQ ID NO: 592826 - protein, 17 aa, Homo sapiens
  CDR3 for beta chain variable domain of TCR clone 296413 (TRBV20-1, TRBJ2-7)
CSAAGTSGGGSSYEQYF

SEQ ID NO: 592827 - protein, 13 aa, Homo sapiens
  CDR3 for alpha chain variable domain of TCR clone 296414 (TRAV3, TRAJ21)
CAVREPDFNKFYF

SEQ ID NO: 592828 - protein, 16 aa, Homo sapiens
  CDR3 for beta chain variable domain of TCR clone 296414 (TRBV28, TRBJ1-6)
CASSLIPGQRNSPLHF

SEQ ID NO: 592829 - protein, 16 aa, Homo sapiens
  CDR3 for alpha chain variable domain of TCR clone 296415 (TRAV12-3, TRAJ53)
CAMSPGSGGSNYKLTF

SEQ ID NO: 592830 - protein, 14 aa, Homo sapiens
  CDR3 for beta chain variable domain of TCR clone 296415 (TRBV19, TRBJ2-7)
CASNFRDTFTGMYF

SEQ ID NO: 592831 - protein, 16 aa, Homo sapiens
  CDR3 for alpha chain variable domain of TCR clone 296416 (TRAV38-1, TRAJ45)
CAFMKGSGGGANGLTF

SEQ ID NO: 592832 - protein, 15 aa, Homo sapiens
  CDR3 for beta chain variable domain of TCR clone 296416 (TRBV20-1, TRBJ2-7)
CSAREGRDSLYEQYF

SEQ ID NO: 592833 - protein, 14 aa, Homo sapiens
  CDR3 for alpha chain variable domain of TCR clone 296417 (TRAV12-2, TRAJ29)
GAVRRNSGNTPLVF

SEQ ID NO: 592834 - protein, 13 aa, Homo sapiens
  CDR3 for beta chain variable domain of TCR clone 296417 (TRBV12-4, TRBJ2-1)
CASSHYTDNEQFF

SEQ ID NO: 592835 - protein, 12 aa, Homo sapiens
  CDR3 for alpha chain variable domain of TCR clone 296418 (TRAV8-3, TRAJ26)
CAGDNYGQNFVF

SEQ ID NO: 592836 - protein, 15 aa, Homo sapiens
  CDR3 for beta chain variable domain of TCR clone 296418 (TRBV9, TRBJ1-4)
CASSRTGGFNEKLFF

SEQ ID NO: 592837 - protein, 21 aa, Homo sapiens
  CDR3 for alpha chain variable domain of TCR clone 296419 (TRAV12-1, TRAJ32)
SSVIQPPTSMNYGGATNKLIF

SEQ ID NO: 592838 - protein, 13 aa, Homo sapiens
  CDR3 for beta chain variable domain of TCR clone 296419 (TRBV7-9, TRBJ1-2)
CASSLKQNYGYTF

SEQ ID NO: 592839 - protein, 10 aa, Homo sapiens
  CDR3 for alpha chain variable domain of TCR clone 296420 (TRAV1-2, TRAJ31)
CASFDARLMF

SEQ ID NO: 592840 - protein, 15 aa, Homo sapiens
  CDR3 for beta chain variable domain of TCR clone 296420 (TRBV4-1, TRBJ1-4)
CASSDTGGTDEKLFF

SEQ ID NO: 592841 - protein, 15 aa, Homo sapiens
  CDR3 for alpha chain variable domain of TCR clone 296421 (TRAV3, TRAJ45)
CAVRTPWGGADGLTF

SEQ ID NO: 592842 - protein, 13 aa, Homo sapiens
  CDR3 for beta chain variable domain of TCR clone 296421 (TRBV20-1, TRBJ1-1)
CSARGGGNTEAFF

SEQ ID NO: 592843 - protein, 14 aa, Homo sapiens
  CDR3 for alpha chain variable domain of TCR clone 296422 (TRAV12-1, TRAJ30)
CVVNIGNRDDKIIF

SEQ ID NO: 592844 - protein, 13 aa, Homo sapiens
  CDR3 for beta chain variable domain of TCR clone 296422 (TRBV7-9, TRBJ2-5)
CRSPRPSGETQYF

SEQ ID NO: 592845 - protein, 13 aa, Homo sapiens
  CDR3 for alpha chain variable domain of TCR clone 296423 (TRAV22, TRAJ48)
CAVERFGNEKLTF

SEQ ID NO: 592846 - protein, 13 aa, Homo sapiens
  CDR3 for beta chain variable domain of TCR clone 296423 (TRBV19, TRBJ1-5)
CASSMRGYQPQHF

SEQ ID NO: 592847 - protein, 16 aa, Homo sapiens
  CDR3 for alpha chain variable domain of TCR clone 296424 (TRAV12-2, TRAJ32)
CAVNLGQVGATNKLIF

SEQ ID NO: 592848 - protein, 13 aa, Homo sapiens
  CDR3 for beta chain variable domain of TCR clone 296424 (TRBV9, TRBJ2-2)
CASSPRPAGELLF

SEQ ID NO: 592849 - protein, 11 aa, Homo sapiens
  CDR3 for alpha chain variable domain of TCR clone 296425 (TRAV12-1, TRAJ43)
CLEYDNNEMRF

SEQ ID NO: 592850 - protein, 15 aa, Homo sapiens
  CDR3 for beta chain variable domain of TCR clone 296425 (TRBV18, TRBJ2-5)
CASSPRASEAETQYF

SEQ ID NO: 592851 - protein, 14 aa, Homo sapiens
  CDR3 for alpha chain variable domain of TCR clone 296426 (TRAV26-1, TRAJ45)
CIEVTGGGADGLTF

SEQ ID NO: 592852 - protein, 15 aa, Homo sapiens
  CDR3 for beta chain variable domain of TCR clone 296426 (TRBV20-1, TRBJ1-1)
CSASRGVTGNTEAFF

SEQ ID NO: 592853 - protein, 10 aa, Homo sapiens
  CDR3 for alpha chain variable domain of TCR clone 296427 (TRAV27, TRAJ49)
CVVPVTSSIL

SEQ ID NO: 592854 - protein, 17 aa, Homo sapiens
  CDR3 for beta chain variable domain of TCR clone 296427 (TRBV7-3, TRBJ2-3)
CASSLMKRMRGADTQYF

SEQ ID NO: 592855 - protein, 11 aa, Homo sapiens
  CDR3 for alpha chain variable domain of TCR clone 296428 (TRAV21, TRAJ34)
CAVTNTNNLIF

SEQ ID NO: 592856 - protein, 17 aa, Homo sapiens
  CDR3 for beta chain variable domain of TCR clone 296428 (TRBV20-1, TRBJ2-1)
CSARSPSGGPPTMSSSS

SEQ ID NO: 592857 - protein, 15 aa, Homo sapiens
  CDR3 for alpha chain variable domain of TCR clone 296429 (TRAV12-1, TRAJ44)
CVVDEYTGTASKLNF

SEQ ID NO: 592858 - protein, 14 aa, Homo sapiens
  CDR3 for beta chain variable domain of TCR clone 296429 (TRBV5-1, TRBJ1-2)
CASSLEPVNYGYIF

SEQ ID NO: 592859 - protein, 19 aa, Homo sapiens
  CDR3 for alpha chain variable domain of TCR clone 296430 (TRAV26-1, TRAJ22)
CRVLLYRWVFSGSARQLTF

SEQ ID NO: 592860 - protein, 19 aa, Homo sapiens
  CDR3 for beta chain variable domain of TCR clone 296430 (TRBV19, TRBJ2-5)
CASSIRQVTDFFLGETQYF

SEQ ID NO: 592861 - protein, 13 aa, Homo sapiens
  CDR3 for alpha chain variable domain of TCR clone 296431 (TRAV21, TRAJ27)
CAARPGNAGKSTF

SEQ ID NO: 592862 - protein, 13 aa, Homo sapiens
  CDR3 for beta chain variable domain of TCR clone 296431 (TRBV19, TRBJ2-7)
CASSKTGTHEQYF

SEQ ID NO: 592863 - protein, 13 aa, Homo sapiens
  CDR3 for alpha chain variable domain of TCR clone 296432 (TRAV29/DV5, TRAJ31)
CAASRTNNARLMF

SEQ ID NO: 592864 - protein, 14 aa, Homo sapiens
  CDR3 for beta chain variable domain of TCR clone 296432 (TRBV12-5, TRBJ2-5)
CASGSRTHQETQYF

SEQ ID NO: 592865 - protein, 12 aa, Homo sapiens
  CDR3 for alpha chain variable domain of TCR clone 296433 (TRAV21, TRAJ20)
CAVRGNDYKLSF

SEQ ID NO: 592866 - protein, 11 aa, Homo sapiens
  CDR3 for beta chain variable domain of TCR clone 296433 (TRBV6-3, TRBJ2-3)
CATGQADTQYF

SEQ ID NO: 592867 - protein, 14 aa, Homo sapiens
  CDR3 for alpha chain variable domain of TCR clone 296434 (TRAV13-1, TRAJ8)
CAASEDTGFQKLVF

SEQ ID NO: 592868 - protein, 13 aa, Homo sapiens
  CDR3 for beta chain variable domain of TCR clone 296434 (TRBV19, TRBJ1-1)
CASSPSNGGEAFF

SEQ ID NO: 592869 - protein, 19 aa, Homo sapiens
  CDR3 for alpha chain variable domain of TCR clone 296435 (TRAV38-1, TRAJ53)
CAFMKHGLESGGSNYKLTF

SEQ ID NO: 592870 - protein, 12 aa, Homo sapiens
  CDR3 for beta chain variable domain of TCR clone 296435 (TRBV11-2, TRBJ2-1)
CASSPGNNEQFF

SEQ ID NO: 592871 - protein, 15 aa, Homo sapiens
  CDR3 for alpha chain variable domain of TCR clone 296436 (TRAV21, TRAJ24)
CAARSSTDGWGKLQF

SEQ ID NO: 592872 - protein, 19 aa, Homo sapiens
  CDR3 for beta chain variable domain of TCR clone 296436 (TRBV14, TRBJ2-1)
CASSQDQLWEAPEYNEQFF

SEQ ID NO: 592873 - protein, 12 aa, Homo sapiens
  CDR3 for alpha chain variable domain of TCR clone 296437 (TRAV12-1, TRAJ40)
CVVYSGTYKYIF

SEQ ID NO: 592874 - protein, 15 aa, Homo sapiens
  CDR3 for beta chain variable domain of TCR clone 296437 (TRBV4-3, TRBJ1-2)
CASSRGQGRNYGYTF

SEQ ID NO: 592875 - protein, 13 aa, Homo sapiens
  CDR3 for alpha chain variable domain of TCR clone 296438 (TRAV8-3, TRAJ17)
CAGIKAAGNKLTF

SEQ ID NO: 592876 - protein, 15 aa, Homo sapiens
  CDR3 for beta chain variable domain of TCR clone 296438 (TRBV4-2, TRBJ2-5)
CASSTQTGLKETQYF

SEQ ID NO: 592877 - protein, 16 aa, Homo sapiens
  CDR3 for alpha chain variable domain of TCR clone 296439 (TRAV21, TRAJ52)
CAVNNAGGTSYGKLTF

SEQ ID NO: 592878 - protein, 13 aa, Homo sapiens
  CDR3 for beta chain variable domain of TCR clone 296439 (TRBV7-3, TRBJ2-3)
CASSLGGSQTQYF

SEQ ID NO: 592879 - protein, 11 aa, Homo sapiens
  CDR3 for alpha chain variable domain of TCR clone 296440 (TRAV20, TRAJ26)
CAVRYGQNFVF

SEQ ID NO: 592880 - protein, 15 aa, Homo sapiens
  CDR3 for beta chain variable domain of TCR clone 296440 (TRBV27, TRBJ2-1)
CASSNGGGSSNEQFF

SEQ ID NO: 592881 - protein, 15 aa, Homo sapiens
  CDR3 for alpha chain variable domain of TCR clone 296441 (TRAV21, TRAJ53)
CATLNSGGSNYKLTF

SEQ ID NO: 592882 - protein, 15 aa, Homo sapiens
  CDR3 for beta chain variable domain of TCR clone 296441 (TRBV9, TRBJ1-6)
CASSVAGTGDSPLRF

SEQ ID NO: 592883 - protein, 12 aa, Homo sapiens
  CDR3 for alpha chain variable domain of TCR clone 296442 (TRAV12-3, TRAJ17)
CAMTLTGNKLTF

SEQ ID NO: 592884 - protein, 12 aa, Homo sapiens
  CDR3 for beta chain variable domain of TCR clone 296442 (TRBV2, TRBJ2-1)
CAYGPPDNEQFF

SEQ ID NO: 592885 - protein, 14 aa, Homo sapiens
  CDR3 for alpha chain variable domain of TCR clone 296443 (TRAV29/DV5, TRAJ36)
CAARRKTGANNLFF

SEQ ID NO: 592886 - protein, 16 aa, Homo sapiens
  CDR3 for beta chain variable domain of TCR clone 296443 (TRBV19, TRBJ1-2)
CASSIGLFRDAYGYTF

SEQ ID NO: 592887 - protein, 15 aa, Homo sapiens
  CDR3 for alpha chain variable domain of TCR clone 296444 (TRAV26-1, TRAJ29)
CIVRVEGSVNTPLVF

SEQ ID NO: 592888 - protein, 12 aa, Homo sapiens
  CDR3 for beta chain variable domain of TCR clone 296444 (TRBV14, TRBJ2-5)
CASSQLKETQYF

SEQ ID NO: 592889 - protein, 23 aa, Homo sapiens
  CDR3 for alpha chain variable domain of TCR clone 296445 (TRAV30, TRAJ43)
CTLRPHSSVTQEPTSAALSDMRL

SEQ ID NO: 592890 - protein, 13 aa, Homo sapiens
  CDR3 for beta chain variable domain of TCR clone 296445 (TRBV12-4, TRBJ2-2)
CASSITGSGELFF

SEQ ID NO: 592891 - protein, 14 aa, Homo sapiens
  CDR3 for alpha chain variable domain of TCR clone 296446 (TRAV8-6, TRAJ33)
CAVSGMDSNYQLIW

SEQ ID NO: 592892 - protein, 15 aa, Homo sapiens
  CDR3 for beta chain variable domain of TCR clone 296446 (TRBV6-1, TRBJ2-7)
CASSESMGDFYEQYF

SEQ ID NO: 592893 - protein, 14 aa, Homo sapiens
  CDR3 for alpha chain variable domain of TCR clone 296447 (TRAV8-3, TRAJ9)
CAVVYNIGGFKTIF

SEQ ID NO: 592894 - protein, 12 aa, Homo sapiens
  CDR3 for beta chain variable domain of TCR clone 296447 (TRBV11-2, TRBJ2-1)
CASSPGNNEQFF

SEQ ID NO: 592895 - protein, 22 aa, Homo sapiens
  CDR3 for alpha chain variable domain of TCR clone 296448 (TRAV3, TRAJ38)
CALRDCLNAGNNHIQNPDPAVY

SEQ ID NO: 592896 - protein, 19 aa, Homo sapiens
  CDR3 for beta chain variable domain of TCR clone 296448 (TRBV7-2, TRBJ2-3)
CASSFLSRNWGGGTDTQYF

SEQ ID NO: 592897 - protein, 16 aa, Homo sapiens
  CDR3 for alpha chain variable domain of TCR clone 296449 (TRAV13-2, TRAJ53)
CAENANSGGSNYKLTF

SEQ ID NO: 592898 - protein, 19 aa, Homo sapiens
  CDR3 for beta chain variable domain of TCR clone 296449 (TRBV28, TRBJ2-7)
CASSYSGTSRLGWVHEQYF

SEQ ID NO: 592899 - protein, 14 aa, Homo sapiens
  CDR3 for alpha chain variable domain of TCR clone 296450 (TRAV26-1, TRAJ45)
CFVRVVGGADGLTF

SEQ ID NO: 592900 - protein, 16 aa, Homo sapiens
  CDR3 for beta chain variable domain of TCR clone 296450 (TRBV7-9, TRBJ1-1)
CASSLTQVRSNTEAFF

SEQ ID NO: 592901 - protein, 13 aa, Homo sapiens
  CDR3 for alpha chain variable domain of TCR clone 296451 (TRAV13-1, TRAJ6)
CAASRGGSYIHTF

SEQ ID NO: 592902 - protein, 15 aa, Homo sapiens
  CDR3 for beta chain variable domain of TCR clone 296451 (TRBV25-1, TRBJ2-5)
CASSDTGTHQETQYF

SEQ ID NO: 592903 - protein, 15 aa, Homo sapiens
  CDR3 for alpha chain variable domain of TCR clone 296452 (TRAV12-1, TRAJ36)
CVVNEHQTVANNLFF

SEQ ID NO: 592904 - protein, 14 aa, Homo sapiens
  CDR3 for beta chain variable domain of TCR clone 296452 (TRBV10-3, TRBJ2-5)
CAIRTSGGQETQYF

SEQ ID NO: 592905 - protein, 11 aa, Homo sapiens
  CDR3 for alpha chain variable domain of TCR clone 296453 (TRAV4, TRAJ23)
CLVAPGGKLIS

SEQ ID NO: 592906 - protein, 17 aa, Homo sapiens
  CDR3 for beta chain variable domain of TCR clone 296453 (TRBV7-3, TRBJ2-2)
CASSLSGTSGGTGELFF

SEQ ID NO: 592907 - protein, 14 aa, Homo sapiens
  CDR3 for alpha chain variable domain of TCR clone 296454 (TRAV12-2, TRAJ9)
CAVNALEGGFKTIF

SEQ ID NO: 592908 - protein, 16 aa, Homo sapiens
  CDR3 for beta chain variable domain of TCR clone 296454 (TRBV19, TRBJ1-6)
CASSVAPVAGNATLHF

SEQ ID NO: 592909 - protein, 17 aa, Homo sapiens
  CDR3 for alpha chain variable domain of TCR clone 296455 (TRAV12-2, TRAJ48)
CASNEKLTFGTGTRLTI

SEQ ID NO: 592910 - protein, 18 aa, Homo sapiens
  CDR3 for beta chain variable domain of TCR clone 296455 (TRBV5-5, TRBJ1-5)
CASSLRQVKGSSNQHQHF

SEQ ID NO: 592911 - protein, 14 aa, Homo sapiens
  CDR3 for alpha chain variable domain of TCR clone 296456 (TRAV39, TRAJ54)
CAVVLIQGAQTLVF

SEQ ID NO: 592912 - protein, 13 aa, Homo sapiens
  CDR3 for beta chain variable domain of TCR clone 296456 (TRBV29-1, TRBJ2-5)
CSVGGTSAETQYF

SEQ ID NO: 592913 - protein, 14 aa, Homo sapiens
  CDR3 for alpha chain variable domain of TCR clone 296457 (TRAV12-2, TRAJ13)
CAVKKTGGYQKVTF

SEQ ID NO: 592914 - protein, 16 aa, Homo sapiens
  CDR3 for beta chain variable domain of TCR clone 296457 (TRBV4-2, TRBJ2-4)
CASSQELRRAKNNQYF

SEQ ID NO: 592915 - protein, 14 aa, Homo sapiens
  CDR3 for alpha chain variable domain of TCR clone 296458 (TRAV12-3, TRAJ10)
SHLPLTGGGNKLTF

SEQ ID NO: 592916 - protein, 14 aa, Homo sapiens
  CDR3 for beta chain variable domain of TCR clone 296458 (TRBV12-4, TRBJ1-1)
CASTWTGHDTEAFF

SEQ ID NO: 592917 - protein, 13 aa, Homo sapiens
  CDR3 for alpha chain variable domain of TCR clone 296459 (TRAV26-1, TRAJ48)
CIVRVVGDEKLTF

SEQ ID NO: 592918 - protein, 18 aa, Homo sapiens
  CDR3 for beta chain variable domain of TCR clone 296459 (TRBV4-3, TRBJ1-6)
CASSQETPASSYNSPLLF

SEQ ID NO: 592919 - protein, 14 aa, Homo sapiens
  CDR3 for alpha chain variable domain of TCR clone 296460 (TRAV8-4, TRAJ8)
CAVSEDTGFQKRVF

SEQ ID NO: 592920 - protein, 12 aa, Homo sapiens
  CDR3 for beta chain variable domain of TCR clone 296460 (TRBV14, TRBJ1-1)
CASRPYETEAFF

SEQ ID NO: 592921 - protein, 13 aa, Homo sapiens
  CDR3 for alpha chain variable domain of TCR clone 296461 (TRAV12-1, TRAJ7)
CVVNMRGNNRLAF

SEQ ID NO: 592922 - protein, 15 aa, Homo sapiens
  CDR3 for beta chain variable domain of TCR clone 296461 (TRBV27, TRBJ2-3)
CASSLGLAVTDTQYF

SEQ ID NO: 592923 - protein, 14 aa, Homo sapiens
  CDR3 for alpha chain variable domain of TCR clone 296462 (TRAV12-2, TRAJ5)
CAVNRSTGRRALTF

SEQ ID NO: 592924 - protein, 14 aa, Homo sapiens
  CDR3 for beta chain variable domain of TCR clone 296462 (TRBV7-8, TRBJ2-3)
CASSLEAGTDTQYF

SEQ ID NO: 592925 - protein, 19 aa, Homo sapiens
  CDR3 for alpha chain variable domain of TCR clone 296463 (TRAV29/DV5, TRAJ49)
CSVLLCSKLTVDTGNQFYF

SEQ ID NO: 592926 - protein, 15 aa, Homo sapiens
  CDR3 for beta chain variable domain of TCR clone 296463 (TRBV7-9, TRBJ1-5)
CASSQGHQPNQPQHF

SEQ ID NO: 592927 - protein, 12 aa, Homo sapiens
  CDR3 for alpha chain variable domain of TCR clone 296464 (TRAV12-3, TRAJ20)
CAMVRGDYKLSF

SEQ ID NO: 592928 - protein, 15 aa, Homo sapiens
  CDR3 for beta chain variable domain of TCR clone 296464 (TRBV20-1, TRBJ2-7)
CSARKGLAESYEQYF

SEQ ID NO: 592929 - protein, 14 aa, Homo sapiens
  CDR3 for alpha chain variable domain of TCR clone 296465 (TRAV12-3, TRAJ9)
CAMSVETGGFKTIF

SEQ ID NO: 592930 - protein, 14 aa, Homo sapiens
  CDR3 for beta chain variable domain of TCR clone 296465 (TRBV7-2, TRBJ2-7)
CASSPKTSFYEQYF

SEQ ID NO: 592931 - protein, 14 aa, Homo sapiens
  CDR3 for alpha chain variable domain of TCR clone 296466 (TRAV26-1, TRAJ24)
CIVRRVGGWGKFQC

SEQ ID NO: 592932 - protein, 16 aa, Homo sapiens
  CDR3 for beta chain variable domain of TCR clone 296466 (TRBV6-3, TRBJ2-1)
CASSYRRGDSYNEQFF

SEQ ID NO: 592933 - protein, 14 aa, Homo sapiens
  CDR3 for alpha chain variable domain of TCR clone 296467 (TRAV12-1, TRAJ30)
CVVNIGGRDDKIIF

SEQ ID NO: 592934 - protein, 13 aa, Homo sapiens
  CDR3 for beta chain variable domain of TCR clone 296467 (TRBV7-9, TRBJ1-2)
CASSLKQNYGYTL

SEQ ID NO: 592935 - protein, 13 aa, Homo sapiens
  CDR3 for alpha chain variable domain of TCR clone 296468 (TRAV13-2, TRAJ48)
CAEMDFGNDKLTF

SEQ ID NO: 592936 - protein, 14 aa, Homo sapiens
  CDR3 for beta chain variable domain of TCR clone 296468 (TRBV19, TRBJ2-7)
CASSMGQGAIEQYF

SEQ ID NO: 592937 - protein, 15 aa, Homo sapiens
  CDR3 for alpha chain variable domain of TCR clone 296469 (TRAV3, TRAJ36)
CAVRAGQTGANNLFF

SEQ ID NO: 592938 - protein, 13 aa, Homo sapiens
  CDR3 for beta chain variable domain of TCR clone 296469 (TRBV10-3, TRBJ1-2)
CAISERDSYGYTF

SEQ ID NO: 592939 - protein, 11 aa, Homo sapiens
  CDR3 for alpha chain variable domain of TCR clone 296470 (TRAV2, TRAJ33)
CAVESNYPLIW

SEQ ID NO: 592940 - protein, 15 aa, Homo sapiens
  CDR3 for beta chain variable domain of TCR clone 296470 (TRBV19, TRBJ1-1)
CARTSGQIQNTEAFF

SEQ ID NO: 592941 - protein, 15 aa, Homo sapiens
  CDR3 for alpha chain variable domain of TCR clone 296471 (TRAV35, TRAJ52)
CAGPRGGTGYGNLTF

SEQ ID NO: 592942 - protein, 14 aa, Homo sapiens
  CDR3 for beta chain variable domain of TCR clone 296471 (TRBV20-1, TRBJ2-7)
CSAWTALSSYEQYF

SEQ ID NO: 592943 - protein, 12 aa, Homo sapiens
  CDR3 for alpha chain variable domain of TCR clone 296472 (TRAV22, TRAJ22)
CAPGGSARQLTF

SEQ ID NO: 592944 - protein, 14 aa, Homo sapiens
  CDR3 for beta chain variable domain of TCR clone 296472 (TRBV7-2, TRBJ2-7)
CASSLYPGRYEQYF

SEQ ID NO: 592945 - protein, 14 aa, Homo sapiens
  CDR3 for alpha chain variable domain of TCR clone 296473 (TRAV1-2, TRAJ8)
CAVGEDTGFQKLVF

SEQ ID NO: 592946 - protein, 16 aa, Homo sapiens
  CDR3 for beta chain variable domain of TCR clone 296473 (TRBV19, TRBJ2-1)
CASSKAGPSSYNEQFF

SEQ ID NO: 592947 - protein, 12 aa, Homo sapiens
  CDR3 for alpha chain variable domain of TCR clone 296474 (TRAV13-1, TRAJ21)
CAAKEGFNTFYF

SEQ ID NO: 592948 - protein, 14 aa, Homo sapiens
  CDR3 for beta chain variable domain of TCR clone 296474 (TRBV5-1, TRBJ2-7)
CASSRGESLYEQYF

SEQ ID NO: 592949 - protein, 14 aa, Homo sapiens
  CDR3 for alpha chain variable domain of TCR clone 296475 (TRAV16, TRAJ17)
CALSGRAAGNKLTF

SEQ ID NO: 592950 - protein, 17 aa, Homo sapiens
  CDR3 for beta chain variable domain of TCR clone 296475 (TRBV3-1, TRBJ1-2)
CASSPTRLPEGGYTLVR

SEQ ID NO: 592951 - protein, 13 aa, Homo sapiens
  CDR3 for alpha chain variable domain of TCR clone 296476 (TRAV12-1, TRAJ34)
CVVTGYNTDKLIF

SEQ ID NO: 592952 - protein, 15 aa, Homo sapiens
  CDR3 for beta chain variable domain of TCR clone 296476 (TRBV7-6, TRBJ2-1)
CASSSLAGEGNEQFF

SEQ ID NO: 592953 - protein, 15 aa, Homo sapiens
  CDR3 for alpha chain variable domain of TCR clone 296477 (TRAV9-2, TRAJ56)
RALSDVDGANSKLTF

SEQ ID NO: 592954 - protein, 16 aa, Homo sapiens
  CDR3 for beta chain variable domain of TCR clone 296477 (TRBV27, TRBJ2-2)
CASSFRGLVRTGELFF

SEQ ID NO: 592955 - protein, 16 aa, Homo sapiens
  CDR3 for alpha chain variable domain of TCR clone 296478 (TRAV30, TRAJ24)
CGTEIVDADSWGKFQF

SEQ ID NO: 592956 - protein, 15 aa, Homo sapiens
  CDR3 for beta chain variable domain of TCR clone 296478 (TRBV7-2, TRBJ2-1)
CASTSASGDYNEQFF

SEQ ID NO: 592957 - protein, 12 aa, Homo sapiens
  CDR3 for alpha chain variable domain of TCR clone 296479 (TRAV13-2, TRAJ23)
CAERHRGGKLIF

SEQ ID NO: 592958 - protein, 16 aa, Homo sapiens
  CDR3 for beta chain variable domain of TCR clone 296479 (TRBV28, TRBJ2-7)
CASSPWVATGDLSQYF

SEQ ID NO: 592959 - protein, 11 aa, Homo sapiens
  CDR3 for alpha chain variable domain of TCR clone 296480 (TRAV13-2, TRAJ23)
FAESPRGKLIF

SEQ ID NO: 592960 - protein, 18 aa, Homo sapiens
  CDR3 for beta chain variable domain of TCR clone 296480 (TRBV6-5, TRBJ1-1)
CASSYSAPGGTGGTEAFF

SEQ ID NO: 592961 - protein, 14 aa, Homo sapiens
  CDR3 for alpha chain variable domain of TCR clone 296481 (TRAV13-1, TRAJ44)
CTAKATGTASKLTF

SEQ ID NO: 592962 - protein, 15 aa, Homo sapiens
  CDR3 for beta chain variable domain of TCR clone 296481 (TRBV4-3, TRBJ1-1)
CASSQELGRGTEAFF

SEQ ID NO: 592963 - protein, 13 aa, Homo sapiens
  CDR3 for alpha chain variable domain of TCR clone 296482 (TRAV35, TRAJ48)
CAGHEFGNEKLTF

SEQ ID NO: 592964 - protein, 14 aa, Homo sapiens
  CDR3 for beta chain variable domain of TCR clone 296482 (TRBV19, TRBJ2-1)
CANPTFVLSGEQFF

SEQ ID NO: 592965 - protein, 13 aa, Homo sapiens
  CDR3 for alpha chain variable domain of TCR clone 296483 (TRAV1-1, TRAJ31)
CASYMNNNARLMF

SEQ ID NO: 592966 - protein, 14 aa, Homo sapiens
  CDR3 for beta chain variable domain of TCR clone 296483 (TRBV4-1, TRBJ2-5)
CASSRSGSGETQYF

SEQ ID NO: 592967 - protein, 13 aa, Homo sapiens
  CDR3 for alpha chain variable domain of TCR clone 296484 (TRAV3, TRAJ27)
CAVRPLGAGKSTF

SEQ ID NO: 592968 - protein, 11 aa, Homo sapiens
  CDR3 for beta chain variable domain of TCR clone 296484 (TRBV11-2, TRBJ1-1)
CASSINTEAFF

SEQ ID NO: 592969 - protein, 12 aa, Homo sapiens
  CDR3 for alpha chain variable domain of TCR clone 296485 (TRAV3, TRAJ43)
CAVRDPNNDMRF

SEQ ID NO: 592970 - protein, 13 aa, Homo sapiens
  CDR3 for beta chain variable domain of TCR clone 296485 (TRBV19, TRBJ1-2)
RASSVPGQDGYTF

SEQ ID NO: 592971 - protein, 16 aa, Homo sapiens
  CDR3 for alpha chain variable domain of TCR clone 296486 (TRAV26-1, TRAJ28)
CIVRPYSGAGSYQLTF

SEQ ID NO: 592972 - protein, 11 aa, Homo sapiens
  CDR3 for beta chain variable domain of TCR clone 296486 (TRBV20-1, TRBJ2-2)
CSARDLTSGIW

SEQ ID NO: 592973 - protein, 14 aa, Homo sapiens
  CDR3 for alpha chain variable domain of TCR clone 296487 (TRAV8-6, TRAJ5)
CAVCVDTGRRALTF

SEQ ID NO: 592974 - protein, 11 aa, Homo sapiens
  CDR3 for beta chain variable domain of TCR clone 296487 (TRBV7-3, TRBJ2-5)
CASSLSETQYF

SEQ ID NO: 592975 - protein, 14 aa, Homo sapiens
  CDR3 for alpha chain variable domain of TCR clone 296488 (TRAV29/DV5, TRAJ45)
FAASFRGGADGLTF

SEQ ID NO: 592976 - protein, 11 aa, Homo sapiens
  CDR3 for beta chain variable domain of TCR clone 296488 (TRBV11-2, TRBJ2-2)
CASSLPGELFF

SEQ ID NO: 592977 - protein, 14 aa, Homo sapiens
  CDR3 for alpha chain variable domain of TCR clone 296489 (TRAV1-2, TRAJ16)
CAVNRFSDGQKLLF

SEQ ID NO: 592978 - protein, 15 aa, Homo sapiens
  CDR3 for beta chain variable domain of TCR clone 296489 (TRBV5-1, TRBJ2-1)
CASSPPRGPYNEQFF

SEQ ID NO: 592979 - protein, 12 aa, Homo sapiens
  CDR3 for alpha chain variable domain of TCR clone 296490 (TRAV26-1, TRAJ53)
CIEGGSNYKLTF

SEQ ID NO: 592980 - protein, 13 aa, Homo sapiens
  CDR3 for beta chain variable domain of TCR clone 296490 (TRBV2, TRBJ1-5)
CATAGPGNQPQHF

SEQ ID NO: 592981 - protein, 14 aa, Homo sapiens
  CDR3 for alpha chain variable domain of TCR clone 296491 (TRAV26-1, TRAJ44)
CIVRPTGTASKLTF

SEQ ID NO: 592982 - protein, 16 aa, Homo sapiens
  CDR3 for beta chain variable domain of TCR clone 296491 (TRBV27, TRBJ2-2)
CASSFRGLVRTGELFF

SEQ ID NO: 592983 - protein, 14 aa, Homo sapiens
  CDR3 for alpha chain variable domain of TCR clone 296492 (TRAV9-2, TRAJ39)
CALYIYNAGNMLTF

SEQ ID NO: 592984 - protein, 14 aa, Homo sapiens
  CDR3 for beta chain variable domain of TCR clone 296492 (TRBV2, TRBJ2-5)
CASSEVLAQETQYF

SEQ ID NO: 592985 - protein, 12 aa, Homo sapiens
  CDR3 for alpha chain variable domain of TCR clone 296493 (TRAV2, TRAJ34)
CAVERNTDKLIF

SEQ ID NO: 592986 - protein, 20 aa, Homo sapiens
  CDR3 for beta chain variable domain of TCR clone 296493 (TRBV7-2, TRBJ2-5)
CASSFLRGGGRNPVLRARHA

SEQ ID NO: 592987 - protein, 14 aa, Homo sapiens
  CDR3 for alpha chain variable domain of TCR clone 296494 (TRAV1-2, TRAJ16)
CAVNRFSDGQKPLF

SEQ ID NO: 592988 - protein, 15 aa, Homo sapiens
  CDR3 for beta chain variable domain of TCR clone 296494 (TRBV5-8, TRBJ1-1)
CASSFSGTSLKGAFF

SEQ ID NO: 592989 - protein, 15 aa, Homo sapiens
  CDR3 for alpha chain variable domain of TCR clone 296495 (TRAV26-1, TRAJ48)
CIVRVGDFGNENLTF

SEQ ID NO: 592990 - protein, 16 aa, Homo sapiens
  CDR3 for beta chain variable domain of TCR clone 296495 (TRBV4-1, TRBJ2-3)
CASSQRAGGLTDTQYF

SEQ ID NO: 592991 - protein, 14 aa, Homo sapiens
  CDR3 for alpha chain variable domain of TCR clone 296496 (TRAV1-2, TRAJ16)
CAVDRFSDGQKLLF

SEQ ID NO: 592992 - protein, 15 aa, Homo sapiens
  CDR3 for beta chain variable domain of TCR clone 296496 (TRBV20-1, TRBJ2-1)
CSARGIGGTYNEQFF

SEQ ID NO: 592993 - protein, 16 aa, Homo sapiens
  CDR3 for alpha chain variable domain of TCR clone 296497 (TRAV4, TRAJ9)
CLVGDTNRPGGFKTIF

SEQ ID NO: 592994 - protein, 16 aa, Homo sapiens
  CDR3 for beta chain variable domain of TCR clone 296497 (TRBV28, TRBJ1-4)
CASIPPYRGRSEKLFF

SEQ ID NO: 592995 - protein, 12 aa, Homo sapiens
  CDR3 for alpha chain variable domain of TCR clone 296498 (TRAV13-2, TRAJ23)
CAERHRGGKLIF

SEQ ID NO: 592996 - protein, 13 aa, Homo sapiens
  CDR3 for beta chain variable domain of TCR clone 296498 (TRBV7-3, TRBJ1-1)
CASSQDWGAEAVF

SEQ ID NO: 592997 - protein, 14 aa, Homo sapiens
  CDR3 for alpha chain variable domain of TCR clone 296499 (TRAV9-2, TRAJ39)
RALYIYNAGNMLTF

SEQ ID NO: 592998 - protein, 17 aa, Homo sapiens
  CDR3 for beta chain variable domain of TCR clone 296499 (TRBV9, TRBJ2-3)
CASRSTAGGPSTDTQYF

SEQ ID NO: 592999 - protein, 15 aa, Homo sapiens
  CDR3 for alpha chain variable domain of TCR clone 296500 (TRAV29/DV5, TRAJ28)
CAAGYSGAGSYQLTF

SEQ ID NO: 593000 - protein, 18 aa, Homo sapiens
  CDR3 for beta chain variable domain of TCR clone 296500 (TRBV3-1, TRBJ1-2)
CASSQGVIGWNGDYGYTF

SEQ ID NO: 593001 - protein, 16 aa, Homo sapiens
  CDR3 for alpha chain variable domain of TCR clone 296501 (TRAV8-2, TRAJ7)
CVVREGPYYGNNRLAF

SEQ ID NO: 593002 - protein, 16 aa, Homo sapiens
  CDR3 for beta chain variable domain of TCR clone 296501 (TRBV12-4, TRBJ1-4)
CASSLKGIGHGEKLFF

SEQ ID NO: 593003 - protein, 19 aa, Homo sapiens
  CDR3 for alpha chain variable domain of TCR clone 296502 (TRAV2, TRAJ20)
ILQVREADAAVYRDCKLSF

SEQ ID NO: 593004 - protein, 12 aa, Homo sapiens
  CDR3 for beta chain variable domain of TCR clone 296502 (TRBV7-9, TRBJ1-5)
CASSPQGQPQHF

SEQ ID NO: 593005 - protein, 17 aa, Homo sapiens
  CDR3 for alpha chain variable domain of TCR clone 296503 (TRAV26-1, TRAJ28)
CSVRVPDSGAGSYQLTF

SEQ ID NO: 593006 - protein, 17 aa, Homo sapiens
  CDR3 for beta chain variable domain of TCR clone 296503 (TRBV28, TRBJ2-7)
CASSPLPAGGKSYEQYF

SEQ ID NO: 593007 - protein, 13 aa, Homo sapiens
  CDR3 for alpha chain variable domain of TCR clone 296504 (TRAV26-2, TRAJ57)
CILSRGGSEKLVF

SEQ ID NO: 593008 - protein, 16 aa, Homo sapiens
  CDR3 for beta chain variable domain of TCR clone 296504 (TRBV18, TRBJ1-5)
CASSPRSGGGNQPQHF

SEQ ID NO: 593009 - protein, 14 aa, Homo sapiens
  CDR3 for alpha chain variable domain of TCR clone 296505 (TRAV23/DV6, TRAJ11)
CAALIGGGYSTLTF

SEQ ID NO: 593010 - protein, 16 aa, Homo sapiens
  CDR3 for beta chain variable domain of TCR clone 296505 (TRBV27, TRBJ2-2)
CASSFRGLVRTGELFF

SEQ ID NO: 593011 - protein, 11 aa, Homo sapiens
  CDR3 for alpha chain variable domain of TCR clone 296506 (TRAV21, TRAJ34)
CAVTNTDKLIF

SEQ ID NO: 593012 - protein, 17 aa, Homo sapiens
  CDR3 for beta chain variable domain of TCR clone 296506 (TRBV20-1, TRBJ2-1)
CSARSPSGGPPAMSSSS

SEQ ID NO: 593013 - protein, 15 aa, Homo sapiens
  CDR3 for alpha chain variable domain of TCR clone 296507 (TRAV26-1, TRAJ44)
CIVRANTGTASKLTF

SEQ ID NO: 593014 - protein, 17 aa, Homo sapiens
  CDR3 for beta chain variable domain of TCR clone 296507 (TRBV7-8, TRBJ2-6)
CASSAGTGGAGANVLTF

SEQ ID NO: 593015 - protein, 16 aa, Homo sapiens
  CDR3 for alpha chain variable domain of TCR clone 296508 (TRAV30, TRAJ24)
CGTEIVDAYSWGKFQF

SEQ ID NO: 593016 - protein, 13 aa, Homo sapiens
  CDR3 for beta chain variable domain of TCR clone 296508 (TRBV12-4, TRBJ1-2)
CASSLRQGKGYTF

SEQ ID NO: 593017 - protein, 15 aa, Homo sapiens
  CDR3 for alpha chain variable domain of TCR clone 296509 (TRAV13-1, TRAJ18)
CAASGGGSTLGRLSF

SEQ ID NO: 593018 - protein, 13 aa, Homo sapiens
  CDR3 for beta chain variable domain of TCR clone 296509 (TRBV18, TRBJ2-1)
CASGLASNKEQFF

SEQ ID NO: 593019 - protein, 12 aa, Homo sapiens
  CDR3 for alpha chain variable domain of TCR clone 296510 (TRAV12-1, TRAJ8)
CVVNPKRVNTGF

SEQ ID NO: 593020 - protein, 14 aa, Homo sapiens
  CDR3 for beta chain variable domain of TCR clone 296510 (TRBV3-1, TRBJ2-7)
CASSRTSGKEEQYF

SEQ ID NO: 593021 - protein, 15 aa, Homo sapiens
  CDR3 for alpha chain variable domain of TCR clone 296511 (TRAV12-1, TRAJ44)
CVADLPTGTASKLTF

SEQ ID NO: 593022 - protein, 16 aa, Homo sapiens
  CDR3 for beta chain variable domain of TCR clone 296511 (TRBV6-1, TRBJ2-5)
CASSETLDRGAETQYF

SEQ ID NO: 593023 - protein, 14 aa, Homo sapiens
  CDR3 for alpha chain variable domain of TCR clone 296512 (TRAV12-2, TRAJ17)
CAVLFKAAGNKLTF

SEQ ID NO: 593024 - protein, 14 aa, Homo sapiens
  CDR3 for beta chain variable domain of TCR clone 296512 (TRBV12-5, TRBJ2-5)
CASGSRTHQDTQYF

SEQ ID NO: 593025 - protein, 13 aa, Homo sapiens
  CDR3 for alpha chain variable domain of TCR clone 296513 (TRAV12-1, TRAJ13)
CVVNLGGYQKVTF

SEQ ID NO: 593026 - protein, 17 aa, Homo sapiens
  CDR3 for beta chain variable domain of TCR clone 296513 (TRBV5-1, TRBJ1-6)
CASSPSLQGSDNSPLHF

SEQ ID NO: 593027 - protein, 13 aa, Homo sapiens
  CDR3 for alpha chain variable domain of TCR clone 296514 (TRAV29/DV5, TRAJ31)
CAASRNNNARLMF

SEQ ID NO: 593028 - protein, 17 aa, Homo sapiens
  CDR3 for beta chain variable domain of TCR clone 296514 (TRBV24-1, TRBJ2-2)
CATSDFGGVPYTGELFF

SEQ ID NO: 593029 - protein, 14 aa, Homo sapiens
  CDR3 for alpha chain variable domain of TCR clone 296515 (TRAV21, TRAJ11)
CAVRRNSGYSTLTF

SEQ ID NO: 593030 - protein, 11 aa, Homo sapiens
  CDR3 for beta chain variable domain of TCR clone 296515 (TRBV11-2, TRBJ1-1)
CASGINTEAFF

SEQ ID NO: 593031 - protein, 14 aa, Homo sapiens
  CDR3 for alpha chain variable domain of TCR clone 296516 (TRAV1-2, TRAJ8)
CSVREDTGFQKLVF

SEQ ID NO: 593032 - protein, 16 aa, Homo sapiens
  CDR3 for beta chain variable domain of TCR clone 296516 (TRBV27, TRBJ2-2)
CASSFRGLVRTGELFF

SEQ ID NO: 593033 - protein, 10 aa, Homo sapiens
  CDR3 for alpha chain variable domain of TCR clone 296517 (TRAV13-2, TRAJ45)
PGGGADGLTF

SEQ ID NO: 593034 - protein, 12 aa, Homo sapiens
  CDR3 for beta chain variable domain of TCR clone 296517 (TRBV12-4, TRBJ2-1)
CASSLQGSEQFF

SEQ ID NO: 593035 - protein, 13 aa, Homo sapiens
  CDR3 for alpha chain variable domain of TCR clone 296518 (TRAV12-2, TRAJ18)
CAVRGSTLGRLYF

SEQ ID NO: 593036 - protein, 20 aa, Homo sapiens
  CDR3 for beta chain variable domain of TCR clone 296518 (TRBV7-8, TRBJ2-2)
CASSHLFPGPTIHIAGELFF

SEQ ID NO: 593037 - protein, 14 aa, Homo sapiens
  CDR3 for alpha chain variable domain of TCR clone 296519 (TRAV35, TRAJ22)
CAGLRPGSARQLTF

SEQ ID NO: 593038 - protein, 14 aa, Homo sapiens
  CDR3 for beta chain variable domain of TCR clone 296519 (TRBV12-5, TRBJ2-5)
CASGSRTHQETQHF

SEQ ID NO: 593039 - protein, 13 aa, Homo sapiens
  CDR3 for alpha chain variable domain of TCR clone 296520 (TRAV12-2, TRAJ42)
CAVKRGSQGNLIF

SEQ ID NO: 593040 - protein, 12 aa, Homo sapiens
  CDR3 for beta chain variable domain of TCR clone 296520 (TRBV24-1, TRBJ1-1)
CATLYPDTEAFF

SEQ ID NO: 593041 - protein, 15 aa, Homo sapiens
  CDR3 for alpha chain variable domain of TCR clone 296521 (TRAV8-3, TRAJ41)
CAVGSNSNSGYALNF

SEQ ID NO: 593042 - protein, 13 aa, Homo sapiens
  CDR3 for beta chain variable domain of TCR clone 296521 (TRBV28, TRBJ2-1)
CASRSGGLNEQFF

SEQ ID NO: 593043 - protein, 13 aa, Homo sapiens
  CDR3 for alpha chain variable domain of TCR clone 296522 (TRAV35, TRAJ53)
CAGQASSNYKLTF

SEQ ID NO: 593044 - protein, 11 aa, Homo sapiens
  CDR3 for beta chain variable domain of TCR clone 296522 (TRBV29-1, TRBJ2-5)
CSEDRTGTQYF

SEQ ID NO: 593045 - protein, 15 aa, Homo sapiens
  CDR3 for alpha chain variable domain of TCR clone 296523 (TRAV3, TRAJ5)
CAVRDLDTGRRALTF

SEQ ID NO: 593046 - protein, 13 aa, Homo sapiens
  CDR3 for beta chain variable domain of TCR clone 296523 (TRBV9, TRBJ2-7)
CASSASDSYGQYF

SEQ ID NO: 593047 - protein, 13 aa, Homo sapiens
  CDR3 for alpha chain variable domain of TCR clone 296524 (TRAV2, TRAJ29)
CAVYSSGNTPLVF

SEQ ID NO: 593048 - protein, 14 aa, Homo sapiens
  CDR3 for beta chain variable domain of TCR clone 296524 (TRBV7-9, TRBJ1-1)
CASSLGGLKTEAFF

SEQ ID NO: 593049 - protein, 13 aa, Homo sapiens
  CDR3 for alpha chain variable domain of TCR clone 296525 (TRAV23/DV6, TRAJ21)
CAASIGNFNKFYF

SEQ ID NO: 593050 - protein, 17 aa, Homo sapiens
  CDR3 for beta chain variable domain of TCR clone 296525 (TRBV20-1, TRBJ2-2)
CSASGSGQGGLTGELFF

SEQ ID NO: 593051 - protein, 13 aa, Homo sapiens
  CDR3 for alpha chain variable domain of TCR clone 296526 (TRAV1-2, TRAJ9)
CAALNTGGFNTIF

SEQ ID NO: 593052 - protein, 13 aa, Homo sapiens
  CDR3 for beta chain variable domain of TCR clone 296526 (TRBV19, TRBJ1-2)
CASSVAGQDGYTF

SEQ ID NO: 593053 - protein, 14 aa, Homo sapiens
  CDR3 for alpha chain variable domain of TCR clone 296527 (TRAV13-2, TRAJ32)
CAESLGGATNKLIF

SEQ ID NO: 593054 - protein, 15 aa, Homo sapiens
  CDR3 for beta chain variable domain of TCR clone 296527 (TRBV20-1, TRBJ1-2)
CSAGDSRGRNYGYTF

SEQ ID NO: 593055 - protein, 15 aa, Homo sapiens
  CDR3 for alpha chain variable domain of TCR clone 296528 (TRAV12-1, TRAJ41)
CVVNSRAGSGYALNF

SEQ ID NO: 593056 - protein, 15 aa, Homo sapiens
  CDR3 for beta chain variable domain of TCR clone 296528 (TRBV13, TRBJ1-2)
CASSLGRQPGYGYTF

SEQ ID NO: 593057 - protein, 12 aa, Homo sapiens
  CDR3 for alpha chain variable domain of TCR clone 296529 (TRAV12-3, TRAJ17)
CAMTLTGNKPTF

SEQ ID NO: 593058 - protein, 15 aa, Homo sapiens
  CDR3 for beta chain variable domain of TCR clone 296529 (TRBV20-1, TRBJ2-7)
CSARARVSGMDEQYF

SEQ ID NO: 593059 - protein, 15 aa, Homo sapiens
  CDR3 for alpha chain variable domain of TCR clone 296530 (TRAV14/DV4, TRAJ22)
CNERGPPGSARQLTF

SEQ ID NO: 593060 - protein, 18 aa, Homo sapiens
  CDR3 for beta chain variable domain of TCR clone 296530 (TRBV19, TRBJ1-6)
CASSVAPVAGNSHSTLGT

SEQ ID NO: 593061 - protein, 13 aa, Homo sapiens
  CDR3 for alpha chain variable domain of TCR clone 296531 (TRAV12-3, TRAJ20)
CAMSATNDYKLSF

SEQ ID NO: 593062 - protein, 16 aa, Homo sapiens
  CDR3 for beta chain variable domain of TCR clone 296531 (TRBV18, TRBJ2-7)
CASSPYRGGQTYEQYF

SEQ ID NO: 593063 - protein, 14 aa, Homo sapiens
  CDR3 for alpha chain variable domain of TCR clone 296532 (TRAV12-3, TRAJ10)
SHLPLTGGGNKLTF

SEQ ID NO: 593064 - protein, 13 aa, Homo sapiens
  CDR3 for beta chain variable domain of TCR clone 296532 (TRBV4-1, TRBJ2-5)
CASSQGHRETQYF

SEQ ID NO: 593065 - protein, 14 aa, Homo sapiens
  CDR3 for alpha chain variable domain of TCR clone 296533 (TRAV29/DV5, TRAJ48)
CPAMALFGNEKLTF

SEQ ID NO: 593066 - protein, 15 aa, Homo sapiens
  CDR3 for beta chain variable domain of TCR clone 296533 (TRBV7-2, TRBJ2-1)
CASTHGTGIYNEQFF

SEQ ID NO: 593067 - protein, 12 aa, Homo sapiens
  CDR3 for alpha chain variable domain of TCR clone 296534 (TRAV4, TRAJ26)
CLVGDYGQNFVF

SEQ ID NO: 593068 - protein, 16 aa, Homo sapiens
  CDR3 for beta chain variable domain of TCR clone 296534 (TRBV7-2, TRBJ1-2)
CASSSNQDRRGYGDTF

SEQ ID NO: 593069 - protein, 14 aa, Homo sapiens
  CDR3 for alpha chain variable domain of TCR clone 296535 (TRAV1-2, TRAJ16)
CAVNRFSDVLKLLF

SEQ ID NO: 593070 - protein, 16 aa, Homo sapiens
  CDR3 for beta chain variable domain of TCR clone 296535 (TRBV7-3, TRBJ2-2)
CASSLKRGTLSGELFF

SEQ ID NO: 593071 - protein, 22 aa, Homo sapiens
  CDR3 for alpha chain variable domain of TCR clone 296536 (TRAV2, TRAJ9)
CAVGIGVEASKLSLEQEQDYLL

SEQ ID NO: 593072 - protein, 14 aa, Homo sapiens
  CDR3 for beta chain variable domain of TCR clone 296536 (TRBV12-5, TRBJ2-5)
CASGSRTHQETQYF

SEQ ID NO: 593073 - protein, 12 aa, Homo sapiens
  CDR3 for alpha chain variable domain of TCR clone 296537 (TRAV27, TRAJ36)
ASTPAGANNLFF

SEQ ID NO: 593074 - protein, 13 aa, Homo sapiens
  CDR3 for beta chain variable domain of TCR clone 296537 (TRBV7-9, TRBJ2-3)
CASSPGSTDTQYC

SEQ ID NO: 593075 - protein, 12 aa, Homo sapiens
  CDR3 for alpha chain variable domain of TCR clone 296538 (TRAV8-6, TRAJ33)
CAVTDSNYQLIW

SEQ ID NO: 593076 - protein, 15 aa, Homo sapiens
  CDR3 for beta chain variable domain of TCR clone 296538 (TRBV4-3, TRBJ1-2)
CASSRGQGRNYGYSF

SEQ ID NO: 593077 - protein, 11 aa, Homo sapiens
  CDR3 for alpha chain variable domain of TCR clone 296539 (TRAV12-3, TRAJ27)
CAMAMQANQPL

SEQ ID NO: 593078 - protein, 13 aa, Homo sapiens
  CDR3 for beta chain variable domain of TCR clone 296539 (TRBV20-1, TRBJ1-1)
CSARVGGNTEASF

SEQ ID NO: 593079 - protein, 14 aa, Homo sapiens
  CDR3 for alpha chain variable domain of TCR clone 296540 (TRAV3, TRAJ27)
CAVRDDTNAGKSTF

SEQ ID NO: 593080 - protein, 15 aa, Homo sapiens
  CDR3 for beta chain variable domain of TCR clone 296540 (TRBV7-7, TRBJ2-2)
CATSKLAKNAGELFF

SEQ ID NO: 593081 - protein, 16 aa, Homo sapiens
  CDR3 for alpha chain variable domain of TCR clone 296541 (TRAV26-1, TRAJ50)
CIVRALMKTSYDKVIF

SEQ ID NO: 593082 - protein, 15 aa, Homo sapiens
  CDR3 for beta chain variable domain of TCR clone 296541 (TRBV5-1, TRBJ2-7)
CASSLDLTSSYEQYF

SEQ ID NO: 593083 - protein, 13 aa, Homo sapiens
  CDR3 for alpha chain variable domain of TCR clone 296542 (TRAV13-1, TRAJ39)
CAASIWAGEMLTF

SEQ ID NO: 593084 - protein, 15 aa, Homo sapiens
  CDR3 for beta chain variable domain of TCR clone 296542 (TRBV7-9, TRBJ1-1)
CASSLLEQGGTEAFF

SEQ ID NO: 593085 - protein, 20 aa, Homo sapiens
  CDR3 for alpha chain variable domain of TCR clone 296543 (TRAV3, )
CAVRDSKSSDKSVCRLAIPM

SEQ ID NO: 593086 - protein, 13 aa, Homo sapiens
  CDR3 for beta chain variable domain of TCR clone 296543 (TRBV7-3, TRBJ1-1)
CASSQDWGAEAFF

SEQ ID NO: 593087 - protein, 11 aa, Homo sapiens
  CDR3 for alpha chain variable domain of TCR clone 296544 (TRAV12-3, TRAJ43)
CAMSVSNDMRF

SEQ ID NO: 593088 - protein, 20 aa, Homo sapiens
  CDR3 for beta chain variable domain of TCR clone 296544 (TRBV28, TRBJ2-1)
CASTPIGRSPGLAGGKEQFF

SEQ ID NO: 593089 - protein, 14 aa, Homo sapiens
  CDR3 for alpha chain variable domain of TCR clone 296545 (TRAV29/DV5, TRAJ47)
CAASSIEYGNKLVF

SEQ ID NO: 593090 - protein, 14 aa, Homo sapiens
  CDR3 for beta chain variable domain of TCR clone 296545 (TRBV4-1, TRBJ2-5)
CASSRSGSGETQYF

SEQ ID NO: 593091 - protein, 16 aa, Homo sapiens
  CDR3 for alpha chain variable domain of TCR clone 296546 (TRAV12-3, TRAJ53)
CAMSPGSGGSNYTLTF

SEQ ID NO: 593092 - protein, 14 aa, Homo sapiens
  CDR3 for beta chain variable domain of TCR clone 296546 (TRBV4-2, TRBJ2-1)
CASGLDRAYNEQFF

SEQ ID NO: 593093 - protein, 15 aa, Homo sapiens
  CDR3 for alpha chain variable domain of TCR clone 296547 (TRAV25, TRAJ52)
CSGRPGGTSYGKLTF

SEQ ID NO: 593094 - protein, 17 aa, Homo sapiens
  CDR3 for beta chain variable domain of TCR clone 296547 (TRBV7-8, TRBJ2-6)
RASSAGTGGAGANVLTF

SEQ ID NO: 593095 - protein, 15 aa, Homo sapiens
  CDR3 for alpha chain variable domain of TCR clone 296548 (TRAV26-1, TRAJ22)
CIVRVSFWFCKATDL

SEQ ID NO: 593096 - protein, 13 aa, Homo sapiens
  CDR3 for beta chain variable domain of TCR clone 296548 (TRBV7-9, TRBJ1-2)
CASSLKQHYGYTF

SEQ ID NO: 593097 - protein, 14 aa, Homo sapiens
  CDR3 for alpha chain variable domain of TCR clone 296549 (TRAV13-1, TRAJ44)
CAAKATGTASKLTF

SEQ ID NO: 593098 - protein, 17 aa, Homo sapiens
  CDR3 for beta chain variable domain of TCR clone 296549 (TRBV7-3, TRBJ2-3)
RASSLMKRMRGADTQYF

SEQ ID NO: 593099 - protein, 11 aa, Homo sapiens
  CDR3 for alpha chain variable domain of TCR clone 296550 (TRAV12-3, TRAJ27)
CAMANAGKSTF

SEQ ID NO: 593100 - protein, 15 aa, Homo sapiens
  CDR3 for beta chain variable domain of TCR clone 296550 (TRBV28, TRBJ2-3)
CASSPDRQGANTQYF

SEQ ID NO: 593101 - protein, 14 aa, Homo sapiens
  CDR3 for alpha chain variable domain of TCR clone 296551 (TRAV12-2, TRAJ13)
CAVKKTRGYQKFTF

SEQ ID NO: 593102 - protein, 15 aa, Homo sapiens
  CDR3 for beta chain variable domain of TCR clone 296551 (TRBV27, TRBJ2-1)
CASSNGGGSSNEQFF

SEQ ID NO: 593103 - protein, 10 aa, Homo sapiens
  CDR3 for alpha chain variable domain of TCR clone 296552 (TRAV19, TRAJ45)
PGGGADGLTF

SEQ ID NO: 593104 - protein, 15 aa, Homo sapiens
  CDR3 for beta chain variable domain of TCR clone 296552 (TRBV5-4, TRBJ1-1)
CASSSLGWANTEAFF

SEQ ID NO: 593105 - protein, 13 aa, Homo sapiens
  CDR3 for alpha chain variable domain of TCR clone 296553 (TRAV30, TRAJ34)
CGTVGYNIDKLIF

SEQ ID NO: 593106 - protein, 16 aa, Homo sapiens
  CDR3 for beta chain variable domain of TCR clone 296553 (TRBV7-9, TRBJ1-2)
CASSLGFSSGEDGYTF

SEQ ID NO: 593107 - protein, 10 aa, Homo sapiens
  CDR3 for alpha chain variable domain of TCR clone 296554 (TRAV8-4, TRAJ43)
CAVSADDMRF

SEQ ID NO: 593108 - protein, 15 aa, Homo sapiens
  CDR3 for beta chain variable domain of TCR clone 296554 (TRBV5-1, TRBJ2-3)
CACSVTSGSTDTQYF

SEQ ID NO: 593109 - protein, 14 aa, Homo sapiens
  CDR3 for alpha chain variable domain of TCR clone 296555 (TRAV23/DV6, TRAJ24)
CAASLSDSGGKLQF

SEQ ID NO: 593110 - protein, 15 aa, Homo sapiens
  CDR3 for beta chain variable domain of TCR clone 296555 (TRBV19, TRBJ2-4)
CASRGPRRGENIQYF

SEQ ID NO: 593111 - protein, 14 aa, Homo sapiens
  CDR3 for alpha chain variable domain of TCR clone 296556 (TRAV25, TRAJ48)
CAGPGGFGNEKLTF

SEQ ID NO: 593112 - protein, 16 aa, Homo sapiens
  CDR3 for beta chain variable domain of TCR clone 296556 (TRBV5-1, TRBJ2-2)
CASSFGDRPNTGELFF

SEQ ID NO: 593113 - protein, 14 aa, Homo sapiens
  CDR3 for alpha chain variable domain of TCR clone 296557 (TRAV20, TRAJ42)
CAVQAGGSQGNLIF

SEQ ID NO: 593114 - protein, 11 aa, Homo sapiens
  CDR3 for beta chain variable domain of TCR clone 296557 (TRBV7-9, TRBJ2-5)
CASSLGETQYF

SEQ ID NO: 593115 - protein, 16 aa, Homo sapiens
  CDR3 for alpha chain variable domain of TCR clone 296558 (TRAV3, TRAJ28)
CAVLPRSGAGSYQLTF

SEQ ID NO: 593116 - protein, 15 aa, Homo sapiens
  CDR3 for beta chain variable domain of TCR clone 296558 (TRBV7-9, TRBJ2-2)
CASGPLDTFPGELFF

SEQ ID NO: 593117 - protein, 12 aa, Homo sapiens
  CDR3 for alpha chain variable domain of TCR clone 296559 (TRAV1-2, TRAJ33)
CATLDSNYQLIW

SEQ ID NO: 593118 - protein, 13 aa, Homo sapiens
  CDR3 for beta chain variable domain of TCR clone 296559 (TRBV19, TRBJ2-7)
CASRKAGGSEQYF

SEQ ID NO: 593119 - protein, 18 aa, Homo sapiens
  CDR3 for alpha chain variable domain of TCR clone 296560 (TRAV12-3, TRAJ52)
CAMSRTNAGGTSYGKLTF

SEQ ID NO: 593120 - protein, 17 aa, Homo sapiens
  CDR3 for beta chain variable domain of TCR clone 296560 (TRBV7-3, TRBJ2-3)
CASRLMKRMRGADTQYF

SEQ ID NO: 593121 - protein, 14 aa, Homo sapiens
  CDR3 for alpha chain variable domain of TCR clone 296561 (TRAV12-3, TRAJ10)
SHLPLTGGVNKLTF

SEQ ID NO: 593122 - protein, 12 aa, Homo sapiens
  CDR3 for beta chain variable domain of TCR clone 296561 (TRBV29-1, TRBJ1-1)
CSVATPGVEAFF

SEQ ID NO: 593123 - protein, 15 aa, Homo sapiens
  CDR3 for alpha chain variable domain of TCR clone 296562 (TRAV8-3, TRAJ11)
CAVGLLNSGYSTLTF

SEQ ID NO: 593124 - protein, 15 aa, Homo sapiens
  CDR3 for beta chain variable domain of TCR clone 296562 (TRBV10-3, TRBJ2-1)
CAISDVQDRAYEQFF

SEQ ID NO: 593125 - protein, 14 aa, Homo sapiens
  CDR3 for alpha chain variable domain of TCR clone 296563 (TRAV35, TRAJ50)
CAGHRKTSYDKVIF

SEQ ID NO: 593126 - protein, 16 aa, Homo sapiens
  CDR3 for beta chain variable domain of TCR clone 296563 (TRBV5-7, TRBJ2-5)
CASSFGQGGYQETQYF

SEQ ID NO: 593127 - protein, 13 aa, Homo sapiens
  CDR3 for alpha chain variable domain of TCR clone 296564 (TRAV8-6, TRAJ50)
CAVIKTSYDKVIF

SEQ ID NO: 593128 - protein, 15 aa, Homo sapiens
  CDR3 for beta chain variable domain of TCR clone 296564 (TRBV15, TRBJ1-4)
CATSRDMGSYEKLFF

SEQ ID NO: 593129 - protein, 14 aa, Homo sapiens
  CDR3 for alpha chain variable domain of TCR clone 296565 (TRAV35, TRAJ22)
CPGLRPGSARQLTF

SEQ ID NO: 593130 - protein, 13 aa, Homo sapiens
  CDR3 for beta chain variable domain of TCR clone 296565 (TRBV20-1, TRBJ2-7)
CSATHTSGYEQYF

SEQ ID NO: 593131 - protein, 15 aa, Homo sapiens
  CDR3 for alpha chain variable domain of TCR clone 296566 (TRAV3, TRAJ5)
CAERDRKTGRRALTF

SEQ ID NO: 593132 - protein, 15 aa, Homo sapiens
  CDR3 for beta chain variable domain of TCR clone 296566 (TRBV7-8, TRBJ2-1)
CASSLADSLYNEQFF

SEQ ID NO: 593133 - protein, 10 aa, Homo sapiens
  CDR3 for alpha chain variable domain of TCR clone 296567 (TRAV30, TRAJ16)
CGTGGQKLLF

SEQ ID NO: 593134 - protein, 13 aa, Homo sapiens
  CDR3 for beta chain variable domain of TCR clone 296567 (TRBV10-3, TRBJ1-2)
CAISERDSYGYTF

SEQ ID NO: 593135 - protein, 14 aa, Homo sapiens
  CDR3 for alpha chain variable domain of TCR clone 296568 (TRAV4, TRAJ43)
YLVGPMYNNNDMRF

SEQ ID NO: 593136 - protein, 21 aa, Homo sapiens
  CDR3 for beta chain variable domain of TCR clone 296568 (TRBV11-1, TRBJ2-1)
CASSARERLRPEGPSYNEQFF

SEQ ID NO: 593137 - protein, 14 aa, Homo sapiens
  CDR3 for alpha chain variable domain of TCR clone 296569 (TRAV6, TRAJ37)
CALGSQGNTGKLIF

SEQ ID NO: 593138 - protein, 12 aa, Homo sapiens
  CDR3 for beta chain variable domain of TCR clone 296569 (TRBV7-8, TRBJ2-7)
CASSLGDREQYF

SEQ ID NO: 593139 - protein, 16 aa, Homo sapiens
  CDR3 for alpha chain variable domain of TCR clone 296570 (TRAV17, TRAJ53)
CATDGGSGGSNYKLTF

SEQ ID NO: 593140 - protein, 15 aa, Homo sapiens
  CDR3 for beta chain variable domain of TCR clone 296570 (TRBV5-5, TRBJ1-5)
CASSLKGGGEQPQHF

SEQ ID NO: 593141 - protein, 12 aa, Homo sapiens
  CDR3 for alpha chain variable domain of TCR clone 296571 (TRAV16, TRAJ10)
CSRTGGGNKLTF

SEQ ID NO: 593142 - protein, 12 aa, Homo sapiens
  CDR3 for beta chain variable domain of TCR clone 296571 (TRBV7-9, TRBJ1-1)
CASSLEGTEAFF

SEQ ID NO: 593143 - protein, 17 aa, Homo sapiens
  CDR3 for alpha chain variable domain of TCR clone 296572 (TRAV4, TRAJ18)
CLVGERSVGPTLGRPYF

SEQ ID NO: 593144 - protein, 16 aa, Homo sapiens
  CDR3 for beta chain variable domain of TCR clone 296572 (TRBV19, TRBJ2-1)
CASSKAGPSSYNEQFF

SEQ ID NO: 593145 - protein, 17 aa, Homo sapiens
  CDR3 for alpha chain variable domain of TCR clone 296573 (TRAV36/DV7, TRAJ52)
CAVAQRAGGTSYGKLTF

SEQ ID NO: 593146 - protein, 14 aa, Homo sapiens
  CDR3 for beta chain variable domain of TCR clone 296573 (TRBV5-1, TRBJ2-5)
CASSLAGKQETQYF

SEQ ID NO: 593147 - protein, 16 aa, Homo sapiens
  CDR3 for alpha chain variable domain of TCR clone 296574 (TRAV23/DV6, TRAJ48)
CAASGVVNFGNEKLTF

SEQ ID NO: 593148 - protein, 15 aa, Homo sapiens
  CDR3 for beta chain variable domain of TCR clone 296574 (TRBV20-1, TRBJ2-5)
SSAGLAGVSQETQYF

SEQ ID NO: 593149 - protein, 12 aa, Homo sapiens
  CDR3 for alpha chain variable domain of TCR clone 296575 (TRAV8-3, TRAJ26)
CAGDNYGQKFVF

SEQ ID NO: 593150 - protein, 15 aa, Homo sapiens
  CDR3 for beta chain variable domain of TCR clone 296575 (TRBV9, TRBJ1-6)
CASSVAGTGDSPLHF

SEQ ID NO: 593151 - protein, 12 aa, Homo sapiens
  CDR3 for alpha chain variable domain of TCR clone 296576 (TRAV12-3, TRAJ17)
CAMTLTGNKLTF

SEQ ID NO: 593152 - protein, 15 aa, Homo sapiens
  CDR3 for beta chain variable domain of TCR clone 296576 (TRBV11-2, TRBJ2-2)
CASSSDRVNVGELFF

SEQ ID NO: 593153 - protein, 16 aa, Homo sapiens
  CDR3 for alpha chain variable domain of TCR clone 296577 (TRAV12-3, TRAJ53)
CAMSPGSGGSNIKLTF

SEQ ID NO: 593154 - protein, 11 aa, Homo sapiens
  CDR3 for beta chain variable domain of TCR clone 296577 (TRBV29-1, TRBJ2-5)
CSEDRTGTQYF

SEQ ID NO: 593155 - protein, 12 aa, Homo sapiens
  CDR3 for alpha chain variable domain of TCR clone 296578 (TRAV12-2, TRAJ43)
CAVNVNNNDMRF

SEQ ID NO: 593156 - protein, 14 aa, Homo sapiens
  CDR3 for beta chain variable domain of TCR clone 296578 (TRBV12-5, TRBJ2-5)
CAIGSRTHQETQYF

SEQ ID NO: 593157 - protein, 12 aa, Homo sapiens
  CDR3 for alpha chain variable domain of TCR clone 296579 (TRAV2, TRAJ9)
CAVGAGGFKTIF

SEQ ID NO: 593158 - protein, 14 aa, Homo sapiens
  CDR3 for beta chain variable domain of TCR clone 296579 (TRBV6-1, TRBJ1-3)
YASVQGGGGNTIYF

SEQ ID NO: 593159 - protein, 12 aa, Homo sapiens
  CDR3 for alpha chain variable domain of TCR clone 296580 (TRAV12-3, TRAJ20)
CAMVRGDYKLSF

SEQ ID NO: 593160 - protein, 12 aa, Homo sapiens
  CDR3 for beta chain variable domain of TCR clone 296580 (TRBV6-1, TRBJ2-7)
CASSDDSYEQYF

SEQ ID NO: 593161 - protein, 14 aa, Homo sapiens
  CDR3 for alpha chain variable domain of TCR clone 296581 (TRAV3, TRAJ22)
CAVRDYGSARQLTF

SEQ ID NO: 593162 - protein, 13 aa, Homo sapiens
  CDR3 for beta chain variable domain of TCR clone 296581 (TRBV11-2, TRBJ2-5)
CASGHGAKVTQYF

SEQ ID NO: 593163 - protein, 13 aa, Homo sapiens
  CDR3 for alpha chain variable domain of TCR clone 296582 (TRAV29/DV5, TRAJ31)
CAASRNNNARLMF

SEQ ID NO: 593164 - protein, 12 aa, Homo sapiens
  CDR3 for beta chain variable domain of TCR clone 296582 (TRBV19, TRBJ2-1)
CASSRQGAEQFF

SEQ ID NO: 593165 - protein, 15 aa, Homo sapiens
  CDR3 for alpha chain variable domain of TCR clone 296583 (TRAV6, TRAJ13)
CALGGDSGGYQKVTF

SEQ ID NO: 593166 - protein, 12 aa, Homo sapiens
  CDR3 for beta chain variable domain of TCR clone 296583 (TRBV7-3, TRBJ2-1)
CASSFQSGPQFF

SEQ ID NO: 593167 - protein, 14 aa, Homo sapiens
  CDR3 for alpha chain variable domain of TCR clone 296584 (TRAV1-2, TRAJ16)
CAVNRFSDGQKLPF

SEQ ID NO: 593168 - protein, 15 aa, Homo sapiens
  CDR3 for beta chain variable domain of TCR clone 296584 (TRBV11-2, TRBJ1-2)
CASSLEGVQRNGYTF

SEQ ID NO: 593169 - protein, 14 aa, Homo sapiens
  CDR3 for alpha chain variable domain of TCR clone 296585 (TRAV13-1, TRAJ3)
CAASKSSSASKIIF

SEQ ID NO: 593170 - protein, 13 aa, Homo sapiens
  CDR3 for beta chain variable domain of TCR clone 296585 (TRBV25-1, TRBJ2-5)
CASSESGGETQYF

SEQ ID NO: 593171 - protein, 15 aa, Homo sapiens
  CDR3 for alpha chain variable domain of TCR clone 296586 (TRAV23/DV6, TRAJ18)
CAARYRGSTLGRLYF

SEQ ID NO: 593172 - protein, 11 aa, Homo sapiens
  CDR3 for beta chain variable domain of TCR clone 296586 (TRBV12-4, TRBJ2-3)
CASSFTDTQYF

SEQ ID NO: 593173 - protein, 14 aa, Homo sapiens
  CDR3 for alpha chain variable domain of TCR clone 296587 (TRAV25, TRAJ48)
CAGPGGFGNEKLTF

SEQ ID NO: 593174 - protein, 16 aa, Homo sapiens
  CDR3 for beta chain variable domain of TCR clone 296587 (TRBV12-4, TRBJ2-7)
CASSLIGGTGTYEQYF

SEQ ID NO: 593175 - protein, 14 aa, Homo sapiens
  CDR3 for alpha chain variable domain of TCR clone 296588 (TRAV12-1, TRAJ43)
CVVNGRSNNNDMSF

SEQ ID NO: 593176 - protein, 13 aa, Homo sapiens
  CDR3 for beta chain variable domain of TCR clone 296588 (TRBV27, TRBJ1-1)
CASSLSIGAEAFF

SEQ ID NO: 593177 - protein, 13 aa, Homo sapiens
  CDR3 for alpha chain variable domain of TCR clone 296589 (TRAV1-1, TRAJ9)
CAAKHTGGFKTIF

SEQ ID NO: 593178 - protein, 12 aa, Homo sapiens
  CDR3 for beta chain variable domain of TCR clone 296589 (TRBV7-8, TRBJ2-7)
CASSLGDREQYF

SEQ ID NO: 593179 - protein, 17 aa, Homo sapiens
  CDR3 for alpha chain variable domain of TCR clone 296590 (TRAV4, )
CLVDIQNPDPAVYQLRD

SEQ ID NO: 593180 - protein, 15 aa, Homo sapiens
  CDR3 for beta chain variable domain of TCR clone 296590 (TRBV20-1, TRBJ1-5)
CSARVCRVVSQPQHF

SEQ ID NO: 593181 - protein, 14 aa, Homo sapiens
  CDR3 for alpha chain variable domain of TCR clone 296591 (TRAV1-2, TRAJ8)
CAVREDTGFQKLVF

SEQ ID NO: 593182 - protein, 15 aa, Homo sapiens
  CDR3 for beta chain variable domain of TCR clone 296591 (TRBV7-9, TRBJ1-4)
CASGARTGGNEKLFF

SEQ ID NO: 593183 - protein, 12 aa, Homo sapiens
  CDR3 for alpha chain variable domain of TCR clone 296592 (TRAV2, TRAJ26)
CAGFPGRLWSEF

SEQ ID NO: 593184 - protein, 13 aa, Homo sapiens
  CDR3 for beta chain variable domain of TCR clone 296592 (TRBV7-9, TRBJ1-2)
CASSLKQNYGYTF

SEQ ID NO: 593185 - protein, 13 aa, Homo sapiens
  CDR3 for alpha chain variable domain of TCR clone 296593 (TRAV3, TRAJ27)
CAVRPLGAGKSTF

SEQ ID NO: 593186 - protein, 18 aa, Homo sapiens
  CDR3 for beta chain variable domain of TCR clone 296593 (TRBV5-5, TRBJ1-5)
CASSLRQVKGSSNQPQHF

SEQ ID NO: 593187 - protein, 12 aa, Homo sapiens
  CDR3 for alpha chain variable domain of TCR clone 296594 (TRAV12-3, TRAJ17)
CSMTHTGNKLTF

SEQ ID NO: 593188 - protein, 15 aa, Homo sapiens
  CDR3 for beta chain variable domain of TCR clone 296594 (TRBV6-4, TRBJ2-7)
CASSDQGPPNYEQYF

SEQ ID NO: 593189 - protein, 12 aa, Homo sapiens
  CDR3 for alpha chain variable domain of TCR clone 296595 (TRAV12-2, TRAJ10)
WGVTGGGNKLTF

SEQ ID NO: 593190 - protein, 13 aa, Homo sapiens
  CDR3 for beta chain variable domain of TCR clone 296595 (TRBV3-1, TRBJ1-1)
CASSPGVITEAFF

SEQ ID NO: 593191 - protein, 13 aa, Homo sapiens
  CDR3 for alpha chain variable domain of TCR clone 296596 (TRAV3, TRAJ21)
CAVREPDFNKFYF

SEQ ID NO: 593192 - protein, 16 aa, Homo sapiens
  CDR3 for beta chain variable domain of TCR clone 296596 (TRBV27, TRBJ1-1)
CASSSRGRTGYTEAFF

SEQ ID NO: 593193 - protein, 19 aa, Homo sapiens
  CDR3 for alpha chain variable domain of TCR clone 296597 (TRAV8-3, TRAJ8)
LSTSVLWDPMNTGFQKLVF

SEQ ID NO: 593194 - protein, 13 aa, Homo sapiens
  CDR3 for beta chain variable domain of TCR clone 296597 (TRBV10-2, TRBJ2-3)
CASSESGVHTQYF

SEQ ID NO: 593195 - protein, 13 aa, Homo sapiens
  CDR3 for alpha chain variable domain of TCR clone 296598 (TRAV20, TRAJ21)
CAVEGYNFNKFYF

SEQ ID NO: 593196 - protein, 14 aa, Homo sapiens
  CDR3 for beta chain variable domain of TCR clone 296598 (TRBV7-3, TRBJ1-1)
CASSRQGGDTEAFF

SEQ ID NO: 593197 - protein, 14 aa, Homo sapiens
  CDR3 for alpha chain variable domain of TCR clone 296599 (TRAV26-1, TRAJ16)
SIVRVPSDGQKLLF

SEQ ID NO: 593198 - protein, 17 aa, Homo sapiens
  CDR3 for beta chain variable domain of TCR clone 296599 (TRBV20-1, TRBJ2-1)
CSASSSGLAGSYNEQFF

SEQ ID NO: 593199 - protein, 17 aa, Homo sapiens
  CDR3 for alpha chain variable domain of TCR clone 296600 (TRAV38-2/DV8, TRAJ38)
CAYRTARGAGNNRKLIW

SEQ ID NO: 593200 - protein, 13 aa, Homo sapiens
  CDR3 for beta chain variable domain of TCR clone 296600 (TRBV6-5, TRBJ2-1)
CASRGRVGNEQFF

SEQ ID NO: 593201 - protein, 14 aa, Homo sapiens
  CDR3 for alpha chain variable domain of TCR clone 296601 (TRAV12-2, TRAJ40)
CAVKTPPGTYKYIF

SEQ ID NO: 593202 - protein, 18 aa, Homo sapiens
  CDR3 for beta chain variable domain of TCR clone 296601 (TRBV20-1, TRBJ2-6)
CSAETTPTHGSGANVLTF

SEQ ID NO: 593203 - protein, 13 aa, Homo sapiens
  CDR3 for alpha chain variable domain of TCR clone 296602 (TRAV8-2, TRAJ34)
CVVSDRRPDKLIF

SEQ ID NO: 593204 - protein, 15 aa, Homo sapiens
  CDR3 for beta chain variable domain of TCR clone 296602 (TRBV20-1, TRBJ2-3)
CSARVVGGSTDTQYF

SEQ ID NO: 593205 - protein, 11 aa, Homo sapiens
  CDR3 for alpha chain variable domain of TCR clone 296603 (TRAV2, TRAJ37)
CAVDNTGKLIF

SEQ ID NO: 593206 - protein, 15 aa, Homo sapiens
  CDR3 for beta chain variable domain of TCR clone 296603 (TRBV9, TRBJ2-1)
CQQRRWRGNYNEQFF

SEQ ID NO: 593207 - protein, 17 aa, Homo sapiens
  CDR3 for alpha chain variable domain of TCR clone 296604 (TRAV3, TRAJ6)
CAVRDGPRAGGSYIPIF

SEQ ID NO: 593208 - protein, 14 aa, Homo sapiens
  CDR3 for beta chain variable domain of TCR clone 296604 (TRBV7-2, TRBJ2-7)
CASSPKTSFYEQYV

SEQ ID NO: 593209 - protein, 12 aa, Homo sapiens
  CDR3 for alpha chain variable domain of TCR clone 296605 (TRAV12-3, TRAJ17)
CAMTLTGNKITF

SEQ ID NO: 593210 - protein, 12 aa, Homo sapiens
  CDR3 for beta chain variable domain of TCR clone 296605 (TRBV12-4, TRBJ2-7)
CASSLGGYEQYF

SEQ ID NO: 593211 - protein, 15 aa, Homo sapiens
  CDR3 for alpha chain variable domain of TCR clone 296606 (TRAV2, TRAJ15)
CAMEDREQAGTALIF

SEQ ID NO: 593212 - protein, 15 aa, Homo sapiens
  CDR3 for beta chain variable domain of TCR clone 296606 (TRBV3-1, TRBJ1-2)
CASSHPGTPGYGYTF

SEQ ID NO: 593213 - protein, 16 aa, Homo sapiens
  CDR3 for alpha chain variable domain of TCR clone 296607 (TRAV30, TRAJ24)
CGTEIVDADSWGKFQL

SEQ ID NO: 593214 - protein, 15 aa, Homo sapiens
  CDR3 for beta chain variable domain of TCR clone 296607 (TRBV7-9, TRBJ1-4)
RASSARTGGNEKLVF

SEQ ID NO: 593215 - protein, 13 aa, Homo sapiens
  CDR3 for alpha chain variable domain of TCR clone 296608 (TRAV27, TRAJ45)
CRSSGGGADGLTF

SEQ ID NO: 593216 - protein, 15 aa, Homo sapiens
  CDR3 for beta chain variable domain of TCR clone 296608 (TRBV20-1, TRBJ2-7)
CSARDRASGMDEQYF

SEQ ID NO: 593217 - protein, 15 aa, Homo sapiens
  CDR3 for alpha chain variable domain of TCR clone 296609 (TRAV2, TRAJ15)
CAVEDRGQAGTALIF

SEQ ID NO: 593218 - protein, 13 aa, Homo sapiens
  CDR3 for beta chain variable domain of TCR clone 296609 (TRBV18, TRBJ2-3)
CASSQSLTDMQYF

SEQ ID NO: 593219 - protein, 12 aa, Homo sapiens
  CDR3 for alpha chain variable domain of TCR clone 296610 (TRAV12-3, TRAJ17)
CVMTLTGNKLTF

SEQ ID NO: 593220 - protein, 14 aa, Homo sapiens
  CDR3 for beta chain variable domain of TCR clone 296610 (TRBV18, TRBJ2-7)
CASSPRGGAYEQYF

SEQ ID NO: 593221 - protein, 13 aa, Homo sapiens
  CDR3 for alpha chain variable domain of TCR clone 296611 (TRAV13-1, TRAJ43)
CAASLSNNNDMRF

SEQ ID NO: 593222 - protein, 14 aa, Homo sapiens
  CDR3 for beta chain variable domain of TCR clone 296611 (TRBV5-1, TRBJ2-5)
CASSLAGKQETQYC

SEQ ID NO: 593223 - protein, 14 aa, Homo sapiens
  CDR3 for alpha chain variable domain of TCR clone 296612 (TRAV35, TRAJ33)
CAGSSQDSNYQLIW

SEQ ID NO: 593224 - protein, 14 aa, Homo sapiens
  CDR3 for beta chain variable domain of TCR clone 296612 (TRBV20-1, TRBJ2-1)
CSTQIGGSANEQFF

SEQ ID NO: 593225 - protein, 16 aa, Homo sapiens
  CDR3 for alpha chain variable domain of TCR clone 296613 (TRAV8-3, TRAJ38)
CAVGASNAGNNRKLIW

SEQ ID NO: 593226 - protein, 15 aa, Homo sapiens
  CDR3 for beta chain variable domain of TCR clone 296613 (TRBV11-3, TRBJ1-3)
CTSSLFGPSGNTIYF

SEQ ID NO: 593227 - protein, 14 aa, Homo sapiens
  CDR3 for alpha chain variable domain of TCR clone 296614 (TRAV12-3, TRAJ10)
CILYTHGRRNKLTF

SEQ ID NO: 593228 - protein, 15 aa, Homo sapiens
  CDR3 for beta chain variable domain of TCR clone 296614 (TRBV7-2, TRBJ1-6)
CASSLGPDRGMPLHF

SEQ ID NO: 593229 - protein, 14 aa, Homo sapiens
  CDR3 for alpha chain variable domain of TCR clone 296615 (TRAV12-2, TRAJ17)
CAVLFKAAGNKLTF

SEQ ID NO: 593230 - protein, 14 aa, Homo sapiens
  CDR3 for beta chain variable domain of TCR clone 296615 (TRBV7-2, TRBJ2-7)
CTSRSQGAAYEQYF

SEQ ID NO: 593231 - protein, 16 aa, Homo sapiens
  CDR3 for alpha chain variable domain of TCR clone 296616 (TRAV13-1, TRAJ13)
CTAFFLGVTRKLPLEL

SEQ ID NO: 593232 - protein, 15 aa, Homo sapiens
  CDR3 for beta chain variable domain of TCR clone 296616 (TRBV7-8, TRBJ2-1)
CASSLADILYNEQFF

SEQ ID NO: 593233 - protein, 15 aa, Homo sapiens
  CDR3 for alpha chain variable domain of TCR clone 296617 (TRAV10, TRAJ6)
CVVRPRTGGSYIPPF

SEQ ID NO: 593234 - protein, 15 aa, Homo sapiens
  CDR3 for beta chain variable domain of TCR clone 296617 (TRBV20-1, TRBJ2-7)
CSARDRVSGMDEQYF

SEQ ID NO: 593235 - protein, 13 aa, Homo sapiens
  CDR3 for alpha chain variable domain of TCR clone 296618 (TRAV21, TRAJ26)
CAVLDNYGQNFVF

SEQ ID NO: 593236 - protein, 16 aa, Homo sapiens
  CDR3 for beta chain variable domain of TCR clone 296618 (TRBV29-1, TRBJ2-2)
YSVETRASGNTGELFF

SEQ ID NO: 593237 - protein, 11 aa, Homo sapiens
  CDR3 for alpha chain variable domain of TCR clone 296619 (TRAV1-1, TRAJ23)
CAVRQGGKLIF

SEQ ID NO: 593238 - protein, 20 aa, Homo sapiens
  CDR3 for beta chain variable domain of TCR clone 296619 (TRBV7-8, TRBJ2-2)
WASSHLFPGPTIHITGELLF

SEQ ID NO: 593239 - protein, 13 aa, Homo sapiens
  CDR3 for alpha chain variable domain of TCR clone 296620 (TRAV35, TRAJ43)
CAGYPYNNNDMRF

SEQ ID NO: 593240 - protein, 15 aa, Homo sapiens
  CDR3 for beta chain variable domain of TCR clone 296620 (TRBV25-1, TRBJ1-4)
CASSKRIATDEKLFF

SEQ ID NO: 593241 - protein, 16 aa, Homo sapiens
  CDR3 for alpha chain variable domain of TCR clone 296621 (TRAV3, TRAJ37)
CAVRGEESGNTGKLIF

SEQ ID NO: 593242 - protein, 13 aa, Homo sapiens
  CDR3 for beta chain variable domain of TCR clone 296621 (TRBV14, TRBJ2-7)
CASSQDRRYEQYF

SEQ ID NO: 593243 - protein, 13 aa, Homo sapiens
  CDR3 for alpha chain variable domain of TCR clone 296622 (TRAV3, TRAJ16)
CAVRDRNGQKLLF

SEQ ID NO: 593244 - protein, 15 aa, Homo sapiens
  CDR3 for beta chain variable domain of TCR clone 296622 (TRBV5-1, TRBJ2-1)
CASSPPRATYNKQFF

SEQ ID NO: 593245 - protein, 15 aa, Homo sapiens
  CDR3 for alpha chain variable domain of TCR clone 296623 (TRAV26-2, TRAJ13)
CILRDLSGGYQKVTF

SEQ ID NO: 593246 - protein, 13 aa, Homo sapiens
  CDR3 for beta chain variable domain of TCR clone 296623 (TRBV18, TRBJ2-2)
CASSPTRGGELFF

SEQ ID NO: 593247 - protein, 13 aa, Homo sapiens
  CDR3 for alpha chain variable domain of TCR clone 296624 (TRAV8-3, TRAJ36)
CAVGATGANNLFF

SEQ ID NO: 593248 - protein, 13 aa, Homo sapiens
  CDR3 for beta chain variable domain of TCR clone 296624 (TRBV4-1, TRBJ2-2)
CASSQENTGELFF

SEQ ID NO: 593249 - protein, 13 aa, Homo sapiens
  CDR3 for alpha chain variable domain of TCR clone 296625 (TRAV27, TRAJ41)
CAGEGSSGYALNF

SEQ ID NO: 593250 - protein, 13 aa, Homo sapiens
  CDR3 for beta chain variable domain of TCR clone 296625 (TRBV27, TRBJ2-7)
CASSFVSSYEQYF

SEQ ID NO: 593251 - protein, 19 aa, Homo sapiens
  CDR3 for alpha chain variable domain of TCR clone 296626 (TRAV26-1, TRAJ22)
CCVLLHRWVFSGSARQLTF

SEQ ID NO: 593252 - protein, 14 aa, Homo sapiens
  CDR3 for beta chain variable domain of TCR clone 296626 (TRBV19, TRBJ2-1)
CASPTFVLSGEQFF

SEQ ID NO: 593253 - protein, 16 aa, Homo sapiens
  CDR3 for alpha chain variable domain of TCR clone 296627 (TRAV38-2/DV8, TRAJ47)
CAYRSGIMEYGNKLVF

SEQ ID NO: 593254 - protein, 14 aa, Homo sapiens
  CDR3 for beta chain variable domain of TCR clone 296627 (TRBV19, TRBJ2-7)
CASSIFAGTYEQYF

SEQ ID NO: 593255 - protein, 15 aa, Homo sapiens
  CDR3 for alpha chain variable domain of TCR clone 296628 (TRAV27, TRAJ38)
CAGRFNAGNNRKLIW

SEQ ID NO: 593256 - protein, 13 aa, Homo sapiens
  CDR3 for beta chain variable domain of TCR clone 296628 (TRBV20-1, TRBJ1-1)
CSAALGGGTEAFF

SEQ ID NO: 593257 - protein, 15 aa, Homo sapiens
  CDR3 for alpha chain variable domain of TCR clone 296629 (TRAV23/DV6, TRAJ18)
CAASHAGSTLGRLYF

SEQ ID NO: 593258 - protein, 17 aa, Homo sapiens
  CDR3 for beta chain variable domain of TCR clone 296629 (TRBV28, TRBJ1-5)
CASSLVGSRGGNQPQHF

SEQ ID NO: 593259 - protein, 13 aa, Homo sapiens
  CDR3 for alpha chain variable domain of TCR clone 296630 (TRAV8-6, TRAJ50)
CAVIKTSYDKVIF

SEQ ID NO: 593260 - protein, 13 aa, Homo sapiens
  CDR3 for beta chain variable domain of TCR clone 296630 (TRBV9, TRBJ2-1)
CASSPSGGNEQFF

SEQ ID NO: 593261 - protein, 13 aa, Homo sapiens
  CDR3 for alpha chain variable domain of TCR clone 296631 (TRAV12-3, TRAJ40)
FAMSYSGTYKYIF

SEQ ID NO: 593262 - protein, 14 aa, Homo sapiens
  CDR3 for beta chain variable domain of TCR clone 296631 (TRBV7-2, TRBJ1-5)
CASSTQGAGQPQHF

SEQ ID NO: 593263 - protein, 19 aa, Homo sapiens
  CDR3 for alpha chain variable domain of TCR clone 296632 (TRAV16, TRAJ26)
CALRLWSEFCLWSRNQIVR

SEQ ID NO: 593264 - protein, 14 aa, Homo sapiens
  CDR3 for beta chain variable domain of TCR clone 296632 (TRBV7-2, TRBJ2-7)
CASRSQGAAYEQYF

SEQ ID NO: 593265 - protein, 13 aa, Homo sapiens
  CDR3 for alpha chain variable domain of TCR clone 296633 (TRAV12-2, TRAJ39)
CALNNNAGNMLTF

SEQ ID NO: 593266 - protein, 13 aa, Homo sapiens
  CDR3 for beta chain variable domain of TCR clone 296633 (TRBV2, TRBJ1-5)
CATAGPGNQPQHF

SEQ ID NO: 593267 - protein, 12 aa, Homo sapiens
  CDR3 for alpha chain variable domain of TCR clone 296634 (TRAV13-1, TRAJ15)
CAASQAGTSLIF

SEQ ID NO: 593268 - protein, 14 aa, Homo sapiens
  CDR3 for beta chain variable domain of TCR clone 296634 (TRBV19, TRBJ2-2)
CASSTLHRSGELFF

SEQ ID NO: 593269 - protein, 14 aa, Homo sapiens
  CDR3 for alpha chain variable domain of TCR clone 296635 (TRAV38-1, TRAJ45)
CAYYSGGGADGLTF

SEQ ID NO: 593270 - protein, 14 aa, Homo sapiens
  CDR3 for beta chain variable domain of TCR clone 296635 (TRBV4-1, TRBJ2-7)
CASRLTSGSYEQYF

SEQ ID NO: 593271 - protein, 13 aa, Homo sapiens
  CDR3 for alpha chain variable domain of TCR clone 296636 (TRAV27, TRAJ29)
CAGAHSGNTPLVF

SEQ ID NO: 593272 - protein, 12 aa, Homo sapiens
  CDR3 for beta chain variable domain of TCR clone 296636 (TRBV7-8, TRBJ2-7)
CASSLAGYEQYF

SEQ ID NO: 593273 - protein, 11 aa, Homo sapiens
  CDR3 for alpha chain variable domain of TCR clone 296637 (TRAV4, TRAJ28)
CLVGYNRAETL

SEQ ID NO: 593274 - protein, 16 aa, Homo sapiens
  CDR3 for beta chain variable domain of TCR clone 296637 (TRBV20-1, TRBJ2-7)
CSAKTGTGATSSTSGR

SEQ ID NO: 593275 - protein, 11 aa, Homo sapiens
  CDR3 for alpha chain variable domain of TCR clone 296638 (TRAV12-1, TRAJ34)
CVVNKGGELIF

SEQ ID NO: 593276 - protein, 15 aa, Homo sapiens
  CDR3 for beta chain variable domain of TCR clone 296638 (TRBV9, TRBJ1-6)
CASSVAGTGDSPLHF

SEQ ID NO: 593277 - protein, 22 aa, Homo sapiens
  CDR3 for alpha chain variable domain of TCR clone 296639 (TRAV4, )
CLVGPHNYDIQNPDPAVNQLRD

SEQ ID NO: 593278 - protein, 17 aa, Homo sapiens
  CDR3 for beta chain variable domain of TCR clone 296639 (TRBV24-1, TRBJ2-1)
CATSDVSTSGTYNEQFF

SEQ ID NO: 593279 - protein, 14 aa, Homo sapiens
  CDR3 for alpha chain variable domain of TCR clone 296640 (TRAV13-2, TRAJ17)
CAENSKAAGNKLTF

SEQ ID NO: 593280 - protein, 13 aa, Homo sapiens
  CDR3 for beta chain variable domain of TCR clone 296640 (TRBV12-4, TRBJ1-2)
CASSVRQGKGYTF

SEQ ID NO: 593281 - protein, 12 aa, Homo sapiens
  CDR3 for alpha chain variable domain of TCR clone 296641 (TRAV13-2, TRAJ8)
CAPWLGFQKLVF

SEQ ID NO: 593282 - protein, 16 aa, Homo sapiens
  CDR3 for beta chain variable domain of TCR clone 296641 (TRBV28, TRBJ1-4)
CASSPPYRGRSEKLFF

SEQ ID NO: 593283 - protein, 14 aa, Homo sapiens
  CDR3 for alpha chain variable domain of TCR clone 296642 (TRAV29/DV5, TRAJ32)
CAAAYGGATNKPIF

SEQ ID NO: 593284 - protein, 14 aa, Homo sapiens
  CDR3 for beta chain variable domain of TCR clone 296642 (TRBV20-1, TRBJ1-1)
CSAQTRIGGTEAFF

SEQ ID NO: 593285 - protein, 15 aa, Homo sapiens
  CDR3 for alpha chain variable domain of TCR clone 296643 (TRAV12-3, TRAJ49)
CAMAVTPNTGNQFYF

SEQ ID NO: 593286 - protein, 18 aa, Homo sapiens
  CDR3 for beta chain variable domain of TCR clone 296643 (TRBV4-1, TRBJ1-5)
CASSLVPRGQGLNQPQHF

SEQ ID NO: 593287 - protein, 15 aa, Homo sapiens
  CDR3 for alpha chain variable domain of TCR clone 296644 (TRAV38-1, TRAJ37)
CAFIHGSGNTGKLIF

SEQ ID NO: 593288 - protein, 15 aa, Homo sapiens
  CDR3 for beta chain variable domain of TCR clone 296644 (TRBV11-2, TRBJ2-1)
CASSRNRGLMYEQFF

SEQ ID NO: 593289 - protein, 15 aa, Homo sapiens
  CDR3 for alpha chain variable domain of TCR clone 296645 (TRAV21, TRAJ53)
CATLNSGGSNYELTF

SEQ ID NO: 593290 - protein, 13 aa, Homo sapiens
  CDR3 for beta chain variable domain of TCR clone 296645 (TRBV11-2, TRBJ2-5)
CASSSTGEETQYF

SEQ ID NO: 593291 - protein, 13 aa, Homo sapiens
  CDR3 for alpha chain variable domain of TCR clone 296646 (TRAV21, TRAJ39)
CAASNNAGNVLTF

SEQ ID NO: 593292 - protein, 16 aa, Homo sapiens
  CDR3 for beta chain variable domain of TCR clone 296646 (TRBV7-3, TRBJ2-2)
CASSLKRGTLSGELFF

SEQ ID NO: 593293 - protein, 17 aa, Homo sapiens
  CDR3 for alpha chain variable domain of TCR clone 296647 (TRAV23/DV6, TRAJ57)
CAASSTLSQGGSEKLVV

SEQ ID NO: 593294 - protein, 11 aa, Homo sapiens
  CDR3 for beta chain variable domain of TCR clone 296647 (TRBV11-2, TRBJ2-2)
CASSLPGELFF

SEQ ID NO: 593295 - protein, 10 aa, Homo sapiens
  CDR3 for alpha chain variable domain of TCR clone 296648 (TRAV36/DV7, TRAJ40)
CAVSLRNLQI

SEQ ID NO: 593296 - protein, 13 aa, Homo sapiens
  CDR3 for beta chain variable domain of TCR clone 296648 (TRBV7-7, TRBJ2-2)
CASSLTSAGELFF

SEQ ID NO: 593297 - protein, 14 aa, Homo sapiens
  CDR3 for alpha chain variable domain of TCR clone 296649 (TRAV12-2, TRAJ13)
CAVKKTGGYQKVTF

SEQ ID NO: 593298 - protein, 16 aa, Homo sapiens
  CDR3 for beta chain variable domain of TCR clone 296649 (TRBV7-3, TRBJ2-1)
CASSLSGGVHYNEQFF

SEQ ID NO: 593299 - protein, 17 aa, Homo sapiens
  CDR3 for alpha chain variable domain of TCR clone 296650 (TRAV26-1, TRAJ36)
CIVRPPGDQTGSNNLFF

SEQ ID NO: 593300 - protein, 16 aa, Homo sapiens
  CDR3 for beta chain variable domain of TCR clone 296650 (TRBV19, TRBJ2-1)
CASSKAGPSSYNEQFF

SEQ ID NO: 593301 - protein, 14 aa, Homo sapiens
  CDR3 for alpha chain variable domain of TCR clone 296651 (TRAV13-1, TRAJ35)
CAAGKGGFGNVLHC

SEQ ID NO: 593302 - protein, 13 aa, Homo sapiens
  CDR3 for beta chain variable domain of TCR clone 296651 (TRBV7-3, TRBJ1-1)
CASSQDWGAEALF

SEQ ID NO: 593303 - protein, 18 aa, Homo sapiens
  CDR3 for alpha chain variable domain of TCR clone 296652 (TRAV21, TRAJ52)
CAVRPSPAGGTSYGKLTF

SEQ ID NO: 593304 - protein, 17 aa, Homo sapiens
  CDR3 for beta chain variable domain of TCR clone 296652 (TRBV13, TRBJ2-3)
CQQPLQGSGGGRNTQYF

SEQ ID NO: 593305 - protein, 11 aa, Homo sapiens
  CDR3 for alpha chain variable domain of TCR clone 296653 (TRAV12-1, TRAJ21)
CVVYNSNKFYF

SEQ ID NO: 593306 - protein, 14 aa, Homo sapiens
  CDR3 for beta chain variable domain of TCR clone 296653 (TRBV19, TRBJ2-7)
CASSMGQGAIEQYF

SEQ ID NO: 593307 - protein, 12 aa, Homo sapiens
  CDR3 for alpha chain variable domain of TCR clone 296654 (TRAV12-3, TRAJ17)
CAMTLTGNKLTF

SEQ ID NO: 593308 - protein, 14 aa, Homo sapiens
  CDR3 for beta chain variable domain of TCR clone 296654 (TRBV19, TRBJ2-1)
CASPTFVLSGGQFF

SEQ ID NO: 593309 - protein, 12 aa, Homo sapiens
  CDR3 for alpha chain variable domain of TCR clone 296655 (TRAV25, TRAJ11)
CAGSVWDTAPHL

SEQ ID NO: 593310 - protein, 14 aa, Homo sapiens
  CDR3 for beta chain variable domain of TCR clone 296655 (TRBV7-6, TRBJ2-3)
CASSLGTVTDTQYF

SEQ ID NO: 593311 - protein, 12 aa, Homo sapiens
  CDR3 for alpha chain variable domain of TCR clone 296656 (TRAV14/DV4, TRAJ9)
CAMNPGGFKTIF

SEQ ID NO: 593312 - protein, 16 aa, Homo sapiens
  CDR3 for beta chain variable domain of TCR clone 296656 (TRBV28, TRBJ2-5)
CASSFSPAEGWETQYF

SEQ ID NO: 593313 - protein, 17 aa, Homo sapiens
  CDR3 for alpha chain variable domain of TCR clone 296657 (TRAV3, TRAJ6)
CAVRDGPRAGGSYKLTF

SEQ ID NO: 593314 - protein, 20 aa, Homo sapiens
  CDR3 for beta chain variable domain of TCR clone 296657 (TRBV28, TRBJ2-1)
CASTPIGRSPGLAGGNEQFF

SEQ ID NO: 593315 - protein, 14 aa, Homo sapiens
  CDR3 for alpha chain variable domain of TCR clone 296658 (TRAV12-2, TRAJ13)
YAVKRTGGYQKVTF

SEQ ID NO: 593316 - protein, 15 aa, Homo sapiens
  CDR3 for beta chain variable domain of TCR clone 296658 (TRBV27, TRBJ2-1)
CASSNGGGSSNEQFF

SEQ ID NO: 593317 - protein, 15 aa, Homo sapiens
  CDR3 for alpha chain variable domain of TCR clone 296659 (TRAV38-2/DV8, TRAJ48)
CAYRIGGFGNEKLTF

SEQ ID NO: 593318 - protein, 16 aa, Homo sapiens
  CDR3 for beta chain variable domain of TCR clone 296659 (TRBV28, TRBJ2-7)
CASSPWVATGDLSQYF

SEQ ID NO: 593319 - protein, 14 aa, Homo sapiens
  CDR3 for alpha chain variable domain of TCR clone 296660 (TRAV8-4, TRAJ9)
CAVRINTGGFKTVF

SEQ ID NO: 593320 - protein, 15 aa, Homo sapiens
  CDR3 for beta chain variable domain of TCR clone 296660 (TRBV20-1, TRBJ2-7)
CSARDRVSGMDEQYF

SEQ ID NO: 593321 - protein, 17 aa, Homo sapiens
  CDR3 for alpha chain variable domain of TCR clone 296661 (TRAV3, TRAJ6)
CAVRDGPRAGGGYIPPF

SEQ ID NO: 593322 - protein, 13 aa, Homo sapiens
  CDR3 for beta chain variable domain of TCR clone 296661 (TRBV12-5, TRBJ2-3)
CASGDRQSDTQYF

SEQ ID NO: 593323 - protein, 17 aa, Homo sapiens
  CDR3 for alpha chain variable domain of TCR clone 296662 (TRAV4, TRAJ42)
CLVGVLNYGGSQGNLIF

SEQ ID NO: 593324 - protein, 15 aa, Homo sapiens
  CDR3 for beta chain variable domain of TCR clone 296662 (TRBV20-1, TRBJ2-7)
CSAESGTSGAYEQYF

SEQ ID NO: 593325 - protein, 12 aa, Homo sapiens
  CDR3 for alpha chain variable domain of TCR clone 296663 (TRAV20, TRAJ37)
CALPSTTGKLIF

SEQ ID NO: 593326 - protein, 14 aa, Homo sapiens
  CDR3 for beta chain variable domain of TCR clone 296663 (TRBV19, TRBJ2-1)
CASPTFVLSGEQFF

SEQ ID NO: 593327 - protein, 12 aa, Homo sapiens
  CDR3 for alpha chain variable domain of TCR clone 296664 (TRAV26-1, TRAJ53)
CIEGGSNYKLTF

SEQ ID NO: 593328 - protein, 15 aa, Homo sapiens
  CDR3 for beta chain variable domain of TCR clone 296664 (TRBV5-1, TRBJ2-1)
CASSPPRAPYNEQFF

SEQ ID NO: 593329 - protein, 13 aa, Homo sapiens
  CDR3 for alpha chain variable domain of TCR clone 296665 (TRAV8-3, TRAJ34)
CAVGPYNTDTLIF

SEQ ID NO: 593330 - protein, 15 aa, Homo sapiens
  CDR3 for beta chain variable domain of TCR clone 296665 (TRBV11-2, TRBJ1-2)
CASSLEGVQRNGYTF

SEQ ID NO: 593331 - protein, 14 aa, Homo sapiens
  CDR3 for alpha chain variable domain of TCR clone 296666 (TRAV16, TRAJ33)
CALSAMDSNYQLIW

SEQ ID NO: 593332 - protein, 15 aa, Homo sapiens
  CDR3 for beta chain variable domain of TCR clone 296666 (TRBV28, TRBJ2-7)
CSSSLEAYPIYEQYF

SEQ ID NO: 593333 - protein, 17 aa, Homo sapiens
  CDR3 for alpha chain variable domain of TCR clone 296667 (TRAV3, TRAJ5)
CAVRDGPRAGGSCIPTF

SEQ ID NO: 593334 - protein, 12 aa, Homo sapiens
  CDR3 for beta chain variable domain of TCR clone 296667 (TRBV28, TRBJ2-3)
CASSLYRDTQYF

SEQ ID NO: 593335 - protein, 15 aa, Homo sapiens
  CDR3 for alpha chain variable domain of TCR clone 296668 (TRAV29/DV5, TRAJ53)
CAASASGGSNYKLTF

SEQ ID NO: 593336 - protein, 16 aa, Homo sapiens
  CDR3 for beta chain variable domain of TCR clone 296668 (TRBV6-1, TRBJ2-5)
CASSETLDRGAETQYF

SEQ ID NO: 593337 - protein, 15 aa, Homo sapiens
  CDR3 for alpha chain variable domain of TCR clone 296669 (TRAV8-3, TRAJ45)
CASSYSVGGADGLTF

SEQ ID NO: 593338 - protein, 13 aa, Homo sapiens
  CDR3 for beta chain variable domain of TCR clone 296669 (TRBV12-5, TRBJ2-3)
CASGDRQSDTQYF

SEQ ID NO: 593339 - protein, 13 aa, Homo sapiens
  CDR3 for alpha chain variable domain of TCR clone 296670 (TRAV8-3, TRAJ40)
CAVVVSGTYKYIF

SEQ ID NO: 593340 - protein, 15 aa, Homo sapiens
  CDR3 for beta chain variable domain of TCR clone 296670 (TRBV7-2, TRBJ2-1)
CASRNTGSSYNEQFF

SEQ ID NO: 593341 - protein, 22 aa, Homo sapiens
  CDR3 for alpha chain variable domain of TCR clone 296671 (TRAV3, TRAJ38)
CAVRDCLNAGNNHIQNPDPAVY

SEQ ID NO: 593342 - protein, 13 aa, Homo sapiens
  CDR3 for beta chain variable domain of TCR clone 296671 (TRBV12-4, TRBJ1-1)
CASSFGEDTEAFF

SEQ ID NO: 593343 - protein, 17 aa, Homo sapiens
  CDR3 for alpha chain variable domain of TCR clone 296672 (TRAV1-2, TRAJ8)
CAVRDPDENTGFQKLVF

SEQ ID NO: 593344 - protein, 16 aa, Homo sapiens
  CDR3 for beta chain variable domain of TCR clone 296672 (TRBV7-9, TRBJ2-2)
CASSGFGGANTGELVF

SEQ ID NO: 593345 - protein, 12 aa, Homo sapiens
  CDR3 for alpha chain variable domain of TCR clone 296673 (TRAV12-3, TRAJ17)
CAMTLTGNKLTF

SEQ ID NO: 593346 - protein, 14 aa, Homo sapiens
  CDR3 for beta chain variable domain of TCR clone 296673 (TRBV7-2, TRBJ2-7)
CASSPETSFYEQYF

SEQ ID NO: 593347 - protein, 14 aa, Homo sapiens
  CDR3 for alpha chain variable domain of TCR clone 296674 (TRAV1-2, TRAJ4)
CAVRSPGGYDKLIF

SEQ ID NO: 593348 - protein, 16 aa, Homo sapiens
  CDR3 for beta chain variable domain of TCR clone 296674 (TRBV20-1, TRBJ2-3)
CSAASGRGVSTDTQYF

SEQ ID NO: 593349 - protein, 16 aa, Homo sapiens
  CDR3 for alpha chain variable domain of TCR clone 296675 (TRAV3, TRAJ5)
CAVRNLMDTGRRALNF

SEQ ID NO: 593350 - protein, 16 aa, Homo sapiens
  CDR3 for beta chain variable domain of TCR clone 296675 (TRBV4-2, TRBJ2-7)
CASSQEGLANSYEQYF

SEQ ID NO: 593351 - protein, 11 aa, Homo sapiens
  CDR3 for alpha chain variable domain of TCR clone 296676 (TRAV35, TRAJ30)
CSGPGDDKIIF

SEQ ID NO: 593352 - protein, 12 aa, Homo sapiens
  CDR3 for beta chain variable domain of TCR clone 296676 (TRBV27, TRBJ2-1)
CASRGFYNEQFF

SEQ ID NO: 593353 - protein, 14 aa, Homo sapiens
  CDR3 for alpha chain variable domain of TCR clone 296677 (TRAV27, TRAJ49)
CAGRPEGTGNQVYF

SEQ ID NO: 593354 - protein, 15 aa, Homo sapiens
  CDR3 for beta chain variable domain of TCR clone 296677 (TRBV19, TRBJ2-1)
CASSIQATSYNEQFF

SEQ ID NO: 593355 - protein, 12 aa, Homo sapiens
  CDR3 for alpha chain variable domain of TCR clone 296678 (TRAV27, TRAJ9)
CAGESGGFKTIF

SEQ ID NO: 593356 - protein, 18 aa, Homo sapiens
  CDR3 for beta chain variable domain of TCR clone 296678 (TRBV10-2, TRBJ2-2)
CISAPAGHRQPDAGELFF

SEQ ID NO: 593357 - protein, 11 aa, Homo sapiens
  CDR3 for alpha chain variable domain of TCR clone 296679 (TRAV17, TRAJ43)
CATPRSNDMRF

SEQ ID NO: 593358 - protein, 12 aa, Homo sapiens
  CDR3 for beta chain variable domain of TCR clone 296679 (TRBV24-1, TRBJ1-1)
CATLYPDTEAFF

SEQ ID NO: 593359 - protein, 14 aa, Homo sapiens
  CDR3 for alpha chain variable domain of TCR clone 296680 (TRAV12-1, TRAJ42)
CVVIYVGSQGNLIF

SEQ ID NO: 593360 - protein, 13 aa, Homo sapiens
  CDR3 for beta chain variable domain of TCR clone 296680 (TRBV12-4, TRBJ1-2)
CASSLRQGKGYTF

SEQ ID NO: 593361 - protein, 14 aa, Homo sapiens
  CDR3 for alpha chain variable domain of TCR clone 296681 (TRAV1-2, TRAJ33)
CAVRAPDRNYQLIW

SEQ ID NO: 593362 - protein, 15 aa, Homo sapiens
  CDR3 for beta chain variable domain of TCR clone 296681 (TRBV10-3, TRBJ2-3)
CAISLTSGGTDTQYF

SEQ ID NO: 593363 - protein, 13 aa, Homo sapiens
  CDR3 for alpha chain variable domain of TCR clone 296682 (TRAV21, TRAJ20)
CAVGLRVDYKLSF

SEQ ID NO: 593364 - protein, 17 aa, Homo sapiens
  CDR3 for beta chain variable domain of TCR clone 296682 (TRBV28, TRBJ2-1)
CASSSARQALTYNEQFF

SEQ ID NO: 593365 - protein, 12 aa, Homo sapiens
  CDR3 for alpha chain variable domain of TCR clone 296683 (TRAV12-3, TRAJ17)
CAMTLTGNTLTF

SEQ ID NO: 593366 - protein, 15 aa, Homo sapiens
  CDR3 for beta chain variable domain of TCR clone 296683 (TRBV20-1, TRBJ2-7)
CSDRDRVSGMDEQYF

SEQ ID NO: 593367 - protein, 16 aa, Homo sapiens
  CDR3 for alpha chain variable domain of TCR clone 296684 (TRAV1-2, TRAJ10)
CAVRGVLTGGGNKLTF

SEQ ID NO: 593368 - protein, 19 aa, Homo sapiens
  CDR3 for beta chain variable domain of TCR clone 296684 (TRBV19, TRBJ2-5)
CASSIGQVTDFFLGETQYF

SEQ ID NO: 593369 - protein, 12 aa, Homo sapiens
  CDR3 for alpha chain variable domain of TCR clone 296685 (TRAV12-1, TRAJ40)
CVVYSGTYNYIF

SEQ ID NO: 593370 - protein, 12 aa, Homo sapiens
  CDR3 for beta chain variable domain of TCR clone 296685 (TRBV28, TRBJ2-3)
CASSLYRDTQYF

SEQ ID NO: 593371 - protein, 12 aa, Homo sapiens
  CDR3 for alpha chain variable domain of TCR clone 296686 (TRAV16, TRAJ26)
CASKDGGQNFVF

SEQ ID NO: 593372 - protein, 13 aa, Homo sapiens
  CDR3 for beta chain variable domain of TCR clone 296686 (TRBV25-1, TRBJ1-1)
CANSDRGRAEAFF

SEQ ID NO: 593373 - protein, 15 aa, Homo sapiens
  CDR3 for alpha chain variable domain of TCR clone 296687 (TRAV8-3, TRAJ45)
CASSYSGGGADGLTF

SEQ ID NO: 593374 - protein, 17 aa, Homo sapiens
  CDR3 for beta chain variable domain of TCR clone 296687 (TRBV7-9, TRBJ2-7)
CASSWQGRWREAYEQYF

SEQ ID NO: 593375 - protein, 14 aa, Homo sapiens
  CDR3 for alpha chain variable domain of TCR clone 296688 (TRAV26-1, TRAJ40)
CIVRLLSGTYKYIF

SEQ ID NO: 593376 - protein, 14 aa, Homo sapiens
  CDR3 for beta chain variable domain of TCR clone 296688 (TRBV12-5, TRBJ2-5)
CASGSRTHQETQYF

SEQ ID NO: 593377 - protein, 12 aa, Homo sapiens
  CDR3 for alpha chain variable domain of TCR clone 296689 (TRAV13-1, TRAJ17)
CAARTAGSKLTF

SEQ ID NO: 593378 - protein, 15 aa, Homo sapiens
  CDR3 for beta chain variable domain of TCR clone 296689 (TRBV7-6, TRBJ1-1)
CASSPQGGANTEAFF

SEQ ID NO: 593379 - protein, 16 aa, Homo sapiens
  CDR3 for alpha chain variable domain of TCR clone 296690 (TRAV3, TRAJ10)
CAVRDMRAGGGNKLTF

SEQ ID NO: 593380 - protein, 14 aa, Homo sapiens
  CDR3 for beta chain variable domain of TCR clone 296690 (TRBV19, TRBJ2-1)
CASPTVVLSGEQFF

SEQ ID NO: 593381 - protein, 13 aa, Homo sapiens
  CDR3 for alpha chain variable domain of TCR clone 296691 (TRAV20, TRAJ31)
CAVQAWNNARLMF

SEQ ID NO: 593382 - protein, 12 aa, Homo sapiens
  CDR3 for beta chain variable domain of TCR clone 296691 (TRBV11-2, TRBJ2-2)
STSSLGGGELFF

SEQ ID NO: 593383 - protein, 12 aa, Homo sapiens
  CDR3 for alpha chain variable domain of TCR clone 296692 (TRAV12-3, TRAJ17)
CAMTLTGNKLTF

SEQ ID NO: 593384 - protein, 15 aa, Homo sapiens
  CDR3 for beta chain variable domain of TCR clone 296692 (TRBV5-5, TRBJ1-5)
CASSSTPGSNQPQHF

SEQ ID NO: 593385 - protein, 14 aa, Homo sapiens
  CDR3 for alpha chain variable domain of TCR clone 296693 (TRAV12-3, TRAJ58)
CAMNTETSGSSLTF

SEQ ID NO: 593386 - protein, 13 aa, Homo sapiens
  CDR3 for beta chain variable domain of TCR clone 296693 (TRBV27, TRBJ2-3)
CASSWGRTDTQYF

SEQ ID NO: 593387 - protein, 17 aa, Homo sapiens
  CDR3 for alpha chain variable domain of TCR clone 296694 (TRAV3, TRAJ38)
CAVRDCLNAGNNRKLIW

SEQ ID NO: 593388 - protein, 12 aa, Homo sapiens
  CDR3 for beta chain variable domain of TCR clone 296694 (TRBV12-4, TRBJ2-7)
CASSLGSYEQYF

SEQ ID NO: 593389 - protein, 13 aa, Homo sapiens
  CDR3 for alpha chain variable domain of TCR clone 296695 (TRAV13-1, TRAJ39)
CAASIWAGNIFTF

SEQ ID NO: 593390 - protein, 15 aa, Homo sapiens
  CDR3 for beta chain variable domain of TCR clone 296695 (TRBV7-9, TRBJ1-1)
CASSLLEQGGNEAFF

SEQ ID NO: 593391 - protein, 13 aa, Homo sapiens
  CDR3 for alpha chain variable domain of TCR clone 296696 (TRAV12-1, TRAJ7)
CVVNMRGNNRLAF

SEQ ID NO: 593392 - protein, 15 aa, Homo sapiens
  CDR3 for beta chain variable domain of TCR clone 296696 (TRBV27, TRBJ2-3)
CGSSLGLAATDTQYF

SEQ ID NO: 593393 - protein, 15 aa, Homo sapiens
  CDR3 for alpha chain variable domain of TCR clone 296697 (TRAV25, TRAJ52)
CAGRPGGTSYGKLTF

SEQ ID NO: 593394 - protein, 13 aa, Homo sapiens
  CDR3 for beta chain variable domain of TCR clone 296697 (TRBV11-2, TRBJ1-3)
CASSLEPVNTMYF

SEQ ID NO: 593395 - protein, 15 aa, Homo sapiens
  CDR3 for alpha chain variable domain of TCR clone 296698 (TRAV8-3, TRAJ35)
CAVGATIGFGNVLHC

SEQ ID NO: 593396 - protein, 11 aa, Homo sapiens
  CDR3 for beta chain variable domain of TCR clone 296698 (TRBV24-1, TRBJ2-1)
CATSIGETQYF

SEQ ID NO: 593397 - protein, 14 aa, Homo sapiens
  CDR3 for alpha chain variable domain of TCR clone 296699 (TRAV30, TRAJ33)
CGTVAPRSNYQLIW

SEQ ID NO: 593398 - protein, 14 aa, Homo sapiens
  CDR3 for beta chain variable domain of TCR clone 296699 (TRBV7-9, TRBJ2-3)
CASSLEDGTDTQYF

SEQ ID NO: 593399 - protein, 14 aa, Homo sapiens
  CDR3 for alpha chain variable domain of TCR clone 296700 (TRAV12-2, TRAJ44)
CAVNPAGTASKLTF

SEQ ID NO: 593400 - protein, 15 aa, Homo sapiens
  CDR3 for beta chain variable domain of TCR clone 296700 (TRBV7-9, TRBJ1-5)
CASSQGHQPNQPQHF

SEQ ID NO: 593401 - protein, 14 aa, Homo sapiens
  CDR3 for alpha chain variable domain of TCR clone 296701 (TRAV2, TRAJ9)
CAVEDRSGGVKTIF

SEQ ID NO: 593402 - protein, 13 aa, Homo sapiens
  CDR3 for beta chain variable domain of TCR clone 296701 (TRBV7-9, TRBJ1-2)
CASSLKQNYGYTF

SEQ ID NO: 593403 - protein, 18 aa, Homo sapiens
  CDR3 for alpha chain variable domain of TCR clone 296702 (TRAV35, TRAJ28)
CAGHNYPLSGAGSYQLTF

SEQ ID NO: 593404 - protein, 14 aa, Homo sapiens
  CDR3 for beta chain variable domain of TCR clone 296702 (TRBV7-9, TRBJ2-1)
CASSPRDSLYEQFF

SEQ ID NO: 593405 - protein, 14 aa, Homo sapiens
  CDR3 for alpha chain variable domain of TCR clone 296703 (TRAV2, TRAJ22)
CAVGRGGSARQLTF

SEQ ID NO: 593406 - protein, 15 aa, Homo sapiens
  CDR3 for beta chain variable domain of TCR clone 296703 (TRBV24-1, TRBJ2-1)
CATSGSGGFYNEQFF

SEQ ID NO: 593407 - protein, 16 aa, Homo sapiens
  CDR3 for alpha chain variable domain of TCR clone 296704 (TRAV3, TRAJ37)
CAVRVRGSGNTGKLIF

SEQ ID NO: 593408 - protein, 11 aa, Homo sapiens
  CDR3 for beta chain variable domain of TCR clone 296704 (TRBV11-2, TRBJ2-2)
CASSFPGELFF

SEQ ID NO: 593409 - protein, 14 aa, Homo sapiens
  CDR3 for alpha chain variable domain of TCR clone 296705 (TRAV8-4, TRAJ13)
CAVTLPGGYQKVTF

SEQ ID NO: 593410 - protein, 16 aa, Homo sapiens
  CDR3 for beta chain variable domain of TCR clone 296705 (TRBV5-7, TRBJ1-4)
CASSPSGGLKTEKLFF

SEQ ID NO: 593411 - protein, 16 aa, Homo sapiens
  CDR3 for alpha chain variable domain of TCR clone 296706 (TRAV38-1, TRAJ32)
CAFMKGGGGATNKLIF

SEQ ID NO: 593412 - protein, 15 aa, Homo sapiens
  CDR3 for beta chain variable domain of TCR clone 296706 (TRBV9, TRBJ1-6)
CASSVAGTGDSPLHF

SEQ ID NO: 593413 - protein, 11 aa, Homo sapiens
  CDR3 for alpha chain variable domain of TCR clone 296707 (TRAV21, TRAJ9)
CAVPGGFKTIF

SEQ ID NO: 593414 - protein, 12 aa, Homo sapiens
  CDR3 for beta chain variable domain of TCR clone 296707 (TRBV20-1, TRBJ2-3)
CRARVGTDTQYF

SEQ ID NO: 593415 - protein, 14 aa, Homo sapiens
  CDR3 for alpha chain variable domain of TCR clone 296708 (TRAV29/DV5, TRAJ36)
CAARRKTGANNLFF

SEQ ID NO: 593416 - protein, 14 aa, Homo sapiens
  CDR3 for beta chain variable domain of TCR clone 296708 (TRBV11-2, TRBJ1-2)
CASSSGQAGDGYTF

SEQ ID NO: 593417 - protein, 14 aa, Homo sapiens
  CDR3 for alpha chain variable domain of TCR clone 296709 (TRAV38-1, TRAJ45)
CAYYSGGGADGLTF

SEQ ID NO: 593418 - protein, 13 aa, Homo sapiens
  CDR3 for beta chain variable domain of TCR clone 296709 (TRBV19, TRBJ2-3)
CASCDRSGDTQYF

SEQ ID NO: 593419 - protein, 11 aa, Homo sapiens
  CDR3 for alpha chain variable domain of TCR clone 296710 (TRAV3, TRAJ21)
CAVGNCNKFYF

SEQ ID NO: 593420 - protein, 16 aa, Homo sapiens
  CDR3 for beta chain variable domain of TCR clone 296710 (TRBV20-1, TRBJ1-2)
CSASMGQGVANYGYTF

SEQ ID NO: 593421 - protein, 16 aa, Homo sapiens
  CDR3 for alpha chain variable domain of TCR clone 296711 (TRAV26-1, TRAJ6)
CIVRVPRTGGSYMPTF

SEQ ID NO: 593422 - protein, 15 aa, Homo sapiens
  CDR3 for beta chain variable domain of TCR clone 296711 (TRBV10-3, TRBJ2-7)
CAISDMTALSYEQYF

SEQ ID NO: 593423 - protein, 13 aa, Homo sapiens
  CDR3 for alpha chain variable domain of TCR clone 296712 (TRAV12-1, TRAJ11)
CVVTRGGYSTLTF

SEQ ID NO: 593424 - protein, 16 aa, Homo sapiens
  CDR3 for beta chain variable domain of TCR clone 296712 (TRBV3-1, TRBJ2-7)
CASSQGATGVAYEQYF

SEQ ID NO: 593425 - protein, 13 aa, Homo sapiens
  CDR3 for alpha chain variable domain of TCR clone 296713 (TRAV13-1, TRAJ40)
CAASKGGTYKYIF

SEQ ID NO: 593426 - protein, 12 aa, Homo sapiens
  CDR3 for beta chain variable domain of TCR clone 296713 (TRBV11-2, TRBJ2-2)
CASSLGGGELFF

SEQ ID NO: 593427 - protein, 15 aa, Homo sapiens
  CDR3 for alpha chain variable domain of TCR clone 296714 (TRAV26-1, TRAJ29)
CIFRVEGSGNTPLVF

SEQ ID NO: 593428 - protein, 15 aa, Homo sapiens
  CDR3 for beta chain variable domain of TCR clone 296714 (TRBV12-4, TRBJ1-1)
CQQQDRVVANTEAFF

SEQ ID NO: 593429 - protein, 14 aa, Homo sapiens
  CDR3 for alpha chain variable domain of TCR clone 296715 (TRAV26-1, TRAJ49)
CIVRLTNTGNQFSF

SEQ ID NO: 593430 - protein, 11 aa, Homo sapiens
  CDR3 for beta chain variable domain of TCR clone 296715 (TRBV29-1, TRBJ2-5)
CSEDRTGTQYF

SEQ ID NO: 593431 - protein, 17 aa, Homo sapiens
  CDR3 for alpha chain variable domain of TCR clone 296716 (TRAV36/DV7, TRAJ52)
CAVAHRAGGTSYGKLTF

SEQ ID NO: 593432 - protein, 14 aa, Homo sapiens
  CDR3 for beta chain variable domain of TCR clone 296716 (TRBV6-1, TRBJ1-3)
CASVQGGGGNTIYF

SEQ ID NO: 593433 - protein, 15 aa, Homo sapiens
  CDR3 for alpha chain variable domain of TCR clone 296717 (TRAV8-4, TRAJ6)
CAVSSPSGGSYIPTF

SEQ ID NO: 593434 - protein, 15 aa, Homo sapiens
  CDR3 for beta chain variable domain of TCR clone 296717 (TRBV2, TRBJ2-1)
CASSEARSAYNEQFF

SEQ ID NO: 593435 - protein, 13 aa, Homo sapiens
  CDR3 for alpha chain variable domain of TCR clone 296718 (TRAV12-1, TRAJ26)
SATYFYYGQNFVF

SEQ ID NO: 593436 - protein, 15 aa, Homo sapiens
  CDR3 for beta chain variable domain of TCR clone 296718 (TRBV5-1, TRBJ2-6)
CASSLDPSGANVLTF

SEQ ID NO: 593437 - protein, 11 aa, Homo sapiens
  CDR3 for alpha chain variable domain of TCR clone 296719 (TRAV8-6, TRAJ13)
CALGLYQKVTF

SEQ ID NO: 593438 - protein, 15 aa, Homo sapiens
  CDR3 for beta chain variable domain of TCR clone 296719 (TRBV5-1, TRBJ2-7)
CASSLNGGPAREQYF

SEQ ID NO: 593439 - protein, 16 aa, Homo sapiens
  CDR3 for alpha chain variable domain of TCR clone 296720 (TRAV27, TRAJ52)
CAGAGAGGTSYGKLTF

SEQ ID NO: 593440 - protein, 14 aa, Homo sapiens
  CDR3 for beta chain variable domain of TCR clone 296720 (TRBV19, TRBJ2-1)
CASPTFVLSGEQFF

SEQ ID NO: 593441 - protein, 13 aa, Homo sapiens
  CDR3 for alpha chain variable domain of TCR clone 296721 (TRAV3, TRAJ17)
CAVPRAAGNKLTF

SEQ ID NO: 593442 - protein, 13 aa, Homo sapiens
  CDR3 for beta chain variable domain of TCR clone 296721 (TRBV4-1, TRBJ2-2)
CASSQENTGELFF

SEQ ID NO: 593443 - protein, 12 aa, Homo sapiens
  CDR3 for alpha chain variable domain of TCR clone 296722 (TRAV2, TRAJ31)
CAVEDNNARLMY

SEQ ID NO: 593444 - protein, 16 aa, Homo sapiens
  CDR3 for beta chain variable domain of TCR clone 296722 (TRBV10-3, TRBJ2-1)
CAISGVGDGGGGEQFF

SEQ ID NO: 593445 - protein, 15 aa, Homo sapiens
  CDR3 for alpha chain variable domain of TCR clone 296723 (TRAV3, TRAJ13)
CAVRVYSGGYQKVTF

SEQ ID NO: 593446 - protein, 16 aa, Homo sapiens
  CDR3 for beta chain variable domain of TCR clone 296723 (TRBV4-1, TRBJ1-2)
CASSQDAGQVLYGYTF

SEQ ID NO: 593447 - protein, 14 aa, Homo sapiens
  CDR3 for alpha chain variable domain of TCR clone 296724 (TRAV12-2, TRAJ45)
CAVNIGGGADGLTF

SEQ ID NO: 593448 - protein, 13 aa, Homo sapiens
  CDR3 for beta chain variable domain of TCR clone 296724 (TRBV19, TRBJ2-2)
CASSIGSTGELFF

SEQ ID NO: 593449 - protein, 12 aa, Homo sapiens
  CDR3 for alpha chain variable domain of TCR clone 296725 (TRAV8-3, TRAJ20)
WSVGANDYKLSF

SEQ ID NO: 593450 - protein, 16 aa, Homo sapiens
  CDR3 for beta chain variable domain of TCR clone 296725 (TRBV19, TRBJ2-2)
CASRSPGTGATGELFF

SEQ ID NO: 593451 - protein, 23 aa, Homo sapiens
  CDR3 for alpha chain variable domain of TCR clone 296726 (TRAV27, TRAJ3)
TSLQPSLVIQASLRGSSASKIIF

SEQ ID NO: 593452 - protein, 15 aa, Homo sapiens
  CDR3 for beta chain variable domain of TCR clone 296726 (TRBV28, TRBJ1-3)
CASGMGWASGNTIYF

SEQ ID NO: 593453 - protein, 15 aa, Homo sapiens
  CDR3 for alpha chain variable domain of TCR clone 296727 (TRAV1-2, TRAJ17)
CAVRGYGAAGNKLTF

SEQ ID NO: 593454 - protein, 17 aa, Homo sapiens
  CDR3 for beta chain variable domain of TCR clone 296727 (TRBV11-2, TRBJ2-5)
PAAPQGGRERPKETQYF

SEQ ID NO: 593455 - protein, 12 aa, Homo sapiens
  CDR3 for alpha chain variable domain of TCR clone 296728 (TRAV17, TRAJ20)
CATYFNDYKLSF

SEQ ID NO: 593456 - protein, 14 aa, Homo sapiens
  CDR3 for beta chain variable domain of TCR clone 296728 (TRBV25-1, TRBJ1-1)
CASTHLGGNTEAFF

SEQ ID NO: 593457 - protein, 13 aa, Homo sapiens
  CDR3 for alpha chain variable domain of TCR clone 296729 (TRAV12-3, TRAJ9)
CAMRNTGGFKTIF

SEQ ID NO: 593458 - protein, 13 aa, Homo sapiens
  CDR3 for beta chain variable domain of TCR clone 296729 (TRBV27, TRBJ2-1)
CASRTLGGGEQFF

SEQ ID NO: 593459 - protein, 14 aa, Homo sapiens
  CDR3 for alpha chain variable domain of TCR clone 296730 (TRAV13-1, TRAJ9)
CAASALTGGFKTIF

SEQ ID NO: 593460 - protein, 12 aa, Homo sapiens
  CDR3 for beta chain variable domain of TCR clone 296730 (TRBV12-4, TRBJ2-7)
CASSLGGYEQYF

SEQ ID NO: 593461 - protein, 18 aa, Homo sapiens
  CDR3 for alpha chain variable domain of TCR clone 296731 (TRAV26-2, TRAJ33)
CCVLLHPEEPASNCQLIW

SEQ ID NO: 593462 - protein, 13 aa, Homo sapiens
  CDR3 for beta chain variable domain of TCR clone 296731 (TRBV24-1, TRBJ2-2)
CATSDWSTGELFF

SEQ ID NO: 593463 - protein, 14 aa, Homo sapiens
  CDR3 for alpha chain variable domain of TCR clone 296732 (TRAV23/DV6, TRAJ11)
CAASLVSGYSTLTF

SEQ ID NO: 593464 - protein, 13 aa, Homo sapiens
  CDR3 for beta chain variable domain of TCR clone 296732 (TRBV4-1, TRBJ2-5)
CASSLTRGETQYF

SEQ ID NO: 593465 - protein, 17 aa, Homo sapiens
  CDR3 for alpha chain variable domain of TCR clone 296733 (TRAV4, TRAJ22)
CCVLLPRGGGSPRQLTF

SEQ ID NO: 593466 - protein, 14 aa, Homo sapiens
  CDR3 for beta chain variable domain of TCR clone 296733 (TRBV20-1, TRBJ1-1)
CSARAVNGYTEAFF

SEQ ID NO: 593467 - protein, 13 aa, Homo sapiens
  CDR3 for alpha chain variable domain of TCR clone 296734 (TRAV12-1, TRAJ49)
CVVSKSTGNQFYF

SEQ ID NO: 593468 - protein, 15 aa, Homo sapiens
  CDR3 for beta chain variable domain of TCR clone 296734 (TRBV9, TRBJ1-6)
CASSVAGTGDSHLHF

SEQ ID NO: 593469 - protein, 14 aa, Homo sapiens
  CDR3 for alpha chain variable domain of TCR clone 296735 (TRAV17, TRAJ15)
CATAPNQAGTALIF

SEQ ID NO: 593470 - protein, 14 aa, Homo sapiens
  CDR3 for beta chain variable domain of TCR clone 296735 (TRBV19, TRBJ2-7)
CASSMGQGAIEQYS

SEQ ID NO: 593471 - protein, 14 aa, Homo sapiens
  CDR3 for alpha chain variable domain of TCR clone 296736 (TRAV16, TRAJ13)
CSLRRSGGYQKVTF

SEQ ID NO: 593472 - protein, 15 aa, Homo sapiens
  CDR3 for beta chain variable domain of TCR clone 296736 (TRBV6-1, TRBJ1-5)
CASSELREGNQPQHF

SEQ ID NO: 593473 - protein, 11 aa, Homo sapiens
  CDR3 for alpha chain variable domain of TCR clone 296737 (TRAV17, TRAJ43)
CDTPRSNDMRF

SEQ ID NO: 593474 - protein, 15 aa, Homo sapiens
  CDR3 for beta chain variable domain of TCR clone 296737 (TRBV11-2, TRBJ2-1)
CASSLGTSGLNEQFF

SEQ ID NO: 593475 - protein, 16 aa, Homo sapiens
  CDR3 for alpha chain variable domain of TCR clone 296738 (TRAV8-3, TRAJ42)
CAVGEGHGGSQGNLIF

SEQ ID NO: 593476 - protein, 14 aa, Homo sapiens
  CDR3 for beta chain variable domain of TCR clone 296738 (TRBV7-2, TRBJ2-1)
CASSRGGARNEQFF

SEQ ID NO: 593477 - protein, 14 aa, Homo sapiens
  CDR3 for alpha chain variable domain of TCR clone 296739 (TRAV2, TRAJ9)
CAVEDRSGGFKTIF

SEQ ID NO: 593478 - protein, 19 aa, Homo sapiens
  CDR3 for beta chain variable domain of TCR clone 296739 (TRBV25-1, TRBJ2-2)
CAILVYRVDRGRKTGELSF

SEQ ID NO: 593479 - protein, 13 aa, Homo sapiens
  CDR3 for alpha chain variable domain of TCR clone 296740 (TRAV8-3, TRAJ4)
WVFYSGGYNKLIF

SEQ ID NO: 593480 - protein, 16 aa, Homo sapiens
  CDR3 for beta chain variable domain of TCR clone 296740 (TRBV7-8, TRBJ2-3)
CASSTGGQRETDTQYF

SEQ ID NO: 593481 - protein, 14 aa, Homo sapiens
  CDR3 for alpha chain variable domain of TCR clone 296741 (TRAV26-1, TRAJ34)
CIVRVAYNAVKLIF

SEQ ID NO: 593482 - protein, 15 aa, Homo sapiens
  CDR3 for beta chain variable domain of TCR clone 296741 (TRBV7-9, TRBJ1-4)
CAGSRTGGFNEKLFF

SEQ ID NO: 593483 - protein, 13 aa, Homo sapiens
  CDR3 for alpha chain variable domain of TCR clone 296742 (TRAV26-1, TRAJ30)
CIVRVESYDKIIF

SEQ ID NO: 593484 - protein, 15 aa, Homo sapiens
  CDR3 for beta chain variable domain of TCR clone 296742 (TRBV6-1, TRBJ2-3)
CASSERGGITDTQYF

SEQ ID NO: 593485 - protein, 19 aa, Homo sapiens
  CDR3 for alpha chain variable domain of TCR clone 296743 (TRAV26-1, TRAJ52)
CIVRAHRNAGGTSYGRLTF

SEQ ID NO: 593486 - protein, 15 aa, Homo sapiens
  CDR3 for beta chain variable domain of TCR clone 296743 (TRBV12-4, TRBJ2-5)
CASSPSTGLQETQYF

SEQ ID NO: 593487 - protein, 16 aa, Homo sapiens
  CDR3 for alpha chain variable domain of TCR clone 296744 (TRAV20, TRAJ10)
CAVLRGLTGGGNKLTF

SEQ ID NO: 593488 - protein, 14 aa, Homo sapiens
  CDR3 for beta chain variable domain of TCR clone 296744 (TRBV7-2, TRBJ1-2)
CASSQTGSTYGYTF

SEQ ID NO: 593489 - protein, 11 aa, Homo sapiens
  CDR3 for alpha chain variable domain of TCR clone 296745 (TRAV3, TRAJ20)
CAVRPSVTTTS

SEQ ID NO: 593490 - protein, 15 aa, Homo sapiens
  CDR3 for beta chain variable domain of TCR clone 296745 (TRBV6-5, TRBJ2-1)
CASSYDAGAGNGQFF

SEQ ID NO: 593491 - protein, 12 aa, Homo sapiens
  CDR3 for alpha chain variable domain of TCR clone 296746 (TRAV12-3, TRAJ17)
CAMTLTGNKLTF

SEQ ID NO: 593492 - protein, 18 aa, Homo sapiens
  CDR3 for beta chain variable domain of TCR clone 296746 (TRBV23-1, TRBJ2-3)
CISAPAVNRPASTDTQYF

SEQ ID NO: 593493 - protein, 15 aa, Homo sapiens
  CDR3 for alpha chain variable domain of TCR clone 296747 (TRAV13-2, TRAJ42)
CAGLNYGGSQGNLIF

SEQ ID NO: 593494 - protein, 16 aa, Homo sapiens
  CDR3 for beta chain variable domain of TCR clone 296747 (TRBV5-4, TRBJ2-5)
CASSMGLAGGRETQYF

SEQ ID NO: 593495 - protein, 13 aa, Homo sapiens
  CDR3 for alpha chain variable domain of TCR clone 296748 (TRAV17, TRAJ5)
CALRGTGRRALTF

SEQ ID NO: 593496 - protein, 12 aa, Homo sapiens
  CDR3 for beta chain variable domain of TCR clone 296748 (TRBV28, TRBJ2-7)
CASSFSSYEQYF

SEQ ID NO: 593497 - protein, 11 aa, Homo sapiens
  CDR3 for alpha chain variable domain of TCR clone 296749 (TRAV3, TRAJ21)
CAVGNFNKFYF

SEQ ID NO: 593498 - protein, 16 aa, Homo sapiens
  CDR3 for beta chain variable domain of TCR clone 296749 (TRBV19, TRBJ2-1)
CASSKAGPSSYNQQFF

SEQ ID NO: 593499 - protein, 19 aa, Homo sapiens
  CDR3 for alpha chain variable domain of TCR clone 296750 (TRAV3, TRAJ6)
CAVRDRNPCRSGGSYIPTF

SEQ ID NO: 593500 - protein, 15 aa, Homo sapiens
  CDR3 for beta chain variable domain of TCR clone 296750 (TRBV18, TRBJ2-7)
CASSPTFMDSYEQYF

SEQ ID NO: 593501 - protein, 14 aa, Homo sapiens
  CDR3 for alpha chain variable domain of TCR clone 296751 (TRAV23/DV6, TRAJ17)
CAARGRAAGNKLTF

SEQ ID NO: 593502 - protein, 12 aa, Homo sapiens
  CDR3 for beta chain variable domain of TCR clone 296751 (TRBV7-9, TRBJ2-3)
CDSSFITDTQYF

SEQ ID NO: 593503 - protein, 12 aa, Homo sapiens
  CDR3 for alpha chain variable domain of TCR clone 296752 (TRAV10, TRAJ43)
CVVVRVGNDMRF

SEQ ID NO: 593504 - protein, 15 aa, Homo sapiens
  CDR3 for beta chain variable domain of TCR clone 296752 (TRBV7-2, TRBJ2-3)
CASSLAGAFIDTQYF

SEQ ID NO: 593505 - protein, 22 aa, Homo sapiens
  CDR3 for alpha chain variable domain of TCR clone 296753 (TRAV12-2, TRAJ53)
SPVIQPPTSVPPILSSNYKLTF

SEQ ID NO: 593506 - protein, 14 aa, Homo sapiens
  CDR3 for beta chain variable domain of TCR clone 296753 (TRBV5-7, TRBJ1-1)
CASSLAGDWTEAFF

SEQ ID NO: 593507 - protein, 14 aa, Homo sapiens
  CDR3 for alpha chain variable domain of TCR clone 296754 (TRAV13-1, TRAJ5)
CAALGLAGRRALTF

SEQ ID NO: 593508 - protein, 13 aa, Homo sapiens
  CDR3 for beta chain variable domain of TCR clone 296754 (TRBV11-3, TRBJ2-3)
CGSSFTGPDTQYF

SEQ ID NO: 593509 - protein, 19 aa, Homo sapiens
  CDR3 for alpha chain variable domain of TCR clone 296755 (TRAV8-3, TRAJ8)
LSTSVLWDPMNTGFQKLVF

SEQ ID NO: 593510 - protein, 13 aa, Homo sapiens
  CDR3 for beta chain variable domain of TCR clone 296755 (TRBV10-2, TRBJ2-3)
CASSESGEHTQYF

SEQ ID NO: 593511 - protein, 14 aa, Homo sapiens
  CDR3 for alpha chain variable domain of TCR clone 296756 (TRAV13-1, TRAJ35)
CAESKGGFGNVLHC

SEQ ID NO: 593512 - protein, 15 aa, Homo sapiens
  CDR3 for beta chain variable domain of TCR clone 296756 (TRBV28, TRBJ2-1)
CASSGLAEVDNEQFF

SEQ ID NO: 593513 - protein, 14 aa, Homo sapiens
  CDR3 for alpha chain variable domain of TCR clone 296757 (TRAV26-2, TRAJ38)
CILYNAGNNRKLIW

SEQ ID NO: 593514 - protein, 14 aa, Homo sapiens
  CDR3 for beta chain variable domain of TCR clone 296757 (TRBV19, TRBJ2-1)
CASPTFLLSGEHFF

SEQ ID NO: 593515 - protein, 14 aa, Homo sapiens
  CDR3 for alpha chain variable domain of TCR clone 296758 (TRAV29/DV5, TRAJ5)
CAASGDTGRRARTF

SEQ ID NO: 593516 - protein, 14 aa, Homo sapiens
  CDR3 for beta chain variable domain of TCR clone 296758 (TRBV7-3, TRBJ2-1)
CASSLSGSYNEQFF

SEQ ID NO: 593517 - protein, 16 aa, Homo sapiens
  CDR3 for alpha chain variable domain of TCR clone 296759 (TRAV30, TRAJ24)
CGTEIVDADSWGKFQV

SEQ ID NO: 593518 - protein, 15 aa, Homo sapiens
  CDR3 for beta chain variable domain of TCR clone 296759 (TRBV6-1, TRBJ2-1)
CASSELRGQYNEQFF

SEQ ID NO: 593519 - protein, 14 aa, Homo sapiens
  CDR3 for alpha chain variable domain of TCR clone 296760 (TRAV12-3, TRAJ10)
SHLPLTGGGSKLTF

SEQ ID NO: 593520 - protein, 12 aa, Homo sapiens
  CDR3 for beta chain variable domain of TCR clone 296760 (TRBV29-1, TRBJ1-1)
CSVATPGVEAFF

SEQ ID NO: 593521 - protein, 15 aa, Homo sapiens
  CDR3 for alpha chain variable domain of TCR clone 296761 (TRAV8-3, TRAJ11)
CAVGLLNSGYSTLTF

SEQ ID NO: 593522 - protein, 16 aa, Homo sapiens
  CDR3 for beta chain variable domain of TCR clone 296761 (TRBV7-9, TRBJ1-2)
CACSLGFASGEDGYTF

SEQ ID NO: 593523 - protein, 11 aa, Homo sapiens
  CDR3 for alpha chain variable domain of TCR clone 296762 (TRAV1-2, TRAJ34)
CAGYNTDKLIF

SEQ ID NO: 593524 - protein, 12 aa, Homo sapiens
  CDR3 for beta chain variable domain of TCR clone 296762 (TRBV12-5, TRBJ2-5)
CASGQGVETQYF

SEQ ID NO: 593525 - protein, 14 aa, Homo sapiens
  CDR3 for alpha chain variable domain of TCR clone 296763 (TRAV12-2, TRAJ17)
CAVLFNAAGNKLTF

SEQ ID NO: 593526 - protein, 17 aa, Homo sapiens
  CDR3 for beta chain variable domain of TCR clone 296763 (TRBV11-2, TRBJ2-1)
CASSLYPPGVEYNEQFF

SEQ ID NO: 593527 - protein, 17 aa, Homo sapiens
  CDR3 for alpha chain variable domain of TCR clone 296764 (TRAV38-1, TRAJ28)
CAFMKPTSGAGSYQLTF

SEQ ID NO: 593528 - protein, 15 aa, Homo sapiens
  CDR3 for beta chain variable domain of TCR clone 296764 (TRBV2, TRBJ1-2)
CASSESRTVNYGYTF

SEQ ID NO: 593529 - protein, 12 aa, Homo sapiens
  CDR3 for alpha chain variable domain of TCR clone 296765 (TRAV12-3, TRAJ17)
CAMTLTGNKLTF

SEQ ID NO: 593530 - protein, 16 aa, Homo sapiens
  CDR3 for beta chain variable domain of TCR clone 296765 (TRBV4-1, TRBJ2-7)
CASRPSGGGADNEQYF

SEQ ID NO: 593531 - protein, 15 aa, Homo sapiens
  CDR3 for alpha chain variable domain of TCR clone 296766 (TRAV12-3, TRAJ49)
CAMAVTPNTGNQFYF

SEQ ID NO: 593532 - protein, 14 aa, Homo sapiens
  CDR3 for beta chain variable domain of TCR clone 296766 (TRBV4-2, TRBJ2-3)
CASRETRAPGMQYF

SEQ ID NO: 593533 - protein, 14 aa, Homo sapiens
  CDR3 for alpha chain variable domain of TCR clone 296767 (TRAV12-3, TRAJ10)
SHLPLTGGGNKLTF

SEQ ID NO: 593534 - protein, 16 aa, Homo sapiens
  CDR3 for beta chain variable domain of TCR clone 296767 (TRBV28, TRBJ2-7)
CASSPWVATGDLSQYF

SEQ ID NO: 593535 - protein, 14 aa, Homo sapiens
  CDR3 for alpha chain variable domain of TCR clone 296768 (TRAV1-2, TRAJ16)
CAVNRCSDGQKLLF

SEQ ID NO: 593536 - protein, 17 aa, Homo sapiens
  CDR3 for beta chain variable domain of TCR clone 296768 (TRBV7-3, TRBJ2-5)
CASSLGSGRSGSETQYF

SEQ ID NO: 593537 - protein, 14 aa, Homo sapiens
  CDR3 for alpha chain variable domain of TCR clone 296769 (TRAV12-2, TRAJ13)
CAVKKTGGYQKVTF

SEQ ID NO: 593538 - protein, 15 aa, Homo sapiens
  CDR3 for beta chain variable domain of TCR clone 296769 (TRBV18, TRBJ2-7)
CASSPSSTGNYEQYF

SEQ ID NO: 593539 - protein, 12 aa, Homo sapiens
  CDR3 for alpha chain variable domain of TCR clone 296770 (TRAV2, TRAJ31)
CAVEDNNARLMF

SEQ ID NO: 593540 - protein, 12 aa, Homo sapiens
  CDR3 for beta chain variable domain of TCR clone 296770 (TRBV7-8, TRBJ2-7)
CASSLGDREQYF

SEQ ID NO: 593541 - protein, 13 aa, Homo sapiens
  CDR3 for alpha chain variable domain of TCR clone 296771 (TRAV12-2, TRAJ3)
CVFQYSSASKIIF

SEQ ID NO: 593542 - protein, 11 aa, Homo sapiens
  CDR3 for beta chain variable domain of TCR clone 296771 (TRBV20-1, TRBJ2-3)
CSGTSSTTQYF

SEQ ID NO: 593543 - protein, 14 aa, Homo sapiens
  CDR3 for alpha chain variable domain of TCR clone 296772 (TRAV12-3, TRAJ22)
CAMSLFGSARQLTF

SEQ ID NO: 593544 - protein, 14 aa, Homo sapiens
  CDR3 for beta chain variable domain of TCR clone 296772 (TRBV7-6, TRBJ2-3)
CASSLGTVTDTQYF

SEQ ID NO: 593545 - protein, 11 aa, Homo sapiens
  CDR3 for alpha chain variable domain of TCR clone 296773 (TRAV12-2, TRAJ49)
CAVHTGNQFYF

SEQ ID NO: 593546 - protein, 15 aa, Homo sapiens
  CDR3 for beta chain variable domain of TCR clone 296773 (TRBV10-3, TRBJ2-3)
CAISLTSGGTDTQYF

SEQ ID NO: 593547 - protein, 12 aa, Homo sapiens
  CDR3 for alpha chain variable domain of TCR clone 296774 (TRAV30, TRAJ20)
CGTESNDYKLSF

SEQ ID NO: 593548 - protein, 15 aa, Homo sapiens
  CDR3 for beta chain variable domain of TCR clone 296774 (TRBV9, TRBJ2-7)
CASSAVPIPGYKQYF

SEQ ID NO: 593549 - protein, 13 aa, Homo sapiens
  CDR3 for alpha chain variable domain of TCR clone 296775 (TRAV17, TRAJ5)
CAPIDTGRRALTF

SEQ ID NO: 593550 - protein, 16 aa, Homo sapiens
  CDR3 for beta chain variable domain of TCR clone 296775 (TRBV27, TRBJ2-7)
CASSSERRDSAYEQYF

SEQ ID NO: 593551 - protein, 13 aa, Homo sapiens
  CDR3 for alpha chain variable domain of TCR clone 296776 (TRAV13-1, TRAJ20)
CAARVSNDYKLSF

SEQ ID NO: 593552 - protein, 16 aa, Homo sapiens
  CDR3 for beta chain variable domain of TCR clone 296776 (TRBV11-1, TRBJ1-1)
CATNPRDRAFNTEAIF

SEQ ID NO: 593553 - protein, 14 aa, Homo sapiens
  CDR3 for alpha chain variable domain of TCR clone 296777 (TRAV14/DV4, TRAJ15)
CAMRRDQAGTALNF

SEQ ID NO: 593554 - protein, 16 aa, Homo sapiens
  CDR3 for beta chain variable domain of TCR clone 296777 (TRBV15, TRBJ2-3)
CATSRDLGIVADTQYF

SEQ ID NO: 593555 - protein, 11 aa, Homo sapiens
  CDR3 for alpha chain variable domain of TCR clone 296778 (TRAV12-3, TRAJ27)
CAMANAGKSTF

SEQ ID NO: 593556 - protein, 14 aa, Homo sapiens
  CDR3 for beta chain variable domain of TCR clone 296778 (TRBV18, TRBJ2-7)
CASSPRGGAYEQYF

SEQ ID NO: 593557 - protein, 12 aa, Homo sapiens
  CDR3 for alpha chain variable domain of TCR clone 296779 (TRAV8-4, TRAJ43)
CAVSVNKNDMRF

SEQ ID NO: 593558 - protein, 13 aa, Homo sapiens
  CDR3 for beta chain variable domain of TCR clone 296779 (TRBV7-9, TRBJ1-2)
CASSLKQNYGYTF

SEQ ID NO: 593559 - protein, 11 aa, Homo sapiens
  CDR3 for alpha chain variable domain of TCR clone 296780 (TRAV2, TRAJ40)
CAVEGTYKYIF

SEQ ID NO: 593560 - protein, 16 aa, Homo sapiens
  CDR3 for beta chain variable domain of TCR clone 296780 (TRBV6-1, TRBJ2-5)
CASSETLDRGAETQYF

SEQ ID NO: 593561 - protein, 18 aa, Homo sapiens
  CDR3 for alpha chain variable domain of TCR clone 296781 (TRAV21, TRAJ52)
CAVRPSTAGGTSYGKLTC

SEQ ID NO: 593562 - protein, 17 aa, Homo sapiens
  CDR3 for beta chain variable domain of TCR clone 296781 (TRBV20-1, TRBJ2-2)
CSASGSGQGGLTGELFF

SEQ ID NO: 593563 - protein, 11 aa, Homo sapiens
  CDR3 for alpha chain variable domain of TCR clone 296782 (TRAV3, TRAJ21)
CAVGNFNKFYF

SEQ ID NO: 593564 - protein, 13 aa, Homo sapiens
  CDR3 for beta chain variable domain of TCR clone 296782 (TRBV7-9, TRBJ2-5)
CAGLPSGRETQYF

SEQ ID NO: 593565 - protein, 16 aa, Homo sapiens
  CDR3 for alpha chain variable domain of TCR clone 296783 (TRAV27, TRAJ52)
CAGAPAGGTSNGKLTF

SEQ ID NO: 593566 - protein, 12 aa, Homo sapiens
  CDR3 for beta chain variable domain of TCR clone 296783 (TRBV27, TRBJ2-1)
CASRGFYNEQFF

SEQ ID NO: 593567 - protein, 13 aa, Homo sapiens
  CDR3 for alpha chain variable domain of TCR clone 296784 (TRAV8-1, TRAJ30)
CAVIMNRDDKIIF

SEQ ID NO: 593568 - protein, 14 aa, Homo sapiens
  CDR3 for beta chain variable domain of TCR clone 296784 (TRBV7-2, TRBJ1-6)
CASSLQGVNSPLHF

SEQ ID NO: 593569 - protein, 14 aa, Homo sapiens
  CDR3 for alpha chain variable domain of TCR clone 296785 (TRAV17, TRAJ31)
CATVLRNNNARLMF

SEQ ID NO: 593570 - protein, 11 aa, Homo sapiens
  CDR3 for beta chain variable domain of TCR clone 296785 (TRBV11-2, TRBJ2-2)
CASSLPGELFF

SEQ ID NO: 593571 - protein, 17 aa, Homo sapiens
  CDR3 for alpha chain variable domain of TCR clone 296786 (TRAV3, TRAJ6)
CAVGDGPRAGGSYIPTF

SEQ ID NO: 593572 - protein, 13 aa, Homo sapiens
  CDR3 for beta chain variable domain of TCR clone 296786 (TRBV4-1, TRBJ2-2)
CASSQENTGELFF

SEQ ID NO: 593573 - protein, 15 aa, Homo sapiens
  CDR3 for alpha chain variable domain of TCR clone 296787 (TRAV23/DV6, TRAJ33)
CAASNSGGGNYQLIW

SEQ ID NO: 593574 - protein, 12 aa, Homo sapiens
  CDR3 for beta chain variable domain of TCR clone 296787 (TRBV7-3, TRBJ2-1)
CASSFINNEQLF

SEQ ID NO: 593575 - protein, 14 aa, Homo sapiens
  CDR3 for alpha chain variable domain of TCR clone 296788 (TRAV17, TRAJ45)
CATASGGGADGLTF

SEQ ID NO: 593576 - protein, 15 aa, Homo sapiens
  CDR3 for beta chain variable domain of TCR clone 296788 (TRBV18, TRBJ2-1)
CASSPPSASYNEQFF

SEQ ID NO: 593577 - protein, 13 aa, Homo sapiens
  CDR3 for alpha chain variable domain of TCR clone 296789 (TRAV8-3, TRAJ36)
CAVGATGANNLFL

SEQ ID NO: 593578 - protein, 13 aa, Homo sapiens
  CDR3 for beta chain variable domain of TCR clone 296789 (TRBV6-1, TRBJ1-1)
CASSRQGNTEAFF

SEQ ID NO: 593579 - protein, 15 aa, Homo sapiens
  CDR3 for alpha chain variable domain of TCR clone 296790 (TRAV17, TRAJ57)
CDTGPSQGGSEKLVF

SEQ ID NO: 593580 - protein, 17 aa, Homo sapiens
  CDR3 for beta chain variable domain of TCR clone 296790 (TRBV11-2, TRBJ2-1)
CASSLYPPGVEYNEQFF

SEQ ID NO: 593581 - protein, 14 aa, Homo sapiens
  CDR3 for alpha chain variable domain of TCR clone 296791 (TRAV26-1, TRAJ39)
CIVFTNNAGNMLTF

SEQ ID NO: 593582 - protein, 14 aa, Homo sapiens
  CDR3 for beta chain variable domain of TCR clone 296791 (TRBV11-2, TRBJ2-5)
CASRPLAGRETQYF

SEQ ID NO: 593583 - protein, 14 aa, Homo sapiens
  CDR3 for alpha chain variable domain of TCR clone 296792 (TRAV35, TRAJ22)
FAGLRPGSARQLTF

SEQ ID NO: 593584 - protein, 15 aa, Homo sapiens
  CDR3 for beta chain variable domain of TCR clone 296792 (TRBV12-4, TRBJ2-5)
CASSPPTGLEETQYF

SEQ ID NO: 593585 - protein, 16 aa, Homo sapiens
  CDR3 for alpha chain variable domain of TCR clone 296793 (TRAV30, TRAJ24)
CGAEIVDADSWGKFQV

SEQ ID NO: 593586 - protein, 13 aa, Homo sapiens
  CDR3 for beta chain variable domain of TCR clone 296793 (TRBV10-3, TRBJ2-7)
CASKLAVNYEQYF

SEQ ID NO: 593587 - protein, 15 aa, Homo sapiens
  CDR3 for alpha chain variable domain of TCR clone 296794 (TRAV20, TRAJ53)
CAVQASGGSNYKLTF

SEQ ID NO: 593588 - protein, 12 aa, Homo sapiens
  CDR3 for beta chain variable domain of TCR clone 296794 (TRBV7-8, TRBJ2-7)
CASSLRDREQYF

SEQ ID NO: 593589 - protein, 15 aa, Homo sapiens
  CDR3 for alpha chain variable domain of TCR clone 296795 (TRAV12-2, TRAJ43)
CAFDMRFGAGNRLTV

SEQ ID NO: 593590 - protein, 15 aa, Homo sapiens
  CDR3 for beta chain variable domain of TCR clone 296795 (TRBV28, TRBJ2-1)
CASSGLAEVDNEQFF

SEQ ID NO: 593591 - protein, 15 aa, Homo sapiens
  CDR3 for alpha chain variable domain of TCR clone 296796 (TRAV17, TRAJ42)
CATDHYGGSQGNLIF

SEQ ID NO: 593592 - protein, 15 aa, Homo sapiens
  CDR3 for beta chain variable domain of TCR clone 296796 (TRBV5-1, TRBJ2-1)
CASSPPRAPYNEQFF

SEQ ID NO: 593593 - protein, 14 aa, Homo sapiens
  CDR3 for alpha chain variable domain of TCR clone 296797 (TRAV13-2, TRAJ17)
CAENSKAAGNKLTF

SEQ ID NO: 593594 - protein, 11 aa, Homo sapiens
  CDR3 for beta chain variable domain of TCR clone 296797 (TRBV27, TRBJ2-7)
CASSLGYEQYF

SEQ ID NO: 593595 - protein, 13 aa, Homo sapiens
  CDR3 for alpha chain variable domain of TCR clone 296798 (TRAV20, TRAJ34)
CAVLSYNTDKLIF

SEQ ID NO: 593596 - protein, 13 aa, Homo sapiens
  CDR3 for beta chain variable domain of TCR clone 296798 (TRBV7-9, TRBJ1-2)
CASSLKQNYGYTF

SEQ ID NO: 593597 - protein, 21 aa, Homo sapiens
  CDR3 for alpha chain variable domain of TCR clone 296799 (TRAV1-1, TRAJ6)
CLLLLRCERLERTGGSYIPTF

SEQ ID NO: 593598 - protein, 13 aa, Homo sapiens
  CDR3 for beta chain variable domain of TCR clone 296799 (TRBV10-2, TRBJ2-3)
CASSESGDHTQYF

SEQ ID NO: 593599 - protein, 11 aa, Homo sapiens
  CDR3 for alpha chain variable domain of TCR clone 296800 (TRAV27, TRAJ47)
CRSNQGNNLVF

SEQ ID NO: 593600 - protein, 16 aa, Homo sapiens
  CDR3 for beta chain variable domain of TCR clone 296800 (TRBV7-9, TRBJ2-1)
CASSDVAGGSYNEQFF

SEQ ID NO: 593601 - protein, 13 aa, Homo sapiens
  CDR3 for alpha chain variable domain of TCR clone 296801 (TRAV1-2, TRAJ9)
CAALNTGGFKTIF

SEQ ID NO: 593602 - protein, 13 aa, Homo sapiens
  CDR3 for beta chain variable domain of TCR clone 296801 (TRBV20-1, TRBJ2-7)
CSATHTSGYEQYF

SEQ ID NO: 593603 - protein, 13 aa, Homo sapiens
  CDR3 for alpha chain variable domain of TCR clone 296802 (TRAV8-6, TRAJ40)
CAVSVTGTYKHIF

SEQ ID NO: 593604 - protein, 15 aa, Homo sapiens
  CDR3 for beta chain variable domain of TCR clone 296802 (TRBV4-1, TRBJ2-3)
CASGRGQGIPDTQYF

SEQ ID NO: 593605 - protein, 14 aa, Homo sapiens
  CDR3 for alpha chain variable domain of TCR clone 296803 (TRAV3, TRAJ17)
CAVRDRSCRQQANF

SEQ ID NO: 593606 - protein, 13 aa, Homo sapiens
  CDR3 for beta chain variable domain of TCR clone 296803 (TRBV20-1, TRBJ1-6)
CSAPLGVGSPLHF

SEQ ID NO: 593607 - protein, 16 aa, Homo sapiens
  CDR3 for alpha chain variable domain of TCR clone 296804 (TRAV8-3, TRAJ28)
CAVPLQRGAGSYQLTF

SEQ ID NO: 593608 - protein, 13 aa, Homo sapiens
  CDR3 for beta chain variable domain of TCR clone 296804 (TRBV7-6, TRBJ2-3)
CASSLRSDNTQYF

SEQ ID NO: 593609 - protein, 13 aa, Homo sapiens
  CDR3 for alpha chain variable domain of TCR clone 296805 (TRAV27, TRAJ11)
CAGARSGYSTLTF

SEQ ID NO: 593610 - protein, 16 aa, Homo sapiens
  CDR3 for beta chain variable domain of TCR clone 296805 (TRBV10-2, TRBJ2-2)
CASSESRDGGSGELFF

SEQ ID NO: 593611 - protein, 12 aa, Homo sapiens
  CDR3 for alpha chain variable domain of TCR clone 296806 (TRAV12-3, TRAJ17)
CAMTLTGNKLTF

SEQ ID NO: 593612 - protein, 14 aa, Homo sapiens
  CDR3 for beta chain variable domain of TCR clone 296806 (TRBV20-1, TRBJ2-1)
CSAQIGGSANEQFL

SEQ ID NO: 593613 - protein, 15 aa, Homo sapiens
  CDR3 for alpha chain variable domain of TCR clone 296807 (TRAV34, TRAJ38)
CGADFTPGNNSKLMW

SEQ ID NO: 593614 - protein, 16 aa, Homo sapiens
  CDR3 for beta chain variable domain of TCR clone 296807 (TRBV12-5, TRBJ2-5)
CASGPRTSGNQETQYF

SEQ ID NO: 593615 - protein, 18 aa, Homo sapiens
  CDR3 for alpha chain variable domain of TCR clone 296808 (TRAV21, TRAJ52)
CAVRPSPAGGTSYGKVTC

SEQ ID NO: 593616 - protein, 17 aa, Homo sapiens
  CDR3 for beta chain variable domain of TCR clone 296808 (TRBV13, TRBJ2-3)
CASSLSRVAGGRNTQYF

SEQ ID NO: 593617 - protein, 15 aa, Homo sapiens
  CDR3 for alpha chain variable domain of TCR clone 296809 (TRAV8-3, TRAJ11)
CAVGLLNSGYSTLTF

SEQ ID NO: 593618 - protein, 16 aa, Homo sapiens
  CDR3 for beta chain variable domain of TCR clone 296809 (TRBV6-6, TRBJ2-1)
CASSCSVSGSYNEQFF

SEQ ID NO: 593619 - protein, 13 aa, Homo sapiens
  CDR3 for alpha chain variable domain of TCR clone 296810 (TRAV39, TRAJ33)
CAVDRDSNYQLIW

SEQ ID NO: 593620 - protein, 15 aa, Homo sapiens
  CDR3 for beta chain variable domain of TCR clone 296810 (TRBV27, TRBJ2-1)
CASSLKYRESHEQFF

SEQ ID NO: 593621 - protein, 15 aa, Homo sapiens
  CDR3 for alpha chain variable domain of TCR clone 296811 (TRAV34, TRAJ38)
CGADFTPGNNRKLIW

SEQ ID NO: 593622 - protein, 15 aa, Homo sapiens
  CDR3 for beta chain variable domain of TCR clone 296811 (TRBV4-1, TRBJ2-3)
CASSQDRLPPDTQYF

SEQ ID NO: 593623 - protein, 14 aa, Homo sapiens
  CDR3 for alpha chain variable domain of TCR clone 296812 (TRAV9-2, TRAJ39)
CALYIYNAGNMLTF

SEQ ID NO: 593624 - protein, 14 aa, Homo sapiens
  CDR3 for beta chain variable domain of TCR clone 296812 (TRBV4-2, TRBJ2-3)
CASSQERGTDTQYF

SEQ ID NO: 593625 - protein, 14 aa, Homo sapiens
  CDR3 for alpha chain variable domain of TCR clone 296813 (TRAV1-2, TRAJ8)
CAVREDTGFQKLVF

SEQ ID NO: 593626 - protein, 15 aa, Homo sapiens
  CDR3 for beta chain variable domain of TCR clone 296813 (TRBV10-3, TRBJ2-1)
CAIRNGTSGHNEQFC

SEQ ID NO: 593627 - protein, 15 aa, Homo sapiens
  CDR3 for alpha chain variable domain of TCR clone 296814 (TRAV21, TRAJ53)
CATLYSGGSNYKLTF

SEQ ID NO: 593628 - protein, 16 aa, Homo sapiens
  CDR3 for beta chain variable domain of TCR clone 296814 (TRBV29-1, TRBJ1-2)
CSVEANRDIANYGYTF

SEQ ID NO: 593629 - protein, 13 aa, Homo sapiens
  CDR3 for alpha chain variable domain of TCR clone 296815 (TRAV3, TRAJ21)
CAVREPDFNKFYF

SEQ ID NO: 593630 - protein, 16 aa, Homo sapiens
  CDR3 for beta chain variable domain of TCR clone 296815 (TRBV20-1, TRBJ2-1)
CSARDLAGHSYNEQFF

SEQ ID NO: 593631 - protein, 15 aa, Homo sapiens
  CDR3 for alpha chain variable domain of TCR clone 296816 (TRAV26-1, TRAJ44)
CIARVPFGTASKLTF

SEQ ID NO: 593632 - protein, 15 aa, Homo sapiens
  CDR3 for beta chain variable domain of TCR clone 296816 (TRBV20-1, TRBJ1-1)
CSASRRVTGNTEAFF

SEQ ID NO: 593633 - protein, 16 aa, Homo sapiens
  CDR3 for alpha chain variable domain of TCR clone 296817 (TRAV12-3, TRAJ50)
CAMRDPMKTSYDKVIF

SEQ ID NO: 593634 - protein, 13 aa, Homo sapiens
  CDR3 for beta chain variable domain of TCR clone 296817 (TRBV25-1, TRBJ1-1)
CQHPPGGNTEAFF

SEQ ID NO: 593635 - protein, 15 aa, Homo sapiens
  CDR3 for alpha chain variable domain of TCR clone 296818 (TRAV38-1, TRAJ37)
CAFIFGSGNTGKLIF

SEQ ID NO: 593636 - protein, 12 aa, Homo sapiens
  CDR3 for beta chain variable domain of TCR clone 296818 (TRBV7-9, TRBJ2-7)
CASSLEGYEQNF

SEQ ID NO: 593637 - protein, 14 aa, Homo sapiens
  CDR3 for alpha chain variable domain of TCR clone 296819 (TRAV1-2, TRAJ8)
CAVREDTGFRKLVF

SEQ ID NO: 593638 - protein, 17 aa, Homo sapiens
  CDR3 for beta chain variable domain of TCR clone 296819 (TRBV28, TRBJ2-5)
CASSRQGGLAGAETQYF

SEQ ID NO: 593639 - protein, 17 aa, Homo sapiens
  CDR3 for alpha chain variable domain of TCR clone 296820 (TRAV12-1, TRAJ42)
WVVMRMNYGGSQGNLIF

SEQ ID NO: 593640 - protein, 13 aa, Homo sapiens
  CDR3 for beta chain variable domain of TCR clone 296820 (TRBV7-2, TRBJ1-1)
CASSLARPAEDFF

SEQ ID NO: 593641 - protein, 18 aa, Homo sapiens
  CDR3 for alpha chain variable domain of TCR clone 296821 (TRAV21, TRAJ52)
CAVRPSLAGSTSYGKLTF

SEQ ID NO: 593642 - protein, 17 aa, Homo sapiens
  CDR3 for beta chain variable domain of TCR clone 296821 (TRBV13, TRBJ2-3)
CASSLSRVAGGRNTQYF

SEQ ID NO: 593643 - protein, 13 aa, Homo sapiens
  CDR3 for alpha chain variable domain of TCR clone 296822 (TRAV35, TRAJ22)
CAGLSGSARQLNF

SEQ ID NO: 593644 - protein, 16 aa, Homo sapiens
  CDR3 for beta chain variable domain of TCR clone 296822 (TRBV7-9, TRBJ2-1)
CASSLVLTGQGNEQFF

SEQ ID NO: 593645 - protein, 13 aa, Homo sapiens
  CDR3 for alpha chain variable domain of TCR clone 296823 (TRAV27, TRAJ45)
CRSSGGGADGLTF

SEQ ID NO: 593646 - protein, 11 aa, Homo sapiens
  CDR3 for beta chain variable domain of TCR clone 296823 (TRBV25-1, TRBJ1-1)
CASRVFTEAFF

SEQ ID NO: 593647 - protein, 13 aa, Homo sapiens
  CDR3 for alpha chain variable domain of TCR clone 296824 (TRAV2, TRAJ40)
CAVVTSGTYKYIF

SEQ ID NO: 593648 - protein, 16 aa, Homo sapiens
  CDR3 for beta chain variable domain of TCR clone 296824 (TRBV18, TRBJ1-1)
CASSPGVGGRGGEAFF

SEQ ID NO: 593649 - protein, 15 aa, Homo sapiens
  CDR3 for alpha chain variable domain of TCR clone 296825 (TRAV26-1, TRAJ44)
CIARVPFGTASKLTF

SEQ ID NO: 593650 - protein, 14 aa, Homo sapiens
  CDR3 for beta chain variable domain of TCR clone 296825 (TRBV19, TRBJ2-1)
CASPTFVLSGEQFF

SEQ ID NO: 593651 - protein, 17 aa, Homo sapiens
  CDR3 for alpha chain variable domain of TCR clone 296826 (TRAV3, TRAJ6)
CAVRDGPRAGGSYIPTF

SEQ ID NO: 593652 - protein, 14 aa, Homo sapiens
  CDR3 for beta chain variable domain of TCR clone 296826 (TRBV7-2, TRBJ2-3)
CASSLAEASDTQYF

SEQ ID NO: 593653 - protein, 14 aa, Homo sapiens
  CDR3 for alpha chain variable domain of TCR clone 296827 (TRAV12-2, TRAJ38)
CAPQTAGNNRKLIW

SEQ ID NO: 593654 - protein, 14 aa, Homo sapiens
  CDR3 for beta chain variable domain of TCR clone 296827 (TRBV20-1, TRBJ2-1)
CSAQIGGSANEQFF

SEQ ID NO: 593655 - protein, 14 aa, Homo sapiens
  CDR3 for alpha chain variable domain of TCR clone 296828 (TRAV12-1, TRAJ22)
CVVTTSGSARQLTF

SEQ ID NO: 593656 - protein, 17 aa, Homo sapiens
  CDR3 for beta chain variable domain of TCR clone 296828 (TRBV13, TRBJ2-3)
CASSLSRVAGGRNTQYF

SEQ ID NO: 593657 - protein, 13 aa, Homo sapiens
  CDR3 for alpha chain variable domain of TCR clone 296829 (TRAV1-1, TRAJ21)
CAVRLYNFNKFYF

SEQ ID NO: 593658 - protein, 16 aa, Homo sapiens
  CDR3 for beta chain variable domain of TCR clone 296829 (TRBV7-3, TRBJ2-1)
CASSLVSGSSNNEQFF

SEQ ID NO: 593659 - protein, 11 aa, Homo sapiens
  CDR3 for alpha chain variable domain of TCR clone 296830 (TRAV3, TRAJ21)
CAVCNFNKFYF

SEQ ID NO: 593660 - protein, 16 aa, Homo sapiens
  CDR3 for beta chain variable domain of TCR clone 296830 (TRBV19, TRBJ2-1)
CASSKAGPSSYNERFF

SEQ ID NO: 593661 - protein, 13 aa, Homo sapiens
  CDR3 for alpha chain variable domain of TCR clone 296831 (TRAV13-1, TRAJ27)
CAASTHQCRQINI

SEQ ID NO: 593662 - protein, 16 aa, Homo sapiens
  CDR3 for beta chain variable domain of TCR clone 296831 (TRBV27, TRBJ2-2)
CASSFRGLVRTGELFF

SEQ ID NO: 593663 - protein, 15 aa, Homo sapiens
  CDR3 for alpha chain variable domain of TCR clone 296832 (TRAV8-3, TRAJ11)
CAVGLLNSGYSTLTF

SEQ ID NO: 593664 - protein, 16 aa, Homo sapiens
  CDR3 for beta chain variable domain of TCR clone 296832 (TRBV7-9, TRBJ1-2)
CASSLGFSSGEDGYTY

SEQ ID NO: 593665 - protein, 12 aa, Homo sapiens
  CDR3 for alpha chain variable domain of TCR clone 296833 (TRAV4, TRAJ26)
CLLGDYGQNFVF

SEQ ID NO: 593666 - protein, 16 aa, Homo sapiens
  CDR3 for beta chain variable domain of TCR clone 296833 (TRBV7-2, TRBJ1-2)
CASSSNQDRRGHGYTF

SEQ ID NO: 593667 - protein, 17 aa, Homo sapiens
  CDR3 for alpha chain variable domain of TCR clone 296834 (TRAV3, TRAJ13)
CAVRDMRRTGGYQKVTL

SEQ ID NO: 593668 - protein, 14 aa, Homo sapiens
  CDR3 for beta chain variable domain of TCR clone 296834 (TRBV12-5, TRBJ2-5)
CASGSRTHQETQYF

SEQ ID NO: 593669 - protein, 14 aa, Homo sapiens
  CDR3 for alpha chain variable domain of TCR clone 296835 (TRAV12-2, TRAJ40)
CAVKIPSGTYKYIF

SEQ ID NO: 593670 - protein, 13 aa, Homo sapiens
  CDR3 for beta chain variable domain of TCR clone 296835 (TRBV20-1, TRBJ1-3)
CSARGQGRDTMYF

SEQ ID NO: 593671 - protein, 17 aa, Homo sapiens
  CDR3 for alpha chain variable domain of TCR clone 296836 (TRAV23/DV6, TRAJ53)
CAASKLGSGGSNYKLTF

SEQ ID NO: 593672 - protein, 14 aa, Homo sapiens
  CDR3 for beta chain variable domain of TCR clone 296836 (TRBV7-9, TRBJ2-3)
CASSSEQGTNTQYF

SEQ ID NO: 593673 - protein, 16 aa, Homo sapiens
  CDR3 for alpha chain variable domain of TCR clone 296837 (TRAV3, TRAJ18)
WAVRDGRGSTLGRLYF

SEQ ID NO: 593674 - protein, 15 aa, Homo sapiens
  CDR3 for beta chain variable domain of TCR clone 296837 (TRBV7-9, TRBJ1-6)
CASSSPGRGNSPLHF

SEQ ID NO: 593675 - protein, 12 aa, Homo sapiens
  CDR3 for alpha chain variable domain of TCR clone 296838 (TRAV27, TRAJ35)
CAGADFGNVLPC

SEQ ID NO: 593676 - protein, 15 aa, Homo sapiens
  CDR3 for beta chain variable domain of TCR clone 296838 (TRBV7-8, TRBJ2-1)
CASSLAGGLYNEQFF

SEQ ID NO: 593677 - protein, 15 aa, Homo sapiens
  CDR3 for alpha chain variable domain of TCR clone 296839 (TRAV20, TRAJ58)
CAVQDLETSGSRLTF

SEQ ID NO: 593678 - protein, 12 aa, Homo sapiens
  CDR3 for beta chain variable domain of TCR clone 296839 (TRBV9, TRBJ2-2)
CASSARTGELVF

SEQ ID NO: 593679 - protein, 18 aa, Homo sapiens
  CDR3 for alpha chain variable domain of TCR clone 296840 (TRAV21, TRAJ52)
CAVRPSPAGGTSYGKLTF

SEQ ID NO: 593680 - protein, 12 aa, Homo sapiens
  CDR3 for beta chain variable domain of TCR clone 296840 (TRBV5-7, TRBJ1-1)
CASSLGRGKAFF

SEQ ID NO: 593681 - protein, 11 aa, Homo sapiens
  CDR3 for alpha chain variable domain of TCR clone 296841 (TRAV23/DV6, TRAJ9)
CAASLSPPNTG

SEQ ID NO: 593682 - protein, 14 aa, Homo sapiens
  CDR3 for beta chain variable domain of TCR clone 296841 (TRBV11-2, TRBJ2-5)
CASNRTGGIETQYF

SEQ ID NO: 593683 - protein, 14 aa, Homo sapiens
  CDR3 for alpha chain variable domain of TCR clone 296842 (TRAV26-1, TRAJ48)
CIVRTNFGNEKLTF

SEQ ID NO: 593684 - protein, 12 aa, Homo sapiens
  CDR3 for beta chain variable domain of TCR clone 296842 (TRBV20-1, TRBJ2-7)
FSASSGANEQYF

SEQ ID NO: 593685 - protein, 15 aa, Homo sapiens
  CDR3 for alpha chain variable domain of TCR clone 296843 (TRAV16, TRAJ48)
CALFISNFGNEKLTF

SEQ ID NO: 593686 - protein, 14 aa, Homo sapiens
  CDR3 for beta chain variable domain of TCR clone 296843 (TRBV25-1, TRBJ1-1)
CASTHLGGNTEAFF

SEQ ID NO: 593687 - protein, 14 aa, Homo sapiens
  CDR3 for alpha chain variable domain of TCR clone 296844 (TRAV12-1, TRAJ15)
CLPPANQAGSALIF

SEQ ID NO: 593688 - protein, 13 aa, Homo sapiens
  CDR3 for beta chain variable domain of TCR clone 296844 (TRBV7-2, TRBJ2-4)
CASSREHANIQYF

SEQ ID NO: 593689 - protein, 11 aa, Homo sapiens
  CDR3 for alpha chain variable domain of TCR clone 296845 (TRAV35, TRAJ34)
CWARNTDKLIF

SEQ ID NO: 593690 - protein, 15 aa, Homo sapiens
  CDR3 for beta chain variable domain of TCR clone 296845 (TRBV10-3, TRBJ2-1)
CAISDVQDRAYEQFF

SEQ ID NO: 593691 - protein, 23 aa, Homo sapiens
  CDR3 for alpha chain variable domain of TCR clone 296846 (TRAV1-1, TRAJ11)
LLQELQMKDSASYFCAGYSTLTF

SEQ ID NO: 593692 - protein, 17 aa, Homo sapiens
  CDR3 for beta chain variable domain of TCR clone 296846 (TRBV13, TRBJ2-3)
CASSLSRVAGGRNTQYF

SEQ ID NO: 593693 - protein, 14 aa, Homo sapiens
  CDR3 for alpha chain variable domain of TCR clone 296847 (TRAV1-1, TRAJ27)
CAVIYNTNEGKSTF

SEQ ID NO: 593694 - protein, 13 aa, Homo sapiens
  CDR3 for beta chain variable domain of TCR clone 296847 (TRBV7-9, TRBJ1-2)
CASSLKQNYGYTF

SEQ ID NO: 593695 - protein, 13 aa, Homo sapiens
  CDR3 for alpha chain variable domain of TCR clone 296848 (TRAV8-6, TRAJ50)
CAVIKTSYDKVIF

SEQ ID NO: 593696 - protein, 16 aa, Homo sapiens
  CDR3 for beta chain variable domain of TCR clone 296848 (TRBV12-5, TRBJ2-5)
CASGPRTSGNQETQYF

SEQ ID NO: 593697 - protein, 14 aa, Homo sapiens
  CDR3 for alpha chain variable domain of TCR clone 296849 (TRAV1-2, TRAJ8)
CAVSEDTGFQKLVF

SEQ ID NO: 593698 - protein, 14 aa, Homo sapiens
  CDR3 for beta chain variable domain of TCR clone 296849 (TRBV25-1, TRBJ1-1)
CASTHLGGNTEAFF

SEQ ID NO: 593699 - protein, 22 aa, Homo sapiens
  CDR3 for alpha chain variable domain of TCR clone 296850 (TRAV17, TRAJ32)
CATDPGGATNKLILELALCLLS

SEQ ID NO: 593700 - protein, 14 aa, Homo sapiens
  CDR3 for beta chain variable domain of TCR clone 296850 (TRBV2, TRBJ1-5)
CASSENRGGQPQHF

SEQ ID NO: 593701 - protein, 17 aa, Homo sapiens
  CDR3 for alpha chain variable domain of TCR clone 296851 (TRAV3, TRAJ7)
CAVRDMSPLEVTTDSLL

SEQ ID NO: 593702 - protein, 17 aa, Homo sapiens
  CDR3 for beta chain variable domain of TCR clone 296851 (TRBV15, TRBJ1-2)
CATSGREIDVVNYGYTF

SEQ ID NO: 593703 - protein, 16 aa, Homo sapiens
  CDR3 for alpha chain variable domain of TCR clone 296852 (TRAV30, TRAJ24)
CGTEVVDADSWGKFQF

SEQ ID NO: 593704 - protein, 14 aa, Homo sapiens
  CDR3 for beta chain variable domain of TCR clone 296852 (TRBV12-5, TRBJ2-5)
CASGSRTHQGTQYF

SEQ ID NO: 593705 - protein, 14 aa, Homo sapiens
  CDR3 for alpha chain variable domain of TCR clone 296853 (TRAV23/DV6, TRAJ13)
CAEMYSGGYQKVTF

SEQ ID NO: 593706 - protein, 14 aa, Homo sapiens
  CDR3 for beta chain variable domain of TCR clone 296853 (TRBV7-9, TRBJ2-1)
CASSPRDSLYEQFF

SEQ ID NO: 593707 - protein, 14 aa, Homo sapiens
  CDR3 for alpha chain variable domain of TCR clone 296854 (TRAV13-2, TRAJ26)
CAENLGNYGQNCVF

SEQ ID NO: 593708 - protein, 14 aa, Homo sapiens
  CDR3 for beta chain variable domain of TCR clone 296854 (TRBV19, TRBJ1-3)
CASNRGNSGNTIYF

SEQ ID NO: 593709 - protein, 11 aa, Homo sapiens
  CDR3 for alpha chain variable domain of TCR clone 296855 (TRAV12-1, TRAJ21)
CVVNNFNKFYF

SEQ ID NO: 593710 - protein, 14 aa, Homo sapiens
  CDR3 for beta chain variable domain of TCR clone 296855 (TRBV18, TRBJ2-7)
CASSPTGGAYEQYF

SEQ ID NO: 593711 - protein, 17 aa, Homo sapiens
  CDR3 for alpha chain variable domain of TCR clone 296856 (TRAV3, TRAJ12)
LAVRDGGRMDSSYKLIF

SEQ ID NO: 593712 - protein, 14 aa, Homo sapiens
  CDR3 for beta chain variable domain of TCR clone 296856 (TRBV7-9, TRBJ1-2)
CASSRQGANYGYTF

SEQ ID NO: 593713 - protein, 14 aa, Homo sapiens
  CDR3 for alpha chain variable domain of TCR clone 296857 (TRAV23/DV6, TRAJ11)
CAASLESGYSTLTF

SEQ ID NO: 593714 - protein, 12 aa, Homo sapiens
  CDR3 for beta chain variable domain of TCR clone 296857 (TRBV7-3, TRBJ2-5)
CASSSPGGTQYF

SEQ ID NO: 593715 - protein, 13 aa, Homo sapiens
  CDR3 for alpha chain variable domain of TCR clone 296858 (TRAV8-4, TRAJ31)
CAVSDSGNARLMF

SEQ ID NO: 593716 - protein, 20 aa, Homo sapiens
  CDR3 for beta chain variable domain of TCR clone 296858 (TRBV7-8, TRBJ2-2)
CASSHLFPGPTIHITGELFF

SEQ ID NO: 593717 - protein, 14 aa, Homo sapiens
  CDR3 for alpha chain variable domain of TCR clone 296859 (TRAV17, TRAJ45)
CATASGGGADGLTF

SEQ ID NO: 593718 - protein, 13 aa, Homo sapiens
  CDR3 for beta chain variable domain of TCR clone 296859 (TRBV5-4, TRBJ1-1)
CASSVDLGTEAFF

SEQ ID NO: 593719 - protein, 18 aa, Homo sapiens
  CDR3 for alpha chain variable domain of TCR clone 296860 (TRAV26-2, TRAJ45)
CILRVDKYSVGGADGLTF

SEQ ID NO: 593720 - protein, 16 aa, Homo sapiens
  CDR3 for beta chain variable domain of TCR clone 296860 (TRBV2, TRBJ1-4)
CASNLLQGATNENLFF

SEQ ID NO: 593721 - protein, 12 aa, Homo sapiens
  CDR3 for alpha chain variable domain of TCR clone 296861 (TRAV12-3, TRAJ17)
CAMTLTGNKLTF

SEQ ID NO: 593722 - protein, 13 aa, Homo sapiens
  CDR3 for beta chain variable domain of TCR clone 296861 (TRBV6-5, TRBJ1-2)
CASSYSQGVRYTF

SEQ ID NO: 593723 - protein, 13 aa, Homo sapiens
  CDR3 for alpha chain variable domain of TCR clone 296862 (TRAV13-1, TRAJ9)
CAARGTGGFKTIF

SEQ ID NO: 593724 - protein, 12 aa, Homo sapiens
  CDR3 for beta chain variable domain of TCR clone 296862 (TRBV2, TRBJ2-1)
CANGPPGNEQFF

SEQ ID NO: 593725 - protein, 14 aa, Homo sapiens
  CDR3 for alpha chain variable domain of TCR clone 296863 (TRAV13-1, TRAJ20)
CAARPGSNDFKLSF

SEQ ID NO: 593726 - protein, 15 aa, Homo sapiens
  CDR3 for beta chain variable domain of TCR clone 296863 (TRBV4-1, TRBJ2-7)
CASSQQGQGFDEQYF

SEQ ID NO: 593727 - protein, 13 aa, Homo sapiens
  CDR3 for alpha chain variable domain of TCR clone 296864 (TRAV2, TRAJ15)
CAVASQAGTALIF

SEQ ID NO: 593728 - protein, 11 aa, Homo sapiens
  CDR3 for beta chain variable domain of TCR clone 296864 (TRBV4-1, TRBJ2-2)
CASEHTGELFF

SEQ ID NO: 593729 - protein, 18 aa, Homo sapiens
  CDR3 for alpha chain variable domain of TCR clone 296865 (TRAV21, TRAJ52)
CAVRPSPAGGTSYGKLTF

SEQ ID NO: 593730 - protein, 15 aa, Homo sapiens
  CDR3 for beta chain variable domain of TCR clone 296865 (TRBV27, TRBJ2-1)
CASSNGVGSSNEQFF

SEQ ID NO: 593731 - protein, 12 aa, Homo sapiens
  CDR3 for alpha chain variable domain of TCR clone 296866 (TRAV27, TRAJ33)
CAGDVSNYQLIW

SEQ ID NO: 593732 - protein, 15 aa, Homo sapiens
  CDR3 for beta chain variable domain of TCR clone 296866 (TRBV6-5, TRBJ2-7)
CASSYSTSGNYEQYF

SEQ ID NO: 593733 - protein, 14 aa, Homo sapiens
  CDR3 for alpha chain variable domain of TCR clone 296867 (TRAV29/DV5, TRAJ36)
CAARRKTGANNLFF

SEQ ID NO: 593734 - protein, 18 aa, Homo sapiens
  CDR3 for beta chain variable domain of TCR clone 296867 (TRBV18, TRBJ2-3)
CASSYTSGAAGGTDTQYF

SEQ ID NO: 593735 - protein, 16 aa, Homo sapiens
  CDR3 for alpha chain variable domain of TCR clone 296868 (TRAV20, TRAJ52)
CAVLPDGVTSYGKLTF

SEQ ID NO: 593736 - protein, 12 aa, Homo sapiens
  CDR3 for beta chain variable domain of TCR clone 296868 (TRBV19, TRBJ2-1)
CASSQISNEQFF

SEQ ID NO: 593737 - protein, 15 aa, Homo sapiens
  CDR3 for alpha chain variable domain of TCR clone 296869 (TRAV12-2, TRAJ53)
CPVNGGGGSNYKLTF

SEQ ID NO: 593738 - protein, 16 aa, Homo sapiens
  CDR3 for beta chain variable domain of TCR clone 296869 (TRBV11-3, TRBJ2-7)
CASSPHGAGGPYEQYF

SEQ ID NO: 593739 - protein, 14 aa, Homo sapiens
  CDR3 for alpha chain variable domain of TCR clone 296870 (TRAV8-3, TRAJ6)
CAVGASGGSYIPTF

SEQ ID NO: 593740 - protein, 14 aa, Homo sapiens
  CDR3 for beta chain variable domain of TCR clone 296870 (TRBV18, TRBJ1-2)
CASSPDRVVYGYTF

SEQ ID NO: 593741 - protein, 13 aa, Homo sapiens
  CDR3 for alpha chain variable domain of TCR clone 296871 (TRAV25, TRAJ29)
CAGRFVGNTPLVF

SEQ ID NO: 593742 - protein, 15 aa, Homo sapiens
  CDR3 for beta chain variable domain of TCR clone 296871 (TRBV29-1, TRBJ2-1)
CSVRTSLSSYNEQSF

SEQ ID NO: 593743 - protein, 12 aa, Homo sapiens
  CDR3 for alpha chain variable domain of TCR clone 296872 (TRAV12-3, TRAJ17)
CAMTLTGNKLTF

SEQ ID NO: 593744 - protein, 11 aa, Homo sapiens
  CDR3 for beta chain variable domain of TCR clone 296872 (TRBV20-1, TRBJ2-7)
DRVSGMDEQYF

SEQ ID NO: 593745 - protein, 16 aa, Homo sapiens
  CDR3 for alpha chain variable domain of TCR clone 296873 (TRAV13-1, TRAJ13)
CTALFLGVTRKLPLEL

SEQ ID NO: 593746 - protein, 15 aa, Homo sapiens
  CDR3 for beta chain variable domain of TCR clone 296873 (TRBV7-8, TRBJ2-1)
CASSLADSLYNEQFF

SEQ ID NO: 593747 - protein, 12 aa, Homo sapiens
  CDR3 for alpha chain variable domain of TCR clone 296874 (TRAV12-1, TRAJ40)
CVVPSGTYKYIF

SEQ ID NO: 593748 - protein, 15 aa, Homo sapiens
  CDR3 for beta chain variable domain of TCR clone 296874 (TRBV12-4, TRBJ2-1)
CASSPLSGRNSEQLF

SEQ ID NO: 593749 - protein, 15 aa, Homo sapiens
  CDR3 for alpha chain variable domain of TCR clone 296875 (TRAV17, TRAJ57)
CATGPSQGGSEKLVF

SEQ ID NO: 593750 - protein, 15 aa, Homo sapiens
  CDR3 for beta chain variable domain of TCR clone 296875 (TRBV28, TRBJ1-2)
CASSSHSIANYGYTF

SEQ ID NO: 593751 - protein, 15 aa, Homo sapiens
  CDR3 for alpha chain variable domain of TCR clone 296876 (TRAV8-3, TRAJ27)
CAVGPSKTNEGKSTF

SEQ ID NO: 593752 - protein, 15 aa, Homo sapiens
  CDR3 for beta chain variable domain of TCR clone 296876 (TRBV27, TRBJ2-1)
CASSNGGGSSNEQFF

SEQ ID NO: 593753 - protein, 12 aa, Homo sapiens
  CDR3 for alpha chain variable domain of TCR clone 296877 (TRAV13-2, TRAJ23)
CAERHRGGKLIF

SEQ ID NO: 593754 - protein, 16 aa, Homo sapiens
  CDR3 for beta chain variable domain of TCR clone 296877 (TRBV12-4, TRBJ1-2)
CASSLGQYRPNYGYTV

SEQ ID NO: 593755 - protein, 12 aa, Homo sapiens
  CDR3 for alpha chain variable domain of TCR clone 296878 (TRAV13-1, TRAJ21)
CAAKEGFNNFYF

SEQ ID NO: 593756 - protein, 13 aa, Homo sapiens
  CDR3 for beta chain variable domain of TCR clone 296878 (TRBV4-1, TRBJ2-7)
CASSQGQAYEQYF

SEQ ID NO: 593757 - protein, 14 aa, Homo sapiens
  CDR3 for alpha chain variable domain of TCR clone 296879 (TRAV27, TRAJ22)
CAGLPSGSARQLTF

SEQ ID NO: 593758 - protein, 13 aa, Homo sapiens
  CDR3 for beta chain variable domain of TCR clone 296879 (TRBV27, TRBJ2-7)
CASSFGDSHEQYF

SEQ ID NO: 593759 - protein, 16 aa, Homo sapiens
  CDR3 for alpha chain variable domain of TCR clone 296880 (TRAV23/DV6, TRAJ9)
CAASIGGNTGGFKTFF

SEQ ID NO: 593760 - protein, 14 aa, Homo sapiens
  CDR3 for beta chain variable domain of TCR clone 296880 (TRBV9, TRBJ2-7)
CASSVGVGSYEQYF

SEQ ID NO: 593761 - protein, 17 aa, Homo sapiens
  CDR3 for alpha chain variable domain of TCR clone 296881 (TRAV12-2, TRAJ36)
CAVKDNLFFGTGTRLTV

SEQ ID NO: 593762 - protein, 16 aa, Homo sapiens
  CDR3 for beta chain variable domain of TCR clone 296881 (TRBV5-1, TRBJ2-2)
CASSLWDTTNTGELFF

SEQ ID NO: 593763 - protein, 18 aa, Homo sapiens
  CDR3 for alpha chain variable domain of TCR clone 296882 (TRAV21, TRAJ52)
CAVRPSPAGGTSYVKLTF

SEQ ID NO: 593764 - protein, 17 aa, Homo sapiens
  CDR3 for beta chain variable domain of TCR clone 296882 (TRBV13, TRBJ2-3)
CASSLSRVARGRNTHYF

SEQ ID NO: 593765 - protein, 14 aa, Homo sapiens
  CDR3 for alpha chain variable domain of TCR clone 296883 (TRAV1-1, TRAJ28)
CAALSGAGSYQLTF

SEQ ID NO: 593766 - protein, 15 aa, Homo sapiens
  CDR3 for beta chain variable domain of TCR clone 296883 (TRBV7-2, TRBJ1-2)
CASSLVSGGDYGYTF

SEQ ID NO: 593767 - protein, 14 aa, Homo sapiens
  CDR3 for alpha chain variable domain of TCR clone 296884 (TRAV14/DV4, TRAJ20)
CAMRESLNDYKLSF

SEQ ID NO: 593768 - protein, 15 aa, Homo sapiens
  CDR3 for beta chain variable domain of TCR clone 296884 (TRBV27, TRBJ2-1)
CASSNGGGSANEQFF

SEQ ID NO: 593769 - protein, 12 aa, Homo sapiens
  CDR3 for alpha chain variable domain of TCR clone 296885 (TRAV2, TRAJ10)
CASTGGGTKLTF

SEQ ID NO: 593770 - protein, 14 aa, Homo sapiens
  CDR3 for beta chain variable domain of TCR clone 296885 (TRBV19, TRBJ2-5)
CASSMTGQQETQYF

SEQ ID NO: 593771 - protein, 11 aa, Homo sapiens
  CDR3 for alpha chain variable domain of TCR clone 296886 (TRAV12-3, TRAJ27)
CAMANAGKSTF

SEQ ID NO: 593772 - protein, 14 aa, Homo sapiens
  CDR3 for beta chain variable domain of TCR clone 296886 (TRBV29-1, TRBJ2-2)
CSVLAETNTGELFF

SEQ ID NO: 593773 - protein, 14 aa, Homo sapiens
  CDR3 for alpha chain variable domain of TCR clone 296887 (TRAV1-2, TRAJ8)
CAVREDTGFQKLVF

SEQ ID NO: 593774 - protein, 16 aa, Homo sapiens
  CDR3 for beta chain variable domain of TCR clone 296887 (TRBV7-2, TRBJ1-4)
CASSPVGRFDREKLFF

SEQ ID NO: 593775 - protein, 15 aa, Homo sapiens
  CDR3 for alpha chain variable domain of TCR clone 296888 (TRAV20, TRAJ6)
CTVRLQSGGSYIPTF

SEQ ID NO: 593776 - protein, 14 aa, Homo sapiens
  CDR3 for beta chain variable domain of TCR clone 296888 (TRBV12-4, TRBJ2-7)
CASSAAGGWYEQYF

SEQ ID NO: 593777 - protein, 15 aa, Homo sapiens
  CDR3 for alpha chain variable domain of TCR clone 296889 (TRAV29/DV5, TRAJ42)
CAAKTDGGSQGNLIF

SEQ ID NO: 593778 - protein, 14 aa, Homo sapiens
  CDR3 for beta chain variable domain of TCR clone 296889 (TRBV12-5, TRBJ2-5)
CASGSRTHQETQYF

SEQ ID NO: 593779 - protein, 17 aa, Homo sapiens
  CDR3 for alpha chain variable domain of TCR clone 296890 (TRAV3, TRAJ42)
CAVRDRDYGGCQGNLIF

SEQ ID NO: 593780 - protein, 18 aa, Homo sapiens
  CDR3 for beta chain variable domain of TCR clone 296890 (TRBV20-1, TRBJ2-3)
CSASGLAGGPGTTDTQYF

SEQ ID NO: 593781 - protein, 12 aa, Homo sapiens
  CDR3 for alpha chain variable domain of TCR clone 296891 (TRAV12-2, TRAJ36)
CAVRIGANDLFF

SEQ ID NO: 593782 - protein, 16 aa, Homo sapiens
  CDR3 for beta chain variable domain of TCR clone 296891 (TRBV18, TRBJ2-7)
CASSPLPGGLSYEQYC

SEQ ID NO: 593783 - protein, 15 aa, Homo sapiens
  CDR3 for alpha chain variable domain of TCR clone 296892 (TRAV27, TRAJ38)
CAWRFNAGNNRKLIW

SEQ ID NO: 593784 - protein, 13 aa, Homo sapiens
  CDR3 for beta chain variable domain of TCR clone 296892 (TRBV12-5, TRBJ2-3)
CASQNRGTDTQYF

SEQ ID NO: 593785 - protein, 13 aa, Homo sapiens
  CDR3 for alpha chain variable domain of TCR clone 296893 (TRAV35, TRAJ44)
CAGLSGTASKLTF

SEQ ID NO: 593786 - protein, 16 aa, Homo sapiens
  CDR3 for beta chain variable domain of TCR clone 296893 (TRBV7-2, TRBJ1-5)
CASSLGGILTSQPQHF

SEQ ID NO: 593787 - protein, 11 aa, Homo sapiens
  CDR3 for alpha chain variable domain of TCR clone 296894 (TRAV12-2, TRAJ29)
CAVTLRSPLVF

SEQ ID NO: 593788 - protein, 11 aa, Homo sapiens
  CDR3 for beta chain variable domain of TCR clone 296894 (TRBV11-2, TRBJ2-2)
CASSLPGELFF

SEQ ID NO: 593789 - protein, 12 aa, Homo sapiens
  CDR3 for alpha chain variable domain of TCR clone 296895 (TRAV1-2, TRAJ33)
CAALDSNYQLIW

SEQ ID NO: 593790 - protein, 14 aa, Homo sapiens
  CDR3 for beta chain variable domain of TCR clone 296895 (TRBV20-1, TRBJ2-7)
GSAKRGRSSYEQYF

SEQ ID NO: 593791 - protein, 13 aa, Homo sapiens
  CDR3 for alpha chain variable domain of TCR clone 296896 (TRAV29/DV5, TRAJ31)
CAASRNNNARLMV

SEQ ID NO: 593792 - protein, 19 aa, Homo sapiens
  CDR3 for beta chain variable domain of TCR clone 296896 (TRBV7-2, TRBJ2-3)
CASSFLSRNWGGGTDTQYF

SEQ ID NO: 593793 - protein, 16 aa, Homo sapiens
  CDR3 for alpha chain variable domain of TCR clone 296897 (TRAV16, TRAJ52)
CALSAAGGTSYGKLTF

SEQ ID NO: 593794 - protein, 15 aa, Homo sapiens
  CDR3 for beta chain variable domain of TCR clone 296897 (TRBV7-2, TRBJ2-1)
CASSSGLAGGNEQFF

SEQ ID NO: 593795 - protein, 16 aa, Homo sapiens
  CDR3 for alpha chain variable domain of TCR clone 296898 (TRAV12-3, TRAJ53)
CAMSPGSGGSNYKLTF

SEQ ID NO: 593796 - protein, 16 aa, Homo sapiens
  CDR3 for beta chain variable domain of TCR clone 296898 (TRBV4-2, TRBJ1-1)
RASSQAGFGMNTEAFF

SEQ ID NO: 593797 - protein, 14 aa, Homo sapiens
  CDR3 for alpha chain variable domain of TCR clone 296899 (TRAV13-1, TRAJ39)
CAASYNNAGNMLTF

SEQ ID NO: 593798 - protein, 15 aa, Homo sapiens
  CDR3 for beta chain variable domain of TCR clone 296899 (TRBV20-1, TRBJ2-7)
CSARDRVSGMDEQYF

SEQ ID NO: 593799 - protein, 14 aa, Homo sapiens
  CDR3 for alpha chain variable domain of TCR clone 296900 (TRAV17, TRAJ37)
CATDGSRNTGELIF

SEQ ID NO: 593800 - protein, 13 aa, Homo sapiens
  CDR3 for beta chain variable domain of TCR clone 296900 (TRBV11-2, TRBJ2-1)
CASSLDRVNEQFF

SEQ ID NO: 593801 - protein, 17 aa, Homo sapiens
  CDR3 for alpha chain variable domain of TCR clone 296901 (TRAV3, TRAJ6)
CAVRDCPRAGGSYIPTF

SEQ ID NO: 593802 - protein, 14 aa, Homo sapiens
  CDR3 for beta chain variable domain of TCR clone 296901 (TRBV5-1, TRBJ2-7)
CASSFASGVNEQYF

SEQ ID NO: 593803 - protein, 13 aa, Homo sapiens
  CDR3 for alpha chain variable domain of TCR clone 296902 (TRAV2, TRAJ40)
CAVVTSGTYKYIF

SEQ ID NO: 593804 - protein, 13 aa, Homo sapiens
  CDR3 for beta chain variable domain of TCR clone 296902 (TRBV7-8, TRBJ2-7)
CASSLSGPYEQYF

SEQ ID NO: 593805 - protein, 16 aa, Homo sapiens
  CDR3 for alpha chain variable domain of TCR clone 296903 (TRAV23/DV6, TRAJ9)
CAASIGGNTGGFKTIF

SEQ ID NO: 593806 - protein, 17 aa, Homo sapiens
  CDR3 for beta chain variable domain of TCR clone 296903 (TRBV27, TRBJ2-7)
CQQFISEGPRSTYEQYF

SEQ ID NO: 593807 - protein, 17 aa, Homo sapiens
  CDR3 for alpha chain variable domain of TCR clone 296904 (TRAV3, TRAJ42)
CAVRDRDYGGSQGNLIF

SEQ ID NO: 593808 - protein, 14 aa, Homo sapiens
  CDR3 for beta chain variable domain of TCR clone 296904 (TRBV5-4, TRBJ2-5)
CASSLVRGQETQYF

SEQ ID NO: 593809 - protein, 15 aa, Homo sapiens
  CDR3 for alpha chain variable domain of TCR clone 296905 (TRAV25, TRAJ52)
CAGTSGGTSYGKLTF

SEQ ID NO: 593810 - protein, 16 aa, Homo sapiens
  CDR3 for beta chain variable domain of TCR clone 296905 (TRBV15, TRBJ1-2)
CATSIGPRTGGGGYTF

SEQ ID NO: 593811 - protein, 10 aa, Homo sapiens
  CDR3 for alpha chain variable domain of TCR clone 296906 (TRAV23/DV6, TRAJ57)
CAATPTLSQG

SEQ ID NO: 593812 - protein, 14 aa, Homo sapiens
  CDR3 for beta chain variable domain of TCR clone 296906 (TRBV25-1, TRBJ1-1)
CASTHLGGNTEAFF

SEQ ID NO: 593813 - protein, 14 aa, Homo sapiens
  CDR3 for alpha chain variable domain of TCR clone 296907 (TRAV8-4, TRAJ54)
CAVSEVLGAQKLLF

SEQ ID NO: 593814 - protein, 13 aa, Homo sapiens
  CDR3 for beta chain variable domain of TCR clone 296907 (TRBV27, TRBJ2-7)
CASRFVSSYEQYF

SEQ ID NO: 593815 - protein, 15 aa, Homo sapiens
  CDR3 for alpha chain variable domain of TCR clone 296908 (TRAV17, TRAJ57)
CATGPSHGGSEKLVF

SEQ ID NO: 593816 - protein, 13 aa, Homo sapiens
  CDR3 for beta chain variable domain of TCR clone 296908 (TRBV11-2, TRBJ2-5)
CASSSTGEETQYF

SEQ ID NO: 593817 - protein, 16 aa, Homo sapiens
  CDR3 for alpha chain variable domain of TCR clone 296909 (TRAV30, TRAJ24)
CGTEIVDTDSWGKFQF

SEQ ID NO: 593818 - protein, 14 aa, Homo sapiens
  CDR3 for beta chain variable domain of TCR clone 296909 (TRBV12-5, TRBJ2-5)
CASGSRTHQEDQYF

SEQ ID NO: 593819 - protein, 14 aa, Homo sapiens
  CDR3 for alpha chain variable domain of TCR clone 296910 (TRAV12-3, TRAJ9)
CAMSPNTGGFKTIF

SEQ ID NO: 593820 - protein, 13 aa, Homo sapiens
  CDR3 for beta chain variable domain of TCR clone 296910 (TRBV10-3, TRBJ2-7)
CASRAGGPHEQYF

SEQ ID NO: 593821 - protein, 12 aa, Homo sapiens
  CDR3 for alpha chain variable domain of TCR clone 296911 (TRAV3, TRAJ20)
CAVRYPDYKLSF

SEQ ID NO: 593822 - protein, 11 aa, Homo sapiens
  CDR3 for beta chain variable domain of TCR clone 296911 (TRBV28, TRBJ2-5)
CASSLKETQYF

SEQ ID NO: 593823 - protein, 13 aa, Homo sapiens
  CDR3 for alpha chain variable domain of TCR clone 296912 (TRAV1-1, TRAJ9)
CAAKNTGGFRAIF

SEQ ID NO: 593824 - protein, 14 aa, Homo sapiens
  CDR3 for beta chain variable domain of TCR clone 296912 (TRBV20-1, TRBJ2-1)
CSAQIGGSANEQFF

SEQ ID NO: 593825 - protein, 15 aa, Homo sapiens
  CDR3 for alpha chain variable domain of TCR clone 296913 (TRAV26-1, TRAJ48)
CIALWSWFGNEKLTF

SEQ ID NO: 593826 - protein, 12 aa, Homo sapiens
  CDR3 for beta chain variable domain of TCR clone 296913 (TRBV19, TRBJ2-5)
CASSISEETQYF

SEQ ID NO: 593827 - protein, 13 aa, Homo sapiens
  CDR3 for alpha chain variable domain of TCR clone 296914 (TRAV13-1, TRAJ6)
CAASRGGSYVPTF

SEQ ID NO: 593828 - protein, 15 aa, Homo sapiens
  CDR3 for beta chain variable domain of TCR clone 296914 (TRBV25-1, TRBJ2-5)
CASSDTGTHQETQYF

SEQ ID NO: 593829 - protein, 11 aa, Homo sapiens
  CDR3 for alpha chain variable domain of TCR clone 296915 (TRAV12-3, TRAJ43)
YAISVSNDMRF

SEQ ID NO: 593830 - protein, 13 aa, Homo sapiens
  CDR3 for beta chain variable domain of TCR clone 296915 (TRBV20-1, TRBJ1-1)
CSAPLGGGTEAFF

SEQ ID NO: 593831 - protein, 14 aa, Homo sapiens
  CDR3 for alpha chain variable domain of TCR clone 296916 (TRAV26-1, TRAJ45)
CIEVTGGGADGPTF

SEQ ID NO: 593832 - protein, 16 aa, Homo sapiens
  CDR3 for beta chain variable domain of TCR clone 296916 (TRBV11-3, TRBJ2-5)
CASSSVVAGSTETQYF

SEQ ID NO: 593833 - protein, 13 aa, Homo sapiens
  CDR3 for alpha chain variable domain of TCR clone 296917 (TRAV12-1, TRAJ37)
CVVNAGNTGKLIF

SEQ ID NO: 593834 - protein, 13 aa, Homo sapiens
  CDR3 for beta chain variable domain of TCR clone 296917 (TRBV2, TRBJ1-1)
CASSEGGNTEAFF

SEQ ID NO: 593835 - protein, 16 aa, Homo sapiens
  CDR3 for alpha chain variable domain of TCR clone 296918 (TRAV30, TRAJ24)
CGTEIVDADSWGKFQF

SEQ ID NO: 593836 - protein, 13 aa, Homo sapiens
  CDR3 for beta chain variable domain of TCR clone 296918 (TRBV10-3, TRBJ1-2)
CAISERDSYGYIF

SEQ ID NO: 593837 - protein, 14 aa, Homo sapiens
  CDR3 for alpha chain variable domain of TCR clone 296919 (TRAV24, TRAJ42)
CAQNYGGSQGNLTF

SEQ ID NO: 593838 - protein, 15 aa, Homo sapiens
  CDR3 for beta chain variable domain of TCR clone 296919 (TRBV19, TRBJ1-5)
CASSIPGGAGQPQHF

SEQ ID NO: 593839 - protein, 14 aa, Homo sapiens
  CDR3 for alpha chain variable domain of TCR clone 296920 (TRAV1-2, TRAJ8)
CAVREDTCFQKLVF

SEQ ID NO: 593840 - protein, 13 aa, Homo sapiens
  CDR3 for beta chain variable domain of TCR clone 296920 (TRBV10-3, TRBJ1-2)
CAISERDSYGYTF

SEQ ID NO: 593841 - protein, 10 aa, Homo sapiens
  CDR3 for alpha chain variable domain of TCR clone 296921 (TRAV21, TRAJ31)
CAVDNARLMF

SEQ ID NO: 593842 - protein, 13 aa, Homo sapiens
  CDR3 for beta chain variable domain of TCR clone 296921 (TRBV4-1, TRBJ1-1)
SASSRKMNTEAFF

SEQ ID NO: 593843 - protein, 10 aa, Homo sapiens
  CDR3 for alpha chain variable domain of TCR clone 296922 (TRAV36/DV7, TRAJ56)
CSGPAVELTF

SEQ ID NO: 593844 - protein, 13 aa, Homo sapiens
  CDR3 for beta chain variable domain of TCR clone 296922 (TRBV7-9, TRBJ2-7)
CASSFWSSYEQYF

SEQ ID NO: 593845 - protein, 12 aa, Homo sapiens
  CDR3 for alpha chain variable domain of TCR clone 296923 (TRAV36/DV7, TRAJ54)
CAVVRGAQKLVF

SEQ ID NO: 593846 - protein, 16 aa, Homo sapiens
  CDR3 for beta chain variable domain of TCR clone 296923 (TRBV7-7, TRBJ2-1)
CASSLASGTSYNEQFF

SEQ ID NO: 593847 - protein, 14 aa, Homo sapiens
  CDR3 for alpha chain variable domain of TCR clone 296924 (TRAV23/DV6, TRAJ21)
CAAYKSGPRDKFYF

SEQ ID NO: 593848 - protein, 15 aa, Homo sapiens
  CDR3 for beta chain variable domain of TCR clone 296924 (TRBV5-4, TRBJ2-2)
CASSLTARGTGELFF

SEQ ID NO: 593849 - protein, 15 aa, Homo sapiens
  CDR3 for alpha chain variable domain of TCR clone 296925 (TRAV3, TRAJ5)
CAVRDLDTGRKAITF

SEQ ID NO: 593850 - protein, 15 aa, Homo sapiens
  CDR3 for beta chain variable domain of TCR clone 296925 (TRBV20-1, TRBJ2-1)
CSARSPGGPGNEQFF

SEQ ID NO: 593851 - protein, 14 aa, Homo sapiens
  CDR3 for alpha chain variable domain of TCR clone 296926 (TRAV17, TRAJ57)
CATEAQGGSEKLVF

SEQ ID NO: 593852 - protein, 13 aa, Homo sapiens
  CDR3 for beta chain variable domain of TCR clone 296926 (TRBV7-9, TRBJ1-2)
CASSLKQNYGYTF

SEQ ID NO: 593853 - protein, 13 aa, Homo sapiens
  CDR3 for alpha chain variable domain of TCR clone 296927 (TRAV12-2, TRAJ20)
CAVYPSNDYKLSF

SEQ ID NO: 593854 - protein, 15 aa, Homo sapiens
  CDR3 for beta chain variable domain of TCR clone 296927 (TRBV27, TRBJ2-5)
CASSLYPRGGETLYF

SEQ ID NO: 593855 - protein, 15 aa, Homo sapiens
  CDR3 for alpha chain variable domain of TCR clone 296928 (TRAV2, TRAJ9)
CAVVDRGTGGFKTIF

SEQ ID NO: 593856 - protein, 15 aa, Homo sapiens
  CDR3 for beta chain variable domain of TCR clone 296928 (TRBV10-2, TRBJ2-6)
CASSEQGTGANVLTF

SEQ ID NO: 593857 - protein, 14 aa, Homo sapiens
  CDR3 for alpha chain variable domain of TCR clone 296929 (TRAV2, TRAJ37)
CAVDVNSNTGKLIF

SEQ ID NO: 593858 - protein, 15 aa, Homo sapiens
  CDR3 for beta chain variable domain of TCR clone 296929 (TRBV20-1, TRBJ1-1)
CSASRGVTGNTEAFF

SEQ ID NO: 593859 - protein, 13 aa, Homo sapiens
  CDR3 for alpha chain variable domain of TCR clone 296930 (TRAV20, TRAJ56)
CAVQAGANSKLTF

SEQ ID NO: 593860 - protein, 12 aa, Homo sapiens
  CDR3 for beta chain variable domain of TCR clone 296930 (TRBV7-9, TRBJ2-2)
CASSLDTGELFF

SEQ ID NO: 593861 - protein, 23 aa, Homo sapiens
  CDR3 for alpha chain variable domain of TCR clone 296931 (TRAV13-2, TRAJ58)
QLLNLETQLSTFVQRRLDSRLTF

SEQ ID NO: 593862 - protein, 15 aa, Homo sapiens
  CDR3 for beta chain variable domain of TCR clone 296931 (TRBV5-1, TRBJ2-5)
CASSSGREMVETQYF

SEQ ID NO: 593863 - protein, 11 aa, Homo sapiens
  CDR3 for alpha chain variable domain of TCR clone 296932 (TRAV12-1, TRAJ31)
CVGRVQCQTHV

SEQ ID NO: 593864 - protein, 20 aa, Homo sapiens
  CDR3 for beta chain variable domain of TCR clone 296932 (TRBV7-8, TRBJ2-2)
CASSHLFPGPTIHITGELFF

SEQ ID NO: 593865 - protein, 16 aa, Homo sapiens
  CDR3 for alpha chain variable domain of TCR clone 296933 (TRAV30, TRAJ24)
CGTEIVDADSWGKFQF

SEQ ID NO: 593866 - protein, 16 aa, Homo sapiens
  CDR3 for beta chain variable domain of TCR clone 296933 (TRBV4-2, TRBJ2-7)
CASSQDGVERGYEQYF

SEQ ID NO: 593867 - protein, 15 aa, Homo sapiens
  CDR3 for alpha chain variable domain of TCR clone 296934 (TRAV2, TRAJ24)
CAVEVLTDSCGKFQF

SEQ ID NO: 593868 - protein, 14 aa, Homo sapiens
  CDR3 for beta chain variable domain of TCR clone 296934 (TRBV19, TRBJ2-1)
CASSMGSGRRSSSS

SEQ ID NO: 593869 - protein, 18 aa, Homo sapiens
  CDR3 for alpha chain variable domain of TCR clone 296935 (TRAV17, TRAJ45)
CATSLDLYSGGGADGFTF

SEQ ID NO: 593870 - protein, 15 aa, Homo sapiens
  CDR3 for beta chain variable domain of TCR clone 296935 (TRBV11-2, TRBJ2-1)
CASSKNRGLIYEQFF

SEQ ID NO: 593871 - protein, 18 aa, Homo sapiens
  CDR3 for alpha chain variable domain of TCR clone 296936 (TRAV13-1, TRAJ52)
CAASKRSAGGTSYGKLTF

SEQ ID NO: 593872 - protein, 17 aa, Homo sapiens
  CDR3 for beta chain variable domain of TCR clone 296936 (TRBV7-8, TRBJ2-6)
CASSAGTGGAGANVLTF

SEQ ID NO: 593873 - protein, 14 aa, Homo sapiens
  CDR3 for alpha chain variable domain of TCR clone 296937 (TRAV8-3, TRAJ9)
CAVVYNTGGFKTIF

SEQ ID NO: 593874 - protein, 16 aa, Homo sapiens
  CDR3 for beta chain variable domain of TCR clone 296937 (TRBV7-3, TRBJ2-2)
CAISLKRGTLSGELFF

SEQ ID NO: 593875 - protein, 14 aa, Homo sapiens
  CDR3 for alpha chain variable domain of TCR clone 296938 (TRAV1-1, TRAJ27)
CAVIYNTNAGKSTF

SEQ ID NO: 593876 - protein, 13 aa, Homo sapiens
  CDR3 for beta chain variable domain of TCR clone 296938 (TRBV12-4, TRBJ2-5)
CASSPGTEETQYF

SEQ ID NO: 593877 - protein, 13 aa, Homo sapiens
  CDR3 for alpha chain variable domain of TCR clone 296939 (TRAV12-2, TRAJ13)
CREETGGYQKVTF

SEQ ID NO: 593878 - protein, 15 aa, Homo sapiens
  CDR3 for beta chain variable domain of TCR clone 296939 (TRBV27, TRBJ2-1)
CASSNGGGSSNEQFF

SEQ ID NO: 593879 - protein, 13 aa, Homo sapiens
  CDR3 for alpha chain variable domain of TCR clone 296940 (TRAV2, TRAJ15)
CAVASQAGTALIF

SEQ ID NO: 593880 - protein, 16 aa, Homo sapiens
  CDR3 for beta chain variable domain of TCR clone 296940 (TRBV5-1, TRBJ1-1)
CSSSSGGNSLNTEAFF

SEQ ID NO: 593881 - protein, 16 aa, Homo sapiens
  CDR3 for alpha chain variable domain of TCR clone 296941 (TRAV16, TRAJ52)
CALSAAGGTSYGKLTF

SEQ ID NO: 593882 - protein, 11 aa, Homo sapiens
  CDR3 for beta chain variable domain of TCR clone 296941 (TRBV18, TRBJ2-5)
CASSPRETQYF

SEQ ID NO: 593883 - protein, 16 aa, Homo sapiens
  CDR3 for alpha chain variable domain of TCR clone 296942 (TRAV35, TRAJ52)
CAGQGSGGTIYGKLTF

SEQ ID NO: 593884 - protein, 17 aa, Homo sapiens
  CDR3 for beta chain variable domain of TCR clone 296942 (TRBV13, TRBJ2-3)
CASSLSRVAGGRNTQYF

SEQ ID NO: 593885 - protein, 18 aa, Homo sapiens
  CDR3 for alpha chain variable domain of TCR clone 296943 (TRAV8-3, TRAJ4)
WVRDPTSNDNGGYNKLIF

SEQ ID NO: 593886 - protein, 13 aa, Homo sapiens
  CDR3 for beta chain variable domain of TCR clone 296943 (TRBV20-1, TRBJ1-2)
CSATGIQGSGYTI

SEQ ID NO: 593887 - protein, 14 aa, Homo sapiens
  CDR3 for alpha chain variable domain of TCR clone 296944 (TRAV12-3, TRAJ54)
CAMRIIQGAQKLAF

SEQ ID NO: 593888 - protein, 16 aa, Homo sapiens
  CDR3 for beta chain variable domain of TCR clone 296944 (TRBV28, TRBJ2-1)
CASRVPASGRIGEQFF

SEQ ID NO: 593889 - protein, 14 aa, Homo sapiens
  CDR3 for alpha chain variable domain of TCR clone 296945 (TRAV35, TRAJ33)
CAGSSQDSNYQLIW

SEQ ID NO: 593890 - protein, 15 aa, Homo sapiens
  CDR3 for beta chain variable domain of TCR clone 296945 (TRBV7-9, TRBJ2-7)
CASSSSGLAVYEQYF

SEQ ID NO: 593891 - protein, 15 aa, Homo sapiens
  CDR3 for alpha chain variable domain of TCR clone 296946 (TRAV3, TRAJ15)
CAVRPADQAGTALIF

SEQ ID NO: 593892 - protein, 15 aa, Homo sapiens
  CDR3 for beta chain variable domain of TCR clone 296946 (TRBV7-7, TRBJ1-3)
CASSQGEHSGNTIYF

SEQ ID NO: 593893 - protein, 16 aa, Homo sapiens
  CDR3 for alpha chain variable domain of TCR clone 296947 (TRAV12-2, TRAJ40)
CAVIRGGTSGTYKYIF

SEQ ID NO: 593894 - protein, 14 aa, Homo sapiens
  CDR3 for beta chain variable domain of TCR clone 296947 (TRBV20-1, TRBJ2-5)
CSAIDGRAGETQYF

SEQ ID NO: 593895 - protein, 12 aa, Homo sapiens
  CDR3 for alpha chain variable domain of TCR clone 296948 (TRAV12-3, TRAJ17)
CAMTLTGNKLTF

SEQ ID NO: 593896 - protein, 16 aa, Homo sapiens
  CDR3 for beta chain variable domain of TCR clone 296948 (TRBV11-2, TRBJ2-1)
CASSLLLLSSYNEQFF

SEQ ID NO: 593897 - protein, 16 aa, Homo sapiens
  CDR3 for alpha chain variable domain of TCR clone 296949 (TRAV30, TRAJ24)
CGTEIVDADIWGKFQL

SEQ ID NO: 593898 - protein, 14 aa, Homo sapiens
  CDR3 for beta chain variable domain of TCR clone 296949 (TRBV12-5, TRBJ2-5)
CASGSRTHLETQYF

SEQ ID NO: 593899 - protein, 14 aa, Homo sapiens
  CDR3 for alpha chain variable domain of TCR clone 296950 (TRAV38-1, TRAJ45)
CAYYSGGGADGLTF

SEQ ID NO: 593900 - protein, 13 aa, Homo sapiens
  CDR3 for beta chain variable domain of TCR clone 296950 (TRBV19, TRBJ2-7)
CASRKAGGSEQYF

SEQ ID NO: 593901 - protein, 17 aa, Homo sapiens
  CDR3 for alpha chain variable domain of TCR clone 296951 (TRAV26-2, TRAJ42)
CILRDVGYGGSQGNLIF

SEQ ID NO: 593902 - protein, 16 aa, Homo sapiens
  CDR3 for beta chain variable domain of TCR clone 296951 (TRBV12-4, TRBJ2-7)
CASSVIGGRGTYEQYF

SEQ ID NO: 593903 - protein, 11 aa, Homo sapiens
  CDR3 for alpha chain variable domain of TCR clone 296952 (TRAV27, TRAJ20)
CAGLNDYKLSF

SEQ ID NO: 593904 - protein, 15 aa, Homo sapiens
  CDR3 for beta chain variable domain of TCR clone 296952 (TRBV20-1, TRBJ2-7)
CSARDRVSGMDEQYF

SEQ ID NO: 593905 - protein, 14 aa, Homo sapiens
  CDR3 for alpha chain variable domain of TCR clone 296953 (TRAV8-3, TRAJ39)
CAVGANNVGNMLTF

SEQ ID NO: 593906 - protein, 12 aa, Homo sapiens
  CDR3 for beta chain variable domain of TCR clone 296953 (TRBV11-3, TRBJ1-1)
CASSHRQGEAFF

SEQ ID NO: 593907 - protein, 16 aa, Homo sapiens
  CDR3 for alpha chain variable domain of TCR clone 296954 (TRAV12-3, TRAJ53)
CAMSPGSGGSNYKLTF

SEQ ID NO: 593908 - protein, 15 aa, Homo sapiens
  CDR3 for beta chain variable domain of TCR clone 296954 (TRBV2, TRBJ2-2)
CAGSRQGPNTGELFF

SEQ ID NO: 593909 - protein, 12 aa, Homo sapiens
  CDR3 for alpha chain variable domain of TCR clone 296955 (TRAV2, TRAJ33)
CAVWASNYQLIW

SEQ ID NO: 593910 - protein, 16 aa, Homo sapiens
  CDR3 for beta chain variable domain of TCR clone 296955 (TRBV20-1, TRBJ1-4)
CSAPGQGLLTNEKLFF

SEQ ID NO: 593911 - protein, 18 aa, Homo sapiens
  CDR3 for alpha chain variable domain of TCR clone 296956 (TRAV13-1, TRAJ52)
CAASKRSAGGTSYGKLTF

SEQ ID NO: 593912 - protein, 13 aa, Homo sapiens
  CDR3 for beta chain variable domain of TCR clone 296956 (TRBV2, TRBJ1-1)
CASSEGGNTEAFF

SEQ ID NO: 593913 - protein, 14 aa, Homo sapiens
  CDR3 for alpha chain variable domain of TCR clone 296957 (TRAV13-2, TRAJ32)
CAENYGGATNKLIF

SEQ ID NO: 593914 - protein, 14 aa, Homo sapiens
  CDR3 for beta chain variable domain of TCR clone 296957 (TRBV25-1, TRBJ1-1)
CASTHLGGNTEAFF

SEQ ID NO: 593915 - protein, 14 aa, Homo sapiens
  CDR3 for alpha chain variable domain of TCR clone 296958 (TRAV12-2, TRAJ40)
CAAKIPPGTYKYIF

SEQ ID NO: 593916 - protein, 17 aa, Homo sapiens
  CDR3 for beta chain variable domain of TCR clone 296958 (TRBV13, TRBJ2-3)
CASSLSRVAGGRNTQYF

SEQ ID NO: 593917 - protein, 13 aa, Homo sapiens
  CDR3 for alpha chain variable domain of TCR clone 296959 (TRAV27, TRAJ11)
CAGARSGYSTLTF

SEQ ID NO: 593918 - protein, 13 aa, Homo sapiens
  CDR3 for beta chain variable domain of TCR clone 296959 (TRBV25-1, TRBJ2-6)
CASRGPGANVLTF

SEQ ID NO: 593919 - protein, 13 aa, Homo sapiens
  CDR3 for alpha chain variable domain of TCR clone 296960 (TRAV27, TRAJ45)
CRSSEGGADGLTF

SEQ ID NO: 593920 - protein, 15 aa, Homo sapiens
  CDR3 for beta chain variable domain of TCR clone 296960 (TRBV20-1, TRBJ2-7)
CSARDRVSGMDEQYF

SEQ ID NO: 593921 - protein, 15 aa, Homo sapiens
  CDR3 for alpha chain variable domain of TCR clone 296961 (TRAV29/DV5, TRAJ29)
CAASAFNSGNTPLVF

SEQ ID NO: 593922 - protein, 16 aa, Homo sapiens
  CDR3 for beta chain variable domain of TCR clone 296961 (TRBV4-2, TRBJ2-1)
CASSPRAGQGANEQFF

SEQ ID NO: 593923 - protein, 16 aa, Homo sapiens
  CDR3 for alpha chain variable domain of TCR clone 296962 (TRAV23/DV6, TRAJ9)
CAASIGGNTGGFKTIF

SEQ ID NO: 593924 - protein, 13 aa, Homo sapiens
  CDR3 for beta chain variable domain of TCR clone 296962 (TRBV3-1, TRBJ1-1)
CASSPGVITEAFF

SEQ ID NO: 593925 - protein, 16 aa, Homo sapiens
  CDR3 for alpha chain variable domain of TCR clone 296963 (TRAV30, TRAJ24)
CGTEIVDADSWGKFQF

SEQ ID NO: 593926 - protein, 14 aa, Homo sapiens
  CDR3 for beta chain variable domain of TCR clone 296963 (TRBV19, TRBJ2-1)
CASSLAGTYNEQFF

SEQ ID NO: 593927 - protein, 14 aa, Homo sapiens
  CDR3 for alpha chain variable domain of TCR clone 296964 (TRAV12-3, TRAJ47)
CAMSVREYGNKLVF

SEQ ID NO: 593928 - protein, 14 aa, Homo sapiens
  CDR3 for beta chain variable domain of TCR clone 296964 (TRBV11-2, TRBJ1-4)
CARSYGNRNEKLFF

SEQ ID NO: 593929 - protein, 16 aa, Homo sapiens
  CDR3 for alpha chain variable domain of TCR clone 296965 (TRAV21, TRAJ17)
CAVRPGEEAEGNKLTF

SEQ ID NO: 593930 - protein, 16 aa, Homo sapiens
  CDR3 for beta chain variable domain of TCR clone 296965 (TRBV2, TRBJ2-7)
CASSEPWTGPSYEQYF

SEQ ID NO: 593931 - protein, 15 aa, Homo sapiens
  CDR3 for alpha chain variable domain of TCR clone 296966 (TRAV27, TRAJ45)
CAPVDSGGGADGLTF

SEQ ID NO: 593932 - protein, 15 aa, Homo sapiens
  CDR3 for beta chain variable domain of TCR clone 296966 (TRBV23-1, TRBJ1-5)
CASSQSRVQGWGAYI

SEQ ID NO: 593933 - protein, 23 aa, Homo sapiens
  CDR3 for alpha chain variable domain of TCR clone 296967 (TRAV4, TRAJ26)
IPADRKSSTLSLPRVYYGQNFVF

SEQ ID NO: 593934 - protein, 16 aa, Homo sapiens
  CDR3 for beta chain variable domain of TCR clone 296967 (TRBV7-2, TRBJ1-2)
CASSSNQDRRDHGYTF

SEQ ID NO: 593935 - protein, 15 aa, Homo sapiens
  CDR3 for alpha chain variable domain of TCR clone 296968 (TRAV17, TRAJ57)
CATGPSQGGSEKLVF

SEQ ID NO: 593936 - protein, 17 aa, Homo sapiens
  CDR3 for beta chain variable domain of TCR clone 296968 (TRBV20-1, TRBJ2-1)
CSASSSGLAGSYNEQFF

SEQ ID NO: 593937 - protein, 13 aa, Homo sapiens
  CDR3 for alpha chain variable domain of TCR clone 296969 (TRAV12-3, TRAJ7)
CAMSASGNNRLAF

SEQ ID NO: 593938 - protein, 15 aa, Homo sapiens
  CDR3 for beta chain variable domain of TCR clone 296969 (TRBV4-1, TRBJ2-1)
CASSQGGELYNEQFF

SEQ ID NO: 593939 - protein, 16 aa, Homo sapiens
  CDR3 for alpha chain variable domain of TCR clone 296970 (TRAV38-1, TRAJ32)
CAFMKGGGGATNKLIF

SEQ ID NO: 593940 - protein, 13 aa, Homo sapiens
  CDR3 for beta chain variable domain of TCR clone 296970 (TRBV20-1, TRBJ2-5)
CGAREAFQETQYF

SEQ ID NO: 593941 - protein, 19 aa, Homo sapiens
  CDR3 for alpha chain variable domain of TCR clone 296971 (TRAV3, TRAJ6)
CAVRDGPREEEATYLHLEE

SEQ ID NO: 593942 - protein, 18 aa, Homo sapiens
  CDR3 for beta chain variable domain of TCR clone 296971 (TRBV7-9, TRBJ2-7)
CASSLTTSGSRTWYEQYF

SEQ ID NO: 593943 - protein, 13 aa, Homo sapiens
  CDR3 for alpha chain variable domain of TCR clone 296972 (TRAV12-1, TRAJ33)
CGDAPDSNYQLIW

SEQ ID NO: 593944 - protein, 14 aa, Homo sapiens
  CDR3 for beta chain variable domain of TCR clone 296972 (TRBV13, TRBJ2-7)
CASSLKGASHEQYF

SEQ ID NO: 593945 - protein, 17 aa, Homo sapiens
  CDR3 for alpha chain variable domain of TCR clone 296973 (TRAV4, TRAJ18)
CLVGERSVGSTLGRLYF

SEQ ID NO: 593946 - protein, 14 aa, Homo sapiens
  CDR3 for beta chain variable domain of TCR clone 296973 (TRBV2, TRBJ2-5)
CASSEVLAQETQYF

SEQ ID NO: 593947 - protein, 11 aa, Homo sapiens
  CDR3 for alpha chain variable domain of TCR clone 296974 (TRAV4, TRAJ31)
CLVGDNARLMF

SEQ ID NO: 593948 - protein, 12 aa, Homo sapiens
  CDR3 for beta chain variable domain of TCR clone 296974 (TRBV7-2, TRBJ2-7)
CASSLEGYEQYF

SEQ ID NO: 593949 - protein, 12 aa, Homo sapiens
  CDR3 for alpha chain variable domain of TCR clone 296975 (TRAV1-2, TRAJ33)
CAALDSNYQLIW

SEQ ID NO: 593950 - protein, 13 aa, Homo sapiens
  CDR3 for beta chain variable domain of TCR clone 296975 (TRBV10-3, TRBJ2-7)
CASKLAVNYEQYF

SEQ ID NO: 593951 - protein, 14 aa, Homo sapiens
  CDR3 for alpha chain variable domain of TCR clone 296976 (TRAV26-1, TRAJ58)
CIVRVETSGSRLTF

SEQ ID NO: 593952 - protein, 15 aa, Homo sapiens
  CDR3 for beta chain variable domain of TCR clone 296976 (TRBV7-4, TRBJ1-2)
CQQPLTGGLSYGYTF

SEQ ID NO: 593953 - protein, 13 aa, Homo sapiens
  CDR3 for alpha chain variable domain of TCR clone 296977 (TRAV27, TRAJ17)
CAGAATAGNKLTF

SEQ ID NO: 593954 - protein, 15 aa, Homo sapiens
  CDR3 for beta chain variable domain of TCR clone 296977 (TRBV5-1, TRBJ2-3)
CASRHQAGSTDTQYF

SEQ ID NO: 593955 - protein, 15 aa, Homo sapiens
  CDR3 for alpha chain variable domain of TCR clone 296978 (TRAV4, TRAJ39)
CLVGPNNNAGNMLTF

SEQ ID NO: 593956 - protein, 13 aa, Homo sapiens
  CDR3 for beta chain variable domain of TCR clone 296978 (TRBV7-2, TRBJ2-7)
CASSSPSGSEQYF

SEQ ID NO: 593957 - protein, 14 aa, Homo sapiens
  CDR3 for alpha chain variable domain of TCR clone 296979 (TRAV12-2, TRAJ17)
RAVLFKAAGNKLTV

SEQ ID NO: 593958 - protein, 20 aa, Homo sapiens
  CDR3 for beta chain variable domain of TCR clone 296979 (TRBV7-8, TRBJ2-2)
CASSHLFPGPTIHITGELFF

SEQ ID NO: 593959 - protein, 14 aa, Homo sapiens
  CDR3 for alpha chain variable domain of TCR clone 296980 (TRAV29/DV5, TRAJ36)
CAARRKTGAKNLFF

SEQ ID NO: 593960 - protein, 15 aa, Homo sapiens
  CDR3 for beta chain variable domain of TCR clone 296980 (TRBV5-1, TRBJ2-2)
CASSLFGQNTGELFF

SEQ ID NO: 593961 - protein, 11 aa, Homo sapiens
  CDR3 for alpha chain variable domain of TCR clone 296981 (TRAV12-1, TRAJ30)
CVVNGQYKIIF

SEQ ID NO: 593962 - protein, 16 aa, Homo sapiens
  CDR3 for beta chain variable domain of TCR clone 296981 (TRBV24-1, TRBJ2-3)
CATSDAISGITDTQYF

SEQ ID NO: 593963 - protein, 15 aa, Homo sapiens
  CDR3 for alpha chain variable domain of TCR clone 296982 (TRAV8-3, TRAJ15)
CAVGAPNQAGTAPIF

SEQ ID NO: 593964 - protein, 14 aa, Homo sapiens
  CDR3 for beta chain variable domain of TCR clone 296982 (TRBV20-1, TRBJ2-1)
CSPNDEASYNEQFF

SEQ ID NO: 593965 - protein, 14 aa, Homo sapiens
  CDR3 for alpha chain variable domain of TCR clone 296983 (TRAV17, TRAJ31)
CATVLRNNNARLMF

SEQ ID NO: 593966 - protein, 14 aa, Homo sapiens
  CDR3 for beta chain variable domain of TCR clone 296983 (TRBV12-4, TRBJ2-7)
CASSLWQKQETQYF

SEQ ID NO: 593967 - protein, 13 aa, Homo sapiens
  CDR3 for alpha chain variable domain of TCR clone 296984 (TRAV12-2, TRAJ6)
CAVNVSRKLHTYI

SEQ ID NO: 593968 - protein, 19 aa, Homo sapiens
  CDR3 for beta chain variable domain of TCR clone 296984 (TRBV25-1, TRBJ2-2)
CAILVYRVDRGRKTGELFF

SEQ ID NO: 593969 - protein, 14 aa, Homo sapiens
  CDR3 for alpha chain variable domain of TCR clone 296985 (TRAV26-1, TRAJ38)
CIADNAGNNRKLIW

SEQ ID NO: 593970 - protein, 15 aa, Homo sapiens
  CDR3 for beta chain variable domain of TCR clone 296985 (TRBV20-1, TRBJ2-7)
CSARDRVSGMDEQYI

SEQ ID NO: 593971 - protein, 15 aa, Homo sapiens
  CDR3 for alpha chain variable domain of TCR clone 296986 (TRAV14/DV4, TRAJ12)
CAMREERDSSYKLIF

SEQ ID NO: 593972 - protein, 15 aa, Homo sapiens
  CDR3 for beta chain variable domain of TCR clone 296986 (TRBV9, TRBJ2-1)
CASSLAGSSYNEQFF

SEQ ID NO: 593973 - protein, 14 aa, Homo sapiens
  CDR3 for alpha chain variable domain of TCR clone 296987 (TRAV23/DV6, TRAJ27)
CAASRDTSAGKSTF

SEQ ID NO: 593974 - protein, 13 aa, Homo sapiens
  CDR3 for beta chain variable domain of TCR clone 296987 (TRBV20-1, TRBJ1-5)
CSASGRGSQPQHF

SEQ ID NO: 593975 - protein, 14 aa, Homo sapiens
  CDR3 for alpha chain variable domain of TCR clone 296988 (TRAV2, TRAJ37)
CAVDFTSNTGKLIF

SEQ ID NO: 593976 - protein, 12 aa, Homo sapiens
  CDR3 for beta chain variable domain of TCR clone 296988 (TRBV7-9, TRBJ2-3)
CASSFITDTQYF

SEQ ID NO: 593977 - protein, 12 aa, Homo sapiens
  CDR3 for alpha chain variable domain of TCR clone 296989 (TRAV21, TRAJ23)
CAVGPQGGKLIF

SEQ ID NO: 593978 - protein, 16 aa, Homo sapiens
  CDR3 for beta chain variable domain of TCR clone 296989 (TRBV7-9, TRBJ1-2)
CASSLGFSSGEDGYTF

SEQ ID NO: 593979 - protein, 14 aa, Homo sapiens
  CDR3 for alpha chain variable domain of TCR clone 296990 (TRAV17, TRAJ24)
CATLTTASWGKFQF

SEQ ID NO: 593980 - protein, 16 aa, Homo sapiens
  CDR3 for beta chain variable domain of TCR clone 296990 (TRBV4-2, TRBJ2-7)
CASSQDGGSLRGEQYF

SEQ ID NO: 593981 - protein, 16 aa, Homo sapiens
  CDR3 for alpha chain variable domain of TCR clone 296991 (TRAV38-1, TRAJ37)
CAFKGDGSSNTGKLIF

SEQ ID NO: 593982 - protein, 13 aa, Homo sapiens
  CDR3 for beta chain variable domain of TCR clone 296991 (TRBV12-4, TRBJ2-5)
CASSLYRRETQYF

SEQ ID NO: 593983 - protein, 10 aa, Homo sapiens
  CDR3 for alpha chain variable domain of TCR clone 296992 (TRAV23/DV6, TRAJ57)
CAASSTLSQS

SEQ ID NO: 593984 - protein, 14 aa, Homo sapiens
  CDR3 for beta chain variable domain of TCR clone 296992 (TRBV25-1, TRBJ1-1)
CASTHLGGNNEAFF

SEQ ID NO: 593985 - protein, 13 aa, Homo sapiens
  CDR3 for alpha chain variable domain of TCR clone 296993 (TRAV29/DV5, TRAJ31)
CAASRNNNARLMF

SEQ ID NO: 593986 - protein, 16 aa, Homo sapiens
  CDR3 for beta chain variable domain of TCR clone 296993 (TRBV4-3, TRBJ2-3)
CASSLGLAGEGDTQYF

SEQ ID NO: 593987 - protein, 16 aa, Homo sapiens
  CDR3 for alpha chain variable domain of TCR clone 296994 (TRAV30, TRAJ24)
CGTEIVDADSWGKLQF

SEQ ID NO: 593988 - protein, 13 aa, Homo sapiens
  CDR3 for beta chain variable domain of TCR clone 296994 (TRBV7-2, TRBJ2-2)
CASSLAVTGELFF

SEQ ID NO: 593989 - protein, 20 aa, Homo sapiens
  CDR3 for alpha chain variable domain of TCR clone 296995 (TRAV1-2, TRAJ34)
LLKELQMKDSASPNTDKPIF

SEQ ID NO: 593990 - protein, 18 aa, Homo sapiens
  CDR3 for beta chain variable domain of TCR clone 296995 (TRBV20-1, TRBJ2-6)
CSAETTPTHGSGANVLTF

SEQ ID NO: 593991 - protein, 11 aa, Homo sapiens
  CDR3 for alpha chain variable domain of TCR clone 296996 (TRAV12-3, TRAJ43)
CAMSVSNDMRF

SEQ ID NO: 593992 - protein, 15 aa, Homo sapiens
  CDR3 for beta chain variable domain of TCR clone 296996 (TRBV11-3, TRBJ2-5)
CASSDTSGGIETQYF

SEQ ID NO: 593993 - protein, 16 aa, Homo sapiens
  CDR3 for alpha chain variable domain of TCR clone 296997 (TRAV3, TRAJ10)
CAVRDMRAGGGNKLTF

SEQ ID NO: 593994 - protein, 17 aa, Homo sapiens
  CDR3 for beta chain variable domain of TCR clone 296997 (TRBV20-1, TRBJ2-2)
FSASGSGQGGLTGELFF

SEQ ID NO: 593995 - protein, 14 aa, Homo sapiens
  CDR3 for alpha chain variable domain of TCR clone 296998 (TRAV12-3, TRAJ10)
SHLPLTGGGNKLTF

SEQ ID NO: 593996 - protein, 18 aa, Homo sapiens
  CDR3 for beta chain variable domain of TCR clone 296998 (TRBV6-6, TRBJ1-3)
CDSSYSKWDSISGNTIYF

SEQ ID NO: 593997 - protein, 13 aa, Homo sapiens
  CDR3 for alpha chain variable domain of TCR clone 296999 (TRAV12-2, TRAJ42)
CAVKRGSQGNLIL

SEQ ID NO: 593998 - protein, 16 aa, Homo sapiens
  CDR3 for beta chain variable domain of TCR clone 296999 (TRBV9, TRBJ2-2)
CASSAMGKGNTGELFF

SEQ ID NO: 593999 - protein, 15 aa, Homo sapiens
  CDR3 for alpha chain variable domain of TCR clone 297000 (TRAV2, TRAJ24)
CAVEVLTDSWGEFQF

SEQ ID NO: 594000 - protein, 13 aa, Homo sapiens
  CDR3 for beta chain variable domain of TCR clone 297000 (TRBV10-2, TRBJ2-7)
CASGTSGGYEQYF

SEQ ID NO: 594001 - protein, 15 aa, Homo sapiens
  CDR3 for alpha chain variable domain of TCR clone 297001 (TRAV8-2, TRAJ15)
CVVSDRYQAGTALIF

SEQ ID NO: 594002 - protein, 12 aa, Homo sapiens
  CDR3 for beta chain variable domain of TCR clone 297001 (TRBV20-1, TRBJ1-1)
QCPDRRNTEAFF

SEQ ID NO: 594003 - protein, 16 aa, Homo sapiens
  CDR3 for alpha chain variable domain of TCR clone 297002 (TRAV17, TRAJ52)
CATDPMGGTSYGKLTF

SEQ ID NO: 594004 - protein, 15 aa, Homo sapiens
  CDR3 for beta chain variable domain of TCR clone 297002 (TRBV6-5, TRBJ2-1)
CASSYDAGAGNEQFF

SEQ ID NO: 594005 - protein, 13 aa, Homo sapiens
  CDR3 for alpha chain variable domain of TCR clone 297003 (TRAV8-3, TRAJ43)
CAVVPYNNNDMRF

SEQ ID NO: 594006 - protein, 17 aa, Homo sapiens
  CDR3 for beta chain variable domain of TCR clone 297003 (TRBV5-1, TRBJ2-1)
CASSLGQMSFSDNEQFF

SEQ ID NO: 594007 - protein, 13 aa, Homo sapiens
  CDR3 for alpha chain variable domain of TCR clone 297004 (TRAV12-3, TRAJ7)
CAMSASGNNRLAF

SEQ ID NO: 594008 - protein, 15 aa, Homo sapiens
  CDR3 for beta chain variable domain of TCR clone 297004 (TRBV6-1, TRBJ2-1)
CASSELRGQYNEQFF

SEQ ID NO: 594009 - protein, 12 aa, Homo sapiens
  CDR3 for alpha chain variable domain of TCR clone 297005 (TRAV13-2, TRAJ23)
CAERHRGGKRIF

SEQ ID NO: 594010 - protein, 13 aa, Homo sapiens
  CDR3 for beta chain variable domain of TCR clone 297005 (TRBV10-3, TRBJ2-7)
CASKLAVNYEQYF

SEQ ID NO: 594011 - protein, 14 aa, Homo sapiens
  CDR3 for alpha chain variable domain of TCR clone 297006 (TRAV12-2, TRAJ17)
CAVLFKAAGNKLTF

SEQ ID NO: 594012 - protein, 15 aa, Homo sapiens
  CDR3 for beta chain variable domain of TCR clone 297006 (TRBV28, TRBJ1-5)
CASSRTGGYVQPQHF

SEQ ID NO: 594013 - protein, 14 aa, Homo sapiens
  CDR3 for alpha chain variable domain of TCR clone 297007 (TRAV16, TRAJ57)
CALPTQGGSEELVF

SEQ ID NO: 594014 - protein, 15 aa, Homo sapiens
  CDR3 for beta chain variable domain of TCR clone 297007 (TRBV28, TRBJ1-3)
CASWGGHLSGNTIYF

SEQ ID NO: 594015 - protein, 14 aa, Homo sapiens
  CDR3 for alpha chain variable domain of TCR clone 297008 (TRAV1-2, TRAJ16)
CAVNRFSDGQQLLF

SEQ ID NO: 594016 - protein, 15 aa, Homo sapiens
  CDR3 for beta chain variable domain of TCR clone 297008 (TRBV12-4, TRBJ2-5)
CASSPPTGLQETQYF

SEQ ID NO: 594017 - protein, 16 aa, Homo sapiens
  CDR3 for alpha chain variable domain of TCR clone 297009 (TRAV12-3, TRAJ53)
CAMSPGSGGSNDKLTF

SEQ ID NO: 594018 - protein, 12 aa, Homo sapiens
  CDR3 for beta chain variable domain of TCR clone 297009 (TRBV11-2, TRBJ2-2)
CASSLPTGELFF

SEQ ID NO: 594019 - protein, 16 aa, Homo sapiens
  CDR3 for alpha chain variable domain of TCR clone 297010 (TRAV1-2, TRAJ10)
CAVRGVLTGGGNTLTF

SEQ ID NO: 594020 - protein, 13 aa, Homo sapiens
  CDR3 for beta chain variable domain of TCR clone 297010 (TRBV20-1, TRBJ1-1)
CSAGTVGNTEAFF

SEQ ID NO: 594021 - protein, 16 aa, Homo sapiens
  CDR3 for alpha chain variable domain of TCR clone 297011 (TRAV41, TRAJ45)
CAVPLYSGGGADGLTF

SEQ ID NO: 594022 - protein, 12 aa, Homo sapiens
  CDR3 for beta chain variable domain of TCR clone 297011 (TRBV5-1, TRBJ1-2)
CASSQDTYGYTF

SEQ ID NO: 594023 - protein, 12 aa, Homo sapiens
  CDR3 for alpha chain variable domain of TCR clone 297012 (TRAV3, TRAJ43)
CAVRDPNNDMRF

SEQ ID NO: 594024 - protein, 20 aa, Homo sapiens
  CDR3 for beta chain variable domain of TCR clone 297012 (TRBV28, TRBJ2-1)
CASTPIGRSPGLAGGNEQFF

SEQ ID NO: 594025 - protein, 13 aa, Homo sapiens
  CDR3 for alpha chain variable domain of TCR clone 297013 (TRAV21, TRAJ45)
CAAPGGGADGLTF

SEQ ID NO: 594026 - protein, 18 aa, Homo sapiens
  CDR3 for beta chain variable domain of TCR clone 297013 (TRBV4-3, TRBJ1-4)
CASSQGSGQGAAKEKLFF

SEQ ID NO: 594027 - protein, 14 aa, Homo sapiens
  CDR3 for alpha chain variable domain of TCR clone 297014 (TRAV26-2, TRAJ32)
CILFRGGATNKLIF

SEQ ID NO: 594028 - protein, 14 aa, Homo sapiens
  CDR3 for beta chain variable domain of TCR clone 297014 (TRBV25-1, TRBJ1-1)
CASTHLGGNTEAFF

SEQ ID NO: 594029 - protein, 13 aa, Homo sapiens
  CDR3 for alpha chain variable domain of TCR clone 297015 (TRAV21, TRAJ27)
CATRPGNAGKSTF

SEQ ID NO: 594030 - protein, 20 aa, Homo sapiens
  CDR3 for beta chain variable domain of TCR clone 297015 (TRBV4-2, TRBJ2-7)
CASSQASGGNLRAVLRAGHQ

SEQ ID NO: 594031 - protein, 17 aa, Homo sapiens
  CDR3 for alpha chain variable domain of TCR clone 297016 (TRAV14/DV4, TRAJ28)
CAMRGTSSGAGSYQITF

SEQ ID NO: 594032 - protein, 13 aa, Homo sapiens
  CDR3 for beta chain variable domain of TCR clone 297016 (TRBV28, TRBJ2-5)
CASSFAGGEIQYF

SEQ ID NO: 594033 - protein, 14 aa, Homo sapiens
  CDR3 for alpha chain variable domain of TCR clone 297017 (TRAV1-2, TRAJ6)
CAVSLSGGSYIPTF

SEQ ID NO: 594034 - protein, 15 aa, Homo sapiens
  CDR3 for beta chain variable domain of TCR clone 297017 (TRBV6-3, TRBJ2-7)
CASSSPGTVFYEQYF

SEQ ID NO: 594035 - protein, 13 aa, Homo sapiens
  CDR3 for alpha chain variable domain of TCR clone 297018 (TRAV36/DV7, TRAJ49)
CAGDSNTGNQFYF

SEQ ID NO: 594036 - protein, 14 aa, Homo sapiens
  CDR3 for beta chain variable domain of TCR clone 297018 (TRBV7-9, TRBJ1-6)
CASRPGTVNSPLHF

SEQ ID NO: 594037 - protein, 14 aa, Homo sapiens
  CDR3 for alpha chain variable domain of TCR clone 297019 (TRAV12-2, TRAJ40)
CAVKIPSGTYKYIF

SEQ ID NO: 594038 - protein, 17 aa, Homo sapiens
  CDR3 for beta chain variable domain of TCR clone 297019 (TRBV7-8, TRBJ2-6)
CASSAGTGGAGANDPTF

SEQ ID NO: 594039 - protein, 10 aa, Homo sapiens
  CDR3 for alpha chain variable domain of TCR clone 297020 (TRAV29/DV5, TRAJ34)
CAEDTDKLIF

SEQ ID NO: 594040 - protein, 15 aa, Homo sapiens
  CDR3 for beta chain variable domain of TCR clone 297020 (TRBV20-1, TRBJ2-7)
CSARDRVSGTDEQYF

SEQ ID NO: 594041 - protein, 17 aa, Homo sapiens
  CDR3 for alpha chain variable domain of TCR clone 297021 (TRAV8-6, TRAJ58)
CAVSSWVGETSGSRLTF

SEQ ID NO: 594042 - protein, 16 aa, Homo sapiens
  CDR3 for beta chain variable domain of TCR clone 297021 (TRBV12-4, TRBJ2-5)
CASSFFVKGRQETQYF

SEQ ID NO: 594043 - protein, 14 aa, Homo sapiens
  CDR3 for alpha chain variable domain of TCR clone 297022 (TRAV27, TRAJ22)
CAGVVPGSARQLTF

SEQ ID NO: 594044 - protein, 12 aa, Homo sapiens
  CDR3 for beta chain variable domain of TCR clone 297022 (TRBV12-5, TRBJ2-5)
CASGQGVETQYF

SEQ ID NO: 594045 - protein, 12 aa, Homo sapiens
  CDR3 for alpha chain variable domain of TCR clone 297023 (TRAV12-1, TRAJ40)
CVVYSGTYKYIF

SEQ ID NO: 594046 - protein, 15 aa, Homo sapiens
  CDR3 for beta chain variable domain of TCR clone 297023 (TRBV7-9, TRBJ1-6)
CASSSPGRGNSPLYF

SEQ ID NO: 594047 - protein, 16 aa, Homo sapiens
  CDR3 for alpha chain variable domain of TCR clone 297024 (TRAV26-1, TRAJ45)
CIVEKYSGGGADGLTF

SEQ ID NO: 594048 - protein, 16 aa, Homo sapiens
  CDR3 for beta chain variable domain of TCR clone 297024 (TRBV28, TRBJ1-4)
CASSPPYRGRSENLFF

SEQ ID NO: 594049 - protein, 14 aa, Homo sapiens
  CDR3 for alpha chain variable domain of TCR clone 297025 (TRAV1-2, TRAJ16)
CAVNRFSDVQKLLF

SEQ ID NO: 594050 - protein, 16 aa, Homo sapiens
  CDR3 for beta chain variable domain of TCR clone 297025 (TRBV6-6, TRBJ1-5)
CASSYSTLVGNQPQHF

SEQ ID NO: 594051 - protein, 12 aa, Homo sapiens
  CDR3 for alpha chain variable domain of TCR clone 297026 (TRAV35, TRAJ49)
CAGWNTGNQFYF

SEQ ID NO: 594052 - protein, 16 aa, Homo sapiens
  CDR3 for beta chain variable domain of TCR clone 297026 (TRBV5-1, TRBJ2-2)
CASSLWDTTNNGELFF

SEQ ID NO: 594053 - protein, 13 aa, Homo sapiens
  CDR3 for alpha chain variable domain of TCR clone 297027 (TRAV8-1, TRAJ30)
CAVIMNRDDKIIF

SEQ ID NO: 594054 - protein, 14 aa, Homo sapiens
  CDR3 for beta chain variable domain of TCR clone 297027 (TRBV7-2, TRBJ1-6)
CASSLQGAISPLHF

SEQ ID NO: 594055 - protein, 12 aa, Homo sapiens
  CDR3 for alpha chain variable domain of TCR clone 297028 (TRAV26-2, TRAJ21)
CILKGNFNKFYF

SEQ ID NO: 594056 - protein, 14 aa, Homo sapiens
  CDR3 for beta chain variable domain of TCR clone 297028 (TRBV7-9, TRBJ1-1)
CASTSLQSYTEAFF

SEQ ID NO: 594057 - protein, 14 aa, Homo sapiens
  CDR3 for alpha chain variable domain of TCR clone 297029 (TRAV8-3, TRAJ4)
CAVGAAGGDNKLIF

SEQ ID NO: 594058 - protein, 14 aa, Homo sapiens
  CDR3 for beta chain variable domain of TCR clone 297029 (TRBV12-5, TRBJ2-5)
CASGSRTHQETQYF

SEQ ID NO: 594059 - protein, 13 aa, Homo sapiens
  CDR3 for alpha chain variable domain of TCR clone 297030 (TRAV12-2, TRAJ4)
CAVRSGGYNKLIF

SEQ ID NO: 594060 - protein, 17 aa, Homo sapiens
  CDR3 for beta chain variable domain of TCR clone 297030 (TRBV13, TRBJ2-3)
CASSLSRVAGGRNTQYF

SEQ ID NO: 594061 - protein, 12 aa, Homo sapiens
  CDR3 for alpha chain variable domain of TCR clone 297031 (TRAV13-1, TRAJ49)
CAARIRSNPFYF

SEQ ID NO: 594062 - protein, 14 aa, Homo sapiens
  CDR3 for beta chain variable domain of TCR clone 297031 (TRBV7-2, TRBJ2-1)
CASSPGLAGNEQFF

SEQ ID NO: 594063 - protein, 14 aa, Homo sapiens
  CDR3 for alpha chain variable domain of TCR clone 297032 (TRAV3, TRAJ33)
CAVRDMRSNYQLIW

SEQ ID NO: 594064 - protein, 17 aa, Homo sapiens
  CDR3 for beta chain variable domain of TCR clone 297032 (TRBV19, TRBJ2-1)
CASSIWSAQPTHNEQFF

SEQ ID NO: 594065 - protein, 17 aa, Homo sapiens
  CDR3 for alpha chain variable domain of TCR clone 297033 (TRAV26-2, TRAJ42)
CILRDESYGGSQGNLIF

SEQ ID NO: 594066 - protein, 15 aa, Homo sapiens
  CDR3 for beta chain variable domain of TCR clone 297033 (TRBV6-6, TRBJ2-7)
CASSYSYGVSYEQYF

SEQ ID NO: 594067 - protein, 15 aa, Homo sapiens
  CDR3 for alpha chain variable domain of TCR clone 297034 (TRAV12-1, TRAJ5)
CVVNMLETGWRALTF

SEQ ID NO: 594068 - protein, 12 aa, Homo sapiens
  CDR3 for beta chain variable domain of TCR clone 297034 (TRBV11-2, TRBJ2-2)
CASSLGGGELFF

SEQ ID NO: 594069 - protein, 14 aa, Homo sapiens
  CDR3 for alpha chain variable domain of TCR clone 297035 (TRAV12-2, TRAJ33)
CAVKRARSNYQLTW

SEQ ID NO: 594070 - protein, 15 aa, Homo sapiens
  CDR3 for beta chain variable domain of TCR clone 297035 (TRBV20-1, TRBJ2-7)
CSARDRVCGMDEQYF

SEQ ID NO: 594071 - protein, 14 aa, Homo sapiens
  CDR3 for alpha chain variable domain of TCR clone 297036 (TRAV30, TRAJ26)
CGTEIVGYGQNFVF

SEQ ID NO: 594072 - protein, 13 aa, Homo sapiens
  CDR3 for beta chain variable domain of TCR clone 297036 (TRBV24-1, TRBJ2-2)
CATSDWSTGELFF

SEQ ID NO: 594073 - protein, 13 aa, Homo sapiens
  CDR3 for alpha chain variable domain of TCR clone 297037 (TRAV1-2, TRAJ9)
CAVLNTGGFKTIF

SEQ ID NO: 594074 - protein, 12 aa, Homo sapiens
  CDR3 for beta chain variable domain of TCR clone 297037 (TRBV7-9, TRBJ1-4)
CASSTDREKLFF

SEQ ID NO: 594075 - protein, 11 aa, Homo sapiens
  CDR3 for alpha chain variable domain of TCR clone 297038 (TRAV26-1, TRAJ27)
CFDPNAGKSTF

SEQ ID NO: 594076 - protein, 18 aa, Homo sapiens
  CDR3 for beta chain variable domain of TCR clone 297038 (TRBV7-9, TRBJ2-6)
CASSFPGAGISGANVLTF

SEQ ID NO: 594077 - protein, 13 aa, Homo sapiens
  CDR3 for alpha chain variable domain of TCR clone 297039 (TRAV12-2, TRAJ6)
RAVNVSRKLHTYI

SEQ ID NO: 594078 - protein, 12 aa, Homo sapiens
  CDR3 for beta chain variable domain of TCR clone 297039 (TRBV29-1, TRBJ2-3)
CSVTGGADTQYF

SEQ ID NO: 594079 - protein, 17 aa, Homo sapiens
  CDR3 for alpha chain variable domain of TCR clone 297040 (TRAV14/DV4, TRAJ4)
CAMREASGRGGYNQLIF

SEQ ID NO: 594080 - protein, 14 aa, Homo sapiens
  CDR3 for beta chain variable domain of TCR clone 297040 (TRBV19, TRBJ2-7)
CASSMGQGAIEQYF

SEQ ID NO: 594081 - protein, 14 aa, Homo sapiens
  CDR3 for alpha chain variable domain of TCR clone 297041 (TRAV27, TRAJ22)
CAGVSVLGKRQLTF

SEQ ID NO: 594082 - protein, 15 aa, Homo sapiens
  CDR3 for beta chain variable domain of TCR clone 297041 (TRBV7-8, TRBJ2-2)
CASSLGQHWAGELFF

SEQ ID NO: 594083 - protein, 18 aa, Homo sapiens
  CDR3 for alpha chain variable domain of TCR clone 297042 (TRAV12-3, TRAJ52)
CAMSVGGAGGTSYGKLTF

SEQ ID NO: 594084 - protein, 12 aa, Homo sapiens
  CDR3 for beta chain variable domain of TCR clone 297042 (TRBV7-9, TRBJ1-5)
CASSPQGQPQHF

SEQ ID NO: 594085 - protein, 15 aa, Homo sapiens
  CDR3 for alpha chain variable domain of TCR clone 297043 (TRAV3, TRAJ4)
CAVRDGTGGYNKLIF

SEQ ID NO: 594086 - protein, 12 aa, Homo sapiens
  CDR3 for beta chain variable domain of TCR clone 297043 (TRBV10-3, TRBJ1-1)
CATMDRPPEAFF

SEQ ID NO: 594087 - protein, 13 aa, Homo sapiens
  CDR3 for alpha chain variable domain of TCR clone 297044 (TRAV3, TRAJ16)
CAVRDRNVQKLLF

SEQ ID NO: 594088 - protein, 15 aa, Homo sapiens
  CDR3 for beta chain variable domain of TCR clone 297044 (TRBV5-1, TRBJ2-1)
CASSPPRAPYNEQLF

SEQ ID NO: 594089 - protein, 14 aa, Homo sapiens
  CDR3 for alpha chain variable domain of TCR clone 297045 (TRAV8-3, TRAJ35)
CAVVPQGFGNVLHS

SEQ ID NO: 594090 - protein, 15 aa, Homo sapiens
  CDR3 for beta chain variable domain of TCR clone 297045 (TRBV6-1, TRBJ2-2)
CASSAGQGYTGELFF

SEQ ID NO: 594091 - protein, 14 aa, Homo sapiens
  CDR3 for alpha chain variable domain of TCR clone 297046 (TRAV8-4, TRAJ8)
CAVSVGTGFQKLLF

SEQ ID NO: 594092 - protein, 15 aa, Homo sapiens
  CDR3 for beta chain variable domain of TCR clone 297046 (TRBV2, TRBJ2-3)
CASSGEGTGTDTQYF

SEQ ID NO: 594093 - protein, 11 aa, Homo sapiens
  CDR3 for alpha chain variable domain of TCR clone 297047 (TRAV12-1, TRAJ30)
CVVNGQDKIIF

SEQ ID NO: 594094 - protein, 16 aa, Homo sapiens
  CDR3 for beta chain variable domain of TCR clone 297047 (TRBV12-4, TRBJ1-5)
CASSRPVGGSNQPQHF

SEQ ID NO: 594095 - protein, 15 aa, Homo sapiens
  CDR3 for alpha chain variable domain of TCR clone 297048 (TRAV3, TRAJ5)
CAVRDRKTGRRALTF

SEQ ID NO: 594096 - protein, 10 aa, Homo sapiens
  CDR3 for beta chain variable domain of TCR clone 297048 (TRBV2, TRBJ2-5)
CASSAATQYF

SEQ ID NO: 594097 - protein, 12 aa, Homo sapiens
  CDR3 for alpha chain variable domain of TCR clone 297049 (TRAV21, TRAJ49)
CAVNDGGTSSIL

SEQ ID NO: 594098 - protein, 14 aa, Homo sapiens
  CDR3 for beta chain variable domain of TCR clone 297049 (TRBV12-5, TRBJ2-5)
CASGSRTHQETQYF

SEQ ID NO: 594099 - protein, 14 aa, Homo sapiens
  CDR3 for alpha chain variable domain of TCR clone 297050 (TRAV12-2, TRAJ13)
CAVKKTGGYQKVTF

SEQ ID NO: 594100 - protein, 13 aa, Homo sapiens
  CDR3 for beta chain variable domain of TCR clone 297050 (TRBV19, TRBJ2-7)
CASSAGHGYEQYF

SEQ ID NO: 594101 - protein, 14 aa, Homo sapiens
  CDR3 for alpha chain variable domain of TCR clone 297051 (TRAV2, TRAJ9)
CAVEDRSGGFKTIF

SEQ ID NO: 594102 - protein, 17 aa, Homo sapiens
  CDR3 for beta chain variable domain of TCR clone 297051 (TRBV10-3, TRBJ1-2)
CAISQTGSASGVDGYTF

SEQ ID NO: 594103 - protein, 11 aa, Homo sapiens
  CDR3 for alpha chain variable domain of TCR clone 297052 (TRAV2, TRAJ33)
CAVDSNYQLIW

SEQ ID NO: 594104 - protein, 16 aa, Homo sapiens
  CDR3 for beta chain variable domain of TCR clone 297052 (TRBV4-2, TRBJ1-1)
CASSPSPGRAAPEAFF

SEQ ID NO: 594105 - protein, 12 aa, Homo sapiens
  CDR3 for alpha chain variable domain of TCR clone 297053 (TRAV3, TRAJ27)
CAVRDNAGKSTF

SEQ ID NO: 594106 - protein, 14 aa, Homo sapiens
  CDR3 for beta chain variable domain of TCR clone 297053 (TRBV5-1, TRBJ1-2)
CASSVDSTNYGYNF

SEQ ID NO: 594107 - protein, 12 aa, Homo sapiens
  CDR3 for alpha chain variable domain of TCR clone 297054 (TRAV12-3, TRAJ17)
CAMTLTGNKLTF

SEQ ID NO: 594108 - protein, 15 aa, Homo sapiens
  CDR3 for beta chain variable domain of TCR clone 297054 (TRBV20-1, TRBJ2-7)
CSARDKVSGMDEQYF

SEQ ID NO: 594109 - protein, 17 aa, Homo sapiens
  CDR3 for alpha chain variable domain of TCR clone 297055 (TRAV13-1, TRAJ28)
CAASPPYSGAGSYQLTF

SEQ ID NO: 594110 - protein, 14 aa, Homo sapiens
  CDR3 for beta chain variable domain of TCR clone 297055 (TRBV19, TRBJ2-1)
CASPTFVLSGEQFF

SEQ ID NO: 594111 - protein, 22 aa, Homo sapiens
  CDR3 for alpha chain variable domain of TCR clone 297056 (TRAV8-6, TRAJ36)
CAVSDWLGQTTSSLGLERDSPL

SEQ ID NO: 594112 - protein, 15 aa, Homo sapiens
  CDR3 for beta chain variable domain of TCR clone 297056 (TRBV9, TRBJ1-6)
CASSVAGTGDSPLHF

SEQ ID NO: 594113 - protein, 14 aa, Homo sapiens
  CDR3 for alpha chain variable domain of TCR clone 297057 (TRAV12-2, TRAJ45)
CAVNPGGGADGLTF

SEQ ID NO: 594114 - protein, 17 aa, Homo sapiens
  CDR3 for beta chain variable domain of TCR clone 297057 (TRBV20-1, TRBJ2-2)
CSASGSGQGGLTGELFF

SEQ ID NO: 594115 - protein, 17 aa, Homo sapiens
  CDR3 for alpha chain variable domain of TCR clone 297058 (TRAV3, TRAJ42)
CAVRDRDYGGSQGNLIV

SEQ ID NO: 594116 - protein, 15 aa, Homo sapiens
  CDR3 for beta chain variable domain of TCR clone 297058 (TRBV6-6, TRBJ2-7)
CASSYSYGGSYKQYF

SEQ ID NO: 594117 - protein, 17 aa, Homo sapiens
  CDR3 for alpha chain variable domain of TCR clone 297059 (TRAV4, TRAJ18)
CLVGERSVGPTLGRLYF

SEQ ID NO: 594118 - protein, 16 aa, Homo sapiens
  CDR3 for beta chain variable domain of TCR clone 297059 (TRBV15, TRBJ1-4)
CATSRDSPPGREKLFF

SEQ ID NO: 594119 - protein, 15 aa, Homo sapiens
  CDR3 for alpha chain variable domain of TCR clone 297060 (TRAV12-2, TRAJ53)
CALNGGGGSNYKLTF

SEQ ID NO: 594120 - protein, 17 aa, Homo sapiens
  CDR3 for beta chain variable domain of TCR clone 297060 (TRBV7-3, TRBJ2-3)
SASSLMKRMRGADTQYF

SEQ ID NO: 594121 - protein, 15 aa, Homo sapiens
  CDR3 for alpha chain variable domain of TCR clone 297061 (TRAV26-2, TRAJ16)
CILSLRFSDGQKLLF

SEQ ID NO: 594122 - protein, 13 aa, Homo sapiens
  CDR3 for beta chain variable domain of TCR clone 297061 (TRBV10-3, TRBJ2-7)
CASRPTEAYEQYF

SEQ ID NO: 594123 - protein, 13 aa, Homo sapiens
  CDR3 for alpha chain variable domain of TCR clone 297062 (TRAV13-1, TRAJ11)
CAAVLAGYSTLTL

SEQ ID NO: 594124 - protein, 17 aa, Homo sapiens
  CDR3 for beta chain variable domain of TCR clone 297062 (TRBV28, TRBJ2-5)
CASSRKGGLAGAETQYF

SEQ ID NO: 594125 - protein, 14 aa, Homo sapiens
  CDR3 for alpha chain variable domain of TCR clone 297063 (TRAV12-1, TRAJ12)
CVVTRMDSSYKLIF

SEQ ID NO: 594126 - protein, 13 aa, Homo sapiens
  CDR3 for beta chain variable domain of TCR clone 297063 (TRBV20-1, TRBJ1-1)
CSARGGGNTEAFY

SEQ ID NO: 594127 - protein, 14 aa, Homo sapiens
  CDR3 for alpha chain variable domain of TCR clone 297064 (TRAV17, TRAJ17)
CATDHRAAGNKLTF

SEQ ID NO: 594128 - protein, 12 aa, Homo sapiens
  CDR3 for beta chain variable domain of TCR clone 297064 (TRBV12-4, TRBJ1-2)
CASSFIWLHLRF

SEQ ID NO: 594129 - protein, 12 aa, Homo sapiens
  CDR3 for alpha chain variable domain of TCR clone 297065 (TRAV20, TRAJ39)
CAVGNAGNMLTF

SEQ ID NO: 594130 - protein, 18 aa, Homo sapiens
  CDR3 for beta chain variable domain of TCR clone 297065 (TRBV20-1, TRBJ2-6)
CSAETTPTHGSGANDLTF

SEQ ID NO: 594131 - protein, 14 aa, Homo sapiens
  CDR3 for alpha chain variable domain of TCR clone 297066 (TRAV12-1, TRAJ16)
CVALPLSDGQKLLF

SEQ ID NO: 594132 - protein, 14 aa, Homo sapiens
  CDR3 for beta chain variable domain of TCR clone 297066 (TRBV11-2, TRBJ2-3)
CASSLGRGTDTQYF

SEQ ID NO: 594133 - protein, 14 aa, Homo sapiens
  CDR3 for alpha chain variable domain of TCR clone 297067 (TRAV13-2, TRAJ17)
CAENSKAAGNKLTF

SEQ ID NO: 594134 - protein, 15 aa, Homo sapiens
  CDR3 for beta chain variable domain of TCR clone 297067 (TRBV27, TRBJ2-1)
CASSNGGGSSNEHFF

SEQ ID NO: 594135 - protein, 14 aa, Homo sapiens
  CDR3 for alpha chain variable domain of TCR clone 297068 (TRAV29/DV5, TRAJ36)
CAARRKTGATNLFF

SEQ ID NO: 594136 - protein, 15 aa, Homo sapiens
  CDR3 for beta chain variable domain of TCR clone 297068 (TRBV20-1, TRBJ2-7)
CSARDRVSGMDEQYF

SEQ ID NO: 594137 - protein, 16 aa, Homo sapiens
  CDR3 for alpha chain variable domain of TCR clone 297069 (TRAV13-1, TRAJ13)
CTAFFLGVTRKLPLDL

SEQ ID NO: 594138 - protein, 12 aa, Homo sapiens
  CDR3 for beta chain variable domain of TCR clone 297069 (TRBV7-2, TRBJ2-1)
CASSPQDIEQFF

SEQ ID NO: 594139 - protein, 14 aa, Homo sapiens
  CDR3 for alpha chain variable domain of TCR clone 297070 (TRAV29/DV5, TRAJ45)
SAASFRGGADGLTF

SEQ ID NO: 594140 - protein, 11 aa, Homo sapiens
  CDR3 for beta chain variable domain of TCR clone 297070 (TRBV11-2, TRBJ2-2)
CASSLPGELFF

SEQ ID NO: 594141 - protein, 13 aa, Homo sapiens
  CDR3 for alpha chain variable domain of TCR clone 297071 (TRAV12-1, TRAJ33)
CGDAPDSTYQLIW

SEQ ID NO: 594142 - protein, 12 aa, Homo sapiens
  CDR3 for beta chain variable domain of TCR clone 297071 (TRBV11-2, TRBJ2-2)
CASSLGGGELFF

SEQ ID NO: 594143 - protein, 14 aa, Homo sapiens
  CDR3 for alpha chain variable domain of TCR clone 297072 (TRAV1-2, TRAJ15)
CAVRDRQAGTALIF

SEQ ID NO: 594144 - protein, 15 aa, Homo sapiens
  CDR3 for beta chain variable domain of TCR clone 297072 (TRBV6-3, TRBJ2-7)
CASSSPGTVFYEQYF

SEQ ID NO: 594145 - protein, 15 aa, Homo sapiens
  CDR3 for alpha chain variable domain of TCR clone 297073 (TRAV21, TRAJ53)
CATLNSGGSNYKLTF

SEQ ID NO: 594146 - protein, 15 aa, Homo sapiens
  CDR3 for beta chain variable domain of TCR clone 297073 (TRBV7-6, TRBJ1-5)
CASSQRSGINQPQHF

SEQ ID NO: 594147 - protein, 17 aa, Homo sapiens
  CDR3 for alpha chain variable domain of TCR clone 297074 (TRAV8-6, TRAJ58)
CAVSSWVGETSGSRLTF

SEQ ID NO: 594148 - protein, 14 aa, Homo sapiens
  CDR3 for beta chain variable domain of TCR clone 297074 (TRBV7-2, TRBJ2-7)
CARGSQGAAYEQYF

SEQ ID NO: 594149 - protein, 12 aa, Homo sapiens
  CDR3 for alpha chain variable domain of TCR clone 297075 (TRAV27, TRAJ9)
CAGESGGFKTTF

SEQ ID NO: 594150 - protein, 18 aa, Homo sapiens
  CDR3 for beta chain variable domain of TCR clone 297075 (TRBV10-2, TRBJ2-2)
CISAPAVHRQADAGELFF

SEQ ID NO: 594151 - protein, 16 aa, Homo sapiens
  CDR3 for alpha chain variable domain of TCR clone 297076 (TRAV12-3, TRAJ53)
CAMSPGSGGSNYKLTF

SEQ ID NO: 594152 - protein, 16 aa, Homo sapiens
  CDR3 for beta chain variable domain of TCR clone 297076 (TRBV2, TRBJ2-1)
CASRPRSGGPYGEQFF

SEQ ID NO: 594153 - protein, 12 aa, Homo sapiens
  CDR3 for alpha chain variable domain of TCR clone 297077 (TRAV3, TRAJ43)
CAVRDPNNDMRF

SEQ ID NO: 594154 - protein, 15 aa, Homo sapiens
  CDR3 for beta chain variable domain of TCR clone 297077 (TRBV6-5, TRBJ2-1)
CASSYDVGAGNEQFF

SEQ ID NO: 594155 - protein, 13 aa, Homo sapiens
  CDR3 for alpha chain variable domain of TCR clone 297078 (TRAV21, TRAJ37)
CAVSSGNTGKLIF

SEQ ID NO: 594156 - protein, 16 aa, Homo sapiens
  CDR3 for beta chain variable domain of TCR clone 297078 (TRBV6-1, TRBJ2-5)
CASSETLDRGAETQYF

SEQ ID NO: 594157 - protein, 14 aa, Homo sapiens
  CDR3 for alpha chain variable domain of TCR clone 297079 (TRAV8-3, TRAJ10)
CAVGNAGGGNRLTF

SEQ ID NO: 594158 - protein, 16 aa, Homo sapiens
  CDR3 for beta chain variable domain of TCR clone 297079 (TRBV11-2, TRBJ1-2)
CASSLDTGGADYGYAF

SEQ ID NO: 594159 - protein, 14 aa, Homo sapiens
  CDR3 for alpha chain variable domain of TCR clone 297080 (TRAV23/DV6, TRAJ27)
CAASRDTNAGKSTF

SEQ ID NO: 594160 - protein, 13 aa, Homo sapiens
  CDR3 for beta chain variable domain of TCR clone 297080 (TRBV7-8, TRBJ2-1)
CASSAGTGNEQFF

SEQ ID NO: 594161 - protein, 14 aa, Homo sapiens
  CDR3 for alpha chain variable domain of TCR clone 297081 (TRAV26-1, TRAJ38)
CIADNAANNRKLIW

SEQ ID NO: 594162 - protein, 14 aa, Homo sapiens
  CDR3 for beta chain variable domain of TCR clone 297081 (TRBV18, TRBJ2-7)
CASSPRGGSYEQYF

SEQ ID NO: 594163 - protein, 14 aa, Homo sapiens
  CDR3 for alpha chain variable domain of TCR clone 297082 (TRAV21, TRAJ38)
CAVMGAGNNRKLIW

SEQ ID NO: 594164 - protein, 13 aa, Homo sapiens
  CDR3 for beta chain variable domain of TCR clone 297082 (TRBV7-9, TRBJ1-2)
CASSLKQNYGYTF

SEQ ID NO: 594165 - protein, 15 aa, Homo sapiens
  CDR3 for alpha chain variable domain of TCR clone 297083 (TRAV27, TRAJ50)
CAGVGRGTSYDKVIF

SEQ ID NO: 594166 - protein, 16 aa, Homo sapiens
  CDR3 for beta chain variable domain of TCR clone 297083 (TRBV7-2, TRBJ1-1)
CASSFYDLTTEAFLDK

SEQ ID NO: 594167 - protein, 18 aa, Homo sapiens
  CDR3 for alpha chain variable domain of TCR clone 297084 (TRAV26-1, TRAJ23)
CIVRVGLEVRSQGGKLIF

SEQ ID NO: 594168 - protein, 16 aa, Homo sapiens
  CDR3 for beta chain variable domain of TCR clone 297084 (TRBV12-4, TRBJ2-5)
CASSFFVRGRQETQYF

SEQ ID NO: 594169 - protein, 12 aa, Homo sapiens
  CDR3 for alpha chain variable domain of TCR clone 297085 (TRAV23/DV6, TRAJ30)
CAASKGDDKITF

SEQ ID NO: 594170 - protein, 13 aa, Homo sapiens
  CDR3 for beta chain variable domain of TCR clone 297085 (TRBV19, TRBJ1-2)
CASSVPGQDGYTF

SEQ ID NO: 594171 - protein, 13 aa, Homo sapiens
  CDR3 for alpha chain variable domain of TCR clone 297086 (TRAV16, TRAJ22)
SAMLAGSARQLTF

SEQ ID NO: 594172 - protein, 15 aa, Homo sapiens
  CDR3 for beta chain variable domain of TCR clone 297086 (TRBV5-5, TRBJ2-7)
CASSLAAPLSYEQYF

SEQ ID NO: 594173 - protein, 17 aa, Homo sapiens
  CDR3 for alpha chain variable domain of TCR clone 297087 (TRAV3, TRAJ6)
CGVRDGPRAGGSYIPTF

SEQ ID NO: 594174 - protein, 13 aa, Homo sapiens
  CDR3 for beta chain variable domain of TCR clone 297087 (TRBV27, TRBJ2-1)
CASRTLGVGEQFF

SEQ ID NO: 594175 - protein, 13 aa, Homo sapiens
  CDR3 for alpha chain variable domain of TCR clone 297088 (TRAV12-3, TRAJ33)
CAMSVNSNYQLIW

SEQ ID NO: 594176 - protein, 14 aa, Homo sapiens
  CDR3 for beta chain variable domain of TCR clone 297088 (TRBV7-6, TRBJ2-7)
CASSPRAGMYEQYF

SEQ ID NO: 594177 - protein, 14 aa, Homo sapiens
  CDR3 for alpha chain variable domain of TCR clone 297089 (TRAV12-2, TRAJ24)
CAVTPADSWGKLQF

SEQ ID NO: 594178 - protein, 14 aa, Homo sapiens
  CDR3 for beta chain variable domain of TCR clone 297089 (TRBV15, TRBJ2-7)
CATSRVARGYEQYF

SEQ ID NO: 594179 - protein, 15 aa, Homo sapiens
  CDR3 for alpha chain variable domain of TCR clone 297090 (TRAV8-3, TRAJ40)
CAVGPYPSGTYKYIF

SEQ ID NO: 594180 - protein, 18 aa, Homo sapiens
  CDR3 for beta chain variable domain of TCR clone 297090 (TRBV7-2, TRBJ2-7)
CASSLDPGVDRASSTSGR

SEQ ID NO: 594181 - protein, 16 aa, Homo sapiens
  CDR3 for alpha chain variable domain of TCR clone 297091 (TRAV8-3, TRAJ8)
CAVPRDGNTGFQKLVF

SEQ ID NO: 594182 - protein, 15 aa, Homo sapiens
  CDR3 for beta chain variable domain of TCR clone 297091 (TRBV6-1, TRBJ2-6)
GASSSRPSGANVLTF

SEQ ID NO: 594183 - protein, 14 aa, Homo sapiens
  CDR3 for alpha chain variable domain of TCR clone 297092 (TRAV12-1, TRAJ13)
CVVIDSGGYQKVTF

SEQ ID NO: 594184 - protein, 12 aa, Homo sapiens
  CDR3 for beta chain variable domain of TCR clone 297092 (TRBV19, TRBJ2-5)
CASSISEETQYF

SEQ ID NO: 594185 - protein, 13 aa, Homo sapiens
  CDR3 for alpha chain variable domain of TCR clone 297093 (TRAV2, TRAJ47)
CAVDREYGNNLVF

SEQ ID NO: 594186 - protein, 17 aa, Homo sapiens
  CDR3 for beta chain variable domain of TCR clone 297093 (TRBV15, TRBJ1-5)
CATSRVKGIYSNQPQHF

SEQ ID NO: 594187 - protein, 14 aa, Homo sapiens
  CDR3 for alpha chain variable domain of TCR clone 297094 (TRAV27, TRAJ40)
CAGSLLSGTYKYIF

SEQ ID NO: 594188 - protein, 15 aa, Homo sapiens
  CDR3 for beta chain variable domain of TCR clone 297094 (TRBV6-3, TRBJ1-4)
CASSSPGQENEKLFF

SEQ ID NO: 594189 - protein, 14 aa, Homo sapiens
  CDR3 for alpha chain variable domain of TCR clone 297095 (TRAV3, TRAJ9)
CAVRLNTGGFKTIF

SEQ ID NO: 594190 - protein, 15 aa, Homo sapiens
  CDR3 for beta chain variable domain of TCR clone 297095 (TRBV7-2, TRBJ2-1)
SASSLASGRVNEQFF

SEQ ID NO: 594191 - protein, 14 aa, Homo sapiens
  CDR3 for alpha chain variable domain of TCR clone 297096 (TRAV6, TRAJ37)
CGGRSSGNTGKLFF

SEQ ID NO: 594192 - protein, 15 aa, Homo sapiens
  CDR3 for beta chain variable domain of TCR clone 297096 (TRBV19, TRBJ2-1)
CASSLTGGAYNEQFF

SEQ ID NO: 594193 - protein, 11 aa, Homo sapiens
  CDR3 for alpha chain variable domain of TCR clone 297097 (TRAV17, TRAJ43)
CATDVTGDMRF

SEQ ID NO: 594194 - protein, 16 aa, Homo sapiens
  CDR3 for beta chain variable domain of TCR clone 297097 (TRBV24-1, TRBJ2-2)
CATSDTGQGGTGELFF

SEQ ID NO: 594195 - protein, 14 aa, Homo sapiens
  CDR3 for alpha chain variable domain of TCR clone 297098 (TRAV12-2, TRAJ24)
CAVTPADSWGKFSL

SEQ ID NO: 594196 - protein, 12 aa, Homo sapiens
  CDR3 for beta chain variable domain of TCR clone 297098 (TRBV3-1, TRBJ2-1)
CASSQGSSGQFF

SEQ ID NO: 594197 - protein, 14 aa, Homo sapiens
  CDR3 for alpha chain variable domain of TCR clone 297099 (TRAV26-1, TRAJ8)
CIVRVDTGFQRLVF

SEQ ID NO: 594198 - protein, 17 aa, Homo sapiens
  CDR3 for beta chain variable domain of TCR clone 297099 (TRBV10-2, TRBJ2-7)
CASWNRGQATYERYFGR

SEQ ID NO: 594199 - protein, 14 aa, Homo sapiens
  CDR3 for alpha chain variable domain of TCR clone 297100 (TRAV12-2, TRAJ9)
CAVNMEGGGFNTIF

SEQ ID NO: 594200 - protein, 14 aa, Homo sapiens
  CDR3 for beta chain variable domain of TCR clone 297100 (TRBV27, TRBJ2-3)
CASRKGGRTDTQYF

SEQ ID NO: 594201 - protein, 12 aa, Homo sapiens
  CDR3 for alpha chain variable domain of TCR clone 297101 (TRAV23/DV6, TRAJ30)
CAASKGDDKITF

SEQ ID NO: 594202 - protein, 17 aa, Homo sapiens
  CDR3 for beta chain variable domain of TCR clone 297101 (TRBV13, TRBJ2-3)
CASSLSRVAGGRNTQYF

SEQ ID NO: 594203 - protein, 13 aa, Homo sapiens
  CDR3 for alpha chain variable domain of TCR clone 297102 (TRAV12-2, TRAJ9)
CAVLETGGFKTIF

SEQ ID NO: 594204 - protein, 14 aa, Homo sapiens
  CDR3 for beta chain variable domain of TCR clone 297102 (TRBV6-3, TRBJ2-7)
CSSRTGVNLYEQYF

SEQ ID NO: 594205 - protein, 14 aa, Homo sapiens
  CDR3 for alpha chain variable domain of TCR clone 297103 (TRAV29/DV5, TRAJ36)
CAALRKTGANNLFF

SEQ ID NO: 594206 - protein, 14 aa, Homo sapiens
  CDR3 for beta chain variable domain of TCR clone 297103 (TRBV12-5, TRBJ2-5)
CASGSRTHQETQYF

SEQ ID NO: 594207 - protein, 15 aa, Homo sapiens
  CDR3 for alpha chain variable domain of TCR clone 297104 (TRAV17, TRAJ23)
FSTDAEDNQGGKLIF

SEQ ID NO: 594208 - protein, 12 aa, Homo sapiens
  CDR3 for beta chain variable domain of TCR clone 297104 (TRBV2, TRBJ2-1)
CAKREGYNEQFF

SEQ ID NO: 594209 - protein, 14 aa, Homo sapiens
  CDR3 for alpha chain variable domain of TCR clone 297105 (TRAV26-1, TRAJ21)
CIVRPPYNFNKFYF

SEQ ID NO: 594210 - protein, 14 aa, Homo sapiens
  CDR3 for beta chain variable domain of TCR clone 297105 (TRBV19, TRBJ2-1)
CASPAFVLSGEQFF

SEQ ID NO: 594211 - protein, 11 aa, Homo sapiens
  CDR3 for alpha chain variable domain of TCR clone 297106 (TRAV8-3, TRAJ18)
CAVGGRQRLNP

SEQ ID NO: 594212 - protein, 14 aa, Homo sapiens
  CDR3 for beta chain variable domain of TCR clone 297106 (TRBV7-2, TRBJ1-2)
CASSQTGSTYGYTF

SEQ ID NO: 594213 - protein, 13 aa, Homo sapiens
  CDR3 for alpha chain variable domain of TCR clone 297107 (TRAV1-2, TRAJ11)
CAVRSSGYSTLTF

SEQ ID NO: 594214 - protein, 14 aa, Homo sapiens
  CDR3 for beta chain variable domain of TCR clone 297107 (TRBV2, TRBJ2-7)
CAGSLTSGGYEQYF

SEQ ID NO: 594215 - protein, 18 aa, Homo sapiens
  CDR3 for alpha chain variable domain of TCR clone 297108 (TRAV21, TRAJ52)
CAVRPSPAGGTSHGKLTF

SEQ ID NO: 594216 - protein, 13 aa, Homo sapiens
  CDR3 for beta chain variable domain of TCR clone 297108 (TRBV10-3, TRBJ2-7)
CASKLAVNYEQYF

SEQ ID NO: 594217 - protein, 15 aa, Homo sapiens
  CDR3 for alpha chain variable domain of TCR clone 297109 (TRAV26-1, TRAJ56)
CIVRVATGANSKLTF

SEQ ID NO: 594218 - protein, 14 aa, Homo sapiens
  CDR3 for beta chain variable domain of TCR clone 297109 (TRBV7-6, TRBJ2-3)
CASSLGTVTDTQYF

SEQ ID NO: 594219 - protein, 14 aa, Homo sapiens
  CDR3 for alpha chain variable domain of TCR clone 297110 (TRAV8-4, TRAJ9)
CAVSARTGGFKTIF

SEQ ID NO: 594220 - protein, 13 aa, Homo sapiens
  CDR3 for beta chain variable domain of TCR clone 297110 (TRBV11-2, TRBJ2-7)
CASSLGDSYEQYF

SEQ ID NO: 594221 - protein, 12 aa, Homo sapiens
  CDR3 for alpha chain variable domain of TCR clone 297111 (TRAV12-2, TRAJ7)
CAVMRGNNRLAF

SEQ ID NO: 594222 - protein, 13 aa, Homo sapiens
  CDR3 for beta chain variable domain of TCR clone 297111 (TRBV14, TRBJ1-1)
CASSREFGTEAFF

SEQ ID NO: 594223 - protein, 16 aa, Homo sapiens
  CDR3 for alpha chain variable domain of TCR clone 297112 (TRAV3, TRAJ10)
CAGRDMRAGGGNKLTF

SEQ ID NO: 594224 - protein, 16 aa, Homo sapiens
  CDR3 for beta chain variable domain of TCR clone 297112 (TRBV12-4, TRBJ1-5)
CASSRPVGGSNQPQHF

SEQ ID NO: 594225 - protein, 13 aa, Homo sapiens
  CDR3 for alpha chain variable domain of TCR clone 297113 (TRAV2, TRAJ29)
CAAQNSGNTPLVF

SEQ ID NO: 594226 - protein, 14 aa, Homo sapiens
  CDR3 for beta chain variable domain of TCR clone 297113 (TRBV2, TRBJ2-7)
CASSLTSGGYEQYF

SEQ ID NO: 594227 - protein, 14 aa, Homo sapiens
  CDR3 for alpha chain variable domain of TCR clone 297114 (TRAV12-1, TRAJ17)
CVVNYKAAGNKLTF

SEQ ID NO: 594228 - protein, 16 aa, Homo sapiens
  CDR3 for beta chain variable domain of TCR clone 297114 (TRBV19, TRBJ2-1)
CASSIKLAGSYNEQFF

SEQ ID NO: 594229 - protein, 11 aa, Homo sapiens
  CDR3 for alpha chain variable domain of TCR clone 297115 (TRAV4, TRAJ31)
CLVGDNARLMF

SEQ ID NO: 594230 - protein, 11 aa, Homo sapiens
  CDR3 for beta chain variable domain of TCR clone 297115 (TRBV29-1, TRBJ2-5)
CSEDRTGTQYF

SEQ ID NO: 594231 - protein, 15 aa, Homo sapiens
  CDR3 for alpha chain variable domain of TCR clone 297116 (TRAV2, TRAJ9)
CAVEDRGTGGFKTIF

SEQ ID NO: 594232 - protein, 13 aa, Homo sapiens
  CDR3 for beta chain variable domain of TCR clone 297116 (TRBV7-7, TRBJ2-5)
CASSRSSQETQYF

SEQ ID NO: 594233 - protein, 15 aa, Homo sapiens
  CDR3 for alpha chain variable domain of TCR clone 297117 (TRAV3, TRAJ42)
CAVRGGTGSQGNLIF

SEQ ID NO: 594234 - protein, 14 aa, Homo sapiens
  CDR3 for beta chain variable domain of TCR clone 297117 (TRBV19, TRBJ1-2)
CASSSLFTRDVYTF

SEQ ID NO: 594235 - protein, 13 aa, Homo sapiens
  CDR3 for alpha chain variable domain of TCR clone 297118 (TRAV27, TRAJ45)
CRSSGGGADGLTF

SEQ ID NO: 594236 - protein, 11 aa, Homo sapiens
  CDR3 for beta chain variable domain of TCR clone 297118 (TRBV19, TRBJ1-1)
CASSIGSEAVF

SEQ ID NO: 594237 - protein, 14 aa, Homo sapiens
  CDR3 for alpha chain variable domain of TCR clone 297119 (TRAV41, TRAJ48)
CAVRPHFGNEKLTF

SEQ ID NO: 594238 - protein, 13 aa, Homo sapiens
  CDR3 for beta chain variable domain of TCR clone 297119 (TRBV19, TRBJ1-2)
CASSVPGQDGYTF

SEQ ID NO: 594239 - protein, 15 aa, Homo sapiens
  CDR3 for alpha chain variable domain of TCR clone 297120 (TRAV20, TRAJ50)
CAVRQMKTSYDKVIF

SEQ ID NO: 594240 - protein, 12 aa, Homo sapiens
  CDR3 for beta chain variable domain of TCR clone 297120 (TRBV14, TRBJ2-5)
CASSQLKETQYF

SEQ ID NO: 594241 - protein, 12 aa, Homo sapiens
  CDR3 for alpha chain variable domain of TCR clone 297121 (TRAV2, TRAJ9)
CAVGAGGFKTIF

SEQ ID NO: 594242 - protein, 15 aa, Homo sapiens
  CDR3 for beta chain variable domain of TCR clone 297121 (TRBV11-2, TRBJ2-1)
CASSRNRGLMYEQFF

SEQ ID NO: 594243 - protein, 14 aa, Homo sapiens
  CDR3 for alpha chain variable domain of TCR clone 297122 (TRAV26-1, TRAJ38)
CIADNAGNNRKLIW

SEQ ID NO: 594244 - protein, 13 aa, Homo sapiens
  CDR3 for beta chain variable domain of TCR clone 297122 (TRBV7-3, TRBJ2-5)
CASSFRGGETQYF

SEQ ID NO: 594245 - protein, 13 aa, Homo sapiens
  CDR3 for alpha chain variable domain of TCR clone 297123 (TRAV23/DV6, TRAJ16)
CAASISDGQKLLF

SEQ ID NO: 594246 - protein, 15 aa, Homo sapiens
  CDR3 for beta chain variable domain of TCR clone 297123 (TRBV28, TRBJ2-5)
CASSPPWSYQETQYF

SEQ ID NO: 594247 - protein, 15 aa, Homo sapiens
  CDR3 for alpha chain variable domain of TCR clone 297124 (TRAV13-1, TRAJ10)
CAATIPTGGGNKLTV

SEQ ID NO: 594248 - protein, 15 aa, Homo sapiens
  CDR3 for beta chain variable domain of TCR clone 297124 (TRBV2, TRBJ2-7)
CASTLLGSGATEQYF

SEQ ID NO: 594249 - protein, 13 aa, Homo sapiens
  CDR3 for alpha chain variable domain of TCR clone 297125 (TRAV2, TRAJ15)
CAVASQAGTAMIF

SEQ ID NO: 594250 - protein, 13 aa, Homo sapiens
  CDR3 for beta chain variable domain of TCR clone 297125 (TRBV4-2, TRBJ1-1)
CASSQAGNTEAFF

SEQ ID NO: 594251 - protein, 16 aa, Homo sapiens
  CDR3 for alpha chain variable domain of TCR clone 297126 (TRAV30, TRAJ24)
CGTEIVDADSWGKFQI

SEQ ID NO: 594252 - protein, 14 aa, Homo sapiens
  CDR3 for beta chain variable domain of TCR clone 297126 (TRBV7-2, TRBJ2-7)
CASRSQGAAYEQYF

SEQ ID NO: 594253 - protein, 15 aa, Homo sapiens
  CDR3 for alpha chain variable domain of TCR clone 297127 (TRAV38-1, TRAJ37)
CAFIHGSGNTGKLIF

SEQ ID NO: 594254 - protein, 12 aa, Homo sapiens
  CDR3 for beta chain variable domain of TCR clone 297127 (TRBV7-9, TRBJ2-7)
CASSFGSYEQNL

SEQ ID NO: 594255 - protein, 15 aa, Homo sapiens
  CDR3 for alpha chain variable domain of TCR clone 297128 (TRAV13-1, TRAJ57)
CAAGNTQGGSEKLVF

SEQ ID NO: 594256 - protein, 13 aa, Homo sapiens
  CDR3 for beta chain variable domain of TCR clone 297128 (TRBV7-6, TRBJ1-5)
CASSQGPNRPQHF

SEQ ID NO: 594257 - protein, 14 aa, Homo sapiens
  CDR3 for alpha chain variable domain of TCR clone 297129 (TRAV13-2, TRAJ4)
CAEKGPKGYNKLSF

SEQ ID NO: 594258 - protein, 13 aa, Homo sapiens
  CDR3 for beta chain variable domain of TCR clone 297129 (TRBV18, TRBJ2-5)
CASSPPGKETQYF

SEQ ID NO: 594259 - protein, 17 aa, Homo sapiens
  CDR3 for alpha chain variable domain of TCR clone 297130 (TRAV3, TRAJ42)
CAVRDRDYGGSQRNLIF

SEQ ID NO: 594260 - protein, 13 aa, Homo sapiens
  CDR3 for beta chain variable domain of TCR clone 297130 (TRBV20-1, TRBJ2-5)
CSARRGTGATQYF

SEQ ID NO: 594261 - protein, 19 aa, Homo sapiens
  CDR3 for alpha chain variable domain of TCR clone 297131 (TRAV17, TRAJ17)
CATDGRPGVIKVAGNKLTF

SEQ ID NO: 594262 - protein, 17 aa, Homo sapiens
  CDR3 for beta chain variable domain of TCR clone 297131 (TRBV12-4, TRBJ1-1)
CASSLSGFRTMNTEAFF

SEQ ID NO: 594263 - protein, 11 aa, Homo sapiens
  CDR3 for alpha chain variable domain of TCR clone 297132 (TRAV1-1, TRAJ16)
CAAGDGHKLLF

SEQ ID NO: 594264 - protein, 16 aa, Homo sapiens
  CDR3 for beta chain variable domain of TCR clone 297132 (TRBV7-3, TRBJ2-2)
CASSLKRGTLSGELFF

SEQ ID NO: 594265 - protein, 12 aa, Homo sapiens
  CDR3 for alpha chain variable domain of TCR clone 297133 (TRAV1-2, TRAJ33)
CAALDSNYQLIW

SEQ ID NO: 594266 - protein, 16 aa, Homo sapiens
  CDR3 for beta chain variable domain of TCR clone 297133 (TRBV6-4, TRBJ1-2)
CATSEAVGDPNYGYTF

SEQ ID NO: 594267 - protein, 14 aa, Homo sapiens
  CDR3 for alpha chain variable domain of TCR clone 297134 (TRAV13-1, TRAJ44)
CAAKATGTASKLTF

SEQ ID NO: 594268 - protein, 16 aa, Homo sapiens
  CDR3 for beta chain variable domain of TCR clone 297134 (TRBV7-9, TRBJ2-6)
CASSLKGPLRANVLSF

SEQ ID NO: 594269 - protein, 17 aa, Homo sapiens
  CDR3 for alpha chain variable domain of TCR clone 297135 (TRAV21, TRAJ52)
CCRPSPAGGTSYGKLTF

SEQ ID NO: 594270 - protein, 17 aa, Homo sapiens
  CDR3 for beta chain variable domain of TCR clone 297135 (TRBV13, TRBJ2-3)
CASSLSRVAGGRNTHYF

SEQ ID NO: 594271 - protein, 14 aa, Homo sapiens
  CDR3 for alpha chain variable domain of TCR clone 297136 (TRAV12-2, TRAJ13)
CAVKKTGGNQKVTF

SEQ ID NO: 594272 - protein, 17 aa, Homo sapiens
  CDR3 for beta chain variable domain of TCR clone 297136 (TRBV20-1, TRBJ2-2)
CSASGSGQGGLTGELFF

SEQ ID NO: 594273 - protein, 14 aa, Homo sapiens
  CDR3 for alpha chain variable domain of TCR clone 297137 (TRAV12-2, TRAJ13)
CAVKKTGGYQKVNF

SEQ ID NO: 594274 - protein, 15 aa, Homo sapiens
  CDR3 for beta chain variable domain of TCR clone 297137 (TRBV27, TRBJ2-1)
CASSNGGGSSSEQFF

SEQ ID NO: 594275 - protein, 14 aa, Homo sapiens
  CDR3 for alpha chain variable domain of TCR clone 297138 (TRAV1-2, TRAJ8)
CAVREYTGFQKLVF

SEQ ID NO: 594276 - protein, 14 aa, Homo sapiens
  CDR3 for beta chain variable domain of TCR clone 297138 (TRBV29-1, TRBJ2-3)
CSAGAGVGADTQYF

SEQ ID NO: 594277 - protein, 14 aa, Homo sapiens
  CDR3 for alpha chain variable domain of TCR clone 297139 (TRAV1-2, TRAJ16)
CAVNRFSDGQKLLF

SEQ ID NO: 594278 - protein, 13 aa, Homo sapiens
  CDR3 for beta chain variable domain of TCR clone 297139 (TRBV7-9, TRBJ2-3)
CASSPGSTDTQYV

SEQ ID NO: 594279 - protein, 14 aa, Homo sapiens
  CDR3 for alpha chain variable domain of TCR clone 297140 (TRAV1-2, TRAJ6)
CAVSLSGGSYIPTF

SEQ ID NO: 594280 - protein, 12 aa, Homo sapiens
  CDR3 for beta chain variable domain of TCR clone 297140 (TRBV5-1, TRBJ2-5)
CASSFSWETQYF

SEQ ID NO: 594281 - protein, 17 aa, Homo sapiens
  CDR3 for alpha chain variable domain of TCR clone 297141 (TRAV26-1, TRAJ58)
YIVRVGAEETSGSRLTF

SEQ ID NO: 594282 - protein, 13 aa, Homo sapiens
  CDR3 for beta chain variable domain of TCR clone 297141 (TRBV12-5, TRBJ1-2)
CASGVRTGNGYTF

SEQ ID NO: 594283 - protein, 17 aa, Homo sapiens
  CDR3 for alpha chain variable domain of TCR clone 297142 (TRAV22, TRAJ53)
CAVEFSNRGGSNYKLTF

SEQ ID NO: 594284 - protein, 15 aa, Homo sapiens
  CDR3 for beta chain variable domain of TCR clone 297142 (TRBV29-1, TRBJ2-1)
CSVPTGLALYNEQFF

SEQ ID NO: 594285 - protein, 12 aa, Homo sapiens
  CDR3 for alpha chain variable domain of TCR clone 297143 (TRAV12-1, TRAJ16)
CVVFRDGKKLLF

SEQ ID NO: 594286 - protein, 15 aa, Homo sapiens
  CDR3 for beta chain variable domain of TCR clone 297143 (TRBV6-5, TRBJ2-1)
CASRGDFDSYNEQFF

SEQ ID NO: 594287 - protein, 17 aa, Homo sapiens
  CDR3 for alpha chain variable domain of TCR clone 297144 (TRAV12-3, TRAJ6)
CAMSARGGAGGSYIPTF

SEQ ID NO: 594288 - protein, 12 aa, Homo sapiens
  CDR3 for beta chain variable domain of TCR clone 297144 (TRBV12-4, TRBJ2-3)
CASSKLPDTQYF

SEQ ID NO: 594289 - protein, 12 aa, Homo sapiens
  CDR3 for alpha chain variable domain of TCR clone 297145 (TRAV12-3, TRAJ17)
CAMTLTGNKLTF

SEQ ID NO: 594290 - protein, 18 aa, Homo sapiens
  CDR3 for beta chain variable domain of TCR clone 297145 (TRBV7-9, TRBJ1-2)
CASSSIAGTSQANYGYTF

SEQ ID NO: 594291 - protein, 12 aa, Homo sapiens
  CDR3 for alpha chain variable domain of TCR clone 297146 (TRAV21, TRAJ42)
CAVGGSQGNLIF

SEQ ID NO: 594292 - protein, 14 aa, Homo sapiens
  CDR3 for beta chain variable domain of TCR clone 297146 (TRBV12-4, TRBJ1-1)
CASSLGTGGNEAFF

SEQ ID NO: 594293 - protein, 17 aa, Homo sapiens
  CDR3 for alpha chain variable domain of TCR clone 297147 (TRAV3, TRAJ12)
CAVRDGGRMDSRYKLIF

SEQ ID NO: 594294 - protein, 13 aa, Homo sapiens
  CDR3 for beta chain variable domain of TCR clone 297147 (TRBV4-2, TRBJ1-1)
CASSKAGNTEAFF

SEQ ID NO: 594295 - protein, 15 aa, Homo sapiens
  CDR3 for alpha chain variable domain of TCR clone 297148 (TRAV2, TRAJ13)
CATPSYSGGYKKVTF

SEQ ID NO: 594296 - protein, 14 aa, Homo sapiens
  CDR3 for beta chain variable domain of TCR clone 297148 (TRBV27, TRBJ2-2)
CASSLGAATGELFF

SEQ ID NO: 594297 - protein, 14 aa, Homo sapiens
  CDR3 for alpha chain variable domain of TCR clone 297149 (TRAV1-2, TRAJ8)
CAVREDTGFQKLVF

SEQ ID NO: 594298 - protein, 16 aa, Homo sapiens
  CDR3 for beta chain variable domain of TCR clone 297149 (TRBV7-6, TRBJ2-6)
CASSLRGLSGANVLTF

SEQ ID NO: 594299 - protein, 13 aa, Homo sapiens
  CDR3 for alpha chain variable domain of TCR clone 297150 (TRAV20, TRAJ20)
CAVRVFNDYKLSF

SEQ ID NO: 594300 - protein, 12 aa, Homo sapiens
  CDR3 for beta chain variable domain of TCR clone 297150 (TRBV9, TRBJ2-1)
CASSITYNEQFF

SEQ ID NO: 594301 - protein, 12 aa, Homo sapiens
  CDR3 for alpha chain variable domain of TCR clone 297151 (TRAV13-1, TRAJ21)
CAAKEGFNKFYF

SEQ ID NO: 594302 - protein, 16 aa, Homo sapiens
  CDR3 for beta chain variable domain of TCR clone 297151 (TRBV13, TRBJ1-1)
CASSRDRIRLNTEAFF

SEQ ID NO: 594303 - protein, 13 aa, Homo sapiens
  CDR3 for alpha chain variable domain of TCR clone 297152 (TRAV39, TRAJ58)
CAGEETSGSRLTF

SEQ ID NO: 594304 - protein, 15 aa, Homo sapiens
  CDR3 for beta chain variable domain of TCR clone 297152 (TRBV29-1, TRBJ2-2)
CSVEEKGRRTGELFF

SEQ ID NO: 594305 - protein, 13 aa, Homo sapiens
  CDR3 for alpha chain variable domain of TCR clone 297153 (TRAV12-2, TRAJ12)
CAVNWDSSYKLIF

SEQ ID NO: 594306 - protein, 15 aa, Homo sapiens
  CDR3 for beta chain variable domain of TCR clone 297153 (TRBV28, TRBJ2-1)
CASSIIAGGRSEQFF

SEQ ID NO: 594307 - protein, 12 aa, Homo sapiens
  CDR3 for alpha chain variable domain of TCR clone 297154 (TRAV23/DV6, TRAJ30)
CAASKGDDKIIF

SEQ ID NO: 594308 - protein, 14 aa, Homo sapiens
  CDR3 for beta chain variable domain of TCR clone 297154 (TRBV19, TRBJ2-7)
CASSIFAGTYEQYF

SEQ ID NO: 594309 - protein, 14 aa, Homo sapiens
  CDR3 for alpha chain variable domain of TCR clone 297155 (TRAV17, TRAJ16)
CATADFPDGQKLLF

SEQ ID NO: 594310 - protein, 15 aa, Homo sapiens
  CDR3 for beta chain variable domain of TCR clone 297155 (TRBV18, TRBJ2-1)
CAGSPPSASYNEQFF

SEQ ID NO: 594311 - protein, 14 aa, Homo sapiens
  CDR3 for alpha chain variable domain of TCR clone 297156 (TRAV1-2, TRAJ16)
CAVNRFSDGQNLLF

SEQ ID NO: 594312 - protein, 16 aa, Homo sapiens
  CDR3 for beta chain variable domain of TCR clone 297156 (TRBV7-3, TRBJ2-2)
CASSLKRGTLSGELFF

SEQ ID NO: 594313 - protein, 12 aa, Homo sapiens
  CDR3 for alpha chain variable domain of TCR clone 297157 (TRAV16, TRAJ10)
CSRTGGGNKLTF

SEQ ID NO: 594314 - protein, 12 aa, Homo sapiens
  CDR3 for beta chain variable domain of TCR clone 297157 (TRBV11-3, TRBJ1-1)
CASSHRQGEAVF

SEQ ID NO: 594315 - protein, 15 aa, Homo sapiens
  CDR3 for alpha chain variable domain of TCR clone 297158 (TRAV2, TRAJ9)
CAVAALNTGGFKTIF

SEQ ID NO: 594316 - protein, 14 aa, Homo sapiens
  CDR3 for beta chain variable domain of TCR clone 297158 (TRBV15, TRBJ2-5)
CATSGDRGQETQYF

SEQ ID NO: 594317 - protein, 20 aa, Homo sapiens
  CDR3 for alpha chain variable domain of TCR clone 297159 (TRAV4, TRAJ29)
CCVLLPRGCVPFSGNTPLVF

SEQ ID NO: 594318 - protein, 17 aa, Homo sapiens
  CDR3 for beta chain variable domain of TCR clone 297159 (TRBV25-1, TRBJ2-7)
CSSSDARVVFSSYEQYF

SEQ ID NO: 594319 - protein, 13 aa, Homo sapiens
  CDR3 for alpha chain variable domain of TCR clone 297160 (TRAV12-3, TRAJ33)
CAMSVNRNYQLIW

SEQ ID NO: 594320 - protein, 16 aa, Homo sapiens
  CDR3 for beta chain variable domain of TCR clone 297160 (TRBV7-3, TRBJ2-3)
CASSLSGYRPEDTQYF

SEQ ID NO: 594321 - protein, 13 aa, Homo sapiens
  CDR3 for alpha chain variable domain of TCR clone 297161 (TRAV2, TRAJ15)
CAVASQAGTALIF

SEQ ID NO: 594322 - protein, 14 aa, Homo sapiens
  CDR3 for beta chain variable domain of TCR clone 297161 (TRBV18, TRBJ2-7)
CASSPRGGPYEQYF

SEQ ID NO: 594323 - protein, 11 aa, Homo sapiens
  CDR3 for alpha chain variable domain of TCR clone 297162 (TRAV29/DV5, TRAJ47)
CAAQRGNKLVF

SEQ ID NO: 594324 - protein, 12 aa, Homo sapiens
  CDR3 for beta chain variable domain of TCR clone 297162 (TRBV11-2, TRBJ2-7)
CASSLPTHEQYF

SEQ ID NO: 594325 - protein, 13 aa, Homo sapiens
  CDR3 for alpha chain variable domain of TCR clone 297163 (TRAV12-3, TRAJ29)
CAMTLSGNTPLVF

SEQ ID NO: 594326 - protein, 16 aa, Homo sapiens
  CDR3 for beta chain variable domain of TCR clone 297163 (TRBV5-1, TRBJ2-2)
CASSLWDTTNTGELFF

SEQ ID NO: 594327 - protein, 12 aa, Homo sapiens
  CDR3 for alpha chain variable domain of TCR clone 297164 (TRAV25, TRAJ35)
CAGIGFGNVLHC

SEQ ID NO: 594328 - protein, 14 aa, Homo sapiens
  CDR3 for beta chain variable domain of TCR clone 297164 (TRBV28, TRBJ1-2)
CASRIQGANYGYTF

SEQ ID NO: 594329 - protein, 17 aa, Homo sapiens
  CDR3 for alpha chain variable domain of TCR clone 297165 (TRAV3, TRAJ6)
CAVRDGPRAGGSYIPTF

SEQ ID NO: 594330 - protein, 13 aa, Homo sapiens
  CDR3 for beta chain variable domain of TCR clone 297165 (TRBV12-5, TRBJ2-3)
CASGDRQSDTLYF

SEQ ID NO: 594331 - protein, 11 aa, Homo sapiens
  CDR3 for alpha chain variable domain of TCR clone 297166 (TRAV35, TRAJ22)
LRPGSARQLTF

SEQ ID NO: 594332 - protein, 15 aa, Homo sapiens
  CDR3 for beta chain variable domain of TCR clone 297166 (TRBV12-4, TRBJ2-5)
CASSPPTGLQETQYF

SEQ ID NO: 594333 - protein, 11 aa, Homo sapiens
  CDR3 for alpha chain variable domain of TCR clone 297167 (TRAV3, TRAJ21)
SAVGNFNKFYF

SEQ ID NO: 594334 - protein, 16 aa, Homo sapiens
  CDR3 for beta chain variable domain of TCR clone 297167 (TRBV19, TRBJ2-1)
CASSRAGPSSYNERFF

SEQ ID NO: 594335 - protein, 13 aa, Homo sapiens
  CDR3 for alpha chain variable domain of TCR clone 297168 (TRAV20, TRAJ37)
CAGCSSNTGKLIF

SEQ ID NO: 594336 - protein, 17 aa, Homo sapiens
  CDR3 for beta chain variable domain of TCR clone 297168 (TRBV7-3, TRBJ2-3)
CASSLMKRMRGADKQYF

SEQ ID NO: 594337 - protein, 14 aa, Homo sapiens
  CDR3 for alpha chain variable domain of TCR clone 297169 (TRAV29/DV5, TRAJ49)
CAASLSNTGNQCYF

SEQ ID NO: 594338 - protein, 15 aa, Homo sapiens
  CDR3 for beta chain variable domain of TCR clone 297169 (TRBV20-1, TRBJ2-1)
CSARGIGGTYNEQFF

SEQ ID NO: 594339 - protein, 17 aa, Homo sapiens
  CDR3 for alpha chain variable domain of TCR clone 297170 (TRAV23/DV6, TRAJ57)
CPASSTLSQGGSEKLVF

SEQ ID NO: 594340 - protein, 14 aa, Homo sapiens
  CDR3 for beta chain variable domain of TCR clone 297170 (TRBV25-1, TRBJ1-1)
CASTHLGGNTEAFF

SEQ ID NO: 594341 - protein, 15 aa, Homo sapiens
  CDR3 for alpha chain variable domain of TCR clone 297171 (TRAV26-1, TRAJ15)
CIVRADNQAGTALIF

SEQ ID NO: 594342 - protein, 15 aa, Homo sapiens
  CDR3 for beta chain variable domain of TCR clone 297171 (TRBV20-1, TRBJ1-1)
CSARSAATSNTEAFF

SEQ ID NO: 594343 - protein, 12 aa, Homo sapiens
  CDR3 for alpha chain variable domain of TCR clone 297172 (TRAV26-1, TRAJ53)
CIEGGSNYKLTF

SEQ ID NO: 594344 - protein, 12 aa, Homo sapiens
  CDR3 for beta chain variable domain of TCR clone 297172 (TRBV7-8, TRBJ2-7)
CASSLGDREQYF

SEQ ID NO: 594345 - protein, 16 aa, Homo sapiens
  CDR3 for alpha chain variable domain of TCR clone 297173 (TRAV3, TRAJ37)
CAVRVRGSGNTGKLIF

SEQ ID NO: 594346 - protein, 11 aa, Homo sapiens
  CDR3 for beta chain variable domain of TCR clone 297173 (TRBV11-2, TRBJ2-2)
CASRLPGELFF

SEQ ID NO: 594347 - protein, 11 aa, Homo sapiens
  CDR3 for alpha chain variable domain of TCR clone 297174 (TRAV2, TRAJ13)
CASGGYQKVTF

SEQ ID NO: 594348 - protein, 17 aa, Homo sapiens
  CDR3 for beta chain variable domain of TCR clone 297174 (TRBV20-1, TRBJ2-7)
CSASGTSGRVGESEQYF

SEQ ID NO: 594349 - protein, 15 aa, Homo sapiens
  CDR3 for alpha chain variable domain of TCR clone 297175 (TRAV29/DV5, TRAJ42)
CAAKTDGGSQGNLIF

SEQ ID NO: 594350 - protein, 14 aa, Homo sapiens
  CDR3 for beta chain variable domain of TCR clone 297175 (TRBV7-2, TRBJ1-1)
CASSFLTGTTEAFF

SEQ ID NO: 594351 - protein, 12 aa, Homo sapiens
  CDR3 for alpha chain variable domain of TCR clone 297176 (TRAV12-1, TRAJ36)
CVVNYWGKQPLL

SEQ ID NO: 594352 - protein, 13 aa, Homo sapiens
  CDR3 for beta chain variable domain of TCR clone 297176 (TRBV14, TRBJ1-1)
CASSREFGTEAFF

SEQ ID NO: 594353 - protein, 11 aa, Homo sapiens
  CDR3 for alpha chain variable domain of TCR clone 297177 (TRAV2, TRAJ13)
CASGGYQKATF

SEQ ID NO: 594354 - protein, 12 aa, Homo sapiens
  CDR3 for beta chain variable domain of TCR clone 297177 (TRBV19, TRBJ2-1)
CASSRQGAEQFF

SEQ ID NO: 594355 - protein, 11 aa, Homo sapiens
  CDR3 for alpha chain variable domain of TCR clone 297178 (TRAV23/DV6, TRAJ9)
CFHTGGFKTIF

SEQ ID NO: 594356 - protein, 15 aa, Homo sapiens
  CDR3 for beta chain variable domain of TCR clone 297178 (TRBV11-3, TRBJ2-3)
CASLKDRREGDTQYF

SEQ ID NO: 594357 - protein, 14 aa, Homo sapiens
  CDR3 for alpha chain variable domain of TCR clone 297179 (TRAV1-2, TRAJ16)
CAVNRFSDGQKLLF

SEQ ID NO: 594358 - protein, 12 aa, Homo sapiens
  CDR3 for beta chain variable domain of TCR clone 297179 (TRBV19, TRBJ2-7)
CASTDRDYEQYF

SEQ ID NO: 594359 - protein, 16 aa, Homo sapiens
  CDR3 for alpha chain variable domain of TCR clone 297180 (TRAV4, TRAJ9)
CLVGDPNRPGGFKIIF

SEQ ID NO: 594360 - protein, 14 aa, Homo sapiens
  CDR3 for beta chain variable domain of TCR clone 297180 (TRBV20-1, TRBJ1-1)
CSAQTRIGGTEAFF

SEQ ID NO: 594361 - protein, 13 aa, Homo sapiens
  CDR3 for alpha chain variable domain of TCR clone 297181 (TRAV35, TRAJ42)
CAGFPGSQGNRIF

SEQ ID NO: 594362 - protein, 17 aa, Homo sapiens
  CDR3 for beta chain variable domain of TCR clone 297181 (TRBV7-8, TRBJ2-6)
CASSAGTGGAGANVLTF

SEQ ID NO: 594363 - protein, 15 aa, Homo sapiens
  CDR3 for alpha chain variable domain of TCR clone 297182 (TRAV12-3, TRAJ6)
CAMSATTGGSYIPTF

SEQ ID NO: 594364 - protein, 15 aa, Homo sapiens
  CDR3 for beta chain variable domain of TCR clone 297182 (TRBV18, TRBJ2-5)
CASSPDPGLQETQYF

SEQ ID NO: 594365 - protein, 14 aa, Homo sapiens
  CDR3 for alpha chain variable domain of TCR clone 297183 (TRAV12-3, TRAJ10)
NDLPLTGGGNKLTF

SEQ ID NO: 594366 - protein, 15 aa, Homo sapiens
  CDR3 for beta chain variable domain of TCR clone 297183 (TRBV29-1, TRBJ2-7)
CSVEFFDRGSYEQYF

SEQ ID NO: 594367 - protein, 14 aa, Homo sapiens
  CDR3 for alpha chain variable domain of TCR clone 297184 (TRAV12-1, TRAJ43)
CVVNGRSNNNDMRF

SEQ ID NO: 594368 - protein, 12 aa, Homo sapiens
  CDR3 for beta chain variable domain of TCR clone 297184 (TRBV29-1, TRBJ2-3)
CSVTGGADRQYF

SEQ ID NO: 594369 - protein, 12 aa, Homo sapiens
  CDR3 for alpha chain variable domain of TCR clone 297185 (TRAV12-3, TRAJ17)
CAMTLTGNKLTF

SEQ ID NO: 594370 - protein, 12 aa, Homo sapiens
  CDR3 for beta chain variable domain of TCR clone 297185 (TRBV2, TRBJ2-7)
CASNLQGYEQYF

SEQ ID NO: 594371 - protein, 14 aa, Homo sapiens
  CDR3 for alpha chain variable domain of TCR clone 297186 (TRAV25, TRAJ45)
CAGPTRGGADGLTF

SEQ ID NO: 594372 - protein, 15 aa, Homo sapiens
  CDR3 for beta chain variable domain of TCR clone 297186 (TRBV6-1, TRBJ2-3)
CASSERCGITDTQYF

SEQ ID NO: 594373 - protein, 14 aa, Homo sapiens
  CDR3 for alpha chain variable domain of TCR clone 297187 (TRAV35, TRAJ13)
CAGRSPGGYQKVTF

SEQ ID NO: 594374 - protein, 14 aa, Homo sapiens
  CDR3 for beta chain variable domain of TCR clone 297187 (TRBV19, TRBJ2-2)
CASSMVELSGELFL

SEQ ID NO: 594375 - protein, 15 aa, Homo sapiens
  CDR3 for alpha chain variable domain of TCR clone 297188 (TRAV8-3, TRAJ20)
CAVEAKGSNDYKLSF

SEQ ID NO: 594376 - protein, 15 aa, Homo sapiens
  CDR3 for beta chain variable domain of TCR clone 297188 (TRBV19, TRBJ1-1)
CASTSGQIQNTEAFF

SEQ ID NO: 594377 - protein, 16 aa, Homo sapiens
  CDR3 for alpha chain variable domain of TCR clone 297189 (TRAV3, TRAJ37)
CAVRGKGSGNTGKLIF

SEQ ID NO: 594378 - protein, 16 aa, Homo sapiens
  CDR3 for beta chain variable domain of TCR clone 297189 (TRBV9, TRBJ1-2)
CASSVEEKVSPYGYTF

SEQ ID NO: 594379 - protein, 14 aa, Homo sapiens
  CDR3 for alpha chain variable domain of TCR clone 297190 (TRAV38-1, TRAJ45)
CATHSGGGADGLTF

SEQ ID NO: 594380 - protein, 13 aa, Homo sapiens
  CDR3 for beta chain variable domain of TCR clone 297190 (TRBV10-3, TRBJ1-2)
CAISERDSYGYTF

SEQ ID NO: 594381 - protein, 13 aa, Homo sapiens
  CDR3 for alpha chain variable domain of TCR clone 297191 (TRAV12-2, TRAJ12)
CAVNWDSSYKLIF

SEQ ID NO: 594382 - protein, 14 aa, Homo sapiens
  CDR3 for beta chain variable domain of TCR clone 297191 (TRBV19, TRBJ2-1)
CASGKSTQYNEQFF

SEQ ID NO: 594383 - protein, 14 aa, Homo sapiens
  CDR3 for alpha chain variable domain of TCR clone 297192 (TRAV26-1, TRAJ26)
CIVRATFLGQNFVF

SEQ ID NO: 594384 - protein, 16 aa, Homo sapiens
  CDR3 for beta chain variable domain of TCR clone 297192 (TRBV12-4, TRBJ2-7)
CASRSTGTGPSYEQYV

SEQ ID NO: 594385 - protein, 12 aa, Homo sapiens
  CDR3 for alpha chain variable domain of TCR clone 297193 (TRAV3, TRAJ20)
CAVRDPDYKLSF

SEQ ID NO: 594386 - protein, 12 aa, Homo sapiens
  CDR3 for beta chain variable domain of TCR clone 297193 (TRBV20-1, TRBJ2-1)
CSAQYTYNEQFF

SEQ ID NO: 594387 - protein, 15 aa, Homo sapiens
  CDR3 for alpha chain variable domain of TCR clone 297194 (TRAV8-3, TRAJ11)
CAVGLLNSGYSTLTF

SEQ ID NO: 594388 - protein, 14 aa, Homo sapiens
  CDR3 for beta chain variable domain of TCR clone 297194 (TRBV4-1, TRBJ2-5)
CASSRSGSVETQYF

SEQ ID NO: 594389 - protein, 12 aa, Homo sapiens
  CDR3 for alpha chain variable domain of TCR clone 297195 (TRAV21, TRAJ39)
CAADNAGNMLTF

SEQ ID NO: 594390 - protein, 14 aa, Homo sapiens
  CDR3 for beta chain variable domain of TCR clone 297195 (TRBV7-6, TRBJ2-3)
CASSLGTVTDTQYF

SEQ ID NO: 594391 - protein, 13 aa, Homo sapiens
  CDR3 for alpha chain variable domain of TCR clone 297196 (TRAV8-3, TRAJ34)
CAVGAYNTDKLIF

SEQ ID NO: 594392 - protein, 11 aa, Homo sapiens
  CDR3 for beta chain variable domain of TCR clone 297196 (TRBV7-3, TRBJ1-2)
CASSLGDGYIF

SEQ ID NO: 594393 - protein, 16 aa, Homo sapiens
  CDR3 for alpha chain variable domain of TCR clone 297197 (TRAV30, TRAJ24)
CGTEIVDADSWGKFQF

SEQ ID NO: 594394 - protein, 13 aa, Homo sapiens
  CDR3 for beta chain variable domain of TCR clone 297197 (TRBV7-8, TRBJ2-7)
RRVRLTEMGEQYF

SEQ ID NO: 594395 - protein, 17 aa, Homo sapiens
  CDR3 for alpha chain variable domain of TCR clone 297198 (TRAV8-3, TRAJ34)
CAIPGKLIFGTGTRLQV

SEQ ID NO: 594396 - protein, 12 aa, Homo sapiens
  CDR3 for beta chain variable domain of TCR clone 297198 (TRBV11-2, TRBJ2-2)
CASSLGGGELFF

SEQ ID NO: 594397 - protein, 10 aa, Homo sapiens
  CDR3 for alpha chain variable domain of TCR clone 297199 (TRAV26-1, TRAJ22)
CVVSLNFFWF

SEQ ID NO: 594398 - protein, 15 aa, Homo sapiens
  CDR3 for beta chain variable domain of TCR clone 297199 (TRBV4-2, TRBJ1-2)
CASSQRTGGRDGYTF

SEQ ID NO: 594399 - protein, 11 aa, Homo sapiens
  CDR3 for alpha chain variable domain of TCR clone 297200 (TRAV17, TRAJ9)
CGFTGGFKTIF

SEQ ID NO: 594400 - protein, 17 aa, Homo sapiens
  CDR3 for beta chain variable domain of TCR clone 297200 (TRBV13, TRBJ2-3)
CASSLSRVARGRNTQYF

SEQ ID NO: 594401 - protein, 20 aa, Homo sapiens
  CDR3 for alpha chain variable domain of TCR clone 297201 (TRAV2, TRAJ32)
FTTVLSTPPSQGGATNKLIF

SEQ ID NO: 594402 - protein, 12 aa, Homo sapiens
  CDR3 for beta chain variable domain of TCR clone 297201 (TRBV20-1, TRBJ2-7)
CSAITPTKEQYF

SEQ ID NO: 594403 - protein, 12 aa, Homo sapiens
  CDR3 for alpha chain variable domain of TCR clone 297202 (TRAV13-1, TRAJ49)
CAASPMGNQFYF

SEQ ID NO: 594404 - protein, 13 aa, Homo sapiens
  CDR3 for beta chain variable domain of TCR clone 297202 (TRBV20-1, TRBJ2-2)
CSVSAAGTGELFF

SEQ ID NO: 594405 - protein, 14 aa, Homo sapiens
  CDR3 for alpha chain variable domain of TCR clone 297203 (TRAV12-1, TRAJ17)
CVVNYKAAGNKLTF

SEQ ID NO: 594406 - protein, 17 aa, Homo sapiens
  CDR3 for beta chain variable domain of TCR clone 297203 (TRBV20-1, TRBJ2-1)
CSASSSALAGSYNEQFF

SEQ ID NO: 594407 - protein, 14 aa, Homo sapiens
  CDR3 for alpha chain variable domain of TCR clone 297204 (TRAV23/DV6, TRAJ23)
CAAGPYNQGGKLIF

SEQ ID NO: 594408 - protein, 16 aa, Homo sapiens
  CDR3 for beta chain variable domain of TCR clone 297204 (TRBV2, TRBJ2-3)
CASSTSVEGVTDTQYF

SEQ ID NO: 594409 - protein, 12 aa, Homo sapiens
  CDR3 for alpha chain variable domain of TCR clone 297205 (TRAV23/DV6, TRAJ16)
CAATGTGQKLLF

SEQ ID NO: 594410 - protein, 12 aa, Homo sapiens
  CDR3 for beta chain variable domain of TCR clone 297205 (TRBV11-2, TRBJ2-2)
CASSLGGGELFF

SEQ ID NO: 594411 - protein, 12 aa, Homo sapiens
  CDR3 for alpha chain variable domain of TCR clone 297206 (TRAV13-2, TRAJ23)
CAERHRGGKLIF

SEQ ID NO: 594412 - protein, 18 aa, Homo sapiens
  CDR3 for beta chain variable domain of TCR clone 297206 (TRBV18, TRBJ2-3)
CASSYTSGAAGGTDTQYF

SEQ ID NO: 594413 - protein, 16 aa, Homo sapiens
  CDR3 for alpha chain variable domain of TCR clone 297207 (TRAV1-2, TRAJ10)
CAVRVVLTGGGNKLTF

SEQ ID NO: 594414 - protein, 16 aa, Homo sapiens
  CDR3 for beta chain variable domain of TCR clone 297207 (TRBV9, TRBJ2-1)
CASSVGGGGNYNEQFF

SEQ ID NO: 594415 - protein, 16 aa, Homo sapiens
  CDR3 for alpha chain variable domain of TCR clone 297208 (TRAV12-3, TRAJ58)
CAMTDTDETSGSRLTF

SEQ ID NO: 594416 - protein, 22 aa, Homo sapiens
  CDR3 for beta chain variable domain of TCR clone 297208 (TRBV23-1, TRBJ2-7)
CASSRRLDAGQGYGGGGYEQYF

SEQ ID NO: 594417 - protein, 16 aa, Homo sapiens
  CDR3 for alpha chain variable domain of TCR clone 297209 (TRAV8-1, TRAJ39)
CAVNVPSYNAGNMLTF

SEQ ID NO: 594418 - protein, 15 aa, Homo sapiens
  CDR3 for beta chain variable domain of TCR clone 297209 (TRBV4-1, TRBJ2-3)
CASRSTRAGTDTQYF

SEQ ID NO: 594419 - protein, 15 aa, Homo sapiens
  CDR3 for alpha chain variable domain of TCR clone 297210 (TRAV25, TRAJ53)
CPTSNSGGSNYKLTF

SEQ ID NO: 594420 - protein, 13 aa, Homo sapiens
  CDR3 for beta chain variable domain of TCR clone 297210 (TRBV7-2, TRBJ2-7)
CASSSPSGSEQYF

SEQ ID NO: 594421 - protein, 14 aa, Homo sapiens
  CDR3 for alpha chain variable domain of TCR clone 297211 (TRAV8-3, TRAJ39)
CAVGANNAGNMLTF

SEQ ID NO: 594422 - protein, 15 aa, Homo sapiens
  CDR3 for beta chain variable domain of TCR clone 297211 (TRBV4-3, TRBJ1-1)
CASSQELGRGTEAFL

SEQ ID NO: 594423 - protein, 18 aa, Homo sapiens
  CDR3 for alpha chain variable domain of TCR clone 297212 (TRAV26-1, TRAJ5)
CIVRVAPPRDTGRTALTF

SEQ ID NO: 594424 - protein, 15 aa, Homo sapiens
  CDR3 for beta chain variable domain of TCR clone 297212 (TRBV7-9, TRBJ2-7)
CASSLPMGQANEQYF

SEQ ID NO: 594425 - protein, 13 aa, Homo sapiens
  CDR3 for alpha chain variable domain of TCR clone 297213 (TRAV2, TRAJ29)
CAAQNSGNTPLVF

SEQ ID NO: 594426 - protein, 14 aa, Homo sapiens
  CDR3 for beta chain variable domain of TCR clone 297213 (TRBV7-9, TRBJ2-4)
CASSLAMGDNIQYF

SEQ ID NO: 594427 - protein, 15 aa, Homo sapiens
  CDR3 for alpha chain variable domain of TCR clone 297214 (TRAV2, TRAJ9)
CAVEDRGTGGFKTIF

SEQ ID NO: 594428 - protein, 15 aa, Homo sapiens
  CDR3 for beta chain variable domain of TCR clone 297214 (TRBV10-3, TRBJ1-3)
CAISDSQGAGNTIYF

SEQ ID NO: 594429 - protein, 11 aa, Homo sapiens
  CDR3 for alpha chain variable domain of TCR clone 297215 (TRAV3, TRAJ21)
CAVGNFNKFYF

SEQ ID NO: 594430 - protein, 15 aa, Homo sapiens
  CDR3 for beta chain variable domain of TCR clone 297215 (TRBV7-2, TRBJ1-2)
CASSPRAGWNYGYTF

SEQ ID NO: 594431 - protein, 11 aa, Homo sapiens
  CDR3 for alpha chain variable domain of TCR clone 297216 (TRAV1-1, TRAJ20)
CAVFNDYKPSF

SEQ ID NO: 594432 - protein, 16 aa, Homo sapiens
  CDR3 for beta chain variable domain of TCR clone 297216 (TRBV29-1, TRBJ2-2)
CSVEKTSEGNTGELFF

SEQ ID NO: 594433 - protein, 15 aa, Homo sapiens
  CDR3 for alpha chain variable domain of TCR clone 297217 (TRAV12-1, TRAJ44)
CVVFVNTGTASKLTF

SEQ ID NO: 594434 - protein, 17 aa, Homo sapiens
  CDR3 for beta chain variable domain of TCR clone 297217 (TRBV7-8, TRBJ2-6)
CTSSAGTGGAGANVLTF

SEQ ID NO: 594435 - protein, 13 aa, Homo sapiens
  CDR3 for alpha chain variable domain of TCR clone 297218 (TRAV13-1, TRAJ21)
CAASIYNFNKFYF

SEQ ID NO: 594436 - protein, 14 aa, Homo sapiens
  CDR3 for beta chain variable domain of TCR clone 297218 (TRBV7-6, TRBJ2-7)
CASSLFQDSYEQYF

SEQ ID NO: 594437 - protein, 12 aa, Homo sapiens
  CDR3 for alpha chain variable domain of TCR clone 297219 (TRAV12-2, TRAJ10)
WGFTGGGNKLTF

SEQ ID NO: 594438 - protein, 14 aa, Homo sapiens
  CDR3 for beta chain variable domain of TCR clone 297219 (TRBV12-4, TRBJ1-4)
CASSRQGANEKLFF

SEQ ID NO: 594439 - protein, 12 aa, Homo sapiens
  CDR3 for alpha chain variable domain of TCR clone 297220 (TRAV3, TRAJ43)
CCERGRNNDMRF

SEQ ID NO: 594440 - protein, 12 aa, Homo sapiens
  CDR3 for beta chain variable domain of TCR clone 297220 (TRBV5-1, TRBJ2-7)
CASSVDSYEQYF

SEQ ID NO: 594441 - protein, 11 aa, Homo sapiens
  CDR3 for alpha chain variable domain of TCR clone 297221 (TRAV1-1, TRAJ3)
CAVRSASKIIS

SEQ ID NO: 594442 - protein, 14 aa, Homo sapiens
  CDR3 for beta chain variable domain of TCR clone 297221 (TRBV2, TRBJ1-6)
CALSPSDPRSPLHF

SEQ ID NO: 594443 - protein, 15 aa, Homo sapiens
  CDR3 for alpha chain variable domain of TCR clone 297222 (TRAV20, TRAJ4)
CAVEGSTGGYNKLIF

SEQ ID NO: 594444 - protein, 14 aa, Homo sapiens
  CDR3 for beta chain variable domain of TCR clone 297222 (TRBV7-8, TRBJ2-7)
CASTLGGALGEQYF

SEQ ID NO: 594445 - protein, 13 aa, Homo sapiens
  CDR3 for alpha chain variable domain of TCR clone 297223 (TRAV36/DV7, TRAJ54)
CAVDRRGAQKLGF

SEQ ID NO: 594446 - protein, 13 aa, Homo sapiens
  CDR3 for beta chain variable domain of TCR clone 297223 (TRBV6-5, TRBJ2-3)
CASRSLVTDTQYF

SEQ ID NO: 594447 - protein, 12 aa, Homo sapiens
  CDR3 for alpha chain variable domain of TCR clone 297224 (TRAV8-3, TRAJ27)
CAVGAEAGKSTF

SEQ ID NO: 594448 - protein, 14 aa, Homo sapiens
  CDR3 for beta chain variable domain of TCR clone 297224 (TRBV2, TRBJ2-1)
CASRLIVGLDEQFF

SEQ ID NO: 594449 - protein, 17 aa, Homo sapiens
  CDR3 for alpha chain variable domain of TCR clone 297225 (TRAV13-1, TRAJ52)
CAASSGAGGTSYGKLTF

SEQ ID NO: 594450 - protein, 14 aa, Homo sapiens
  CDR3 for beta chain variable domain of TCR clone 297225 (TRBV25-1, TRBJ1-1)
CASTHLGGNTEAFF

SEQ ID NO: 594451 - protein, 17 aa, Homo sapiens
  CDR3 for alpha chain variable domain of TCR clone 297226 (TRAV3, TRAJ6)
CAVRDGPRAGGSYIPTF

SEQ ID NO: 594452 - protein, 16 aa, Homo sapiens
  CDR3 for beta chain variable domain of TCR clone 297226 (TRBV7-8, TRBJ2-3)
CASSTEGQRETDTQCF

SEQ ID NO: 594453 - protein, 10 aa, Homo sapiens
  CDR3 for alpha chain variable domain of TCR clone 297227 (TRAV2, TRAJ34)
CAVVNEKLIL

SEQ ID NO: 594454 - protein, 15 aa, Homo sapiens
  CDR3 for beta chain variable domain of TCR clone 297227 (TRBV3-1, TRBJ2-2)
CASSQDWTRAGELFF

SEQ ID NO: 594455 - protein, 18 aa, Homo sapiens
  CDR3 for alpha chain variable domain of TCR clone 297228 (TRAV8-6, TRAJ52)
CAVSRVGAGGTSYGKLTF

SEQ ID NO: 594456 - protein, 17 aa, Homo sapiens
  CDR3 for beta chain variable domain of TCR clone 297228 (TRBV13, TRBJ2-3)
CASSLSRVAGGRNTQYF

SEQ ID NO: 594457 - protein, 14 aa, Homo sapiens
  CDR3 for alpha chain variable domain of TCR clone 297229 (TRAV12-2, TRAJ13)
CAVKKTGGYQKVTF

SEQ ID NO: 594458 - protein, 16 aa, Homo sapiens
  CDR3 for beta chain variable domain of TCR clone 297229 (TRBV18, TRBJ1-5)
CASSPYRVEGNQPQHF

SEQ ID NO: 594459 - protein, 14 aa, Homo sapiens
  CDR3 for alpha chain variable domain of TCR clone 297230 (TRAV13-1, TRAJ41)
CAARSGDAGYALNF

SEQ ID NO: 594460 - protein, 15 aa, Homo sapiens
  CDR3 for beta chain variable domain of TCR clone 297230 (TRBV29-1, TRBJ2-5)
CSVAGASGTQETQYF

SEQ ID NO: 594461 - protein, 22 aa, Homo sapiens
  CDR3 for alpha chain variable domain of TCR clone 297231 (TRAV27, TRAJ41)
CAVRTQIPDIQNPDPAVYKLRD

SEQ ID NO: 594462 - protein, 16 aa, Homo sapiens
  CDR3 for beta chain variable domain of TCR clone 297231 (TRBV5-1, TRBJ2-3)
CASSLGLAVYTDTQYF

SEQ ID NO: 594463 - protein, 14 aa, Homo sapiens
  CDR3 for alpha chain variable domain of TCR clone 297232 (TRAV17, TRAJ12)
CATDREDSSYKLIF

SEQ ID NO: 594464 - protein, 16 aa, Homo sapiens
  CDR3 for beta chain variable domain of TCR clone 297232 (TRBV7-3, TRBJ2-2)
CASSLKRGTLSGELFF

SEQ ID NO: 594465 - protein, 12 aa, Homo sapiens
  CDR3 for alpha chain variable domain of TCR clone 297233 (TRAV12-3, TRAJ17)
CAMTLTGNKLTF

SEQ ID NO: 594466 - protein, 17 aa, Homo sapiens
  CDR3 for beta chain variable domain of TCR clone 297233 (TRBV7-8, TRBJ2-6)
CASSAGTEGAGANVLTF

SEQ ID NO: 594467 - protein, 18 aa, Homo sapiens
  CDR3 for alpha chain variable domain of TCR clone 297234 (TRAV21, TRAJ52)
CAVRPFPAGGTSYGKLTF

SEQ ID NO: 594468 - protein, 16 aa, Homo sapiens
  CDR3 for beta chain variable domain of TCR clone 297234 (TRBV13, TRBJ2-2)
CASSPRTGEHTGELFF

SEQ ID NO: 594469 - protein, 17 aa, Homo sapiens
  CDR3 for alpha chain variable domain of TCR clone 297235 (TRAV26-1, TRAJ49)
CIAGNQFYFGTGTSLTV

SEQ ID NO: 594470 - protein, 16 aa, Homo sapiens
  CDR3 for beta chain variable domain of TCR clone 297235 (TRBV19, TRBJ2-1)
CASSKAGPSSYNEQFF

SEQ ID NO: 594471 - protein, 11 aa, Homo sapiens
  CDR3 for alpha chain variable domain of TCR clone 297236 (TRAV1-2, TRAJ40)
CAVPGTYKYIF

SEQ ID NO: 594472 - protein, 16 aa, Homo sapiens
  CDR3 for beta chain variable domain of TCR clone 297236 (TRBV29-1, TRBJ2-7)
CSVEVVGTSGGYEQYF

SEQ ID NO: 594473 - protein, 14 aa, Homo sapiens
  CDR3 for alpha chain variable domain of TCR clone 297237 (TRAV1-2, TRAJ16)
CAVNRFSDCQKLLF

SEQ ID NO: 594474 - protein, 17 aa, Homo sapiens
  CDR3 for beta chain variable domain of TCR clone 297237 (TRBV11-2, TRBJ2-1)
CASSLYPPGVEYNEQFF

SEQ ID NO: 594475 - protein, 15 aa, Homo sapiens
  CDR3 for alpha chain variable domain of TCR clone 297238 (TRAV26-1, TRAJ37)
CIVRLGSGNTGKLIF

SEQ ID NO: 594476 - protein, 13 aa, Homo sapiens
  CDR3 for beta chain variable domain of TCR clone 297238 (TRBV7-3, TRBJ1-1)
CASSQDWGAEAFF

SEQ ID NO: 594477 - protein, 11 aa, Homo sapiens
  CDR3 for alpha chain variable domain of TCR clone 297239 (TRAV16, TRAJ34)
CALYNTDKLIF

SEQ ID NO: 594478 - protein, 14 aa, Homo sapiens
  CDR3 for beta chain variable domain of TCR clone 297239 (TRBV7-8, TRBJ2-1)
CATERERSYNEQFF

SEQ ID NO: 594479 - protein, 14 aa, Homo sapiens
  CDR3 for alpha chain variable domain of TCR clone 297240 (TRAV12-3, TRAJ29)
CAMILLSGNTPLVF

SEQ ID NO: 594480 - protein, 16 aa, Homo sapiens
  CDR3 for beta chain variable domain of TCR clone 297240 (TRBV7-7, TRBJ2-1)
CASSLASGTSYNEQFF

SEQ ID NO: 594481 - protein, 10 aa, Homo sapiens
  CDR3 for alpha chain variable domain of TCR clone 297241 (TRAV12-3, TRAJ49)
CAMNDDQFYF

SEQ ID NO: 594482 - protein, 16 aa, Homo sapiens
  CDR3 for beta chain variable domain of TCR clone 297241 (TRBV5-1, TRBJ1-1)
CASSSGGNSLNTEAFF

SEQ ID NO: 594483 - protein, 14 aa, Homo sapiens
  CDR3 for alpha chain variable domain of TCR clone 297242 (TRAV26-1, TRAJ38)
CIADNAGNNRKLIW

SEQ ID NO: 594484 - protein, 13 aa, Homo sapiens
  CDR3 for beta chain variable domain of TCR clone 297242 (TRBV2, TRBJ1-1)
CASSEGGNTEAFF

SEQ ID NO: 594485 - protein, 15 aa, Homo sapiens
  CDR3 for alpha chain variable domain of TCR clone 297243 (TRAV8-3, TRAJ23)
CAVGDSYNQGGKLIF

SEQ ID NO: 594486 - protein, 22 aa, Homo sapiens
  CDR3 for beta chain variable domain of TCR clone 297243 (TRBV29-1, TRBJ2-5)
TVSNMSPEDSSIYLCSAGTQYF

SEQ ID NO: 594487 - protein, 15 aa, Homo sapiens
  CDR3 for alpha chain variable domain of TCR clone 297244 (TRAV25, TRAJ53)
CPTSNSGGSNYKLTF

SEQ ID NO: 594488 - protein, 15 aa, Homo sapiens
  CDR3 for beta chain variable domain of TCR clone 297244 (TRBV27, TRBJ2-3)
CAGSLGLAGPDTQYF

SEQ ID NO: 594489 - protein, 15 aa, Homo sapiens
  CDR3 for alpha chain variable domain of TCR clone 297245 (TRAV8-4, TRAJ29)
CAVSEDFRGNTPLVF

SEQ ID NO: 594490 - protein, 15 aa, Homo sapiens
  CDR3 for beta chain variable domain of TCR clone 297245 (TRBV2, TRBJ2-7)
CASSPAGTGTYEQYF

SEQ ID NO: 594491 - protein, 14 aa, Homo sapiens
  CDR3 for alpha chain variable domain of TCR clone 297246 (TRAV38-1, TRAJ45)
CASHSGGGAGGLTF

SEQ ID NO: 594492 - protein, 14 aa, Homo sapiens
  CDR3 for beta chain variable domain of TCR clone 297246 (TRBV7-9, TRBJ2-2)
CASSGLADTGELFF

SEQ ID NO: 594493 - protein, 12 aa, Homo sapiens
  CDR3 for alpha chain variable domain of TCR clone 297247 (TRAV12-3, TRAJ17)
CAMTLTGNKLTF

SEQ ID NO: 594494 - protein, 15 aa, Homo sapiens
  CDR3 for beta chain variable domain of TCR clone 297247 (TRBV11-2, TRBJ1-4)
CASSFRGLYNEKLFF

SEQ ID NO: 594495 - protein, 17 aa, Homo sapiens
  CDR3 for alpha chain variable domain of TCR clone 297248 (TRAV8-3, TRAJ32)
CAVGPLDYGGATNKLLF

SEQ ID NO: 594496 - protein, 15 aa, Homo sapiens
  CDR3 for beta chain variable domain of TCR clone 297248 (TRBV18, TRBJ1-2)
CASSPGNGLGYGYTF

SEQ ID NO: 594497 - protein, 13 aa, Homo sapiens
  CDR3 for alpha chain variable domain of TCR clone 297249 (TRAV27, TRAJ43)
CAGAGNNNNDMRF

SEQ ID NO: 594498 - protein, 14 aa, Homo sapiens
  CDR3 for beta chain variable domain of TCR clone 297249 (TRBV7-2, TRBJ2-7)
CASRSQGAAYELYF

SEQ ID NO: 594499 - protein, 13 aa, Homo sapiens
  CDR3 for alpha chain variable domain of TCR clone 297250 (TRAV27, TRAJ6)
CAGGTGGSYIPTF

SEQ ID NO: 594500 - protein, 15 aa, Homo sapiens
  CDR3 for beta chain variable domain of TCR clone 297250 (TRBV5-7, TRBJ2-7)
CASSLGPGRGHEQYF

SEQ ID NO: 594501 - protein, 12 aa, Homo sapiens
  CDR3 for alpha chain variable domain of TCR clone 297251 (TRAV25, TRAJ11)
CAGASGYSTLTF

SEQ ID NO: 594502 - protein, 13 aa, Homo sapiens
  CDR3 for beta chain variable domain of TCR clone 297251 (TRBV7-2, TRBJ2-1)
CAGSSQTSGEQFF

SEQ ID NO: 594503 - protein, 17 aa, Homo sapiens
  CDR3 for alpha chain variable domain of TCR clone 297252 (TRAV13-1, TRAJ53)
CAASWKSSGGSNYKLTF

SEQ ID NO: 594504 - protein, 19 aa, Homo sapiens
  CDR3 for beta chain variable domain of TCR clone 297252 (TRBV7-9, TRBJ2-1)
CASSHNRGARLRSYNEQFF

SEQ ID NO: 594505 - protein, 19 aa, Homo sapiens
  CDR3 for alpha chain variable domain of TCR clone 297253 (TRAV35, TRAJ47)
VLGLLDCRTHTEYGKKLVF

SEQ ID NO: 594506 - protein, 11 aa, Homo sapiens
  CDR3 for beta chain variable domain of TCR clone 297253 (TRBV29-1, TRBJ1-1)
CSVEVGTRTFF

SEQ ID NO: 594507 - protein, 14 aa, Homo sapiens
  CDR3 for alpha chain variable domain of TCR clone 297254 (TRAV20, TRAJ42)
CAVQAGGSQGNRIF

SEQ ID NO: 594508 - protein, 13 aa, Homo sapiens
  CDR3 for beta chain variable domain of TCR clone 297254 (TRBV28, TRBJ1-2)
CKQDTGANYGYTF

SEQ ID NO: 594509 - protein, 19 aa, Homo sapiens
  CDR3 for alpha chain variable domain of TCR clone 297255 (TRAV21, TRAJ20)
SLVTQPPTSVLPTDYKLSF

SEQ ID NO: 594510 - protein, 14 aa, Homo sapiens
  CDR3 for beta chain variable domain of TCR clone 297255 (TRBV7-2, TRBJ1-3)
CASSRLRSGNTMYF

SEQ ID NO: 594511 - protein, 13 aa, Homo sapiens
  CDR3 for alpha chain variable domain of TCR clone 297256 (TRAV27, TRAJ45)
CRSSGGGADGLTF

SEQ ID NO: 594512 - protein, 14 aa, Homo sapiens
  CDR3 for beta chain variable domain of TCR clone 297256 (TRBV7-9, TRBJ2-1)
CASSSMVGFGEKFF

SEQ ID NO: 594513 - protein, 14 aa, Homo sapiens
  CDR3 for alpha chain variable domain of TCR clone 297257 (TRAV12-2, TRAJ13)
CAVKKTGGYQKVTF

SEQ ID NO: 594514 - protein, 19 aa, Homo sapiens
  CDR3 for beta chain variable domain of TCR clone 297257 (TRBV25-1, TRBJ2-2)
CAILVYRVDRGRKTGDLFF

SEQ ID NO: 594515 - protein, 12 aa, Homo sapiens
  CDR3 for alpha chain variable domain of TCR clone 297258 (TRAV16, TRAJ10)
CSRTGGGNKLTF

SEQ ID NO: 594516 - protein, 15 aa, Homo sapiens
  CDR3 for beta chain variable domain of TCR clone 297258 (TRBV11-2, TRBJ2-1)
CASSLGPDSYNEQFF

SEQ ID NO: 594517 - protein, 13 aa, Homo sapiens
  CDR3 for alpha chain variable domain of TCR clone 297259 (TRAV8-3, TRAJ28)
CAVGAVGSYQLTF

SEQ ID NO: 594518 - protein, 14 aa, Homo sapiens
  CDR3 for beta chain variable domain of TCR clone 297259 (TRBV7-2, TRBJ2-7)
SASRSQGAAYEQYF

SEQ ID NO: 594519 - protein, 14 aa, Homo sapiens
  CDR3 for alpha chain variable domain of TCR clone 297260 (TRAV12-3, TRAJ57)
CAMSAWGGSEKLVV

SEQ ID NO: 594520 - protein, 14 aa, Homo sapiens
  CDR3 for beta chain variable domain of TCR clone 297260 (TRBV7-8, TRBJ2-7)
CASSPRDRVYEQYF

SEQ ID NO: 594521 - protein, 16 aa, Homo sapiens
  CDR3 for alpha chain variable domain of TCR clone 297261 (TRAV12-1, TRAJ43)
CVVNPHRFGAGTRLTV

SEQ ID NO: 594522 - protein, 13 aa, Homo sapiens
  CDR3 for beta chain variable domain of TCR clone 297261 (TRBV20-1, TRBJ1-1)
CSARGGGNPEAFF

SEQ ID NO: 594523 - protein, 15 aa, Homo sapiens
  CDR3 for alpha chain variable domain of TCR clone 297262 (TRAV30, TRAJ32)
CGTAILGGATNKLIF

SEQ ID NO: 594524 - protein, 13 aa, Homo sapiens
  CDR3 for beta chain variable domain of TCR clone 297262 (TRBV6-3, TRBJ2-7)
CASSFSGGYEQYF

SEQ ID NO: 594525 - protein, 15 aa, Homo sapiens
  CDR3 for alpha chain variable domain of TCR clone 297263 (TRAV12-2, TRAJ8)
CAVREENTGFQKLVF

SEQ ID NO: 594526 - protein, 12 aa, Homo sapiens
  CDR3 for beta chain variable domain of TCR clone 297263 (TRBV19, TRBJ1-5)
CASSIAQQPQHF

SEQ ID NO: 594527 - protein, 14 aa, Homo sapiens
  CDR3 for alpha chain variable domain of TCR clone 297264 (TRAV13-1, TRAJ10)
CAAKEPGGGNKLTF

SEQ ID NO: 594528 - protein, 15 aa, Homo sapiens
  CDR3 for beta chain variable domain of TCR clone 297264 (TRBV20-1, TRBJ2-7)
CSARKGLAESYEQYF

SEQ ID NO: 594529 - protein, 12 aa, Homo sapiens
  CDR3 for alpha chain variable domain of TCR clone 297265 (TRAV13-2, TRAJ23)
CAERHRGGKLIF

SEQ ID NO: 594530 - protein, 16 aa, Homo sapiens
  CDR3 for beta chain variable domain of TCR clone 297265 (TRBV20-1, TRBJ1-4)
WRAPGQGLLTNEKLFF

SEQ ID NO: 594531 - protein, 13 aa, Homo sapiens
  CDR3 for alpha chain variable domain of TCR clone 297266 (TRAV16, TRAJ11)
CALTQSGYSTLTF

SEQ ID NO: 594532 - protein, 14 aa, Homo sapiens
  CDR3 for beta chain variable domain of TCR clone 297266 (TRBV19, TRBJ2-7)
CASSTTRSAYEQYF

SEQ ID NO: 594533 - protein, 16 aa, Homo sapiens
  CDR3 for alpha chain variable domain of TCR clone 297267 (TRAV17, TRAJ28)
CASYASSGAGSYQLTF

SEQ ID NO: 594534 - protein, 15 aa, Homo sapiens
  CDR3 for beta chain variable domain of TCR clone 297267 (TRBV4-2, TRBJ2-1)
CASSPSGGLYNEQFF

SEQ ID NO: 594535 - protein, 10 aa, Homo sapiens
  CDR3 for alpha chain variable domain of TCR clone 297268 (TRAV20, TRAJ43)
CAVQADDMRF

SEQ ID NO: 594536 - protein, 14 aa, Homo sapiens
  CDR3 for beta chain variable domain of TCR clone 297268 (TRBV4-1, TRBJ2-2)
CASSQAVNTGELFF

SEQ ID NO: 594537 - protein, 15 aa, Homo sapiens
  CDR3 for alpha chain variable domain of TCR clone 297269 (TRAV12-2, TRAJ52)
CSVTSGGTSYGKLTF

SEQ ID NO: 594538 - protein, 15 aa, Homo sapiens
  CDR3 for beta chain variable domain of TCR clone 297269 (TRBV7-2, TRBJ2-1)
CASSPGFISGNEQFF

SEQ ID NO: 594539 - protein, 15 aa, Homo sapiens
  CDR3 for alpha chain variable domain of TCR clone 297270 (TRAV8-2, TRAJ44)
CVVSPNTGTASKLTF

SEQ ID NO: 594540 - protein, 17 aa, Homo sapiens
  CDR3 for beta chain variable domain of TCR clone 297270 (TRBV7-3, TRBJ2-3)
CASSLMKRMRGADTQYF

SEQ ID NO: 594541 - protein, 10 aa, Homo sapiens
  CDR3 for alpha chain variable domain of TCR clone 297271 (TRAV13-1, TRAJ49)
CAVPGNQFYF

SEQ ID NO: 594542 - protein, 14 aa, Homo sapiens
  CDR3 for beta chain variable domain of TCR clone 297271 (TRBV12-4, TRBJ1-1)
CASSLGTGGTEAFF

SEQ ID NO: 594543 - protein, 14 aa, Homo sapiens
  CDR3 for alpha chain variable domain of TCR clone 297272 (TRAV12-1, TRAJ54)
CVVNIYQGAQKLGF

SEQ ID NO: 594544 - protein, 14 aa, Homo sapiens
  CDR3 for beta chain variable domain of TCR clone 297272 (TRBV19, TRBJ2-1)
CASPTFVLSGEQFF

SEQ ID NO: 594545 - protein, 14 aa, Homo sapiens
  CDR3 for alpha chain variable domain of TCR clone 297273 (TRAV26-1, TRAJ39)
CIVFTNNAGNKLTF

SEQ ID NO: 594546 - protein, 15 aa, Homo sapiens
  CDR3 for beta chain variable domain of TCR clone 297273 (TRBV19, TRBJ2-4)
CASSLTGLTKNIQYF

SEQ ID NO: 594547 - protein, 14 aa, Homo sapiens
  CDR3 for alpha chain variable domain of TCR clone 297274 (TRAV17, TRAJ6)
CATNPAGGSYIPTF

SEQ ID NO: 594548 - protein, 17 aa, Homo sapiens
  CDR3 for beta chain variable domain of TCR clone 297274 (TRBV13, TRBJ2-3)
CASSLSRVAGGRNTQYF

SEQ ID NO: 594549 - protein, 14 aa, Homo sapiens
  CDR3 for alpha chain variable domain of TCR clone 297275 (TRAV35, TRAJ22)
CAGLRPGSARQLTF

SEQ ID NO: 594550 - protein, 17 aa, Homo sapiens
  CDR3 for beta chain variable domain of TCR clone 297275 (TRBV7-3, TRBJ2-3)
CASSPRGQGYGTDTQYF

SEQ ID NO: 594551 - protein, 13 aa, Homo sapiens
  CDR3 for alpha chain variable domain of TCR clone 297276 (TRAV3, TRAJ36)
CAVSLGGANNLFF

SEQ ID NO: 594552 - protein, 14 aa, Homo sapiens
  CDR3 for beta chain variable domain of TCR clone 297276 (TRBV19, TRBJ2-1)
CASPTFVLSGEQFF

SEQ ID NO: 594553 - protein, 17 aa, Homo sapiens
  CDR3 for alpha chain variable domain of TCR clone 297277 (TRAV3, TRAJ12)
CAVRDGGRMDSNYKLIF

SEQ ID NO: 594554 - protein, 13 aa, Homo sapiens
  CDR3 for beta chain variable domain of TCR clone 297277 (TRBV15, TRBJ1-6)
CATSGGLNSPLHF

SEQ ID NO: 594555 - protein, 13 aa, Homo sapiens
  CDR3 for alpha chain variable domain of TCR clone 297278 (TRAV8-6, TRAJ49)
CAVLRTPVTSSIL

SEQ ID NO: 594556 - protein, 15 aa, Homo sapiens
  CDR3 for beta chain variable domain of TCR clone 297278 (TRBV6-3, TRBJ2-7)
CASSSPGTVFYEQYF

SEQ ID NO: 594557 - protein, 15 aa, Homo sapiens
  CDR3 for alpha chain variable domain of TCR clone 297279 (TRAV12-2, TRAJ53)
CAVNTGGGSNYKLTF

SEQ ID NO: 594558 - protein, 15 aa, Homo sapiens
  CDR3 for beta chain variable domain of TCR clone 297279 (TRBV5-1, TRBJ2-7)
CASSLMTSGSNEQYF

SEQ ID NO: 594559 - protein, 14 aa, Homo sapiens
  CDR3 for alpha chain variable domain of TCR clone 297280 (TRAV8-4, TRAJ15)
CAVTIREAGTALIF

SEQ ID NO: 594560 - protein, 16 aa, Homo sapiens
  CDR3 for beta chain variable domain of TCR clone 297280 (TRBV29-1, TRBJ2-6)
CSVEDITYSGANVLSF

SEQ ID NO: 594561 - protein, 15 aa, Homo sapiens
  CDR3 for alpha chain variable domain of TCR clone 297281 (TRAV4, TRAJ39)
CLVGPNNNAGNMLTF

SEQ ID NO: 594562 - protein, 19 aa, Homo sapiens
  CDR3 for beta chain variable domain of TCR clone 297281 (TRBV14, TRBJ2-1)
CASSQGQRWEAPEYNEQFF

SEQ ID NO: 594563 - protein, 14 aa, Homo sapiens
  CDR3 for alpha chain variable domain of TCR clone 297282 (TRAV26-1, TRAJ38)
CVADNAGNNRTLIW

SEQ ID NO: 594564 - protein, 13 aa, Homo sapiens
  CDR3 for beta chain variable domain of TCR clone 297282 (TRBV20-1, TRBJ1-1)
CSARGGGNTEAFF

SEQ ID NO: 594565 - protein, 13 aa, Homo sapiens
  CDR3 for alpha chain variable domain of TCR clone 297283 (TRAV29/DV5, TRAJ31)
CAASRNNNARLVF

SEQ ID NO: 594566 - protein, 12 aa, Homo sapiens
  CDR3 for beta chain variable domain of TCR clone 297283 (TRBV14, TRBJ2-7)
CASSRLKGEQYF

SEQ ID NO: 594567 - protein, 15 aa, Homo sapiens
  CDR3 for alpha chain variable domain of TCR clone 297284 (TRAV8-3, TRAJ11)
CAEGLLNSGYSTLTF

SEQ ID NO: 594568 - protein, 15 aa, Homo sapiens
  CDR3 for beta chain variable domain of TCR clone 297284 (TRBV13, TRBJ2-1)
CASSLLSGLNNEQFF

SEQ ID NO: 594569 - protein, 14 aa, Homo sapiens
  CDR3 for alpha chain variable domain of TCR clone 297285 (TRAV9-2, TRAJ38)
CALSNAGNNRKLIW

SEQ ID NO: 594570 - protein, 13 aa, Homo sapiens
  CDR3 for beta chain variable domain of TCR clone 297285 (TRBV5-7, TRBJ2-3)
CASSLGRTDTQYF

SEQ ID NO: 594571 - protein, 15 aa, Homo sapiens
  CDR3 for alpha chain variable domain of TCR clone 297286 (TRAV3, TRAJ29)
CAVRDPLSGNPPLVF

SEQ ID NO: 594572 - protein, 17 aa, Homo sapiens
  CDR3 for beta chain variable domain of TCR clone 297286 (TRBV7-2, TRBJ2-7)
CASSLGTGTSGRYEQYF

SEQ ID NO: 594573 - protein, 19 aa, Homo sapiens
  CDR3 for alpha chain variable domain of TCR clone 297287 (TRAV2, TRAJ32)
TTVLSTPPSQGGATNKLIF

SEQ ID NO: 594574 - protein, 12 aa, Homo sapiens
  CDR3 for beta chain variable domain of TCR clone 297287 (TRBV20-1, TRBJ2-7)
CCAITPTKEQYF

SEQ ID NO: 594575 - protein, 18 aa, Homo sapiens
  CDR3 for alpha chain variable domain of TCR clone 297288 (TRAV21, TRAJ52)
CAVRPSPAGGTSFGKLTF

SEQ ID NO: 594576 - protein, 13 aa, Homo sapiens
  CDR3 for beta chain variable domain of TCR clone 297288 (TRBV20-1, TRBJ1-1)
CSARVGGNTEAFF

SEQ ID NO: 594577 - protein, 14 aa, Homo sapiens
  CDR3 for alpha chain variable domain of TCR clone 297289 (TRAV20, TRAJ56)
CAVQFGGANSKLTF

SEQ ID NO: 594578 - protein, 13 aa, Homo sapiens
  CDR3 for beta chain variable domain of TCR clone 297289 (TRBV2, TRBJ1-1)
CASSEGGNTEAFF

SEQ ID NO: 594579 - protein, 12 aa, Homo sapiens
  CDR3 for alpha chain variable domain of TCR clone 297290 (TRAV12-3, TRAJ17)
CAMTLTGNKLTF

SEQ ID NO: 594580 - protein, 12 aa, Homo sapiens
  CDR3 for beta chain variable domain of TCR clone 297290 (TRBV11-2, TRBJ2-7)
CASSPGNNEQFF

SEQ ID NO: 594581 - protein, 13 aa, Homo sapiens
  CDR3 for alpha chain variable domain of TCR clone 297291 (TRAV8-6, TRAJ49)
CAVITNTGNQFYF

SEQ ID NO: 594582 - protein, 14 aa, Homo sapiens
  CDR3 for beta chain variable domain of TCR clone 297291 (TRBV7-6, TRBJ2-3)
CASSLGTVTDTRYF

SEQ ID NO: 594583 - protein, 13 aa, Homo sapiens
  CDR3 for alpha chain variable domain of TCR clone 297292 (TRAV1-2, TRAJ9)
CAILNTGGFKTIF

SEQ ID NO: 594584 - protein, 17 aa, Homo sapiens
  CDR3 for beta chain variable domain of TCR clone 297292 (TRBV13, TRBJ2-3)
CASSLSRVAGGRDTQYF

SEQ ID NO: 594585 - protein, 14 aa, Homo sapiens
  CDR3 for alpha chain variable domain of TCR clone 297293 (TRAV21, TRAJ57)
CAVSRGGGSEKLVF

SEQ ID NO: 594586 - protein, 15 aa, Homo sapiens
  CDR3 for beta chain variable domain of TCR clone 297293 (TRBV19, TRBJ2-1)
CASSIQATSYNEQFF

SEQ ID NO: 594587 - protein, 13 aa, Homo sapiens
  CDR3 for alpha chain variable domain of TCR clone 297294 (TRAV13-1, TRAJ39)
CTASIVMQATCSP

SEQ ID NO: 594588 - protein, 14 aa, Homo sapiens
  CDR3 for beta chain variable domain of TCR clone 297294 (TRBV18, TRBJ2-7)
CASSPRGGAYEQYF

SEQ ID NO: 594589 - protein, 13 aa, Homo sapiens
  CDR3 for alpha chain variable domain of TCR clone 297295 (TRAV38-1, TRAJ42)
CARWGGSQGNLIF

SEQ ID NO: 594590 - protein, 14 aa, Homo sapiens
  CDR3 for beta chain variable domain of TCR clone 297295 (TRBV13, TRBJ2-5)
CASSLERVGETQYF

SEQ ID NO: 594591 - protein, 18 aa, Homo sapiens
  CDR3 for alpha chain variable domain of TCR clone 297296 (TRAV12-3, TRAJ52)
CAMSRTNAGGTSYGKLTF

SEQ ID NO: 594592 - protein, 17 aa, Homo sapiens
  CDR3 for beta chain variable domain of TCR clone 297296 (TRBV7-3, TRBJ2-3)
CASSLMKRMRGSDTQYF

SEQ ID NO: 594593 - protein, 16 aa, Homo sapiens
  CDR3 for alpha chain variable domain of TCR clone 297297 (TRAV3, TRAJ10)
CAVRDMRAGGGNKLTF

SEQ ID NO: 594594 - protein, 14 aa, Homo sapiens
  CDR3 for beta chain variable domain of TCR clone 297297 (TRBV15, TRBJ2-5)
CATSRVSVRETQYF

SEQ ID NO: 594595 - protein, 15 aa, Homo sapiens
  CDR3 for alpha chain variable domain of TCR clone 297298 (TRAV1-2, TRAJ30)
CAVRPHGNRDDKIIF

SEQ ID NO: 594596 - protein, 13 aa, Homo sapiens
  CDR3 for beta chain variable domain of TCR clone 297298 (TRBV7-3, TRBJ1-1)
CASSQDWGAEAFF

SEQ ID NO: 594597 - protein, 15 aa, Homo sapiens
  CDR3 for alpha chain variable domain of TCR clone 297299 (TRAV26-2, TRAJ28)
CILVESGAGSYHLTF

SEQ ID NO: 594598 - protein, 16 aa, Homo sapiens
  CDR3 for beta chain variable domain of TCR clone 297299 (TRBV4-2, TRBJ1-2)
CASSQEIGGASYGYTF

SEQ ID NO: 594599 - protein, 16 aa, Homo sapiens
  CDR3 for alpha chain variable domain of TCR clone 297300 (TRAV12-1, TRAJ28)
CVVIGYSGAGSYQLTF

SEQ ID NO: 594600 - protein, 15 aa, Homo sapiens
  CDR3 for beta chain variable domain of TCR clone 297300 (TRBV14, TRBJ1-1)
CASSQEGMGFTEAFF

SEQ ID NO: 594601 - protein, 17 aa, Homo sapiens
  CDR3 for alpha chain variable domain of TCR clone 297301 (TRAV36/DV7, TRAJ52)
CVVAQRAGGTSYGKLTF

SEQ ID NO: 594602 - protein, 14 aa, Homo sapiens
  CDR3 for beta chain variable domain of TCR clone 297301 (TRBV20-1, TRBJ1-1)
CSAQTRIGGTEAFF

SEQ ID NO: 594603 - protein, 11 aa, Homo sapiens
  CDR3 for alpha chain variable domain of TCR clone 297302 (TRAV17, TRAJ9)
CGFTGGFKTIF

SEQ ID NO: 594604 - protein, 14 aa, Homo sapiens
  CDR3 for beta chain variable domain of TCR clone 297302 (TRBV7-8, TRBJ2-3)
CASSLEAGTDTQYF

SEQ ID NO: 594605 - protein, 13 aa, Homo sapiens
  CDR3 for alpha chain variable domain of TCR clone 297303 (TRAV21, TRAJ57)
CAVTQGGSEKLVF

SEQ ID NO: 594606 - protein, 16 aa, Homo sapiens
  CDR3 for beta chain variable domain of TCR clone 297303 (TRBV29-1, TRBJ2-7)
CSVDDAEDGTAYEQFF

SEQ ID NO: 594607 - protein, 15 aa, Homo sapiens
  CDR3 for alpha chain variable domain of TCR clone 297304 (TRAV12-3, TRAJ49)
CAMAVTPNTGNQFYF

SEQ ID NO: 594608 - protein, 18 aa, Homo sapiens
  CDR3 for beta chain variable domain of TCR clone 297304 (TRBV4-1, TRBJ1-5)
CASNQDPRGQGLNQPQHF

SEQ ID NO: 594609 - protein, 17 aa, Homo sapiens
  CDR3 for alpha chain variable domain of TCR clone 297305 (TRAV3, TRAJ7)
CAVRDMSPLEGTTDSLL

SEQ ID NO: 594610 - protein, 17 aa, Homo sapiens
  CDR3 for beta chain variable domain of TCR clone 297305 (TRBV15, TRBJ1-2)
CATSGWEIDVVNYGYTF

SEQ ID NO: 594611 - protein, 14 aa, Homo sapiens
  CDR3 for alpha chain variable domain of TCR clone 297306 (TRAV29/DV5, TRAJ49)
CSASAQTTGNQFYF

SEQ ID NO: 594612 - protein, 16 aa, Homo sapiens
  CDR3 for beta chain variable domain of TCR clone 297306 (TRBV12-4, TRBJ1-5)
CASRQPVEGSNQPQHF

SEQ ID NO: 594613 - protein, 14 aa, Homo sapiens
  CDR3 for alpha chain variable domain of TCR clone 297307 (TRAV3, TRAJ36)
CAVRDGNGANNLFF

SEQ ID NO: 594614 - protein, 16 aa, Homo sapiens
  CDR3 for beta chain variable domain of TCR clone 297307 (TRBV20-1, TRBJ2-6)
CSAREGPGVGANVLTF

SEQ ID NO: 594615 - protein, 13 aa, Homo sapiens
  CDR3 for alpha chain variable domain of TCR clone 297308 (TRAV2, TRAJ15)
CAVASQARTALIF

SEQ ID NO: 594616 - protein, 13 aa, Homo sapiens
  CDR3 for beta chain variable domain of TCR clone 297308 (TRBV5-1, TRBJ1-5)
CASSLAQDQPQHF

SEQ ID NO: 594617 - protein, 13 aa, Homo sapiens
  CDR3 for alpha chain variable domain of TCR clone 297309 (TRAV12-2, TRAJ54)
CAVNRRGAQKLVF

SEQ ID NO: 594618 - protein, 15 aa, Homo sapiens
  CDR3 for beta chain variable domain of TCR clone 297309 (TRBV7-2, TRBJ2-1)
CASSLVLAGGNEQFF

SEQ ID NO: 594619 - protein, 14 aa, Homo sapiens
  CDR3 for alpha chain variable domain of TCR clone 297310 (TRAV9-2, TRAJ39)
CALYIYNAGNMLTF

SEQ ID NO: 594620 - protein, 13 aa, Homo sapiens
  CDR3 for beta chain variable domain of TCR clone 297310 (TRBV20-1, TRBJ1-1)
CSARGVGNTEAFF

SEQ ID NO: 594621 - protein, 12 aa, Homo sapiens
  CDR3 for alpha chain variable domain of TCR clone 297311 (TRAV20, TRAJ39)
CAVGNAGNMLTF

SEQ ID NO: 594622 - protein, 16 aa, Homo sapiens
  CDR3 for beta chain variable domain of TCR clone 297311 (TRBV15, TRBJ1-2)
CATSRGPRTGGGGHTF

SEQ ID NO: 594623 - protein, 14 aa, Homo sapiens
  CDR3 for alpha chain variable domain of TCR clone 297312 (TRAV1-1, TRAJ27)
CAVIYNTNAGKSTF

SEQ ID NO: 594624 - protein, 15 aa, Homo sapiens
  CDR3 for beta chain variable domain of TCR clone 297312 (TRBV7-2, TRBJ2-1)
FASSSGLAGGNEQFF

SEQ ID NO: 594625 - protein, 12 aa, Homo sapiens
  CDR3 for alpha chain variable domain of TCR clone 297313 (TRAV13-1, TRAJ21)
CAAKEGFNKFYF

SEQ ID NO: 594626 - protein, 18 aa, Homo sapiens
  CDR3 for beta chain variable domain of TCR clone 297313 (TRBV20-1, TRBJ2-6)
CSAETAPTHGSGANVLTF

SEQ ID NO: 594627 - protein, 13 aa, Homo sapiens
  CDR3 for alpha chain variable domain of TCR clone 297314 (TRAV20, TRAJ48)
CAVQRVGNEKLTF

SEQ ID NO: 594628 - protein, 14 aa, Homo sapiens
  CDR3 for beta chain variable domain of TCR clone 297314 (TRBV27, TRBJ2-7)
CASSFRDGPYEQYF

SEQ ID NO: 594629 - protein, 14 aa, Homo sapiens
  CDR3 for alpha chain variable domain of TCR clone 297315 (TRAV1-2, TRAJ16)
CAVNRFSDGQKLLF

SEQ ID NO: 594630 - protein, 19 aa, Homo sapiens
  CDR3 for beta chain variable domain of TCR clone 297315 (TRBV7-9, TRBJ2-1)
CASSHNRGALLRSYNEQFF

SEQ ID NO: 594631 - protein, 13 aa, Homo sapiens
  CDR3 for alpha chain variable domain of TCR clone 297316 (TRAV12-1, TRAJ22)
CVASGGSARQLTF

SEQ ID NO: 594632 - protein, 13 aa, Homo sapiens
  CDR3 for beta chain variable domain of TCR clone 297316 (TRBV29-1, TRBJ2-3)
SAALQGGADTQYF

SEQ ID NO: 594633 - protein, 14 aa, Homo sapiens
  CDR3 for alpha chain variable domain of TCR clone 297317 (TRAV2, TRAJ9)
CAVEDRSGGFKTIF

SEQ ID NO: 594634 - protein, 19 aa, Homo sapiens
  CDR3 for beta chain variable domain of TCR clone 297317 (TRBV25-1, TRBJ2-2)
SAILVYRVDRGRKTGELFF

SEQ ID NO: 594635 - protein, 18 aa, Homo sapiens
  CDR3 for alpha chain variable domain of TCR clone 297318 (TRAV21, TRAJ52)
CAVRPSPPGGTSYGKLTF

SEQ ID NO: 594636 - protein, 15 aa, Homo sapiens
  CDR3 for beta chain variable domain of TCR clone 297318 (TRBV6-6, TRBJ2-7)
CASSYSYGGSYEQYF

SEQ ID NO: 594637 - protein, 13 aa, Homo sapiens
  CDR3 for alpha chain variable domain of TCR clone 297319 (TRAV2, TRAJ40)
CAVVTSGTYKYIF

SEQ ID NO: 594638 - protein, 14 aa, Homo sapiens
  CDR3 for beta chain variable domain of TCR clone 297319 (TRBV19, TRBJ2-1)
CASPTFVLSGEWFF

SEQ ID NO: 594639 - protein, 15 aa, Homo sapiens
  CDR3 for alpha chain variable domain of TCR clone 297320 (TRAV26-1, TRAJ23)
CIGRVAGYQGGKLIF

SEQ ID NO: 594640 - protein, 18 aa, Homo sapiens
  CDR3 for beta chain variable domain of TCR clone 297320 (TRBV28, TRBJ2-1)
CASSSTSGRANSYNEQFF

SEQ ID NO: 594641 - protein, 14 aa, Homo sapiens
  CDR3 for alpha chain variable domain of TCR clone 297321 (TRAV29/DV5, TRAJ36)
CAARRTTGADNLFF

SEQ ID NO: 594642 - protein, 16 aa, Homo sapiens
  CDR3 for beta chain variable domain of TCR clone 297321 (TRBV6-1, TRBJ2-1)
CAGILRQGSSYNEQFF

SEQ ID NO: 594643 - protein, 14 aa, Homo sapiens
  CDR3 for alpha chain variable domain of TCR clone 297322 (TRAV1-2, TRAJ6)
CAVSLSGGSYIPTF

SEQ ID NO: 594644 - protein, 19 aa, Homo sapiens
  CDR3 for beta chain variable domain of TCR clone 297322 (TRBV25-1, TRBJ2-2)
CAILVYRVDRGRKTGELFF

SEQ ID NO: 594645 - protein, 14 aa, Homo sapiens
  CDR3 for alpha chain variable domain of TCR clone 297323 (TRAV12-3, TRAJ10)
SHLPLAGGGNKLTF

SEQ ID NO: 594646 - protein, 16 aa, Homo sapiens
  CDR3 for beta chain variable domain of TCR clone 297323 (TRBV7-9, TRBJ2-1)
CASSDVAGGSYNEQFF

SEQ ID NO: 594647 - protein, 16 aa, Homo sapiens
  CDR3 for alpha chain variable domain of TCR clone 297324 (TRAV23/DV6, TRAJ48)
CAASGVVNFGNEKLTI

SEQ ID NO: 594648 - protein, 15 aa, Homo sapiens
  CDR3 for beta chain variable domain of TCR clone 297324 (TRBV7-9, TRBJ2-1)
CASSLGWGRANEQFF

SEQ ID NO: 594649 - protein, 12 aa, Homo sapiens
  CDR3 for alpha chain variable domain of TCR clone 297325 (TRAV13-2, TRAJ58)
CAERRLDSRLTF

SEQ ID NO: 594650 - protein, 15 aa, Homo sapiens
  CDR3 for beta chain variable domain of TCR clone 297325 (TRBV5-1, TRBJ2-5)
CASSSGRGMVETQYF

SEQ ID NO: 594651 - protein, 14 aa, Homo sapiens
  CDR3 for alpha chain variable domain of TCR clone 297326 (TRAV12-2, TRAJ45)
CAPPERGGADGLTF

SEQ ID NO: 594652 - protein, 14 aa, Homo sapiens
  CDR3 for beta chain variable domain of TCR clone 297326 (TRBV18, TRBJ1-5)
CASSPGNSNQTQHF

SEQ ID NO: 594653 - protein, 14 aa, Homo sapiens
  CDR3 for alpha chain variable domain of TCR clone 297327 (TRAV2, TRAJ9)
CAVEDRSGGFKTIF

SEQ ID NO: 594654 - protein, 16 aa, Homo sapiens
  CDR3 for beta chain variable domain of TCR clone 297327 (TRBV28, TRBJ2-5)
CASSFSPAGGWETQYF

SEQ ID NO: 594655 - protein, 15 aa, Homo sapiens
  CDR3 for alpha chain variable domain of TCR clone 297328 (TRAV26-1, TRAJ48)
CIARWSWFGNEKLTF

SEQ ID NO: 594656 - protein, 12 aa, Homo sapiens
  CDR3 for beta chain variable domain of TCR clone 297328 (TRBV19, TRBJ2-5)
FASSISEETQYF

SEQ ID NO: 594657 - protein, 15 aa, Homo sapiens
  CDR3 for alpha chain variable domain of TCR clone 297329 (TRAV8-3, TRAJ44)
CAVGAGAGTASKITF

SEQ ID NO: 594658 - protein, 12 aa, Homo sapiens
  CDR3 for beta chain variable domain of TCR clone 297329 (TRBV7-8, TRBJ2-4)
CASSLGGNIQYF

SEQ ID NO: 594659 - protein, 13 aa, Homo sapiens
  CDR3 for alpha chain variable domain of TCR clone 297330 (TRAV3, TRAJ21)
CAVREPDFNKFYF

SEQ ID NO: 594660 - protein, 11 aa, Homo sapiens
  CDR3 for beta chain variable domain of TCR clone 297330 (TRBV19, TRBJ1-1)
CASSIGSEAFF

SEQ ID NO: 594661 - protein, 14 aa, Homo sapiens
  CDR3 for alpha chain variable domain of TCR clone 297331 (TRAV20, TRAJ29)
CAVHESFRKHTSCL

SEQ ID NO: 594662 - protein, 16 aa, Homo sapiens
  CDR3 for beta chain variable domain of TCR clone 297331 (TRBV7-2, TRBJ2-7)
CASSLDLSGGAYEQYF

SEQ ID NO: 594663 - protein, 15 aa, Homo sapiens
  CDR3 for alpha chain variable domain of TCR clone 297332 (TRAV23/DV6, TRAJ4)
CAASPLRGGYIKLLF

SEQ ID NO: 594664 - protein, 15 aa, Homo sapiens
  CDR3 for beta chain variable domain of TCR clone 297332 (TRBV7-9, TRBJ1-6)
CASSSPGRGNSPLHF

SEQ ID NO: 594665 - protein, 13 aa, Homo sapiens
  CDR3 for alpha chain variable domain of TCR clone 297333 (TRAV12-2, TRAJ6)
CAVNVSRKLHTYI

SEQ ID NO: 594666 - protein, 12 aa, Homo sapiens
  CDR3 for beta chain variable domain of TCR clone 297333 (TRBV7-9, TRBJ1-4)
CASSTDREKLFF

SEQ ID NO: 594667 - protein, 12 aa, Homo sapiens
  CDR3 for alpha chain variable domain of TCR clone 297334 (TRAV8-1, TRAJ31)
CAVINNNARLMF

SEQ ID NO: 594668 - protein, 15 aa, Homo sapiens
  CDR3 for beta chain variable domain of TCR clone 297334 (TRBV20-1, TRBJ2-2)
CSAWGGQGNTGELFF

SEQ ID NO: 594669 - protein, 16 aa, Homo sapiens
  CDR3 for alpha chain variable domain of TCR clone 297335 (TRAV3, TRAJ3)
CAVRDRAKSSASKIIF

SEQ ID NO: 594670 - protein, 14 aa, Homo sapiens
  CDR3 for beta chain variable domain of TCR clone 297335 (TRBV19, TRBJ2-1)
CASPTFVLSGEQFF

SEQ ID NO: 594671 - protein, 16 aa, Homo sapiens
  CDR3 for alpha chain variable domain of TCR clone 297336 (TRAV26-1, TRAJ52)
CIVSNVGGTSYGKLTF

SEQ ID NO: 594672 - protein, 16 aa, Homo sapiens
  CDR3 for beta chain variable domain of TCR clone 297336 (TRBV5-1, TRBJ2-1)
CASSLEGRGLYNEQFF

SEQ ID NO: 594673 - protein, 14 aa, Homo sapiens
  CDR3 for alpha chain variable domain of TCR clone 297337 (TRAV1-2, TRAJ16)
CAVNRFSDGQKLLF

SEQ ID NO: 594674 - protein, 15 aa, Homo sapiens
  CDR3 for beta chain variable domain of TCR clone 297337 (TRBV10-3, TRBJ2-5)
CAISEFGRGQETQYF

SEQ ID NO: 594675 - protein, 13 aa, Homo sapiens
  CDR3 for alpha chain variable domain of TCR clone 297338 (TRAV20, TRAJ34)
CAVRSYNTDKLIF

SEQ ID NO: 594676 - protein, 15 aa, Homo sapiens
  CDR3 for beta chain variable domain of TCR clone 297338 (TRBV27, TRBJ1-3)
CASSPSPGSGNTMYF

SEQ ID NO: 594677 - protein, 14 aa, Homo sapiens
  CDR3 for alpha chain variable domain of TCR clone 297339 (TRAV29/DV5, TRAJ36)
CAARRKTGANNLFF

SEQ ID NO: 594678 - protein, 16 aa, Homo sapiens
  CDR3 for beta chain variable domain of TCR clone 297339 (TRBV11-2, TRBJ1-2)
CASSPSGREANYGYTF

SEQ ID NO: 594679 - protein, 11 aa, Homo sapiens
  CDR3 for alpha chain variable domain of TCR clone 297340 (TRAV40, TRAJ53)
TSGGSNYKLAF

SEQ ID NO: 594680 - protein, 14 aa, Homo sapiens
  CDR3 for beta chain variable domain of TCR clone 297340 (TRBV9, TRBJ2-1)
CASSVAGTFDEQFF

SEQ ID NO: 594681 - protein, 11 aa, Homo sapiens
  CDR3 for alpha chain variable domain of TCR clone 297341 (TRAV23/DV6, TRAJ48)
CAPRWGEKLTF

SEQ ID NO: 594682 - protein, 13 aa, Homo sapiens
  CDR3 for beta chain variable domain of TCR clone 297341 (TRBV12-4, TRBJ2-5)
CASSPETEETQYF

SEQ ID NO: 594683 - protein, 14 aa, Homo sapiens
  CDR3 for alpha chain variable domain of TCR clone 297342 (TRAV8-6, TRAJ44)
CAVSFTGTASKLTF

SEQ ID NO: 594684 - protein, 13 aa, Homo sapiens
  CDR3 for beta chain variable domain of TCR clone 297342 (TRBV20-1, TRBJ2-7)
CSADSRHSYEQYF

SEQ ID NO: 594685 - protein, 12 aa, Homo sapiens
  CDR3 for alpha chain variable domain of TCR clone 297343 (TRAV3, TRAJ43)
CAVRDPNNDMRF

SEQ ID NO: 594686 - protein, 17 aa, Homo sapiens
  CDR3 for beta chain variable domain of TCR clone 297343 (TRBV7-8, TRBJ2-6)
CASSAGTGGAGANVLTC

SEQ ID NO: 594687 - protein, 12 aa, Homo sapiens
  CDR3 for alpha chain variable domain of TCR clone 297344 (TRAV21, TRAJ30)
CAAMNRDDKIIL

SEQ ID NO: 594688 - protein, 17 aa, Homo sapiens
  CDR3 for beta chain variable domain of TCR clone 297344 (TRBV5-1, TRBJ1-1)
CASRPIRTGGVNTEAFF

SEQ ID NO: 594689 - protein, 17 aa, Homo sapiens
  CDR3 for alpha chain variable domain of TCR clone 297345 (TRAV17, TRAJ24)
CATANSMTTDSWGKLQF

SEQ ID NO: 594690 - protein, 16 aa, Homo sapiens
  CDR3 for beta chain variable domain of TCR clone 297345 (TRBV6-1, TRBJ2-5)
CASSETLDRGTETQYF

SEQ ID NO: 594691 - protein, 14 aa, Homo sapiens
  CDR3 for alpha chain variable domain of TCR clone 297346 (TRAV26-2, TRAJ32)
CILFRGGATNKLIF

SEQ ID NO: 594692 - protein, 13 aa, Homo sapiens
  CDR3 for beta chain variable domain of TCR clone 297346 (TRBV10-3, TRBJ2-7)
CASKLAVNYEQYF

SEQ ID NO: 594693 - protein, 12 aa, Homo sapiens
  CDR3 for alpha chain variable domain of TCR clone 297347 (TRAV12-1, TRAJ40)
CVVSSGTYKYIF

SEQ ID NO: 594694 - protein, 16 aa, Homo sapiens
  CDR3 for beta chain variable domain of TCR clone 297347 (TRBV12-4, TRBJ2-7)
CASSPEGQGSSYEQYF

SEQ ID NO: 594695 - protein, 15 aa, Homo sapiens
  CDR3 for alpha chain variable domain of TCR clone 297348 (TRAV17, TRAJ37)
CATDGGASNTGKLIF

SEQ ID NO: 594696 - protein, 15 aa, Homo sapiens
  CDR3 for beta chain variable domain of TCR clone 297348 (TRBV28, TRBJ2-5)
CASSSGRTIQETQYC

SEQ ID NO: 594697 - protein, 18 aa, Homo sapiens
  CDR3 for alpha chain variable domain of TCR clone 297349 (TRAV26-2, TRAJ54)
CILRDVEVGIQGAQKLVF

SEQ ID NO: 594698 - protein, 15 aa, Homo sapiens
  CDR3 for beta chain variable domain of TCR clone 297349 (TRBV2, TRBJ2-2)
CASSRETVGTGELFF

SEQ ID NO: 594699 - protein, 13 aa, Homo sapiens
  CDR3 for alpha chain variable domain of TCR clone 297350 (TRAV12-3, TRAJ33)
CAMSVNSNYQLIW

SEQ ID NO: 594700 - protein, 19 aa, Homo sapiens
  CDR3 for beta chain variable domain of TCR clone 297350 (TRBV5-7, TRBJ2-4)
CASSLEGFASGSAKNIQYF

SEQ ID NO: 594701 - protein, 12 aa, Homo sapiens
  CDR3 for alpha chain variable domain of TCR clone 297351 (TRAV12-1, TRAJ40)
CVFYSGTYKYIF

SEQ ID NO: 594702 - protein, 18 aa, Homo sapiens
  CDR3 for beta chain variable domain of TCR clone 297351 (TRBV12-4, TRBJ2-2)
CGSSLVAGTRGRTGELFF

SEQ ID NO: 594703 - protein, 14 aa, Homo sapiens
  CDR3 for alpha chain variable domain of TCR clone 297352 (TRAV1-1, TRAJ27)
CAGIYNTNAGKSTF

SEQ ID NO: 594704 - protein, 15 aa, Homo sapiens
  CDR3 for beta chain variable domain of TCR clone 297352 (TRBV6-3, TRBJ2-7)
CASSSPGTVFYEQYF

SEQ ID NO: 594705 - protein, 11 aa, Homo sapiens
  CDR3 for alpha chain variable domain of TCR clone 297353 (TRAV12-1, TRAJ16)
CGDPDGQKLLF

SEQ ID NO: 594706 - protein, 17 aa, Homo sapiens
  CDR3 for beta chain variable domain of TCR clone 297353 (TRBV20-1, TRBJ2-1)
CSASSSGLAGSYNEQFF

SEQ ID NO: 594707 - protein, 12 aa, Homo sapiens
  CDR3 for alpha chain variable domain of TCR clone 297354 (TRAV26-1, TRAJ17)
CISQSCRQQANF

SEQ ID NO: 594708 - protein, 16 aa, Homo sapiens
  CDR3 for beta chain variable domain of TCR clone 297354 (TRBV28, TRBJ1-4)
CASSSRTGAANEKLSF

SEQ ID NO: 594709 - protein, 16 aa, Homo sapiens
  CDR3 for alpha chain variable domain of TCR clone 297355 (TRAV21, TRAJ17)
CAVRPGEEAAGNKLTF

SEQ ID NO: 594710 - protein, 16 aa, Homo sapiens
  CDR3 for beta chain variable domain of TCR clone 297355 (TRBV2, TRBJ2-7)
CASSEPRTGPSYEQYF

SEQ ID NO: 594711 - protein, 14 aa, Homo sapiens
  CDR3 for alpha chain variable domain of TCR clone 297356 (TRAV17, TRAJ34)
CATVPTYNTDKLIF

SEQ ID NO: 594712 - protein, 15 aa, Homo sapiens
  CDR3 for beta chain variable domain of TCR clone 297356 (TRBV20-1, TRBJ2-5)
CSATRTSGSLETQYF

SEQ ID NO: 594713 - protein, 17 aa, Homo sapiens
  CDR3 for alpha chain variable domain of TCR clone 297357 (TRAV3, TRAJ6)
CAVRDGPRAGGSYIPTF

SEQ ID NO: 594714 - protein, 13 aa, Homo sapiens
  CDR3 for beta chain variable domain of TCR clone 297357 (TRBV7-2, TRBJ1-2)
CASSLKQNYGYTF

SEQ ID NO: 594715 - protein, 13 aa, Homo sapiens
  CDR3 for alpha chain variable domain of TCR clone 297358 (TRAV17, TRAJ5)
CALRGTGRRALTF

SEQ ID NO: 594716 - protein, 15 aa, Homo sapiens
  CDR3 for beta chain variable domain of TCR clone 297358 (TRBV20-1, TRBJ2-7)
GSAREGRDSLYEQYF

SEQ ID NO: 594717 - protein, 12 aa, Homo sapiens
  CDR3 for alpha chain variable domain of TCR clone 297359 (TRAV16, TRAJ49)
CGLNEGGNQFYF

SEQ ID NO: 594718 - protein, 14 aa, Homo sapiens
  CDR3 for beta chain variable domain of TCR clone 297359 (TRBV7-9, TRBJ2-1)
CASRPTGLRNEQFF

SEQ ID NO: 594719 - protein, 12 aa, Homo sapiens
  CDR3 for alpha chain variable domain of TCR clone 297360 (TRAV3, TRAJ7)
CADLLWEQQTRF

SEQ ID NO: 594720 - protein, 13 aa, Homo sapiens
  CDR3 for beta chain variable domain of TCR clone 297360 (TRBV7-3, TRBJ2-5)
CASSFRGGETQYS

SEQ ID NO: 594721 - protein, 14 aa, Homo sapiens
  CDR3 for alpha chain variable domain of TCR clone 297361 (TRAV12-2, TRAJ44)
CAVNKAGTASKLTV

SEQ ID NO: 594722 - protein, 12 aa, Homo sapiens
  CDR3 for beta chain variable domain of TCR clone 297361 (TRBV19, TRBJ1-4)
CASKDWPGGLFF

SEQ ID NO: 594723 - protein, 14 aa, Homo sapiens
  CDR3 for alpha chain variable domain of TCR clone 297362 (TRAV2, TRAJ29)
CAVTPPSGNTPLVF

SEQ ID NO: 594724 - protein, 13 aa, Homo sapiens
  CDR3 for beta chain variable domain of TCR clone 297362 (TRBV13, TRBJ2-7)
CASSSGLTHEQYF

SEQ ID NO: 594725 - protein, 22 aa, Homo sapiens
  CDR3 for alpha chain variable domain of TCR clone 297363 (TRAV27, TRAJ41)
CAVRTQIPDIQNPYPAVYQLRD

SEQ ID NO: 594726 - protein, 16 aa, Homo sapiens
  CDR3 for beta chain variable domain of TCR clone 297363 (TRBV5-1, TRBJ2-3)
CASSLGLAVYTDTQYF

SEQ ID NO: 594727 - protein, 13 aa, Homo sapiens
  CDR3 for alpha chain variable domain of TCR clone 297364 (TRAV21, TRAJ27)
CSARPGNAGKSTF

SEQ ID NO: 594728 - protein, 13 aa, Homo sapiens
  CDR3 for beta chain variable domain of TCR clone 297364 (TRBV7-9, TRBJ1-2)
CASSLKQNYGYTF

SEQ ID NO: 594729 - protein, 16 aa, Homo sapiens
  CDR3 for alpha chain variable domain of TCR clone 297365 (TRAV17, TRAJ9)
CATGEGGGTGGFKTIF

SEQ ID NO: 594730 - protein, 12 aa, Homo sapiens
  CDR3 for beta chain variable domain of TCR clone 297365 (TRBV11-2, TRBJ2-1)
CASSPGNNEQFF

SEQ ID NO: 594731 - protein, 12 aa, Homo sapiens
  CDR3 for alpha chain variable domain of TCR clone 297366 (TRAV13-1, TRAJ21)
CAAKESFNKFYF

SEQ ID NO: 594732 - protein, 15 aa, Homo sapiens
  CDR3 for beta chain variable domain of TCR clone 297366 (TRBV12-4, TRBJ2-5)
CASSPPTGLQETQYF

SEQ ID NO: 594733 - protein, 12 aa, Homo sapiens
  CDR3 for alpha chain variable domain of TCR clone 297367 (TRAV3, TRAJ20)
CAVRDGDYKLSF

SEQ ID NO: 594734 - protein, 14 aa, Homo sapiens
  CDR3 for beta chain variable domain of TCR clone 297367 (TRBV12-4, TRBJ1-6)
CASNLQGKGSPLHF

SEQ ID NO: 594735 - protein, 12 aa, Homo sapiens
  CDR3 for alpha chain variable domain of TCR clone 297368 (TRAV2, TRAJ33)
CAVPDSNCQLIW

SEQ ID NO: 594736 - protein, 15 aa, Homo sapiens
  CDR3 for beta chain variable domain of TCR clone 297368 (TRBV15, TRBJ1-5)
CATSRDPVSNQPQHC

SEQ ID NO: 594737 - protein, 12 aa, Homo sapiens
  CDR3 for alpha chain variable domain of TCR clone 297369 (TRAV29/DV5, TRAJ49)
CAATDTGNQFYY

SEQ ID NO: 594738 - protein, 19 aa, Homo sapiens
  CDR3 for beta chain variable domain of TCR clone 297369 (TRBV25-1, TRBJ2-2)
CAILVYRVDRGRKTGELFF

SEQ ID NO: 594739 - protein, 21 aa, Homo sapiens
  CDR3 for alpha chain variable domain of TCR clone 297370 (TRAV25, TRAJ53)
TATQTTDVGTGSGGSNYKLTF

SEQ ID NO: 594740 - protein, 16 aa, Homo sapiens
  CDR3 for beta chain variable domain of TCR clone 297370 (TRBV4-2, TRBJ2-3)
CASSLSSGRHTDTQYF

SEQ ID NO: 594741 - protein, 13 aa, Homo sapiens
  CDR3 for alpha chain variable domain of TCR clone 297371 (TRAV1-2, TRAJ9)
CAALNIGGFKTIF

SEQ ID NO: 594742 - protein, 16 aa, Homo sapiens
  CDR3 for beta chain variable domain of TCR clone 297371 (TRBV6-5, TRBJ2-1)
CASSYSLSGGYNEQFF

SEQ ID NO: 594743 - protein, 14 aa, Homo sapiens
  CDR3 for alpha chain variable domain of TCR clone 297372 (TRAV17, TRAJ57)
CATDPQGGSEKLVF

SEQ ID NO: 594744 - protein, 15 aa, Homo sapiens
  CDR3 for beta chain variable domain of TCR clone 297372 (TRBV5-1, TRBJ2-7)
CASSFDLTSSYEQYF

SEQ ID NO: 594745 - protein, 13 aa, Homo sapiens
  CDR3 for alpha chain variable domain of TCR clone 297373 (TRAV27, TRAJ45)
CRSSGGGDDGLIF

SEQ ID NO: 594746 - protein, 17 aa, Homo sapiens
  CDR3 for beta chain variable domain of TCR clone 297373 (TRBV11-2, TRBJ2-1)
CASSLYPPGVEYNEQFF

SEQ ID NO: 594747 - protein, 14 aa, Homo sapiens
  CDR3 for alpha chain variable domain of TCR clone 297374 (TRAV23/DV6, TRAJ11)
CQASLESGYSTLTF

SEQ ID NO: 594748 - protein, 15 aa, Homo sapiens
  CDR3 for beta chain variable domain of TCR clone 297374 (TRBV28, TRBJ2-7)
CASSSPGTEPFEQYF

SEQ ID NO: 594749 - protein, 14 aa, Homo sapiens
  CDR3 for alpha chain variable domain of TCR clone 297375 (TRAV1-2, TRAJ16)
CAVTRFSDGQNLLF

SEQ ID NO: 594750 - protein, 13 aa, Homo sapiens
  CDR3 for beta chain variable domain of TCR clone 297375 (TRBV4-1, TRBJ2-1)
CASSQAGGDEQFF

SEQ ID NO: 594751 - protein, 13 aa, Homo sapiens
  CDR3 for alpha chain variable domain of TCR clone 297376 (TRAV2, TRAJ40)
CAVVTSGTYKYIF

SEQ ID NO: 594752 - protein, 19 aa, Homo sapiens
  CDR3 for beta chain variable domain of TCR clone 297376 (TRBV3-1, TRBJ2-1)
CASSQDVTSGRHSYNEQFF

SEQ ID NO: 594753 - protein, 13 aa, Homo sapiens
  CDR3 for alpha chain variable domain of TCR clone 297377 (TRAV21, TRAJ27)
CAARTGNAGTSTF

SEQ ID NO: 594754 - protein, 14 aa, Homo sapiens
  CDR3 for beta chain variable domain of TCR clone 297377 (TRBV7-6, TRBJ2-3)
CASSLGTVTDTQYF

SEQ ID NO: 594755 - protein, 13 aa, Homo sapiens
  CDR3 for alpha chain variable domain of TCR clone 297378 (TRAV35, TRAJ20)
CAGPLSNDYKLSF

SEQ ID NO: 594756 - protein, 16 aa, Homo sapiens
  CDR3 for beta chain variable domain of TCR clone 297378 (TRBV29-1, TRBJ2-7)
CSVEVVGTSGGYEQDF

SEQ ID NO: 594757 - protein, 13 aa, Homo sapiens
  CDR3 for alpha chain variable domain of TCR clone 297379 (TRAV29/DV5, TRAJ31)
CAASRNNNARLMF

SEQ ID NO: 594758 - protein, 13 aa, Homo sapiens
  CDR3 for beta chain variable domain of TCR clone 297379 (TRBV7-3, TRBJ2-5)
CASSFRGGETQYF

SEQ ID NO: 594759 - protein, 14 aa, Homo sapiens
  CDR3 for alpha chain variable domain of TCR clone 297380 (TRAV26-1, TRAJ45)
CIEVTGGGADGLPF

SEQ ID NO: 594760 - protein, 14 aa, Homo sapiens
  CDR3 for beta chain variable domain of TCR clone 297380 (TRBV7-3, TRBJ2-2)
CASSLNSNTGELFF

SEQ ID NO: 594761 - protein, 13 aa, Homo sapiens
  CDR3 for alpha chain variable domain of TCR clone 297381 (TRAV35, TRAJ44)
CAGLSGTACKLTF

SEQ ID NO: 594762 - protein, 14 aa, Homo sapiens
  CDR3 for beta chain variable domain of TCR clone 297381 (TRBV7-8, TRBJ1-2)
CASSLGPYRDICMA

SEQ ID NO: 594763 - protein, 15 aa, Homo sapiens
  CDR3 for alpha chain variable domain of TCR clone 297382 (TRAV8-6, TRAJ26)
CAVSDQSPGGQNFVF

SEQ ID NO: 594764 - protein, 13 aa, Homo sapiens
  CDR3 for beta chain variable domain of TCR clone 297382 (TRBV27, TRBJ2-7)
CASSLRHRYKQYF

SEQ ID NO: 594765 - protein, 17 aa, Homo sapiens
  CDR3 for alpha chain variable domain of TCR clone 297383 (TRAV8-6, TRAJ8)
CAVKEGIENTGFQKLVF

SEQ ID NO: 594766 - protein, 20 aa, Homo sapiens
  CDR3 for beta chain variable domain of TCR clone 297383 (TRBV28, TRBJ2-1)
CASTPIGRSPGLAGGNEQFF

SEQ ID NO: 594767 - protein, 11 aa, Homo sapiens
  CDR3 for alpha chain variable domain of TCR clone 297384 (TRAV13-1, TRAJ15)
CAETTGIALIF

SEQ ID NO: 594768 - protein, 15 aa, Homo sapiens
  CDR3 for beta chain variable domain of TCR clone 297384 (TRBV19, TRBJ2-1)
CASSIQATSYNEQFF

SEQ ID NO: 594769 - protein, 15 aa, Homo sapiens
  CDR3 for alpha chain variable domain of TCR clone 297385 (TRAV8-3, TRAJ45)
CASSYSGGGADGLTF

SEQ ID NO: 594770 - protein, 14 aa, Homo sapiens
  CDR3 for beta chain variable domain of TCR clone 297385 (TRBV7-2, TRBJ2-1)
CASSRGGARNEQFF

SEQ ID NO: 594771 - protein, 14 aa, Homo sapiens
  CDR3 for alpha chain variable domain of TCR clone 297386 (TRAV21, TRAJ58)
CAVKRETSGSRLTF

SEQ ID NO: 594772 - protein, 14 aa, Homo sapiens
  CDR3 for beta chain variable domain of TCR clone 297386 (TRBV4-2, TRBJ2-1)
CASGLDRAYNEQFF

SEQ ID NO: 594773 - protein, 10 aa, Homo sapiens
  CDR3 for alpha chain variable domain of TCR clone 297387 (TRAV16, TRAJ22)
SAMYRRQLTF

SEQ ID NO: 594774 - protein, 15 aa, Homo sapiens
  CDR3 for beta chain variable domain of TCR clone 297387 (TRBV7-9, TRBJ1-6)
CASSSPGRGNSPLHF

SEQ ID NO: 594775 - protein, 14 aa, Homo sapiens
  CDR3 for alpha chain variable domain of TCR clone 297388 (TRAV38-1, TRAJ45)
CASHSGGGADGLTF

SEQ ID NO: 594776 - protein, 12 aa, Homo sapiens
  CDR3 for beta chain variable domain of TCR clone 297388 (TRBV5-1, TRBJ1-2)
CASSSDSYGYTF

SEQ ID NO: 594777 - protein, 17 aa, Homo sapiens
  CDR3 for alpha chain variable domain of TCR clone 297389 (TRAV4, TRAJ10)
CTTASWGFTGGGNKLTF

SEQ ID NO: 594778 - protein, 17 aa, Homo sapiens
  CDR3 for beta chain variable domain of TCR clone 297389 (TRBV13, TRBJ2-3)
CASSLSRVAGGRNTQYF

SEQ ID NO: 594779 - protein, 15 aa, Homo sapiens
  CDR3 for alpha chain variable domain of TCR clone 297390 (TRAV8-3, TRAJ20)
CAVEAKGSNDYKLRF

SEQ ID NO: 594780 - protein, 12 aa, Homo sapiens
  CDR3 for beta chain variable domain of TCR clone 297390 (TRBV7-2, TRBJ1-2)
CASRDSIYGYTF

SEQ ID NO: 594781 - protein, 12 aa, Homo sapiens
  CDR3 for alpha chain variable domain of TCR clone 297391 (TRAV8-3, TRAJ26)
CAGDNYGQNFVF

SEQ ID NO: 594782 - protein, 12 aa, Homo sapiens
  CDR3 for beta chain variable domain of TCR clone 297391 (TRBV27, TRBJ2-5)
CASSLKGETQYF

SEQ ID NO: 594783 - protein, 16 aa, Homo sapiens
  CDR3 for alpha chain variable domain of TCR clone 297392 (TRAV29/DV5, TRAJ39)
CAASLLFNNGGNMLTF

SEQ ID NO: 594784 - protein, 16 aa, Homo sapiens
  CDR3 for beta chain variable domain of TCR clone 297392 (TRBV19, TRBJ2-6)
CASSMSGLSGANVLTF

SEQ ID NO: 594785 - protein, 14 aa, Homo sapiens
  CDR3 for alpha chain variable domain of TCR clone 297393 (TRAV27, TRAJ23)
CAGLSYNQGGKLIF

SEQ ID NO: 594786 - protein, 15 aa, Homo sapiens
  CDR3 for beta chain variable domain of TCR clone 297393 (TRBV20-1, TRBJ2-7)
CGARDRVSGMDEQYF

SEQ ID NO: 594787 - protein, 16 aa, Homo sapiens
  CDR3 for alpha chain variable domain of TCR clone 297394 (TRAV30, TRAJ24)
CGTEIVDADSWGKFQF

SEQ ID NO: 594788 - protein, 14 aa, Homo sapiens
  CDR3 for beta chain variable domain of TCR clone 297394 (TRBV12-4, TRBJ1-1)
CASRQTGLNTEAFF

SEQ ID NO: 594789 - protein, 10 aa, Homo sapiens
  CDR3 for alpha chain variable domain of TCR clone 297395 (TRAV8-1, TRAJ43)
CAVNVDDMRF

SEQ ID NO: 594790 - protein, 16 aa, Homo sapiens
  CDR3 for beta chain variable domain of TCR clone 297395 (TRBV12-5, TRBJ2-5)
CASGPRTSGNQETQYF

SEQ ID NO: 594791 - protein, 13 aa, Homo sapiens
  CDR3 for alpha chain variable domain of TCR clone 297396 (TRAV35, TRAJ21)
CARQLSNFNKFYF

SEQ ID NO: 594792 - protein, 11 aa, Homo sapiens
  CDR3 for beta chain variable domain of TCR clone 297396 (TRBV7-6, TRBJ2-5)
CASSSQGTQYF

SEQ ID NO: 594793 - protein, 13 aa, Homo sapiens
  CDR3 for alpha chain variable domain of TCR clone 297397 (TRAV12-2, TRAJ20)
CAVDPSNDYKLSF

SEQ ID NO: 594794 - protein, 15 aa, Homo sapiens
  CDR3 for beta chain variable domain of TCR clone 297397 (TRBV27, TRBJ2-5)
CASSLYPRGGETQYF

SEQ ID NO: 594795 - protein, 14 aa, Homo sapiens
  CDR3 for alpha chain variable domain of TCR clone 297398 (TRAV1-2, TRAJ8)
CAAREDTGFQKLVF

SEQ ID NO: 594796 - protein, 17 aa, Homo sapiens
  CDR3 for beta chain variable domain of TCR clone 297398 (TRBV7-8, TRBJ2-6)
CASSAGTGGAGANVLTF

SEQ ID NO: 594797 - protein, 11 aa, Homo sapiens
  CDR3 for alpha chain variable domain of TCR clone 297399 (TRAV8-3, TRAJ15)
CAVGPGTALIF

SEQ ID NO: 594798 - protein, 11 aa, Homo sapiens
  CDR3 for beta chain variable domain of TCR clone 297399 (TRBV18, TRBJ2-3)
CASSYTSGAAG

SEQ ID NO: 594799 - protein, 15 aa, Homo sapiens
  CDR3 for alpha chain variable domain of TCR clone 297400 (TRAV12-2, TRAJ43)
CAFDMRFGAGTRLTG

SEQ ID NO: 594800 - protein, 18 aa, Homo sapiens
  CDR3 for beta chain variable domain of TCR clone 297400 (TRBV20-1, TRBJ2-3)
CSASGLAGGPGTTDTQYS

SEQ ID NO: 594801 - protein, 15 aa, Homo sapiens
  CDR3 for alpha chain variable domain of TCR clone 297401 (TRAV17, TRAJ57)
CATGPSQGGSEKLVF

SEQ ID NO: 594802 - protein, 15 aa, Homo sapiens
  CDR3 for beta chain variable domain of TCR clone 297401 (TRBV9, TRBJ1-6)
CASSVGGTGDSPLHF

SEQ ID NO: 594803 - protein, 11 aa, Homo sapiens
  CDR3 for alpha chain variable domain of TCR clone 297402 (TRAV3, TRAJ21)
CAVGNFNKFYF

SEQ ID NO: 594804 - protein, 19 aa, Homo sapiens
  CDR3 for beta chain variable domain of TCR clone 297402 (TRBV7-2, TRBJ2-3)
CASSSQGGPRLAGADTQYF

SEQ ID NO: 594805 - protein, 14 aa, Homo sapiens
  CDR3 for alpha chain variable domain of TCR clone 297403 (TRAV3, TRAJ9)
CAVRLNTGGFKTIF

SEQ ID NO: 594806 - protein, 15 aa, Homo sapiens
  CDR3 for beta chain variable domain of TCR clone 297403 (TRBV7-2, TRBJ2-1)
CTSSLASGRVNEQFF

SEQ ID NO: 594807 - protein, 12 aa, Homo sapiens
  CDR3 for alpha chain variable domain of TCR clone 297404 (TRAV26-2, TRAJ21)
CILKGNFNKFYF

SEQ ID NO: 594808 - protein, 14 aa, Homo sapiens
  CDR3 for beta chain variable domain of TCR clone 297404 (TRBV27, TRBJ2-7)
CASSSRPLFYEQYF

SEQ ID NO: 594809 - protein, 14 aa, Homo sapiens
  CDR3 for alpha chain variable domain of TCR clone 297405 (TRAV12-2, TRAJ40)
CAVKIPSGTYKYIS

SEQ ID NO: 594810 - protein, 14 aa, Homo sapiens
  CDR3 for beta chain variable domain of TCR clone 297405 (TRBV5-8, TRBJ1-1)
CASSPRTGFSEAFF

SEQ ID NO: 594811 - protein, 12 aa, Homo sapiens
  CDR3 for alpha chain variable domain of TCR clone 297406 (TRAV13-2, TRAJ23)
CAERHRGGKLIF

SEQ ID NO: 594812 - protein, 16 aa, Homo sapiens
  CDR3 for beta chain variable domain of TCR clone 297406 (TRBV12-5, TRBJ2-5)
CASGPRTSGNHETQYF

SEQ ID NO: 594813 - protein, 20 aa, Homo sapiens
  CDR3 for alpha chain variable domain of TCR clone 297407 (TRAV12-3, TRAJ41)
SLFIRDSQPSDSATPEALNF

SEQ ID NO: 594814 - protein, 15 aa, Homo sapiens
  CDR3 for beta chain variable domain of TCR clone 297407 (TRBV5-1, TRBJ2-7)
CASSLDSTSSYEQYF

SEQ ID NO: 594815 - protein, 13 aa, Homo sapiens
  CDR3 for alpha chain variable domain of TCR clone 297408 (TRAV22, TRAJ29)
CSVGGSGNTPLAF

SEQ ID NO: 594816 - protein, 13 aa, Homo sapiens
  CDR3 for beta chain variable domain of TCR clone 297408 (TRBV4-2, TRBJ1-1)
CASSQAGNTEAFF

SEQ ID NO: 594817 - protein, 14 aa, Homo sapiens
  CDR3 for alpha chain variable domain of TCR clone 297409 (TRAV1-2, TRAJ16)
CAVNRFSDGQQLLF

SEQ ID NO: 594818 - protein, 12 aa, Homo sapiens
  CDR3 for beta chain variable domain of TCR clone 297409 (TRBV20-1, TRBJ2-5)
CSAPRSQETQYF

SEQ ID NO: 594819 - protein, 12 aa, Homo sapiens
  CDR3 for alpha chain variable domain of TCR clone 297410 (TRAV21, TRAJ13)
PGPSGGYQKVTF

SEQ ID NO: 594820 - protein, 13 aa, Homo sapiens
  CDR3 for beta chain variable domain of TCR clone 297410 (TRBV7-9, TRBJ1-2)
WASSLKQNYGYTF

SEQ ID NO: 594821 - protein, 15 aa, Homo sapiens
  CDR3 for alpha chain variable domain of TCR clone 297411 (TRAV8-3, TRAJ44)
CAVGAGAGTASKLTF

SEQ ID NO: 594822 - protein, 13 aa, Homo sapiens
  CDR3 for beta chain variable domain of TCR clone 297411 (TRBV5-1, TRBJ2-1)
CASSSEGFEEQFF

SEQ ID NO: 594823 - protein, 12 aa, Homo sapiens
  CDR3 for alpha chain variable domain of TCR clone 297412 (TRAV29/DV5, TRAJ34)
CAARHNTDKLIF

SEQ ID NO: 594824 - protein, 12 aa, Homo sapiens
  CDR3 for beta chain variable domain of TCR clone 297412 (TRBV5-5, TRBJ2-5)
CASSYFGETQYF

SEQ ID NO: 594825 - protein, 13 aa, Homo sapiens
  CDR3 for alpha chain variable domain of TCR clone 297413 (TRAV21, TRAJ11)
RAVPNSGYSTLTF

SEQ ID NO: 594826 - protein, 13 aa, Homo sapiens
  CDR3 for beta chain variable domain of TCR clone 297413 (TRBV3-1, TRBJ2-7)
CASSLRDGYEQYF

SEQ ID NO: 594827 - protein, 14 aa, Homo sapiens
  CDR3 for alpha chain variable domain of TCR clone 297414 (TRAV1-2, TRAJ8)
CAVRVDTGFQKLVF

SEQ ID NO: 594828 - protein, 15 aa, Homo sapiens
  CDR3 for beta chain variable domain of TCR clone 297414 (TRBV11-3, TRBJ2-3)
CASLKDGREGDTQYF

SEQ ID NO: 594829 - protein, 12 aa, Homo sapiens
  CDR3 for alpha chain variable domain of TCR clone 297415 (TRAV13-1, TRAJ15)
CAASQAGTALIF

SEQ ID NO: 594830 - protein, 14 aa, Homo sapiens
  CDR3 for beta chain variable domain of TCR clone 297415 (TRBV19, TRBJ2-1)
CASPTIVLSGEQFF

SEQ ID NO: 594831 - protein, 14 aa, Homo sapiens
  CDR3 for alpha chain variable domain of TCR clone 297416 (TRAV13-1, TRAJ8)
CAASEVTGFQKLVF

SEQ ID NO: 594832 - protein, 13 aa, Homo sapiens
  CDR3 for beta chain variable domain of TCR clone 297416 (TRBV19, TRBJ1-5)
CASSTRRDQPQHF

SEQ ID NO: 594833 - protein, 16 aa, Homo sapiens
  CDR3 for alpha chain variable domain of TCR clone 297417 (TRAV3, TRAJ37)
CAARGKGSGNTGKLIF

SEQ ID NO: 594834 - protein, 16 aa, Homo sapiens
  CDR3 for beta chain variable domain of TCR clone 297417 (TRBV28, TRBJ1-5)
CASSFRGGYSNQPQQF

SEQ ID NO: 594835 - protein, 17 aa, Homo sapiens
  CDR3 for alpha chain variable domain of TCR clone 297418 (TRAV26-1, TRAJ37)
CIVSVITVSSNTGKLIF

SEQ ID NO: 594836 - protein, 15 aa, Homo sapiens
  CDR3 for beta chain variable domain of TCR clone 297418 (TRBV10-1, TRBJ2-3)
CASSATSGGFDTQYF

SEQ ID NO: 594837 - protein, 15 aa, Homo sapiens
  CDR3 for alpha chain variable domain of TCR clone 297419 (TRAV26-1, TRAJ44)
CIVRIGTGTASKLTF

SEQ ID NO: 594838 - protein, 16 aa, Homo sapiens
  CDR3 for beta chain variable domain of TCR clone 297419 (TRBV7-6, TRBJ2-2)
CASSLKRGTLSGELFF

SEQ ID NO: 594839 - protein, 12 aa, Homo sapiens
  CDR3 for alpha chain variable domain of TCR clone 297420 (TRAV12-2, TRAJ8)
CAVATGFQKLVF

SEQ ID NO: 594840 - protein, 15 aa, Homo sapiens
  CDR3 for beta chain variable domain of TCR clone 297420 (TRBV7-9, TRBJ1-6)
CASSSPGRGNSPLHF

SEQ ID NO: 594841 - protein, 13 aa, Homo sapiens
  CDR3 for alpha chain variable domain of TCR clone 297421 (TRAV21, TRAJ20)
CAVGLRVDYKLSF

SEQ ID NO: 594842 - protein, 13 aa, Homo sapiens
  CDR3 for beta chain variable domain of TCR clone 297421 (TRBV19, TRBJ1-2)
CASSQGQVYGYTF

SEQ ID NO: 594843 - protein, 14 aa, Homo sapiens
  CDR3 for alpha chain variable domain of TCR clone 297422 (TRAV16, TRAJ26)
CIIVLSAYGQNLVF

SEQ ID NO: 594844 - protein, 14 aa, Homo sapiens
  CDR3 for beta chain variable domain of TCR clone 297422 (TRBV7-2, TRBJ2-7)
CASRSQGAAYEQYF

SEQ ID NO: 594845 - protein, 14 aa, Homo sapiens
  CDR3 for alpha chain variable domain of TCR clone 297423 (TRAV12-2, TRAJ11)
CAVNRESVYSTLTF

SEQ ID NO: 594846 - protein, 10 aa, Homo sapiens
  CDR3 for beta chain variable domain of TCR clone 297423 (TRBV20-1, TRBJ2-5)
CSARFETQYF

SEQ ID NO: 594847 - protein, 14 aa, Homo sapiens
  CDR3 for alpha chain variable domain of TCR clone 297424 (TRAV1-2, TRAJ8)
CAVRGDTGFQKLGF

SEQ ID NO: 594848 - protein, 17 aa, Homo sapiens
  CDR3 for beta chain variable domain of TCR clone 297424 (TRBV9, TRBJ2-2)
CASSVGGQGTDTGELFF

SEQ ID NO: 594849 - protein, 13 aa, Homo sapiens
  CDR3 for alpha chain variable domain of TCR clone 297425 (TRAV23/DV6, TRAJ16)
CAASISDGQKLLF

SEQ ID NO: 594850 - protein, 15 aa, Homo sapiens
  CDR3 for beta chain variable domain of TCR clone 297425 (TRBV2, TRBJ2-2)
GASSRETVGTGELFF

SEQ ID NO: 594851 - protein, 15 aa, Homo sapiens
  CDR3 for alpha chain variable domain of TCR clone 297426 (TRAV17, TRAJ56)
CATDANTGANSKLTF

SEQ ID NO: 594852 - protein, 14 aa, Homo sapiens
  CDR3 for beta chain variable domain of TCR clone 297426 (TRBV19, TRBJ1-5)
CASSLGTGGQPQHF

SEQ ID NO: 594853 - protein, 13 aa, Homo sapiens
  CDR3 for alpha chain variable domain of TCR clone 297427 (TRAV22, TRAJ26)
CAVEHNYGQNLVF

SEQ ID NO: 594854 - protein, 16 aa, Homo sapiens
  CDR3 for beta chain variable domain of TCR clone 297427 (TRBV7-2, TRBJ2-6)
CASSERRASGANVLTF

SEQ ID NO: 594855 - protein, 15 aa, Homo sapiens
  CDR3 for alpha chain variable domain of TCR clone 297428 (TRAV3, TRAJ20)
CAMRDVKLSDYKLSF

SEQ ID NO: 594856 - protein, 15 aa, Homo sapiens
  CDR3 for beta chain variable domain of TCR clone 297428 (TRBV7-9, TRBJ1-6)
CASSSPGRANSPLHF

SEQ ID NO: 594857 - protein, 13 aa, Homo sapiens
  CDR3 for alpha chain variable domain of TCR clone 297429 (TRAV24, TRAJ42)
CAFSTGSQGNLIF

SEQ ID NO: 594858 - protein, 12 aa, Homo sapiens
  CDR3 for beta chain variable domain of TCR clone 297429 (TRBV12-4, TRBJ2-3)
CASSTLPDTQYF

SEQ ID NO: 594859 - protein, 14 aa, Homo sapiens
  CDR3 for alpha chain variable domain of TCR clone 297430 (TRAV13-2, TRAJ11)
CAETGNSGYSTLTF

SEQ ID NO: 594860 - protein, 12 aa, Homo sapiens
  CDR3 for beta chain variable domain of TCR clone 297430 (TRBV28, TRBJ2-3)
CASSLYRDTQYF

SEQ ID NO: 594861 - protein, 18 aa, Homo sapiens
  CDR3 for alpha chain variable domain of TCR clone 297431 (TRAV13-1, TRAJ52)
CAAKNTNAGGTSYGKLTF

SEQ ID NO: 594862 - protein, 12 aa, Homo sapiens
  CDR3 for beta chain variable domain of TCR clone 297431 (TRBV4-3, TRBJ2-1)
CASSLSGYEQFF

SEQ ID NO: 594863 - protein, 14 aa, Homo sapiens
  CDR3 for alpha chain variable domain of TCR clone 297432 (TRAV17, TRAJ37)
CATDGSSNTGKLIF

SEQ ID NO: 594864 - protein, 13 aa, Homo sapiens
  CDR3 for beta chain variable domain of TCR clone 297432 (TRBV11-2, TRBJ2-1)
CDSSLDLVNEQFF

SEQ ID NO: 594865 - protein, 17 aa, Homo sapiens
  CDR3 for alpha chain variable domain of TCR clone 297433 (TRAV8-2, )
CVANIQNPDPAVYQLRD

SEQ ID NO: 594866 - protein, 14 aa, Homo sapiens
  CDR3 for beta chain variable domain of TCR clone 297433 (TRBV7-9, TRBJ2-5)
CASSVVGGEETQYF

SEQ ID NO: 594867 - protein, 17 aa, Homo sapiens
  CDR3 for alpha chain variable domain of TCR clone 297434 (TRAV8-6, TRAJ58)
CSVSFWVGETSGSRLTF

SEQ ID NO: 594868 - protein, 14 aa, Homo sapiens
  CDR3 for beta chain variable domain of TCR clone 297434 (TRBV4-2, TRBJ2-1)
CASGLDRAYNEQFF

SEQ ID NO: 594869 - protein, 14 aa, Homo sapiens
  CDR3 for alpha chain variable domain of TCR clone 297435 (TRAV17, TRAJ31)
CATDAEDNNARRMF

SEQ ID NO: 594870 - protein, 16 aa, Homo sapiens
  CDR3 for beta chain variable domain of TCR clone 297435 (TRBV24-1, TRBJ2-5)
CATRLAEDCWEKTQYF

SEQ ID NO: 594871 - protein, 14 aa, Homo sapiens
  CDR3 for alpha chain variable domain of TCR clone 297436 (TRAV1-2, TRAJ8)
CAVREDTGFEKLVF

SEQ ID NO: 594872 - protein, 14 aa, Homo sapiens
  CDR3 for beta chain variable domain of TCR clone 297436 (TRBV25-1, TRBJ1-1)
CASTHLGGNTEAFF

SEQ ID NO: 594873 - protein, 12 aa, Homo sapiens
  CDR3 for alpha chain variable domain of TCR clone 297437 (TRAV23/DV6, TRAJ53)
CAASKLGSGGST

SEQ ID NO: 594874 - protein, 18 aa, Homo sapiens
  CDR3 for beta chain variable domain of TCR clone 297437 (TRBV11-2, TRBJ2-3)
CASSLGGASRGAPNTQYF

SEQ ID NO: 594875 - protein, 14 aa, Homo sapiens
  CDR3 for alpha chain variable domain of TCR clone 297438 (TRAV25, TRAJ35)
CARRMEGFGNVLHC

SEQ ID NO: 594876 - protein, 15 aa, Homo sapiens
  CDR3 for beta chain variable domain of TCR clone 297438 (TRBV19, TRBJ2-7)
CASSPAGSGEALRYF

SEQ ID NO: 594877 - protein, 13 aa, Homo sapiens
  CDR3 for alpha chain variable domain of TCR clone 297439 (TRAV1-1, TRAJ30)
CAVRSDRDDKIIF

SEQ ID NO: 594878 - protein, 15 aa, Homo sapiens
  CDR3 for beta chain variable domain of TCR clone 297439 (TRBV7-2, TRBJ2-7)
CASSSDSLNYNEQYF

SEQ ID NO: 594879 - protein, 13 aa, Homo sapiens
  CDR3 for alpha chain variable domain of TCR clone 297440 (TRAV23/DV6, TRAJ24)
CAASTDSWGKFQF

SEQ ID NO: 594880 - protein, 15 aa, Homo sapiens
  CDR3 for beta chain variable domain of TCR clone 297440 (TRBV28, TRBJ2-5)
CASSPGQGSIETQYF

SEQ ID NO: 594881 - protein, 13 aa, Homo sapiens
  CDR3 for alpha chain variable domain of TCR clone 297441 (TRAV8-1, TRAJ23)
CAWRDNQGGKLIF

SEQ ID NO: 594882 - protein, 13 aa, Homo sapiens
  CDR3 for beta chain variable domain of TCR clone 297441 (TRBV20-1, TRBJ2-7)
CSATHTGGDEQYF

SEQ ID NO: 594883 - protein, 11 aa, Homo sapiens
  CDR3 for alpha chain variable domain of TCR clone 297442 (TRAV1-2, TRAJ20)
CAVANDYKLSF

SEQ ID NO: 594884 - protein, 13 aa, Homo sapiens
  CDR3 for beta chain variable domain of TCR clone 297442 (TRBV7-6, TRBJ1-2)
CASSLVADYGYTF

SEQ ID NO: 594885 - protein, 16 aa, Homo sapiens
  CDR3 for alpha chain variable domain of TCR clone 297443 (TRAV16, TRAJ52)
CALSGVGGTSYGKLTF

SEQ ID NO: 594886 - protein, 14 aa, Homo sapiens
  CDR3 for beta chain variable domain of TCR clone 297443 (TRBV19, TRBJ1-2)
CASSLQGPAYGYTF

SEQ ID NO: 594887 - protein, 22 aa, Homo sapiens
  CDR3 for alpha chain variable domain of TCR clone 297444 (TRAV39, TRAJ49)
PCMTSLPPTSVPWTNTSNQVYF

SEQ ID NO: 594888 - protein, 17 aa, Homo sapiens
  CDR3 for beta chain variable domain of TCR clone 297444 (TRBV20-1, TRBJ2-1)
CSARDRRRASSYNEQFF

SEQ ID NO: 594889 - protein, 13 aa, Homo sapiens
  CDR3 for alpha chain variable domain of TCR clone 297445 (TRAV4, TRAJ28)
CLFIWGWELPTHF

SEQ ID NO: 594890 - protein, 14 aa, Homo sapiens
  CDR3 for beta chain variable domain of TCR clone 297445 (TRBV7-9, TRBJ2-5)
CASSLDTAKETQYF

SEQ ID NO: 594891 - protein, 13 aa, Homo sapiens
  CDR3 for alpha chain variable domain of TCR clone 297446 (TRAV17, TRAJ5)
CALRGTGRRALTF

SEQ ID NO: 594892 - protein, 14 aa, Homo sapiens
  CDR3 for beta chain variable domain of TCR clone 297446 (TRBV12-5, TRBJ2-5)
CASGSRTHQENQYF

SEQ ID NO: 594893 - protein, 11 aa, Homo sapiens
  CDR3 for alpha chain variable domain of TCR clone 297447 (TRAV35, TRAJ30)
CAGPGDDKIIF

SEQ ID NO: 594894 - protein, 15 aa, Homo sapiens
  CDR3 for beta chain variable domain of TCR clone 297447 (TRBV7-3, TRBJ2-2)
CASSETGQGTGELFF

SEQ ID NO: 594895 - protein, 14 aa, Homo sapiens
  CDR3 for alpha chain variable domain of TCR clone 297448 (TRAV12-3, TRAJ12)
CAMSEVDSSYKLIF

SEQ ID NO: 594896 - protein, 12 aa, Homo sapiens
  CDR3 for beta chain variable domain of TCR clone 297448 (TRBV18, TRBJ1-4)
CASSRSREKLFF

SEQ ID NO: 594897 - protein, 15 aa, Homo sapiens
  CDR3 for alpha chain variable domain of TCR clone 297449 (TRAV14/DV4, TRAJ49)
CAMREGWIGGNQFYF

SEQ ID NO: 594898 - protein, 15 aa, Homo sapiens
  CDR3 for beta chain variable domain of TCR clone 297449 (TRBV6-1, TRBJ2-7)
CASSESMGDFYEQYV

SEQ ID NO: 594899 - protein, 17 aa, Homo sapiens
  CDR3 for alpha chain variable domain of TCR clone 297450 (TRAV3, TRAJ38)
CAVRGCINAGNNRKLIW

SEQ ID NO: 594900 - protein, 16 aa, Homo sapiens
  CDR3 for beta chain variable domain of TCR clone 297450 (TRBV20-1, TRBJ1-4)
CSAPGQGLLTNEKLFF

SEQ ID NO: 594901 - protein, 12 aa, Homo sapiens
  CDR3 for alpha chain variable domain of TCR clone 297451 (TRAV3, TRAJ43)
CAVRDPNNDMRF

SEQ ID NO: 594902 - protein, 12 aa, Homo sapiens
  CDR3 for beta chain variable domain of TCR clone 297451 (TRBV5-7, TRBJ1-2)
CASSLVQNGYTF

SEQ ID NO: 594903 - protein, 11 aa, Homo sapiens
  CDR3 for alpha chain variable domain of TCR clone 297452 (TRAV17, TRAJ43)
CATPRSNDMLF

SEQ ID NO: 594904 - protein, 13 aa, Homo sapiens
  CDR3 for beta chain variable domain of TCR clone 297452 (TRBV10-3, TRBJ2-7)
CASKLAVNYEQYF

SEQ ID NO: 594905 - protein, 14 aa, Homo sapiens
  CDR3 for alpha chain variable domain of TCR clone 297453 (TRAV13-1, TRAJ13)
CAASRVGGYQKVTF

SEQ ID NO: 594906 - protein, 17 aa, Homo sapiens
  CDR3 for beta chain variable domain of TCR clone 297453 (TRBV15, TRBJ1-5)
CATSRAPAGTRNQPQHF

SEQ ID NO: 594907 - protein, 12 aa, Homo sapiens
  CDR3 for alpha chain variable domain of TCR clone 297454 (TRAV29/DV5, TRAJ49)
CAATDTGNQFYS

SEQ ID NO: 594908 - protein, 15 aa, Homo sapiens
  CDR3 for beta chain variable domain of TCR clone 297454 (TRBV19, TRBJ2-2)
CASRQTGADTGELFF

SEQ ID NO: 594909 - protein, 17 aa, Homo sapiens
  CDR3 for alpha chain variable domain of TCR clone 297455 (TRAV3, TRAJ12)
CAVRDGGGMDSSYKLIF

SEQ ID NO: 594910 - protein, 15 aa, Homo sapiens
  CDR3 for beta chain variable domain of TCR clone 297455 (TRBV5-1, TRBJ2-3)
CASSVTSGSTDTQYF

SEQ ID NO: 594911 - protein, 14 aa, Homo sapiens
  CDR3 for alpha chain variable domain of TCR clone 297456 (TRAV1-2, TRAJ8)
CAVREDTGFQKLVF

SEQ ID NO: 594912 - protein, 12 aa, Homo sapiens
  CDR3 for beta chain variable domain of TCR clone 297456 (TRBV27, TRBJ2-2)
CASKLCAGELFF

SEQ ID NO: 594913 - protein, 15 aa, Homo sapiens
  CDR3 for alpha chain variable domain of TCR clone 297457 (TRAV2, TRAJ15)
CAVEDREQAGTALIF

SEQ ID NO: 594914 - protein, 13 aa, Homo sapiens
  CDR3 for beta chain variable domain of TCR clone 297457 (TRBV10-2, TRBJ2-3)
CASSETGDHTQYF

SEQ ID NO: 594915 - protein, 12 aa, Homo sapiens
  CDR3 for alpha chain variable domain of TCR clone 297458 (TRAV12-1, TRAJ40)
VVVYSGTYKYIF

SEQ ID NO: 594916 - protein, 12 aa, Homo sapiens
  CDR3 for beta chain variable domain of TCR clone 297458 (TRBV11-2, TRBJ2-2)
CASSLGGGELFF

SEQ ID NO: 594917 - protein, 15 aa, Homo sapiens
  CDR3 for alpha chain variable domain of TCR clone 297459 (TRAV17, TRAJ57)
CATGPSQGGSEKLVF

SEQ ID NO: 594918 - protein, 16 aa, Homo sapiens
  CDR3 for beta chain variable domain of TCR clone 297459 (TRBV20-1, TRBJ2-2)
CSASAIGIPGAGELFF

SEQ ID NO: 594919 - protein, 14 aa, Homo sapiens
  CDR3 for alpha chain variable domain of TCR clone 297460 (TRAV13-1, TRAJ40)
CAASMTSGTYKYIF

SEQ ID NO: 594920 - protein, 15 aa, Homo sapiens
  CDR3 for beta chain variable domain of TCR clone 297460 (TRBV10-2, TRBJ2-5)
CASRGSGGPQETQYF

SEQ ID NO: 594921 - protein, 16 aa, Homo sapiens
  CDR3 for alpha chain variable domain of TCR clone 297461 (TRAV12-3, TRAJ52)
CAVSNAGGTSYGKLTF

SEQ ID NO: 594922 - protein, 16 aa, Homo sapiens
  CDR3 for beta chain variable domain of TCR clone 297461 (TRBV6-6, TRBJ2-1)
CASSYSFAGSYNEQFF

SEQ ID NO: 594923 - protein, 13 aa, Homo sapiens
  CDR3 for alpha chain variable domain of TCR clone 297462 (TRAV8-4, TRAJ10)
CAAFTGGGHKLTF

SEQ ID NO: 594924 - protein, 12 aa, Homo sapiens
  CDR3 for beta chain variable domain of TCR clone 297462 (TRBV3-1, TRBJ2-1)
CASSQGSSGQFF

SEQ ID NO: 594925 - protein, 15 aa, Homo sapiens
  CDR3 for alpha chain variable domain of TCR clone 297463 (TRAV2, TRAJ22)
CAVPSRGGSARQLTF

SEQ ID NO: 594926 - protein, 13 aa, Homo sapiens
  CDR3 for beta chain variable domain of TCR clone 297463 (TRBV14, TRBJ1-1)
CASSREFGTEAFF

SEQ ID NO: 594927 - protein, 16 aa, Homo sapiens
  CDR3 for alpha chain variable domain of TCR clone 297464 (TRAV30, TRAJ24)
CGTEIVDADSWGKFQF

SEQ ID NO: 594928 - protein, 15 aa, Homo sapiens
  CDR3 for beta chain variable domain of TCR clone 297464 (TRBV7-9, TRBJ1-6)
CVSSSPGRGNSPLHF

SEQ ID NO: 594929 - protein, 14 aa, Homo sapiens
  CDR3 for alpha chain variable domain of TCR clone 297465 (TRAV12-1, TRAJ23)
CVVMIYNQGGKLIF

SEQ ID NO: 594930 - protein, 13 aa, Homo sapiens
  CDR3 for beta chain variable domain of TCR clone 297465 (TRBV20-1, TRBJ1-1)
CSARGGGNTEAFF

SEQ ID NO: 594931 - protein, 13 aa, Homo sapiens
  CDR3 for alpha chain variable domain of TCR clone 297466 (TRAV12-2, TRAJ3)
FAFQYSSASKIIF

SEQ ID NO: 594932 - protein, 11 aa, Homo sapiens
  CDR3 for beta chain variable domain of TCR clone 297466 (TRBV20-1, TRBJ2-3)
CSGTSSTTQYF

SEQ ID NO: 594933 - protein, 12 aa, Homo sapiens
  CDR3 for alpha chain variable domain of TCR clone 297467 (TRAV13-1, TRAJ49)
CAASPMGNQFYF

SEQ ID NO: 594934 - protein, 15 aa, Homo sapiens
  CDR3 for beta chain variable domain of TCR clone 297467 (TRBV2, TRBJ2-5)
CASSEQGLIGETQYF

SEQ ID NO: 594935 - protein, 12 aa, Homo sapiens
  CDR3 for alpha chain variable domain of TCR clone 297468 (TRAV1-2, TRAJ7)
CAVAYGNNRLAF

SEQ ID NO: 594936 - protein, 15 aa, Homo sapiens
  CDR3 for beta chain variable domain of TCR clone 297468 (TRBV7-2, TRBJ2-1)
CASSSGLAGGNEQFF

SEQ ID NO: 594937 - protein, 12 aa, Homo sapiens
  CDR3 for alpha chain variable domain of TCR clone 297469 (TRAV35, TRAJ54)
CADLQGAQKLVF

SEQ ID NO: 594938 - protein, 15 aa, Homo sapiens
  CDR3 for beta chain variable domain of TCR clone 297469 (TRBV7-9, TRBJ2-5)
CASSDTGRGRETQYF

SEQ ID NO: 594939 - protein, 15 aa, Homo sapiens
  CDR3 for alpha chain variable domain of TCR clone 297470 (TRAV12-1, TRAJ44)
CVVDTPQDTASKLTF

SEQ ID NO: 594940 - protein, 14 aa, Homo sapiens
  CDR3 for beta chain variable domain of TCR clone 297470 (TRBV7-9, TRBJ2-1)
CASSPRDSLYEQFF

SEQ ID NO: 594941 - protein, 15 aa, Homo sapiens
  CDR3 for alpha chain variable domain of TCR clone 297471 (TRAV26-1, TRAJ29)
CIVRVEGSGNKPLGL

SEQ ID NO: 594942 - protein, 14 aa, Homo sapiens
  CDR3 for beta chain variable domain of TCR clone 297471 (TRBV18, TRBJ2-5)
CASSPGVSQETQYF

SEQ ID NO: 594943 - protein, 14 aa, Homo sapiens
  CDR3 for alpha chain variable domain of TCR clone 297472 (TRAV12-3, TRAJ37)
CVSEGSSNSGKLIF

SEQ ID NO: 594944 - protein, 14 aa, Homo sapiens
  CDR3 for beta chain variable domain of TCR clone 297472 (TRBV20-1, TRBJ1-1)
CSAQTRIGGTEAFF

SEQ ID NO: 594945 - protein, 15 aa, Homo sapiens
  CDR3 for alpha chain variable domain of TCR clone 297473 (TRAV3, TRAJ22)
SAVRDRGGSARQLTF

SEQ ID NO: 594946 - protein, 16 aa, Homo sapiens
  CDR3 for beta chain variable domain of TCR clone 297473 (TRBV5-4, TRBJ2-3)
CASQQPGAGGADTQYF

SEQ ID NO: 594947 - protein, 12 aa, Homo sapiens
  CDR3 for alpha chain variable domain of TCR clone 297474 (TRAV1-1, TRAJ43)
CAPRGSSNDMRF

SEQ ID NO: 594948 - protein, 15 aa, Homo sapiens
  CDR3 for beta chain variable domain of TCR clone 297474 (TRBV5-1, TRBJ2-7)
CASSLGDFTTYEQYF

SEQ ID NO: 594949 - protein, 15 aa, Homo sapiens
  CDR3 for alpha chain variable domain of TCR clone 297475 (TRAV26-1, TRAJ23)
CIVRVAAYQGGKLIF

SEQ ID NO: 594950 - protein, 18 aa, Homo sapiens
  CDR3 for beta chain variable domain of TCR clone 297475 (TRBV28, TRBJ2-1)
CASSSTSGRASSYNEQFF

SEQ ID NO: 594951 - protein, 16 aa, Homo sapiens
  CDR3 for alpha chain variable domain of TCR clone 297476 (TRAV26-1, TRAJ58)
IASSESGETSGSRLTF

SEQ ID NO: 594952 - protein, 15 aa, Homo sapiens
  CDR3 for beta chain variable domain of TCR clone 297476 (TRBV6-3, TRBJ2-7)
CASSSPGTVFYEQYF

SEQ ID NO: 594953 - protein, 14 aa, Homo sapiens
  CDR3 for alpha chain variable domain of TCR clone 297477 (TRAV17, TRAJ11)
CATDARSGYSTLTF

SEQ ID NO: 594954 - protein, 12 aa, Homo sapiens
  CDR3 for beta chain variable domain of TCR clone 297477 (TRBV12-5, TRBJ2-5)
CASGQGVETQYF

SEQ ID NO: 594955 - protein, 12 aa, Homo sapiens
  CDR3 for alpha chain variable domain of TCR clone 297478 (TRAV12-3, TRAJ17)
CAMTLTGNKLTF

SEQ ID NO: 594956 - protein, 20 aa, Homo sapiens
  CDR3 for beta chain variable domain of TCR clone 297478 (TRBV7-8, TRBJ2-2)
CASSHLFPGPTIHISGELFF

SEQ ID NO: 594957 - protein, 14 aa, Homo sapiens
  CDR3 for alpha chain variable domain of TCR clone 297479 (TRAV13-1, TRAJ6)
CAASITGGSYMPTF

SEQ ID NO: 594958 - protein, 14 aa, Homo sapiens
  CDR3 for beta chain variable domain of TCR clone 297479 (TRBV6-3, TRBJ2-1)
CASLHSAYYNEQFF

SEQ ID NO: 594959 - protein, 17 aa, Homo sapiens
  CDR3 for alpha chain variable domain of TCR clone 297480 (TRAV13-1, TRAJ52)
CAASSGAGCTSYGKLTF

SEQ ID NO: 594960 - protein, 15 aa, Homo sapiens
  CDR3 for beta chain variable domain of TCR clone 297480 (TRBV7-8, TRBJ2-7)
CASSLRHVEAYEQYF

SEQ ID NO: 594961 - protein, 14 aa, Homo sapiens
  CDR3 for alpha chain variable domain of TCR clone 297481 (TRAV17, TRAJ40)
CATALTSGTYKYIF

SEQ ID NO: 594962 - protein, 15 aa, Homo sapiens
  CDR3 for beta chain variable domain of TCR clone 297481 (TRBV18, TRBJ2-1)
CASSPPSASYNEQFF

SEQ ID NO: 594963 - protein, 14 aa, Homo sapiens
  CDR3 for alpha chain variable domain of TCR clone 297482 (TRAV17, TRAJ54)
CATDANQGAQKLVF

SEQ ID NO: 594964 - protein, 14 aa, Homo sapiens
  CDR3 for beta chain variable domain of TCR clone 297482 (TRBV25-1, TRBJ1-1)
CAGTHLGGNTEAFF

SEQ ID NO: 594965 - protein, 17 aa, Homo sapiens
  CDR3 for alpha chain variable domain of TCR clone 297483 (TRAV8-1, TRAJ43)
CAVTNDMRFGAGTRLTV

SEQ ID NO: 594966 - protein, 17 aa, Homo sapiens
  CDR3 for beta chain variable domain of TCR clone 297483 (TRBV5-4, TRBJ2-1)
CVSRSAGGRGPYNEQFF

SEQ ID NO: 594967 - protein, 16 aa, Homo sapiens
  CDR3 for alpha chain variable domain of TCR clone 297484 (TRAV39, TRAJ45)
CAVDRSAGGGADGLTC

SEQ ID NO: 594968 - protein, 14 aa, Homo sapiens
  CDR3 for beta chain variable domain of TCR clone 297484 (TRBV28, TRBJ1-3)
CASSFRDRVNTIYF

SEQ ID NO: 594969 - protein, 12 aa, Homo sapiens
  CDR3 for alpha chain variable domain of TCR clone 297485 (TRAV30, TRAJ39)
CGRGNAGNMSTF

SEQ ID NO: 594970 - protein, 15 aa, Homo sapiens
  CDR3 for beta chain variable domain of TCR clone 297485 (TRBV5-1, TRBJ1-1)
CASSWTGRGNTEAFF

SEQ ID NO: 594971 - protein, 15 aa, Homo sapiens
  CDR3 for alpha chain variable domain of TCR clone 297486 (TRAV8-4, TRAJ3)
CAVTGENLVQQCFQD

SEQ ID NO: 594972 - protein, 14 aa, Homo sapiens
  CDR3 for beta chain variable domain of TCR clone 297486 (TRBV11-2, TRBJ2-5)
CASRPLAGRETQYF

SEQ ID NO: 594973 - protein, 12 aa, Homo sapiens
  CDR3 for alpha chain variable domain of TCR clone 297487 (TRAV12-2, TRAJ4)
GWPEGGFNKLIF

SEQ ID NO: 594974 - protein, 15 aa, Homo sapiens
  CDR3 for beta chain variable domain of TCR clone 297487 (TRBV9, TRBJ1-6)
CASSVAGTGNSPLHF

SEQ ID NO: 594975 - protein, 12 aa, Homo sapiens
  CDR3 for alpha chain variable domain of TCR clone 297488 (TRAV12-1, TRAJ40)
CVFYSGTYKYIF

SEQ ID NO: 594976 - protein, 18 aa, Homo sapiens
  CDR3 for beta chain variable domain of TCR clone 297488 (TRBV12-4, TRBJ2-2)
CASSLAAGTRGPTGELFF

SEQ ID NO: 594977 - protein, 14 aa, Homo sapiens
  CDR3 for alpha chain variable domain of TCR clone 297489 (TRAV13-1, TRAJ44)
CAAKSTGTASKHTF

SEQ ID NO: 594978 - protein, 16 aa, Homo sapiens
  CDR3 for beta chain variable domain of TCR clone 297489 (TRBV19, TRBJ2-2)
CASRSPGTGATGELFF

SEQ ID NO: 594979 - protein, 13 aa, Homo sapiens
  CDR3 for alpha chain variable domain of TCR clone 297490 (TRAV8-3, TRAJ42)
CARYGGSQGNLIF

SEQ ID NO: 594980 - protein, 14 aa, Homo sapiens
  CDR3 for beta chain variable domain of TCR clone 297490 (TRBV20-1, TRBJ2-1)
CSALDRGTYNEQCF

SEQ ID NO: 594981 - protein, 14 aa, Homo sapiens
  CDR3 for alpha chain variable domain of TCR clone 297491 (TRAV9-2, TRAJ56)
CALSDTGANSKLTF

SEQ ID NO: 594982 - protein, 14 aa, Homo sapiens
  CDR3 for beta chain variable domain of TCR clone 297491 (TRBV28, TRBJ2-1)
CASSLVAPYNEQFF

SEQ ID NO: 594983 - protein, 12 aa, Homo sapiens
  CDR3 for alpha chain variable domain of TCR clone 297492 (TRAV17, TRAJ57)
CATDGGSEKLVF

SEQ ID NO: 594984 - protein, 21 aa, Homo sapiens
  CDR3 for beta chain variable domain of TCR clone 297492 (TRBV7-9, TRBJ2-7)
RGTRPCISVPAASQGAYEQYF

SEQ ID NO: 594985 - protein, 14 aa, Homo sapiens
  CDR3 for alpha chain variable domain of TCR clone 297493 (TRAV17, TRAJ57)
CATDPQGGSEKLVF

SEQ ID NO: 594986 - protein, 16 aa, Homo sapiens
  CDR3 for beta chain variable domain of TCR clone 297493 (TRBV27, TRBJ2-2)
CASSCRGLVRTGELFF

SEQ ID NO: 594987 - protein, 13 aa, Homo sapiens
  CDR3 for alpha chain variable domain of TCR clone 297494 (TRAV13-1, TRAJ21)
CAASIYNFNKFYF

SEQ ID NO: 594988 - protein, 13 aa, Homo sapiens
  CDR3 for beta chain variable domain of TCR clone 297494 (TRBV27, TRBJ1-4)
CASSLKGDEKLFF

SEQ ID NO: 594989 - protein, 12 aa, Homo sapiens
  CDR3 for alpha chain variable domain of TCR clone 297495 (TRAV40, TRAJ20)
CLRGLNEYKLSF

SEQ ID NO: 594990 - protein, 14 aa, Homo sapiens
  CDR3 for beta chain variable domain of TCR clone 297495 (TRBV19, TRBJ2-1)
CASSSGRGYNEQFF

SEQ ID NO: 594991 - protein, 15 aa, Homo sapiens
  CDR3 for alpha chain variable domain of TCR clone 297496 (TRAV17, TRAJ37)
CATDHGSSNTGNLIF

SEQ ID NO: 594992 - protein, 14 aa, Homo sapiens
  CDR3 for beta chain variable domain of TCR clone 297496 (TRBV7-2, TRBJ2-3)
CASSRTSGADTQYF

SEQ ID NO: 594993 - protein, 14 aa, Homo sapiens
  CDR3 for alpha chain variable domain of TCR clone 297497 (TRAV12-3, TRAJ9)
CAMSPNTGCFKTIF

SEQ ID NO: 594994 - protein, 12 aa, Homo sapiens
  CDR3 for beta chain variable domain of TCR clone 297497 (TRBV19, TRBJ1-5)
CASSIAQQTQHF

SEQ ID NO: 594995 - protein, 20 aa, Homo sapiens
  CDR3 for alpha chain variable domain of TCR clone 297498 (TRAV1-1, TRAJ4)
CLLLLRCEGFLSGGYNKLIF

SEQ ID NO: 594996 - protein, 16 aa, Homo sapiens
  CDR3 for beta chain variable domain of TCR clone 297498 (TRBV28, TRBJ1-4)
CASSPPYRGRSEKLLF

SEQ ID NO: 594997 - protein, 14 aa, Homo sapiens
  CDR3 for alpha chain variable domain of TCR clone 297499 (TRAV1-2, TRAJ8)
CAVGEDTGFQKLVF

SEQ ID NO: 594998 - protein, 16 aa, Homo sapiens
  CDR3 for beta chain variable domain of TCR clone 297499 (TRBV5-7, TRBJ2-5)
CASTLAPAGGRETQYF

SEQ ID NO: 594999 - protein, 13 aa, Homo sapiens
  CDR3 for alpha chain variable domain of TCR clone 297500 (TRAV29/DV5, TRAJ29)
CAASAAGNTPLVF

SEQ ID NO: 595000 - protein, 14 aa, Homo sapiens
  CDR3 for beta chain variable domain of TCR clone 297500 (TRBV19, TRBJ1-5)
CASRAPDSFLSQHF

SEQ ID NO: 595001 - protein, 16 aa, Homo sapiens
  CDR3 for alpha chain variable domain of TCR clone 297501 (TRAV12-3, TRAJ53)
CAMSPGSGCSNYKLTF

SEQ ID NO: 595002 - protein, 20 aa, Homo sapiens
  CDR3 for beta chain variable domain of TCR clone 297501 (TRBV7-8, TRBJ2-2)
CASSHLFPGPTIHITGELFF

SEQ ID NO: 595003 - protein, 14 aa, Homo sapiens
  CDR3 for alpha chain variable domain of TCR clone 297502 (TRAV1-2, TRAJ16)
CAVNRFSDGQKLLF

SEQ ID NO: 595004 - protein, 13 aa, Homo sapiens
  CDR3 for beta chain variable domain of TCR clone 297502 (TRBV7-3, TRBJ2-1)
CASSVDSYNEQFF

SEQ ID NO: 595005 - protein, 17 aa, Homo sapiens
  CDR3 for alpha chain variable domain of TCR clone 297503 (TRAV12-2, TRAJ22)
CAVNRIPFSGSARQLAF

SEQ ID NO: 595006 - protein, 13 aa, Homo sapiens
  CDR3 for beta chain variable domain of TCR clone 297503 (TRBV11-3, TRBJ1-1)
CASSSNRDTEAFF

SEQ ID NO: 595007 - protein, 14 aa, Homo sapiens
  CDR3 for alpha chain variable domain of TCR clone 297504 (TRAV2, TRAJ37)
CAVDFTSNTGKLIF

SEQ ID NO: 595008 - protein, 14 aa, Homo sapiens
  CDR3 for beta chain variable domain of TCR clone 297504 (TRBV7-8, TRBJ2-7)
CASSPGLADYEQYF

SEQ ID NO: 595009 - protein, 14 aa, Homo sapiens
  CDR3 for alpha chain variable domain of TCR clone 297505 (TRAV13-1, TRAJ44)
CAAKATGTASKLTL

SEQ ID NO: 595010 - protein, 17 aa, Homo sapiens
  CDR3 for beta chain variable domain of TCR clone 297505 (TRBV7-3, TRBJ2-3)
RASSLMKRMRGAATQYF

SEQ ID NO: 595011 - protein, 13 aa, Homo sapiens
  CDR3 for alpha chain variable domain of TCR clone 297506 (TRAV8-4, TRAJ30)
CALNRNRDDKIIF

SEQ ID NO: 595012 - protein, 17 aa, Homo sapiens
  CDR3 for beta chain variable domain of TCR clone 297506 (TRBV20-1, TRBJ2-2)
CSASGSGQGGLTGELFF

SEQ ID NO: 595013 - protein, 15 aa, Homo sapiens
  CDR3 for alpha chain variable domain of TCR clone 297507 (TRAV34, TRAJ38)
CGADFTPGNNRKLIW

SEQ ID NO: 595014 - protein, 16 aa, Homo sapiens
  CDR3 for beta chain variable domain of TCR clone 297507 (TRBV28, TRBJ2-1)
CASSSPEYPRDNEQFF

SEQ ID NO: 595015 - protein, 15 aa, Homo sapiens
  CDR3 for alpha chain variable domain of TCR clone 297508 (TRAV1-2, TRAJ20)
CLLPLCCEQRLKLSF

SEQ ID NO: 595016 - protein, 16 aa, Homo sapiens
  CDR3 for beta chain variable domain of TCR clone 297508 (TRBV29-1, TRBJ2-6)
CSVEDITYSGANVLTF

SEQ ID NO: 595017 - protein, 11 aa, Homo sapiens
  CDR3 for alpha chain variable domain of TCR clone 297509 (TRAV12-2, TRAJ26)
CPSQGGQNFVF

SEQ ID NO: 595018 - protein, 11 aa, Homo sapiens
  CDR3 for beta chain variable domain of TCR clone 297509 (TRBV12-4, TRBJ2-3)
CASTATDKQYF

SEQ ID NO: 595019 - protein, 15 aa, Homo sapiens
  CDR3 for alpha chain variable domain of TCR clone 297510 (TRAV1-2, TRAJ36)
CAASADQTGAHNLFF

SEQ ID NO: 595020 - protein, 15 aa, Homo sapiens
  CDR3 for beta chain variable domain of TCR clone 297510 (TRBV5-1, TRBJ2-7)
CASSFSTDSVYEQYF

SEQ ID NO: 595021 - protein, 14 aa, Homo sapiens
  CDR3 for alpha chain variable domain of TCR clone 297511 (TRAV12-2, TRAJ44)
CAVNIAGTASKRTF

SEQ ID NO: 595022 - protein, 17 aa, Homo sapiens
  CDR3 for beta chain variable domain of TCR clone 297511 (TRBV10-3, TRBJ1-2)
CAISESTTALANYGYTF

SEQ ID NO: 595023 - protein, 12 aa, Homo sapiens
  CDR3 for alpha chain variable domain of TCR clone 297512 (TRAV13-1, TRAJ15)
FAASQAGTALLF

SEQ ID NO: 595024 - protein, 13 aa, Homo sapiens
  CDR3 for beta chain variable domain of TCR clone 297512 (TRBV10-3, TRBJ1-2)
CAISERDSYGYTF

SEQ ID NO: 595025 - protein, 14 aa, Homo sapiens
  CDR3 for alpha chain variable domain of TCR clone 297513 (TRAV12-2, TRAJ17)
CAVLFKAAGTKLTF

SEQ ID NO: 595026 - protein, 17 aa, Homo sapiens
  CDR3 for beta chain variable domain of TCR clone 297513 (TRBV20-1, TRBJ2-2)
CSASGSGHGGLTGELFF

SEQ ID NO: 595027 - protein, 14 aa, Homo sapiens
  CDR3 for alpha chain variable domain of TCR clone 297514 (TRAV9-2, TRAJ39)
CALYIYNEGNMLTF

SEQ ID NO: 595028 - protein, 16 aa, Homo sapiens
  CDR3 for beta chain variable domain of TCR clone 297514 (TRBV27, TRBJ2-2)
CASSLRPGGAPGELFF

SEQ ID NO: 595029 - protein, 12 aa, Homo sapiens
  CDR3 for alpha chain variable domain of TCR clone 297515 (TRAV38-2/DV8, TRAJ48)
CALLSGNEKLTF

SEQ ID NO: 595030 - protein, 16 aa, Homo sapiens
  CDR3 for beta chain variable domain of TCR clone 297515 (TRBV6-4, TRBJ1-2)
CASSEAVGDPNYDYTF

SEQ ID NO: 595031 - protein, 15 aa, Homo sapiens
  CDR3 for alpha chain variable domain of TCR clone 297516 (TRAV26-1, TRAJ29)
CIVRVEGSGDTPLVF

SEQ ID NO: 595032 - protein, 15 aa, Homo sapiens
  CDR3 for beta chain variable domain of TCR clone 297516 (TRBV7-9, TRBJ1-5)
CASSQGRQPNQPQHF

SEQ ID NO: 595033 - protein, 15 aa, Homo sapiens
  CDR3 for alpha chain variable domain of TCR clone 297517 (TRAV26-1, TRAJ56)
CIVRVDNGANSKWTF

SEQ ID NO: 595034 - protein, 15 aa, Homo sapiens
  CDR3 for beta chain variable domain of TCR clone 297517 (TRBV20-1, TRBJ2-7)
CSARDPTEVGHEQYF

SEQ ID NO: 595035 - protein, 15 aa, Homo sapiens
  CDR3 for alpha chain variable domain of TCR clone 297518 (TRAV3, TRAJ5)
CAVRDLDTGRRALTF

SEQ ID NO: 595036 - protein, 13 aa, Homo sapiens
  CDR3 for beta chain variable domain of TCR clone 297518 (TRBV12-4, TRBJ2-7)
CASRPTETYEPYF

SEQ ID NO: 595037 - protein, 16 aa, Homo sapiens
  CDR3 for alpha chain variable domain of TCR clone 297519 (TRAV12-3, TRAJ53)
CSISPGSGGSNYKLTF

SEQ ID NO: 595038 - protein, 11 aa, Homo sapiens
  CDR3 for beta chain variable domain of TCR clone 297519 (TRBV29-1, TRBJ2-5)
CSEDRTGTQYF

SEQ ID NO: 595039 - protein, 13 aa, Homo sapiens
  CDR3 for alpha chain variable domain of TCR clone 297520 (TRAV12-3, TRAJ13)
CAMSSGGYQKVTF

SEQ ID NO: 595040 - protein, 17 aa, Homo sapiens
  CDR3 for beta chain variable domain of TCR clone 297520 (TRBV5-1, TRBJ2-5)
CASSLLGLAANQETQYF

SEQ ID NO: 595041 - protein, 17 aa, Homo sapiens
  CDR3 for alpha chain variable domain of TCR clone 297521 (TRAV8-6, TRAJ22)
CAVSLYPSSGSARQLAF

SEQ ID NO: 595042 - protein, 16 aa, Homo sapiens
  CDR3 for beta chain variable domain of TCR clone 297521 (TRBV19, TRBJ2-7)
CASSPAGSGSLNEQYF

SEQ ID NO: 595043 - protein, 14 aa, Homo sapiens
  CDR3 for alpha chain variable domain of TCR clone 297522 (TRAV2, TRAJ37)
CAVAFTSNTAKLIF

SEQ ID NO: 595044 - protein, 15 aa, Homo sapiens
  CDR3 for beta chain variable domain of TCR clone 297522 (TRBV20-1, TRBJ1-1)
CSASRGVTGNTEAFF

SEQ ID NO: 595045 - protein, 16 aa, Homo sapiens
  CDR3 for alpha chain variable domain of TCR clone 297523 (TRAV30, TRAJ24)
CGTEIVDAASWGKFPF

SEQ ID NO: 595046 - protein, 14 aa, Homo sapiens
  CDR3 for beta chain variable domain of TCR clone 297523 (TRBV12-5, TRBJ2-5)
CASGSRTHQETQYF

SEQ ID NO: 595047 - protein, 13 aa, Homo sapiens
  CDR3 for alpha chain variable domain of TCR clone 297524 (TRAV30, TRAJ24)
CGTVTDSWGKFQF

SEQ ID NO: 595048 - protein, 15 aa, Homo sapiens
  CDR3 for beta chain variable domain of TCR clone 297524 (TRBV19, TRBJ1-1)
CASTSGQIQNTEAFF

SEQ ID NO: 595049 - protein, 14 aa, Homo sapiens
  CDR3 for alpha chain variable domain of TCR clone 297525 (TRAV3, TRAJ16)
CCERLKSDGQKLLF

SEQ ID NO: 595050 - protein, 15 aa, Homo sapiens
  CDR3 for beta chain variable domain of TCR clone 297525 (TRBV28, TRBJ2-7)
CANSPGGRGFYEQYF

SEQ ID NO: 595051 - protein, 15 aa, Homo sapiens
  CDR3 for alpha chain variable domain of TCR clone 297526 (TRAV3, TRAJ3)
CAVRDRDSSASKIIF

SEQ ID NO: 595052 - protein, 12 aa, Homo sapiens
  CDR3 for beta chain variable domain of TCR clone 297526 (TRBV12-5, TRBJ2-5)
CASGQGVETQYF

SEQ ID NO: 595053 - protein, 11 aa, Homo sapiens
  CDR3 for alpha chain variable domain of TCR clone 297527 (TRAV1-2, TRAJ20)
CAVSNDYKLSF

SEQ ID NO: 595054 - protein, 16 aa, Homo sapiens
  CDR3 for beta chain variable domain of TCR clone 297527 (TRBV11-1, TRBJ2-2)
CASSAEGLKNTGELFF

SEQ ID NO: 595055 - protein, 13 aa, Homo sapiens
  CDR3 for alpha chain variable domain of TCR clone 297528 (TRAV14/DV4, TRAJ23)
CAMREVKGGKLIF

SEQ ID NO: 595056 - protein, 15 aa, Homo sapiens
  CDR3 for beta chain variable domain of TCR clone 297528 (TRBV6-3, TRBJ2-1)
CASSYARDSYNEQFF

SEQ ID NO: 595057 - protein, 13 aa, Homo sapiens
  CDR3 for alpha chain variable domain of TCR clone 297529 (TRAV3, TRAJ21)
CAVREPDFNKFYF

SEQ ID NO: 595058 - protein, 15 aa, Homo sapiens
  CDR3 for beta chain variable domain of TCR clone 297529 (TRBV11-2, TRBJ1-2)
CASSLAFGNNYGYTF

SEQ ID NO: 595059 - protein, 16 aa, Homo sapiens
  CDR3 for alpha chain variable domain of TCR clone 297530 (TRAV30, TRAJ24)
CGTEIVDADSWGKFQF

SEQ ID NO: 595060 - protein, 12 aa, Homo sapiens
  CDR3 for beta chain variable domain of TCR clone 297530 (TRBV7-2, TRBJ2-5)
CASSQYQETQYF

SEQ ID NO: 595061 - protein, 11 aa, Homo sapiens
  CDR3 for alpha chain variable domain of TCR clone 297531 (TRAV2, TRAJ13)
CASGGYQKVTF

SEQ ID NO: 595062 - protein, 17 aa, Homo sapiens
  CDR3 for beta chain variable domain of TCR clone 297531 (TRBV11-2, TRBJ2-1)
CASSLYPPGVEYNEQSF

SEQ ID NO: 595063 - protein, 23 aa, Homo sapiens
  CDR3 for alpha chain variable domain of TCR clone 297532 (TRAV26-1, TRAJ38)
CIADNAGNNHIQNPDPAVYQLRD

SEQ ID NO: 595064 - protein, 11 aa, Homo sapiens
  CDR3 for beta chain variable domain of TCR clone 297532 (TRBV7-9, TRBJ1-2)
GFSSGEDGYTF

SEQ ID NO: 595065 - protein, 17 aa, Homo sapiens
  CDR3 for alpha chain variable domain of TCR clone 297533 (TRAV23/DV6, TRAJ57)
CAASSTLSQVGSEKLVF

SEQ ID NO: 595066 - protein, 13 aa, Homo sapiens
  CDR3 for beta chain variable domain of TCR clone 297533 (TRBV15, TRBJ1-6)
CATSGGLNSPLHF

SEQ ID NO: 595067 - protein, 18 aa, Homo sapiens
  CDR3 for alpha chain variable domain of TCR clone 297534 (TRAV21, TRAJ45)
CCGGHQGGSGGGADGLTF

SEQ ID NO: 595068 - protein, 10 aa, Homo sapiens
  CDR3 for beta chain variable domain of TCR clone 297534 (TRBV4-1, TRBJ2-7)
SRGDRHEQYF

SEQ ID NO: 595069 - protein, 15 aa, Homo sapiens
  CDR3 for alpha chain variable domain of TCR clone 297535 (TRAV26-1, TRAJ17)
CIVSILGAAGNKLTF

SEQ ID NO: 595070 - protein, 16 aa, Homo sapiens
  CDR3 for beta chain variable domain of TCR clone 297535 (TRBV7-7, TRBJ2-1)
CASSLASGTSYNEQFF

SEQ ID NO: 595071 - protein, 14 aa, Homo sapiens
  CDR3 for alpha chain variable domain of TCR clone 297536 (TRAV20, TRAJ56)
CAVQFGGANSKLTF

SEQ ID NO: 595072 - protein, 16 aa, Homo sapiens
  CDR3 for beta chain variable domain of TCR clone 297536 (TRBV20-1, TRBJ2-7)
CSAKRGRSSYEQYLGR

SEQ ID NO: 595073 - protein, 11 aa, Homo sapiens
  CDR3 for alpha chain variable domain of TCR clone 297537 (TRAV2, TRAJ13)
CASGGCQKVTF

SEQ ID NO: 595074 - protein, 16 aa, Homo sapiens
  CDR3 for beta chain variable domain of TCR clone 297537 (TRBV19, TRBJ2-1)
CASSKAGPSSYNEQSF

SEQ ID NO: 595075 - protein, 14 aa, Homo sapiens
  CDR3 for alpha chain variable domain of TCR clone 297538 (TRAV26-1, TRAJ40)
CLVRVARGTYKYIF

SEQ ID NO: 595076 - protein, 14 aa, Homo sapiens
  CDR3 for beta chain variable domain of TCR clone 297538 (TRBV7-3, TRBJ2-7)
CASSLKADSYEQYF

SEQ ID NO: 595077 - protein, 16 aa, Homo sapiens
  CDR3 for alpha chain variable domain of TCR clone 297539 (TRAV3, TRAJ21)
CAVRDIERGNFNKFYF

SEQ ID NO: 595078 - protein, 15 aa, Homo sapiens
  CDR3 for beta chain variable domain of TCR clone 297539 (TRBV11-3, TRBJ2-3)
CASLKDGREGDTQYF

SEQ ID NO: 595079 - protein, 15 aa, Homo sapiens
  CDR3 for alpha chain variable domain of TCR clone 297540 (TRAV2, TRAJ22)
CAVPSRGGSARQLTF

SEQ ID NO: 595080 - protein, 12 aa, Homo sapiens
  CDR3 for beta chain variable domain of TCR clone 297540 (TRBV11-2, TRBJ2-2)
SASSLGGGELFF

SEQ ID NO: 595081 - protein, 16 aa, Homo sapiens
  CDR3 for alpha chain variable domain of TCR clone 297541 (TRAV30, TRAJ49)
SAAQRVGPNTGNQFYF

SEQ ID NO: 595082 - protein, 15 aa, Homo sapiens
  CDR3 for beta chain variable domain of TCR clone 297541 (TRBV2, TRBJ2-1)
CASSELEGSYNEQFF

SEQ ID NO: 595083 - protein, 12 aa, Homo sapiens
  CDR3 for alpha chain variable domain of TCR clone 297542 (TRAV38-2/DV8, TRAJ48)
CALLSGNEKLTF

SEQ ID NO: 595084 - protein, 15 aa, Homo sapiens
  CDR3 for beta chain variable domain of TCR clone 297542 (TRBV6-1, TRBJ2-1)
CASSELRGQYIELFF

SEQ ID NO: 595085 - protein, 13 aa, Homo sapiens
  CDR3 for alpha chain variable domain of TCR clone 297543 (TRAV8-3, TRAJ43)
CAVGPDNNNDMRF

SEQ ID NO: 595086 - protein, 14 aa, Homo sapiens
  CDR3 for beta chain variable domain of TCR clone 297543 (TRBV19, TRBJ2-1)
CASPTFVLSGEEFF

SEQ ID NO: 595087 - protein, 13 aa, Homo sapiens
  CDR3 for alpha chain variable domain of TCR clone 297544 (TRAV12-1, TRAJ39)
CVARSGAGNMLTF

SEQ ID NO: 595088 - protein, 15 aa, Homo sapiens
  CDR3 for beta chain variable domain of TCR clone 297544 (TRBV20-1, TRBJ2-7)
CSARDRVSGMDEQYF

SEQ ID NO: 595089 - protein, 15 aa, Homo sapiens
  CDR3 for alpha chain variable domain of TCR clone 297545 (TRAV35, TRAJ40)
CAGQLGQAGTYKYIF

SEQ ID NO: 595090 - protein, 14 aa, Homo sapiens
  CDR3 for beta chain variable domain of TCR clone 297545 (TRBV7-3, TRBJ2-1)
CASSLTGGANAQFF

SEQ ID NO: 595091 - protein, 14 aa, Homo sapiens
  CDR3 for alpha chain variable domain of TCR clone 297546 (TRAV1-2, TRAJ16)
CAVNRFSDGQKLLF

SEQ ID NO: 595092 - protein, 17 aa, Homo sapiens
  CDR3 for beta chain variable domain of TCR clone 297546 (TRBV7-2, TRBJ2-4)
CASSFRLAGGPVNIQYF

SEQ ID NO: 595093 - protein, 13 aa, Homo sapiens
  CDR3 for alpha chain variable domain of TCR clone 297547 (TRAV12-2, TRAJ9)
CAVKWAGGFKTIF

SEQ ID NO: 595094 - protein, 12 aa, Homo sapiens
  CDR3 for beta chain variable domain of TCR clone 297547 (TRBV14, TRBJ2-5)
CASSHLKETQYF

SEQ ID NO: 595095 - protein, 12 aa, Homo sapiens
  CDR3 for alpha chain variable domain of TCR clone 297548 (TRAV12-3, TRAJ17)
CAMTLTGNELTF

SEQ ID NO: 595096 - protein, 13 aa, Homo sapiens
  CDR3 for beta chain variable domain of TCR clone 297548 (TRBV20-1, TRBJ2-5)
CSARGDYQETQYF

SEQ ID NO: 595097 - protein, 10 aa, Homo sapiens
  CDR3 for alpha chain variable domain of TCR clone 297549 (TRAV12-1, TRAJ21)
CGIQLQQILL

SEQ ID NO: 595098 - protein, 16 aa, Homo sapiens
  CDR3 for beta chain variable domain of TCR clone 297549 (TRBV12-4, TRBJ1-5)
CASSRPVGGSNQPQHF

SEQ ID NO: 595099 - protein, 16 aa, Homo sapiens
  CDR3 for alpha chain variable domain of TCR clone 297550 (TRAV30, TRAJ24)
CGTEIVDADSWGKFQC

SEQ ID NO: 595100 - protein, 15 aa, Homo sapiens
  CDR3 for beta chain variable domain of TCR clone 297550 (TRBV15, TRBJ1-5)
CATSRDPVSNQPQHF

SEQ ID NO: 595101 - protein, 12 aa, Homo sapiens
  CDR3 for alpha chain variable domain of TCR clone 297551 (TRAV12-1, TRAJ39)
CVVREAGNMLTF

SEQ ID NO: 595102 - protein, 12 aa, Homo sapiens
  CDR3 for beta chain variable domain of TCR clone 297551 (TRBV12-4, TRBJ2-7)
CASSLGGYEQYF

SEQ ID NO: 595103 - protein, 13 aa, Homo sapiens
  CDR3 for alpha chain variable domain of TCR clone 297552 (TRAV26-2, TRAJ57)
CILSRGGSEKLVF

SEQ ID NO: 595104 - protein, 17 aa, Homo sapiens
  CDR3 for beta chain variable domain of TCR clone 297552 (TRBV13, TRBJ2-3)
CASSLSRVAGGRNTQYF

SEQ ID NO: 595105 - protein, 13 aa, Homo sapiens
  CDR3 for alpha chain variable domain of TCR clone 297553 (TRAV17, TRAJ9)
CATDYTGGFKTIF

SEQ ID NO: 595106 - protein, 15 aa, Homo sapiens
  CDR3 for beta chain variable domain of TCR clone 297553 (TRBV9, TRBJ2-1)
CASSLAGSSYNEQFF

SEQ ID NO: 595107 - protein, 15 aa, Homo sapiens
  CDR3 for alpha chain variable domain of TCR clone 297554 (TRAV8-3, TRAJ11)
CAVGLLKSGYSTLTL

SEQ ID NO: 595108 - protein, 16 aa, Homo sapiens
  CDR3 for beta chain variable domain of TCR clone 297554 (TRBV7-9, TRBJ1-2)
CASSLGFSSGEDGYTF

SEQ ID NO: 595109 - protein, 14 aa, Homo sapiens
  CDR3 for alpha chain variable domain of TCR clone 297555 (TRAV8-3, TRAJ7)
CAAIELYGNNRLAL

SEQ ID NO: 595110 - protein, 15 aa, Homo sapiens
  CDR3 for beta chain variable domain of TCR clone 297555 (TRBV3-1, TRBJ2-1)
CASSTGDTNYNEQFF

SEQ ID NO: 595111 - protein, 11 aa, Homo sapiens
  CDR3 for alpha chain variable domain of TCR clone 297556 (TRAV12-1, TRAJ30)
CVVNGQDKIIF

SEQ ID NO: 595112 - protein, 13 aa, Homo sapiens
  CDR3 for beta chain variable domain of TCR clone 297556 (TRBV12-4, TRBJ2-5)
CASSPGTEETQYF

SEQ ID NO: 595113 - protein, 16 aa, Homo sapiens
  CDR3 for alpha chain variable domain of TCR clone 297557 (TRAV29/DV5, )
CAASAFRPQIPDIKNP

SEQ ID NO: 595114 - protein, 13 aa, Homo sapiens
  CDR3 for beta chain variable domain of TCR clone 297557 (TRBV27, TRBJ1-1)
CASSLSIGAEAFF

SEQ ID NO: 595115 - protein, 16 aa, Homo sapiens
  CDR3 for alpha chain variable domain of TCR clone 297558 (TRAV13-1, TRAJ10)
FAASSHFTGGGNKLTS

SEQ ID NO: 595116 - protein, 15 aa, Homo sapiens
  CDR3 for beta chain variable domain of TCR clone 297558 (TRBV7-9, TRBJ1-6)
CASSSPGRGNSPLHF

SEQ ID NO: 595117 - protein, 12 aa, Homo sapiens
  CDR3 for alpha chain variable domain of TCR clone 297559 (TRAV12-3, TRAJ17)
CAMTLTGNKLTF

SEQ ID NO: 595118 - protein, 15 aa, Homo sapiens
  CDR3 for beta chain variable domain of TCR clone 297559 (TRBV29-1, TRBJ2-1)
CSVEAPRGSPNEQFF

SEQ ID NO: 595119 - protein, 16 aa, Homo sapiens
  CDR3 for alpha chain variable domain of TCR clone 297560 (TRAV25, TRAJ24)
CAQRRGTTDSWGKLKF

SEQ ID NO: 595120 - protein, 14 aa, Homo sapiens
  CDR3 for beta chain variable domain of TCR clone 297560 (TRBV6-6, TRBJ1-5)
CASSYGPANQPQHF

SEQ ID NO: 595121 - protein, 16 aa, Homo sapiens
  CDR3 for alpha chain variable domain of TCR clone 297561 (TRAV30, TRAJ24)
CGTEIVDADSWGKFQF

SEQ ID NO: 595122 - protein, 13 aa, Homo sapiens
  CDR3 for beta chain variable domain of TCR clone 297561 (TRBV13, TRBJ2-5)
CASSPEVGETQYF

SEQ ID NO: 595123 - protein, 14 aa, Homo sapiens
  CDR3 for alpha chain variable domain of TCR clone 297562 (TRAV13-1, TRAJ9)
CAASRPSGGFKTIF

SEQ ID NO: 595124 - protein, 16 aa, Homo sapiens
  CDR3 for beta chain variable domain of TCR clone 297562 (TRBV2, TRBJ2-3)
CASSGGGFTSTDTQYF

SEQ ID NO: 595125 - protein, 13 aa, Homo sapiens
  CDR3 for alpha chain variable domain of TCR clone 297563 (TRAV2, TRAJ40)
CAVVTSGTYKYVF

SEQ ID NO: 595126 - protein, 14 aa, Homo sapiens
  CDR3 for beta chain variable domain of TCR clone 297563 (TRBV19, TRBJ2-1)
CASPTFVSSGEQFF

SEQ ID NO: 595127 - protein, 14 aa, Homo sapiens
  CDR3 for alpha chain variable domain of TCR clone 297564 (TRAV17, TRAJ53)
CATAAGGSNYKLTF

SEQ ID NO: 595128 - protein, 16 aa, Homo sapiens
  CDR3 for beta chain variable domain of TCR clone 297564 (TRBV4-1, TRBJ1-1)
CASSQDAGMGNTEAFF

SEQ ID NO: 595129 - protein, 16 aa, Homo sapiens
  CDR3 for alpha chain variable domain of TCR clone 297565 (TRAV12-2, TRAJ40)
CAVIRGGTSGTYKYIF

SEQ ID NO: 595130 - protein, 16 aa, Homo sapiens
  CDR3 for beta chain variable domain of TCR clone 297565 (TRBV7-6, TRBJ2-3)
CASSARTSRGTDTQYF

SEQ ID NO: 595131 - protein, 12 aa, Homo sapiens
  CDR3 for alpha chain variable domain of TCR clone 297566 (TRAV21, TRAJ23)
CAVINQGGKLIF

SEQ ID NO: 595132 - protein, 17 aa, Homo sapiens
  CDR3 for beta chain variable domain of TCR clone 297566 (TRBV28, TRBJ2-3)
CASSSPPTGLSTDTQYF

SEQ ID NO: 595133 - protein, 11 aa, Homo sapiens
  CDR3 for alpha chain variable domain of TCR clone 297567 (TRAV16, TRAJ33)
CALHSNYQLIW

SEQ ID NO: 595134 - protein, 11 aa, Homo sapiens
  CDR3 for beta chain variable domain of TCR clone 297567 (TRBV12-4, TRBJ2-3)
CASTATDTQYF

SEQ ID NO: 595135 - protein, 12 aa, Homo sapiens
  CDR3 for alpha chain variable domain of TCR clone 297568 (TRAV16, TRAJ13)
CITLRGYQKGTF

SEQ ID NO: 595136 - protein, 17 aa, Homo sapiens
  CDR3 for beta chain variable domain of TCR clone 297568 (TRBV28, TRBJ2-5)
CASSRQGGLAGAETQYF

SEQ ID NO: 595137 - protein, 15 aa, Homo sapiens
  CDR3 for alpha chain variable domain of TCR clone 297569 (TRAV3, TRAJ4)
CAVRDGTGGYNKLIF

SEQ ID NO: 595138 - protein, 15 aa, Homo sapiens
  CDR3 for beta chain variable domain of TCR clone 297569 (TRBV27, TRBJ2-7)
CASSQDQGRLYEQYF

SEQ ID NO: 595139 - protein, 16 aa, Homo sapiens
  CDR3 for alpha chain variable domain of TCR clone 297570 (TRAV12-2, TRAJ6)
CAAPLAGTGGSYIPTF

SEQ ID NO: 595140 - protein, 10 aa, Homo sapiens
  CDR3 for beta chain variable domain of TCR clone 297570 (TRBV28, TRBJ1-2)
CASSSDRAVF

SEQ ID NO: 595141 - protein, 14 aa, Homo sapiens
  CDR3 for alpha chain variable domain of TCR clone 297571 (TRAV12-2, TRAJ40)
CAAKIPSGTYKYTF

SEQ ID NO: 595142 - protein, 20 aa, Homo sapiens
  CDR3 for beta chain variable domain of TCR clone 297571 (TRBV28, TRBJ2-1)
CASTPIGRSPGLAGGNEQFF

SEQ ID NO: 595143 - protein, 14 aa, Homo sapiens
  CDR3 for alpha chain variable domain of TCR clone 297572 (TRAV13-1, TRAJ35)
CAASKGGFGNVLHC

SEQ ID NO: 595144 - protein, 14 aa, Homo sapiens
  CDR3 for beta chain variable domain of TCR clone 297572 (TRBV2, TRBJ2-5)
CASSEVLAQEAQYF

SEQ ID NO: 595145 - protein, 14 aa, Homo sapiens
  CDR3 for alpha chain variable domain of TCR clone 297573 (TRAV21, TRAJ35)
CAVMPIGFGNVLHC

SEQ ID NO: 595146 - protein, 12 aa, Homo sapiens
  CDR3 for beta chain variable domain of TCR clone 297573 (TRBV7-9, TRBJ2-7)
CASSFKREEQYF

SEQ ID NO: 595147 - protein, 14 aa, Homo sapiens
  CDR3 for alpha chain variable domain of TCR clone 297574 (TRAV12-1, TRAJ17)
CVVNPKAAGNKLTF

SEQ ID NO: 595148 - protein, 12 aa, Homo sapiens
  CDR3 for beta chain variable domain of TCR clone 297574 (TRBV11-2, TRBJ2-2)
CASSLGGGELFF

SEQ ID NO: 595149 - protein, 16 aa, Homo sapiens
  CDR3 for alpha chain variable domain of TCR clone 297575 (TRAV30, TRAJ24)
CGTEIVDDDSWGKFQF

SEQ ID NO: 595150 - protein, 15 aa, Homo sapiens
  CDR3 for beta chain variable domain of TCR clone 297575 (TRBV20-1, TRBJ2-4)
CSARDLTGGPNIQYF

SEQ ID NO: 595151 - protein, 13 aa, Homo sapiens
  CDR3 for alpha chain variable domain of TCR clone 297576 (TRAV3, TRAJ16)
CAVGDRNGQKLLF

SEQ ID NO: 595152 - protein, 15 aa, Homo sapiens
  CDR3 for beta chain variable domain of TCR clone 297576 (TRBV5-1, TRBJ2-1)
CASSPPRAPYNEQFF

SEQ ID NO: 595153 - protein, 15 aa, Homo sapiens
  CDR3 for alpha chain variable domain of TCR clone 297577 (TRAV8-3, TRAJ45)
CASSYSGGGADGFTF

SEQ ID NO: 595154 - protein, 14 aa, Homo sapiens
  CDR3 for beta chain variable domain of TCR clone 297577 (TRBV4-1, TRBJ1-5)
CASSQGPTNQPQHF

SEQ ID NO: 595155 - protein, 14 aa, Homo sapiens
  CDR3 for alpha chain variable domain of TCR clone 297578 (TRAV17, TRAJ31)
CATVLRNNNARLMF

SEQ ID NO: 595156 - protein, 16 aa, Homo sapiens
  CDR3 for beta chain variable domain of TCR clone 297578 (TRBV19, TRBJ2-2)
CASRSPGTGATGELFF

SEQ ID NO: 595157 - protein, 13 aa, Homo sapiens
  CDR3 for alpha chain variable domain of TCR clone 297579 (TRAV8-1, TRAJ30)
CAVNGGRDDKIIF

SEQ ID NO: 595158 - protein, 15 aa, Homo sapiens
  CDR3 for beta chain variable domain of TCR clone 297579 (TRBV5-7, TRBJ1-5)
CASSYGKLWDQPQHF

SEQ ID NO: 595159 - protein, 13 aa, Homo sapiens
  CDR3 for alpha chain variable domain of TCR clone 297580 (TRAV20, TRAJ37)
CAGCSSNTGKLIF

SEQ ID NO: 595160 - protein, 15 aa, Homo sapiens
  CDR3 for beta chain variable domain of TCR clone 297580 (TRBV7-2, TRBJ2-1)
CASSFQAGEYNEQFF

SEQ ID NO: 595161 - protein, 14 aa, Homo sapiens
  CDR3 for alpha chain variable domain of TCR clone 297581 (TRAV1-2, TRAJ8)
CAVREDTGFQKIVF

SEQ ID NO: 595162 - protein, 15 aa, Homo sapiens
  CDR3 for beta chain variable domain of TCR clone 297581 (TRBV20-1, TRBJ2-7)
CSARDRVSGMDEQYF

SEQ ID NO: 595163 - protein, 13 aa, Homo sapiens
  CDR3 for alpha chain variable domain of TCR clone 297582 (TRAV8-3, TRAJ28)
CAVGAVGSYQLTF

SEQ ID NO: 595164 - protein, 16 aa, Homo sapiens
  CDR3 for beta chain variable domain of TCR clone 297582 (TRBV19, TRBJ2-1)
CARSRAGPSSYNEQFF

SEQ ID NO: 595165 - protein, 17 aa, Homo sapiens
  CDR3 for alpha chain variable domain of TCR clone 297583 (TRAV36/DV7, TRAJ52)
CAVAQRAGGTRYGKLTF

SEQ ID NO: 595166 - protein, 14 aa, Homo sapiens
  CDR3 for beta chain variable domain of TCR clone 297583 (TRBV6-1, TRBJ1-3)
CASVQGGGGNTMYF

SEQ ID NO: 595167 - protein, 14 aa, Homo sapiens
  CDR3 for alpha chain variable domain of TCR clone 297584 (TRAV35, TRAJ33)
CAGSSQDSNYQLIW

SEQ ID NO: 595168 - protein, 16 aa, Homo sapiens
  CDR3 for beta chain variable domain of TCR clone 297584 (TRBV20-1, TRBJ1-4)
CSARPYGGELNEKLFF

SEQ ID NO: 595169 - protein, 19 aa, Homo sapiens
  CDR3 for alpha chain variable domain of TCR clone 297585 (TRAV27, TRAJ53)
ASTSVQSRNRGGSNYKLTL

SEQ ID NO: 595170 - protein, 14 aa, Homo sapiens
  CDR3 for beta chain variable domain of TCR clone 297585 (TRBV11-1, TRBJ2-7)
CASTFAVPSYEQYF

SEQ ID NO: 595171 - protein, 13 aa, Homo sapiens
  CDR3 for alpha chain variable domain of TCR clone 297586 (TRAV2, TRAJ29)
CAVEPSGNTPLVF

SEQ ID NO: 595172 - protein, 15 aa, Homo sapiens
  CDR3 for beta chain variable domain of TCR clone 297586 (TRBV7-9, TRBJ1-5)
CASSQGHQPNQPQHF

SEQ ID NO: 595173 - protein, 16 aa, Homo sapiens
  CDR3 for alpha chain variable domain of TCR clone 297587 (TRAV13-2, TRAJ34)
CAEPPSPLSNTDKLIF

SEQ ID NO: 595174 - protein, 17 aa, Homo sapiens
  CDR3 for beta chain variable domain of TCR clone 297587 (TRBV20-1, TRBJ2-1)
CSAPPRLAGTRYNEQFF

SEQ ID NO: 595175 - protein, 17 aa, Homo sapiens
  CDR3 for alpha chain variable domain of TCR clone 297588 (TRAV3, TRAJ38)
CAVRGCLNAGNNRKLIL

SEQ ID NO: 595176 - protein, 16 aa, Homo sapiens
  CDR3 for beta chain variable domain of TCR clone 297588 (TRBV20-1, TRBJ1-4)
CSAPGQGLLTNEKLFF

SEQ ID NO: 595177 - protein, 14 aa, Homo sapiens
  CDR3 for alpha chain variable domain of TCR clone 297589 (TRAV1-2, TRAJ8)
CAVREDTGFQKLVF

SEQ ID NO: 595178 - protein, 14 aa, Homo sapiens
  CDR3 for beta chain variable domain of TCR clone 297589 (TRBV20-1, TRBJ1-1)
CSAQTRIGGTEDFF

SEQ ID NO: 595179 - protein, 14 aa, Homo sapiens
  CDR3 for alpha chain variable domain of TCR clone 297590 (TRAV29/DV5, TRAJ32)
CAASQGGATNKLIF

SEQ ID NO: 595180 - protein, 13 aa, Homo sapiens
  CDR3 for beta chain variable domain of TCR clone 297590 (TRBV7-9, TRBJ1-2)
CASSLKQNYGDTF

SEQ ID NO: 595181 - protein, 16 aa, Homo sapiens
  CDR3 for alpha chain variable domain of TCR clone 297591 (TRAV12-2, TRAJ50)
CAVGTATKTSYDKVIF

SEQ ID NO: 595182 - protein, 15 aa, Homo sapiens
  CDR3 for beta chain variable domain of TCR clone 297591 (TRBV6-3, TRBJ2-7)
CASSSPGTVFYEQYF

SEQ ID NO: 595183 - protein, 13 aa, Homo sapiens
  CDR3 for alpha chain variable domain of TCR clone 297592 (TRAV12-2, TRAJ4)
CAVRSGGYNKLIF

SEQ ID NO: 595184 - protein, 15 aa, Homo sapiens
  CDR3 for beta chain variable domain of TCR clone 297592 (TRBV10-3, TRBJ2-1)
CAISDVQDRVYERFF

SEQ ID NO: 595185 - protein, 16 aa, Homo sapiens
  CDR3 for alpha chain variable domain of TCR clone 297593 (TRAV26-2, TRAJ28)
CILRPYSGAGSYQLTF

SEQ ID NO: 595186 - protein, 21 aa, Homo sapiens
  CDR3 for beta chain variable domain of TCR clone 297593 (TRBV27, TRBJ2-5)
CASRTAGTGSTRDPVLRARHA

SEQ ID NO: 595187 - protein, 13 aa, Homo sapiens
  CDR3 for alpha chain variable domain of TCR clone 297594 (TRAV3, TRAJ20)
CAVRSLNDYKLGF

SEQ ID NO: 595188 - protein, 13 aa, Homo sapiens
  CDR3 for beta chain variable domain of TCR clone 297594 (TRBV6-1, TRBJ2-1)
CAGMDPTNNEQFF

SEQ ID NO: 595189 - protein, 23 aa, Homo sapiens
  CDR3 for alpha chain variable domain of TCR clone 297595 (TRAV26-1, TRAJ38)
CIADNAGNNHIQNPDPALYHLRD

SEQ ID NO: 595190 - protein, 13 aa, Homo sapiens
  CDR3 for beta chain variable domain of TCR clone 297595 (TRBV20-1, TRBJ1-1)
CSARGGGNTEAFF

SEQ ID NO: 595191 - protein, 14 aa, Homo sapiens
  CDR3 for alpha chain variable domain of TCR clone 297596 (TRAV12-2, TRAJ5)
CAVNRSTGRRALTF

SEQ ID NO: 595192 - protein, 12 aa, Homo sapiens
  CDR3 for beta chain variable domain of TCR clone 297596 (TRBV19, TRBJ1-5)
CASSIAKQHQHF

SEQ ID NO: 595193 - protein, 11 aa, Homo sapiens
  CDR3 for alpha chain variable domain of TCR clone 297597 (TRAV3, TRAJ32)
CAVSPKGMVVL

SEQ ID NO: 595194 - protein, 12 aa, Homo sapiens
  CDR3 for beta chain variable domain of TCR clone 297597 (TRBV7-9, TRBJ1-4)
CASSTDREKLFF

SEQ ID NO: 595195 - protein, 14 aa, Homo sapiens
  CDR3 for alpha chain variable domain of TCR clone 297598 (TRAV9-2, TRAJ39)
CALYIYNAGNMLTF

SEQ ID NO: 595196 - protein, 15 aa, Homo sapiens
  CDR3 for beta chain variable domain of TCR clone 297598 (TRBV28, TRBJ2-5)
CASSSGRVIQETQYF

SEQ ID NO: 595197 - protein, 15 aa, Homo sapiens
  CDR3 for alpha chain variable domain of TCR clone 297599 (TRAV16, TRAJ4)
CALEDPSGGYNKLIF

SEQ ID NO: 595198 - protein, 13 aa, Homo sapiens
  CDR3 for beta chain variable domain of TCR clone 297599 (TRBV7-3, TRBJ2-7)
CASSQSGGYEQYF

SEQ ID NO: 595199 - protein, 12 aa, Homo sapiens
  CDR3 for alpha chain variable domain of TCR clone 297600 (TRAV29/DV5, TRAJ49)
CAATDTGNQFYF

SEQ ID NO: 595200 - protein, 14 aa, Homo sapiens
  CDR3 for beta chain variable domain of TCR clone 297600 (TRBV20-1, TRBJ2-3)
CSARGGTSTDTQYF

SEQ ID NO: 595201 - protein, 15 aa, Homo sapiens
  CDR3 for alpha chain variable domain of TCR clone 297601 (TRAV9-2, TRAJ11)
CALSDGNSGYRTLTF

SEQ ID NO: 595202 - protein, 15 aa, Homo sapiens
  CDR3 for beta chain variable domain of TCR clone 297601 (TRBV2, TRBJ2-1)
CASSETGGNYNEQFF

SEQ ID NO: 595203 - protein, 13 aa, Homo sapiens
  CDR3 for alpha chain variable domain of TCR clone 297602 (TRAV2, TRAJ24)
CAVRTDSWGKLQF

SEQ ID NO: 595204 - protein, 14 aa, Homo sapiens
  CDR3 for beta chain variable domain of TCR clone 297602 (TRBV13, TRBJ2-5)
CASSLGRGQETQYF

SEQ ID NO: 595205 - protein, 15 aa, Homo sapiens
  CDR3 for alpha chain variable domain of TCR clone 297603 (TRAV12-2, TRAJ43)
CAFDMRFGAGTRLTV

SEQ ID NO: 595206 - protein, 12 aa, Homo sapiens
  CDR3 for beta chain variable domain of TCR clone 297603 (TRBV7-8, TRBJ2-7)
CASSLGDREQYF

SEQ ID NO: 595207 - protein, 14 aa, Homo sapiens
  CDR3 for alpha chain variable domain of TCR clone 297604 (TRAV27, TRAJ22)
CAGVSVLGKRQLTF

SEQ ID NO: 595208 - protein, 12 aa, Homo sapiens
  CDR3 for beta chain variable domain of TCR clone 297604 (TRBV7-8, TRBJ2-7)
CASEGGPHGQYF

SEQ ID NO: 595209 - protein, 13 aa, Homo sapiens
  CDR3 for alpha chain variable domain of TCR clone 297605 (TRAV8-1, TRAJ15)
CAVKNQAGTALIF

SEQ ID NO: 595210 - protein, 15 aa, Homo sapiens
  CDR3 for beta chain variable domain of TCR clone 297605 (TRBV7-3, TRBJ2-7)
CASSVTPTGYDEQYF

SEQ ID NO: 595211 - protein, 17 aa, Homo sapiens
  CDR3 for alpha chain variable domain of TCR clone 297606 (TRAV26-1, TRAJ28)
CIVRALYPGAGSYQLTF

SEQ ID NO: 595212 - protein, 12 aa, Homo sapiens
  CDR3 for beta chain variable domain of TCR clone 297606 (TRBV12-4, TRBJ2-1)
CASRQTENEQFF

SEQ ID NO: 595213 - protein, 13 aa, Homo sapiens
  CDR3 for alpha chain variable domain of TCR clone 297607 (TRAV29/DV5, TRAJ31)
CAPSRNNNARLMF

SEQ ID NO: 595214 - protein, 13 aa, Homo sapiens
  CDR3 for beta chain variable domain of TCR clone 297607 (TRBV7-2, TRBJ2-4)
CASSREHANIQYF

SEQ ID NO: 595215 - protein, 16 aa, Homo sapiens
  CDR3 for alpha chain variable domain of TCR clone 297608 (TRAV3, TRAJ37)
CAVRPHGSGNTGILIF

SEQ ID NO: 595216 - protein, 17 aa, Homo sapiens
  CDR3 for beta chain variable domain of TCR clone 297608 (TRBV7-2, TRBJ2-7)
CASSFETSGSTSSTSGR

SEQ ID NO: 595217 - protein, 11 aa, Homo sapiens
  CDR3 for alpha chain variable domain of TCR clone 297609 (TRAV21, TRAJ20)
CAVDGDYKLSF

SEQ ID NO: 595218 - protein, 13 aa, Homo sapiens
  CDR3 for beta chain variable domain of TCR clone 297609 (TRBV7-9, TRBJ1-2)
CASSLKQNYGYTF

SEQ ID NO: 595219 - protein, 18 aa, Homo sapiens
  CDR3 for alpha chain variable domain of TCR clone 297610 (TRAV13-1, TRAJ52)
CAAKNPNACGTSYGKLTF

SEQ ID NO: 595220 - protein, 15 aa, Homo sapiens
  CDR3 for beta chain variable domain of TCR clone 297610 (TRBV2, TRBJ2-2)
CASSRETVGTGELFF

SEQ ID NO: 595221 - protein, 14 aa, Homo sapiens
  CDR3 for alpha chain variable domain of TCR clone 297611 (TRAV12-3, TRAJ9)
CAMSPNTGGFKTIF

SEQ ID NO: 595222 - protein, 12 aa, Homo sapiens
  CDR3 for beta chain variable domain of TCR clone 297611 (TRBV19, TRBJ2-5)
CATSRGGETQYF

SEQ ID NO: 595223 - protein, 13 aa, Homo sapiens
  CDR3 for alpha chain variable domain of TCR clone 297612 (TRAV17, TRAJ4)
CATKSGGDNKLIF

SEQ ID NO: 595224 - protein, 14 aa, Homo sapiens
  CDR3 for beta chain variable domain of TCR clone 297612 (TRBV20-1, TRBJ1-5)
CSARDDRGNQPQHF

SEQ ID NO: 595225 - protein, 18 aa, Homo sapiens
  CDR3 for alpha chain variable domain of TCR clone 297613 (TRAV13-1, TRAJ52)
CAAKNPNAGGTSYGKLTF

SEQ ID NO: 595226 - protein, 16 aa, Homo sapiens
  CDR3 for beta chain variable domain of TCR clone 297613 (TRBV5-1, TRBJ1-1)
CASSSGGNSLNTEAFF

SEQ ID NO: 595227 - protein, 15 aa, Homo sapiens
  CDR3 for alpha chain variable domain of TCR clone 297614 (TRAV8-4, TRAJ3)
CAVTGENLVQQCFQD

SEQ ID NO: 595228 - protein, 16 aa, Homo sapiens
  CDR3 for beta chain variable domain of TCR clone 297614 (TRBV4-2, TRBJ1-1)
CASSRAGFGMNTEAFF

SEQ ID NO: 595229 - protein, 13 aa, Homo sapiens
  CDR3 for alpha chain variable domain of TCR clone 297615 (TRAV13-1, TRAJ39)
CSKYSNAGDMLTF

SEQ ID NO: 595230 - protein, 16 aa, Homo sapiens
  CDR3 for beta chain variable domain of TCR clone 297615 (TRBV12-4, TRBJ2-5)
CASSFFVRGRQETQYF

SEQ ID NO: 595231 - protein, 14 aa, Homo sapiens
  CDR3 for alpha chain variable domain of TCR clone 297616 (TRAV12-3, TRAJ10)
SHLPLTGGGNKLTF

SEQ ID NO: 595232 - protein, 11 aa, Homo sapiens
  CDR3 for beta chain variable domain of TCR clone 297616 (TRBV19, TRBJ2-7)
CASGNSYEQYF

SEQ ID NO: 595233 - protein, 16 aa, Homo sapiens
  CDR3 for alpha chain variable domain of TCR clone 297617 (TRAV8-3, TRAJ44)
CAVGTLMTGAASKLTF

SEQ ID NO: 595234 - protein, 13 aa, Homo sapiens
  CDR3 for beta chain variable domain of TCR clone 297617 (TRBV11-2, TRBJ2-1)
CASSLRLTHEQFF

SEQ ID NO: 595235 - protein, 14 aa, Homo sapiens
  CDR3 for alpha chain variable domain of TCR clone 297618 (TRAV12-2, TRAJ13)
CAVKKTGGYRKVTF

SEQ ID NO: 595236 - protein, 15 aa, Homo sapiens
  CDR3 for beta chain variable domain of TCR clone 297618 (TRBV27, TRBJ2-1)
RASSNGGGSSNEQFF

SEQ ID NO: 595237 - protein, 12 aa, Homo sapiens
  CDR3 for alpha chain variable domain of TCR clone 297619 (TRAV13-1, TRAJ21)
GAAFFNFNKFYF

SEQ ID NO: 595238 - protein, 14 aa, Homo sapiens
  CDR3 for beta chain variable domain of TCR clone 297619 (TRBV4-1, TRBJ2-7)
CASRLTSGSYEQYF

SEQ ID NO: 595239 - protein, 16 aa, Homo sapiens
  CDR3 for alpha chain variable domain of TCR clone 297620 (TRAV16, TRAJ21)
CAFGWATTSTNFTLDL

SEQ ID NO: 595240 - protein, 15 aa, Homo sapiens
  CDR3 for beta chain variable domain of TCR clone 297620 (TRBV19, TRBJ2-1)
CASSIQATSYNEQFF

SEQ ID NO: 595241 - protein, 14 aa, Homo sapiens
  CDR3 for alpha chain variable domain of TCR clone 297621 (TRAV8-4, TRAJ9)
CAVTFNTGGFKTIF

SEQ ID NO: 595242 - protein, 14 aa, Homo sapiens
  CDR3 for beta chain variable domain of TCR clone 297621 (TRBV7-2, TRBJ2-7)
CASSPKTSFYEQYF

SEQ ID NO: 595243 - protein, 14 aa, Homo sapiens
  CDR3 for alpha chain variable domain of TCR clone 297622 (TRAV23/DV6, TRAJ11)
CAASLESGYSTLTF

SEQ ID NO: 595244 - protein, 15 aa, Homo sapiens
  CDR3 for beta chain variable domain of TCR clone 297622 (TRBV28, TRBJ2-7)
CASSSPGTEPFELYF

SEQ ID NO: 595245 - protein, 13 aa, Homo sapiens
  CDR3 for alpha chain variable domain of TCR clone 297623 (TRAV30, TRAJ20)
CGTEDRSDYKLSF

SEQ ID NO: 595246 - protein, 14 aa, Homo sapiens
  CDR3 for beta chain variable domain of TCR clone 297623 (TRBV7-2, TRBJ1-5)
CASSTQGAGQPQHF

SEQ ID NO: 595247 - protein, 10 aa, Homo sapiens
  CDR3 for alpha chain variable domain of TCR clone 297624 (TRAV8-4, TRAJ39)
CAVAGNMLTF

SEQ ID NO: 595248 - protein, 17 aa, Homo sapiens
  CDR3 for beta chain variable domain of TCR clone 297624 (TRBV28, TRBJ2-5)
CASSTPEGDALQETQYL

SEQ ID NO: 595249 - protein, 13 aa, Homo sapiens
  CDR3 for alpha chain variable domain of TCR clone 297625 (TRAV12-1, TRAJ21)
CVVTLYNFNRFYF

SEQ ID NO: 595250 - protein, 20 aa, Homo sapiens
  CDR3 for beta chain variable domain of TCR clone 297625 (TRBV7-8, TRBJ2-1)
CASSLAHRLAGVRAYNEQFF

SEQ ID NO: 595251 - protein, 14 aa, Homo sapiens
  CDR3 for alpha chain variable domain of TCR clone 297626 (TRAV27, TRAJ13)
CRSSNSGGYQKVTF

SEQ ID NO: 595252 - protein, 13 aa, Homo sapiens
  CDR3 for beta chain variable domain of TCR clone 297626 (TRBV10-3, TRBJ2-7)
CASKLAVNYEQYF

SEQ ID NO: 595253 - protein, 15 aa, Homo sapiens
  CDR3 for alpha chain variable domain of TCR clone 297627 (TRAV12-3, TRAJ42)
CAMSGHGGSQGNLIF

SEQ ID NO: 595254 - protein, 16 aa, Homo sapiens
  CDR3 for beta chain variable domain of TCR clone 297627 (TRBV5-1, TRBJ2-3)
CASSSVGRRSTDTQYF

SEQ ID NO: 595255 - protein, 17 aa, Homo sapiens
  CDR3 for alpha chain variable domain of TCR clone 297628 (TRAV3, TRAJ6)
CAARDGPRAGGRYIPTF

SEQ ID NO: 595256 - protein, 20 aa, Homo sapiens
  CDR3 for beta chain variable domain of TCR clone 297628 (TRBV28, TRBJ2-1)
CASTPIGRSPGLAGGNEQFF

SEQ ID NO: 595257 - protein, 17 aa, Homo sapiens
  CDR3 for alpha chain variable domain of TCR clone 297629 (TRAV3, TRAJ6)
CAARDGPRAGGSNIPTF

SEQ ID NO: 595258 - protein, 20 aa, Homo sapiens
  CDR3 for beta chain variable domain of TCR clone 297629 (TRBV28, TRBJ2-1)
CASTPIGRSPGLAGGNEQFF

SEQ ID NO: 595259 - protein, 17 aa, Homo sapiens
  CDR3 for alpha chain variable domain of TCR clone 297630 (TRAV23/DV6, TRAJ57)
CAASSTLSQGGSEKLVF

SEQ ID NO: 595260 - protein, 13 aa, Homo sapiens
  CDR3 for beta chain variable domain of TCR clone 297630 (TRBV20-1, TRBJ1-1)
CSARGGGNTEAFC

SEQ ID NO: 595261 - protein, 15 aa, Homo sapiens
  CDR3 for alpha chain variable domain of TCR clone 297631 (TRAV8-4, TRAJ13)
CAVSDWGGGYQKVTF

SEQ ID NO: 595262 - protein, 15 aa, Homo sapiens
  CDR3 for beta chain variable domain of TCR clone 297631 (TRBV25-1, TRBJ1-4)
CASSPGDRTNEKLFF

SEQ ID NO: 595263 - protein, 13 aa, Homo sapiens
  CDR3 for alpha chain variable domain of TCR clone 297632 (TRAV8-3, TRAJ43)
CAVGPDNNNDMRF

SEQ ID NO: 595264 - protein, 17 aa, Homo sapiens
  CDR3 for beta chain variable domain of TCR clone 297632 (TRBV15, TRBJ1-4)
CATSRYGTGDPNEKLFF

SEQ ID NO: 595265 - protein, 11 aa, Homo sapiens
  CDR3 for alpha chain variable domain of TCR clone 297633 (TRAV26-1, TRAJ37)
CIVRVGRKLIF

SEQ ID NO: 595266 - protein, 14 aa, Homo sapiens
  CDR3 for beta chain variable domain of TCR clone 297633 (TRBV2, TRBJ2-1)
CASRTGSSYNEQFF

SEQ ID NO: 595267 - protein, 12 aa, Homo sapiens
  CDR3 for alpha chain variable domain of TCR clone 297634 (TRAV2, TRAJ9)
CAVVAGGFKTIF

SEQ ID NO: 595268 - protein, 14 aa, Homo sapiens
  CDR3 for beta chain variable domain of TCR clone 297634 (TRBV6-1, TRBJ1-3)
CASVQGGGGNTMYF

SEQ ID NO: 595269 - protein, 14 aa, Homo sapiens
  CDR3 for alpha chain variable domain of TCR clone 297635 (TRAV3, TRAJ21)
CAVRDAYNFNKFYF

SEQ ID NO: 595270 - protein, 17 aa, Homo sapiens
  CDR3 for beta chain variable domain of TCR clone 297635 (TRBV20-1, TRBJ1-6)
CSARGGYTFAYNSPLHF

SEQ ID NO: 595271 - protein, 22 aa, Homo sapiens
  CDR3 for alpha chain variable domain of TCR clone 297636 (TRAV39, TRAJ49)
PCMTSLPPTSVPWTNTGNQLYF

SEQ ID NO: 595272 - protein, 17 aa, Homo sapiens
  CDR3 for beta chain variable domain of TCR clone 297636 (TRBV20-1, TRBJ2-1)
CSARDRRRASSYNEQFF

SEQ ID NO: 595273 - protein, 11 aa, Homo sapiens
  CDR3 for alpha chain variable domain of TCR clone 297637 (TRAV1-2, TRAJ40)
CAVPGTYKSIF

SEQ ID NO: 595274 - protein, 16 aa, Homo sapiens
  CDR3 for beta chain variable domain of TCR clone 297637 (TRBV29-1, TRBJ2-7)
CSVEVVGTSGNYEQYF

SEQ ID NO: 595275 - protein, 11 aa, Homo sapiens
  CDR3 for alpha chain variable domain of TCR clone 297638 (TRAV13-1, TRAJ52)
PGGTSYGKLTF

SEQ ID NO: 595276 - protein, 16 aa, Homo sapiens
  CDR3 for beta chain variable domain of TCR clone 297638 (TRBV28, TRBJ2-7)
CASSPWFATGDLSQYF

SEQ ID NO: 595277 - protein, 18 aa, Homo sapiens
  CDR3 for alpha chain variable domain of TCR clone 297639 (TRAV21, TRAJ52)
CAVRPSPAGGTSYGKLTS

SEQ ID NO: 595278 - protein, 17 aa, Homo sapiens
  CDR3 for beta chain variable domain of TCR clone 297639 (TRBV13, TRBJ2-3)
CASSRSRVAGGRNTQYF

SEQ ID NO: 595279 - protein, 15 aa, Homo sapiens
  CDR3 for alpha chain variable domain of TCR clone 297640 (TRAV8-6, TRAJ26)
CAVSDQSPGGQNFVF

SEQ ID NO: 595280 - protein, 14 aa, Homo sapiens
  CDR3 for beta chain variable domain of TCR clone 297640 (TRBV12-5, TRBJ2-5)
CASGSRTHQETQYF

SEQ ID NO: 595281 - protein, 14 aa, Homo sapiens
  CDR3 for alpha chain variable domain of TCR clone 297641 (TRAV3, TRAJ36)
CAVRDGTGANNLFF

SEQ ID NO: 595282 - protein, 16 aa, Homo sapiens
  CDR3 for beta chain variable domain of TCR clone 297641 (TRBV20-1, TRBJ2-6)
CSAREGPGVGANVLTV

SEQ ID NO: 595283 - protein, 17 aa, Homo sapiens
  CDR3 for alpha chain variable domain of TCR clone 297642 (TRAV3, TRAJ42)
CAVRDMDYGGSQGNLIF

SEQ ID NO: 595284 - protein, 12 aa, Homo sapiens
  CDR3 for beta chain variable domain of TCR clone 297642 (TRBV11-2, TRBJ2-1)
CASSPGNNEQFF

SEQ ID NO: 595285 - protein, 17 aa, Homo sapiens
  CDR3 for alpha chain variable domain of TCR clone 297643 (TRAV4, TRAJ18)
SLGGERSVGSTLGRLYF

SEQ ID NO: 595286 - protein, 16 aa, Homo sapiens
  CDR3 for beta chain variable domain of TCR clone 297643 (TRBV19, TRBJ2-1)
YASSKAGPSSYNEQFF

SEQ ID NO: 595287 - protein, 15 aa, Homo sapiens
  CDR3 for alpha chain variable domain of TCR clone 297644 (TRAV21, TRAJ52)
CAVRGGGTSYGKLTF

SEQ ID NO: 595288 - protein, 13 aa, Homo sapiens
  CDR3 for beta chain variable domain of TCR clone 297644 (TRBV6-5, TRBJ2-5)
CATGPSPQETQYF

SEQ ID NO: 595289 - protein, 17 aa, Homo sapiens
  CDR3 for alpha chain variable domain of TCR clone 297645 (TRAV26-2, TRAJ42)
CILRDVGYGGSQGNLIF

SEQ ID NO: 595290 - protein, 16 aa, Homo sapiens
  CDR3 for beta chain variable domain of TCR clone 297645 (TRBV7-3, TRBJ2-2)
CASSLKRGTLSGELFF

SEQ ID NO: 595291 - protein, 16 aa, Homo sapiens
  CDR3 for alpha chain variable domain of TCR clone 297646 (TRAV3, TRAJ37)
CAVRDSGSGNTGKLIF

SEQ ID NO: 595292 - protein, 12 aa, Homo sapiens
  CDR3 for beta chain variable domain of TCR clone 297646 (TRBV7-2, TRBJ2-5)
CASSVYQETQYF

SEQ ID NO: 595293 - protein, 15 aa, Homo sapiens
  CDR3 for alpha chain variable domain of TCR clone 297647 (TRAV36/DV7, TRAJ28)
CAVGTLGLGVTNSLS

SEQ ID NO: 595294 - protein, 12 aa, Homo sapiens
  CDR3 for beta chain variable domain of TCR clone 297647 (TRBV7-6, TRBJ2-3)
CASSWAEDTQYF

SEQ ID NO: 595295 - protein, 13 aa, Homo sapiens
  CDR3 for alpha chain variable domain of TCR clone 297648 (TRAV12-3, TRAJ15)
CAMSDQEGTALIF

SEQ ID NO: 595296 - protein, 15 aa, Homo sapiens
  CDR3 for beta chain variable domain of TCR clone 297648 (TRBV20-1, TRBJ2-7)
CSARDRGSGMDEQYL

SEQ ID NO: 595297 - protein, 14 aa, Homo sapiens
  CDR3 for alpha chain variable domain of TCR clone 297649 (TRAV1-2, TRAJ16)
RAVNRFSDGQKLLF

SEQ ID NO: 595298 - protein, 16 aa, Homo sapiens
  CDR3 for beta chain variable domain of TCR clone 297649 (TRBV2, TRBJ2-5)
CASSETQGVGEETQYF

SEQ ID NO: 595299 - protein, 11 aa, Homo sapiens
  CDR3 for alpha chain variable domain of TCR clone 297650 (TRAV12-1, TRAJ15)
GVVNAGTALIF

SEQ ID NO: 595300 - protein, 16 aa, Homo sapiens
  CDR3 for beta chain variable domain of TCR clone 297650 (TRBV28, TRBJ2-1)
CASSSRVRDSYNEQFF

SEQ ID NO: 595301 - protein, 12 aa, Homo sapiens
  CDR3 for alpha chain variable domain of TCR clone 297651 (TRAV12-3, TRAJ17)
CAMTLTGNKLTF

SEQ ID NO: 595302 - protein, 16 aa, Homo sapiens
  CDR3 for beta chain variable domain of TCR clone 297651 (TRBV2, TRBJ2-1)
CASSANPRDWQAEQFF

SEQ ID NO: 595303 - protein, 14 aa, Homo sapiens
  CDR3 for alpha chain variable domain of TCR clone 297652 (TRAV12-2, TRAJ13)
CAVKKTGGYQKVPL

SEQ ID NO: 595304 - protein, 15 aa, Homo sapiens
  CDR3 for beta chain variable domain of TCR clone 297652 (TRBV27, TRBJ2-1)
CASSNGGGSSNEQFF

SEQ ID NO: 595305 - protein, 14 aa, Homo sapiens
  CDR3 for alpha chain variable domain of TCR clone 297653 (TRAV3, TRAJ9)
CAVRGNTGGFKTIF

SEQ ID NO: 595306 - protein, 14 aa, Homo sapiens
  CDR3 for beta chain variable domain of TCR clone 297653 (TRBV15, TRBJ2-1)
CATSGVEVYNEQFF

SEQ ID NO: 595307 - protein, 16 aa, Homo sapiens
  CDR3 for alpha chain variable domain of TCR clone 297654 (TRAV26-1, TRAJ45)
CIVEKDSGGGADGLTF

SEQ ID NO: 595308 - protein, 16 aa, Homo sapiens
  CDR3 for beta chain variable domain of TCR clone 297654 (TRBV10-3, TRBJ1-6)
CAISERRGQGNSPLHF

SEQ ID NO: 595309 - protein, 13 aa, Homo sapiens
  CDR3 for alpha chain variable domain of TCR clone 297655 (TRAV13-2, TRAJ40)
CAELISGTYKYIF

SEQ ID NO: 595310 - protein, 15 aa, Homo sapiens
  CDR3 for beta chain variable domain of TCR clone 297655 (TRBV7-2, TRBJ2-7)
CASSLALGSAYEQYF

SEQ ID NO: 595311 - protein, 14 aa, Homo sapiens
  CDR3 for alpha chain variable domain of TCR clone 297656 (TRAV12-3, TRAJ10)
SHLPLTGGGNKLTF

SEQ ID NO: 595312 - protein, 16 aa, Homo sapiens
  CDR3 for beta chain variable domain of TCR clone 297656 (TRBV7-9, TRBJ2-1)
CASNDVAGGSYNEQFF

SEQ ID NO: 595313 - protein, 15 aa, Homo sapiens
  CDR3 for alpha chain variable domain of TCR clone 297657 (TRAV3, TRAJ47)
CAVRDIGEYGNKLGF

SEQ ID NO: 595314 - protein, 14 aa, Homo sapiens
  CDR3 for beta chain variable domain of TCR clone 297657 (TRBV13, TRBJ2-5)
SASSLERVGETQYF

SEQ ID NO: 595315 - protein, 15 aa, Homo sapiens
  CDR3 for alpha chain variable domain of TCR clone 297658 (TRAV8-3, TRAJ23)
CAVGHRYNQGGTLIF

SEQ ID NO: 595316 - protein, 22 aa, Homo sapiens
  CDR3 for beta chain variable domain of TCR clone 297658 (TRBV29-1, TRBJ2-5)
TVSNMSPEDSSIYLCSAGTQYF

SEQ ID NO: 595317 - protein, 13 aa, Homo sapiens
  CDR3 for alpha chain variable domain of TCR clone 297659 (TRAV12-1, TRAJ3)
CVVNPRGASKIIF

SEQ ID NO: 595318 - protein, 13 aa, Homo sapiens
  CDR3 for beta chain variable domain of TCR clone 297659 (TRBV28, TRBJ1-5)
RASSDRGNQPQHF

SEQ ID NO: 595319 - protein, 15 aa, Homo sapiens
  CDR3 for alpha chain variable domain of TCR clone 297660 (TRAV22, TRAJ45)
CAAKYSGGGADGLTF

SEQ ID NO: 595320 - protein, 13 aa, Homo sapiens
  CDR3 for beta chain variable domain of TCR clone 297660 (TRBV7-3, TRBJ1-1)
CASSQDWGAEAFF

SEQ ID NO: 595321 - protein, 12 aa, Homo sapiens
  CDR3 for alpha chain variable domain of TCR clone 297661 (TRAV23/DV6, TRAJ58)
CAARLLRGGTSG

SEQ ID NO: 595322 - protein, 15 aa, Homo sapiens
  CDR3 for beta chain variable domain of TCR clone 297661 (TRBV9, TRBJ1-6)
CASSVAGTGDSPLHF

SEQ ID NO: 595323 - protein, 13 aa, Homo sapiens
  CDR3 for alpha chain variable domain of TCR clone 297662 (TRAV2, TRAJ5)
CAVPDTGGRALTF

SEQ ID NO: 595324 - protein, 15 aa, Homo sapiens
  CDR3 for beta chain variable domain of TCR clone 297662 (TRBV7-2, TRBJ2-2)
CASSTRTGYTGELFF

SEQ ID NO: 595325 - protein, 14 aa, Homo sapiens
  CDR3 for alpha chain variable domain of TCR clone 297663 (TRAV3, TRAJ9)
CAVRLNTGGFKTIF

SEQ ID NO: 595326 - protein, 15 aa, Homo sapiens
  CDR3 for beta chain variable domain of TCR clone 297663 (TRBV4-1, TRBJ1-1)
CASSQAPGGTAEAFF

SEQ ID NO: 595327 - protein, 13 aa, Homo sapiens
  CDR3 for alpha chain variable domain of TCR clone 297664 (TRAV1-2, TRAJ9)
CAALNTGGFKTIF

SEQ ID NO: 595328 - protein, 16 aa, Homo sapiens
  CDR3 for beta chain variable domain of TCR clone 297664 (TRBV5-1, TRBJ2-3)
CASSLGLAVYTDTQYF

SEQ ID NO: 595329 - protein, 14 aa, Homo sapiens
  CDR3 for alpha chain variable domain of TCR clone 297665 (TRAV23/DV6, TRAJ4)
CAAPSSGGYNKLIF

SEQ ID NO: 595330 - protein, 12 aa, Homo sapiens
  CDR3 for beta chain variable domain of TCR clone 297665 (TRBV19, TRBJ2-1)
CASSMQDTEQFF

SEQ ID NO: 595331 - protein, 14 aa, Homo sapiens
  CDR3 for alpha chain variable domain of TCR clone 297666 (TRAV8-3, TRAJ9)
CAVVYNTGGFKTIF

SEQ ID NO: 595332 - protein, 14 aa, Homo sapiens
  CDR3 for beta chain variable domain of TCR clone 297666 (TRBV20-1, TRBJ1-1)
CSAQTRIGGTEAFF

SEQ ID NO: 595333 - protein, 17 aa, Homo sapiens
  CDR3 for alpha chain variable domain of TCR clone 297667 (TRAV8-1, TRAJ43)
CAVTNDMRFGAGTRMTI

SEQ ID NO: 595334 - protein, 17 aa, Homo sapiens
  CDR3 for beta chain variable domain of TCR clone 297667 (TRBV5-4, TRBJ2-1)
CASSSAGGRGPYNEQFF

SEQ ID NO: 595335 - protein, 16 aa, Homo sapiens
  CDR3 for alpha chain variable domain of TCR clone 297668 (TRAV26-1, TRAJ44)
IASSESRTGPASKLTF

SEQ ID NO: 595336 - protein, 13 aa, Homo sapiens
  CDR3 for beta chain variable domain of TCR clone 297668 (TRBV7-2, TRBJ1-5)
CASSFARNQPQHF

SEQ ID NO: 595337 - protein, 14 aa, Homo sapiens
  CDR3 for alpha chain variable domain of TCR clone 297669 (TRAV2, TRAJ37)
CAVDFTSNTGKLIF

SEQ ID NO: 595338 - protein, 13 aa, Homo sapiens
  CDR3 for beta chain variable domain of TCR clone 297669 (TRBV24-1, TRBJ2-1)
CATSAGPYNEQFF

SEQ ID NO: 595339 - protein, 14 aa, Homo sapiens
  CDR3 for alpha chain variable domain of TCR clone 297670 (TRAV35, TRAJ22)
CAGLRPGSARQLTF

SEQ ID NO: 595340 - protein, 16 aa, Homo sapiens
  CDR3 for beta chain variable domain of TCR clone 297670 (TRBV19, TRBJ2-1)
CASSKAGPSSYNEQFF

SEQ ID NO: 595341 - protein, 14 aa, Homo sapiens
  CDR3 for alpha chain variable domain of TCR clone 297671 (TRAV12-2, TRAJ29)
CAVRRNSGNTPLVF

SEQ ID NO: 595342 - protein, 16 aa, Homo sapiens
  CDR3 for beta chain variable domain of TCR clone 297671 (TRBV7-9, TRBJ2-3)
CASSPWREVGTDTQYF

SEQ ID NO: 595343 - protein, 13 aa, Homo sapiens
  CDR3 for alpha chain variable domain of TCR clone 297672 (TRAV5, TRAJ30)
CAEIENRDDKIIF

SEQ ID NO: 595344 - protein, 14 aa, Homo sapiens
  CDR3 for beta chain variable domain of TCR clone 297672 (TRBV4-1, TRBJ2-2)
CASSQAVNTGELFF

SEQ ID NO: 595345 - protein, 12 aa, Homo sapiens
  CDR3 for alpha chain variable domain of TCR clone 297673 (TRAV3, TRAJ20)
CAVRDPDYKLSF

SEQ ID NO: 595346 - protein, 15 aa, Homo sapiens
  CDR3 for beta chain variable domain of TCR clone 297673 (TRBV5-1, TRBJ2-7)
CASSLGDFTTYEQYF

SEQ ID NO: 595347 - protein, 15 aa, Homo sapiens
  CDR3 for alpha chain variable domain of TCR clone 297674 (TRAV3, TRAJ15)
CAVRPANQAGTALSF

SEQ ID NO: 595348 - protein, 14 aa, Homo sapiens
  CDR3 for beta chain variable domain of TCR clone 297674 (TRBV4-1, TRBJ2-2)
CASSQAVNTGELFF

SEQ ID NO: 595349 - protein, 16 aa, Homo sapiens
  CDR3 for alpha chain variable domain of TCR clone 297675 (TRAV12-2, TRAJ28)
CAVITDSGAGSYQLTF

SEQ ID NO: 595350 - protein, 16 aa, Homo sapiens
  CDR3 for beta chain variable domain of TCR clone 297675 (TRBV7-9, TRBJ2-3)
CASSPWREVGTDTQYF

SEQ ID NO: 595351 - protein, 17 aa, Homo sapiens
  CDR3 for alpha chain variable domain of TCR clone 297676 (TRAV8-2, )
CVVNIQNPDPAVYQLRD

SEQ ID NO: 595352 - protein, 14 aa, Homo sapiens
  CDR3 for beta chain variable domain of TCR clone 297676 (TRBV7-9, TRBJ2-5)
CASGLVGGEETQYF

SEQ ID NO: 595353 - protein, 16 aa, Homo sapiens
  CDR3 for alpha chain variable domain of TCR clone 297677 (TRAV14/DV4, TRAJ54)
CAMREGLAWGAQKLVF

SEQ ID NO: 595354 - protein, 19 aa, Homo sapiens
  CDR3 for beta chain variable domain of TCR clone 297677 (TRBV7-9, TRBJ2-6)
CASSLESVTVLPGANVLTF

SEQ ID NO: 595355 - protein, 12 aa, Homo sapiens
  CDR3 for alpha chain variable domain of TCR clone 297678 (TRAV13-1, TRAJ21)
CSAKEGFNKFYF

SEQ ID NO: 595356 - protein, 16 aa, Homo sapiens
  CDR3 for beta chain variable domain of TCR clone 297678 (TRBV6-1, TRBJ1-2)
CASSEANSIINYGYTF

SEQ ID NO: 595357 - protein, 17 aa, Homo sapiens
  CDR3 for alpha chain variable domain of TCR clone 297679 (TRAV3, TRAJ42)
CAVRARDNGGSQGNLIF

SEQ ID NO: 595358 - protein, 12 aa, Homo sapiens
  CDR3 for beta chain variable domain of TCR clone 297679 (TRBV11-2, TRBJ2-1)
CASSPGNNEQFF

SEQ ID NO: 595359 - protein, 11 aa, Homo sapiens
  CDR3 for alpha chain variable domain of TCR clone 297680 (TRAV17, TRAJ31)
CATDRTARLMF

SEQ ID NO: 595360 - protein, 14 aa, Homo sapiens
  CDR3 for beta chain variable domain of TCR clone 297680 (TRBV4-2, TRBJ2-3)
CARSQERGTDTQYF

SEQ ID NO: 595361 - protein, 12 aa, Homo sapiens
  CDR3 for alpha chain variable domain of TCR clone 297681 (TRAV13-2, TRAJ23)
CAERHRGGKLIF

SEQ ID NO: 595362 - protein, 15 aa, Homo sapiens
  CDR3 for beta chain variable domain of TCR clone 297681 (TRBV15, TRBJ2-1)
CATSRPGQGLHEKFF

SEQ ID NO: 595363 - protein, 15 aa, Homo sapiens
  CDR3 for alpha chain variable domain of TCR clone 297682 (TRAV23/DV6, TRAJ37)
CAAGEGSSNAGKLIF

SEQ ID NO: 595364 - protein, 17 aa, Homo sapiens
  CDR3 for beta chain variable domain of TCR clone 297682 (TRBV20-1, TRBJ2-7)
CSATRAGGVAGVEEQYF

SEQ ID NO: 595365 - protein, 12 aa, Homo sapiens
  CDR3 for alpha chain variable domain of TCR clone 297683 (TRAV16, TRAJ10)
CSRTGGGNKLTF

SEQ ID NO: 595366 - protein, 19 aa, Homo sapiens
  CDR3 for beta chain variable domain of TCR clone 297683 (TRBV25-1, TRBJ2-2)
CAILVCRVDRGRKTGELFF

SEQ ID NO: 595367 - protein, 11 aa, Homo sapiens
  CDR3 for alpha chain variable domain of TCR clone 297684 (TRAV2, TRAJ13)
CDSGGYQKVTF

SEQ ID NO: 595368 - protein, 14 aa, Homo sapiens
  CDR3 for beta chain variable domain of TCR clone 297684 (TRBV4-1, TRBJ2-7)
CASSPVAGGDEQYF

SEQ ID NO: 595369 - protein, 14 aa, Homo sapiens
  CDR3 for alpha chain variable domain of TCR clone 297685 (TRAV2, TRAJ23)
CAVGLRNQGGKLIS

SEQ ID NO: 595370 - protein, 13 aa, Homo sapiens
  CDR3 for beta chain variable domain of TCR clone 297685 (TRBV12-4, TRBJ2-5)
CASSPGTEETQYF

SEQ ID NO: 595371 - protein, 14 aa, Homo sapiens
  CDR3 for alpha chain variable domain of TCR clone 297686 (TRAV8-2, TRAJ37)
CVVSISGNTGKLVF

SEQ ID NO: 595372 - protein, 13 aa, Homo sapiens
  CDR3 for beta chain variable domain of TCR clone 297686 (TRBV7-8, TRBJ2-7)
RRVRLTEMGEQYF

SEQ ID NO: 595373 - protein, 14 aa, Homo sapiens
  CDR3 for alpha chain variable domain of TCR clone 297687 (TRAV12-2, TRAJ40)
CAVKIPSGTYKHIF

SEQ ID NO: 595374 - protein, 15 aa, Homo sapiens
  CDR3 for beta chain variable domain of TCR clone 297687 (TRBV4-1, TRBJ2-7)
CASSQNTGRLYEQYF

SEQ ID NO: 595375 - protein, 17 aa, Homo sapiens
  CDR3 for alpha chain variable domain of TCR clone 297688 (TRAV13-2, TRAJ28)
CAKEPAGSGAGSYQLTF

SEQ ID NO: 595376 - protein, 15 aa, Homo sapiens
  CDR3 for beta chain variable domain of TCR clone 297688 (TRBV5-5, TRBJ1-1)
CASSLVGKDNTEAFF

SEQ ID NO: 595377 - protein, 21 aa, Homo sapiens
  CDR3 for alpha chain variable domain of TCR clone 297689 (TRAV1-1, TRAJ6)
CLLLLRCERLERKGGSYIPTF

SEQ ID NO: 595378 - protein, 13 aa, Homo sapiens
  CDR3 for beta chain variable domain of TCR clone 297689 (TRBV10-2, TRBJ2-7)
CASGASGGYEQYF

SEQ ID NO: 595379 - protein, 14 aa, Homo sapiens
  CDR3 for alpha chain variable domain of TCR clone 297690 (TRAV1-2, TRAJ8)
CAVREDTGFQKLVF

SEQ ID NO: 595380 - protein, 15 aa, Homo sapiens
  CDR3 for beta chain variable domain of TCR clone 297690 (TRBV5-5, TRBJ1-1)
CASSLVGKDNTEAFF

SEQ ID NO: 595381 - protein, 11 aa, Homo sapiens
  CDR3 for alpha chain variable domain of TCR clone 297691 (TRAV17, TRAJ43)
CATPRSNDMGF

SEQ ID NO: 595382 - protein, 15 aa, Homo sapiens
  CDR3 for beta chain variable domain of TCR clone 297691 (TRBV11-2, TRBJ2-1)
CASSLGTSGLNEQFF

SEQ ID NO: 595383 - protein, 17 aa, Homo sapiens
  CDR3 for alpha chain variable domain of TCR clone 297692 (TRAV3, TRAJ6)
CAVRDGPRAGGSYIHTF

SEQ ID NO: 595384 - protein, 14 aa, Homo sapiens
  CDR3 for beta chain variable domain of TCR clone 297692 (TRBV7-2, TRBJ2-7)
CASSPKTSVYEQYF

SEQ ID NO: 595385 - protein, 13 aa, Homo sapiens
  CDR3 for alpha chain variable domain of TCR clone 297693 (TRAV17, TRAJ5)
CALRGTGRRALTF

SEQ ID NO: 595386 - protein, 14 aa, Homo sapiens
  CDR3 for beta chain variable domain of TCR clone 297693 (TRBV12-5, TRBJ2-5)
CASGSRTQQETQYF

SEQ ID NO: 595387 - protein, 16 aa, Homo sapiens
  CDR3 for alpha chain variable domain of TCR clone 297694 (TRAV12-3, TRAJ58)
CAMTDTDETSGSRLTF

SEQ ID NO: 595388 - protein, 22 aa, Homo sapiens
  CDR3 for beta chain variable domain of TCR clone 297694 (TRBV23-1, TRBJ2-7)
CASSRRLDSGQGYVGGGYEQYF

SEQ ID NO: 595389 - protein, 12 aa, Homo sapiens
  CDR3 for alpha chain variable domain of TCR clone 297695 (TRAV2, TRAJ31)
CAVEDNNARLMF

SEQ ID NO: 595390 - protein, 16 aa, Homo sapiens
  CDR3 for beta chain variable domain of TCR clone 297695 (TRBV10-3, TRBJ2-1)
CAISGVGDEGGGEQFF

SEQ ID NO: 595391 - protein, 13 aa, Homo sapiens
  CDR3 for alpha chain variable domain of TCR clone 297696 (TRAV21, TRAJ27)
CAARPGNAGKSAF

SEQ ID NO: 595392 - protein, 15 aa, Homo sapiens
  CDR3 for beta chain variable domain of TCR clone 297696 (TRBV11-2, TRBJ2-2)
CASSSDRVNAGELFF

SEQ ID NO: 595393 - protein, 15 aa, Homo sapiens
  CDR3 for alpha chain variable domain of TCR clone 297697 (TRAV12-2, TRAJ43)
CAFEMRFGAGTRLTV

SEQ ID NO: 595394 - protein, 13 aa, Homo sapiens
  CDR3 for beta chain variable domain of TCR clone 297697 (TRBV19, TRBJ1-2)
CASSVPGQDGYTF

SEQ ID NO: 595395 - protein, 15 aa, Homo sapiens
  CDR3 for alpha chain variable domain of TCR clone 297698 (TRAV23/DV6, TRAJ13)
CAAWPGGGGYEKVTF

SEQ ID NO: 595396 - protein, 14 aa, Homo sapiens
  CDR3 for beta chain variable domain of TCR clone 297698 (TRBV6-1, TRBJ2-1)
CASAGGAIKNEQFF

SEQ ID NO: 595397 - protein, 12 aa, Homo sapiens
  CDR3 for alpha chain variable domain of TCR clone 297699 (TRAV13-2, TRAJ23)
CAERHRGGKLIF

SEQ ID NO: 595398 - protein, 15 aa, Homo sapiens
  CDR3 for beta chain variable domain of TCR clone 297699 (TRBV6-6, TRBJ2-7)
CASSYSYGGSYEQYF

SEQ ID NO: 595399 - protein, 14 aa, Homo sapiens
  CDR3 for alpha chain variable domain of TCR clone 297700 (TRAV14/DV4, TRAJ9)
CAMRPNIGGFKTIF

SEQ ID NO: 595400 - protein, 17 aa, Homo sapiens
  CDR3 for beta chain variable domain of TCR clone 297700 (TRBV13, TRBJ2-3)
CASSLSRVAGGRNTQYF

SEQ ID NO: 595401 - protein, 12 aa, Homo sapiens
  CDR3 for alpha chain variable domain of TCR clone 297701 (TRAV3, TRAJ20)
CAVRDGDYKLSF

SEQ ID NO: 595402 - protein, 15 aa, Homo sapiens
  CDR3 for beta chain variable domain of TCR clone 297701 (TRBV11-2, TRBJ2-1)
CASSSPSTRYNEQFF

SEQ ID NO: 595403 - protein, 16 aa, Homo sapiens
  CDR3 for alpha chain variable domain of TCR clone 297702 (TRAV14/DV4, TRAJ54)
CAMREGRIQGAQKLVF

SEQ ID NO: 595404 - protein, 12 aa, Homo sapiens
  CDR3 for beta chain variable domain of TCR clone 297702 (TRBV5-4, TRBJ2-5)
CANSSTRETQYF

SEQ ID NO: 595405 - protein, 15 aa, Homo sapiens
  CDR3 for alpha chain variable domain of TCR clone 297703 (TRAV3, TRAJ9)
CAVRARNTGGFKTIF

SEQ ID NO: 595406 - protein, 12 aa, Homo sapiens
  CDR3 for beta chain variable domain of TCR clone 297703 (TRBV12-4, TRBJ2-1)
CASSLQGSEQFF

SEQ ID NO: 595407 - protein, 14 aa, Homo sapiens
  CDR3 for alpha chain variable domain of TCR clone 297704 (TRAV9-2, TRAJ39)
CALYIYNAGNMLTF

SEQ ID NO: 595408 - protein, 15 aa, Homo sapiens
  CDR3 for beta chain variable domain of TCR clone 297704 (TRBV7-2, TRBJ2-7)
CASSLDPAQGQEQYF

SEQ ID NO: 595409 - protein, 12 aa, Homo sapiens
  CDR3 for alpha chain variable domain of TCR clone 297705 (TRAV2, TRAJ37)
CAVTMNTGKLIF

SEQ ID NO: 595410 - protein, 15 aa, Homo sapiens
  CDR3 for beta chain variable domain of TCR clone 297705 (TRBV5-1, TRBJ2-5)
CASSFGGRPQETQYF

SEQ ID NO: 595411 - protein, 16 aa, Homo sapiens
  CDR3 for alpha chain variable domain of TCR clone 297706 (TRAV26-2, TRAJ45)
CTTASPIGGGADGLTF

SEQ ID NO: 595412 - protein, 20 aa, Homo sapiens
  CDR3 for beta chain variable domain of TCR clone 297706 (TRBV28, TRBJ2-1)
CSSTPIGRSPGLAGENEQFF

SEQ ID NO: 595413 - protein, 14 aa, Homo sapiens
  CDR3 for alpha chain variable domain of TCR clone 297707 (TRAV8-6, TRAJ52)
CAVIGGTSYGKLTF

SEQ ID NO: 595414 - protein, 16 aa, Homo sapiens
  CDR3 for beta chain variable domain of TCR clone 297707 (TRBV7-7, TRBJ2-1)
CASSLASGTSYNEQFF

SEQ ID NO: 595415 - protein, 14 aa, Homo sapiens
  CDR3 for alpha chain variable domain of TCR clone 297708 (TRAV1-2, TRAJ8)
CAVREDTGFQKLVF

SEQ ID NO: 595416 - protein, 17 aa, Homo sapiens
  CDR3 for beta chain variable domain of TCR clone 297708 (TRBV23-1, TRBJ2-1)
CISAPAVNRDQGGEQFF

SEQ ID NO: 595417 - protein, 14 aa, Homo sapiens
  CDR3 for alpha chain variable domain of TCR clone 297709 (TRAV13-1, TRAJ35)
CAASKGGFGNVLHC

SEQ ID NO: 595418 - protein, 15 aa, Homo sapiens
  CDR3 for beta chain variable domain of TCR clone 297709 (TRBV7-3, TRBJ1-5)
CASSQGHQPNQPQHF

SEQ ID NO: 595419 - protein, 18 aa, Homo sapiens
  CDR3 for alpha chain variable domain of TCR clone 297710 (TRAV21, TRAJ52)
CAVRPSPAGGTSHGKLTI

SEQ ID NO: 595420 - protein, 17 aa, Homo sapiens
  CDR3 for beta chain variable domain of TCR clone 297710 (TRBV13, TRBJ2-3)
CASSLSRVAGGRNTQYF

SEQ ID NO: 595421 - protein, 14 aa, Homo sapiens
  CDR3 for alpha chain variable domain of TCR clone 297711 (TRAV35, TRAJ22)
CAGLRPGSARQLPF

SEQ ID NO: 595422 - protein, 16 aa, Homo sapiens
  CDR3 for beta chain variable domain of TCR clone 297711 (TRBV6-1, TRBJ2-5)
CASSETLDRGAETQYF

SEQ ID NO: 595423 - protein, 13 aa, Homo sapiens
  CDR3 for alpha chain variable domain of TCR clone 297712 (TRAV8-3, TRAJ28)
CAVGAVGSYQLTF

SEQ ID NO: 595424 - protein, 14 aa, Homo sapiens
  CDR3 for beta chain variable domain of TCR clone 297712 (TRBV7-9, TRBJ1-5)
CASSQGHPNQPQHF

SEQ ID NO: 595425 - protein, 14 aa, Homo sapiens
  CDR3 for alpha chain variable domain of TCR clone 297713 (TRAV30, TRAJ33)
CGTERRSSNYQLIW

SEQ ID NO: 595426 - protein, 16 aa, Homo sapiens
  CDR3 for beta chain variable domain of TCR clone 297713 (TRBV7-3, TRBJ2-2)
CASSLKRGTLSGELFF

SEQ ID NO: 595427 - protein, 11 aa, Homo sapiens
  CDR3 for alpha chain variable domain of TCR clone 297714 (TRAV23/DV6, TRAJ58)
CAARLLRGETS

SEQ ID NO: 595428 - protein, 14 aa, Homo sapiens
  CDR3 for beta chain variable domain of TCR clone 297714 (TRBV7-6, TRBJ2-3)
CASSLGTVTDTQYF

SEQ ID NO: 595429 - protein, 16 aa, Homo sapiens
  CDR3 for alpha chain variable domain of TCR clone 297715 (TRAV12-2, TRAJ32)
CAVNLGQGGATNKPIF

SEQ ID NO: 595430 - protein, 16 aa, Homo sapiens
  CDR3 for beta chain variable domain of TCR clone 297715 (TRBV9, TRBJ2-7)
CASSVGLGGGTYEQYF

SEQ ID NO: 595431 - protein, 12 aa, Homo sapiens
  CDR3 for alpha chain variable domain of TCR clone 297716 (TRAV16, TRAJ26)
CALRSYGQNFVF

SEQ ID NO: 595432 - protein, 14 aa, Homo sapiens
  CDR3 for beta chain variable domain of TCR clone 297716 (TRBV7-3, TRBJ1-1)
CASSLKGGNTEAFF

SEQ ID NO: 595433 - protein, 14 aa, Homo sapiens
  CDR3 for alpha chain variable domain of TCR clone 297717 (TRAV29/DV5, TRAJ36)
CAARRKTGANNLFF

SEQ ID NO: 595434 - protein, 15 aa, Homo sapiens
  CDR3 for beta chain variable domain of TCR clone 297717 (TRBV15, TRBJ1-5)
CATSREQGGNQPQHF

SEQ ID NO: 595435 - protein, 12 aa, Homo sapiens
  CDR3 for alpha chain variable domain of TCR clone 297718 (TRAV12-3, TRAJ17)
CAMTLTGNKITF

SEQ ID NO: 595436 - protein, 14 aa, Homo sapiens
  CDR3 for beta chain variable domain of TCR clone 297718 (TRBV18, TRBJ2-7)
CASSPRGGAYEQYF

SEQ ID NO: 595437 - protein, 14 aa, Homo sapiens
  CDR3 for alpha chain variable domain of TCR clone 297719 (TRAV3, TRAJ22)
CAVRDYGSARQLTF

SEQ ID NO: 595438 - protein, 13 aa, Homo sapiens
  CDR3 for beta chain variable domain of TCR clone 297719 (TRBV11-2, TRBJ2-5)
YASGHGAKETQYF

SEQ ID NO: 595439 - protein, 18 aa, Homo sapiens
  CDR3 for alpha chain variable domain of TCR clone 297720 (TRAV21, TRAJ52)
CAVRPSPAGGTSYGKLTF

SEQ ID NO: 595440 - protein, 13 aa, Homo sapiens
  CDR3 for beta chain variable domain of TCR clone 297720 (TRBV7-3, TRBJ1-1)
CAISQDWGAEAFF

SEQ ID NO: 595441 - protein, 12 aa, Homo sapiens
  CDR3 for alpha chain variable domain of TCR clone 297721 (TRAV12-1, TRAJ40)
CVVPSGNYKYIF

SEQ ID NO: 595442 - protein, 15 aa, Homo sapiens
  CDR3 for beta chain variable domain of TCR clone 297721 (TRBV12-4, TRBJ2-1)
CASSPLSGRNNEQFF

SEQ ID NO: 595443 - protein, 12 aa, Homo sapiens
  CDR3 for alpha chain variable domain of TCR clone 297722 (TRAV13-1, TRAJ48)
CAANFGNEKLTF

SEQ ID NO: 595444 - protein, 14 aa, Homo sapiens
  CDR3 for beta chain variable domain of TCR clone 297722 (TRBV7-9, TRBJ2-2)
CASSLGHRTGELFF

SEQ ID NO: 595445 - protein, 11 aa, Homo sapiens
  CDR3 for alpha chain variable domain of TCR clone 297723 (TRAV3, TRAJ21)
CAVGNFNKFYF

SEQ ID NO: 595446 - protein, 17 aa, Homo sapiens
  CDR3 for beta chain variable domain of TCR clone 297723 (TRBV20-1, TRBJ2-1)
CSASSSGLAGSYSEQFF

SEQ ID NO: 595447 - protein, 13 aa, Homo sapiens
  CDR3 for alpha chain variable domain of TCR clone 297724 (TRAV12-3, TRAJ7)
CAMTPYGNNRLAF

SEQ ID NO: 595448 - protein, 14 aa, Homo sapiens
  CDR3 for beta chain variable domain of TCR clone 297724 (TRBV7-2, TRBJ2-7)
CASSLYPGRYEQYF

SEQ ID NO: 595449 - protein, 14 aa, Homo sapiens
  CDR3 for alpha chain variable domain of TCR clone 297725 (TRAV26-1, TRAJ38)
CITDNAGNNRKLIW

SEQ ID NO: 595450 - protein, 13 aa, Homo sapiens
  CDR3 for beta chain variable domain of TCR clone 297725 (TRBV20-1, TRBJ1-1)
YSARGGGNTEAFF

SEQ ID NO: 595451 - protein, 16 aa, Homo sapiens
  CDR3 for alpha chain variable domain of TCR clone 297726 (TRAV27, TRAJ45)
CPPRGGRGGGADGLTF

SEQ ID NO: 595452 - protein, 16 aa, Homo sapiens
  CDR3 for beta chain variable domain of TCR clone 297726 (TRBV7-2, TRBJ1-3)
CASSRLEASSGNTIYF

SEQ ID NO: 595453 - protein, 15 aa, Homo sapiens
  CDR3 for alpha chain variable domain of TCR clone 297727 (TRAV4, TRAJ28)
CLVEGSGAGSYQLTF

SEQ ID NO: 595454 - protein, 17 aa, Homo sapiens
  CDR3 for beta chain variable domain of TCR clone 297727 (TRBV7-3, TRBJ2-3)
CASSLMKRMRGADTQYF

SEQ ID NO: 595455 - protein, 15 aa, Homo sapiens
  CDR3 for alpha chain variable domain of TCR clone 297728 (TRAV2, TRAJ37)
CAVEDGYNNTGKPIF

SEQ ID NO: 595456 - protein, 13 aa, Homo sapiens
  CDR3 for beta chain variable domain of TCR clone 297728 (TRBV20-1, TRBJ1-6)
CSTFREGNSPLHF

SEQ ID NO: 595457 - protein, 16 aa, Homo sapiens
  CDR3 for alpha chain variable domain of TCR clone 297729 (TRAV30, TRAJ49)
SAAQRVGPNTGNQFYF

SEQ ID NO: 595458 - protein, 17 aa, Homo sapiens
  CDR3 for beta chain variable domain of TCR clone 297729 (TRBV2, TRBJ1-4)
CASSKRELTQGEEKLFF

SEQ ID NO: 595459 - protein, 17 aa, Homo sapiens
  CDR3 for alpha chain variable domain of TCR clone 297730 (TRAV12-2, TRAJ53)
CAPLIDSQEGSNYKLTF

SEQ ID NO: 595460 - protein, 12 aa, Homo sapiens
  CDR3 for beta chain variable domain of TCR clone 297730 (TRBV11-2, TRBJ2-2)
CASSLGGGELFF

SEQ ID NO: 595461 - protein, 14 aa, Homo sapiens
  CDR3 for alpha chain variable domain of TCR clone 297731 (TRAV35, TRAJ50)
CAGHRKTSYEKVVF

SEQ ID NO: 595462 - protein, 13 aa, Homo sapiens
  CDR3 for beta chain variable domain of TCR clone 297731 (TRBV7-7, TRBJ2-3)
CASSLSRADTQDF

SEQ ID NO: 595463 - protein, 14 aa, Homo sapiens
  CDR3 for alpha chain variable domain of TCR clone 297732 (TRAV27, TRAJ41)
CAVRTQIPGMHSTS

SEQ ID NO: 595464 - protein, 15 aa, Homo sapiens
  CDR3 for beta chain variable domain of TCR clone 297732 (TRBV9, TRBJ1-6)
CASSVAGTGDSPLLF

SEQ ID NO: 595465 - protein, 16 aa, Homo sapiens
  CDR3 for alpha chain variable domain of TCR clone 297733 (TRAV3, TRAJ37)
CAGRGKGSVNTGKIIF

SEQ ID NO: 595466 - protein, 13 aa, Homo sapiens
  CDR3 for beta chain variable domain of TCR clone 297733 (TRBV14, TRBJ2-7)
CASSQDRRYEQYF

SEQ ID NO: 595467 - protein, 13 aa, Homo sapiens
  CDR3 for alpha chain variable domain of TCR clone 297734 (TRAV3, TRAJ27)
CAVRPLGAGKSTF

SEQ ID NO: 595468 - protein, 15 aa, Homo sapiens
  CDR3 for beta chain variable domain of TCR clone 297734 (TRBV5-1, TRBJ1-4)
CASSLTADSDEKLFF

SEQ ID NO: 595469 - protein, 16 aa, Homo sapiens
  CDR3 for alpha chain variable domain of TCR clone 297735 (TRAV30, TRAJ24)
CGTEIVDDDSWGKFQF

SEQ ID NO: 595470 - protein, 14 aa, Homo sapiens
  CDR3 for beta chain variable domain of TCR clone 297735 (TRBV20-1, TRBJ1-1)
CSAQTRIGGTEAFF

SEQ ID NO: 595471 - protein, 13 aa, Homo sapiens
  CDR3 for alpha chain variable domain of TCR clone 297736 (TRAV1-2, TRAJ12)
CAVSMDSSYKLIF

SEQ ID NO: 595472 - protein, 13 aa, Homo sapiens
  CDR3 for beta chain variable domain of TCR clone 297736 (TRBV19, TRBJ1-2)
CASSVPGQDGYTF

SEQ ID NO: 595473 - protein, 12 aa, Homo sapiens
  CDR3 for alpha chain variable domain of TCR clone 297737 (TRAV12-3, TRAJ17)
CAMKLTGNKLTF

SEQ ID NO: 595474 - protein, 13 aa, Homo sapiens
  CDR3 for beta chain variable domain of TCR clone 297737 (TRBV12-4, TRBJ1-1)
CASSPGTGFEAFF

SEQ ID NO: 595475 - protein, 16 aa, Homo sapiens
  CDR3 for alpha chain variable domain of TCR clone 297738 (TRAV1-2, TRAJ10)
CAVRGVLTGGGNKLTF

SEQ ID NO: 595476 - protein, 16 aa, Homo sapiens
  CDR3 for beta chain variable domain of TCR clone 297738 (TRBV7-3, TRBJ2-1)
CASSKPLAGGFNEQFF

SEQ ID NO: 595477 - protein, 10 aa, Homo sapiens
  CDR3 for alpha chain variable domain of TCR clone 297739 (TRAV2, TRAJ43)
CCGNNNDMRF

SEQ ID NO: 595478 - protein, 13 aa, Homo sapiens
  CDR3 for beta chain variable domain of TCR clone 297739 (TRBV7-3, TRBJ1-1)
CASSQDWGAEAFF

SEQ ID NO: 595479 - protein, 11 aa, Homo sapiens
  CDR3 for alpha chain variable domain of TCR clone 297740 (TRAV17, TRAJ43)
CATPRSNDIRF

SEQ ID NO: 595480 - protein, 14 aa, Homo sapiens
  CDR3 for beta chain variable domain of TCR clone 297740 (TRBV7-2, TRBJ2-7)
CASSPKTSFYEQYF

SEQ ID NO: 595481 - protein, 15 aa, Homo sapiens
  CDR3 for alpha chain variable domain of TCR clone 297741 (TRAV26-1, TRAJ17)
CIVRVVKAAGNKLTF

SEQ ID NO: 595482 - protein, 16 aa, Homo sapiens
  CDR3 for beta chain variable domain of TCR clone 297741 (TRBV7-9, TRBJ2-1)
SASSLVSGPSYNEQFF

SEQ ID NO: 595483 - protein, 15 aa, Homo sapiens
  CDR3 for alpha chain variable domain of TCR clone 297742 (TRAV17, TRAJ57)
CATGPSPGGSEKLVF

SEQ ID NO: 595484 - protein, 15 aa, Homo sapiens
  CDR3 for beta chain variable domain of TCR clone 297742 (TRBV6-3, TRBJ2-7)
CASSSPGTVFYEQYF

SEQ ID NO: 595485 - protein, 13 aa, Homo sapiens
  CDR3 for alpha chain variable domain of TCR clone 297743 (TRAV26-1, TRAJ33)
CIVRVDSNYQLIW

SEQ ID NO: 595486 - protein, 16 aa, Homo sapiens
  CDR3 for beta chain variable domain of TCR clone 297743 (TRBV24-1, TRBJ2-3)
CATSDPGTGATDTQYF

SEQ ID NO: 595487 - protein, 14 aa, Homo sapiens
  CDR3 for alpha chain variable domain of TCR clone 297744 (TRAV1-2, TRAJ8)
CAVRDDTGFQKLVF

SEQ ID NO: 595488 - protein, 11 aa, Homo sapiens
  CDR3 for beta chain variable domain of TCR clone 297744 (TRBV11-3, TRBJ2-7)
CASSRTYEQYF

SEQ ID NO: 595489 - protein, 13 aa, Homo sapiens
  CDR3 for alpha chain variable domain of TCR clone 297745 (TRAV21, TRAJ27)
CAARPGNAGKSTF

SEQ ID NO: 595490 - protein, 14 aa, Homo sapiens
  CDR3 for beta chain variable domain of TCR clone 297745 (TRBV7-6, TRBJ2-3)
CASSLGTGTETQYF

SEQ ID NO: 595491 - protein, 15 aa, Homo sapiens
  CDR3 for alpha chain variable domain of TCR clone 297746 (TRAV20, TRAJ43)
CAVQAGKSSNNDMRF

SEQ ID NO: 595492 - protein, 13 aa, Homo sapiens
  CDR3 for beta chain variable domain of TCR clone 297746 (TRBV20-1, TRBJ1-1)
CSPRGGGNTEAFF

SEQ ID NO: 595493 - protein, 15 aa, Homo sapiens
  CDR3 for alpha chain variable domain of TCR clone 297747 (TRAV8-2, TRAJ40)
CVVFGTTSGTYKYIF

SEQ ID NO: 595494 - protein, 14 aa, Homo sapiens
  CDR3 for beta chain variable domain of TCR clone 297747 (TRBV19, TRBJ2-1)
CASPTFVLSGEQFF

SEQ ID NO: 595495 - protein, 14 aa, Homo sapiens
  CDR3 for alpha chain variable domain of TCR clone 297748 (TRAV12-3, TRAJ13)
CAMKNSGGYQKVTF

SEQ ID NO: 595496 - protein, 15 aa, Homo sapiens
  CDR3 for beta chain variable domain of TCR clone 297748 (TRBV7-9, TRBJ1-4)
CASSATGGNNEKLFF

SEQ ID NO: 595497 - protein, 14 aa, Homo sapiens
  CDR3 for alpha chain variable domain of TCR clone 297749 (TRAV12-1, TRAJ17)
CVVNYKAAGNKLTF

SEQ ID NO: 595498 - protein, 14 aa, Homo sapiens
  CDR3 for beta chain variable domain of TCR clone 297749 (TRBV7-2, TRBJ2-1)
CASSPGLAGNEQFF

SEQ ID NO: 595499 - protein, 15 aa, Homo sapiens
  CDR3 for alpha chain variable domain of TCR clone 297750 (TRAV8-3, TRAJ20)
CAVEAKRSNDYKLSF

SEQ ID NO: 595500 - protein, 12 aa, Homo sapiens
  CDR3 for beta chain variable domain of TCR clone 297750 (TRBV7-2, TRBJ1-2)
CASRDSIYGYTF

SEQ ID NO: 595501 - protein, 14 aa, Homo sapiens
  CDR3 for alpha chain variable domain of TCR clone 297751 (TRAV8-1, TRAJ4)
CAVKFSGGYNKLIF

SEQ ID NO: 595502 - protein, 22 aa, Homo sapiens
  CDR3 for beta chain variable domain of TCR clone 297751 (TRBV7-3, TRBJ2-5)
CASARDRVIVRPRDPVLRARHA

SEQ ID NO: 595503 - protein, 12 aa, Homo sapiens
  CDR3 for alpha chain variable domain of TCR clone 297752 (TRAV12-2, TRAJ26)
CAVNVYGQNFVF

SEQ ID NO: 595504 - protein, 13 aa, Homo sapiens
  CDR3 for beta chain variable domain of TCR clone 297752 (TRBV27, TRBJ1-1)
CASSLSIGAEAFF

SEQ ID NO: 595505 - protein, 13 aa, Homo sapiens
  CDR3 for alpha chain variable domain of TCR clone 297753 (TRAV17, TRAJ57)
TSVLHGGSEKLVF

SEQ ID NO: 595506 - protein, 13 aa, Homo sapiens
  CDR3 for beta chain variable domain of TCR clone 297753 (TRBV7-9, TRBJ2-7)
CASSFAGAYEQYF

SEQ ID NO: 595507 - protein, 16 aa, Homo sapiens
  CDR3 for alpha chain variable domain of TCR clone 297754 (TRAV21, TRAJ37)
CAVRTAGSSHTGKLTF

SEQ ID NO: 595508 - protein, 13 aa, Homo sapiens
  CDR3 for beta chain variable domain of TCR clone 297754 (TRBV7-9, TRBJ2-5)
CASLPSGRETQYF

SEQ ID NO: 595509 - protein, 14 aa, Homo sapiens
  CDR3 for alpha chain variable domain of TCR clone 297755 (TRAV38-1, TRAJ45)
CAYYSGGCADGLTF

SEQ ID NO: 595510 - protein, 15 aa, Homo sapiens
  CDR3 for beta chain variable domain of TCR clone 297755 (TRBV11-2, TRBJ2-1)
CASSKNRGLIYEQFF

SEQ ID NO: 595511 - protein, 16 aa, Homo sapiens
  CDR3 for alpha chain variable domain of TCR clone 297756 (TRAV30, TRAJ24)
CGTEIADADSWGKFQF

SEQ ID NO: 595512 - protein, 11 aa, Homo sapiens
  CDR3 for beta chain variable domain of TCR clone 297756 (TRBV12-5, TRBJ2-3)
CASTATDTQYF

SEQ ID NO: 595513 - protein, 10 aa, Homo sapiens
  CDR3 for alpha chain variable domain of TCR clone 297757 (TRAV12-2, TRAJ20)
CAVYFYKLSF

SEQ ID NO: 595514 - protein, 14 aa, Homo sapiens
  CDR3 for beta chain variable domain of TCR clone 297757 (TRBV10-3, TRBJ2-2)
CAISEVSHSGELFF

SEQ ID NO: 595515 - protein, 12 aa, Homo sapiens
  CDR3 for alpha chain variable domain of TCR clone 297758 (TRAV2, TRAJ9)
CAVGAGGFKTIF

SEQ ID NO: 595516 - protein, 17 aa, Homo sapiens
  CDR3 for beta chain variable domain of TCR clone 297758 (TRBV4-2, TRBJ2-5)
CASSPGRWRNFQETQYF

SEQ ID NO: 595517 - protein, 14 aa, Homo sapiens
  CDR3 for alpha chain variable domain of TCR clone 297759 (TRAV12-2, TRAJ17)
CAVLFNAAGNKRTF

SEQ ID NO: 595518 - protein, 17 aa, Homo sapiens
  CDR3 for beta chain variable domain of TCR clone 297759 (TRBV20-1, TRBJ2-2)
CSASGSGQGGLTGELFF

SEQ ID NO: 595519 - protein, 19 aa, Homo sapiens
  CDR3 for alpha chain variable domain of TCR clone 297760 (TRAV26-1, TRAJ52)
CIVRAHRNAGGASYGKLTF

SEQ ID NO: 595520 - protein, 13 aa, Homo sapiens
  CDR3 for beta chain variable domain of TCR clone 297760 (TRBV19, TRBJ2-7)
CASRKAGGSEQYF

SEQ ID NO: 595521 - protein, 12 aa, Homo sapiens
  CDR3 for alpha chain variable domain of TCR clone 297761 (TRAV13-2, TRAJ23)
CAERHSGGKLIF

SEQ ID NO: 595522 - protein, 16 aa, Homo sapiens
  CDR3 for beta chain variable domain of TCR clone 297761 (TRBV19, TRBJ2-2)
CASRSPGTGATGELFF

SEQ ID NO: 595523 - protein, 15 aa, Homo sapiens
  CDR3 for alpha chain variable domain of TCR clone 297762 (TRAV2, TRAJ9)
CAVEDRRTGGFKTIF

SEQ ID NO: 595524 - protein, 16 aa, Homo sapiens
  CDR3 for beta chain variable domain of TCR clone 297762 (TRBV24-1, TRBJ2-3)
CATSDPGTGATDTQYF

SEQ ID NO: 595525 - protein, 14 aa, Homo sapiens
  CDR3 for alpha chain variable domain of TCR clone 297763 (TRAV12-2, TRAJ17)
CAVLFKAAGNKLTF

SEQ ID NO: 595526 - protein, 14 aa, Homo sapiens
  CDR3 for beta chain variable domain of TCR clone 297763 (TRBV12-5, TRBJ2-5)
RASGSRTHQETQYF

SEQ ID NO: 595527 - protein, 19 aa, Homo sapiens
  CDR3 for alpha chain variable domain of TCR clone 297764 (TRAV8-3, TRAJ8)
LSTSVLWDPMNTGFQKLVF

SEQ ID NO: 595528 - protein, 16 aa, Homo sapiens
  CDR3 for beta chain variable domain of TCR clone 297764 (TRBV4-2, TRBJ1-1)
CASSQAGFGMNTEAFF

SEQ ID NO: 595529 - protein, 13 aa, Homo sapiens
  CDR3 for alpha chain variable domain of TCR clone 297765 (TRAV3, TRAJ40)
CAVRGSGAYKYIF

SEQ ID NO: 595530 - protein, 15 aa, Homo sapiens
  CDR3 for beta chain variable domain of TCR clone 297765 (TRBV27, TRBJ1-5)
CASSSSVTGNQPQHF

SEQ ID NO: 595531 - protein, 14 aa, Homo sapiens
  CDR3 for alpha chain variable domain of TCR clone 297766 (TRAV12-3, TRAJ54)
CAMRALQGAQKLVF

SEQ ID NO: 595532 - protein, 15 aa, Homo sapiens
  CDR3 for beta chain variable domain of TCR clone 297766 (TRBV19, TRBJ2-4)
CASSTPGIAKNIQYF

SEQ ID NO: 595533 - protein, 13 aa, Homo sapiens
  CDR3 for alpha chain variable domain of TCR clone 297767 (TRAV30, TRAJ24)
CGTVTDSWGTLQF

SEQ ID NO: 595534 - protein, 15 aa, Homo sapiens
  CDR3 for beta chain variable domain of TCR clone 297767 (TRBV19, TRBJ1-1)
CASTSGQIQNTEAFF

SEQ ID NO: 595535 - protein, 13 aa, Homo sapiens
  CDR3 for alpha chain variable domain of TCR clone 297768 (TRAV36/DV7, TRAJ49)
CAVEANTGNQFSF

SEQ ID NO: 595536 - protein, 14 aa, Homo sapiens
  CDR3 for beta chain variable domain of TCR clone 297768 (TRBV20-1, TRBJ2-5)
CSASSGRAAETQYF

SEQ ID NO: 595537 - protein, 11 aa, Homo sapiens
  CDR3 for alpha chain variable domain of TCR clone 297769 (TRAV3, TRAJ21)
CAVGNFNKFYF

SEQ ID NO: 595538 - protein, 15 aa, Homo sapiens
  CDR3 for beta chain variable domain of TCR clone 297769 (TRBV7-6, TRBJ2-1)
CASSSLAGEGNEQFF

SEQ ID NO: 595539 - protein, 17 aa, Homo sapiens
  CDR3 for alpha chain variable domain of TCR clone 297770 (TRAV3, TRAJ42)
CAVRDRDYGGSQGNLIF

SEQ ID NO: 595540 - protein, 16 aa, Homo sapiens
  CDR3 for beta chain variable domain of TCR clone 297770 (TRBV29-1, TRBJ2-7)
CSVEVVGTSGSYEQYF

SEQ ID NO: 595541 - protein, 13 aa, Homo sapiens
  CDR3 for alpha chain variable domain of TCR clone 297771 (TRAV12-2, TRAJ50)
CAVIVTSYDKVIF

SEQ ID NO: 595542 - protein, 14 aa, Homo sapiens
  CDR3 for beta chain variable domain of TCR clone 297771 (TRBV25-1, TRBJ1-1)
CASTHLGGNTEAFF

SEQ ID NO: 595543 - protein, 18 aa, Homo sapiens
  CDR3 for alpha chain variable domain of TCR clone 297772 (TRAV13-1, TRAJ52)
CAAKNPNAGGTSYGKPTF

SEQ ID NO: 595544 - protein, 15 aa, Homo sapiens
  CDR3 for beta chain variable domain of TCR clone 297772 (TRBV28, TRBJ2-3)
CASSPDRQGANTQYF

SEQ ID NO: 595545 - protein, 13 aa, Homo sapiens
  CDR3 for alpha chain variable domain of TCR clone 297773 (TRAV12-1, TRAJ38)
CVVPAGNNRKLIW

SEQ ID NO: 595546 - protein, 14 aa, Homo sapiens
  CDR3 for beta chain variable domain of TCR clone 297773 (TRBV11-2, TRBJ2-5)
CASSALGQQETQYF

SEQ ID NO: 595547 - protein, 13 aa, Homo sapiens
  CDR3 for alpha chain variable domain of TCR clone 297774 (TRAV12-3, TRAJ7)
CATTPYGNNRLAF

SEQ ID NO: 595548 - protein, 13 aa, Homo sapiens
  CDR3 for beta chain variable domain of TCR clone 297774 (TRBV10-3, TRBJ1-2)
CPINADLNYGYTF

SEQ ID NO: 595549 - protein, 13 aa, Homo sapiens
  CDR3 for alpha chain variable domain of TCR clone 297775 (TRAV20, TRAJ21)
CAVEGYNFNKFYF

SEQ ID NO: 595550 - protein, 15 aa, Homo sapiens
  CDR3 for beta chain variable domain of TCR clone 297775 (TRBV7-2, TRBJ2-7)
CASSLKGALTYEQYF

SEQ ID NO: 595551 - protein, 14 aa, Homo sapiens
  CDR3 for alpha chain variable domain of TCR clone 297776 (TRAV29/DV5, TRAJ34)
CAASASRETDKLIF

SEQ ID NO: 595552 - protein, 16 aa, Homo sapiens
  CDR3 for beta chain variable domain of TCR clone 297776 (TRBV2, TRBJ2-5)
CASSEGISGAQETQYF

SEQ ID NO: 595553 - protein, 13 aa, Homo sapiens
  CDR3 for alpha chain variable domain of TCR clone 297777 (TRAV8-3, TRAJ36)
CAVGATGANNLFF

SEQ ID NO: 595554 - protein, 15 aa, Homo sapiens
  CDR3 for beta chain variable domain of TCR clone 297777 (TRBV11-2, TRBJ2-1)
CASSPAGQSLNEQFF

SEQ ID NO: 595555 - protein, 14 aa, Homo sapiens
  CDR3 for alpha chain variable domain of TCR clone 297778 (TRAV1-2, TRAJ27)
CAVRSSTNAGKSTF

SEQ ID NO: 595556 - protein, 15 aa, Homo sapiens
  CDR3 for beta chain variable domain of TCR clone 297778 (TRBV18, TRBJ2-7)
CASSPLQGRTYEQYF

SEQ ID NO: 595557 - protein, 13 aa, Homo sapiens
  CDR3 for alpha chain variable domain of TCR clone 297779 (TRAV12-3, TRAJ5)
CAMIYTGRRALTF

SEQ ID NO: 595558 - protein, 12 aa, Homo sapiens
  CDR3 for beta chain variable domain of TCR clone 297779 (TRBV18, TRBJ1-4)
GASSPSREKLFF

SEQ ID NO: 595559 - protein, 15 aa, Homo sapiens
  CDR3 for alpha chain variable domain of TCR clone 297780 (TRAV8-3, TRAJ11)
CAVGLLNSGYSTLTF

SEQ ID NO: 595560 - protein, 16 aa, Homo sapiens
  CDR3 for beta chain variable domain of TCR clone 297780 (TRBV7-9, TRBJ1-2)
CASSLVFSSGEDGYTF

SEQ ID NO: 595561 - protein, 10 aa, Homo sapiens
  CDR3 for alpha chain variable domain of TCR clone 297781 (TRAV13-1, TRAJ7)
LIGGNNRLAF

SEQ ID NO: 595562 - protein, 14 aa, Homo sapiens
  CDR3 for beta chain variable domain of TCR clone 297781 (TRBV16, TRBJ1-1)
CASSQAGPNTESFF

SEQ ID NO: 595563 - protein, 15 aa, Homo sapiens
  CDR3 for alpha chain variable domain of TCR clone 297782 (TRAV23/DV6, TRAJ13)
CAAWPGGGGYQKVTF

SEQ ID NO: 595564 - protein, 17 aa, Homo sapiens
  CDR3 for beta chain variable domain of TCR clone 297782 (TRBV19, TRBJ2-7)
CASSISFYDSYPYEQHF

SEQ ID NO: 595565 - protein, 13 aa, Homo sapiens
  CDR3 for alpha chain variable domain of TCR clone 297783 (TRAV12-3, TRAJ43)
CAMIRPNNNDMRL

SEQ ID NO: 595566 - protein, 12 aa, Homo sapiens
  CDR3 for beta chain variable domain of TCR clone 297783 (TRBV11-2, TRBJ2-5)
CDSSLGQETQYF

SEQ ID NO: 595567 - protein, 17 aa, Homo sapiens
  CDR3 for alpha chain variable domain of TCR clone 297784 (TRAV38-2/DV8, TRAJ28)
CAFLTLYSGAGSYQITF

SEQ ID NO: 595568 - protein, 14 aa, Homo sapiens
  CDR3 for beta chain variable domain of TCR clone 297784 (TRBV7-2, TRBJ2-5)
CASSLSGGGETQYF

SEQ ID NO: 595569 - protein, 13 aa, Homo sapiens
  CDR3 for alpha chain variable domain of TCR clone 297785 (TRAV13-2, TRAJ54)
CAENYQVAQKLVF

SEQ ID NO: 595570 - protein, 15 aa, Homo sapiens
  CDR3 for beta chain variable domain of TCR clone 297785 (TRBV3-1, TRBJ2-5)
CASSRGLALRETQYF

SEQ ID NO: 595571 - protein, 12 aa, Homo sapiens
  CDR3 for alpha chain variable domain of TCR clone 297786 (TRAV1-1, TRAJ24)
CAATDSWGKLQF

SEQ ID NO: 595572 - protein, 14 aa, Homo sapiens
  CDR3 for beta chain variable domain of TCR clone 297786 (TRBV20-1, TRBJ2-7)
CSAKRGRSSYEQYF

SEQ ID NO: 595573 - protein, 13 aa, Homo sapiens
  CDR3 for alpha chain variable domain of TCR clone 297787 (TRAV21, TRAJ57)
CAVTQGGSEKLVF

SEQ ID NO: 595574 - protein, 15 aa, Homo sapiens
  CDR3 for beta chain variable domain of TCR clone 297787 (TRBV11-2, TRBJ2-1)
CASSKNRGLIYEQFF

SEQ ID NO: 595575 - protein, 13 aa, Homo sapiens
  CDR3 for alpha chain variable domain of TCR clone 297788 (TRAV21, TRAJ57)
CAVTQGGSEKLVF

SEQ ID NO: 595576 - protein, 18 aa, Homo sapiens
  CDR3 for beta chain variable domain of TCR clone 297788 (TRBV5-5, TRBJ1-5)
CASSLRQVKGSSNQPQHF

SEQ ID NO: 595577 - protein, 15 aa, Homo sapiens
  CDR3 for alpha chain variable domain of TCR clone 297789 (TRAV8-3, TRAJ6)
CDVGPLGRGSYIPTF

SEQ ID NO: 595578 - protein, 14 aa, Homo sapiens
  CDR3 for beta chain variable domain of TCR clone 297789 (TRBV19, TRBJ2-2)
CASSTGQGAGELFF

SEQ ID NO: 595579 - protein, 14 aa, Homo sapiens
  CDR3 for alpha chain variable domain of TCR clone 297790 (TRAV17, TRAJ22)
CATSPSGSARQLTF

SEQ ID NO: 595580 - protein, 15 aa, Homo sapiens
  CDR3 for beta chain variable domain of TCR clone 297790 (TRBV5-1, TRBJ2-7)
CASSLMTSGSNEQYF

SEQ ID NO: 595581 - protein, 12 aa, Homo sapiens
  CDR3 for alpha chain variable domain of TCR clone 297791 (TRAV38-1, TRAJ32)
CAPLGATNKLIF

SEQ ID NO: 595582 - protein, 14 aa, Homo sapiens
  CDR3 for beta chain variable domain of TCR clone 297791 (TRBV29-1, TRBJ2-5)
CRVETSGSGETQYF

SEQ ID NO: 595583 - protein, 15 aa, Homo sapiens
  CDR3 for alpha chain variable domain of TCR clone 297792 (TRAV3, TRAJ5)
CAVRDSKTGMRALTF

SEQ ID NO: 595584 - protein, 15 aa, Homo sapiens
  CDR3 for beta chain variable domain of TCR clone 297792 (TRBV7-8, TRBJ2-1)
CASSLADSLYNEQFF

SEQ ID NO: 595585 - protein, 13 aa, Homo sapiens
  CDR3 for alpha chain variable domain of TCR clone 297793 (TRAV17, TRAJ22)
CAHHSGTARQLTF

SEQ ID NO: 595586 - protein, 14 aa, Homo sapiens
  CDR3 for beta chain variable domain of TCR clone 297793 (TRBV16, TRBJ1-1)
CASSQAGPNTEAFI

SEQ ID NO: 595587 - protein, 12 aa, Homo sapiens
  CDR3 for alpha chain variable domain of TCR clone 297794 (TRAV1-1, TRAJ8)
CAGGTGFKKLVL

SEQ ID NO: 595588 - protein, 15 aa, Homo sapiens
  CDR3 for beta chain variable domain of TCR clone 297794 (TRBV7-9, TRBJ1-4)
CASSRTGGFNEKLFF

SEQ ID NO: 595589 - protein, 12 aa, Homo sapiens
  CDR3 for alpha chain variable domain of TCR clone 297795 (TRAV16, TRAJ13)
CITLRGYQKVTF

SEQ ID NO: 595590 - protein, 17 aa, Homo sapiens
  CDR3 for beta chain variable domain of TCR clone 297795 (TRBV28, TRBJ2-5)
CASRRQGGLAGAETQYF

SEQ ID NO: 595591 - protein, 13 aa, Homo sapiens
  CDR3 for alpha chain variable domain of TCR clone 297796 (TRAV13-1, TRAJ21)
CAASIYNFNKFYF

SEQ ID NO: 595592 - protein, 15 aa, Homo sapiens
  CDR3 for beta chain variable domain of TCR clone 297796 (TRBV7-8, TRBJ1-5)
CANSLAGQPNQPQHF

SEQ ID NO: 595593 - protein, 14 aa, Homo sapiens
  CDR3 for alpha chain variable domain of TCR clone 297797 (TRAV12-1, TRAJ12)
CVVTRMDSSYKLIF

SEQ ID NO: 595594 - protein, 15 aa, Homo sapiens
  CDR3 for beta chain variable domain of TCR clone 297797 (TRBV2, TRBJ2-1)
CASSDEREGDNEQFF

SEQ ID NO: 595595 - protein, 14 aa, Homo sapiens
  CDR3 for alpha chain variable domain of TCR clone 297798 (TRAV3, TRAJ9)
CAVRGNTGGFKTIF

SEQ ID NO: 595596 - protein, 14 aa, Homo sapiens
  CDR3 for beta chain variable domain of TCR clone 297798 (TRBV4-2, TRBJ2-1)
CASGLDRAYNEQFF

SEQ ID NO: 595597 - protein, 12 aa, Homo sapiens
  CDR3 for alpha chain variable domain of TCR clone 297799 (TRAV21, TRAJ39)
CAADNAGNMHTF

SEQ ID NO: 595598 - protein, 13 aa, Homo sapiens
  CDR3 for beta chain variable domain of TCR clone 297799 (TRBV6-1, TRBJ1-1)
CASSRQGNTEAFF

SEQ ID NO: 595599 - protein, 13 aa, Homo sapiens
  CDR3 for alpha chain variable domain of TCR clone 297800 (TRAV1-2, TRAJ17)
CAVGKAAGNKLTF

SEQ ID NO: 595600 - protein, 15 aa, Homo sapiens
  CDR3 for beta chain variable domain of TCR clone 297800 (TRBV12-4, TRBJ2-5)
CASSPPTGLQETQYF

SEQ ID NO: 595601 - protein, 17 aa, Homo sapiens
  CDR3 for alpha chain variable domain of TCR clone 297801 (TRAV3, TRAJ12)
CAVRDGGRMDSSYKLIS

SEQ ID NO: 595602 - protein, 12 aa, Homo sapiens
  CDR3 for beta chain variable domain of TCR clone 297801 (TRBV11-2, TRBJ2-2)
CASSLGGGELFF

SEQ ID NO: 595603 - protein, 15 aa, Homo sapiens
  CDR3 for alpha chain variable domain of TCR clone 297802 (TRAV3, TRAJ22)
CAVRDRGGSARQPTF

SEQ ID NO: 595604 - protein, 15 aa, Homo sapiens
  CDR3 for beta chain variable domain of TCR clone 297802 (TRBV19, TRBJ2-5)
CASSIVRASQETQYF

SEQ ID NO: 595605 - protein, 14 aa, Homo sapiens
  CDR3 for alpha chain variable domain of TCR clone 297803 (TRAV12-1, TRAJ10)
CVAILTGGGNKLTF

SEQ ID NO: 595606 - protein, 15 aa, Homo sapiens
  CDR3 for beta chain variable domain of TCR clone 297803 (TRBV20-1, TRBJ2-7)
CSARGFRPQTYGQYF

SEQ ID NO: 595607 - protein, 11 aa, Homo sapiens
  CDR3 for alpha chain variable domain of TCR clone 297804 (TRAV35, TRAJ34)
CWARNTDKLIL

SEQ ID NO: 595608 - protein, 13 aa, Homo sapiens
  CDR3 for beta chain variable domain of TCR clone 297804 (TRBV10-3, TRBJ2-7)
CASKLAVNYEQYF

SEQ ID NO: 595609 - protein, 13 aa, Homo sapiens
  CDR3 for alpha chain variable domain of TCR clone 297805 (TRAV38-1, TRAJ42)
CARWGGSQGNIIF

SEQ ID NO: 595610 - protein, 18 aa, Homo sapiens
  CDR3 for beta chain variable domain of TCR clone 297805 (TRBV11-2, TRBJ2-3)
CASSLGGASRGAPNTQYF

SEQ ID NO: 595611 - protein, 11 aa, Homo sapiens
  CDR3 for alpha chain variable domain of TCR clone 297806 (TRAV26-1, TRAJ37)
CIVRVGRQLIF

SEQ ID NO: 595612 - protein, 13 aa, Homo sapiens
  CDR3 for beta chain variable domain of TCR clone 297806 (TRBV14, TRBJ1-2)
CASSEDRRYGYTF

SEQ ID NO: 595613 - protein, 16 aa, Homo sapiens
  CDR3 for alpha chain variable domain of TCR clone 297807 (TRAV30, TRAJ24)
CGTEIVDADSWGKFQF

SEQ ID NO: 595614 - protein, 13 aa, Homo sapiens
  CDR3 for beta chain variable domain of TCR clone 297807 (TRBV11-2, TRBJ2-5)
CASGRGPSETQYF

SEQ ID NO: 595615 - protein, 15 aa, Homo sapiens
  CDR3 for alpha chain variable domain of TCR clone 297808 (TRAV35, TRAJ40)
CDGQLGTSGTYKYIF

SEQ ID NO: 595616 - protein, 14 aa, Homo sapiens
  CDR3 for beta chain variable domain of TCR clone 297808 (TRBV7-3, TRBJ2-1)
CASSLAGGTNEQFF

SEQ ID NO: 595617 - protein, 15 aa, Homo sapiens
  CDR3 for alpha chain variable domain of TCR clone 297809 (TRAV12-1, TRAJ44)
CVVFVNTGTASKLTF

SEQ ID NO: 595618 - protein, 15 aa, Homo sapiens
  CDR3 for beta chain variable domain of TCR clone 297809 (TRBV7-3, TRBJ2-1)
CASSFGQSNYNEQFF

SEQ ID NO: 595619 - protein, 13 aa, Homo sapiens
  CDR3 for alpha chain variable domain of TCR clone 297810 (TRAV20, TRAJ34)
CAVSSYNTDKLIF

SEQ ID NO: 595620 - protein, 13 aa, Homo sapiens
  CDR3 for beta chain variable domain of TCR clone 297810 (TRBV7-9, TRBJ1-2)
CASSLKQNYGHTF

SEQ ID NO: 595621 - protein, 17 aa, Homo sapiens
  CDR3 for alpha chain variable domain of TCR clone 297811 (TRAV12-1, TRAJ52)
CVVTPNAGGTSYGKLTF

SEQ ID NO: 595622 - protein, 17 aa, Homo sapiens
  CDR3 for beta chain variable domain of TCR clone 297811 (TRBV20-1, TRBJ2-1)
CSASSSGLAGSYNEQFF

SEQ ID NO: 595623 - protein, 18 aa, Homo sapiens
  CDR3 for alpha chain variable domain of TCR clone 297812 (TRAV9-2, TRAJ52)
CALSRHTAGGTSYGKLTF

SEQ ID NO: 595624 - protein, 13 aa, Homo sapiens
  CDR3 for beta chain variable domain of TCR clone 297812 (TRBV7-9, TRBJ1-2)
CASSLKQNYGYTF

SEQ ID NO: 595625 - protein, 20 aa, Homo sapiens
  CDR3 for alpha chain variable domain of TCR clone 297813 (TRAV30, TRAJ54)
SAAQSRSETQVVQGAQKLVF

SEQ ID NO: 595626 - protein, 11 aa, Homo sapiens
  CDR3 for beta chain variable domain of TCR clone 297813 (TRBV25-1, TRBJ2-4)
CQSRDQNIQYV

SEQ ID NO: 595627 - protein, 14 aa, Homo sapiens
  CDR3 for alpha chain variable domain of TCR clone 297814 (TRAV12-2, TRAJ13)
CAVKKTGGYQKVTF

SEQ ID NO: 595628 - protein, 15 aa, Homo sapiens
  CDR3 for beta chain variable domain of TCR clone 297814 (TRBV9, TRBJ2-3)
CASSVATGHTDTQYF

SEQ ID NO: 595629 - protein, 12 aa, Homo sapiens
  CDR3 for alpha chain variable domain of TCR clone 297815 (TRAV3, TRAJ20)
CAVRDGDYKLSF

SEQ ID NO: 595630 - protein, 15 aa, Homo sapiens
  CDR3 for beta chain variable domain of TCR clone 297815 (TRBV11-2, TRBJ2-1)
CASSSPATRYNEQFF

SEQ ID NO: 595631 - protein, 14 aa, Homo sapiens
  CDR3 for alpha chain variable domain of TCR clone 297816 (TRAV1-1, TRAJ27)
CAVVYNTNAGKPTF

SEQ ID NO: 595632 - protein, 15 aa, Homo sapiens
  CDR3 for beta chain variable domain of TCR clone 297816 (TRBV7-2, TRBJ2-1)
CASSSGLAGGNEQFF

SEQ ID NO: 595633 - protein, 13 aa, Homo sapiens
  CDR3 for alpha chain variable domain of TCR clone 297817 (TRAV8-3, TRAJ54)
CAVSIQGAQKLVF

SEQ ID NO: 595634 - protein, 13 aa, Homo sapiens
  CDR3 for beta chain variable domain of TCR clone 297817 (TRBV7-3, TRBJ1-1)
CASSLTQGTEAFF

SEQ ID NO: 595635 - protein, 13 aa, Homo sapiens
  CDR3 for alpha chain variable domain of TCR clone 297818 (TRAV8-4, TRAJ48)
CAVSLFGNEKLTF

SEQ ID NO: 595636 - protein, 15 aa, Homo sapiens
  CDR3 for beta chain variable domain of TCR clone 297818 (TRBV20-1, TRBJ2-7)
CSARKGLAESYEQNF

SEQ ID NO: 595637 - protein, 12 aa, Homo sapiens
  CDR3 for alpha chain variable domain of TCR clone 297819 (TRAV8-3, TRAJ27)
CAVGGEAGKSTF

SEQ ID NO: 595638 - protein, 14 aa, Homo sapiens
  CDR3 for beta chain variable domain of TCR clone 297819 (TRBV2, TRBJ2-1)
CASRLIVGHDEQFF

SEQ ID NO: 595639 - protein, 12 aa, Homo sapiens
  CDR3 for alpha chain variable domain of TCR clone 297820 (TRAV30, TRAJ20)
CGTESNYYKLSF

SEQ ID NO: 595640 - protein, 15 aa, Homo sapiens
  CDR3 for beta chain variable domain of TCR clone 297820 (TRBV20-1, TRBJ2-7)
CSARDRVSGMDEQYF

SEQ ID NO: 595641 - protein, 14 aa, Homo sapiens
  CDR3 for alpha chain variable domain of TCR clone 297821 (TRAV1-2, TRAJ16)
CAVNRFSDGQKLLF

SEQ ID NO: 595642 - protein, 15 aa, Homo sapiens
  CDR3 for beta chain variable domain of TCR clone 297821 (TRBV11-2, TRBJ2-2)
CASRGLAANTVELFF

SEQ ID NO: 595643 - protein, 11 aa, Homo sapiens
  CDR3 for alpha chain variable domain of TCR clone 297822 (TRAV2, TRAJ13)
CASGGYQKVTF

SEQ ID NO: 595644 - protein, 14 aa, Homo sapiens
  CDR3 for beta chain variable domain of TCR clone 297822 (TRBV5-1, TRBJ2-1)
CASSALWAGNEQFF

SEQ ID NO: 595645 - protein, 14 aa, Homo sapiens
  CDR3 for alpha chain variable domain of TCR clone 297823 (TRAV29/DV5, TRAJ36)
CAARRKTGANNLFF

SEQ ID NO: 595646 - protein, 19 aa, Homo sapiens
  CDR3 for beta chain variable domain of TCR clone 297823 (TRBV7-2, TRBJ2-3)
WASSFLSRNWGGGTDTQYF

SEQ ID NO: 595647 - protein, 15 aa, Homo sapiens
  CDR3 for alpha chain variable domain of TCR clone 297824 (TRAV35, TRAJ40)
CAGQLGTSGTYKYIF

SEQ ID NO: 595648 - protein, 17 aa, Homo sapiens
  CDR3 for beta chain variable domain of TCR clone 297824 (TRBV4-1, TRBJ2-5)
CASSQDLTGGPIETQYF

SEQ ID NO: 595649 - protein, 14 aa, Homo sapiens
  CDR3 for alpha chain variable domain of TCR clone 297825 (TRAV13-1, TRAJ21)
CAAKEGFNKFYLDL

SEQ ID NO: 595650 - protein, 15 aa, Homo sapiens
  CDR3 for beta chain variable domain of TCR clone 297825 (TRBV2, TRBJ2-1)
CASSELAGSYNEQFF

SEQ ID NO: 595651 - protein, 14 aa, Homo sapiens
  CDR3 for alpha chain variable domain of TCR clone 297826 (TRAV1-1, TRAJ30)
CAVRSLNSDDKIIF

SEQ ID NO: 595652 - protein, 14 aa, Homo sapiens
  CDR3 for beta chain variable domain of TCR clone 297826 (TRBV7-8, TRBJ2-3)
CASSLEAGTDTQYF

SEQ ID NO: 595653 - protein, 18 aa, Homo sapiens
  CDR3 for alpha chain variable domain of TCR clone 297827 (TRAV12-3, TRAJ52)
CAMSRTNAGGTSYGKLTI

SEQ ID NO: 595654 - protein, 17 aa, Homo sapiens
  CDR3 for beta chain variable domain of TCR clone 297827 (TRBV7-3, TRBJ2-3)
CASSLMKRMRGADTQYF

SEQ ID NO: 595655 - protein, 13 aa, Homo sapiens
  CDR3 for alpha chain variable domain of TCR clone 297828 (TRAV8-6, TRAJ13)
CALSSGGYQKVTF

SEQ ID NO: 595656 - protein, 14 aa, Homo sapiens
  CDR3 for beta chain variable domain of TCR clone 297828 (TRBV7-2, TRBJ1-1)
CASSFLTGTTEAFF

SEQ ID NO: 595657 - protein, 16 aa, Homo sapiens
  CDR3 for alpha chain variable domain of TCR clone 297829 (TRAV4, TRAJ22)
CLVGDLYSGSSRQLTF

SEQ ID NO: 595658 - protein, 15 aa, Homo sapiens
  CDR3 for beta chain variable domain of TCR clone 297829 (TRBV7-2, TRBJ2-1)
CASTHGTGIYNEQFF

SEQ ID NO: 595659 - protein, 15 aa, Homo sapiens
  CDR3 for alpha chain variable domain of TCR clone 297830 (TRAV4, TRAJ8)
CLVGVLNTGFQKLVF

SEQ ID NO: 595660 - protein, 12 aa, Homo sapiens
  CDR3 for beta chain variable domain of TCR clone 297830 (TRBV7-8, TRBJ2-7)
CASSLGDREQYF

SEQ ID NO: 595661 - protein, 14 aa, Homo sapiens
  CDR3 for alpha chain variable domain of TCR clone 297831 (TRAV20, TRAJ18)
CAVGRGSTLGRLYF

SEQ ID NO: 595662 - protein, 14 aa, Homo sapiens
  CDR3 for beta chain variable domain of TCR clone 297831 (TRBV19, TRBJ2-7)
CASSMGQGAIEQYF

SEQ ID NO: 595663 - protein, 13 aa, Homo sapiens
  CDR3 for alpha chain variable domain of TCR clone 297832 (TRAV2, TRAJ15)
CAVASQAGTALIF

SEQ ID NO: 595664 - protein, 12 aa, Homo sapiens
  CDR3 for beta chain variable domain of TCR clone 297832 (TRBV7-2, TRBJ2-3)
CASSRDADTQYF

SEQ ID NO: 595665 - protein, 14 aa, Homo sapiens
  CDR3 for alpha chain variable domain of TCR clone 297833 (TRAV38-1, TRAJ43)
CAFMKHNNNNDLRF

SEQ ID NO: 595666 - protein, 17 aa, Homo sapiens
  CDR3 for beta chain variable domain of TCR clone 297833 (TRBV7-7, TRBJ1-4)
CASSLVGQGASNEKLFF

SEQ ID NO: 595667 - protein, 12 aa, Homo sapiens
  CDR3 for alpha chain variable domain of TCR clone 297834 (TRAV29/DV5, TRAJ15)
CASNQAGTALIF

SEQ ID NO: 595668 - protein, 15 aa, Homo sapiens
  CDR3 for beta chain variable domain of TCR clone 297834 (TRBV11-2, TRBJ2-2)
CASSSHRVNAGELFF

SEQ ID NO: 595669 - protein, 12 aa, Homo sapiens
  CDR3 for alpha chain variable domain of TCR clone 297835 (TRAV6, TRAJ3)
CALYSSASKIIF

SEQ ID NO: 595670 - protein, 12 aa, Homo sapiens
  CDR3 for beta chain variable domain of TCR clone 297835 (TRBV7-2, TRBJ2-3)
CANSLIGETQYF

SEQ ID NO: 595671 - protein, 15 aa, Homo sapiens
  CDR3 for alpha chain variable domain of TCR clone 297836 (TRAV17, TRAJ45)
CATAELGGGADGLTF

SEQ ID NO: 595672 - protein, 18 aa, Homo sapiens
  CDR3 for beta chain variable domain of TCR clone 297836 (TRBV11-2, TRBJ2-3)
CASSLGGASRGAPNTQYF

SEQ ID NO: 595673 - protein, 14 aa, Homo sapiens
  CDR3 for alpha chain variable domain of TCR clone 297837 (TRAV12-1, TRAJ17)
CVVNYKAAGNKLTF

SEQ ID NO: 595674 - protein, 15 aa, Homo sapiens
  CDR3 for beta chain variable domain of TCR clone 297837 (TRBV20-1, TRBJ2-1)
CSARGIGGTYNEQFF

SEQ ID NO: 595675 - protein, 14 aa, Homo sapiens
  CDR3 for alpha chain variable domain of TCR clone 297838 (TRAV13-1, TRAJ35)
CAASTGGFGNVLHC

SEQ ID NO: 595676 - protein, 13 aa, Homo sapiens
  CDR3 for beta chain variable domain of TCR clone 297838 (TRBV7-3, TRBJ1-1)
CASSQDWGAEAFF

SEQ ID NO: 595677 - protein, 13 aa, Homo sapiens
  CDR3 for alpha chain variable domain of TCR clone 297839 (TRAV21, TRAJ10)
CAVPTGGGNKLTF

SEQ ID NO: 595678 - protein, 16 aa, Homo sapiens
  CDR3 for beta chain variable domain of TCR clone 297839 (TRBV7-8, TRBJ2-4)
CASSAERTLAKNIQYF

SEQ ID NO: 595679 - protein, 16 aa, Homo sapiens
  CDR3 for alpha chain variable domain of TCR clone 297840 (TRAV13-1, TRAJ48)
CAASIFGNFGNEKLIF

SEQ ID NO: 595680 - protein, 12 aa, Homo sapiens
  CDR3 for beta chain variable domain of TCR clone 297840 (TRBV14, TRBJ2-4)
CASSNLKSIQYF

SEQ ID NO: 595681 - protein, 16 aa, Homo sapiens
  CDR3 for alpha chain variable domain of TCR clone 297841 (TRAV3, TRAJ3)
CAVRDRAKSSASKIIF

SEQ ID NO: 595682 - protein, 16 aa, Homo sapiens
  CDR3 for beta chain variable domain of TCR clone 297841 (TRBV12-5, TRBJ2-5)
CASGPRTSGNQETQYF

SEQ ID NO: 595683 - protein, 16 aa, Homo sapiens
  CDR3 for alpha chain variable domain of TCR clone 297842 (TRAV26-2, TRAJ41)
CILRDPLSNSGYALNF

SEQ ID NO: 595684 - protein, 17 aa, Homo sapiens
  CDR3 for beta chain variable domain of TCR clone 297842 (TRBV11-2, TRBJ2-1)
CASSLYPPGVEYNEQFF

SEQ ID NO: 595685 - protein, 16 aa, Homo sapiens
  CDR3 for alpha chain variable domain of TCR clone 297843 (TRAV30, TRAJ24)
CGTEIVDANSWGKFQF

SEQ ID NO: 595686 - protein, 19 aa, Homo sapiens
  CDR3 for beta chain variable domain of TCR clone 297843 (TRBV25-1, TRBJ2-2)
CAILVYRVHRGRKTGELFF

SEQ ID NO: 595687 - protein, 17 aa, Homo sapiens
  CDR3 for alpha chain variable domain of TCR clone 297844 (TRAV35, TRAJ38)
CAGQLQRNAGNNRKLIW

SEQ ID NO: 595688 - protein, 13 aa, Homo sapiens
  CDR3 for beta chain variable domain of TCR clone 297844 (TRBV7-7, TRBJ2-3)
CASSLSRADTQYF

SEQ ID NO: 595689 - protein, 13 aa, Homo sapiens
  CDR3 for alpha chain variable domain of TCR clone 297845 (TRAV8-6, TRAJ21)
CAVSPSSLTKFYF

SEQ ID NO: 595690 - protein, 18 aa, Homo sapiens
  CDR3 for beta chain variable domain of TCR clone 297845 (TRBV11-2, TRBJ2-3)
CASSLGGASRGAPNTRYF

SEQ ID NO: 595691 - protein, 19 aa, Homo sapiens
  CDR3 for alpha chain variable domain of TCR clone 297846 (TRAV26-1, TRAJ52)
CIVRAHRNAGGTSYGKLTF

SEQ ID NO: 595692 - protein, 15 aa, Homo sapiens
  CDR3 for beta chain variable domain of TCR clone 297846 (TRBV29-1, TRBJ2-1)
CSGRDRKSSFNEQFF

SEQ ID NO: 595693 - protein, 10 aa, Homo sapiens
  CDR3 for alpha chain variable domain of TCR clone 297847 (TRAV36/DV7, TRAJ56)
RAGPAVELTF

SEQ ID NO: 595694 - protein, 13 aa, Homo sapiens
  CDR3 for beta chain variable domain of TCR clone 297847 (TRBV7-9, TRBJ2-7)
CASSFWSSYEQYF

SEQ ID NO: 595695 - protein, 14 aa, Homo sapiens
  CDR3 for alpha chain variable domain of TCR clone 297848 (TRAV12-2, TRAJ40)
CAVKIPSGTYKYIF

SEQ ID NO: 595696 - protein, 12 aa, Homo sapiens
  CDR3 for beta chain variable domain of TCR clone 297848 (TRBV29-1, TRBJ2-3)
CSVTGGAGTQYF

SEQ ID NO: 595697 - protein, 14 aa, Homo sapiens
  CDR3 for alpha chain variable domain of TCR clone 297849 (TRAV12-2, TRAJ40)
CAVKIPSGTYKQIF

SEQ ID NO: 595698 - protein, 14 aa, Homo sapiens
  CDR3 for beta chain variable domain of TCR clone 297849 (TRBV20-1, TRBJ1-1)
CSAQTRIGGTEAFF

SEQ ID NO: 595699 - protein, 12 aa, Homo sapiens
  CDR3 for alpha chain variable domain of TCR clone 297850 (TRAV12-3, TRAJ34)
CAMGYNTNKLIF

SEQ ID NO: 595700 - protein, 14 aa, Homo sapiens
  CDR3 for beta chain variable domain of TCR clone 297850 (TRBV4-1, TRBJ2-2)
CASSQAVNTGELFF

SEQ ID NO: 595701 - protein, 13 aa, Homo sapiens
  CDR3 for alpha chain variable domain of TCR clone 297851 (TRAV2, TRAJ40)
CAVVTSGTYKYMF

SEQ ID NO: 595702 - protein, 14 aa, Homo sapiens
  CDR3 for beta chain variable domain of TCR clone 297851 (TRBV19, TRBJ2-1)
CASPTFALGGEQFF

SEQ ID NO: 595703 - protein, 16 aa, Homo sapiens
  CDR3 for alpha chain variable domain of TCR clone 297852 (TRAV21, TRAJ17)
CAVRPGEEAAGNELTF

SEQ ID NO: 595704 - protein, 16 aa, Homo sapiens
  CDR3 for beta chain variable domain of TCR clone 297852 (TRBV2, TRBJ2-7)
CASSEPWTGPSYEQYF

SEQ ID NO: 595705 - protein, 15 aa, Homo sapiens
  CDR3 for alpha chain variable domain of TCR clone 297853 (TRAV17, TRAJ4)
CATGTWSGGYNKLIF

SEQ ID NO: 595706 - protein, 16 aa, Homo sapiens
  CDR3 for beta chain variable domain of TCR clone 297853 (TRBV19, TRBJ2-1)
CASSKAGPSSYNEQFF

SEQ ID NO: 595707 - protein, 15 aa, Homo sapiens
  CDR3 for alpha chain variable domain of TCR clone 297854 (TRAV27, TRAJ38)
CAARRNAGNNRKLIW

SEQ ID NO: 595708 - protein, 15 aa, Homo sapiens
  CDR3 for beta chain variable domain of TCR clone 297854 (TRBV5-4, TRBJ2-1)
CASSREGLPYNEQFF

SEQ ID NO: 595709 - protein, 10 aa, Homo sapiens
  CDR3 for alpha chain variable domain of TCR clone 297855 (TRAV36/DV7, TRAJ48)
CAVGNEKLTF

SEQ ID NO: 595710 - protein, 16 aa, Homo sapiens
  CDR3 for beta chain variable domain of TCR clone 297855 (TRBV15, TRBJ2-3)
CATRLSGGRAPDTQYF

SEQ ID NO: 595711 - protein, 14 aa, Homo sapiens
  CDR3 for alpha chain variable domain of TCR clone 297856 (TRAV1-2, TRAJ16)
CAVNLFSDGQKLLL

SEQ ID NO: 595712 - protein, 15 aa, Homo sapiens
  CDR3 for beta chain variable domain of TCR clone 297856 (TRBV7-9, TRBJ1-6)
CASSSPGRGNSPLHF

SEQ ID NO: 595713 - protein, 17 aa, Homo sapiens
  CDR3 for alpha chain variable domain of TCR clone 297857 (TRAV27, TRAJ26)
CAGARAPLDNYGPNSVF

SEQ ID NO: 595714 - protein, 15 aa, Homo sapiens
  CDR3 for beta chain variable domain of TCR clone 297857 (TRBV11-2, TRBJ2-5)
CASSPRSGGLETQYF

SEQ ID NO: 595715 - protein, 14 aa, Homo sapiens
  CDR3 for alpha chain variable domain of TCR clone 297858 (TRAV29/DV5, TRAJ44)
CSAFLVGTASKLTF

SEQ ID NO: 595716 - protein, 16 aa, Homo sapiens
  CDR3 for beta chain variable domain of TCR clone 297858 (TRBV19, TRBJ1-5)
CASSIQGGYSNQPQHF

SEQ ID NO: 595717 - protein, 13 aa, Homo sapiens
  CDR3 for alpha chain variable domain of TCR clone 297859 (TRAV2, TRAJ21)
GAVVDLNFNKFYF

SEQ ID NO: 595718 - protein, 15 aa, Homo sapiens
  CDR3 for beta chain variable domain of TCR clone 297859 (TRBV28, TRBJ2-5)
CASSPGQGSIETQSF

SEQ ID NO: 595719 - protein, 18 aa, Homo sapiens
  CDR3 for alpha chain variable domain of TCR clone 297860 (TRAV21, TRAJ52)
CAVRPSPACGTSYGKLTF

SEQ ID NO: 595720 - protein, 14 aa, Homo sapiens
  CDR3 for beta chain variable domain of TCR clone 297860 (TRBV5-1, TRBJ1-5)
CASSLGQGAQPQHF

SEQ ID NO: 595721 - protein, 17 aa, Homo sapiens
  CDR3 for alpha chain variable domain of TCR clone 297861 (TRAV17, TRAJ28)
CATDPRRGRAGSYQLTF

SEQ ID NO: 595722 - protein, 16 aa, Homo sapiens
  CDR3 for beta chain variable domain of TCR clone 297861 (TRBV25-1, TRBJ1-1)
CASSGDRDRGRIEAFF

SEQ ID NO: 595723 - protein, 12 aa, Homo sapiens
  CDR3 for alpha chain variable domain of TCR clone 297862 (TRAV12-3, TRAJ17)
CAMTLTGNTLTF

SEQ ID NO: 595724 - protein, 15 aa, Homo sapiens
  CDR3 for beta chain variable domain of TCR clone 297862 (TRBV20-1, TRBJ2-7)
CSASDRVSGMDEQYF

SEQ ID NO: 595725 - protein, 15 aa, Homo sapiens
  CDR3 for alpha chain variable domain of TCR clone 297863 (TRAV13-1, TRAJ44)
CAASRGGGTASNLTF

SEQ ID NO: 595726 - protein, 15 aa, Homo sapiens
  CDR3 for beta chain variable domain of TCR clone 297863 (TRBV18, TRBJ2-1)
CASSPPSASYNEQFF

SEQ ID NO: 595727 - protein, 14 aa, Homo sapiens
  CDR3 for alpha chain variable domain of TCR clone 297864 (TRAV27, TRAJ36)
CAGPPKRGANNLFF

SEQ ID NO: 595728 - protein, 15 aa, Homo sapiens
  CDR3 for beta chain variable domain of TCR clone 297864 (TRBV18, TRBJ2-7)
CASTPAATPNYEQYF

SEQ ID NO: 595729 - protein, 12 aa, Homo sapiens
  CDR3 for alpha chain variable domain of TCR clone 297865 (TRAV13-2, TRAJ23)
CAERHRGGKLIF

SEQ ID NO: 595730 - protein, 13 aa, Homo sapiens
  CDR3 for beta chain variable domain of TCR clone 297865 (TRBV7-9, TRBJ2-3)
CASRPGSTDTQYF

SEQ ID NO: 595731 - protein, 16 aa, Homo sapiens
  CDR3 for alpha chain variable domain of TCR clone 297866 (TRAV30, TRAJ24)
CGTEIVDDDSWGKFQF

SEQ ID NO: 595732 - protein, 15 aa, Homo sapiens
  CDR3 for beta chain variable domain of TCR clone 297866 (TRBV5-1, TRBJ2-1)
CASSPPRAPYNEQFF

SEQ ID NO: 595733 - protein, 12 aa, Homo sapiens
  CDR3 for alpha chain variable domain of TCR clone 297867 (TRAV17, TRAJ37)
CAGSSNTGKLIF

SEQ ID NO: 595734 - protein, 14 aa, Homo sapiens
  CDR3 for beta chain variable domain of TCR clone 297867 (TRBV6-1, TRBJ1-3)
CASVQGGGGNTIYF

SEQ ID NO: 595735 - protein, 13 aa, Homo sapiens
  CDR3 for alpha chain variable domain of TCR clone 297868 (TRAV2, TRAJ40)
CAVVTSGTYEYIF

SEQ ID NO: 595736 - protein, 12 aa, Homo sapiens
  CDR3 for beta chain variable domain of TCR clone 297868 (TRBV12-4, TRBJ2-7)
CASSLGGYEQYF

SEQ ID NO: 595737 - protein, 11 aa, Homo sapiens
  CDR3 for alpha chain variable domain of TCR clone 297869 (TRAV23/DV6, TRAJ48)
CAPRWGEKLTF

SEQ ID NO: 595738 - protein, 13 aa, Homo sapiens
  CDR3 for beta chain variable domain of TCR clone 297869 (TRBV12-4, TRBJ2-5)
CASSRGTEENQYF

SEQ ID NO: 595739 - protein, 16 aa, Homo sapiens
  CDR3 for alpha chain variable domain of TCR clone 297870 (TRAV12-3, TRAJ53)
CAMSPGSGGSHYKLTF

SEQ ID NO: 595740 - protein, 12 aa, Homo sapiens
  CDR3 for beta chain variable domain of TCR clone 297870 (TRBV12-4, TRBJ2-7)
WASSLGGHEQYF

SEQ ID NO: 595741 - protein, 16 aa, Homo sapiens
  CDR3 for alpha chain variable domain of TCR clone 297871 (TRAV8-1, TRAJ42)
CAVTSRYGGSQGNLIF

SEQ ID NO: 595742 - protein, 12 aa, Homo sapiens
  CDR3 for beta chain variable domain of TCR clone 297871 (TRBV6-3, TRBJ2-7)
CASSLVRRGLYF

SEQ ID NO: 595743 - protein, 18 aa, Homo sapiens
  CDR3 for alpha chain variable domain of TCR clone 297872 (TRAV26-1, TRAJ52)
CIVRVEGAGGTSYGKLTF

SEQ ID NO: 595744 - protein, 13 aa, Homo sapiens
  CDR3 for beta chain variable domain of TCR clone 297872 (TRBV9, TRBJ2-1)
CASSPSGGNEQFF

SEQ ID NO: 595745 - protein, 14 aa, Homo sapiens
  CDR3 for alpha chain variable domain of TCR clone 297873 (TRAV12-2, TRAJ17)
CAVNIKAAGNKLTF

SEQ ID NO: 595746 - protein, 13 aa, Homo sapiens
  CDR3 for beta chain variable domain of TCR clone 297873 (TRBV12-4, TRBJ1-2)
CASSSGPNYGYTF

SEQ ID NO: 595747 - protein, 13 aa, Homo sapiens
  CDR3 for alpha chain variable domain of TCR clone 297874 (TRAV26-2, TRAJ47)
CIRLMEYGNKLVF

SEQ ID NO: 595748 - protein, 15 aa, Homo sapiens
  CDR3 for beta chain variable domain of TCR clone 297874 (TRBV9, TRBJ1-6)
CASSVAGTGDSPLHF

SEQ ID NO: 595749 - protein, 14 aa, Homo sapiens
  CDR3 for alpha chain variable domain of TCR clone 297875 (TRAV13-2, TRAJ57)
CAENFQGGSEKLVF

SEQ ID NO: 595750 - protein, 13 aa, Homo sapiens
  CDR3 for beta chain variable domain of TCR clone 297875 (TRBV2, TRBJ1-1)
CASSVLMNTEAFF

SEQ ID NO: 595751 - protein, 14 aa, Homo sapiens
  CDR3 for alpha chain variable domain of TCR clone 297876 (TRAV12-2, TRAJ40)
CAVKIPSGTYKYIF

SEQ ID NO: 595752 - protein, 16 aa, Homo sapiens
  CDR3 for beta chain variable domain of TCR clone 297876 (TRBV7-8, TRBJ2-6)
CQQRRDRGRWANVLTF

SEQ ID NO: 595753 - protein, 14 aa, Homo sapiens
  CDR3 for alpha chain variable domain of TCR clone 297877 (TRAV27, TRAJ45)
CAGAQEEVLTDLPL

SEQ ID NO: 595754 - protein, 13 aa, Homo sapiens
  CDR3 for beta chain variable domain of TCR clone 297877 (TRBV27, TRBJ1-1)
CASSLSIGAEAFF

SEQ ID NO: 595755 - protein, 13 aa, Homo sapiens
  CDR3 for alpha chain variable domain of TCR clone 297878 (TRAV12-1, TRAJ49)
CVVGANTGNQFYF

SEQ ID NO: 595756 - protein, 14 aa, Homo sapiens
  CDR3 for beta chain variable domain of TCR clone 297878 (TRBV7-2, TRBJ2-7)
CASRSQGAAYEQYF

SEQ ID NO: 595757 - protein, 16 aa, Homo sapiens
  CDR3 for alpha chain variable domain of TCR clone 297879 (TRAV30, TRAJ24)
CGTEIVDADSWGKFHF

SEQ ID NO: 595758 - protein, 14 aa, Homo sapiens
  CDR3 for beta chain variable domain of TCR clone 297879 (TRBV12-5, TRBJ2-5)
CASGSRTHQETQYC

SEQ ID NO: 595759 - protein, 13 aa, Homo sapiens
  CDR3 for alpha chain variable domain of TCR clone 297880 (TRAV8-1, TRAJ9)
CAVNSVGGFKTIF

SEQ ID NO: 595760 - protein, 15 aa, Homo sapiens
  CDR3 for beta chain variable domain of TCR clone 297880 (TRBV11-2, TRBJ2-3)
CASSGSDGLTDTQYF

SEQ ID NO: 595761 - protein, 12 aa, Homo sapiens
  CDR3 for alpha chain variable domain of TCR clone 297881 (TRAV13-1, TRAJ21)
CAAKEGFNKFYF

SEQ ID NO: 595762 - protein, 13 aa, Homo sapiens
  CDR3 for beta chain variable domain of TCR clone 297881 (TRBV20-1, TRBJ1-3)
CSAGAYSGNTIYF

SEQ ID NO: 595763 - protein, 18 aa, Homo sapiens
  CDR3 for alpha chain variable domain of TCR clone 297882 (TRAV21, TRAJ52)
CAVRPSPAGGTIYVKLTF

SEQ ID NO: 595764 - protein, 17 aa, Homo sapiens
  CDR3 for beta chain variable domain of TCR clone 297882 (TRBV13, TRBJ2-3)
CASSLSRVAGGRNTQYF

SEQ ID NO: 595765 - protein, 10 aa, Homo sapiens
  CDR3 for alpha chain variable domain of TCR clone 297883 (TRAV1-2, TRAJ31)
CVSEDARLMF

SEQ ID NO: 595766 - protein, 15 aa, Homo sapiens
  CDR3 for beta chain variable domain of TCR clone 297883 (TRBV6-1, TRBJ2-3)
CASSERGGITDTQYF

SEQ ID NO: 595767 - protein, 13 aa, Homo sapiens
  CDR3 for alpha chain variable domain of TCR clone 297884 (TRAV13-1, TRAJ5)
CAAEHTGRRALTF

SEQ ID NO: 595768 - protein, 16 aa, Homo sapiens
  CDR3 for beta chain variable domain of TCR clone 297884 (TRBV19, TRBJ2-2)
CASRSPGTGATGELFF

SEQ ID NO: 595769 - protein, 17 aa, Homo sapiens
  CDR3 for alpha chain variable domain of TCR clone 297885 (TRAV3, TRAJ42)
CAVRDRNYGGSQGNLIF

SEQ ID NO: 595770 - protein, 15 aa, Homo sapiens
  CDR3 for beta chain variable domain of TCR clone 297885 (TRBV4-1, TRBJ2-5)
CASSQWDLYQETQYF

SEQ ID NO: 595771 - protein, 15 aa, Homo sapiens
  CDR3 for alpha chain variable domain of TCR clone 297886 (TRAV13-2, TRAJ53)
CAERGSSGSNYKLTF

SEQ ID NO: 595772 - protein, 14 aa, Homo sapiens
  CDR3 for beta chain variable domain of TCR clone 297886 (TRBV4-1, TRBJ2-2)
CASSQYPDTGELFF

SEQ ID NO: 595773 - protein, 14 aa, Homo sapiens
  CDR3 for alpha chain variable domain of TCR clone 297887 (TRAV12-2, TRAJ17)
CAALFKAAGNKLTF

SEQ ID NO: 595774 - protein, 13 aa, Homo sapiens
  CDR3 for beta chain variable domain of TCR clone 297887 (TRBV4-2, TRBJ2-2)
CASEDRGTGELFF

SEQ ID NO: 595775 - protein, 14 aa, Homo sapiens
  CDR3 for alpha chain variable domain of TCR clone 297888 (TRAV8-4, TRAJ13)
CAVTLSGGYQKVTF

SEQ ID NO: 595776 - protein, 15 aa, Homo sapiens
  CDR3 for beta chain variable domain of TCR clone 297888 (TRBV7-9, TRBJ2-5)
CASSLVWRDRETQYF

SEQ ID NO: 595777 - protein, 11 aa, Homo sapiens
  CDR3 for alpha chain variable domain of TCR clone 297889 (TRAV1-2, TRAJ40)
CAVPGTYKYIF

SEQ ID NO: 595778 - protein, 14 aa, Homo sapiens
  CDR3 for beta chain variable domain of TCR clone 297889 (TRBV19, TRBJ2-1)
CASPTFVSSGEQFF

SEQ ID NO: 595779 - protein, 15 aa, Homo sapiens
  CDR3 for alpha chain variable domain of TCR clone 297890 (TRAV17, TRAJ4)
CATGTWSGGYNKMIF

SEQ ID NO: 595780 - protein, 15 aa, Homo sapiens
  CDR3 for beta chain variable domain of TCR clone 297890 (TRBV20-1, TRBJ2-7)
CSARDRVSGMDEQYS

SEQ ID NO: 595781 - protein, 13 aa, Homo sapiens
  CDR3 for alpha chain variable domain of TCR clone 297891 (TRAV2, TRAJ23)
CAVMGNQGGKLIF

SEQ ID NO: 595782 - protein, 16 aa, Homo sapiens
  CDR3 for beta chain variable domain of TCR clone 297891 (TRBV6-1, TRBJ2-5)
CASSETLDRGAETQYF

SEQ ID NO: 595783 - protein, 14 aa, Homo sapiens
  CDR3 for alpha chain variable domain of TCR clone 297892 (TRAV13-1, TRAJ44)
CAAKATGTASKLTF

SEQ ID NO: 595784 - protein, 17 aa, Homo sapiens
  CDR3 for beta chain variable domain of TCR clone 297892 (TRBV7-3, TRBJ2-3)
CASSLMKRMRGEDTQYF

SEQ ID NO: 595785 - protein, 15 aa, Homo sapiens
  CDR3 for alpha chain variable domain of TCR clone 297893 (TRAV8-3, TRAJ45)
CASSYPGGGADGLTF

SEQ ID NO: 595786 - protein, 13 aa, Homo sapiens
  CDR3 for beta chain variable domain of TCR clone 297893 (TRBV7-9, TRBJ1-2)
CASSLKQNYGYTF

SEQ ID NO: 595787 - protein, 13 aa, Homo sapiens
  CDR3 for alpha chain variable domain of TCR clone 297894 (TRAV13-1, TRAJ33)
CAASRAGDYQLIW

SEQ ID NO: 595788 - protein, 12 aa, Homo sapiens
  CDR3 for beta chain variable domain of TCR clone 297894 (TRBV11-2, TRBJ1-2)
CASSREGDGYTF

SEQ ID NO: 595789 - protein, 13 aa, Homo sapiens
  CDR3 for alpha chain variable domain of TCR clone 297895 (TRAV2, TRAJ15)
CAVASQAGTALIF

SEQ ID NO: 595790 - protein, 14 aa, Homo sapiens
  CDR3 for beta chain variable domain of TCR clone 297895 (TRBV7-2, TRBJ2-5)
CASSPRGSSETQYF

SEQ ID NO: 595791 - protein, 19 aa, Homo sapiens
  CDR3 for alpha chain variable domain of TCR clone 297896 (TRAV8-3, TRAJ44)
CTSVLWVRLYTGTASKLTF

SEQ ID NO: 595792 - protein, 16 aa, Homo sapiens
  CDR3 for beta chain variable domain of TCR clone 297896 (TRBV6-4, TRBJ1-2)
CASSEAVGDPNYGYTF

SEQ ID NO: 595793 - protein, 14 aa, Homo sapiens
  CDR3 for alpha chain variable domain of TCR clone 297897 (TRAV12-2, TRAJ44)
CAVNEAGPASKLTF

SEQ ID NO: 595794 - protein, 12 aa, Homo sapiens
  CDR3 for beta chain variable domain of TCR clone 297897 (TRBV19, TRBJ1-4)
CASKDWPGGLFF

SEQ ID NO: 595795 - protein, 11 aa, Homo sapiens
  CDR3 for alpha chain variable domain of TCR clone 297898 (TRAV21, TRAJ34)
FAVTNTDKLIF

SEQ ID NO: 595796 - protein, 16 aa, Homo sapiens
  CDR3 for beta chain variable domain of TCR clone 297898 (TRBV18, TRBJ1-1)
CASSPGVGGRGGEAFF

SEQ ID NO: 595797 - protein, 13 aa, Homo sapiens
  CDR3 for alpha chain variable domain of TCR clone 297899 (TRAV1-2, TRAJ9)
CAALNTGGFKTIF

SEQ ID NO: 595798 - protein, 15 aa, Homo sapiens
  CDR3 for beta chain variable domain of TCR clone 297899 (TRBV19, TRBJ2-1)
CASSLTGGAYNEQFC

SEQ ID NO: 595799 - protein, 12 aa, Homo sapiens
  CDR3 for alpha chain variable domain of TCR clone 297900 (TRAV3, TRAJ26)
CAARDYGQNFVF

SEQ ID NO: 595800 - protein, 16 aa, Homo sapiens
  CDR3 for beta chain variable domain of TCR clone 297900 (TRBV11-2, TRBJ1-2)
CASSPSGREANYGYTF

SEQ ID NO: 595801 - protein, 14 aa, Homo sapiens
  CDR3 for alpha chain variable domain of TCR clone 297901 (TRAV8-6, TRAJ29)
CAVSGWAGNTPLVF

SEQ ID NO: 595802 - protein, 17 aa, Homo sapiens
  CDR3 for beta chain variable domain of TCR clone 297901 (TRBV11-2, TRBJ2-1)
CASSLYPPGVEYNEQFF

SEQ ID NO: 595803 - protein, 16 aa, Homo sapiens
  CDR3 for alpha chain variable domain of TCR clone 297902 (TRAV1-2, TRAJ10)
CAVRGVLTGGGNTPTF

SEQ ID NO: 595804 - protein, 12 aa, Homo sapiens
  CDR3 for beta chain variable domain of TCR clone 297902 (TRBV7-8, TRBJ2-7)
CASSLGDREQYF

SEQ ID NO: 595805 - protein, 14 aa, Homo sapiens
  CDR3 for alpha chain variable domain of TCR clone 297903 (TRAV3, TRAJ21)
CAVESQANFNKFYF

SEQ ID NO: 595806 - protein, 12 aa, Homo sapiens
  CDR3 for beta chain variable domain of TCR clone 297903 (TRBV6-3, TRBJ2-7)
CARSLTPYEQYF

SEQ ID NO: 595807 - protein, 13 aa, Homo sapiens
  CDR3 for alpha chain variable domain of TCR clone 297904 (TRAV13-2, TRAJ48)
FAEMDCGNEKLTF

SEQ ID NO: 595808 - protein, 15 aa, Homo sapiens
  CDR3 for beta chain variable domain of TCR clone 297904 (TRBV7-9, TRBJ1-6)
CASSSPGRGNSPLHF

SEQ ID NO: 595809 - protein, 16 aa, Homo sapiens
  CDR3 for alpha chain variable domain of TCR clone 297905 (TRAV30, TRAJ24)
CGTEIVDADSWGKFQF

SEQ ID NO: 595810 - protein, 16 aa, Homo sapiens
  CDR3 for beta chain variable domain of TCR clone 297905 (TRBV5-1, TRBJ2-2)
CASSLWDTTNTGELFF

SEQ ID NO: 595811 - protein, 18 aa, Homo sapiens
  CDR3 for alpha chain variable domain of TCR clone 297906 (TRAV12-3, TRAJ52)
CAMSVGGAGGTSYGKLTF

SEQ ID NO: 595812 - protein, 15 aa, Homo sapiens
  CDR3 for beta chain variable domain of TCR clone 297906 (TRBV7-9, TRBJ2-1)
CASSLLIGSYNEQFF

SEQ ID NO: 595813 - protein, 12 aa, Homo sapiens
  CDR3 for alpha chain variable domain of TCR clone 297907 (TRAV3, TRAJ43)
CAVRAPNNDMRF

SEQ ID NO: 595814 - protein, 13 aa, Homo sapiens
  CDR3 for beta chain variable domain of TCR clone 297907 (TRBV19, TRBJ1-2)
CASSVPGQDGYTF

SEQ ID NO: 595815 - protein, 11 aa, Homo sapiens
  CDR3 for alpha chain variable domain of TCR clone 297908 (TRAV3, TRAJ21)
CAVGNFNKSYF

SEQ ID NO: 595816 - protein, 16 aa, Homo sapiens
  CDR3 for beta chain variable domain of TCR clone 297908 (TRBV19, TRBJ2-1)
RASSKAGPSSYNEQFF

SEQ ID NO: 595817 - protein, 15 aa, Homo sapiens
  CDR3 for alpha chain variable domain of TCR clone 297909 (TRAV26-1, TRAJ44)
CIVRIGTGTASKLTF

SEQ ID NO: 595818 - protein, 12 aa, Homo sapiens
  CDR3 for beta chain variable domain of TCR clone 297909 (TRBV7-8, TRBJ2-7)
CASSLGDREQYF

SEQ ID NO: 595819 - protein, 14 aa, Homo sapiens
  CDR3 for alpha chain variable domain of TCR clone 297910 (TRAV12-2, TRAJ44)
CAVNPAGTASKLTF

SEQ ID NO: 595820 - protein, 15 aa, Homo sapiens
  CDR3 for beta chain variable domain of TCR clone 297910 (TRBV5-1, TRBJ2-1)
CASSPPSAPYNEQFF

SEQ ID NO: 595821 - protein, 13 aa, Homo sapiens
  CDR3 for alpha chain variable domain of TCR clone 297911 (TRAV12-2, TRAJ9)
CAVKWAGGFKTIF

SEQ ID NO: 595822 - protein, 13 aa, Homo sapiens
  CDR3 for beta chain variable domain of TCR clone 297911 (TRBV7-3, TRBJ1-1)
CASSQDWWAEAFF

SEQ ID NO: 595823 - protein, 12 aa, Homo sapiens
  CDR3 for alpha chain variable domain of TCR clone 297912 (TRAV21, TRAJ58)
CAAETSGSRLTF

SEQ ID NO: 595824 - protein, 15 aa, Homo sapiens
  CDR3 for beta chain variable domain of TCR clone 297912 (TRBV20-1, TRBJ2-7)
CSARDPVKVEGEQYF

SEQ ID NO: 595825 - protein, 12 aa, Homo sapiens
  CDR3 for alpha chain variable domain of TCR clone 297913 (TRAV3, TRAJ4)
CAVSGCYNKLIF

SEQ ID NO: 595826 - protein, 17 aa, Homo sapiens
  CDR3 for beta chain variable domain of TCR clone 297913 (TRBV6-5, TRBJ2-6)
CASSSATSGPGANVLTF

SEQ ID NO: 595827 - protein, 13 aa, Homo sapiens
  CDR3 for alpha chain variable domain of TCR clone 297914 (TRAV8-3, TRAJ28)
CAVGAVGSYQLTF

SEQ ID NO: 595828 - protein, 15 aa, Homo sapiens
  CDR3 for beta chain variable domain of TCR clone 297914 (TRBV7-9, TRBJ1-5)
CASSQGRQPNEPQHF

SEQ ID NO: 595829 - protein, 13 aa, Homo sapiens
  CDR3 for alpha chain variable domain of TCR clone 297915 (TRAV13-1, TRAJ56)
CSKSSGANSKLTF

SEQ ID NO: 595830 - protein, 14 aa, Homo sapiens
  CDR3 for beta chain variable domain of TCR clone 297915 (TRBV5-4, TRBJ1-1)
CASSLDSRRDEAFF

SEQ ID NO: 595831 - protein, 12 aa, Homo sapiens
  CDR3 for alpha chain variable domain of TCR clone 297916 (TRAV8-3, TRAJ26)
CAGDDYGQNFVF

SEQ ID NO: 595832 - protein, 15 aa, Homo sapiens
  CDR3 for beta chain variable domain of TCR clone 297916 (TRBV9, TRBJ2-1)
CASSPAGSSYNEQFF

SEQ ID NO: 595833 - protein, 12 aa, Homo sapiens
  CDR3 for alpha chain variable domain of TCR clone 297917 (TRAV1-2, TRAJ42)
CVAGGSQGNLIF

SEQ ID NO: 595834 - protein, 22 aa, Homo sapiens
  CDR3 for beta chain variable domain of TCR clone 297917 (TRBV29-1, TRBJ2-5)
TVSNMSPEDSSIYLCSAGTQYF

SEQ ID NO: 595835 - protein, 15 aa, Homo sapiens
  CDR3 for alpha chain variable domain of TCR clone 297918 (TRAV13-2, TRAJ45)
CAESDSGGGADGLTF

SEQ ID NO: 595836 - protein, 12 aa, Homo sapiens
  CDR3 for beta chain variable domain of TCR clone 297918 (TRBV27, TRBJ2-2)
CASKLFTGELFF

SEQ ID NO: 595837 - protein, 14 aa, Homo sapiens
  CDR3 for alpha chain variable domain of TCR clone 297919 (TRAV20, TRAJ20)
CAVRRGYNDYKLSF

SEQ ID NO: 595838 - protein, 13 aa, Homo sapiens
  CDR3 for beta chain variable domain of TCR clone 297919 (TRBV19, TRBJ2-5)
CASSETAPETQFF

SEQ ID NO: 595839 - protein, 14 aa, Homo sapiens
  CDR3 for alpha chain variable domain of TCR clone 297920 (TRAV12-1, TRAJ30)
CVPTGTKRDDKIIF

SEQ ID NO: 595840 - protein, 11 aa, Homo sapiens
  CDR3 for beta chain variable domain of TCR clone 297920 (TRBV4-1, TRBJ2-2)
CASEHTGELFF

SEQ ID NO: 595841 - protein, 13 aa, Homo sapiens
  CDR3 for alpha chain variable domain of TCR clone 297921 (TRAV30, TRAJ24)
CGTVTDSWGKLQF

SEQ ID NO: 595842 - protein, 13 aa, Homo sapiens
  CDR3 for beta chain variable domain of TCR clone 297921 (TRBV7-3, TRBJ1-1)
CASSQDWGAEAFF

SEQ ID NO: 595843 - protein, 13 aa, Homo sapiens
  CDR3 for alpha chain variable domain of TCR clone 297922 (TRAV8-6, TRAJ8)
CAFMNTGFQKLAF

SEQ ID NO: 595844 - protein, 15 aa, Homo sapiens
  CDR3 for beta chain variable domain of TCR clone 297922 (TRBV28, TRBJ2-5)
CASSSGRVIQETQYF

SEQ ID NO: 595845 - protein, 12 aa, Homo sapiens
  CDR3 for alpha chain variable domain of TCR clone 297923 (TRAV16, TRAJ12)
CALEDSSYKLIF

SEQ ID NO: 595846 - protein, 14 aa, Homo sapiens
  CDR3 for beta chain variable domain of TCR clone 297923 (TRBV12-4, TRBJ1-5)
CASSPTGPRGGTYF

SEQ ID NO: 595847 - protein, 16 aa, Homo sapiens
  CDR3 for alpha chain variable domain of TCR clone 297924 (TRAV29/DV5, TRAJ36)
CAASAHYQSGANNPFF

SEQ ID NO: 595848 - protein, 13 aa, Homo sapiens
  CDR3 for beta chain variable domain of TCR clone 297924 (TRBV7-9, TRBJ1-2)
CASSLKQNYGYTF

SEQ ID NO: 595849 - protein, 12 aa, Homo sapiens
  CDR3 for alpha chain variable domain of TCR clone 297925 (TRAV2, TRAJ9)
CAVGAGGFKTIF

SEQ ID NO: 595850 - protein, 13 aa, Homo sapiens
  CDR3 for beta chain variable domain of TCR clone 297925 (TRBV7-3, TRBJ2-5)
CASSVRGGETQYF

SEQ ID NO: 595851 - protein, 13 aa, Homo sapiens
  CDR3 for alpha chain variable domain of TCR clone 297926 (TRAV12-3, TRAJ20)
CAVGLRVDYKLSF

SEQ ID NO: 595852 - protein, 11 aa, Homo sapiens
  CDR3 for beta chain variable domain of TCR clone 297926 (TRBV29-1, TRBJ2-5)
CSEDRTGTQYF

SEQ ID NO: 595853 - protein, 14 aa, Homo sapiens
  CDR3 for alpha chain variable domain of TCR clone 297927 (TRAV12-2, TRAJ40)
CAVKIPSGTYKYIF

SEQ ID NO: 595854 - protein, 10 aa, Homo sapiens
  CDR3 for beta chain variable domain of TCR clone 297927 (TRBV24-1, TRBJ2-2)
CATSEADLER

SEQ ID NO: 595855 - protein, 15 aa, Homo sapiens
  CDR3 for alpha chain variable domain of TCR clone 297928 (TRAV13-2, TRAJ50)
CAEEPLKTSYDKVIF

SEQ ID NO: 595856 - protein, 13 aa, Homo sapiens
  CDR3 for beta chain variable domain of TCR clone 297928 (TRBV19, TRBJ1-1)
CASSITGESEAFF

SEQ ID NO: 595857 - protein, 12 aa, Homo sapiens
  CDR3 for alpha chain variable domain of TCR clone 297929 (TRAV12-1, TRAJ31)
CVSWNNNARLMF

SEQ ID NO: 595858 - protein, 15 aa, Homo sapiens
  CDR3 for beta chain variable domain of TCR clone 297929 (TRBV7-2, TRBJ1-5)
CASSLDRGEDQPQHF

SEQ ID NO: 595859 - protein, 16 aa, Homo sapiens
  CDR3 for alpha chain variable domain of TCR clone 297930 (TRAV16, TRAJ4)
CGLSRMFSGGYNKLIF

SEQ ID NO: 595860 - protein, 16 aa, Homo sapiens
  CDR3 for beta chain variable domain of TCR clone 297930 (TRBV24-1, TRBJ2-3)
CATSDPGTGATDTQYF

SEQ ID NO: 595861 - protein, 19 aa, Homo sapiens
  CDR3 for alpha chain variable domain of TCR clone 297931 (TRAV2, TRAJ20)
ILQVRAADAAVYRDCKLSF

SEQ ID NO: 595862 - protein, 12 aa, Homo sapiens
  CDR3 for beta chain variable domain of TCR clone 297931 (TRBV11-2, TRBJ2-2)
CASSLGGGELFF

SEQ ID NO: 595863 - protein, 13 aa, Homo sapiens
  CDR3 for alpha chain variable domain of TCR clone 297932 (TRAV20, TRAJ34)
CAVSSYNIDKLIF

SEQ ID NO: 595864 - protein, 13 aa, Homo sapiens
  CDR3 for beta chain variable domain of TCR clone 297932 (TRBV7-9, TRBJ1-2)
CASSLKQNYGYTF

SEQ ID NO: 595865 - protein, 16 aa, Homo sapiens
  CDR3 for alpha chain variable domain of TCR clone 297933 (TRAV27, TRAJ13)
CAGAKSDYGGYQRVTF

SEQ ID NO: 595866 - protein, 15 aa, Homo sapiens
  CDR3 for beta chain variable domain of TCR clone 297933 (TRBV29-1, TRBJ2-1)
CSVGRHALFYNEQFF

SEQ ID NO: 595867 - protein, 11 aa, Homo sapiens
  CDR3 for alpha chain variable domain of TCR clone 297934 (TRAV1-2, TRAJ11)
CAVRGYSTLTF

SEQ ID NO: 595868 - protein, 15 aa, Homo sapiens
  CDR3 for beta chain variable domain of TCR clone 297934 (TRBV11-3, TRBJ2-3)
CASLKDGREGDTQYS

SEQ ID NO: 595869 - protein, 11 aa, Homo sapiens
  CDR3 for alpha chain variable domain of TCR clone 297935 (TRAV22, TRAJ49)
CAVLTGNQFYF

SEQ ID NO: 595870 - protein, 11 aa, Homo sapiens
  CDR3 for beta chain variable domain of TCR clone 297935 (TRBV5-6, TRBJ2-1)
CASSLRGEQFF

SEQ ID NO: 595871 - protein, 14 aa, Homo sapiens
  CDR3 for alpha chain variable domain of TCR clone 297936 (TRAV9-2, TRAJ39)
CALYIYNVGNMLTF

SEQ ID NO: 595872 - protein, 17 aa, Homo sapiens
  CDR3 for beta chain variable domain of TCR clone 297936 (TRBV9, TRBJ2-3)
CASRSTAGGPSTDTQYF

SEQ ID NO: 595873 - protein, 14 aa, Homo sapiens
  CDR3 for alpha chain variable domain of TCR clone 297937 (TRAV2, TRAJ9)
CAVEDRSGGFKTIF

SEQ ID NO: 595874 - protein, 14 aa, Homo sapiens
  CDR3 for beta chain variable domain of TCR clone 297937 (TRBV13, TRBJ2-5)
CASSLGPRGETQYF

SEQ ID NO: 595875 - protein, 14 aa, Homo sapiens
  CDR3 for alpha chain variable domain of TCR clone 297938 (TRAV12-2, TRAJ17)
CAALFRAAGNKLTF

SEQ ID NO: 595876 - protein, 15 aa, Homo sapiens
  CDR3 for beta chain variable domain of TCR clone 297938 (TRBV20-1, TRBJ2-7)
CSARDRVSGMDEQYF

SEQ ID NO: 595877 - protein, 17 aa, Homo sapiens
  CDR3 for alpha chain variable domain of TCR clone 297939 (TRAV8-1, TRAJ43)
CAVTNDLRFGAGTRLTV

SEQ ID NO: 595878 - protein, 17 aa, Homo sapiens
  CDR3 for beta chain variable domain of TCR clone 297939 (TRBV5-4, TRBJ2-1)
CASSSAGGRGPYNEQFF

SEQ ID NO: 595879 - protein, 12 aa, Homo sapiens
  CDR3 for alpha chain variable domain of TCR clone 297940 (TRAV6, TRAJ22)
TISSGSARQLTF

SEQ ID NO: 595880 - protein, 15 aa, Homo sapiens
  CDR3 for beta chain variable domain of TCR clone 297940 (TRBV20-1, TRBJ1-6)
CSAREGGTFNSPLHF

SEQ ID NO: 595881 - protein, 17 aa, Homo sapiens
  CDR3 for alpha chain variable domain of TCR clone 297941 (TRAV29/DV5, TRAJ45)
CAADGPFSGGGADGLTF

SEQ ID NO: 595882 - protein, 13 aa, Homo sapiens
  CDR3 for beta chain variable domain of TCR clone 297941 (TRBV19, TRBJ1-5)
CASSMRGYQTQHF

SEQ ID NO: 595883 - protein, 13 aa, Homo sapiens
  CDR3 for alpha chain variable domain of TCR clone 297942 (TRAV2, TRAJ29)
CAFYSSGNTPLVF

SEQ ID NO: 595884 - protein, 14 aa, Homo sapiens
  CDR3 for beta chain variable domain of TCR clone 297942 (TRBV7-9, TRBJ1-1)
CASSLGGLKTEAFF

SEQ ID NO: 595885 - protein, 15 aa, Homo sapiens
  CDR3 for alpha chain variable domain of TCR clone 297943 (TRAV34, TRAJ38)
CGADFTPGNNRKLIW

SEQ ID NO: 595886 - protein, 17 aa, Homo sapiens
  CDR3 for beta chain variable domain of TCR clone 297943 (TRBV15, TRBJ1-4)
CDTSRYGTGDPNEKLFF

SEQ ID NO: 595887 - protein, 14 aa, Homo sapiens
  CDR3 for alpha chain variable domain of TCR clone 297944 (TRAV3, TRAJ37)
CAVKESGNTGKLIF

SEQ ID NO: 595888 - protein, 17 aa, Homo sapiens
  CDR3 for beta chain variable domain of TCR clone 297944 (TRBV25-1, TRBJ2-7)
CASSDARVVFSSYEQYF

SEQ ID NO: 595889 - protein, 15 aa, Homo sapiens
  CDR3 for alpha chain variable domain of TCR clone 297945 (TRAV14/DV4, TRAJ10)
CAMRELTGGGNKLTF

SEQ ID NO: 595890 - protein, 18 aa, Homo sapiens
  CDR3 for beta chain variable domain of TCR clone 297945 (TRBV7-9, TRBJ2-7)
CAGSLTTSGSRTWYEQYF

SEQ ID NO: 595891 - protein, 13 aa, Homo sapiens
  CDR3 for alpha chain variable domain of TCR clone 297946 (TRAV3, TRAJ3)
CAVADSSASKIIF

SEQ ID NO: 595892 - protein, 14 aa, Homo sapiens
  CDR3 for beta chain variable domain of TCR clone 297946 (TRBV18, TRBJ2-1)
CASSPPTSGGIVIF

SEQ ID NO: 595893 - protein, 16 aa, Homo sapiens
  CDR3 for alpha chain variable domain of TCR clone 297947 (TRAV36/DV7, TRAJ30)
CAVETYGVDRDDKIIF

SEQ ID NO: 595894 - protein, 13 aa, Homo sapiens
  CDR3 for beta chain variable domain of TCR clone 297947 (TRBV4-2, TRBJ1-1)
CASSQAGNTEAFF

SEQ ID NO: 595895 - protein, 12 aa, Homo sapiens
  CDR3 for alpha chain variable domain of TCR clone 297948 (TRAV3, TRAJ31)
CAAQRANARLMF

SEQ ID NO: 595896 - protein, 15 aa, Homo sapiens
  CDR3 for beta chain variable domain of TCR clone 297948 (TRBV28, TRBJ1-4)
CASSRSGTGKEKLFF

SEQ ID NO: 595897 - protein, 15 aa, Homo sapiens
  CDR3 for alpha chain variable domain of TCR clone 297949 (TRAV27, TRAJ22)
CAGAPLKGSARQLTV

SEQ ID NO: 595898 - protein, 16 aa, Homo sapiens
  CDR3 for beta chain variable domain of TCR clone 297949 (TRBV19, TRBJ2-2)
CASTLGASGAPGELFF

SEQ ID NO: 595899 - protein, 14 aa, Homo sapiens
  CDR3 for alpha chain variable domain of TCR clone 297950 (TRAV3, TRAJ17)
CAVRDAAAGNKLTF

SEQ ID NO: 595900 - protein, 15 aa, Homo sapiens
  CDR3 for beta chain variable domain of TCR clone 297950 (TRBV7-6, TRBJ1-2)
CASSSGGRGGYGYTF

SEQ ID NO: 595901 - protein, 15 aa, Homo sapiens
  CDR3 for alpha chain variable domain of TCR clone 297951 (TRAV2, TRAJ9)
CAVEDRGTGGFKTIF

SEQ ID NO: 595902 - protein, 19 aa, Homo sapiens
  CDR3 for beta chain variable domain of TCR clone 297951 (TRBV7-9, TRBJ2-1)
CASSLWGSTRKSSYNEQFF

SEQ ID NO: 595903 - protein, 12 aa, Homo sapiens
  CDR3 for alpha chain variable domain of TCR clone 297952 (TRAV16, TRAJ10)
CSRTGGGNKLTF

SEQ ID NO: 595904 - protein, 15 aa, Homo sapiens
  CDR3 for beta chain variable domain of TCR clone 297952 (TRBV11-2, TRBJ1-1)
CASSSRSSLLLSLDK

SEQ ID NO: 595905 - protein, 12 aa, Homo sapiens
  CDR3 for alpha chain variable domain of TCR clone 297953 (TRAV12-3, TRAJ17)
CAMTLTGNKLTF

SEQ ID NO: 595906 - protein, 17 aa, Homo sapiens
  CDR3 for beta chain variable domain of TCR clone 297953 (TRBV11-2, TRBJ2-6)
CASSQRDIFSGANVLAF

SEQ ID NO: 595907 - protein, 14 aa, Homo sapiens
  CDR3 for alpha chain variable domain of TCR clone 297954 (TRAV20, TRAJ29)
CAVQAWIGNTPLVF

SEQ ID NO: 595908 - protein, 15 aa, Homo sapiens
  CDR3 for beta chain variable domain of TCR clone 297954 (TRBV29-1, TRBJ2-7)
CSVEFFDRGSYEQYF

SEQ ID NO: 595909 - protein, 15 aa, Homo sapiens
  CDR3 for alpha chain variable domain of TCR clone 297955 (TRAV13-1, TRAJ17)
RAASIERAAGNKLTF

SEQ ID NO: 595910 - protein, 13 aa, Homo sapiens
  CDR3 for beta chain variable domain of TCR clone 297955 (TRBV7-7, TRBJ2-3)
CASSLSRADTQYF

SEQ ID NO: 595911 - protein, 13 aa, Homo sapiens
  CDR3 for alpha chain variable domain of TCR clone 297956 (TRAV20, TRAJ37)
CAGCSSNTGKLIF

SEQ ID NO: 595912 - protein, 16 aa, Homo sapiens
  CDR3 for beta chain variable domain of TCR clone 297956 (TRBV7-9, TRBJ2-1)
CASSRKNFSSPREQFF

SEQ ID NO: 595913 - protein, 12 aa, Homo sapiens
  CDR3 for alpha chain variable domain of TCR clone 297957 (TRAV21, TRAJ33)
FAVQDSDYQLIW

SEQ ID NO: 595914 - protein, 14 aa, Homo sapiens
  CDR3 for beta chain variable domain of TCR clone 297957 (TRBV28, TRBJ2-1)
CASSPGEGGNEQFF

SEQ ID NO: 595915 - protein, 13 aa, Homo sapiens
  CDR3 for alpha chain variable domain of TCR clone 297958 (TRAV26-2, TRAJ43)
CILRAVNNNDMRF

SEQ ID NO: 595916 - protein, 11 aa, Homo sapiens
  CDR3 for beta chain variable domain of TCR clone 297958 (TRBV29-1, TRBJ2-5)
CSGDRTGTQYF

SEQ ID NO: 595917 - protein, 14 aa, Homo sapiens
  CDR3 for alpha chain variable domain of TCR clone 297959 (TRAV13-2, TRAJ17)
CAENSKAAGNTLTF

SEQ ID NO: 595918 - protein, 11 aa, Homo sapiens
  CDR3 for beta chain variable domain of TCR clone 297959 (TRBV6-3, TRBJ2-3)
CATGQADTQYF

SEQ ID NO: 595919 - protein, 14 aa, Homo sapiens
  CDR3 for alpha chain variable domain of TCR clone 297960 (TRAV26-1, TRAJ38)
CIADNAGNNRKLSW

SEQ ID NO: 595920 - protein, 17 aa, Homo sapiens
  CDR3 for beta chain variable domain of TCR clone 297960 (TRBV15, TRBJ1-1)
CASSRVGGADGDTEAFF

SEQ ID NO: 595921 - protein, 14 aa, Homo sapiens
  CDR3 for alpha chain variable domain of TCR clone 297961 (TRAV1-2, TRAJ16)
CAVNRFSDGQKLLF

SEQ ID NO: 595922 - protein, 16 aa, Homo sapiens
  CDR3 for beta chain variable domain of TCR clone 297961 (TRBV13, TRBJ2-2)
YASSPRTGEHTGELFF

SEQ ID NO: 595923 - protein, 14 aa, Homo sapiens
  CDR3 for alpha chain variable domain of TCR clone 297962 (TRAV21, TRAJ35)
CAVMPIGFGNVLHC

SEQ ID NO: 595924 - protein, 12 aa, Homo sapiens
  CDR3 for beta chain variable domain of TCR clone 297962 (TRBV7-9, TRBJ2-7)
CASSSKREQQYF

SEQ ID NO: 595925 - protein, 11 aa, Homo sapiens
  CDR3 for alpha chain variable domain of TCR clone 297963 (TRAV12-1, TRAJ40)
CVYSGTYKYIF

SEQ ID NO: 595926 - protein, 18 aa, Homo sapiens
  CDR3 for beta chain variable domain of TCR clone 297963 (TRBV11-2, TRBJ2-3)
CASSLGGASRGAPNTQYF

SEQ ID NO: 595927 - protein, 13 aa, Homo sapiens
  CDR3 for alpha chain variable domain of TCR clone 297964 (TRAV29/DV5, TRAJ31)
CAASRNTNARLMF

SEQ ID NO: 595928 - protein, 14 aa, Homo sapiens
  CDR3 for beta chain variable domain of TCR clone 297964 (TRBV18, TRBJ2-5)
CASSPPGHQETQYF

SEQ ID NO: 595929 - protein, 16 aa, Homo sapiens
  CDR3 for alpha chain variable domain of TCR clone 297965 (TRAV8-4, TRAJ16)
CAVSPVGRWPEAALCN

SEQ ID NO: 595930 - protein, 14 aa, Homo sapiens
  CDR3 for beta chain variable domain of TCR clone 297965 (TRBV23-1, TRBJ2-5)
CASSFLRSQETQYF

SEQ ID NO: 595931 - protein, 15 aa, Homo sapiens
  CDR3 for alpha chain variable domain of TCR clone 297966 (TRAV4, TRAJ39)
CLVGPTNNAGNMHTF

SEQ ID NO: 595932 - protein, 13 aa, Homo sapiens
  CDR3 for beta chain variable domain of TCR clone 297966 (TRBV11-2, TRBJ2-5)
CASSSTGEETQYF

SEQ ID NO: 595933 - protein, 15 aa, Homo sapiens
  CDR3 for alpha chain variable domain of TCR clone 297967 (TRAV2, TRAJ22)
CAVPSRGGSARQLTF

SEQ ID NO: 595934 - protein, 16 aa, Homo sapiens
  CDR3 for beta chain variable domain of TCR clone 297967 (TRBV11-2, TRBJ1-2)
CASSLDTGGADYGYTF

SEQ ID NO: 595935 - protein, 14 aa, Homo sapiens
  CDR3 for alpha chain variable domain of TCR clone 297968 (TRAV8-2, TRAJ4)
CVVSPSGGYNKLIF

SEQ ID NO: 595936 - protein, 11 aa, Homo sapiens
  CDR3 for beta chain variable domain of TCR clone 297968 (TRBV12-4, TRBJ2-2)
CASSSAGEPFF

SEQ ID NO: 595937 - protein, 14 aa, Homo sapiens
  CDR3 for alpha chain variable domain of TCR clone 297969 (TRAV2, TRAJ9)
CAVEDRSGGFKTLF

SEQ ID NO: 595938 - protein, 13 aa, Homo sapiens
  CDR3 for beta chain variable domain of TCR clone 297969 (TRBV7-3, TRBJ2-5)
CASSFRGGETQYF

SEQ ID NO: 595939 - protein, 15 aa, Homo sapiens
  CDR3 for alpha chain variable domain of TCR clone 297970 (TRAV17, TRAJ57)
CATGPSQGGYEKLVF

SEQ ID NO: 595940 - protein, 16 aa, Homo sapiens
  CDR3 for beta chain variable domain of TCR clone 297970 (TRBV12-4, TRBJ1-5)
CASSGPVGGSNQPQHF

SEQ ID NO: 595941 - protein, 14 aa, Homo sapiens
  CDR3 for alpha chain variable domain of TCR clone 297971 (TRAV4, TRAJ32)
CLVNYGGATNKLIF

SEQ ID NO: 595942 - protein, 14 aa, Homo sapiens
  CDR3 for beta chain variable domain of TCR clone 297971 (TRBV15, TRBJ2-5)
YATSGGTRTETQYF

SEQ ID NO: 595943 - protein, 14 aa, Homo sapiens
  CDR3 for alpha chain variable domain of TCR clone 297972 (TRAV13-1, TRAJ40)
CAARSTSGTYKYIF

SEQ ID NO: 595944 - protein, 15 aa, Homo sapiens
  CDR3 for beta chain variable domain of TCR clone 297972 (TRBV18, TRBJ1-5)
CASSETGGNNQPQDF

SEQ ID NO: 595945 - protein, 10 aa, Homo sapiens
  CDR3 for alpha chain variable domain of TCR clone 297973 (TRAV12-1, TRAJ23)
CVGSGGKLIF

SEQ ID NO: 595946 - protein, 15 aa, Homo sapiens
  CDR3 for beta chain variable domain of TCR clone 297973 (TRBV6-5, TRBJ2-1)
CASSSTSSFYNEQSF

SEQ ID NO: 595947 - protein, 17 aa, Homo sapiens
  CDR3 for alpha chain variable domain of TCR clone 297974 (TRAV17, TRAJ24)
CATANSMTTDSWGKLQF

SEQ ID NO: 595948 - protein, 13 aa, Homo sapiens
  CDR3 for beta chain variable domain of TCR clone 297974 (TRBV7-9, TRBJ1-2)
CASSLKQNYGYTF

SEQ ID NO: 595949 - protein, 17 aa, Homo sapiens
  CDR3 for alpha chain variable domain of TCR clone 297975 (TRAV3, TRAJ6)
CAVRDGPSAGGSYIPAF

SEQ ID NO: 595950 - protein, 14 aa, Homo sapiens
  CDR3 for beta chain variable domain of TCR clone 297975 (TRBV7-2, TRBJ2-7)
CASSPKTSFYEQYF

SEQ ID NO: 595951 - protein, 15 aa, Homo sapiens
  CDR3 for alpha chain variable domain of TCR clone 297976 (TRAV8-3, TRAJ45)
CASSYSGGGADGLTF

SEQ ID NO: 595952 - protein, 13 aa, Homo sapiens
  CDR3 for beta chain variable domain of TCR clone 297976 (TRBV7-2, TRBJ2-2)
CTSSLAVTGELFF

SEQ ID NO: 595953 - protein, 14 aa, Homo sapiens
  CDR3 for alpha chain variable domain of TCR clone 297977 (TRAV8-3, TRAJ35)
CAVVPQGFGNVLHC

SEQ ID NO: 595954 - protein, 15 aa, Homo sapiens
  CDR3 for beta chain variable domain of TCR clone 297977 (TRBV7-9, TRBJ2-7)
CASSLALAEAYEQYF

SEQ ID NO: 595955 - protein, 16 aa, Homo sapiens
  CDR3 for alpha chain variable domain of TCR clone 297978 (TRAV3, TRAJ10)
CAVRDMRAGGGNKLTF

SEQ ID NO: 595956 - protein, 15 aa, Homo sapiens
  CDR3 for beta chain variable domain of TCR clone 297978 (TRBV28, TRBJ2-1)
CASSGLAEVDNEQFF

SEQ ID NO: 595957 - protein, 14 aa, Homo sapiens
  CDR3 for alpha chain variable domain of TCR clone 297979 (TRAV17, TRAJ57)
CATDPQGGSEKLVF

SEQ ID NO: 595958 - protein, 15 aa, Homo sapiens
  CDR3 for beta chain variable domain of TCR clone 297979 (TRBV20-1, TRBJ1-5)
CSARGSVDSNQPQHF

SEQ ID NO: 595959 - protein, 14 aa, Homo sapiens
  CDR3 for alpha chain variable domain of TCR clone 297980 (TRAV12-2, TRAJ12)
CAVINRDSSYKLIF

SEQ ID NO: 595960 - protein, 15 aa, Homo sapiens
  CDR3 for beta chain variable domain of TCR clone 297980 (TRBV28, TRBJ2-1)
CASSLDTSAYNEQFF

SEQ ID NO: 595961 - protein, 16 aa, Homo sapiens
  CDR3 for alpha chain variable domain of TCR clone 297981 (TRAV20, TRAJ26)
CAVQHRRDNYGQNFVF

SEQ ID NO: 595962 - protein, 15 aa, Homo sapiens
  CDR3 for beta chain variable domain of TCR clone 297981 (TRBV7-2, TRBJ2-7)
CSSSWVQGAIYEQYF

SEQ ID NO: 595963 - protein, 12 aa, Homo sapiens
  CDR3 for alpha chain variable domain of TCR clone 297982 (TRAV1-1, TRAJ8)
CAGGTGFQKLVF

SEQ ID NO: 595964 - protein, 15 aa, Homo sapiens
  CDR3 for beta chain variable domain of TCR clone 297982 (TRBV7-9, IGHJ2)
CASSRTGGFNDKLFF

SEQ ID NO: 595965 - protein, 16 aa, Homo sapiens
  CDR3 for alpha chain variable domain of TCR clone 297983 (TRAV12-2, TRAJ32)
CAVNLGHGGATKKLIF

SEQ ID NO: 595966 - protein, 15 aa, Homo sapiens
  CDR3 for beta chain variable domain of TCR clone 297983 (TRBV20-1, TRBJ2-7)
CSARGPLAGGREQYF

SEQ ID NO: 595967 - protein, 18 aa, Homo sapiens
  CDR3 for alpha chain variable domain of TCR clone 297984 (TRAV26-2, TRAJ45)
CILRVDKYSGGGADGLTF

SEQ ID NO: 595968 - protein, 16 aa, Homo sapiens
  CDR3 for beta chain variable domain of TCR clone 297984 (TRBV12-5, TRBJ2-5)
CASGPRTSGNQETQYF

SEQ ID NO: 595969 - protein, 21 aa, Homo sapiens
  CDR3 for alpha chain variable domain of TCR clone 297985 (TRAV12-1, TRAJ32)
SPVIQPPTSMTYGGATNKLIF

SEQ ID NO: 595970 - protein, 15 aa, Homo sapiens
  CDR3 for beta chain variable domain of TCR clone 297985 (TRBV7-9, TRBJ2-2)
CASGPLDTFPGELFF

SEQ ID NO: 595971 - protein, 16 aa, Homo sapiens
  CDR3 for alpha chain variable domain of TCR clone 297986 (TRAV13-2, TRAJ32)
CAENMNYVGATNKLIF

SEQ ID NO: 595972 - protein, 14 aa, Homo sapiens
  CDR3 for beta chain variable domain of TCR clone 297986 (TRBV15, TRBJ2-5)
CATSSTGYQETQYF

SEQ ID NO: 595973 - protein, 18 aa, Homo sapiens
  CDR3 for alpha chain variable domain of TCR clone 297987 (TRAV8-3, TRAJ44)
CAVGLLFKALPVNSPLGL

SEQ ID NO: 595974 - protein, 15 aa, Homo sapiens
  CDR3 for beta chain variable domain of TCR clone 297987 (TRBV10-2, TRBJ2-6)
CASSEQGTGANVLTF

SEQ ID NO: 595975 - protein, 16 aa, Homo sapiens
  CDR3 for alpha chain variable domain of TCR clone 297988 (TRAV27, TRAJ13)
CAGAKSDSGGYQKVTF

SEQ ID NO: 595976 - protein, 15 aa, Homo sapiens
  CDR3 for beta chain variable domain of TCR clone 297988 (TRBV4-1, TRBJ2-7)
CASSQQGQGFDEQYF

SEQ ID NO: 595977 - protein, 14 aa, Homo sapiens
  CDR3 for alpha chain variable domain of TCR clone 297989 (TRAV13-1, TRAJ10)
CAALFTGGGNKLTF

SEQ ID NO: 595978 - protein, 15 aa, Homo sapiens
  CDR3 for beta chain variable domain of TCR clone 297989 (TRBV10-3, TRBJ2-2)
CAIREGDRAAGELFF

SEQ ID NO: 595979 - protein, 13 aa, Homo sapiens
  CDR3 for alpha chain variable domain of TCR clone 297990 (TRAV22, TRAJ29)
WAVGGSGNTPLVF

SEQ ID NO: 595980 - protein, 13 aa, Homo sapiens
  CDR3 for beta chain variable domain of TCR clone 297990 (TRBV19, TRBJ2-7)
CASRKAGGSEQYF

SEQ ID NO: 595981 - protein, 16 aa, Homo sapiens
  CDR3 for alpha chain variable domain of TCR clone 297991 (TRAV3, TRAJ34)
CAVRARGTPTSSSLGL

SEQ ID NO: 595982 - protein, 15 aa, Homo sapiens
  CDR3 for beta chain variable domain of TCR clone 297991 (TRBV6-3, TRBJ2-7)
CASSSPGTVFCEQYF

SEQ ID NO: 595983 - protein, 14 aa, Homo sapiens
  CDR3 for alpha chain variable domain of TCR clone 297992 (TRAV29/DV5, TRAJ36)
CAARRKTGANNLLF

SEQ ID NO: 595984 - protein, 13 aa, Homo sapiens
  CDR3 for beta chain variable domain of TCR clone 297992 (TRBV19, TRBJ1-2)
CASSVPGQDGYTF

SEQ ID NO: 595985 - protein, 15 aa, Homo sapiens
  CDR3 for alpha chain variable domain of TCR clone 297993 (TRAV21, TRAJ52)
CAVRGGVTSYGKLTF

SEQ ID NO: 595986 - protein, 15 aa, Homo sapiens
  CDR3 for beta chain variable domain of TCR clone 297993 (TRBV18, TRBJ1-5)
CASSPSDRSNQPQHF

SEQ ID NO: 595987 - protein, 15 aa, Homo sapiens
  CDR3 for alpha chain variable domain of TCR clone 297994 (TRAV12-1, TRAJ5)
CVVNMLETGRRALTF

SEQ ID NO: 595988 - protein, 14 aa, Homo sapiens
  CDR3 for beta chain variable domain of TCR clone 297994 (TRBV12-4, TRBJ1-1)
CASSLGTGGTEAFF

SEQ ID NO: 595989 - protein, 14 aa, Homo sapiens
  CDR3 for alpha chain variable domain of TCR clone 297995 (TRAV16, TRAJ17)
CAPRIKAAGNKLTF

SEQ ID NO: 595990 - protein, 13 aa, Homo sapiens
  CDR3 for beta chain variable domain of TCR clone 297995 (TRBV20-1, TRBJ2-2)
CSASAAGTGELFF

SEQ ID NO: 595991 - protein, 15 aa, Homo sapiens
  CDR3 for alpha chain variable domain of TCR clone 297996 (TRAV36/DV7, TRAJ40)
CAVEGFPSGTYKYIF

SEQ ID NO: 595992 - protein, 14 aa, Homo sapiens
  CDR3 for beta chain variable domain of TCR clone 297996 (TRBV7-3, TRBJ2-1)
CASSLAGGTNEQFF

SEQ ID NO: 595993 - protein, 16 aa, Homo sapiens
  CDR3 for alpha chain variable domain of TCR clone 297997 (TRAV3, TRAJ37)
CAVRGKGSGNTGKLSF

SEQ ID NO: 595994 - protein, 14 aa, Homo sapiens
  CDR3 for beta chain variable domain of TCR clone 297997 (TRBV20-1, TRBJ2-3)
CSARGGTSTDTQYF

SEQ ID NO: 595995 - protein, 14 aa, Homo sapiens
  CDR3 for alpha chain variable domain of TCR clone 297998 (TRAV12-2, TRAJ40)
CAVKIPSGTYKYIF

SEQ ID NO: 595996 - protein, 12 aa, Homo sapiens
  CDR3 for beta chain variable domain of TCR clone 297998 (TRBV5-4, TRBJ2-5)
CASSSTRETQYF

SEQ ID NO: 595997 - protein, 22 aa, Homo sapiens
  CDR3 for alpha chain variable domain of TCR clone 297999 (TRAV13-1, )
CAASGPRRPQIPDIPNPDPAVY

SEQ ID NO: 595998 - protein, 16 aa, Homo sapiens
  CDR3 for beta chain variable domain of TCR clone 297999 (TRBV18, TRBJ2-3)
CASSPPAGGPRKYAVF

SEQ ID NO: 595999 - protein, 12 aa, Homo sapiens
  CDR3 for alpha chain variable domain of TCR clone 298000 (TRAV2, TRAJ33)
CAVPDSNYQLIW

SEQ ID NO: 596000 - protein, 17 aa, Homo sapiens
  CDR3 for beta chain variable domain of TCR clone 298000 (TRBV6-5, TRBJ2-3)
CASSYGTSLYKSNTQYF

SEQ ID NO: 596001 - protein, 20 aa, Homo sapiens
  CDR3 for alpha chain variable domain of TCR clone 298001 (TRAV13-1, TRAJ27)
CAAHTNAGKSTFVDGPTLTV

SEQ ID NO: 596002 - protein, 14 aa, Homo sapiens
  CDR3 for beta chain variable domain of TCR clone 298001 (TRBV19, TRBJ2-2)
CASSGQGIAGELFF

SEQ ID NO: 596003 - protein, 16 aa, Homo sapiens
  CDR3 for alpha chain variable domain of TCR clone 298002 (TRAV12-2, TRAJ18)
CAVFAGRGSTLGRLYF

SEQ ID NO: 596004 - protein, 13 aa, Homo sapiens
  CDR3 for beta chain variable domain of TCR clone 298002 (TRBV19, TRBJ2-7)
CASRKAGGSEQYF

SEQ ID NO: 596005 - protein, 14 aa, Homo sapiens
  CDR3 for alpha chain variable domain of TCR clone 298003 (TRAV27, TRAJ23)
CAGLSYNQGGKLIF

SEQ ID NO: 596006 - protein, 15 aa, Homo sapiens
  CDR3 for beta chain variable domain of TCR clone 298003 (TRBV19, TRBJ2-2)
CASSLNGGVTGELFF

SEQ ID NO: 596007 - protein, 13 aa, Homo sapiens
  CDR3 for alpha chain variable domain of TCR clone 298004 (TRAV12-3, TRAJ43)
RAMIRPNNNDMRF

SEQ ID NO: 596008 - protein, 12 aa, Homo sapiens
  CDR3 for beta chain variable domain of TCR clone 298004 (TRBV11-2, TRBJ2-5)
CASSLGQETQYF

SEQ ID NO: 596009 - protein, 11 aa, Homo sapiens
  CDR3 for alpha chain variable domain of TCR clone 298005 (TRAV3, TRAJ21)
CAVGNFNKFYF

SEQ ID NO: 596010 - protein, 16 aa, Homo sapiens
  CDR3 for beta chain variable domain of TCR clone 298005 (TRBV19, TRBJ2-2)
CASSFPGQGLAGELFF

SEQ ID NO: 596011 - protein, 21 aa, Homo sapiens
  CDR3 for alpha chain variable domain of TCR clone 298006 (TRAV27, TRAJ38)
CAARRNAGNNHIQNPDPAVYQ

SEQ ID NO: 596012 - protein, 12 aa, Homo sapiens
  CDR3 for beta chain variable domain of TCR clone 298006 (TRBV11-2, TRBJ2-2)
CASSLGGGELSF

SEQ ID NO: 596013 - protein, 14 aa, Homo sapiens
  CDR3 for alpha chain variable domain of TCR clone 298007 (TRAV12-3, TRAJ22)
CAMSLFGSARQLTF

SEQ ID NO: 596014 - protein, 13 aa, Homo sapiens
  CDR3 for beta chain variable domain of TCR clone 298007 (TRBV7-3, TRBJ1-1)
CASSQDWGAEAFF

SEQ ID NO: 596015 - protein, 13 aa, Homo sapiens
  CDR3 for alpha chain variable domain of TCR clone 298008 (TRAV2, TRAJ40)
CAVVTSGIYKYIF

SEQ ID NO: 596016 - protein, 16 aa, Homo sapiens
  CDR3 for beta chain variable domain of TCR clone 298008 (TRBV28, TRBJ2-7)
CASSLFFETGGPEQYF

SEQ ID NO: 596017 - protein, 17 aa, Homo sapiens
  CDR3 for alpha chain variable domain of TCR clone 298009 (TRAV38-2/DV8, TRAJ45)
CAYRSRYSGGGADGLTS

SEQ ID NO: 596018 - protein, 15 aa, Homo sapiens
  CDR3 for beta chain variable domain of TCR clone 298009 (TRBV19, TRBJ2-1)
CASIKGRGPYNEQFF

SEQ ID NO: 596019 - protein, 14 aa, Homo sapiens
  CDR3 for alpha chain variable domain of TCR clone 298010 (TRAV12-3, TRAJ10)
SHLPLTGGGNKLTF

SEQ ID NO: 596020 - protein, 15 aa, Homo sapiens
  CDR3 for beta chain variable domain of TCR clone 298010 (TRBV6-1, TRBJ1-5)
CASSELREGNQPQHF

SEQ ID NO: 596021 - protein, 13 aa, Homo sapiens
  CDR3 for alpha chain variable domain of TCR clone 298011 (TRAV23/DV6, TRAJ24)
CAASVDSWGKLQF

SEQ ID NO: 596022 - protein, 12 aa, Homo sapiens
  CDR3 for beta chain variable domain of TCR clone 298011 (TRBV5-1, TRBJ2-7)
CASSDSTYEQYF

SEQ ID NO: 596023 - protein, 11 aa, Homo sapiens
  CDR3 for alpha chain variable domain of TCR clone 298012 (TRAV21, TRAJ34)
CAVTNTDKLIF

SEQ ID NO: 596024 - protein, 15 aa, Homo sapiens
  CDR3 for beta chain variable domain of TCR clone 298012 (TRBV28, TRBJ2-5)
CASSQTSGSLETQYF

SEQ ID NO: 596025 - protein, 15 aa, Homo sapiens
  CDR3 for alpha chain variable domain of TCR clone 298013 (TRAV2, TRAJ27)
CAVDSITPMQANQPL

SEQ ID NO: 596026 - protein, 18 aa, Homo sapiens
  CDR3 for beta chain variable domain of TCR clone 298013 (TRBV7-9, TRBJ2-7)
WASSLTTSGSRTWYEQYF

SEQ ID NO: 596027 - protein, 11 aa, Homo sapiens
  CDR3 for alpha chain variable domain of TCR clone 298014 (TRAV12-2, TRAJ30)
CSVGRDDKIIF

SEQ ID NO: 596028 - protein, 14 aa, Homo sapiens
  CDR3 for beta chain variable domain of TCR clone 298014 (TRBV6-1, TRBJ1-3)
CASVQGGGGNTIYF

SEQ ID NO: 596029 - protein, 17 aa, Homo sapiens
  CDR3 for alpha chain variable domain of TCR clone 298015 (TRAV17, TRAJ57)
CANPEKLVVGKGTKLTV

SEQ ID NO: 596030 - protein, 16 aa, Homo sapiens
  CDR3 for beta chain variable domain of TCR clone 298015 (TRBV11-2, TRBJ2-3)
CASSFQGRGALDTQYF

SEQ ID NO: 596031 - protein, 13 aa, Homo sapiens
  CDR3 for alpha chain variable domain of TCR clone 298016 (TRAV12-3, TRAJ13)
CAMTSGGYQKVTF

SEQ ID NO: 596032 - protein, 13 aa, Homo sapiens
  CDR3 for beta chain variable domain of TCR clone 298016 (TRBV7-9, TRBJ1-2)
CASSLKKNYGYTF

SEQ ID NO: 596033 - protein, 11 aa, Homo sapiens
  CDR3 for alpha chain variable domain of TCR clone 298017 (TRAV35, TRAJ57)
GPQGGSEKLVF

SEQ ID NO: 596034 - protein, 13 aa, Homo sapiens
  CDR3 for beta chain variable domain of TCR clone 298017 (TRBV7-9, TRBJ2-3)
CASSPGSTDTQYF

SEQ ID NO: 596035 - protein, 15 aa, Homo sapiens
  CDR3 for alpha chain variable domain of TCR clone 298018 (TRAV12-2, TRAJ43)
CAFDMRFVAGTSLTV

SEQ ID NO: 596036 - protein, 15 aa, Homo sapiens
  CDR3 for beta chain variable domain of TCR clone 298018 (TRBV5-1, TRBJ2-3)
CASSVTSGSTDTQYF

SEQ ID NO: 596037 - protein, 16 aa, Homo sapiens
  CDR3 for alpha chain variable domain of TCR clone 298019 (TRAV30, TRAJ24)
CGTEIVDADSWGKFQF

SEQ ID NO: 596038 - protein, 14 aa, Homo sapiens
  CDR3 for beta chain variable domain of TCR clone 298019 (TRBV12-4, TRBJ1-4)
CASRMTGRSEKLFF

SEQ ID NO: 596039 - protein, 15 aa, Homo sapiens
  CDR3 for alpha chain variable domain of TCR clone 298020 (TRAV13-2, TRAJ10)
CAENRVTGGGNKLTF

SEQ ID NO: 596040 - protein, 20 aa, Homo sapiens
  CDR3 for beta chain variable domain of TCR clone 298020 (TRBV28, TRBJ2-1)
CASTPIGRSPGLAGGNEQFF

SEQ ID NO: 596041 - protein, 14 aa, Homo sapiens
  CDR3 for alpha chain variable domain of TCR clone 298021 (TRAV12-2, TRAJ9)
CAVNMEGGGFKTIF

SEQ ID NO: 596042 - protein, 13 aa, Homo sapiens
  CDR3 for beta chain variable domain of TCR clone 298021 (TRBV7-2, TRBJ1-5)
CASSFARNQPQHF

SEQ ID NO: 596043 - protein, 14 aa, Homo sapiens
  CDR3 for alpha chain variable domain of TCR clone 298022 (TRAV12-2, TRAJ40)
CAVKIPSGTYKYIF

SEQ ID NO: 596044 - protein, 16 aa, Homo sapiens
  CDR3 for beta chain variable domain of TCR clone 298022 (TRBV19, TRBJ2-3)
CASSPGAASRTDTQYF

SEQ ID NO: 596045 - protein, 12 aa, Homo sapiens
  CDR3 for alpha chain variable domain of TCR clone 298023 (TRAV36/DV7, TRAJ54)
CAVVRGAQKLVF

SEQ ID NO: 596046 - protein, 15 aa, Homo sapiens
  CDR3 for beta chain variable domain of TCR clone 298023 (TRBV12-4, TRBJ2-5)
CASSPPTGLQETQYF

SEQ ID NO: 596047 - protein, 15 aa, Homo sapiens
  CDR3 for alpha chain variable domain of TCR clone 298024 (TRAV26-1, TRAJ44)
CIVRIGTGTASKLTF

SEQ ID NO: 596048 - protein, 17 aa, Homo sapiens
  CDR3 for beta chain variable domain of TCR clone 298024 (TRBV7-6, TRBJ2-1)
CASSLEPTGAAYNEQFF

SEQ ID NO: 596049 - protein, 15 aa, Homo sapiens
  CDR3 for alpha chain variable domain of TCR clone 298025 (TRAV8-4, TRAJ3)
CAVSEPYSGASKIIF

SEQ ID NO: 596050 - protein, 18 aa, Homo sapiens
  CDR3 for beta chain variable domain of TCR clone 298025 (TRBV6-1, TRBJ1-6)
CASSGSDGRRINNSPLHF

SEQ ID NO: 596051 - protein, 14 aa, Homo sapiens
  CDR3 for alpha chain variable domain of TCR clone 298026 (TRAV12-3, TRAJ33)
CAMSVPGSNYQLIR

SEQ ID NO: 596052 - protein, 12 aa, Homo sapiens
  CDR3 for beta chain variable domain of TCR clone 298026 (TRBV7-8, TRBJ2-7)
CASSLGDREQYF

SEQ ID NO: 596053 - protein, 14 aa, Homo sapiens
  CDR3 for alpha chain variable domain of TCR clone 298027 (TRAV1-2, TRAJ8)
CAVREDTGFQKLVF

SEQ ID NO: 596054 - protein, 13 aa, Homo sapiens
  CDR3 for beta chain variable domain of TCR clone 298027 (TRBV7-3, TRBJ2-1)
CASSLDSYIEQFL

SEQ ID NO: 596055 - protein, 15 aa, Homo sapiens
  CDR3 for alpha chain variable domain of TCR clone 298028 (TRAV23/DV6, TRAJ12)
CAAIDLGAMDSSYKL

SEQ ID NO: 596056 - protein, 12 aa, Homo sapiens
  CDR3 for beta chain variable domain of TCR clone 298028 (TRBV10-3, TRBJ2-2)
CASRENTGELFF

SEQ ID NO: 596057 - protein, 12 aa, Homo sapiens
  CDR3 for alpha chain variable domain of TCR clone 298029 (TRAV38-2/DV8, TRAJ57)
CAWKGGSGKLGF

SEQ ID NO: 596058 - protein, 13 aa, Homo sapiens
  CDR3 for beta chain variable domain of TCR clone 298029 (TRBV5-1, TRBJ1-5)
CASSLAQDQPQHF

SEQ ID NO: 596059 - protein, 13 aa, Homo sapiens
  CDR3 for alpha chain variable domain of TCR clone 298030 (TRAV12-3, TRAJ53)
CAMRGGRNYKLTF

SEQ ID NO: 596060 - protein, 15 aa, Homo sapiens
  CDR3 for beta chain variable domain of TCR clone 298030 (TRBV2, TRBJ2-1)
CATQARLVMIGEQFF

SEQ ID NO: 596061 - protein, 13 aa, Homo sapiens
  CDR3 for alpha chain variable domain of TCR clone 298031 (TRAV8-3, TRAJ44)
CAVVPGTASKLPF

SEQ ID NO: 596062 - protein, 14 aa, Homo sapiens
  CDR3 for beta chain variable domain of TCR clone 298031 (TRBV11-2, TRBJ2-3)
CDSSRLARTDTQHF

SEQ ID NO: 596063 - protein, 14 aa, Homo sapiens
  CDR3 for alpha chain variable domain of TCR clone 298032 (TRAV1-2, TRAJ16)
CAVNRFSDGQKLLF

SEQ ID NO: 596064 - protein, 15 aa, Homo sapiens
  CDR3 for beta chain variable domain of TCR clone 298032 (TRBV27, TRBJ2-5)
CASSLIPSGGETQYF

SEQ ID NO: 596065 - protein, 14 aa, Homo sapiens
  CDR3 for alpha chain variable domain of TCR clone 298033 (TRAV12-2, TRAJ40)
CAVKIPSGTYKYIF

SEQ ID NO: 596066 - protein, 13 aa, Homo sapiens
  CDR3 for beta chain variable domain of TCR clone 298033 (TRBV13, TRBJ2-5)
CASSPEVGETQYF

SEQ ID NO: 596067 - protein, 10 aa, Homo sapiens
  CDR3 for alpha chain variable domain of TCR clone 298034 (TRAV20, TRAJ37)
GASNTGKLIF

SEQ ID NO: 596068 - protein, 14 aa, Homo sapiens
  CDR3 for beta chain variable domain of TCR clone 298034 (TRBV20-1, TRBJ2-5)
CSARDGRAGETQYF

SEQ ID NO: 596069 - protein, 13 aa, Homo sapiens
  CDR3 for alpha chain variable domain of TCR clone 298035 (TRAV21, TRAJ57)
CAVTQGGSEKLVF

SEQ ID NO: 596070 - protein, 15 aa, Homo sapiens
  CDR3 for beta chain variable domain of TCR clone 298035 (TRBV5-1, TRBJ1-1)
CASSSTTGTNTEDFF

SEQ ID NO: 596071 - protein, 12 aa, Homo sapiens
  CDR3 for alpha chain variable domain of TCR clone 298036 (TRAV12-1, TRAJ40)
CVVYSGTYKYIF

SEQ ID NO: 596072 - protein, 17 aa, Homo sapiens
  CDR3 for beta chain variable domain of TCR clone 298036 (TRBV11-2, TRBJ2-3)
CRSLGGASRGAPNTQYF

SEQ ID NO: 596073 - protein, 14 aa, Homo sapiens
  CDR3 for alpha chain variable domain of TCR clone 298037 (TRAV12-3, TRAJ10)
SHLPLTGGGNKLTF

SEQ ID NO: 596074 - protein, 13 aa, Homo sapiens
  CDR3 for beta chain variable domain of TCR clone 298037 (TRBV19, TRBJ1-5)
CASSEGSNQPQHF

SEQ ID NO: 596075 - protein, 10 aa, Homo sapiens
  CDR3 for alpha chain variable domain of TCR clone 298038 (TRAV5, TRAJ34)
CAEDTDKLIF

SEQ ID NO: 596076 - protein, 14 aa, Homo sapiens
  CDR3 for beta chain variable domain of TCR clone 298038 (TRBV20-1, TRBJ2-5)
CSARGGRAGETQYF

SEQ ID NO: 596077 - protein, 14 aa, Homo sapiens
  CDR3 for alpha chain variable domain of TCR clone 298039 (TRAV2, TRAJ9)
CAVEDRSGGFKTIF

SEQ ID NO: 596078 - protein, 15 aa, Homo sapiens
  CDR3 for beta chain variable domain of TCR clone 298039 (TRBV3-1, TRBJ2-2)
CASSQDWTRAGELFF

SEQ ID NO: 596079 - protein, 10 aa, Homo sapiens
  CDR3 for alpha chain variable domain of TCR clone 298040 (TRAV23/DV6, TRAJ45)
TGGGADGLTF

SEQ ID NO: 596080 - protein, 11 aa, Homo sapiens
  CDR3 for beta chain variable domain of TCR clone 298040 (TRBV19, TRBJ1-1)
CASSIGSEAFF

SEQ ID NO: 596081 - protein, 18 aa, Homo sapiens
  CDR3 for alpha chain variable domain of TCR clone 298041 (TRAV12-3, TRAJ52)
CAMSAGGAGGTGYGKLTF

SEQ ID NO: 596082 - protein, 16 aa, Homo sapiens
  CDR3 for beta chain variable domain of TCR clone 298041 (TRBV12-5, TRBJ2-5)
CASGPRTSGNQETQYF

SEQ ID NO: 596083 - protein, 16 aa, Homo sapiens
  CDR3 for alpha chain variable domain of TCR clone 298042 (TRAV26-1, TRAJ45)
CIVEKYSGGGADGLTF

SEQ ID NO: 596084 - protein, 17 aa, Homo sapiens
  CDR3 for beta chain variable domain of TCR clone 298042 (TRBV11-2, TRBJ2-4)
CASSSVGPGGHRNIQYF

SEQ ID NO: 596085 - protein, 17 aa, Homo sapiens
  CDR3 for alpha chain variable domain of TCR clone 298043 (TRAV13-1, TRAJ31)
CAPRDRLMFGDGTQLVV

SEQ ID NO: 596086 - protein, 12 aa, Homo sapiens
  CDR3 for beta chain variable domain of TCR clone 298043 (TRBV7-9, TRBJ2-7)
CASNLEGYEQYF

SEQ ID NO: 596087 - protein, 14 aa, Homo sapiens
  CDR3 for alpha chain variable domain of TCR clone 298044 (TRAV26-1, TRAJ40)
CIVRLLSGTYKYIL

SEQ ID NO: 596088 - protein, 10 aa, Homo sapiens
  CDR3 for beta chain variable domain of TCR clone 298044 (TRBV15, TRBJ2-7)
AETGGYEQYF

SEQ ID NO: 596089 - protein, 17 aa, Homo sapiens
  CDR3 for alpha chain variable domain of TCR clone 298045 (TRAV8-6, TRAJ58)
CAVSSWVVKTSGSRLTF

SEQ ID NO: 596090 - protein, 17 aa, Homo sapiens
  CDR3 for beta chain variable domain of TCR clone 298045 (TRBV11-2, TRBJ2-1)
CASSLYPPGVEYNEQFF

SEQ ID NO: 596091 - protein, 14 aa, Homo sapiens
  CDR3 for alpha chain variable domain of TCR clone 298046 (TRAV4, TRAJ9)
CLVGSGTGGFKTIF

SEQ ID NO: 596092 - protein, 12 aa, Homo sapiens
  CDR3 for beta chain variable domain of TCR clone 298046 (TRBV7-9, TRBJ2-7)
CASSLEGYEQYF

SEQ ID NO: 596093 - protein, 13 aa, Homo sapiens
  CDR3 for alpha chain variable domain of TCR clone 298047 (TRAV3, TRAJ33)
CAVRDRSNYQLIW

SEQ ID NO: 596094 - protein, 16 aa, Homo sapiens
  CDR3 for beta chain variable domain of TCR clone 298047 (TRBV4-2, TRBJ2-7)
CASSQDRGTSFYEQYF

SEQ ID NO: 596095 - protein, 14 aa, Homo sapiens
  CDR3 for alpha chain variable domain of TCR clone 298048 (TRAV12-2, TRAJ44)
CAVNPAGTASKLTF

SEQ ID NO: 596096 - protein, 13 aa, Homo sapiens
  CDR3 for beta chain variable domain of TCR clone 298048 (TRBV12-4, TRBJ1-2)
CASSLRQGKGYTF

SEQ ID NO: 596097 - protein, 14 aa, Homo sapiens
  CDR3 for alpha chain variable domain of TCR clone 298049 (TRAV12-2, TRAJ13)
CAVKKTGGYQKVTF

SEQ ID NO: 596098 - protein, 12 aa, Homo sapiens
  CDR3 for beta chain variable domain of TCR clone 298049 (TRBV7-6, TRBJ2-3)
CASSTGTDTQYF

SEQ ID NO: 596099 - protein, 14 aa, Homo sapiens
  CDR3 for alpha chain variable domain of TCR clone 298050 (TRAV10, TRAJ47)
WVVSLMEYGNKMVF

SEQ ID NO: 596100 - protein, 16 aa, Homo sapiens
  CDR3 for beta chain variable domain of TCR clone 298050 (TRBV28, TRBJ2-3)
CASSLFTGVSTDTQYF

SEQ ID NO: 596101 - protein, 17 aa, Homo sapiens
  CDR3 for alpha chain variable domain of TCR clone 298051 (TRAV21, TRAJ52)
CAVGVNAGGTSYGKLTF

SEQ ID NO: 596102 - protein, 14 aa, Homo sapiens
  CDR3 for beta chain variable domain of TCR clone 298051 (TRBV5-1, TRBJ1-2)
CAQLPGELWLHLRF

SEQ ID NO: 596103 - protein, 15 aa, Homo sapiens
  CDR3 for alpha chain variable domain of TCR clone 298052 (TRAV12-2, TRAJ43)
CAFDLRFGAGTRLTV

SEQ ID NO: 596104 - protein, 18 aa, Homo sapiens
  CDR3 for beta chain variable domain of TCR clone 298052 (TRBV20-1, TRBJ2-3)
CSASGLAGGPGTTDTQYF

SEQ ID NO: 596105 - protein, 16 aa, Homo sapiens
  CDR3 for alpha chain variable domain of TCR clone 298053 (TRAV30, TRAJ24)
CGTEIVDADSWGKFQV

SEQ ID NO: 596106 - protein, 19 aa, Homo sapiens
  CDR3 for beta chain variable domain of TCR clone 298053 (TRBV25-1, TRBJ2-2)
CAILVYRVDRGRKTGELFL

SEQ ID NO: 596107 - protein, 15 aa, Homo sapiens
  CDR3 for alpha chain variable domain of TCR clone 298054 (TRAV3, TRAJ5)
CAVRDLDTGRRALTF

SEQ ID NO: 596108 - protein, 16 aa, Homo sapiens
  CDR3 for beta chain variable domain of TCR clone 298054 (TRBV7-9, TRBJ2-7)
CASSSPSANTVNEQYF

SEQ ID NO: 596109 - protein, 12 aa, Homo sapiens
  CDR3 for alpha chain variable domain of TCR clone 298055 (TRAV3, TRAJ20)
CAVRDPDYKLSF

SEQ ID NO: 596110 - protein, 20 aa, Homo sapiens
  CDR3 for beta chain variable domain of TCR clone 298055 (TRBV4-1, TRBJ2-2)
CASSQASPPGLASNTGELFF

SEQ ID NO: 596111 - protein, 13 aa, Homo sapiens
  CDR3 for alpha chain variable domain of TCR clone 298056 (TRAV23/DV6, TRAJ12)
CAPRVDSSYKLIF

SEQ ID NO: 596112 - protein, 12 aa, Homo sapiens
  CDR3 for beta chain variable domain of TCR clone 298056 (TRBV7-6, TRBJ2-5)
CASRLSQETQYF

SEQ ID NO: 596113 - protein, 14 aa, Homo sapiens
  CDR3 for alpha chain variable domain of TCR clone 298057 (TRAV13-1, TRAJ10)
CAAKKPGGGHKLTF

SEQ ID NO: 596114 - protein, 14 aa, Homo sapiens
  CDR3 for beta chain variable domain of TCR clone 298057 (TRBV6-6, TRBJ2-7)
CASSDSGAGYEQYF

SEQ ID NO: 596115 - protein, 15 aa, Homo sapiens
  CDR3 for alpha chain variable domain of TCR clone 298058 (TRAV8-6, TRAJ6)
CAVSGESGGSYIPTF

SEQ ID NO: 596116 - protein, 14 aa, Homo sapiens
  CDR3 for beta chain variable domain of TCR clone 298058 (TRBV7-9, TRBJ2-1)
CASSSMVGFGEQFV

SEQ ID NO: 596117 - protein, 13 aa, Homo sapiens
  CDR3 for alpha chain variable domain of TCR clone 298059 (TRAV13-1, TRAJ6)
CARGSGGGYIPTF

SEQ ID NO: 596118 - protein, 13 aa, Homo sapiens
  CDR3 for beta chain variable domain of TCR clone 298059 (TRBV20-1, TRBJ2-1)
CSARDLVSNEQFF

SEQ ID NO: 596119 - protein, 14 aa, Homo sapiens
  CDR3 for alpha chain variable domain of TCR clone 298060 (TRAV1-2, TRAJ16)
CAVRGFSDGQKLLF

SEQ ID NO: 596120 - protein, 12 aa, Homo sapiens
  CDR3 for beta chain variable domain of TCR clone 298060 (TRBV14, TRBJ2-7)
CASSRLKGEKYF

SEQ ID NO: 596121 - protein, 12 aa, Homo sapiens
  CDR3 for alpha chain variable domain of TCR clone 298061 (TRAV26-1, TRAJ43)
CIVRPRGDDMRF

SEQ ID NO: 596122 - protein, 16 aa, Homo sapiens
  CDR3 for beta chain variable domain of TCR clone 298061 (TRBV3-1, TRBJ2-1)
CASSQGGRRSFDEQVF

SEQ ID NO: 596123 - protein, 12 aa, Homo sapiens
  CDR3 for alpha chain variable domain of TCR clone 298062 (TRAV26-1, TRAJ36)
CIVRVRANNLFF

SEQ ID NO: 596124 - protein, 13 aa, Homo sapiens
  CDR3 for beta chain variable domain of TCR clone 298062 (TRBV11-2, TRBJ2-5)
CASSRGPSETQYF

SEQ ID NO: 596125 - protein, 12 aa, Homo sapiens
  CDR3 for alpha chain variable domain of TCR clone 298063 (TRAV13-1, TRAJ5)
CAVDTGRRALTF

SEQ ID NO: 596126 - protein, 16 aa, Homo sapiens
  CDR3 for beta chain variable domain of TCR clone 298063 (TRBV28, TRBJ2-1)
CASSSPEYPRDNEQFF

SEQ ID NO: 596127 - protein, 14 aa, Homo sapiens
  CDR3 for alpha chain variable domain of TCR clone 298064 (TRAV12-2, TRAJ23)
CAVRGYNQGGKLIF

SEQ ID NO: 596128 - protein, 15 aa, Homo sapiens
  CDR3 for beta chain variable domain of TCR clone 298064 (TRBV20-1, TRBJ2-3)
CSASSGGPRTDTQYF

SEQ ID NO: 596129 - protein, 14 aa, Homo sapiens
  CDR3 for alpha chain variable domain of TCR clone 298065 (TRAV8-3, TRAJ27)
CAGGRNTNAGKSTF

SEQ ID NO: 596130 - protein, 15 aa, Homo sapiens
  CDR3 for beta chain variable domain of TCR clone 298065 (TRBV11-1, TRBJ2-5)
CASSLRGRVQETQYF

SEQ ID NO: 596131 - protein, 13 aa, Homo sapiens
  CDR3 for alpha chain variable domain of TCR clone 298066 (TRAV1-2, TRAJ6)
CAVPKGGSYIPTF

SEQ ID NO: 596132 - protein, 14 aa, Homo sapiens
  CDR3 for beta chain variable domain of TCR clone 298066 (TRBV19, TRBJ2-5)
CASSMTGQQETQYF

SEQ ID NO: 596133 - protein, 14 aa, Homo sapiens
  CDR3 for alpha chain variable domain of TCR clone 298067 (TRAV1-2, TRAJ6)
CAVRSSGGSYIPTF

SEQ ID NO: 596134 - protein, 13 aa, Homo sapiens
  CDR3 for beta chain variable domain of TCR clone 298067 (TRBV6-6, TRBJ2-1)
CASSLHQGDEQFF

SEQ ID NO: 596135 - protein, 12 aa, Homo sapiens
  CDR3 for alpha chain variable domain of TCR clone 298068 (TRAV29/DV5, TRAJ34)
CAASGNTDKLIF

SEQ ID NO: 596136 - protein, 12 aa, Homo sapiens
  CDR3 for beta chain variable domain of TCR clone 298068 (TRBV6-1, TRBJ2-7)
CASSEPLYEQYF

SEQ ID NO: 596137 - protein, 15 aa, Homo sapiens
  CDR3 for alpha chain variable domain of TCR clone 298069 (TRAV3, TRAJ42)
CAVRGGTGSQGNLIF

SEQ ID NO: 596138 - protein, 14 aa, Homo sapiens
  CDR3 for beta chain variable domain of TCR clone 298069 (TRBV7-2, TRBJ2-7)
CASSPKTSFYEQYF

SEQ ID NO: 596139 - protein, 11 aa, Homo sapiens
  CDR3 for alpha chain variable domain of TCR clone 298070 (TRAV1-2, TRAJ40)
CAVPGTYKYIF

SEQ ID NO: 596140 - protein, 12 aa, Homo sapiens
  CDR3 for beta chain variable domain of TCR clone 298070 (TRBV6-3, TRBJ2-7)
CASSLTPYGQYF

SEQ ID NO: 596141 - protein, 14 aa, Homo sapiens
  CDR3 for alpha chain variable domain of TCR clone 298071 (TRAV35, TRAJ42)
CAGPKGGSQGNLIF

SEQ ID NO: 596142 - protein, 13 aa, Homo sapiens
  CDR3 for beta chain variable domain of TCR clone 298071 (TRBV7-2, TRBJ1-5)
CASSFARNQPQHF

SEQ ID NO: 596143 - protein, 17 aa, Homo sapiens
  CDR3 for alpha chain variable domain of TCR clone 298072 (TRAV13-1, TRAJ5)
CCNPSLSRDTGRRALTF

SEQ ID NO: 596144 - protein, 17 aa, Homo sapiens
  CDR3 for beta chain variable domain of TCR clone 298072 (TRBV24-1, TRBJ2-1)
CATSDVSTSGTYNEQIF

SEQ ID NO: 596145 - protein, 16 aa, Homo sapiens
  CDR3 for alpha chain variable domain of TCR clone 298073 (TRAV13-1, TRAJ10)
CAAGYILTGGGNKLTF

SEQ ID NO: 596146 - protein, 15 aa, Homo sapiens
  CDR3 for beta chain variable domain of TCR clone 298073 (TRBV12-4, TRBJ2-7)
CASSQTGAISYEQYV

SEQ ID NO: 596147 - protein, 16 aa, Homo sapiens
  CDR3 for alpha chain variable domain of TCR clone 298074 (TRAV3, TRAJ10)
CALRDMRAGGGNKLTF

SEQ ID NO: 596148 - protein, 15 aa, Homo sapiens
  CDR3 for beta chain variable domain of TCR clone 298074 (TRBV6-3, TRBJ2-7)
CASSSPGTVFYEQYF

SEQ ID NO: 596149 - protein, 14 aa, Homo sapiens
  CDR3 for alpha chain variable domain of TCR clone 298075 (TRAV12-3, TRAJ10)
SLLPLTGGGNKLTF

SEQ ID NO: 596150 - protein, 13 aa, Homo sapiens
  CDR3 for beta chain variable domain of TCR clone 298075 (TRBV2, TRBJ1-6)
CASGRGGISPLHF

SEQ ID NO: 596151 - protein, 16 aa, Homo sapiens
  CDR3 for alpha chain variable domain of TCR clone 298076 (TRAV30, TRAJ24)
CGTEIVDADSWGKFQF

SEQ ID NO: 596152 - protein, 12 aa, Homo sapiens
  CDR3 for beta chain variable domain of TCR clone 298076 (TRBV11-2, TRBJ2-2)
CASSLPTVELFF

SEQ ID NO: 596153 - protein, 15 aa, Homo sapiens
  CDR3 for alpha chain variable domain of TCR clone 298077 (TRAV21, TRAJ40)
CAVRPQTSGTYKYIF

SEQ ID NO: 596154 - protein, 13 aa, Homo sapiens
  CDR3 for beta chain variable domain of TCR clone 298077 (TRBV7-2, TRBJ2-2)
CTSSSVRAGELFF

SEQ ID NO: 596155 - protein, 13 aa, Homo sapiens
  CDR3 for alpha chain variable domain of TCR clone 298078 (TRAV12-2, TRAJ6)
CAVNVSRKLHTYI

SEQ ID NO: 596156 - protein, 16 aa, Homo sapiens
  CDR3 for beta chain variable domain of TCR clone 298078 (TRBV11-2, TRBJ2-7)
CASSPTTGGVSYEQYY

SEQ ID NO: 596157 - protein, 10 aa, Homo sapiens
  CDR3 for alpha chain variable domain of TCR clone 298079 (TRAV13-2, TRAJ20)
CAENICRLQA

SEQ ID NO: 596158 - protein, 14 aa, Homo sapiens
  CDR3 for beta chain variable domain of TCR clone 298079 (TRBV7-3, TRBJ2-1)
CASSLAGGTNEQVF

SEQ ID NO: 596159 - protein, 13 aa, Homo sapiens
  CDR3 for alpha chain variable domain of TCR clone 298080 (TRAV1-1, TRAJ11)
CAVLNSGYSTLTF

SEQ ID NO: 596160 - protein, 17 aa, Homo sapiens
  CDR3 for beta chain variable domain of TCR clone 298080 (TRBV6-3, TRBJ2-2)
CASSYVGQGINTGELFF

SEQ ID NO: 596161 - protein, 13 aa, Homo sapiens
  CDR3 for alpha chain variable domain of TCR clone 298081 (TRAV29/DV5, TRAJ40)
CAASEAGTYKYRF

SEQ ID NO: 596162 - protein, 18 aa, Homo sapiens
  CDR3 for beta chain variable domain of TCR clone 298081 (TRBV14, TRBJ2-1)
CASSQEYGGAYLRGEQFF

SEQ ID NO: 596163 - protein, 14 aa, Homo sapiens
  CDR3 for alpha chain variable domain of TCR clone 298082 (TRAV8-4, TRAJ43)
CAVSDPRNNNDMRF

SEQ ID NO: 596164 - protein, 14 aa, Homo sapiens
  CDR3 for beta chain variable domain of TCR clone 298082 (TRBV19, TRBJ2-1)
CASPTVVLSGEQFF

SEQ ID NO: 596165 - protein, 14 aa, Homo sapiens
  CDR3 for alpha chain variable domain of TCR clone 298083 (TRAV3, TRAJ22)
CAVRDYGSARQLNF

SEQ ID NO: 596166 - protein, 13 aa, Homo sapiens
  CDR3 for beta chain variable domain of TCR clone 298083 (TRBV11-2, TRBJ2-5)
CASGHGAKETQYF

SEQ ID NO: 596167 - protein, 10 aa, Homo sapiens
  CDR3 for alpha chain variable domain of TCR clone 298084 (TRAV23/DV6, TRAJ57)
CAARPTLSQG

SEQ ID NO: 596168 - protein, 13 aa, Homo sapiens
  CDR3 for beta chain variable domain of TCR clone 298084 (TRBV7-6, TRBJ1-2)
CASSLVADYGYTF

SEQ ID NO: 596169 - protein, 14 aa, Homo sapiens
  CDR3 for alpha chain variable domain of TCR clone 298085 (TRAV8-3, TRAJ31)
CAVGRGLHNARLMF

SEQ ID NO: 596170 - protein, 15 aa, Homo sapiens
  CDR3 for beta chain variable domain of TCR clone 298085 (TRBV7-2, TRBJ2-2)
CASSLAGGLTGELFF

SEQ ID NO: 596171 - protein, 14 aa, Homo sapiens
  CDR3 for alpha chain variable domain of TCR clone 298086 (TRAV13-1, TRAJ35)
CAASKGGFGNVLHC

SEQ ID NO: 596172 - protein, 13 aa, Homo sapiens
  CDR3 for beta chain variable domain of TCR clone 298086 (TRBV7-2, TRBJ2-4)
CASSREHANIQYF

SEQ ID NO: 596173 - protein, 17 aa, Homo sapiens
  CDR3 for alpha chain variable domain of TCR clone 298087 (TRAV3, TRAJ6)
CAARDGPRAGGSYIPTF

SEQ ID NO: 596174 - protein, 14 aa, Homo sapiens
  CDR3 for beta chain variable domain of TCR clone 298087 (TRBV7-2, TRBJ2-7)
CASSSKTSFYEQYF

SEQ ID NO: 596175 - protein, 14 aa, Homo sapiens
  CDR3 for alpha chain variable domain of TCR clone 298088 (TRAV13-2, TRAJ17)
CAENSKAAGNELTF

SEQ ID NO: 596176 - protein, 11 aa, Homo sapiens
  CDR3 for beta chain variable domain of TCR clone 298088 (TRBV6-3, TRBJ2-3)
CATGQADTQYF

SEQ ID NO: 596177 - protein, 16 aa, Homo sapiens
  CDR3 for alpha chain variable domain of TCR clone 298089 (TRAV12-3, TRAJ13)
CAMSLGSGGSNYKLAF

SEQ ID NO: 596178 - protein, 16 aa, Homo sapiens
  CDR3 for beta chain variable domain of TCR clone 298089 (TRBV5-7, TRBJ1-4)
CASSPSGGLKTEKLFF

SEQ ID NO: 596179 - protein, 13 aa, Homo sapiens
  CDR3 for alpha chain variable domain of TCR clone 298090 (TRAV12-3, TRAJ9)
CAMRNTGGFKTIF

SEQ ID NO: 596180 - protein, 16 aa, Homo sapiens
  CDR3 for beta chain variable domain of TCR clone 298090 (TRBV28, TRBJ2-7)
CASSLFFETGGPEQYF

SEQ ID NO: 596181 - protein, 14 aa, Homo sapiens
  CDR3 for alpha chain variable domain of TCR clone 298091 (TRAV4, TRAJ9)
CLVGSGTGGFKTIF

SEQ ID NO: 596182 - protein, 15 aa, Homo sapiens
  CDR3 for beta chain variable domain of TCR clone 298091 (TRBV14, TRBJ2-1)
CASSLGLAGGTEQFF

SEQ ID NO: 596183 - protein, 13 aa, Homo sapiens
  CDR3 for alpha chain variable domain of TCR clone 298092 (TRAV12-1, TRAJ6)
CVVFPGGSFIPTF

SEQ ID NO: 596184 - protein, 14 aa, Homo sapiens
  CDR3 for beta chain variable domain of TCR clone 298092 (TRBV20-1, TRBJ1-3)
CSASPTGAGNTIYF

SEQ ID NO: 596185 - protein, 13 aa, Homo sapiens
  CDR3 for alpha chain variable domain of TCR clone 298093 (TRAV21, TRAJ27)
CAARPGNAGKSTF

SEQ ID NO: 596186 - protein, 10 aa, Homo sapiens
  CDR3 for beta chain variable domain of TCR clone 298093 (TRBV4-2, TRBJ2-7)
LAGGTYEQYF

SEQ ID NO: 596187 - protein, 13 aa, Homo sapiens
  CDR3 for alpha chain variable domain of TCR clone 298094 (TRAV12-1, TRAJ6)
CVVYPGGSYIPTF

SEQ ID NO: 596188 - protein, 16 aa, Homo sapiens
  CDR3 for beta chain variable domain of TCR clone 298094 (TRBV7-3, TRBJ2-2)
CASSLKRGTLSGELFF

SEQ ID NO: 596189 - protein, 12 aa, Homo sapiens
  CDR3 for alpha chain variable domain of TCR clone 298095 (TRAV23/DV6, TRAJ30)
CAASKGDDKIIF

SEQ ID NO: 596190 - protein, 18 aa, Homo sapiens
  CDR3 for beta chain variable domain of TCR clone 298095 (TRBV10-3, TRBJ2-3)
CAISESRVGPTRGDTQYF

SEQ ID NO: 596191 - protein, 14 aa, Homo sapiens
  CDR3 for alpha chain variable domain of TCR clone 298096 (TRAV2, TRAJ8)
CAGRGNTGFQKLVF

SEQ ID NO: 596192 - protein, 15 aa, Homo sapiens
  CDR3 for beta chain variable domain of TCR clone 298096 (TRBV19, TRBJ2-1)
CASSSPGVPLDEQFF

SEQ ID NO: 596193 - protein, 14 aa, Homo sapiens
  CDR3 for alpha chain variable domain of TCR clone 298097 (TRAV12-2, TRAJ13)
CAVKKTGGYQEVTF

SEQ ID NO: 596194 - protein, 15 aa, Homo sapiens
  CDR3 for beta chain variable domain of TCR clone 298097 (TRBV28, TRBJ2-1)
CASSIIAGGRSEQFF

SEQ ID NO: 596195 - protein, 14 aa, Homo sapiens
  CDR3 for alpha chain variable domain of TCR clone 298098 (TRAV4, TRAJ20)
CLVGRRSNDYKLSV

SEQ ID NO: 596196 - protein, 18 aa, Homo sapiens
  CDR3 for beta chain variable domain of TCR clone 298098 (TRBV2, TRBJ2-5)
CASSGDPQGRGAQETQYF

SEQ ID NO: 596197 - protein, 13 aa, Homo sapiens
  CDR3 for alpha chain variable domain of TCR clone 298099 (TRAV8-4, TRAJ4)
CAVSDIVYNKLIF

SEQ ID NO: 596198 - protein, 13 aa, Homo sapiens
  CDR3 for beta chain variable domain of TCR clone 298099 (TRBV19, TRBJ1-2)
CASSQGQVYGYTF

SEQ ID NO: 596199 - protein, 12 aa, Homo sapiens
  CDR3 for alpha chain variable domain of TCR clone 298100 (TRAV17, TRAJ49)
CATVTTGNQFYF

SEQ ID NO: 596200 - protein, 18 aa, Homo sapiens
  CDR3 for beta chain variable domain of TCR clone 298100 (TRBV11-2, TRBJ2-6)
CASSLNPFLGTGANVLTC

SEQ ID NO: 596201 - protein, 10 aa, Homo sapiens
  CDR3 for alpha chain variable domain of TCR clone 298101 (TRAV8-4, TRAJ43)
CAVSADDMRF

SEQ ID NO: 596202 - protein, 14 aa, Homo sapiens
  CDR3 for beta chain variable domain of TCR clone 298101 (TRBV19, TRBJ2-2)
CASSGQGIAGELFF

SEQ ID NO: 596203 - protein, 14 aa, Homo sapiens
  CDR3 for alpha chain variable domain of TCR clone 298102 (TRAV13-1, TRAJ5)
CAASPDTGRRALTF

SEQ ID NO: 596204 - protein, 15 aa, Homo sapiens
  CDR3 for beta chain variable domain of TCR clone 298102 (TRBV7-2, TRBJ2-7)
CASSLTGQETYEQYF

SEQ ID NO: 596205 - protein, 14 aa, Homo sapiens
  CDR3 for alpha chain variable domain of TCR clone 298103 (TRAV12-3, TRAJ30)
CAMSLLNRDDKIIF

SEQ ID NO: 596206 - protein, 14 aa, Homo sapiens
  CDR3 for beta chain variable domain of TCR clone 298103 (TRBV7-2, TRBJ2-7)
CASSPKTSFYEQYF

SEQ ID NO: 596207 - protein, 16 aa, Homo sapiens
  CDR3 for alpha chain variable domain of TCR clone 298104 (TRAV13-2, TRAJ53)
CAENANSVGSNYKLTF

SEQ ID NO: 596208 - protein, 19 aa, Homo sapiens
  CDR3 for beta chain variable domain of TCR clone 298104 (TRBV28, TRBJ2-7)
CASSYSGTSRLGWVYEQYF

SEQ ID NO: 596209 - protein, 15 aa, Homo sapiens
  CDR3 for alpha chain variable domain of TCR clone 298105 (TRAV21, TRAJ24)
CAARSSTDCWRKLQF

SEQ ID NO: 596210 - protein, 15 aa, Homo sapiens
  CDR3 for beta chain variable domain of TCR clone 298105 (TRBV5-1, TRBJ2-1)
CASSPPRAPYNEQFF

SEQ ID NO: 596211 - protein, 16 aa, Homo sapiens
  CDR3 for alpha chain variable domain of TCR clone 298106 (TRAV8-3, TRAJ44)
CAVGPLNTGTASKLTF

SEQ ID NO: 596212 - protein, 18 aa, Homo sapiens
  CDR3 for beta chain variable domain of TCR clone 298106 (TRBV3-1, TRBJ2-1)
RASSQDLPGRPLFDEQFF

SEQ ID NO: 596213 - protein, 13 aa, Homo sapiens
  CDR3 for alpha chain variable domain of TCR clone 298107 (TRAV13-1, TRAJ10)
CAALEGGGNKLTF

SEQ ID NO: 596214 - protein, 15 aa, Homo sapiens
  CDR3 for beta chain variable domain of TCR clone 298107 (TRBV27, TRBJ1-6)
CASSFDRGLGSHLHF

SEQ ID NO: 596215 - protein, 15 aa, Homo sapiens
  CDR3 for alpha chain variable domain of TCR clone 298108 (TRAV12-1, TRAJ40)
CVVNRDTSGTYKYIF

SEQ ID NO: 596216 - protein, 13 aa, Homo sapiens
  CDR3 for beta chain variable domain of TCR clone 298108 (TRBV6-1, TRBJ2-1)
CASEGISYNEQFF

SEQ ID NO: 596217 - protein, 14 aa, Homo sapiens
  CDR3 for alpha chain variable domain of TCR clone 298109 (TRAV17, TRAJ56)
CATVPAGAYSKLTF

SEQ ID NO: 596218 - protein, 14 aa, Homo sapiens
  CDR3 for beta chain variable domain of TCR clone 298109 (TRBV7-9, TRBJ2-3)
CASSLEDGTDTQYF

SEQ ID NO: 596219 - protein, 14 aa, Homo sapiens
  CDR3 for alpha chain variable domain of TCR clone 298110 (TRAV12-2, TRAJ45)
CAVNIGGGADGLTF

SEQ ID NO: 596220 - protein, 13 aa, Homo sapiens
  CDR3 for beta chain variable domain of TCR clone 298110 (TRBV20-1, TRBJ1-1)
CSARVGGNTEAFF

SEQ ID NO: 596221 - protein, 15 aa, Homo sapiens
  CDR3 for alpha chain variable domain of TCR clone 298111 (TRAV12-2, TRAJ8)
CAVREENTGFQQLVF

SEQ ID NO: 596222 - protein, 15 aa, Homo sapiens
  CDR3 for beta chain variable domain of TCR clone 298111 (TRBV7-8, TRBJ1-2)
CASSLVRDGGLGYTF

SEQ ID NO: 596223 - protein, 11 aa, Homo sapiens
  CDR3 for alpha chain variable domain of TCR clone 298112 (TRAV3, TRAJ21)
CAVGNFNKFYF

SEQ ID NO: 596224 - protein, 17 aa, Homo sapiens
  CDR3 for beta chain variable domain of TCR clone 298112 (TRBV24-1, TRBJ2-1)
CATSDVSTSGIYNEQFF

SEQ ID NO: 596225 - protein, 16 aa, Homo sapiens
  CDR3 for alpha chain variable domain of TCR clone 298113 (TRAV16, TRAJ52)
CALSAAGGTSYGKLTF

SEQ ID NO: 596226 - protein, 15 aa, Homo sapiens
  CDR3 for beta chain variable domain of TCR clone 298113 (TRBV5-4, TRBJ2-1)
CASSFSGGSYNEQFF

SEQ ID NO: 596227 - protein, 14 aa, Homo sapiens
  CDR3 for alpha chain variable domain of TCR clone 298114 (TRAV1-2, TRAJ16)
CAVNRFSDGQKLLF

SEQ ID NO: 596228 - protein, 14 aa, Homo sapiens
  CDR3 for beta chain variable domain of TCR clone 298114 (TRBV6-5, TRBJ1-2)
CASSYDGTGGGYTF

SEQ ID NO: 596229 - protein, 13 aa, Homo sapiens
  CDR3 for alpha chain variable domain of TCR clone 298115 (TRAV21, TRAJ57)
CAVTQGGSEQLVF

SEQ ID NO: 596230 - protein, 17 aa, Homo sapiens
  CDR3 for beta chain variable domain of TCR clone 298115 (TRBV20-1, TRBJ2-2)
CSASGSGQGGLTGELFF

SEQ ID NO: 596231 - protein, 16 aa, Homo sapiens
  CDR3 for alpha chain variable domain of TCR clone 298116 (TRAV3, TRAJ37)
CAVRGKGSGSTGKLIF

SEQ ID NO: 596232 - protein, 16 aa, Homo sapiens
  CDR3 for beta chain variable domain of TCR clone 298116 (TRBV12-4, TRBJ1-5)
CASSRPVGGSNQPQHF

SEQ ID NO: 596233 - protein, 13 aa, Homo sapiens
  CDR3 for alpha chain variable domain of TCR clone 298117 (TRAV26-2, TRAJ57)
RILSRGGSEKLVF

SEQ ID NO: 596234 - protein, 15 aa, Homo sapiens
  CDR3 for beta chain variable domain of TCR clone 298117 (TRBV6-1, TRBJ2-3)
CASSERWDSTDTQYF

SEQ ID NO: 596235 - protein, 12 aa, Homo sapiens
  CDR3 for alpha chain variable domain of TCR clone 298118 (TRAV21, TRAJ33)
CAKMDSNYQLIW

SEQ ID NO: 596236 - protein, 14 aa, Homo sapiens
  CDR3 for beta chain variable domain of TCR clone 298118 (TRBV23-1, TRBJ2-5)
CASSFLRSQETQYF

SEQ ID NO: 596237 - protein, 12 aa, Homo sapiens
  CDR3 for alpha chain variable domain of TCR clone 298119 (TRAV12-2, TRAJ31)
CAVNTPDARLLF

SEQ ID NO: 596238 - protein, 15 aa, Homo sapiens
  CDR3 for beta chain variable domain of TCR clone 298119 (TRBV20-1, TRBJ2-7)
CSAESGTSGAYEQYF

SEQ ID NO: 596239 - protein, 16 aa, Homo sapiens
  CDR3 for alpha chain variable domain of TCR clone 298120 (TRAV3, TRAJ37)
CAVRGKGSGNTGKLIF

SEQ ID NO: 596240 - protein, 16 aa, Homo sapiens
  CDR3 for beta chain variable domain of TCR clone 298120 (TRBV28, TRBJ1-5)
CASSFRGGHSNQPQHF

SEQ ID NO: 596241 - protein, 15 aa, Homo sapiens
  CDR3 for alpha chain variable domain of TCR clone 298121 (TRAV3, TRAJ36)
CAVRASQTGANNLFF

SEQ ID NO: 596242 - protein, 14 aa, Homo sapiens
  CDR3 for beta chain variable domain of TCR clone 298121 (TRBV19, TRBJ2-7)
CASTVQGRPYEQYF

SEQ ID NO: 596243 - protein, 15 aa, Homo sapiens
  CDR3 for alpha chain variable domain of TCR clone 298122 (TRAV2, TRAJ11)
CAVEDPNSGYSTLTF

SEQ ID NO: 596244 - protein, 14 aa, Homo sapiens
  CDR3 for beta chain variable domain of TCR clone 298122 (TRBV25-1, TRBJ1-1)
CASTHLGGNTEAFF

SEQ ID NO: 596245 - protein, 12 aa, Homo sapiens
  CDR3 for alpha chain variable domain of TCR clone 298123 (TRAV13-1, TRAJ21)
CAAKEGFNKFYF

SEQ ID NO: 596246 - protein, 12 aa, Homo sapiens
  CDR3 for beta chain variable domain of TCR clone 298123 (TRBV7-6, TRBJ2-3)
WASSTGTDTQYF

SEQ ID NO: 596247 - protein, 12 aa, Homo sapiens
  CDR3 for alpha chain variable domain of TCR clone 298124 (TRAV8-3, TRAJ5)
CAVGGGLRALTF

SEQ ID NO: 596248 - protein, 17 aa, Homo sapiens
  CDR3 for beta chain variable domain of TCR clone 298124 (TRBV4-2, TRBJ1-1)
CASTQFGGGSGNTEAFF

SEQ ID NO: 596249 - protein, 14 aa, Homo sapiens
  CDR3 for alpha chain variable domain of TCR clone 298125 (TRAV8-3, TRAJ4)
CAVGASGGYNKLIF

SEQ ID NO: 596250 - protein, 12 aa, Homo sapiens
  CDR3 for beta chain variable domain of TCR clone 298125 (TRBV7-8, TRBJ2-7)
CASSLAGYEQYF

SEQ ID NO: 596251 - protein, 10 aa, Homo sapiens
  CDR3 for alpha chain variable domain of TCR clone 298126 (TRAV1-2, TRAJ31)
CAFFRCQTHV

SEQ ID NO: 596252 - protein, 14 aa, Homo sapiens
  CDR3 for beta chain variable domain of TCR clone 298126 (TRBV25-1, TRBJ1-1)
CASTHLGGNTEAFF

SEQ ID NO: 596253 - protein, 11 aa, Homo sapiens
  CDR3 for alpha chain variable domain of TCR clone 298127 (TRAV3, TRAJ21)
FAVGNFDKFYF

SEQ ID NO: 596254 - protein, 16 aa, Homo sapiens
  CDR3 for beta chain variable domain of TCR clone 298127 (TRBV19, TRBJ2-1)
CASSKAGPSSYNEQFF

SEQ ID NO: 596255 - protein, 15 aa, Homo sapiens
  CDR3 for alpha chain variable domain of TCR clone 298128 (TRAV12-1, TRAJ9)
CVVSFGYTGGFKTIF

SEQ ID NO: 596256 - protein, 16 aa, Homo sapiens
  CDR3 for beta chain variable domain of TCR clone 298128 (TRBV27, TRBJ2-5)
CASSFGPGGTKETQYF

SEQ ID NO: 596257 - protein, 17 aa, Homo sapiens
  CDR3 for alpha chain variable domain of TCR clone 298129 (TRAV13-1, TRAJ5)
CSNPSLSRDTGRRALTF

SEQ ID NO: 596258 - protein, 16 aa, Homo sapiens
  CDR3 for beta chain variable domain of TCR clone 298129 (TRBV5-1, TRBJ2-5)
CASSLALLRAGETQYF

SEQ ID NO: 596259 - protein, 13 aa, Homo sapiens
  CDR3 for alpha chain variable domain of TCR clone 298130 (TRAV2, TRAJ40)
CAVVTSGTYKYIF

SEQ ID NO: 596260 - protein, 13 aa, Homo sapiens
  CDR3 for beta chain variable domain of TCR clone 298130 (TRBV20-1, TRBJ2-5)
CSAATELQETQYF

SEQ ID NO: 596261 - protein, 11 aa, Homo sapiens
  CDR3 for alpha chain variable domain of TCR clone 298131 (TRAV21, TRAJ48)
CAVDGNEKLTF

SEQ ID NO: 596262 - protein, 15 aa, Homo sapiens
  CDR3 for beta chain variable domain of TCR clone 298131 (TRBV27, TRBJ2-5)
CASSLYPRGGETQYF

SEQ ID NO: 596263 - protein, 14 aa, Homo sapiens
  CDR3 for alpha chain variable domain of TCR clone 298132 (TRAV12-1, TRAJ13)
CVVIDSGGYQKVTF

SEQ ID NO: 596264 - protein, 12 aa, Homo sapiens
  CDR3 for beta chain variable domain of TCR clone 298132 (TRBV29-1, TRBJ2-3)
CSVTGGAETQYF

SEQ ID NO: 596265 - protein, 13 aa, Homo sapiens
  CDR3 for alpha chain variable domain of TCR clone 298133 (TRAV27, TRAJ57)
CAGFQGGSDKLVF

SEQ ID NO: 596266 - protein, 14 aa, Homo sapiens
  CDR3 for beta chain variable domain of TCR clone 298133 (TRBV20-1, TRBJ1-2)
CSGRKDGRAYGYTF

SEQ ID NO: 596267 - protein, 14 aa, Homo sapiens
  CDR3 for alpha chain variable domain of TCR clone 298134 (TRAV13-1, TRAJ10)
CAAKEGFNKFYFGS

SEQ ID NO: 596268 - protein, 12 aa, Homo sapiens
  CDR3 for beta chain variable domain of TCR clone 298134 (TRBV7-8, TRBJ2-7)
CASSLGDREQYF

SEQ ID NO: 596269 - protein, 13 aa, Homo sapiens
  CDR3 for alpha chain variable domain of TCR clone 298135 (TRAV21, TRAJ57)
CAVTQGGSEKLVC

SEQ ID NO: 596270 - protein, 16 aa, Homo sapiens
  CDR3 for beta chain variable domain of TCR clone 298135 (TRBV29-1, TRBJ2-7)
CSVEDAEGGTAYEQYF

SEQ ID NO: 596271 - protein, 13 aa, Homo sapiens
  CDR3 for alpha chain variable domain of TCR clone 298136 (TRAV27, TRAJ57)
CRSAQGGSEKLVF

SEQ ID NO: 596272 - protein, 14 aa, Homo sapiens
  CDR3 for beta chain variable domain of TCR clone 298136 (TRBV11-2, TRBJ1-2)
CASSLGTANYGYTF

SEQ ID NO: 596273 - protein, 16 aa, Homo sapiens
  CDR3 for alpha chain variable domain of TCR clone 298137 (TRAV3, TRAJ37)
CAVRGKGSGNTGKLIF

SEQ ID NO: 596274 - protein, 15 aa, Homo sapiens
  CDR3 for beta chain variable domain of TCR clone 298137 (TRBV6-5, TRBJ2-1)
CASSYDAGAGNEQFF

SEQ ID NO: 596275 - protein, 14 aa, Homo sapiens
  CDR3 for alpha chain variable domain of TCR clone 298138 (TRAV27, TRAJ45)
CAGAQEEVLPDSPL

SEQ ID NO: 596276 - protein, 14 aa, Homo sapiens
  CDR3 for beta chain variable domain of TCR clone 298138 (TRBV7-6, TRBJ2-3)
CASRLGTVTDTQYF

SEQ ID NO: 596277 - protein, 16 aa, Homo sapiens
  CDR3 for alpha chain variable domain of TCR clone 298139 (TRAV4, TRAJ22)
CLVGDLYSGSARQLTF

SEQ ID NO: 596278 - protein, 12 aa, Homo sapiens
  CDR3 for beta chain variable domain of TCR clone 298139 (TRBV11-2, TRBJ2-2)
CASSLPTGELFF

SEQ ID NO: 596279 - protein, 16 aa, Homo sapiens
  CDR3 for alpha chain variable domain of TCR clone 298140 (TRAV20, TRAJ53)
CAVRLGSGGSNYKLTF

SEQ ID NO: 596280 - protein, 12 aa, Homo sapiens
  CDR3 for beta chain variable domain of TCR clone 298140 (TRBV29-1, TRBJ2-3)
CSVVLGADTQYF

SEQ ID NO: 596281 - protein, 14 aa, Homo sapiens
  CDR3 for alpha chain variable domain of TCR clone 298141 (TRAV12-2, TRAJ45)
CALNIGGGADGLTF

SEQ ID NO: 596282 - protein, 13 aa, Homo sapiens
  CDR3 for beta chain variable domain of TCR clone 298141 (TRBV19, TRBJ2-2)
CASSIWSTGELFF

SEQ ID NO: 596283 - protein, 13 aa, Homo sapiens
  CDR3 for alpha chain variable domain of TCR clone 298142 (TRAV2, TRAJ40)
CAVVTSGTYKYIF

SEQ ID NO: 596284 - protein, 13 aa, Homo sapiens
  CDR3 for beta chain variable domain of TCR clone 298142 (TRBV11-2, TRBJ2-1)
CASILRLTHEQFF

SEQ ID NO: 596285 - protein, 11 aa, Homo sapiens
  CDR3 for alpha chain variable domain of TCR clone 298143 (TRAV17, TRAJ39)
CATGAAGNMLT

SEQ ID NO: 596286 - protein, 14 aa, Homo sapiens
  CDR3 for beta chain variable domain of TCR clone 298143 (TRBV7-9, TRBJ1-2)
CASSRQGANYGYTF

SEQ ID NO: 596287 - protein, 14 aa, Homo sapiens
  CDR3 for alpha chain variable domain of TCR clone 298144 (TRAV35, TRAJ41)
CAGQASVRRNALNF

SEQ ID NO: 596288 - protein, 14 aa, Homo sapiens
  CDR3 for beta chain variable domain of TCR clone 298144 (TRBV20-1, TRBJ1-2)
CIASEQGAVYGYTF

SEQ ID NO: 596289 - protein, 14 aa, Homo sapiens
  CDR3 for alpha chain variable domain of TCR clone 298145 (TRAV12-3, TRAJ58)
CAMSTETSGSRLTF

SEQ ID NO: 596290 - protein, 17 aa, Homo sapiens
  CDR3 for beta chain variable domain of TCR clone 298145 (TRBV27, TRBJ2-6)
CASSLTGFASGANVLTF

SEQ ID NO: 596291 - protein, 14 aa, Homo sapiens
  CDR3 for alpha chain variable domain of TCR clone 298146 (TRAV30, TRAJ26)
CGTEIVSYGQNFVF

SEQ ID NO: 596292 - protein, 15 aa, Homo sapiens
  CDR3 for beta chain variable domain of TCR clone 298146 (TRBV20-1, TRBJ1-1)
CSASRGVTGNTEAFF

SEQ ID NO: 596293 - protein, 14 aa, Homo sapiens
  CDR3 for alpha chain variable domain of TCR clone 298147 (TRAV12-2, TRAJ40)
CAAKIPSGTHKYTF

SEQ ID NO: 596294 - protein, 14 aa, Homo sapiens
  CDR3 for beta chain variable domain of TCR clone 298147 (TRBV20-1, TRBJ1-1)
CSAQTRIGGTEAFF

SEQ ID NO: 596295 - protein, 13 aa, Homo sapiens
  CDR3 for alpha chain variable domain of TCR clone 298148 (TRAV21, TRAJ27)
CAARPGNAGKSTF

SEQ ID NO: 596296 - protein, 14 aa, Homo sapiens
  CDR3 for beta chain variable domain of TCR clone 298148 (TRBV7-3, TRBJ1-5)
RASSFSGCNQPQHF

SEQ ID NO: 596297 - protein, 18 aa, Homo sapiens
  CDR3 for alpha chain variable domain of TCR clone 298149 (TRAV21, TRAJ52)
CAVRPSPAGGTSYGKLTF

SEQ ID NO: 596298 - protein, 15 aa, Homo sapiens
  CDR3 for beta chain variable domain of TCR clone 298149 (TRBV2, TRBJ2-1)
CASSKLAGGYNEQFF

SEQ ID NO: 596299 - protein, 16 aa, Homo sapiens
  CDR3 for alpha chain variable domain of TCR clone 298150 (TRAV8-3, TRAJ13)
CAVGAYPSGGYQKVTF

SEQ ID NO: 596300 - protein, 16 aa, Homo sapiens
  CDR3 for beta chain variable domain of TCR clone 298150 (TRBV7-7, TRBJ2-1)
CASSLASGTSYNEQFF

SEQ ID NO: 596301 - protein, 12 aa, Homo sapiens
  CDR3 for alpha chain variable domain of TCR clone 298151 (TRAV17, TRAJ30)
CVSERRDDKIIF

SEQ ID NO: 596302 - protein, 14 aa, Homo sapiens
  CDR3 for beta chain variable domain of TCR clone 298151 (TRBV7-7, TRBJ2-2)
CASSRDRSTGELFF

SEQ ID NO: 596303 - protein, 14 aa, Homo sapiens
  CDR3 for alpha chain variable domain of TCR clone 298152 (TRAV12-1, TRAJ17)
CVVKYKAAGNKLTF

SEQ ID NO: 596304 - protein, 14 aa, Homo sapiens
  CDR3 for beta chain variable domain of TCR clone 298152 (TRBV7-2, TRBJ2-7)
CASRSQGAAYEQYF

SEQ ID NO: 596305 - protein, 11 aa, Homo sapiens
  CDR3 for alpha chain variable domain of TCR clone 298153 (TRAV13-1, TRAJ6)
CDTLGSYIPTF

SEQ ID NO: 596306 - protein, 13 aa, Homo sapiens
  CDR3 for beta chain variable domain of TCR clone 298153 (TRBV6-6, TRBJ2-1)
CASSLHQGDEQFF

SEQ ID NO: 596307 - protein, 12 aa, Homo sapiens
  CDR3 for alpha chain variable domain of TCR clone 298154 (TRAV1-2, TRAJ29)
CAVPSGNTPLVF

SEQ ID NO: 596308 - protein, 13 aa, Homo sapiens
  CDR3 for beta chain variable domain of TCR clone 298154 (TRBV15, TRBJ2-7)
CATSTTGHYEQYV

SEQ ID NO: 596309 - protein, 14 aa, Homo sapiens
  CDR3 for alpha chain variable domain of TCR clone 298155 (TRAV17, TRAJ54)
CATDANQGAQKLVF

SEQ ID NO: 596310 - protein, 12 aa, Homo sapiens
  CDR3 for beta chain variable domain of TCR clone 298155 (TRBV6-3, TRBJ2-1)
CASSGSYNERFF

SEQ ID NO: 596311 - protein, 19 aa, Homo sapiens
  CDR3 for alpha chain variable domain of TCR clone 298156 (TRAV29/DV5, TRAJ49)
CSVPLCSKLTVDTGNQFYF

SEQ ID NO: 596312 - protein, 17 aa, Homo sapiens
  CDR3 for beta chain variable domain of TCR clone 298156 (TRBV13, TRBJ2-3)
CASSLSRVAGGRNTQYF

SEQ ID NO: 596313 - protein, 15 aa, Homo sapiens
  CDR3 for alpha chain variable domain of TCR clone 298157 (TRAV12-1, TRAJ44)
CVVFVNTGTASKLTF

SEQ ID NO: 596314 - protein, 15 aa, Homo sapiens
  CDR3 for beta chain variable domain of TCR clone 298157 (TRBV7-9, TRBJ1-4)
CASSARTGGNEKLFF

SEQ ID NO: 596315 - protein, 15 aa, Homo sapiens
  CDR3 for alpha chain variable domain of TCR clone 298158 (TRAV3, TRAJ9)
CAVRDINTGGFKTIF

SEQ ID NO: 596316 - protein, 13 aa, Homo sapiens
  CDR3 for beta chain variable domain of TCR clone 298158 (TRBV19, TRBJ2-7)
CASSIPIVREQYF

SEQ ID NO: 596317 - protein, 14 aa, Homo sapiens
  CDR3 for alpha chain variable domain of TCR clone 298159 (TRAV12-1, TRAJ42)
CVVIYGGSQGNHIF

SEQ ID NO: 596318 - protein, 17 aa, Homo sapiens
  CDR3 for beta chain variable domain of TCR clone 298159 (TRBV3-1, TRBJ2-6)
CASSSNTGPAGANDLTF

SEQ ID NO: 596319 - protein, 19 aa, Homo sapiens
  CDR3 for alpha chain variable domain of TCR clone 298160 (TRAV17, TRAJ40)
TASRAADTASYFCVSKYIF

SEQ ID NO: 596320 - protein, 17 aa, Homo sapiens
  CDR3 for beta chain variable domain of TCR clone 298160 (TRBV11-2, TRBJ2-4)
CASSFLALGGAGDSQYF

SEQ ID NO: 596321 - protein, 13 aa, Homo sapiens
  CDR3 for alpha chain variable domain of TCR clone 298161 (TRAV23/DV6, TRAJ58)
CAATGTSGSRLTF

SEQ ID NO: 596322 - protein, 13 aa, Homo sapiens
  CDR3 for beta chain variable domain of TCR clone 298161 (TRBV5-5, TRBJ1-2)
CASSFWRGEAYTF

SEQ ID NO: 596323 - protein, 15 aa, Homo sapiens
  CDR3 for alpha chain variable domain of TCR clone 298162 (TRAV3, TRAJ3)
CAVRDMSSSASKIIF

SEQ ID NO: 596324 - protein, 14 aa, Homo sapiens
  CDR3 for beta chain variable domain of TCR clone 298162 (TRBV19, TRBJ2-1)
RASPTFVLSGEQFF

SEQ ID NO: 596325 - protein, 13 aa, Homo sapiens
  CDR3 for alpha chain variable domain of TCR clone 298163 (TRAV29/DV5, TRAJ31)
CAASRNNNARLMF

SEQ ID NO: 596326 - protein, 15 aa, Homo sapiens
  CDR3 for beta chain variable domain of TCR clone 298163 (TRBV10-2, TRBJ2-5)
CASRGSGGPQETQYF

SEQ ID NO: 596327 - protein, 12 aa, Homo sapiens
  CDR3 for alpha chain variable domain of TCR clone 298164 (TRAV1-2, TRAJ33)
CAALDSNYQLIW

SEQ ID NO: 596328 - protein, 15 aa, Homo sapiens
  CDR3 for beta chain variable domain of TCR clone 298164 (TRBV9, TRBJ1-4)
CASSVGGSTNEKLFF

SEQ ID NO: 596329 - protein, 12 aa, Homo sapiens
  CDR3 for alpha chain variable domain of TCR clone 298165 (TRAV13-1, TRAJ21)
CAAKEGCNKFYF

SEQ ID NO: 596330 - protein, 14 aa, Homo sapiens
  CDR3 for beta chain variable domain of TCR clone 298165 (TRBV23-1, TRBJ2-5)
CASSFLRSQETQHF

SEQ ID NO: 596331 - protein, 11 aa, Homo sapiens
  CDR3 for alpha chain variable domain of TCR clone 298166 (TRAV3, TRAJ21)
CAVGNFYKFHF

SEQ ID NO: 596332 - protein, 16 aa, Homo sapiens
  CDR3 for beta chain variable domain of TCR clone 298166 (TRBV19, TRBJ2-1)
CASSKAGPSSYNEQFF

SEQ ID NO: 596333 - protein, 16 aa, Homo sapiens
  CDR3 for alpha chain variable domain of TCR clone 298167 (TRAV8-3, TRAJ13)
CTVGAYPSGGYQKVTF

SEQ ID NO: 596334 - protein, 15 aa, Homo sapiens
  CDR3 for beta chain variable domain of TCR clone 298167 (TRBV19, TRBJ1-5)
CASSIVWADNQPQHF

SEQ ID NO: 596335 - protein, 16 aa, Homo sapiens
  CDR3 for alpha chain variable domain of TCR clone 298168 (TRAV30, TRAJ24)
CGTEIVDADSWGKFQF

SEQ ID NO: 596336 - protein, 12 aa, Homo sapiens
  CDR3 for beta chain variable domain of TCR clone 298168 (TRBV19, TRBJ2-5)
CASGTGQETQYF

SEQ ID NO: 596337 - protein, 14 aa, Homo sapiens
  CDR3 for alpha chain variable domain of TCR clone 298169 (TRAV12-3, TRAJ10)
SHLPLTGGGNKLTF

SEQ ID NO: 596338 - protein, 18 aa, Homo sapiens
  CDR3 for beta chain variable domain of TCR clone 298169 (TRBV7-9, TRBJ2-1)
CASSKTGFTTTGNNEQFF

SEQ ID NO: 596339 - protein, 14 aa, Homo sapiens
  CDR3 for alpha chain variable domain of TCR clone 298170 (TRAV13-2, TRAJ11)
CAETGNSGYSTLTC

SEQ ID NO: 596340 - protein, 16 aa, Homo sapiens
  CDR3 for beta chain variable domain of TCR clone 298170 (TRBV10-3, TRBJ2-1)
CAISGVGDGGGGEQFF

SEQ ID NO: 596341 - protein, 17 aa, Homo sapiens
  CDR3 for alpha chain variable domain of TCR clone 298171 (TRAV21, TRAJ53)
CCEGGENSGGSNYKLTF

SEQ ID NO: 596342 - protein, 14 aa, Homo sapiens
  CDR3 for beta chain variable domain of TCR clone 298171 (TRBV11-3, TRBJ1-5)
LTGDRLYYNQPQHF

SEQ ID NO: 596343 - protein, 16 aa, Homo sapiens
  CDR3 for alpha chain variable domain of TCR clone 298172 (TRAV27, TRAJ48)
TAAQPGDTGLYLPLTF

SEQ ID NO: 596344 - protein, 11 aa, Homo sapiens
  CDR3 for beta chain variable domain of TCR clone 298172 (TRBV19, TRBJ1-1)
CASSIGSEAFF

SEQ ID NO: 596345 - protein, 15 aa, Homo sapiens
  CDR3 for alpha chain variable domain of TCR clone 298173 (TRAV23/DV6, TRAJ30)
CAASSQESRDDKIIF

SEQ ID NO: 596346 - protein, 15 aa, Homo sapiens
  CDR3 for beta chain variable domain of TCR clone 298173 (TRBV28, TRBJ1-4)
CASSLGTGTKEKLFF

SEQ ID NO: 596347 - protein, 13 aa, Homo sapiens
  CDR3 for alpha chain variable domain of TCR clone 298174 (TRAV16, TRAJ11)
YALTQSGYSTLAF

SEQ ID NO: 596348 - protein, 17 aa, Homo sapiens
  CDR3 for beta chain variable domain of TCR clone 298174 (TRBV5-1, TRBJ1-5)
CASSLAFLTRGNQPQHF

SEQ ID NO: 596349 - protein, 17 aa, Homo sapiens
  CDR3 for alpha chain variable domain of TCR clone 298175 (TRAV26-1, TRAJ37)
CIVRVITVSSNTGKLIF

SEQ ID NO: 596350 - protein, 14 aa, Homo sapiens
  CDR3 for beta chain variable domain of TCR clone 298175 (TRBV19, TRBJ2-1)
CASPNFVLSGEQFF

SEQ ID NO: 596351 - protein, 18 aa, Homo sapiens
  CDR3 for alpha chain variable domain of TCR clone 298176 (TRAV21, TRAJ52)
CAVGPSPAGGTSYGKLTF

SEQ ID NO: 596352 - protein, 17 aa, Homo sapiens
  CDR3 for beta chain variable domain of TCR clone 298176 (TRBV13, TRBJ2-3)
CASSLSRVAGGRNTPYF

SEQ ID NO: 596353 - protein, 12 aa, Homo sapiens
  CDR3 for alpha chain variable domain of TCR clone 298177 (TRAV20, TRAJ20)
RAVRFNDYKLSF

SEQ ID NO: 596354 - protein, 14 aa, Homo sapiens
  CDR3 for beta chain variable domain of TCR clone 298177 (TRBV20-1, TRBJ2-1)
CSAQIGGSANEQFF

SEQ ID NO: 596355 - protein, 13 aa, Homo sapiens
  CDR3 for alpha chain variable domain of TCR clone 298178 (TRAV8-3, TRAJ28)
CAVGADGSYQLTF

SEQ ID NO: 596356 - protein, 15 aa, Homo sapiens
  CDR3 for beta chain variable domain of TCR clone 298178 (TRBV7-9, TRBJ1-5)
CASSQGHQPNQPQHF

SEQ ID NO: 596357 - protein, 17 aa, Homo sapiens
  CDR3 for alpha chain variable domain of TCR clone 298179 (TRAV26-2, TRAJ37)
CILRDRGGSSNTGKLIL

SEQ ID NO: 596358 - protein, 13 aa, Homo sapiens
  CDR3 for beta chain variable domain of TCR clone 298179 (TRBV23-1, TRBJ1-4)
CASRGKFNEKLFF

SEQ ID NO: 596359 - protein, 11 aa, Homo sapiens
  CDR3 for alpha chain variable domain of TCR clone 298180 (TRAV21, TRAJ33)
CAVLSNYQLIW

SEQ ID NO: 596360 - protein, 15 aa, Homo sapiens
  CDR3 for beta chain variable domain of TCR clone 298180 (TRBV11-2, TRBJ2-7)
CASSLMVGGSYEKYF

SEQ ID NO: 596361 - protein, 17 aa, Homo sapiens
  CDR3 for alpha chain variable domain of TCR clone 298181 (TRAV3, TRAJ42)
CAVRGRDYGGSQGNLIF

SEQ ID NO: 596362 - protein, 20 aa, Homo sapiens
  CDR3 for beta chain variable domain of TCR clone 298181 (TRBV28, TRBJ2-1)
CASTPIGRSPGLAGGNEQFF

SEQ ID NO: 596363 - protein, 15 aa, Homo sapiens
  CDR3 for alpha chain variable domain of TCR clone 298182 (TRAV26-1, TRAJ40)
CIVRVTTSGTYKYIF

SEQ ID NO: 596364 - protein, 13 aa, Homo sapiens
  CDR3 for beta chain variable domain of TCR clone 298182 (TRBV4-2, TRBJ1-1)
CASSQAGNTEAFF

SEQ ID NO: 596365 - protein, 13 aa, Homo sapiens
  CDR3 for alpha chain variable domain of TCR clone 298183 (TRAV12-3, TRAJ13)
CAMSSGGYQKVTF

SEQ ID NO: 596366 - protein, 13 aa, Homo sapiens
  CDR3 for beta chain variable domain of TCR clone 298183 (TRBV20-1, TRBJ1-1)
CSAPPGGDTEAFF

SEQ ID NO: 596367 - protein, 12 aa, Homo sapiens
  CDR3 for alpha chain variable domain of TCR clone 298184 (TRAV12-3, TRAJ29)
CAAREGNTPLVF

SEQ ID NO: 596368 - protein, 17 aa, Homo sapiens
  CDR3 for beta chain variable domain of TCR clone 298184 (TRBV18, TRBJ2-1)
CASSPLAAGAEDNEQFF

SEQ ID NO: 596369 - protein, 14 aa, Homo sapiens
  CDR3 for alpha chain variable domain of TCR clone 298185 (TRAV13-1, TRAJ9)
CAASALTGGFKTIF

SEQ ID NO: 596370 - protein, 16 aa, Homo sapiens
  CDR3 for beta chain variable domain of TCR clone 298185 (TRBV11-2, TRBJ2-7)
CASSLAPTGVNYEQYF

SEQ ID NO: 596371 - protein, 11 aa, Homo sapiens
  CDR3 for alpha chain variable domain of TCR clone 298186 (TRAV17, TRAJ39)
CATNPYNMLTF

SEQ ID NO: 596372 - protein, 13 aa, Homo sapiens
  CDR3 for beta chain variable domain of TCR clone 298186 (TRBV7-8, TRBJ2-1)
CASTRDTVDEQFF

SEQ ID NO: 596373 - protein, 14 aa, Homo sapiens
  CDR3 for alpha chain variable domain of TCR clone 298187 (TRAV27, TRAJ36)
CAGPPKRGANNLFF

SEQ ID NO: 596374 - protein, 15 aa, Homo sapiens
  CDR3 for beta chain variable domain of TCR clone 298187 (TRBV18, TRBJ2-7)
CASSPASTPSYEQYF

SEQ ID NO: 596375 - protein, 13 aa, Homo sapiens
  CDR3 for alpha chain variable domain of TCR clone 298188 (TRAV8-3, TRAJ36)
CAVGATGANNLFV

SEQ ID NO: 596376 - protein, 16 aa, Homo sapiens
  CDR3 for beta chain variable domain of TCR clone 298188 (TRBV11-1, TRBJ1-1)
CATNPRDRAFNTEAFF

SEQ ID NO: 596377 - protein, 17 aa, Homo sapiens
  CDR3 for alpha chain variable domain of TCR clone 298189 (TRAV13-1, TRAJ52)
CAASSGAGGTSYGKLTF

SEQ ID NO: 596378 - protein, 16 aa, Homo sapiens
  CDR3 for beta chain variable domain of TCR clone 298189 (TRBV27, TRBJ2-5)
CASSFGPGGTKETQYF

SEQ ID NO: 596379 - protein, 14 aa, Homo sapiens
  CDR3 for alpha chain variable domain of TCR clone 298190 (TRAV23/DV6, TRAJ40)
WAARKNSGTYKYIF

SEQ ID NO: 596380 - protein, 14 aa, Homo sapiens
  CDR3 for beta chain variable domain of TCR clone 298190 (TRBV10-3, TRBJ2-5)
CAISERDYQETQYF

SEQ ID NO: 596381 - protein, 13 aa, Homo sapiens
  CDR3 for alpha chain variable domain of TCR clone 298191 (TRAV16, TRAJ11)
CALMNSGYSTLTF

SEQ ID NO: 596382 - protein, 14 aa, Homo sapiens
  CDR3 for beta chain variable domain of TCR clone 298191 (TRBV7-2, TRBJ2-2)
CASRGQGAAGELFF

SEQ ID NO: 596383 - protein, 12 aa, Homo sapiens
  CDR3 for alpha chain variable domain of TCR clone 298192 (TRAV3, TRAJ43)
CAVRDPNIDMRF

SEQ ID NO: 596384 - protein, 15 aa, Homo sapiens
  CDR3 for beta chain variable domain of TCR clone 298192 (TRBV27, TRBJ1-5)
CASSLGTGFDQPQHF

SEQ ID NO: 596385 - protein, 15 aa, Homo sapiens
  CDR3 for alpha chain variable domain of TCR clone 298193 (TRAV27, TRAJ38)
CAARRNAGNNRKMIW

SEQ ID NO: 596386 - protein, 14 aa, Homo sapiens
  CDR3 for beta chain variable domain of TCR clone 298193 (TRBV7-8, TRBJ2-3)
CASSLEAGTDTQYF

SEQ ID NO: 596387 - protein, 22 aa, Homo sapiens
  CDR3 for alpha chain variable domain of TCR clone 298194 (TRAV30, TRAJ48)
TASQLSYSGTYFFGIGNEKLTF

SEQ ID NO: 596388 - protein, 15 aa, Homo sapiens
  CDR3 for beta chain variable domain of TCR clone 298194 (TRBV28, TRBJ2-5)
CASSPPWSYQETQYF

SEQ ID NO: 596389 - protein, 16 aa, Homo sapiens
  CDR3 for alpha chain variable domain of TCR clone 298195 (TRAV4, TRAJ6)
CLVGVYASGGSYIPTF

SEQ ID NO: 596390 - protein, 15 aa, Homo sapiens
  CDR3 for beta chain variable domain of TCR clone 298195 (TRBV14, TRBJ2-5)
CASRQGDRDQETQYF

SEQ ID NO: 596391 - protein, 18 aa, Homo sapiens
  CDR3 for alpha chain variable domain of TCR clone 298196 (TRAV13-1, TRAJ52)
CAAKNPNAGGTSYGKLTF

SEQ ID NO: 596392 - protein, 12 aa, Homo sapiens
  CDR3 for beta chain variable domain of TCR clone 298196 (TRBV4-3, TRBJ2-1)
CASSLSCYEQFF

SEQ ID NO: 596393 - protein, 18 aa, Homo sapiens
  CDR3 for alpha chain variable domain of TCR clone 298197 (TRAV26-1, TRAJ30)
CCVLFHRQSTNRDDKIII

SEQ ID NO: 596394 - protein, 18 aa, Homo sapiens
  CDR3 for beta chain variable domain of TCR clone 298197 (TRBV4-1, TRBJ1-5)
CASSQDPRGQGLNQPQHF

SEQ ID NO: 596395 - protein, 15 aa, Homo sapiens
  CDR3 for alpha chain variable domain of TCR clone 298198 (TRAV1-2, TRAJ32)
CAVRGYGGATNKLIF

SEQ ID NO: 596396 - protein, 17 aa, Homo sapiens
  CDR3 for beta chain variable domain of TCR clone 298198 (TRBV15, TRBJ1-5)
CATSRAPPGTRNQPQHF

SEQ ID NO: 596397 - protein, 19 aa, Homo sapiens
  CDR3 for alpha chain variable domain of TCR clone 298199 (TRAV2, TRAJ20)
ILQVREADAAVYRDCKLSF

SEQ ID NO: 596398 - protein, 13 aa, Homo sapiens
  CDR3 for beta chain variable domain of TCR clone 298199 (TRBV7-3, TRBJ1-1)
CASRQDWGAEAFF

SEQ ID NO: 596399 - protein, 16 aa, Homo sapiens
  CDR3 for alpha chain variable domain of TCR clone 298200 (TRAV16, TRAJ57)
CAPYLITQCGSEKLVF

SEQ ID NO: 596400 - protein, 17 aa, Homo sapiens
  CDR3 for beta chain variable domain of TCR clone 298200 (TRBV24-1, TRBJ2-4)
CATSDAEARGVRNIQYF

SEQ ID NO: 596401 - protein, 18 aa, Homo sapiens
  CDR3 for alpha chain variable domain of TCR clone 298201 (TRAV21, TRAJ52)
CAVRPSPAGGTSYGKLTF

SEQ ID NO: 596402 - protein, 15 aa, Homo sapiens
  CDR3 for beta chain variable domain of TCR clone 298201 (TRBV10-3, TRBJ2-3)
CAISPTSGGTDTQYF

SEQ ID NO: 596403 - protein, 12 aa, Homo sapiens
  CDR3 for alpha chain variable domain of TCR clone 298202 (TRAV12-3, TRAJ5)
CAMDTGRRALTF

SEQ ID NO: 596404 - protein, 13 aa, Homo sapiens
  CDR3 for beta chain variable domain of TCR clone 298202 (TRBV7-7, TRBJ2-2)
CTSSLTSAGELFF

SEQ ID NO: 596405 - protein, 17 aa, Homo sapiens
  CDR3 for alpha chain variable domain of TCR clone 298203 (TRAV8-6, TRAJ58)
CAVSSYVGETSGSRLTF

SEQ ID NO: 596406 - protein, 14 aa, Homo sapiens
  CDR3 for beta chain variable domain of TCR clone 298203 (TRBV4-2, TRBJ2-1)
CASGLDRAYNEQFF

SEQ ID NO: 596407 - protein, 16 aa, Homo sapiens
  CDR3 for alpha chain variable domain of TCR clone 298204 (TRAV8-3, TRAJ13)
CAVGAYPSGGYQKVTF

SEQ ID NO: 596408 - protein, 14 aa, Homo sapiens
  CDR3 for beta chain variable domain of TCR clone 298204 (TRBV7-3, TRBJ2-1)
CASSLAGGQNEQFF

SEQ ID NO: 596409 - protein, 14 aa, Homo sapiens
  CDR3 for alpha chain variable domain of TCR clone 298205 (TRAV8-3, TRAJ13)
CAVGAQEGYQKVTF

SEQ ID NO: 596410 - protein, 16 aa, Homo sapiens
  CDR3 for beta chain variable domain of TCR clone 298205 (TRBV9, TRBJ2-1)
CASSVGGGGNYNEQFF

SEQ ID NO: 596411 - protein, 15 aa, Homo sapiens
  CDR3 for alpha chain variable domain of TCR clone 298206 (TRAV4, TRAJ39)
CLLGPNNNAGNMLTF

SEQ ID NO: 596412 - protein, 13 aa, Homo sapiens
  CDR3 for beta chain variable domain of TCR clone 298206 (TRBV11-2, TRBJ2-5)
CASSSTGEETQYF

SEQ ID NO: 596413 - protein, 14 aa, Homo sapiens
  CDR3 for alpha chain variable domain of TCR clone 298207 (TRAV1-2, TRAJ8)
CAVREDTGFQELVF

SEQ ID NO: 596414 - protein, 14 aa, Homo sapiens
  CDR3 for beta chain variable domain of TCR clone 298207 (TRBV2, TRBJ2-5)
CSSKKATGLETQYF

SEQ ID NO: 596415 - protein, 14 aa, Homo sapiens
  CDR3 for alpha chain variable domain of TCR clone 298208 (TRAV1-2, TRAJ8)
CAVREDTGFQKLVF

SEQ ID NO: 596416 - protein, 14 aa, Homo sapiens
  CDR3 for beta chain variable domain of TCR clone 298208 (TRBV7-3, TRBJ2-2)
CASSLNSNTGELFF

SEQ ID NO: 596417 - protein, 12 aa, Homo sapiens
  CDR3 for alpha chain variable domain of TCR clone 298209 (TRAV12-3, TRAJ17)
CAMTLTGNKLTF

SEQ ID NO: 596418 - protein, 16 aa, Homo sapiens
  CDR3 for beta chain variable domain of TCR clone 298209 (TRBV4-1, TRBJ2-7)
CASSLTAGQATYEQYF

SEQ ID NO: 596419 - protein, 18 aa, Homo sapiens
  CDR3 for alpha chain variable domain of TCR clone 298210 (TRAV12-3, TRAJ52)
CAMSVGGAGGTSYGKLTF

SEQ ID NO: 596420 - protein, 11 aa, Homo sapiens
  CDR3 for beta chain variable domain of TCR clone 298210 (TRBV11-2, TRBJ2-5)
CQQLRQETQYF

SEQ ID NO: 596421 - protein, 14 aa, Homo sapiens
  CDR3 for alpha chain variable domain of TCR clone 298211 (TRAV1-2, TRAJ16)
CSVNRFSDGQKLLF

SEQ ID NO: 596422 - protein, 13 aa, Homo sapiens
  CDR3 for beta chain variable domain of TCR clone 298211 (TRBV12-4, TRBJ2-5)
CASSLGGSRTQYF

SEQ ID NO: 596423 - protein, 13 aa, Homo sapiens
  CDR3 for alpha chain variable domain of TCR clone 298212 (TRAV1-2, TRAJ9)
CAALNTGGCKTIF

SEQ ID NO: 596424 - protein, 13 aa, Homo sapiens
  CDR3 for beta chain variable domain of TCR clone 298212 (TRBV19, TRBJ1-2)
CASSVPGQDGDTF

SEQ ID NO: 596425 - protein, 17 aa, Homo sapiens
  CDR3 for alpha chain variable domain of TCR clone 298213 (TRAV8-6, TRAJ58)
CAVSSWVGETSGSRLTF

SEQ ID NO: 596426 - protein, 14 aa, Homo sapiens
  CDR3 for beta chain variable domain of TCR clone 298213 (TRBV4-2, TRBJ2-1)
CASGLDRASNEQFF

SEQ ID NO: 596427 - protein, 19 aa, Homo sapiens
  CDR3 for alpha chain variable domain of TCR clone 298214 (TRAV30, TRAJ32)
RNLLLWHRDSGGATNKLIF

SEQ ID NO: 596428 - protein, 17 aa, Homo sapiens
  CDR3 for beta chain variable domain of TCR clone 298214 (TRBV5-4, TRBJ2-1)
CASSSAGGRGPYNEQFF

SEQ ID NO: 596429 - protein, 13 aa, Homo sapiens
  CDR3 for alpha chain variable domain of TCR clone 298215 (TRAV2, TRAJ15)
CAVASQSGTALIF

SEQ ID NO: 596430 - protein, 15 aa, Homo sapiens
  CDR3 for beta chain variable domain of TCR clone 298215 (TRBV7-3, TRBJ2-2)
CASSETGQGTGELFF

SEQ ID NO: 596431 - protein, 14 aa, Homo sapiens
  CDR3 for alpha chain variable domain of TCR clone 298216 (TRAV8-2, TRAJ11)
CVVSDKSGYSTLTF

SEQ ID NO: 596432 - protein, 16 aa, Homo sapiens
  CDR3 for beta chain variable domain of TCR clone 298216 (TRBV28, TRBJ2-1)
CASSSPEYPRDNEQFF

SEQ ID NO: 596433 - protein, 14 aa, Homo sapiens
  CDR3 for alpha chain variable domain of TCR clone 298217 (TRAV1-2, TRAJ16)
CAFNRFSDGQKLLF

SEQ ID NO: 596434 - protein, 14 aa, Homo sapiens
  CDR3 for beta chain variable domain of TCR clone 298217 (TRBV5-5, TRBJ1-2)
CASSLDPYNYGYTF

SEQ ID NO: 596435 - protein, 18 aa, Homo sapiens
  CDR3 for alpha chain variable domain of TCR clone 298218 (TRAV26-2, TRAJ54)
CILRDVEVGIQGAQKLVF

SEQ ID NO: 596436 - protein, 16 aa, Homo sapiens
  CDR3 for beta chain variable domain of TCR clone 298218 (TRBV6-1, TRBJ2-5)
CASIETLDRGAETQYF

SEQ ID NO: 596437 - protein, 11 aa, Homo sapiens
  CDR3 for alpha chain variable domain of TCR clone 298219 (TRAV13-1, TRAJ40)
GAVSGTYKYIF

SEQ ID NO: 596438 - protein, 16 aa, Homo sapiens
  CDR3 for beta chain variable domain of TCR clone 298219 (TRBV10-3, TRBJ2-3)
CAISVSRLALTDTQYF

SEQ ID NO: 596439 - protein, 17 aa, Homo sapiens
  CDR3 for alpha chain variable domain of TCR clone 298220 (TRAV38-2/DV8, TRAJ42)
CALHPSTYGGSQGNLIF

SEQ ID NO: 596440 - protein, 14 aa, Homo sapiens
  CDR3 for beta chain variable domain of TCR clone 298220 (TRBV7-9, TRBJ1-1)
CASTPLQSYTEAFF

SEQ ID NO: 596441 - protein, 13 aa, Homo sapiens
  CDR3 for alpha chain variable domain of TCR clone 298221 (TRAV13-1, TRAJ39)
CSKYSNAGYMLTF

SEQ ID NO: 596442 - protein, 16 aa, Homo sapiens
  CDR3 for beta chain variable domain of TCR clone 298221 (TRBV7-2, TRBJ2-3)
CASSLVALYSTDTQYF

SEQ ID NO: 596443 - protein, 16 aa, Homo sapiens
  CDR3 for alpha chain variable domain of TCR clone 298222 (TRAV26-1, TRAJ37)
CIVRGDGSGNTGKLIF

SEQ ID NO: 596444 - protein, 17 aa, Homo sapiens
  CDR3 for beta chain variable domain of TCR clone 298222 (TRBV7-8, TRBJ2-6)
CASSAGTGGAGANVLTF

SEQ ID NO: 596445 - protein, 15 aa, Homo sapiens
  CDR3 for alpha chain variable domain of TCR clone 298223 (TRAV17, TRAJ13)
CATDAGSGGYQKVTF

SEQ ID NO: 596446 - protein, 14 aa, Homo sapiens
  CDR3 for beta chain variable domain of TCR clone 298223 (TRBV7-2, TRBJ2-5)
CASSLSGGGETQYF

SEQ ID NO: 596447 - protein, 14 aa, Homo sapiens
  CDR3 for alpha chain variable domain of TCR clone 298224 (TRAV3, TRAJ34)
CAVRAPGNTDKLIF

SEQ ID NO: 596448 - protein, 17 aa, Homo sapiens
  CDR3 for beta chain variable domain of TCR clone 298224 (TRBV20-1, TRBJ2-5)
CSAAPGLARGISYEQYF

SEQ ID NO: 596449 - protein, 13 aa, Homo sapiens
  CDR3 for alpha chain variable domain of TCR clone 298225 (TRAV30, TRAJ24)
CGTVTDSWGKLQF

SEQ ID NO: 596450 - protein, 13 aa, Homo sapiens
  CDR3 for beta chain variable domain of TCR clone 298225 (TRBV5-1, TRBJ1-4)
CASSLNSGEKLFF

SEQ ID NO: 596451 - protein, 17 aa, Homo sapiens
  CDR3 for alpha chain variable domain of TCR clone 298226 (TRAV29/DV5, TRAJ52)
CAATSTADGTSYGKLTF

SEQ ID NO: 596452 - protein, 13 aa, Homo sapiens
  CDR3 for beta chain variable domain of TCR clone 298226 (TRBV12-4, TRBJ2-7)
CASSPTETYEQYF

SEQ ID NO: 596453 - protein, 13 aa, Homo sapiens
  CDR3 for alpha chain variable domain of TCR clone 298227 (TRAV2, TRAJ24)
CAVQLTAGGNCSL

SEQ ID NO: 596454 - protein, 14 aa, Homo sapiens
  CDR3 for beta chain variable domain of TCR clone 298227 (TRBV13, TRBJ2-5)
CASSLGRGQETQYF

SEQ ID NO: 596455 - protein, 12 aa, Homo sapiens
  CDR3 for alpha chain variable domain of TCR clone 298228 (TRAV2, TRAJ9)
CAVGAGGFKTIF

SEQ ID NO: 596456 - protein, 18 aa, Homo sapiens
  CDR3 for beta chain variable domain of TCR clone 298228 (TRBV7-7, TRBJ2-1)
CASSLALTSGRSYSEQFF

SEQ ID NO: 596457 - protein, 15 aa, Homo sapiens
  CDR3 for alpha chain variable domain of TCR clone 298229 (TRAV16, TRAJ57)
CALSGGQGGSEKLVF

SEQ ID NO: 596458 - protein, 13 aa, Homo sapiens
  CDR3 for beta chain variable domain of TCR clone 298229 (TRBV11-2, TRBJ2-5)
CANSFSSQETQYF

SEQ ID NO: 596459 - protein, 13 aa, Homo sapiens
  CDR3 for alpha chain variable domain of TCR clone 298230 (TRAV21, TRAJ20)
CAVGLRVDYKLSF

SEQ ID NO: 596460 - protein, 15 aa, Homo sapiens
  CDR3 for beta chain variable domain of TCR clone 298230 (TRBV11-2, TRBJ2-1)
CASSLGTSGLNEQFF

SEQ ID NO: 596461 - protein, 14 aa, Homo sapiens
  CDR3 for alpha chain variable domain of TCR clone 298231 (TRAV35, TRAJ54)
CAGYLIQGAQKLVF

SEQ ID NO: 596462 - protein, 14 aa, Homo sapiens
  CDR3 for beta chain variable domain of TCR clone 298231 (TRBV7-6, TRBJ2-3)
CASSLGTVTDTQYF

SEQ ID NO: 596463 - protein, 15 aa, Homo sapiens
  CDR3 for alpha chain variable domain of TCR clone 298232 (TRAV3, TRAJ20)
CAVRDIKLSDYKLSF

SEQ ID NO: 596464 - protein, 16 aa, Homo sapiens
  CDR3 for beta chain variable domain of TCR clone 298232 (TRBV12-4, TRBJ2-1)
CASSAVGQGNGDEQFL

SEQ ID NO: 596465 - protein, 17 aa, Homo sapiens
  CDR3 for alpha chain variable domain of TCR clone 298233 (TRAV3, TRAJ13)
CAVRDMRRTGGYQKVTF

SEQ ID NO: 596466 - protein, 14 aa, Homo sapiens
  CDR3 for beta chain variable domain of TCR clone 298233 (TRBV7-3, TRBJ1-1)
CASSLKGGNTEAFF

SEQ ID NO: 596467 - protein, 13 aa, Homo sapiens
  CDR3 for alpha chain variable domain of TCR clone 298234 (TRAV1-2, TRAJ9)
CAAINTGGFKTTF

SEQ ID NO: 596468 - protein, 13 aa, Homo sapiens
  CDR3 for beta chain variable domain of TCR clone 298234 (TRBV19, TRBJ1-2)
CASSVPGQDGYTF

SEQ ID NO: 596469 - protein, 13 aa, Homo sapiens
  CDR3 for alpha chain variable domain of TCR clone 298235 (TRAV17, TRAJ9)
CATDYTGGFKTFF

SEQ ID NO: 596470 - protein, 13 aa, Homo sapiens
  CDR3 for beta chain variable domain of TCR clone 298235 (TRBV7-9, TRBJ1-2)
CASSLKQNYGYTF

SEQ ID NO: 596471 - protein, 12 aa, Homo sapiens
  CDR3 for alpha chain variable domain of TCR clone 298236 (TRAV12-3, TRAJ17)
CAMTLTGNKLTF

SEQ ID NO: 596472 - protein, 15 aa, Homo sapiens
  CDR3 for beta chain variable domain of TCR clone 298236 (TRBV6-6, TRBJ2-5)
CASSPGGGLEVTQYF

SEQ ID NO: 596473 - protein, 12 aa, Homo sapiens
  CDR3 for alpha chain variable domain of TCR clone 298237 (TRAV12-3, TRAJ5)
CASGQGRRALTF

SEQ ID NO: 596474 - protein, 11 aa, Homo sapiens
  CDR3 for beta chain variable domain of TCR clone 298237 (TRBV12-4, TRBJ2-3)
CASTATDTQYF

SEQ ID NO: 596475 - protein, 13 aa, Homo sapiens
  CDR3 for alpha chain variable domain of TCR clone 298238 (TRAV13-1, TRAJ21)
CAASIYNFNKFYF

SEQ ID NO: 596476 - protein, 16 aa, Homo sapiens
  CDR3 for beta chain variable domain of TCR clone 298238 (TRBV11-2, TRBJ2-2)
CASSLRTGNLIGELFF

SEQ ID NO: 596477 - protein, 14 aa, Homo sapiens
  CDR3 for alpha chain variable domain of TCR clone 298239 (TRAV13-2, TRAJ29)
CAEGTFGTNTPLVF

SEQ ID NO: 596478 - protein, 13 aa, Homo sapiens
  CDR3 for beta chain variable domain of TCR clone 298239 (TRBV2, TRBJ1-1)
CASNLLRNTEAFF

SEQ ID NO: 596479 - protein, 17 aa, Homo sapiens
  CDR3 for alpha chain variable domain of TCR clone 298240 (TRAV3, TRAJ6)
CAVRDGPRAGGSYIPTS

SEQ ID NO: 596480 - protein, 14 aa, Homo sapiens
  CDR3 for beta chain variable domain of TCR clone 298240 (TRBV19, TRBJ2-1)
CASPTFVLSGEQFF

SEQ ID NO: 596481 - protein, 23 aa, Homo sapiens
  CDR3 for alpha chain variable domain of TCR clone 298241 (TRAV4, TRAJ26)
IPSDRKSSTLSLPRVYYGQNFVF

SEQ ID NO: 596482 - protein, 16 aa, Homo sapiens
  CDR3 for beta chain variable domain of TCR clone 298241 (TRBV7-2, TRBJ1-2)
CASSSNQDRRGHGYTF

SEQ ID NO: 596483 - protein, 13 aa, Homo sapiens
  CDR3 for alpha chain variable domain of TCR clone 298242 (TRAV21, TRAJ20)
CAVGLRVDYKLSF

SEQ ID NO: 596484 - protein, 13 aa, Homo sapiens
  CDR3 for beta chain variable domain of TCR clone 298242 (TRBV29-1, TRBJ2-1)
CSVECGRVNEQFF

SEQ ID NO: 596485 - protein, 15 aa, Homo sapiens
  CDR3 for alpha chain variable domain of TCR clone 298243 (TRAV13-1, TRAJ17)
CAASMERAAGNKLTF

SEQ ID NO: 596486 - protein, 13 aa, Homo sapiens
  CDR3 for beta chain variable domain of TCR clone 298243 (TRBV7-7, TRBJ2-3)
CASTLSRADTQYF

SEQ ID NO: 596487 - protein, 13 aa, Homo sapiens
  CDR3 for alpha chain variable domain of TCR clone 298244 (TRAV36/DV7, TRAJ49)
CAGDSNTGNQFYF

SEQ ID NO: 596488 - protein, 16 aa, Homo sapiens
  CDR3 for beta chain variable domain of TCR clone 298244 (TRBV7-2, TRBJ1-4)
CASSPVGRFDREKLFF

SEQ ID NO: 596489 - protein, 17 aa, Homo sapiens
  CDR3 for alpha chain variable domain of TCR clone 298245 (TRAV3, TRAJ12)
CAVRDGGRMDSSYKLIF

SEQ ID NO: 596490 - protein, 16 aa, Homo sapiens
  CDR3 for beta chain variable domain of TCR clone 298245 (TRBV9, TRBJ2-2)
CASSSMGKGNTGELFF

SEQ ID NO: 596491 - protein, 16 aa, Homo sapiens
  CDR3 for alpha chain variable domain of TCR clone 298246 (TRAV23/DV6, TRAJ57)
CAASSTLSQGGSEKLF

SEQ ID NO: 596492 - protein, 14 aa, Homo sapiens
  CDR3 for beta chain variable domain of TCR clone 298246 (TRBV20-1, TRBJ2-7)
CSAKRGRSSYEQYF

SEQ ID NO: 596493 - protein, 15 aa, Homo sapiens
  CDR3 for alpha chain variable domain of TCR clone 298247 (TRAV4, TRAJ10)
CLVGDEEGRGNKLTF

SEQ ID NO: 596494 - protein, 15 aa, Homo sapiens
  CDR3 for beta chain variable domain of TCR clone 298247 (TRBV7-2, TRBJ2-7)
CASSLTGQGTYEQYF

SEQ ID NO: 596495 - protein, 10 aa, Homo sapiens
  CDR3 for alpha chain variable domain of TCR clone 298248 (TRAV36/DV7, TRAJ49)
CALTGNQVYF

SEQ ID NO: 596496 - protein, 13 aa, Homo sapiens
  CDR3 for beta chain variable domain of TCR clone 298248 (TRBV4-1, TRBJ2-7)
CASSQGQAYEQYF

SEQ ID NO: 596497 - protein, 13 aa, Homo sapiens
  CDR3 for alpha chain variable domain of TCR clone 298249 (TRAV13-2, TRAJ48)
CAEMDFGNEKLTF

SEQ ID NO: 596498 - protein, 15 aa, Homo sapiens
  CDR3 for beta chain variable domain of TCR clone 298249 (TRBV7-9, TRBJ1-6)
CASGSPGRGNSALHF

SEQ ID NO: 596499 - protein, 12 aa, Homo sapiens
  CDR3 for alpha chain variable domain of TCR clone 298250 (TRAV29/DV5, TRAJ15)
CASNQAGTALIF

SEQ ID NO: 596500 - protein, 17 aa, Homo sapiens
  CDR3 for beta chain variable domain of TCR clone 298250 (TRBV5-1, TRBJ2-2)
CASSLDLGQGNTGELFF

SEQ ID NO: 596501 - protein, 15 aa, Homo sapiens
  CDR3 for alpha chain variable domain of TCR clone 298251 (TRAV12-2, TRAJ42)
CAVNSHGGRQGNLIF

SEQ ID NO: 596502 - protein, 13 aa, Homo sapiens
  CDR3 for beta chain variable domain of TCR clone 298251 (TRBV27, TRBJ1-1)
CASSVSANTEAFF

SEQ ID NO: 596503 - protein, 13 aa, Homo sapiens
  CDR3 for alpha chain variable domain of TCR clone 298252 (TRAV17, TRAJ5)
CAPMDTGRIALTF

SEQ ID NO: 596504 - protein, 16 aa, Homo sapiens
  CDR3 for beta chain variable domain of TCR clone 298252 (TRBV27, TRBJ2-7)
CANSSERRDSAYEQYF

SEQ ID NO: 596505 - protein, 12 aa, Homo sapiens
  CDR3 for alpha chain variable domain of TCR clone 298253 (TRAV2, TRAJ9)
CAVVAGGFKTIF

SEQ ID NO: 596506 - protein, 13 aa, Homo sapiens
  CDR3 for beta chain variable domain of TCR clone 298253 (TRBV12-5, TRBJ2-3)
CASGDRQSDTQYF

SEQ ID NO: 596507 - protein, 13 aa, Homo sapiens
  CDR3 for alpha chain variable domain of TCR clone 298254 (TRAV21, TRAJ57)
CAVIEGRSEKLVF

SEQ ID NO: 596508 - protein, 14 aa, Homo sapiens
  CDR3 for beta chain variable domain of TCR clone 298254 (TRBV12-5, TRBJ2-5)
CASGSRKHQETQYF

SEQ ID NO: 596509 - protein, 13 aa, Homo sapiens
  CDR3 for alpha chain variable domain of TCR clone 298255 (TRAV8-2, TRAJ49)
CVVSPSTGNQFYF

SEQ ID NO: 596510 - protein, 14 aa, Homo sapiens
  CDR3 for beta chain variable domain of TCR clone 298255 (TRBV7-9, TRBJ2-1)
CASSPRDSLYEQFF

SEQ ID NO: 596511 - protein, 21 aa, Homo sapiens
  CDR3 for alpha chain variable domain of TCR clone 298256 (TRAV21, TRAJ27)
CAARPGNAGKSTCGDGPTLTV

SEQ ID NO: 596512 - protein, 14 aa, Homo sapiens
  CDR3 for beta chain variable domain of TCR clone 298256 (TRBV11-2, TRBJ2-7)
CASSLGAGAYEQYF

SEQ ID NO: 596513 - protein, 17 aa, Homo sapiens
  CDR3 for alpha chain variable domain of TCR clone 298257 (TRAV3, TRAJ42)
FAVRDRDYGGSQGNLIF

SEQ ID NO: 596514 - protein, 20 aa, Homo sapiens
  CDR3 for beta chain variable domain of TCR clone 298257 (TRBV7-8, TRBJ2-2)
CASSHLFPGPTIHITGELFF

SEQ ID NO: 596515 - protein, 15 aa, Homo sapiens
  CDR3 for alpha chain variable domain of TCR clone 298258 (TRAV3, TRAJ12)
CAVRDIRDSSYKLIF

SEQ ID NO: 596516 - protein, 15 aa, Homo sapiens
  CDR3 for beta chain variable domain of TCR clone 298258 (TRBV27, TRBJ2-1)
CASSNGGGSSNEQFF

SEQ ID NO: 596517 - protein, 11 aa, Homo sapiens
  CDR3 for alpha chain variable domain of TCR clone 298259 (TRAV17, TRAJ39)
CATTPYNMLTF

SEQ ID NO: 596518 - protein, 13 aa, Homo sapiens
  CDR3 for beta chain variable domain of TCR clone 298259 (TRBV7-8, TRBJ2-1)
CASTRDAVDEQFF

SEQ ID NO: 596519 - protein, 17 aa, Homo sapiens
  CDR3 for alpha chain variable domain of TCR clone 298260 (TRAV27, TRAJ18)
CAGLHRGRGSTLGRLYF

SEQ ID NO: 596520 - protein, 13 aa, Homo sapiens
  CDR3 for beta chain variable domain of TCR clone 298260 (TRBV7-9, TRBJ1-2)
CASSLKQNYGYSF

SEQ ID NO: 596521 - protein, 13 aa, Homo sapiens
  CDR3 for alpha chain variable domain of TCR clone 298261 (TRAV21, TRAJ27)
CAARPGNAGKSTF

SEQ ID NO: 596522 - protein, 19 aa, Homo sapiens
  CDR3 for beta chain variable domain of TCR clone 298261 (TRBV11-3, TRBJ2-2)
CASSTRPGAKTTNTGELFF

SEQ ID NO: 596523 - protein, 14 aa, Homo sapiens
  CDR3 for alpha chain variable domain of TCR clone 298262 (TRAV2, TRAJ9)
CAVEDRSGGFKTIF

SEQ ID NO: 596524 - protein, 16 aa, Homo sapiens
  CDR3 for beta chain variable domain of TCR clone 298262 (TRBV3-1, TRBJ2-5)
CASSPGQFNGFGTQYF

SEQ ID NO: 596525 - protein, 17 aa, Homo sapiens
  CDR3 for alpha chain variable domain of TCR clone 298263 (TRAV4, )
CLVDIQNPEPAVYQLRD

SEQ ID NO: 596526 - protein, 15 aa, Homo sapiens
  CDR3 for beta chain variable domain of TCR clone 298263 (TRBV20-1, TRBJ1-5)
CSARVGRVVSQPQHF

SEQ ID NO: 596527 - protein, 14 aa, Homo sapiens
  CDR3 for alpha chain variable domain of TCR clone 298264 (TRAV4, TRAJ23)
CLVGSYNHGGKLIF

SEQ ID NO: 596528 - protein, 16 aa, Homo sapiens
  CDR3 for beta chain variable domain of TCR clone 298264 (TRBV4-1, TRBJ2-7)
CASSQEWTSGPLEQYF

SEQ ID NO: 596529 - protein, 12 aa, Homo sapiens
  CDR3 for alpha chain variable domain of TCR clone 298265 (TRAV12-3, TRAJ3)
CAIDSSASKIIF

SEQ ID NO: 596530 - protein, 16 aa, Homo sapiens
  CDR3 for beta chain variable domain of TCR clone 298265 (TRBV7-9, TRBJ2-3)
CQQLEEAGAYPDTQYF

SEQ ID NO: 596531 - protein, 13 aa, Homo sapiens
  CDR3 for alpha chain variable domain of TCR clone 298266 (TRAV21, TRAJ56)
CAVSTGANSKLTF

SEQ ID NO: 596532 - protein, 16 aa, Homo sapiens
  CDR3 for beta chain variable domain of TCR clone 298266 (TRBV7-3, TRBJ2-3)
CASSPGAGRFTDTQYF

SEQ ID NO: 596533 - protein, 12 aa, Homo sapiens
  CDR3 for alpha chain variable domain of TCR clone 298267 (TRAV13-2, TRAJ23)
CAERHRGRKLIF

SEQ ID NO: 596534 - protein, 14 aa, Homo sapiens
  CDR3 for beta chain variable domain of TCR clone 298267 (TRBV7-2, TRBJ2-7)
CASSPKTSFYEQYF

SEQ ID NO: 596535 - protein, 14 aa, Homo sapiens
  CDR3 for alpha chain variable domain of TCR clone 298268 (TRAV1-1, TRAJ33)
CAVRPEDRNYQLIW

SEQ ID NO: 596536 - protein, 15 aa, Homo sapiens
  CDR3 for beta chain variable domain of TCR clone 298268 (TRBV20-1, TRBJ2-1)
CSARSPGGPGNEQFF

SEQ ID NO: 596537 - protein, 14 aa, Homo sapiens
  CDR3 for alpha chain variable domain of TCR clone 298269 (TRAV12-3, TRAJ9)
CAMSPNTGGFKPIF

SEQ ID NO: 596538 - protein, 14 aa, Homo sapiens
  CDR3 for beta chain variable domain of TCR clone 298269 (TRBV19, TRBJ2-1)
CASPTFVLSGEQFF

SEQ ID NO: 596539 - protein, 23 aa, Homo sapiens
  CDR3 for alpha chain variable domain of TCR clone 298270 (TRAV26-1, TRAJ38)
CIADNAGNNHIQNPDPAVYQMRD

SEQ ID NO: 596540 - protein, 12 aa, Homo sapiens
  CDR3 for beta chain variable domain of TCR clone 298270 (TRBV11-2, TRBJ2-2)
CASSLPTGELFF

SEQ ID NO: 596541 - protein, 15 aa, Homo sapiens
  CDR3 for alpha chain variable domain of TCR clone 298271 (TRAV12-1, TRAJ5)
CVVNMMETGRRALTF

SEQ ID NO: 596542 - protein, 13 aa, Homo sapiens
  CDR3 for beta chain variable domain of TCR clone 298271 (TRBV14, TRBJ1-5)
CASSQDRRGPQHF

SEQ ID NO: 596543 - protein, 12 aa, Homo sapiens
  CDR3 for alpha chain variable domain of TCR clone 298272 (TRAV38-1, TRAJ43)
CAFMTRLADMRF

SEQ ID NO: 596544 - protein, 14 aa, Homo sapiens
  CDR3 for beta chain variable domain of TCR clone 298272 (TRBV12-4, TRBJ2-1)
CASSLGQGASEQFF

SEQ ID NO: 596545 - protein, 17 aa, Homo sapiens
  CDR3 for alpha chain variable domain of TCR clone 298273 (TRAV13-1, TRAJ52)
CAASSGAGGTSYEKLTF

SEQ ID NO: 596546 - protein, 15 aa, Homo sapiens
  CDR3 for beta chain variable domain of TCR clone 298273 (TRBV2, TRBJ2-1)
CASSELAGSYNEQFF

SEQ ID NO: 596547 - protein, 14 aa, Homo sapiens
  CDR3 for alpha chain variable domain of TCR clone 298274 (TRAV14/DV4, TRAJ42)
CPRGSLRSQGNLIF

SEQ ID NO: 596548 - protein, 14 aa, Homo sapiens
  CDR3 for beta chain variable domain of TCR clone 298274 (TRBV20-1, TRBJ2-3)
RTSGGAGTTDTQYF

SEQ ID NO: 596549 - protein, 14 aa, Homo sapiens
  CDR3 for alpha chain variable domain of TCR clone 298275 (TRAV12-3, TRAJ10)
SHLPLTGGGNKLTF

SEQ ID NO: 596550 - protein, 17 aa, Homo sapiens
  CDR3 for beta chain variable domain of TCR clone 298275 (TRBV28, TRBJ2-5)
CASSTPEGDALQETQYL

SEQ ID NO: 596551 - protein, 13 aa, Homo sapiens
  CDR3 for alpha chain variable domain of TCR clone 298276 (TRAV36/DV7, TRAJ49)
CAGDSNTGNQFYF

SEQ ID NO: 596552 - protein, 16 aa, Homo sapiens
  CDR3 for beta chain variable domain of TCR clone 298276 (TRBV20-1, TRBJ1-2)
CSASMGQGVANYGYTF

SEQ ID NO: 596553 - protein, 16 aa, Homo sapiens
  CDR3 for alpha chain variable domain of TCR clone 298277 (TRAV1-2, TRAJ10)
CAVRGVLTGGGNKLTF

SEQ ID NO: 596554 - protein, 17 aa, Homo sapiens
  CDR3 for beta chain variable domain of TCR clone 298277 (TRBV15, TRBJ1-5)
CATSRAPPGTRNQPQHF

SEQ ID NO: 596555 - protein, 13 aa, Homo sapiens
  CDR3 for alpha chain variable domain of TCR clone 298278 (TRAV17, TRAJ21)
CATDGGNFNKFYF

SEQ ID NO: 596556 - protein, 18 aa, Homo sapiens
  CDR3 for beta chain variable domain of TCR clone 298278 (TRBV24-1, TRBJ2-2)
CATSDSGQGTANTGELFV

SEQ ID NO: 596557 - protein, 16 aa, Homo sapiens
  CDR3 for alpha chain variable domain of TCR clone 298279 (TRAV30, TRAJ24)
CGTEIVDADSWGKFQF

SEQ ID NO: 596558 - protein, 13 aa, Homo sapiens
  CDR3 for beta chain variable domain of TCR clone 298279 (TRBV10-3, TRBJ2-5)
CAMTSGAGETQYF

SEQ ID NO: 596559 - protein, 14 aa, Homo sapiens
  CDR3 for alpha chain variable domain of TCR clone 298280 (TRAV12-3, TRAJ15)
CAMIPPQAGTALIF

SEQ ID NO: 596560 - protein, 12 aa, Homo sapiens
  CDR3 for beta chain variable domain of TCR clone 298280 (TRBV11-2, TRBJ2-2)
CASSRGGGELLL

SEQ ID NO: 596561 - protein, 15 aa, Homo sapiens
  CDR3 for alpha chain variable domain of TCR clone 298281 (TRAV26-1, TRAJ56)
CIVRVDNGANSKLTF

SEQ ID NO: 596562 - protein, 15 aa, Homo sapiens
  CDR3 for beta chain variable domain of TCR clone 298281 (TRBV20-1, TRBJ2-7)
CSGRDPTEVGHEQYF

SEQ ID NO: 596563 - protein, 14 aa, Homo sapiens
  CDR3 for alpha chain variable domain of TCR clone 298282 (TRAV12-2, TRAJ17)
CTVLFKAAGNKLTF

SEQ ID NO: 596564 - protein, 14 aa, Homo sapiens
  CDR3 for beta chain variable domain of TCR clone 298282 (TRBV15, TRBJ1-2)
CATSRDFDRVGYTF

SEQ ID NO: 596565 - protein, 14 aa, Homo sapiens
  CDR3 for alpha chain variable domain of TCR clone 298283 (TRAV1-2, TRAJ8)
CAVREDTGFQKLVF

SEQ ID NO: 596566 - protein, 14 aa, Homo sapiens
  CDR3 for beta chain variable domain of TCR clone 298283 (TRBV7-9, TRBJ2-1)
CASSLGVADNEQFF

SEQ ID NO: 596567 - protein, 20 aa, Homo sapiens
  CDR3 for alpha chain variable domain of TCR clone 298284 (TRAV4, TRAJ29)
CCVLLPRGCVPFSGNTPLVF

SEQ ID NO: 596568 - protein, 17 aa, Homo sapiens
  CDR3 for beta chain variable domain of TCR clone 298284 (TRBV25-1, TRBJ2-7)
CASSDSRVVFSSYEQYF

SEQ ID NO: 596569 - protein, 14 aa, Homo sapiens
  CDR3 for alpha chain variable domain of TCR clone 298285 (TRAV8-6, TRAJ57)
CAVSSKGGSEKLVF

SEQ ID NO: 596570 - protein, 12 aa, Homo sapiens
  CDR3 for beta chain variable domain of TCR clone 298285 (TRBV7-9, TRBJ2-7)
CASSLEGYEQYF

SEQ ID NO: 596571 - protein, 15 aa, Homo sapiens
  CDR3 for alpha chain variable domain of TCR clone 298286 (TRAV3, TRAJ22)
CAVRDRGGSARQLSF

SEQ ID NO: 596572 - protein, 15 aa, Homo sapiens
  CDR3 for beta chain variable domain of TCR clone 298286 (TRBV19, TRBJ2-5)
CASSIVRASQETQYF

SEQ ID NO: 596573 - protein, 18 aa, Homo sapiens
  CDR3 for alpha chain variable domain of TCR clone 298287 (TRAV21, TRAJ52)
CAVRPSPAGGPSYGKLTF

SEQ ID NO: 596574 - protein, 14 aa, Homo sapiens
  CDR3 for beta chain variable domain of TCR clone 298287 (TRBV4-2, TRBJ2-1)
CASGLDRAYNEQFF

SEQ ID NO: 596575 - protein, 17 aa, Homo sapiens
  CDR3 for alpha chain variable domain of TCR clone 298288 (TRAV17, TRAJ7)
CATLGRLAFGKGNQVVV

SEQ ID NO: 596576 - protein, 13 aa, Homo sapiens
  CDR3 for beta chain variable domain of TCR clone 298288 (TRBV19, TRBJ2-7)
CASSPRQSYEQYF

SEQ ID NO: 596577 - protein, 14 aa, Homo sapiens
  CDR3 for alpha chain variable domain of TCR clone 298289 (TRAV12-2, TRAJ13)
CAVKKTGGYQKVTF

SEQ ID NO: 596578 - protein, 15 aa, Homo sapiens
  CDR3 for beta chain variable domain of TCR clone 298289 (TRBV5-5, TRBJ2-2)
CASSRQASGAGELFF

SEQ ID NO: 596579 - protein, 16 aa, Homo sapiens
  CDR3 for alpha chain variable domain of TCR clone 298290 (TRAV12-2, TRAJ28)
CPVITDSGAGSYQLTF

SEQ ID NO: 596580 - protein, 12 aa, Homo sapiens
  CDR3 for beta chain variable domain of TCR clone 298290 (TRBV9, TRBJ2-2)
CASSLVTGELFF

SEQ ID NO: 596581 - protein, 15 aa, Homo sapiens
  CDR3 for alpha chain variable domain of TCR clone 298291 (TRAV8-1, TRAJ6)
CAVNTPPGGSYIPTF

SEQ ID NO: 596582 - protein, 14 aa, Homo sapiens
  CDR3 for beta chain variable domain of TCR clone 298291 (TRBV4-2, TRBJ2-1)
CASGLDRAYNEQFF

SEQ ID NO: 596583 - protein, 13 aa, Homo sapiens
  CDR3 for alpha chain variable domain of TCR clone 298292 (TRAV26-1, TRAJ31)
CIVRVDGNARLMF

SEQ ID NO: 596584 - protein, 17 aa, Homo sapiens
  CDR3 for beta chain variable domain of TCR clone 298292 (TRBV11-2, TRBJ2-1)
CFSSLYPPGVEYNEQFF

SEQ ID NO: 596585 - protein, 13 aa, Homo sapiens
  CDR3 for alpha chain variable domain of TCR clone 298293 (TRAV20, TRAJ48)
CAVHLFGDEKLTF

SEQ ID NO: 596586 - protein, 15 aa, Homo sapiens
  CDR3 for beta chain variable domain of TCR clone 298293 (TRBV6-5, TRBJ2-6)
CASSQWEAGANVLTF

SEQ ID NO: 596587 - protein, 14 aa, Homo sapiens
  CDR3 for alpha chain variable domain of TCR clone 298294 (TRAV26-1, TRAJ38)
CIVVGAGKNRKRIW

SEQ ID NO: 596588 - protein, 12 aa, Homo sapiens
  CDR3 for beta chain variable domain of TCR clone 298294 (TRBV5-1, TRBJ2-5)
CASSWDQETQYF

SEQ ID NO: 596589 - protein, 14 aa, Homo sapiens
  CDR3 for alpha chain variable domain of TCR clone 298295 (TRAV29/DV5, TRAJ44)
CAAFLVCTASKLTF

SEQ ID NO: 596590 - protein, 15 aa, Homo sapiens
  CDR3 for beta chain variable domain of TCR clone 298295 (TRBV7-3, TRBJ2-2)
CASSETGQGTGELFF

SEQ ID NO: 596591 - protein, 13 aa, Homo sapiens
  CDR3 for alpha chain variable domain of TCR clone 298296 (TRAV21, TRAJ27)
CAARHGNAGKSTF

SEQ ID NO: 596592 - protein, 14 aa, Homo sapiens
  CDR3 for beta chain variable domain of TCR clone 298296 (TRBV7-6, TRBJ2-3)
CASSLGRVTDTQYF

SEQ ID NO: 596593 - protein, 14 aa, Homo sapiens
  CDR3 for alpha chain variable domain of TCR clone 298297 (TRAV12-1, TRAJ22)
CVVTTSGSARQLTF

SEQ ID NO: 596594 - protein, 16 aa, Homo sapiens
  CDR3 for beta chain variable domain of TCR clone 298297 (TRBV27, TRBJ1-1)
CASSLLAGTGETEAFF

SEQ ID NO: 596595 - protein, 12 aa, Homo sapiens
  CDR3 for alpha chain variable domain of TCR clone 298298 (TRAV8-3, TRAJ9)
CASHNGGFKTIF

SEQ ID NO: 596596 - protein, 13 aa, Homo sapiens
  CDR3 for beta chain variable domain of TCR clone 298298 (TRBV12-4, TRBJ1-2)
CASSSGSKDGYTF

SEQ ID NO: 596597 - protein, 10 aa, Homo sapiens
  CDR3 for alpha chain variable domain of TCR clone 298299 (TRAV26-1, TRAJ22)
CIVRVSFLFC

SEQ ID NO: 596598 - protein, 13 aa, Homo sapiens
  CDR3 for beta chain variable domain of TCR clone 298299 (TRBV7-9, TRBJ1-2)
CASSLKQNYGYTF

SEQ ID NO: 596599 - protein, 18 aa, Homo sapiens
  CDR3 for alpha chain variable domain of TCR clone 298300 (TRAV26-2, TRAJ32)
CILRAPLNYGGATNNLIF

SEQ ID NO: 596600 - protein, 13 aa, Homo sapiens
  CDR3 for beta chain variable domain of TCR clone 298300 (TRBV7-3, TRBJ2-1)
CASSLWPYNEQFF

SEQ ID NO: 596601 - protein, 15 aa, Homo sapiens
  CDR3 for alpha chain variable domain of TCR clone 298301 (TRAV12-1, TRAJ45)
CVVLSGGGGADGLTF

SEQ ID NO: 596602 - protein, 14 aa, Homo sapiens
  CDR3 for beta chain variable domain of TCR clone 298301 (TRBV11-2, TRBJ2-1)
CASSRTGGIETQYF

SEQ ID NO: 596603 - protein, 15 aa, Homo sapiens
  CDR3 for alpha chain variable domain of TCR clone 298302 (TRAV21, TRAJ53)
CATLNSGGSNYKLTF

SEQ ID NO: 596604 - protein, 17 aa, Homo sapiens
  CDR3 for beta chain variable domain of TCR clone 298302 (TRBV28, TRBJ2-5)
CASSRQGGLAGAETQYF

SEQ ID NO: 596605 - protein, 14 aa, Homo sapiens
  CDR3 for alpha chain variable domain of TCR clone 298303 (TRAV1-2, TRAJ16)
CSVNRFSDVQKLLF

SEQ ID NO: 596606 - protein, 15 aa, Homo sapiens
  CDR3 for beta chain variable domain of TCR clone 298303 (TRBV7-9, TRBJ1-6)
CASSSPGRGNSPLHF

SEQ ID NO: 596607 - protein, 15 aa, Homo sapiens
  CDR3 for alpha chain variable domain of TCR clone 298304 (TRAV8-3, TRAJ11)
CAVGLLNSGYSTLTF

SEQ ID NO: 596608 - protein, 14 aa, Homo sapiens
  CDR3 for beta chain variable domain of TCR clone 298304 (TRBV4-1, TRBJ2-5)
CASSRSGSGDTQYF

SEQ ID NO: 596609 - protein, 15 aa, Homo sapiens
  CDR3 for alpha chain variable domain of TCR clone 298305 (TRAV3, TRAJ22)
CAVGDRGGSARQLTF

SEQ ID NO: 596610 - protein, 15 aa, Homo sapiens
  CDR3 for beta chain variable domain of TCR clone 298305 (TRBV20-1, TRBJ1-1)
CSASRGVTGNTEAFF

SEQ ID NO: 596611 - protein, 12 aa, Homo sapiens
  CDR3 for alpha chain variable domain of TCR clone 298306 (TRAV2, TRAJ10)
CASTGGGNKLTF

SEQ ID NO: 596612 - protein, 20 aa, Homo sapiens
  CDR3 for beta chain variable domain of TCR clone 298306 (TRBV7-8, TRBJ2-2)
CASSHLFPGPTIHIAGELFF

SEQ ID NO: 596613 - protein, 12 aa, Homo sapiens
  CDR3 for alpha chain variable domain of TCR clone 298307 (TRAV1-1, TRAJ12)
FAVGDSSYKLIF

SEQ ID NO: 596614 - protein, 14 aa, Homo sapiens
  CDR3 for beta chain variable domain of TCR clone 298307 (TRBV20-1, TRBJ2-7)
CSAPELAGVGEQYF

SEQ ID NO: 596615 - protein, 16 aa, Homo sapiens
  CDR3 for alpha chain variable domain of TCR clone 298308 (TRAV1-2, TRAJ10)
FAVRGVLTGGGNKLTF

SEQ ID NO: 596616 - protein, 20 aa, Homo sapiens
  CDR3 for beta chain variable domain of TCR clone 298308 (TRBV7-8, TRBJ2-2)
CASSHLFPGPTIHITGELFF

SEQ ID NO: 596617 - protein, 16 aa, Homo sapiens
  CDR3 for alpha chain variable domain of TCR clone 298309 (TRAV4, TRAJ22)
CLVGDLYSGSARQLTF

SEQ ID NO: 596618 - protein, 16 aa, Homo sapiens
  CDR3 for beta chain variable domain of TCR clone 298309 (TRBV7-9, TRBJ2-1)
CASSDVAGGSYNEQVV

SEQ ID NO: 596619 - protein, 11 aa, Homo sapiens
  CDR3 for alpha chain variable domain of TCR clone 298310 (TRAV23/DV6, TRAJ9)
CFHTGGFKTIF

SEQ ID NO: 596620 - protein, 16 aa, Homo sapiens
  CDR3 for beta chain variable domain of TCR clone 298310 (TRBV12-4, TRBJ1-5)
CASSRPVGGSNQPQHF

SEQ ID NO: 596621 - protein, 11 aa, Homo sapiens
  CDR3 for alpha chain variable domain of TCR clone 298311 (TRAV17, TRAJ36)
CAPTGANNLFF

SEQ ID NO: 596622 - protein, 15 aa, Homo sapiens
  CDR3 for beta chain variable domain of TCR clone 298311 (TRBV20-1, TRBJ1-1)
CSAPPGGHTEAFLDK

SEQ ID NO: 596623 - protein, 17 aa, Homo sapiens
  CDR3 for alpha chain variable domain of TCR clone 298312 (TRAV26-1, TRAJ53)
CIVRFDDSGGSNYKLTF

SEQ ID NO: 596624 - protein, 15 aa, Homo sapiens
  CDR3 for beta chain variable domain of TCR clone 298312 (TRBV20-1, TRBJ2-7)
CSARVPAAYFYEQYF

SEQ ID NO: 596625 - protein, 16 aa, Homo sapiens
  CDR3 for alpha chain variable domain of TCR clone 298313 (TRAV30, TRAJ24)
CGTEIVDADSWGKFQF

SEQ ID NO: 596626 - protein, 13 aa, Homo sapiens
  CDR3 for beta chain variable domain of TCR clone 298313 (TRBV4-2, TRBJ1-2)
CASSLSASGGYTF

SEQ ID NO: 596627 - protein, 14 aa, Homo sapiens
  CDR3 for alpha chain variable domain of TCR clone 298314 (TRAV12-2, TRAJ17)
CAVLFKAAGNKLTF

SEQ ID NO: 596628 - protein, 11 aa, Homo sapiens
  CDR3 for beta chain variable domain of TCR clone 298314 (TRBV12-4, TRBJ2-3)
CASTAKDTQYF

SEQ ID NO: 596629 - protein, 14 aa, Homo sapiens
  CDR3 for alpha chain variable domain of TCR clone 298315 (TRAV1-2, TRAJ16)
CAVNRFSDVQKLLF

SEQ ID NO: 596630 - protein, 14 aa, Homo sapiens
  CDR3 for beta chain variable domain of TCR clone 298315 (TRBV20-1, TRBJ1-5)
CSAPGTGVGQPQHF

SEQ ID NO: 596631 - protein, 16 aa, Homo sapiens
  CDR3 for alpha chain variable domain of TCR clone 298316 (TRAV30, TRAJ24)
CGTEIVDADSWGKFQF

SEQ ID NO: 596632 - protein, 13 aa, Homo sapiens
  CDR3 for beta chain variable domain of TCR clone 298316 (TRBV7-3, TRBJ1-1)
CASSQDWGAEAFL

SEQ ID NO: 596633 - protein, 15 aa, Homo sapiens
  CDR3 for alpha chain variable domain of TCR clone 298317 (TRAV4, TRAJ39)
CLVGPNNSAGNMLTF

SEQ ID NO: 596634 - protein, 14 aa, Homo sapiens
  CDR3 for beta chain variable domain of TCR clone 298317 (TRBV25-1, TRBJ1-1)
CASTHLGGNTEAFF

SEQ ID NO: 596635 - protein, 12 aa, Homo sapiens
  CDR3 for alpha chain variable domain of TCR clone 298318 (TRAV13-1, TRAJ21)
CAAKEGFNKFYF

SEQ ID NO: 596636 - protein, 14 aa, Homo sapiens
  CDR3 for beta chain variable domain of TCR clone 298318 (TRBV5-4, TRBJ1-1)
CASSLDSRRDEEFF

SEQ ID NO: 596637 - protein, 16 aa, Homo sapiens
  CDR3 for alpha chain variable domain of TCR clone 298319 (TRAV14/DV4, TRAJ53)
CAVREGGGGSNYKLTF

SEQ ID NO: 596638 - protein, 17 aa, Homo sapiens
  CDR3 for beta chain variable domain of TCR clone 298319 (TRBV11-2, TRBJ2-1)
CASSLYPPGVEYNEQFF

SEQ ID NO: 596639 - protein, 14 aa, Homo sapiens
  CDR3 for alpha chain variable domain of TCR clone 298320 (TRAV8-3, TRAJ39)
CAVGANNAGNMLTF

SEQ ID NO: 596640 - protein, 12 aa, Homo sapiens
  CDR3 for beta chain variable domain of TCR clone 298320 (TRBV28, TRBJ1-3)
CASVSSGNTLYF

SEQ ID NO: 596641 - protein, 10 aa, Homo sapiens
  CDR3 for alpha chain variable domain of TCR clone 298321 (TRAV8-2, TRAJ26)
LFSSGQNFVF

SEQ ID NO: 596642 - protein, 15 aa, Homo sapiens
  CDR3 for beta chain variable domain of TCR clone 298321 (TRBV11-2, TRBJ2-2)
CASSSDRVNAGELFF

SEQ ID NO: 596643 - protein, 13 aa, Homo sapiens
  CDR3 for alpha chain variable domain of TCR clone 298322 (TRAV17, TRAJ9)
CATDYTGGFKTIF

SEQ ID NO: 596644 - protein, 14 aa, Homo sapiens
  CDR3 for beta chain variable domain of TCR clone 298322 (TRBV19, TRBJ2-5)
CASSMTGPQETQYF

SEQ ID NO: 596645 - protein, 13 aa, Homo sapiens
  CDR3 for alpha chain variable domain of TCR clone 298323 (TRAV27, TRAJ6)
CAGGTRGSYIPTF

SEQ ID NO: 596646 - protein, 13 aa, Homo sapiens
  CDR3 for beta chain variable domain of TCR clone 298323 (TRBV7-3, TRBJ1-1)
CASSQDWGAEAVF

SEQ ID NO: 596647 - protein, 13 aa, Homo sapiens
  CDR3 for alpha chain variable domain of TCR clone 298324 (TRAV2, TRAJ15)
CAVDAQAGTALIF

SEQ ID NO: 596648 - protein, 14 aa, Homo sapiens
  CDR3 for beta chain variable domain of TCR clone 298324 (TRBV6-5, TRBJ2-7)
CASVASGGAHEQYF

SEQ ID NO: 596649 - protein, 10 aa, Homo sapiens
  CDR3 for alpha chain variable domain of TCR clone 298325 (TRAV1-2, TRAJ34)
VAVNTDKLIF

SEQ ID NO: 596650 - protein, 13 aa, Homo sapiens
  CDR3 for beta chain variable domain of TCR clone 298325 (TRBV10-1, TRBJ2-1)
CASSAGPDNEQFF

SEQ ID NO: 596651 - protein, 14 aa, Homo sapiens
  CDR3 for alpha chain variable domain of TCR clone 298326 (TRAV3, TRAJ6)
CAVRRTGGSYIPTF

SEQ ID NO: 596652 - protein, 17 aa, Homo sapiens
  CDR3 for beta chain variable domain of TCR clone 298326 (TRBV11-2, TRBJ2-4)
CASSSVGPGGHRNIQYF

SEQ ID NO: 596653 - protein, 13 aa, Homo sapiens
  CDR3 for alpha chain variable domain of TCR clone 298327 (TRAV20, TRAJ34)
CAVSPYNTDKLIF

SEQ ID NO: 596654 - protein, 13 aa, Homo sapiens
  CDR3 for beta chain variable domain of TCR clone 298327 (TRBV7-9, TRBJ1-2)
CASSLKQNYGYAF

SEQ ID NO: 596655 - protein, 14 aa, Homo sapiens
  CDR3 for alpha chain variable domain of TCR clone 298328 (TRAV23/DV6, TRAJ22)
CAASVSGSARQLTS

SEQ ID NO: 596656 - protein, 13 aa, Homo sapiens
  CDR3 for beta chain variable domain of TCR clone 298328 (TRBV4-2, TRBJ1-1)
CASSQAGNTEAFF

SEQ ID NO: 596657 - protein, 14 aa, Homo sapiens
  CDR3 for alpha chain variable domain of TCR clone 298329 (TRAV26-1, TRAJ45)
CIVRVVGGADGLTF

SEQ ID NO: 596658 - protein, 16 aa, Homo sapiens
  CDR3 for beta chain variable domain of TCR clone 298329 (TRBV7-9, TRBJ1-1)
CASSLTQVPSNTEAFF

SEQ ID NO: 596659 - protein, 15 aa, Homo sapiens
  CDR3 for alpha chain variable domain of TCR clone 298330 (TRAV21, TRAJ45)
CAVSYSGGGADGLTF

SEQ ID NO: 596660 - protein, 15 aa, Homo sapiens
  CDR3 for beta chain variable domain of TCR clone 298330 (TRBV6-3, TRBJ2-7)
CASSSPGTVFYEQYF

SEQ ID NO: 596661 - protein, 13 aa, Homo sapiens
  CDR3 for alpha chain variable domain of TCR clone 298331 (TRAV8-4, TRAJ10)
CAAFTGGGTKLTF

SEQ ID NO: 596662 - protein, 15 aa, Homo sapiens
  CDR3 for beta chain variable domain of TCR clone 298331 (TRBV2, TRBJ2-3)
CASSDFEKATDTQYF

SEQ ID NO: 596663 - protein, 16 aa, Homo sapiens
  CDR3 for alpha chain variable domain of TCR clone 298332 (TRAV16, TRAJ4)
CALSRMFSGGYNKLIF

SEQ ID NO: 596664 - protein, 16 aa, Homo sapiens
  CDR3 for beta chain variable domain of TCR clone 298332 (TRBV28, TRBJ1-5)
CASSFRGGYSNQPQHF

SEQ ID NO: 596665 - protein, 14 aa, Homo sapiens
  CDR3 for alpha chain variable domain of TCR clone 298333 (TRAV23/DV6, TRAJ4)
CAAPSSGGYNKLIL

SEQ ID NO: 596666 - protein, 16 aa, Homo sapiens
  CDR3 for beta chain variable domain of TCR clone 298333 (TRBV19, TRBJ1-1)
CASRFGGAVTGTEAFF

SEQ ID NO: 596667 - protein, 12 aa, Homo sapiens
  CDR3 for alpha chain variable domain of TCR clone 298334 (TRAV2, TRAJ10)
CASTGGGNKLTF

SEQ ID NO: 596668 - protein, 14 aa, Homo sapiens
  CDR3 for beta chain variable domain of TCR clone 298334 (TRBV7-2, TRBJ2-2)
CGSRGQGAAGELFF

SEQ ID NO: 596669 - protein, 13 aa, Homo sapiens
  CDR3 for alpha chain variable domain of TCR clone 298335 (TRAV30, TRAJ26)
CGTEIPLGQNFVF

SEQ ID NO: 596670 - protein, 13 aa, Homo sapiens
  CDR3 for beta chain variable domain of TCR clone 298335 (TRBV10-3, TRBJ2-7)
CASKLAVNYEQYF

SEQ ID NO: 596671 - protein, 12 aa, Homo sapiens
  CDR3 for alpha chain variable domain of TCR clone 298336 (TRAV12-2, TRAJ10)
WGVTGGGNKLTF

SEQ ID NO: 596672 - protein, 16 aa, Homo sapiens
  CDR3 for beta chain variable domain of TCR clone 298336 (TRBV6-4, TRBJ1-2)
CASSEAVGDPNYGHTF

SEQ ID NO: 596673 - protein, 13 aa, Homo sapiens
  CDR3 for alpha chain variable domain of TCR clone 298337 (TRAV13-2, TRAJ11)
CAENYSGYSTLTF

SEQ ID NO: 596674 - protein, 15 aa, Homo sapiens
  CDR3 for beta chain variable domain of TCR clone 298337 (TRBV7-3, TRBJ2-2)
CASKANGANTGELFF

SEQ ID NO: 596675 - protein, 11 aa, Homo sapiens
  CDR3 for alpha chain variable domain of TCR clone 298338 (TRAV12-2, TRAJ39)
CAVNNMPTFGG

SEQ ID NO: 596676 - protein, 16 aa, Homo sapiens
  CDR3 for beta chain variable domain of TCR clone 298338 (TRBV5-3, TRBJ2-2)
CARRLGRGKKKGEMFF

SEQ ID NO: 596677 - protein, 14 aa, Homo sapiens
  CDR3 for alpha chain variable domain of TCR clone 298339 (TRAV12-2, TRAJ5)
CAVNRSTGRRALTF

SEQ ID NO: 596678 - protein, 15 aa, Homo sapiens
  CDR3 for beta chain variable domain of TCR clone 298339 (TRBV28, TRBJ1-2)
CASIPQGSDDYGYTF

SEQ ID NO: 596679 - protein, 11 aa, Homo sapiens
  CDR3 for alpha chain variable domain of TCR clone 298340 (TRAV3, TRAJ21)
CAVGSFNKFYF

SEQ ID NO: 596680 - protein, 16 aa, Homo sapiens
  CDR3 for beta chain variable domain of TCR clone 298340 (TRBV19, TRBJ2-1)
CASSRAGPSSYNEQFF

SEQ ID NO: 596681 - protein, 14 aa, Homo sapiens
  CDR3 for alpha chain variable domain of TCR clone 298341 (TRAV8-1, TRAJ4)
CAVKFSGGYNKLIF

SEQ ID NO: 596682 - protein, 12 aa, Homo sapiens
  CDR3 for beta chain variable domain of TCR clone 298341 (TRBV11-2, TRBJ2-2)
CASSLGGGELFF

SEQ ID NO: 596683 - protein, 14 aa, Homo sapiens
  CDR3 for alpha chain variable domain of TCR clone 298342 (TRAV12-1, TRAJ17)
CVVNYKAAGNKLTF

SEQ ID NO: 596684 - protein, 12 aa, Homo sapiens
  CDR3 for beta chain variable domain of TCR clone 298342 (TRBV11-2, TRBJ2-2)
CASRLGGGELFF

SEQ ID NO: 596685 - protein, 17 aa, Homo sapiens
  CDR3 for alpha chain variable domain of TCR clone 298343 (TRAV26-1, TRAJ58)
CIVRVGAEETSGSRLTF

SEQ ID NO: 596686 - protein, 18 aa, Homo sapiens
  CDR3 for beta chain variable domain of TCR clone 298343 (TRBV7-9, TRBJ2-7)
CASSLTTSGSRTWHEQYF

SEQ ID NO: 596687 - protein, 15 aa, Homo sapiens
  CDR3 for alpha chain variable domain of TCR clone 298344 (TRAV2, TRAJ9)
CAVAALNTGGFKTIF

SEQ ID NO: 596688 - protein, 16 aa, Homo sapiens
  CDR3 for beta chain variable domain of TCR clone 298344 (TRBV18, TRBJ2-1)
CASSPRLAGGGDEQFF

SEQ ID NO: 596689 - protein, 15 aa, Homo sapiens
  CDR3 for alpha chain variable domain of TCR clone 298345 (TRAV12-1, TRAJ47)
CVVTNRLKGGNKLVF

SEQ ID NO: 596690 - protein, 19 aa, Homo sapiens
  CDR3 for beta chain variable domain of TCR clone 298345 (TRBV20-1, TRBJ2-5)
CSARPQGLAGISKSGTQYF

SEQ ID NO: 596691 - protein, 14 aa, Homo sapiens
  CDR3 for alpha chain variable domain of TCR clone 298346 (TRAV12-2, TRAJ24)
CAVTPADSWGKLQF

SEQ ID NO: 596692 - protein, 14 aa, Homo sapiens
  CDR3 for beta chain variable domain of TCR clone 298346 (TRBV19, TRBJ2-3)
CASSAPRGTDTQYF

SEQ ID NO: 596693 - protein, 11 aa, Homo sapiens
  CDR3 for alpha chain variable domain of TCR clone 298347 (TRAV4, TRAJ23)
CLVGRKAYLRT

SEQ ID NO: 596694 - protein, 12 aa, Homo sapiens
  CDR3 for beta chain variable domain of TCR clone 298347 (TRBV7-8, TRBJ2-7)
CASSLGDREQYF

SEQ ID NO: 596695 - protein, 15 aa, Homo sapiens
  CDR3 for alpha chain variable domain of TCR clone 298348 (TRAV13-1, TRAJ10)
CAATILTGGGNKLTF

SEQ ID NO: 596696 - protein, 17 aa, Homo sapiens
  CDR3 for beta chain variable domain of TCR clone 298348 (TRBV7-8, TRBJ2-6)
CASSAGTGGAGANVLTF

SEQ ID NO: 596697 - protein, 15 aa, Homo sapiens
  CDR3 for alpha chain variable domain of TCR clone 298349 (TRAV14/DV4, TRAJ12)
CAMREERDSSYKLIF

SEQ ID NO: 596698 - protein, 13 aa, Homo sapiens
  CDR3 for beta chain variable domain of TCR clone 298349 (TRBV11-2, TRBJ2-5)
CASSSTGEETQYF

SEQ ID NO: 596699 - protein, 14 aa, Homo sapiens
  CDR3 for alpha chain variable domain of TCR clone 298350 (TRAV1-2, TRAJ16)
CAVNRVSDGQKLLF

SEQ ID NO: 596700 - protein, 16 aa, Homo sapiens
  CDR3 for beta chain variable domain of TCR clone 298350 (TRBV11-2, TRBJ1-2)
CDSSLDTGGADYGYTF

SEQ ID NO: 596701 - protein, 14 aa, Homo sapiens
  CDR3 for alpha chain variable domain of TCR clone 298351 (TRAV1-2, TRAJ16)
CAVNRFSDGQKLLF

SEQ ID NO: 596702 - protein, 15 aa, Homo sapiens
  CDR3 for beta chain variable domain of TCR clone 298351 (TRBV20-1, TRBJ1-1)
CSASRGVTGTTEAFF

SEQ ID NO: 596703 - protein, 12 aa, Homo sapiens
  CDR3 for alpha chain variable domain of TCR clone 298352 (TRAV12-3, TRAJ17)
CAMTLTGNKLNF

SEQ ID NO: 596704 - protein, 15 aa, Homo sapiens
  CDR3 for beta chain variable domain of TCR clone 298352 (TRBV4-1, TRBJ1-4)
CASSDTGGTNEKLFF

SEQ ID NO: 596705 - protein, 14 aa, Homo sapiens
  CDR3 for alpha chain variable domain of TCR clone 298353 (TRAV1-2, TRAJ8)
CAVREDTGFHKLVF

SEQ ID NO: 596706 - protein, 16 aa, Homo sapiens
  CDR3 for beta chain variable domain of TCR clone 298353 (TRBV24-1, TRBJ2-3)
CATSDPGTGATDTQYF

SEQ ID NO: 596707 - protein, 14 aa, Homo sapiens
  CDR3 for alpha chain variable domain of TCR clone 298354 (TRAV8-3, TRAJ16)
CAVDRFSDGQKLLF

SEQ ID NO: 596708 - protein, 14 aa, Homo sapiens
  CDR3 for beta chain variable domain of TCR clone 298354 (TRBV7-2, TRBJ2-7)
CASSPKTSFYEQYF

SEQ ID NO: 596709 - protein, 14 aa, Homo sapiens
  CDR3 for alpha chain variable domain of TCR clone 298355 (TRAV12-2, TRAJ45)
CAVNIGGGADGLTF

SEQ ID NO: 596710 - protein, 13 aa, Homo sapiens
  CDR3 for beta chain variable domain of TCR clone 298355 (TRBV19, TRBJ2-2)
CASKVSAAGELFF

SEQ ID NO: 596711 - protein, 14 aa, Homo sapiens
  CDR3 for alpha chain variable domain of TCR clone 298356 (TRAV21, TRAJ45)
CAVSSGGGADGLTF

SEQ ID NO: 596712 - protein, 13 aa, Homo sapiens
  CDR3 for beta chain variable domain of TCR clone 298356 (TRBV12-4, TRBJ2-5)
CASSPGTEETQYF

SEQ ID NO: 596713 - protein, 13 aa, Homo sapiens
  CDR3 for alpha chain variable domain of TCR clone 298357 (TRAV17, TRAJ54)
CAAGIQEAQKLVF

SEQ ID NO: 596714 - protein, 14 aa, Homo sapiens
  CDR3 for beta chain variable domain of TCR clone 298357 (TRBV11-2, TRBJ1-2)
CASSLGTANYGYTF

SEQ ID NO: 596715 - protein, 14 aa, Homo sapiens
  CDR3 for alpha chain variable domain of TCR clone 298358 (TRAV29/DV5, TRAJ34)
CAASASGNTDKLIF

SEQ ID NO: 596716 - protein, 14 aa, Homo sapiens
  CDR3 for beta chain variable domain of TCR clone 298358 (TRBV7-2, TRBJ2-7)
CASSPKTSFYEQYF

SEQ ID NO: 596717 - protein, 15 aa, Homo sapiens
  CDR3 for alpha chain variable domain of TCR clone 298359 (TRAV8-6, TRAJ45)
CAVSEQGGGADGLTF

SEQ ID NO: 596718 - protein, 14 aa, Homo sapiens
  CDR3 for beta chain variable domain of TCR clone 298359 (TRBV28, TRBJ2-5)
CASKGSSFWETQYF

SEQ ID NO: 596719 - protein, 14 aa, Homo sapiens
  CDR3 for alpha chain variable domain of TCR clone 298360 (TRAV12-3, TRAJ10)
SHLPLTGGGNKLTF

SEQ ID NO: 596720 - protein, 18 aa, Homo sapiens
  CDR3 for beta chain variable domain of TCR clone 298360 (TRBV12-4, TRBJ1-3)
CASSLSRGGAFSGNTIYF

SEQ ID NO: 596721 - protein, 11 aa, Homo sapiens
  CDR3 for alpha chain variable domain of TCR clone 298361 (TRAV3, TRAJ21)
FAVGNFNKFYF

SEQ ID NO: 596722 - protein, 14 aa, Homo sapiens
  CDR3 for beta chain variable domain of TCR clone 298361 (TRBV7-3, TRBJ2-2)
CASSSGGYTGELFF

SEQ ID NO: 596723 - protein, 17 aa, Homo sapiens
  CDR3 for alpha chain variable domain of TCR clone 298362 (TRAV26-1, TRAJ58)
CIVRVGAEETSGSRLTF

SEQ ID NO: 596724 - protein, 18 aa, Homo sapiens
  CDR3 for beta chain variable domain of TCR clone 298362 (TRBV7-9, TRBJ2-7)
YASSLTTSGSRTWYEQYF

SEQ ID NO: 596725 - protein, 12 aa, Homo sapiens
  CDR3 for alpha chain variable domain of TCR clone 298363 (TRAV12-1, TRAJ40)
CVVYSGTYKYIF

SEQ ID NO: 596726 - protein, 17 aa, Homo sapiens
  CDR3 for beta chain variable domain of TCR clone 298363 (TRBV15, TRBJ1-5)
CATSRAPPGTRNQPQHF

SEQ ID NO: 596727 - protein, 11 aa, Homo sapiens
  CDR3 for alpha chain variable domain of TCR clone 298364 (TRAV17, TRAJ43)
CATPRSNDMRF

SEQ ID NO: 596728 - protein, 13 aa, Homo sapiens
  CDR3 for beta chain variable domain of TCR clone 298364 (TRBV28, TRBJ2-7)
CASTPGLAGEQYF

SEQ ID NO: 596729 - protein, 13 aa, Homo sapiens
  CDR3 for alpha chain variable domain of TCR clone 298365 (TRAV36/DV7, TRAJ37)
CAVFSSNTGKLIF

SEQ ID NO: 596730 - protein, 12 aa, Homo sapiens
  CDR3 for beta chain variable domain of TCR clone 298365 (TRBV19, TRBJ1-5)
CASSIAQQPQHF

SEQ ID NO: 596731 - protein, 14 aa, Homo sapiens
  CDR3 for alpha chain variable domain of TCR clone 298366 (TRAV12-3, TRAJ10)
SHLPLTGVGNKLTF

SEQ ID NO: 596732 - protein, 12 aa, Homo sapiens
  CDR3 for beta chain variable domain of TCR clone 298366 (TRBV7-9, TRBJ2-7)
CASSIKREEQYF

SEQ ID NO: 596733 - protein, 14 aa, Homo sapiens
  CDR3 for alpha chain variable domain of TCR clone 298367 (TRAV12-1, TRAJ17)
CVVNYKAAGNKLTF

SEQ ID NO: 596734 - protein, 16 aa, Homo sapiens
  CDR3 for beta chain variable domain of TCR clone 298367 (TRBV12-4, TRBJ1-5)
CASSRPVGGSNKPQHF

SEQ ID NO: 596735 - protein, 15 aa, Homo sapiens
  CDR3 for alpha chain variable domain of TCR clone 298368 (TRAV3, TRAJ45)
CAMRTPWGGADGLTF

SEQ ID NO: 596736 - protein, 16 aa, Homo sapiens
  CDR3 for beta chain variable domain of TCR clone 298368 (TRBV6-1, TRBJ2-2)
CASSFGQGANTGELFF

SEQ ID NO: 596737 - protein, 19 aa, Homo sapiens
  CDR3 for alpha chain variable domain of TCR clone 298369 (TRAV38-1, TRAJ53)
CAFMKHGLESGGSNYKLTF

SEQ ID NO: 596738 - protein, 12 aa, Homo sapiens
  CDR3 for beta chain variable domain of TCR clone 298369 (TRBV11-2, TRBJ2-2)
CASSLGGGELFF

SEQ ID NO: 596739 - protein, 13 aa, Homo sapiens
  CDR3 for alpha chain variable domain of TCR clone 298370 (TRAV21, TRAJ27)
CAARPGNAGKSTV

SEQ ID NO: 596740 - protein, 15 aa, Homo sapiens
  CDR3 for beta chain variable domain of TCR clone 298370 (TRBV12-4, TRBJ2-5)
CASSPPTGLQETQYF

SEQ ID NO: 596741 - protein, 15 aa, Homo sapiens
  CDR3 for alpha chain variable domain of TCR clone 298371 (TRAV8-3, TRAJ11)
CAVRLLNSGYSTLTF

SEQ ID NO: 596742 - protein, 23 aa, Homo sapiens
  CDR3 for beta chain variable domain of TCR clone 298371 (TRBV7-9, TRBJ1-2)
EAQLEKSRLLSDRFSSGEDGYTF

SEQ ID NO: 596743 - protein, 13 aa, Homo sapiens
  CDR3 for alpha chain variable domain of TCR clone 298372 (TRAV9-2, TRAJ53)
CALSGGSNYKLTF

SEQ ID NO: 596744 - protein, 12 aa, Homo sapiens
  CDR3 for beta chain variable domain of TCR clone 298372 (TRBV11-2, TRBJ2-1)
CASGPGNNEQFF

SEQ ID NO: 596745 - protein, 14 aa, Homo sapiens
  CDR3 for alpha chain variable domain of TCR clone 298373 (TRAV8-2, TRAJ37)
CGVSISGNTGKLIF

SEQ ID NO: 596746 - protein, 13 aa, Homo sapiens
  CDR3 for beta chain variable domain of TCR clone 298373 (TRBV7-8, TRBJ2-7)
RRVRLTEMGEQYF

SEQ ID NO: 596747 - protein, 15 aa, Homo sapiens
  CDR3 for alpha chain variable domain of TCR clone 298374 (TRAV8-1, TRAJ6)
CAVNANPGGSYIPTF

SEQ ID NO: 596748 - protein, 12 aa, Homo sapiens
  CDR3 for beta chain variable domain of TCR clone 298374 (TRBV14, TRBJ2-4)
CASSNLKSIQYF

SEQ ID NO: 596749 - protein, 12 aa, Homo sapiens
  CDR3 for alpha chain variable domain of TCR clone 298375 (TRAV26-1, TRAJ13)
CIVSRGYQKVTF

SEQ ID NO: 596750 - protein, 16 aa, Homo sapiens
  CDR3 for beta chain variable domain of TCR clone 298375 (TRBV7-9, TRBJ2-3)
CASSPWREVGTDTQYF

SEQ ID NO: 596751 - protein, 12 aa, Homo sapiens
  CDR3 for alpha chain variable domain of TCR clone 298376 (TRAV8-3, TRAJ41)
CVVGALGYVLNF

SEQ ID NO: 596752 - protein, 16 aa, Homo sapiens
  CDR3 for beta chain variable domain of TCR clone 298376 (TRBV7-6, TRBJ2-3)
CASSDSRGEGTDTQYF

SEQ ID NO: 596753 - protein, 21 aa, Homo sapiens
  CDR3 for alpha chain variable domain of TCR clone 298377 (TRAV26-1, TRAJ38)
CIADNAGNNHIQNPDPAVYRL

SEQ ID NO: 596754 - protein, 13 aa, Homo sapiens
  CDR3 for beta chain variable domain of TCR clone 298377 (TRBV12-4, TRBJ1-2)
CASSLRQGKGYTF

SEQ ID NO: 596755 - protein, 15 aa, Homo sapiens
  CDR3 for alpha chain variable domain of TCR clone 298378 (TRAV10, TRAJ42)
SLLHLWGGSQGNLIF

SEQ ID NO: 596756 - protein, 15 aa, Homo sapiens
  CDR3 for beta chain variable domain of TCR clone 298378 (TRBV3-1, TRBJ2-1)
CASSQQPSGGNGQFF

SEQ ID NO: 596757 - protein, 16 aa, Homo sapiens
  CDR3 for alpha chain variable domain of TCR clone 298379 (TRAV16, TRAJ24)
FALSGGSTDSWGKLQF

SEQ ID NO: 596758 - protein, 15 aa, Homo sapiens
  CDR3 for beta chain variable domain of TCR clone 298379 (TRBV27, TRBJ2-1)
CASSNGGGSSNEQFF

SEQ ID NO: 596759 - protein, 15 aa, Homo sapiens
  CDR3 for alpha chain variable domain of TCR clone 298380 (TRAV13-1, TRAJ16)
CAARYQMARSCSLQG

SEQ ID NO: 596760 - protein, 13 aa, Homo sapiens
  CDR3 for beta chain variable domain of TCR clone 298380 (TRBV4-1, TRBJ2-1)
CASSQAGGDQQFF

SEQ ID NO: 596761 - protein, 13 aa, Homo sapiens
  CDR3 for alpha chain variable domain of TCR clone 298381 (TRAV2, TRAJ15)
CAVASQAGTALIF

SEQ ID NO: 596762 - protein, 18 aa, Homo sapiens
  CDR3 for beta chain variable domain of TCR clone 298381 (TRBV12-4, TRBJ2-2)
CGSSLVAGTRGRTGELFF

SEQ ID NO: 596763 - protein, 14 aa, Homo sapiens
  CDR3 for alpha chain variable domain of TCR clone 298382 (TRAV9-2, TRAJ39)
CALYIYNAGNMITF

SEQ ID NO: 596764 - protein, 15 aa, Homo sapiens
  CDR3 for beta chain variable domain of TCR clone 298382 (TRBV27, TRBJ2-7)
CASSTAGTGSYEQYF

SEQ ID NO: 596765 - protein, 14 aa, Homo sapiens
  CDR3 for alpha chain variable domain of TCR clone 298383 (TRAV20, TRAJ56)
CAVQFGGANSKLTF

SEQ ID NO: 596766 - protein, 16 aa, Homo sapiens
  CDR3 for beta chain variable domain of TCR clone 298383 (TRBV20-1, TRBJ1-4)
CSAPGQGLLTNEKLFF

SEQ ID NO: 596767 - protein, 10 aa, Homo sapiens
  CDR3 for alpha chain variable domain of TCR clone 298384 (TRAV1-2, TRAJ20)
CACNDYKLSF

SEQ ID NO: 596768 - protein, 15 aa, Homo sapiens
  CDR3 for beta chain variable domain of TCR clone 298384 (TRBV7-6, TRBJ1-5)
CASSQSSGINQPQHF

SEQ ID NO: 596769 - protein, 18 aa, Homo sapiens
  CDR3 for alpha chain variable domain of TCR clone 298385 (TRAV21, TRAJ52)
CAVRPSPAGGTSYGKLTF

SEQ ID NO: 596770 - protein, 13 aa, Homo sapiens
  CDR3 for beta chain variable domain of TCR clone 298385 (TRBV5-1, TRBJ1-2)
CASSFSGNLGYTF

SEQ ID NO: 596771 - protein, 17 aa, Homo sapiens
  CDR3 for alpha chain variable domain of TCR clone 298386 (TRAV3, TRAJ6)
CAGRDGPRAGGSYIPTF

SEQ ID NO: 596772 - protein, 13 aa, Homo sapiens
  CDR3 for beta chain variable domain of TCR clone 298386 (TRBV20-1, TRBJ2-1)
CSASTGTSNEQFF

SEQ ID NO: 596773 - protein, 12 aa, Homo sapiens
  CDR3 for alpha chain variable domain of TCR clone 298387 (TRAV20, TRAJ54)
CAVQEGAQKLVC

SEQ ID NO: 596774 - protein, 17 aa, Homo sapiens
  CDR3 for beta chain variable domain of TCR clone 298387 (TRBV13, TRBJ2-3)
CASSLSRVAGGRNTQYF

SEQ ID NO: 596775 - protein, 11 aa, Homo sapiens
  CDR3 for alpha chain variable domain of TCR clone 298388 (TRAV2, TRAJ21)
CAVFNFNKFYF

SEQ ID NO: 596776 - protein, 16 aa, Homo sapiens
  CDR3 for beta chain variable domain of TCR clone 298388 (TRBV29-1, TRBJ1-2)
CSVEANRDIANYGYTF

SEQ ID NO: 596777 - protein, 16 aa, Homo sapiens
  CDR3 for alpha chain variable domain of TCR clone 298389 (TRAV20, TRAJ52)
CAVLPDCGTSYGKLTF

SEQ ID NO: 596778 - protein, 12 aa, Homo sapiens
  CDR3 for beta chain variable domain of TCR clone 298389 (TRBV19, TRBJ2-1)
CASSQISNEQFF

SEQ ID NO: 596779 - protein, 12 aa, Homo sapiens
  CDR3 for alpha chain variable domain of TCR clone 298390 (TRAV12-2, TRAJ10)
WGVTGGGNKLTF

SEQ ID NO: 596780 - protein, 14 aa, Homo sapiens
  CDR3 for beta chain variable domain of TCR clone 298390 (TRBV20-1, TRBJ1-1)
CSAQTRIGGTEAFF

SEQ ID NO: 596781 - protein, 12 aa, Homo sapiens
  CDR3 for alpha chain variable domain of TCR clone 298391 (TRAV26-1, TRAJ54)
CIGGWGAQKLVF

SEQ ID NO: 596782 - protein, 14 aa, Homo sapiens
  CDR3 for beta chain variable domain of TCR clone 298391 (TRBV11-2, TRBJ1-2)
CASSSGQAGGGYTF

SEQ ID NO: 596783 - protein, 15 aa, Homo sapiens
  CDR3 for alpha chain variable domain of TCR clone 298392 (TRAV4, TRAJ39)
CLVGTNNNAGNMLTF

SEQ ID NO: 596784 - protein, 14 aa, Homo sapiens
  CDR3 for beta chain variable domain of TCR clone 298392 (TRBV19, TRBJ2-1)
CASPTFVLSGEQFF

SEQ ID NO: 596785 - protein, 15 aa, Homo sapiens
  CDR3 for alpha chain variable domain of TCR clone 298393 (TRAV38-2/DV8, TRAJ48)
CAYRSSESGNEKLTF

SEQ ID NO: 596786 - protein, 13 aa, Homo sapiens
  CDR3 for beta chain variable domain of TCR clone 298393 (TRBV4-2, TRBJ1-2)
CASSLSDSGGYTF

SEQ ID NO: 596787 - protein, 10 aa, Homo sapiens
  CDR3 for alpha chain variable domain of TCR clone 298394 (TRAV30, TRAJ48)
CGIGNEKLTL

SEQ ID NO: 596788 - protein, 17 aa, Homo sapiens
  CDR3 for beta chain variable domain of TCR clone 298394 (TRBV7-6, TRBJ2-3)
CIAVPAAWRGGTDTQYF

SEQ ID NO: 596789 - protein, 11 aa, Homo sapiens
  CDR3 for alpha chain variable domain of TCR clone 298395 (TRAV35, TRAJ31)
CAESGDARLMF

SEQ ID NO: 596790 - protein, 11 aa, Homo sapiens
  CDR3 for beta chain variable domain of TCR clone 298395 (TRBV24-1, TRBJ2-3)
CAASDLDTQYF

SEQ ID NO: 596791 - protein, 16 aa, Homo sapiens
  CDR3 for alpha chain variable domain of TCR clone 298396 (TRAV3, TRAJ37)
CAVRGKGSGNTGKLLF

SEQ ID NO: 596792 - protein, 15 aa, Homo sapiens
  CDR3 for beta chain variable domain of TCR clone 298396 (TRBV5-1, TRBJ2-7)
CASSLNGGPAREQYF

SEQ ID NO: 596793 - protein, 12 aa, Homo sapiens
  CDR3 for alpha chain variable domain of TCR clone 298397 (TRAV38-2/DV8, TRAJ48)
CALLSGNEKLTF

SEQ ID NO: 596794 - protein, 13 aa, Homo sapiens
  CDR3 for beta chain variable domain of TCR clone 298397 (TRBV19, TRBJ1-2)
CASSVPGQDGYTF

SEQ ID NO: 596795 - protein, 13 aa, Homo sapiens
  CDR3 for alpha chain variable domain of TCR clone 298398 (TRAV23/DV6, TRAJ47)
CAASIRNGIWKQN

SEQ ID NO: 596796 - protein, 13 aa, Homo sapiens
  CDR3 for beta chain variable domain of TCR clone 298398 (TRBV19, TRBJ1-2)
CASSQGQVYGYTF

SEQ ID NO: 596797 - protein, 15 aa, Homo sapiens
  CDR3 for alpha chain variable domain of TCR clone 298399 (TRAV27, TRAJ38)
CAARRNAGTNRKLIW

SEQ ID NO: 596798 - protein, 13 aa, Homo sapiens
  CDR3 for beta chain variable domain of TCR clone 298399 (TRBV12-5, TRBJ2-3)
CASGDRQSDTQYL

SEQ ID NO: 596799 - protein, 14 aa, Homo sapiens
  CDR3 for alpha chain variable domain of TCR clone 298400 (TRAV12-2, TRAJ40)
CAVKIPSGTYQYIF

SEQ ID NO: 596800 - protein, 15 aa, Homo sapiens
  CDR3 for beta chain variable domain of TCR clone 298400 (TRBV20-1, TRBJ1-4)
CSARREWGVNEKLFF

SEQ ID NO: 596801 - protein, 12 aa, Homo sapiens
  CDR3 for alpha chain variable domain of TCR clone 298401 (TRAV12-2, TRAJ10)
WGVTGGGNKLTF

SEQ ID NO: 596802 - protein, 15 aa, Homo sapiens
  CDR3 for beta chain variable domain of TCR clone 298401 (TRBV20-1, TRBJ2-1)
CSARGIGGTYNEQFF

SEQ ID NO: 596803 - protein, 13 aa, Homo sapiens
  CDR3 for alpha chain variable domain of TCR clone 298402 (TRAV1-2, TRAJ7)
CAGPYYGNNRLAF

SEQ ID NO: 596804 - protein, 13 aa, Homo sapiens
  CDR3 for beta chain variable domain of TCR clone 298402 (TRBV7-2, TRBJ2-1)
CASSLGVYNEQFF

SEQ ID NO: 596805 - protein, 15 aa, Homo sapiens
  CDR3 for alpha chain variable domain of TCR clone 298403 (TRAV1-2, TRAJ28)
CAVQYSGAGRYQLTF

SEQ ID NO: 596806 - protein, 13 aa, Homo sapiens
  CDR3 for beta chain variable domain of TCR clone 298403 (TRBV4-2, TRBJ1-1)
CASSQAGNTEAFF

SEQ ID NO: 596807 - protein, 12 aa, Homo sapiens
  CDR3 for alpha chain variable domain of TCR clone 298404 (TRAV16, TRAJ56)
CAPTGADSKLTF

SEQ ID NO: 596808 - protein, 14 aa, Homo sapiens
  CDR3 for beta chain variable domain of TCR clone 298404 (TRBV20-1, TRBJ2-5)
CSALVPGYQETQYF

SEQ ID NO: 596809 - protein, 15 aa, Homo sapiens
  CDR3 for alpha chain variable domain of TCR clone 298405 (TRAV26-1, TRAJ44)
CIVRVATGTASKLTF

SEQ ID NO: 596810 - protein, 15 aa, Homo sapiens
  CDR3 for beta chain variable domain of TCR clone 298405 (TRBV25-1, TRBJ1-4)
CASSPGDSTNEKLFF

SEQ ID NO: 596811 - protein, 11 aa, Homo sapiens
  CDR3 for alpha chain variable domain of TCR clone 298406 (TRAV12-3, TRAJ6)
CAMSGSYIPTF

SEQ ID NO: 596812 - protein, 15 aa, Homo sapiens
  CDR3 for beta chain variable domain of TCR clone 298406 (TRBV28, TRBJ2-3)
CASSPDRQGANTQYF

SEQ ID NO: 596813 - protein, 13 aa, Homo sapiens
  CDR3 for alpha chain variable domain of TCR clone 298407 (TRAV21, TRAJ27)
CAARPGNAGKSTF

SEQ ID NO: 596814 - protein, 14 aa, Homo sapiens
  CDR3 for beta chain variable domain of TCR clone 298407 (TRBV7-6, TRBJ2-3)
CASSLGTVTVTQYF

SEQ ID NO: 596815 - protein, 11 aa, Homo sapiens
  CDR3 for alpha chain variable domain of TCR clone 298408 (TRAV12-1, TRAJ30)
CVVNGQDKIIF

SEQ ID NO: 596816 - protein, 15 aa, Homo sapiens
  CDR3 for beta chain variable domain of TCR clone 298408 (TRBV7-3, TRBJ2-2)
CASSETGQGTGELFF

SEQ ID NO: 596817 - protein, 14 aa, Homo sapiens
  CDR3 for alpha chain variable domain of TCR clone 298409 (TRAV1-2, TRAJ8)
CAVREDTGFRKLVF

SEQ ID NO: 596818 - protein, 16 aa, Homo sapiens
  CDR3 for beta chain variable domain of TCR clone 298409 (TRBV12-5, TRBJ2-5)
CASGPRTSGNQETQYF

SEQ ID NO: 596819 - protein, 10 aa, Homo sapiens
  CDR3 for alpha chain variable domain of TCR clone 298410 (TRAV30, TRAJ48)
CGIGNENLTF

SEQ ID NO: 596820 - protein, 15 aa, Homo sapiens
  CDR3 for beta chain variable domain of TCR clone 298410 (TRBV28, TRBJ2-1)
CASRKTGTAYNEQFF

SEQ ID NO: 596821 - protein, 12 aa, Homo sapiens
  CDR3 for alpha chain variable domain of TCR clone 298411 (TRAV21, TRAJ29)
CAVTSGNTPLVF

SEQ ID NO: 596822 - protein, 15 aa, Homo sapiens
  CDR3 for beta chain variable domain of TCR clone 298411 (TRBV12-4, TRBJ1-2)
CASRLGVAGNYGYIF

SEQ ID NO: 596823 - protein, 14 aa, Homo sapiens
  CDR3 for alpha chain variable domain of TCR clone 298412 (TRAV8-3, TRAJ36)
CAVGPITGANNLFF

SEQ ID NO: 596824 - protein, 15 aa, Homo sapiens
  CDR3 for beta chain variable domain of TCR clone 298412 (TRBV4-1, TRBJ2-1)
CARSQDPGNYNEQFF

SEQ ID NO: 596825 - protein, 14 aa, Homo sapiens
  CDR3 for alpha chain variable domain of TCR clone 298413 (TRAV2, TRAJ29)
CAVTPPSGNTPLVF

SEQ ID NO: 596826 - protein, 14 aa, Homo sapiens
  CDR3 for beta chain variable domain of TCR clone 298413 (TRBV19, TRBJ2-1)
CASPTFVLSGEQFF

SEQ ID NO: 596827 - protein, 14 aa, Homo sapiens
  CDR3 for alpha chain variable domain of TCR clone 298414 (TRAV13-2, TRAJ29)
CAENIEPGNTPLVF

SEQ ID NO: 596828 - protein, 14 aa, Homo sapiens
  CDR3 for beta chain variable domain of TCR clone 298414 (TRBV19, TRBJ2-2)
CTTTGHANTGELFF

SEQ ID NO: 596829 - protein, 12 aa, Homo sapiens
  CDR3 for alpha chain variable domain of TCR clone 298415 (TRAV12-3, TRAJ4)
CAMTGAGTRLAV

SEQ ID NO: 596830 - protein, 12 aa, Homo sapiens
  CDR3 for beta chain variable domain of TCR clone 298415 (TRBV9, TRBJ2-1)
CASSVGGTDIFF

SEQ ID NO: 596831 - protein, 15 aa, Homo sapiens
  CDR3 for alpha chain variable domain of TCR clone 298416 (TRAV13-2, TRAJ16)
CAENDRFSDGQKLLF

SEQ ID NO: 596832 - protein, 13 aa, Homo sapiens
  CDR3 for beta chain variable domain of TCR clone 298416 (TRBV12-5, TRBJ2-3)
CASGDRQSDTQYF

SEQ ID NO: 596833 - protein, 13 aa, Homo sapiens
  CDR3 for alpha chain variable domain of TCR clone 298417 (TRAV38-1, TRAJ45)
CLLLGGGADGLTF

SEQ ID NO: 596834 - protein, 20 aa, Homo sapiens
  CDR3 for beta chain variable domain of TCR clone 298417 (TRBV28, TRBJ2-1)
CASTPIGRSPGLAGGNEQFF

SEQ ID NO: 596835 - protein, 14 aa, Homo sapiens
  CDR3 for alpha chain variable domain of TCR clone 298418 (TRAV12-2, TRAJ40)
CAVKVPSGTYKYIF

SEQ ID NO: 596836 - protein, 14 aa, Homo sapiens
  CDR3 for beta chain variable domain of TCR clone 298418 (TRBV7-8, TRBJ2-7)
CASSPRDRVYEQYF

SEQ ID NO: 596837 - protein, 14 aa, Homo sapiens
  CDR3 for alpha chain variable domain of TCR clone 298419 (TRAV16, TRAJ17)
CALSGRAAGNKLTF

SEQ ID NO: 596838 - protein, 15 aa, Homo sapiens
  CDR3 for beta chain variable domain of TCR clone 298419 (TRBV3-1, TRBJ1-2)
CASSPTRLPEWGYTF

SEQ ID NO: 596839 - protein, 12 aa, Homo sapiens
  CDR3 for alpha chain variable domain of TCR clone 298420 (TRAV25, TRAJ17)
CAGEAAGNKLTF

SEQ ID NO: 596840 - protein, 16 aa, Homo sapiens
  CDR3 for beta chain variable domain of TCR clone 298420 (TRBV6-4, TRBJ1-2)
CASSEAVGDPNYGYTF

SEQ ID NO: 596841 - protein, 13 aa, Homo sapiens
  CDR3 for alpha chain variable domain of TCR clone 298421 (TRAV8-3, TRAJ23)
CAGIYNQGGKLIF

SEQ ID NO: 596842 - protein, 12 aa, Homo sapiens
  CDR3 for beta chain variable domain of TCR clone 298421 (TRBV7-8, TRBJ2-7)
CASSLGDREQYF

SEQ ID NO: 596843 - protein, 15 aa, Homo sapiens
  CDR3 for alpha chain variable domain of TCR clone 298422 (TRAV12-3, TRAJ6)
CAMSATSGGSYIPTF

SEQ ID NO: 596844 - protein, 11 aa, Homo sapiens
  CDR3 for beta chain variable domain of TCR clone 298422 (TRBV20-1, TRBJ1-5)
CSAQGDQPQDF

SEQ ID NO: 596845 - protein, 15 aa, Homo sapiens
  CDR3 for alpha chain variable domain of TCR clone 298423 (TRAV17, TRAJ23)
CATDAEDNQGGKLIF

SEQ ID NO: 596846 - protein, 14 aa, Homo sapiens
  CDR3 for beta chain variable domain of TCR clone 298423 (TRBV25-1, TRBJ1-1)
CASTHLGGNTEAFF

SEQ ID NO: 596847 - protein, 12 aa, Homo sapiens
  CDR3 for alpha chain variable domain of TCR clone 298424 (TRAV13-1, TRAJ16)
CAAVSDGQKLLF

SEQ ID NO: 596848 - protein, 15 aa, Homo sapiens
  CDR3 for beta chain variable domain of TCR clone 298424 (TRBV7-2, TRBJ2-1)
CQQLSSGAGYNEQFF

SEQ ID NO: 596849 - protein, 16 aa, Homo sapiens
  CDR3 for alpha chain variable domain of TCR clone 298425 (TRAV36/DV7, TRAJ52)
CCGSASWWSSYGKLTF

SEQ ID NO: 596850 - protein, 14 aa, Homo sapiens
  CDR3 for beta chain variable domain of TCR clone 298425 (TRBV20-1, TRBJ1-1)
CSAQTRVGGTEAFF

SEQ ID NO: 596851 - protein, 14 aa, Homo sapiens
  CDR3 for alpha chain variable domain of TCR clone 298426 (TRAV17, TRAJ35)
CATDRPGFGNVLHC

SEQ ID NO: 596852 - protein, 19 aa, Homo sapiens
  CDR3 for beta chain variable domain of TCR clone 298426 (TRBV11-3, TRBJ2-2)
CASGTRPGAKTTNTGELFF

SEQ ID NO: 596853 - protein, 14 aa, Homo sapiens
  CDR3 for alpha chain variable domain of TCR clone 298427 (TRAV1-2, TRAJ8)
CAVIEDTCFQKLVF

SEQ ID NO: 596854 - protein, 14 aa, Homo sapiens
  CDR3 for beta chain variable domain of TCR clone 298427 (TRBV7-9, TRBJ1-1)
CASSLGGANTEAVF

SEQ ID NO: 596855 - protein, 16 aa, Homo sapiens
  CDR3 for alpha chain variable domain of TCR clone 298428 (TRAV26-1, TRAJ38)
CIVRAYNAGNNRKLIW

SEQ ID NO: 596856 - protein, 11 aa, Homo sapiens
  CDR3 for beta chain variable domain of TCR clone 298428 (TRBV19, TRBJ1-1)
CASSIGSEAFF

SEQ ID NO: 596857 - protein, 14 aa, Homo sapiens
  CDR3 for alpha chain variable domain of TCR clone 298429 (TRAV16, TRAJ40)
CAPHESCYLRNLQI

SEQ ID NO: 596858 - protein, 12 aa, Homo sapiens
  CDR3 for beta chain variable domain of TCR clone 298429 (TRBV7-3, TRBJ2-3)
CASSSLTDTQYF

SEQ ID NO: 596859 - protein, 16 aa, Homo sapiens
  CDR3 for alpha chain variable domain of TCR clone 298430 (TRAV27, TRAJ13)
CAGAKSDSGGYQKVTF

SEQ ID NO: 596860 - protein, 14 aa, Homo sapiens
  CDR3 for beta chain variable domain of TCR clone 298430 (TRBV19, TRBJ2-2)
CASSGQGIAGELFF

SEQ ID NO: 596861 - protein, 14 aa, Homo sapiens
  CDR3 for alpha chain variable domain of TCR clone 298431 (TRAV1-2, TRAJ8)
CAVREDTGFQKLVY

SEQ ID NO: 596862 - protein, 15 aa, Homo sapiens
  CDR3 for beta chain variable domain of TCR clone 298431 (TRBV7-9, TRBJ1-1)
CASSHRGTVNTEAFF

SEQ ID NO: 596863 - protein, 11 aa, Homo sapiens
  CDR3 for alpha chain variable domain of TCR clone 298432 (TRAV39, TRAJ49)
CAVDISTQFYS

SEQ ID NO: 596864 - protein, 11 aa, Homo sapiens
  CDR3 for beta chain variable domain of TCR clone 298432 (TRBV7-8, TRBJ2-7)
CASSLSLEQYF

SEQ ID NO: 596865 - protein, 11 aa, Homo sapiens
  CDR3 for alpha chain variable domain of TCR clone 298433 (TRAV25, TRAJ5)
CRGGGRRALTF

SEQ ID NO: 596866 - protein, 18 aa, Homo sapiens
  CDR3 for beta chain variable domain of TCR clone 298433 (TRBV13, TRBJ2-6)
CASSPMTSGGSGANVLTF

SEQ ID NO: 596867 - protein, 14 aa, Homo sapiens
  CDR3 for alpha chain variable domain of TCR clone 298434 (TRAV35, TRAJ22)
CAGLRPGSARQLTF

SEQ ID NO: 596868 - protein, 13 aa, Homo sapiens
  CDR3 for beta chain variable domain of TCR clone 298434 (TRBV20-1, TRBJ1-1)
CSARGGGNTEDFF

SEQ ID NO: 596869 - protein, 12 aa, Homo sapiens
  CDR3 for alpha chain variable domain of TCR clone 298435 (TRAV20, TRAJ54)
SAVQEGAQRLVF

SEQ ID NO: 596870 - protein, 17 aa, Homo sapiens
  CDR3 for beta chain variable domain of TCR clone 298435 (TRBV13, TRBJ2-3)
CASSLSRVAGGRNTQYF

SEQ ID NO: 596871 - protein, 16 aa, Homo sapiens
  CDR3 for alpha chain variable domain of TCR clone 298436 (TRAV26-1, TRAJ37)
CIVRGDGSGNTGKLIF

SEQ ID NO: 596872 - protein, 17 aa, Homo sapiens
  CDR3 for beta chain variable domain of TCR clone 298436 (TRBV4-1, TRBJ2-7)
CASSRYPLGVRGGEQYF

SEQ ID NO: 596873 - protein, 16 aa, Homo sapiens
  CDR3 for alpha chain variable domain of TCR clone 298437 (TRAV30, TRAJ24)
CGTEIVDADSGGKFHV

SEQ ID NO: 596874 - protein, 14 aa, Homo sapiens
  CDR3 for beta chain variable domain of TCR clone 298437 (TRBV12-5, TRBJ2-5)
CASGSRTHQETQYF

SEQ ID NO: 596875 - protein, 15 aa, Homo sapiens
  CDR3 for alpha chain variable domain of TCR clone 298438 (TRAV12-3, TRAJ17)
CAMSPSLAAGNKLTF

SEQ ID NO: 596876 - protein, 13 aa, Homo sapiens
  CDR3 for beta chain variable domain of TCR clone 298438 (TRBV5-1, TRBJ1-2)
CASSIDRPEGYTF

SEQ ID NO: 596877 - protein, 16 aa, Homo sapiens
  CDR3 for alpha chain variable domain of TCR clone 298439 (TRAV21, TRAJ52)
CAVTNAGGTSYGKLTF

SEQ ID NO: 596878 - protein, 11 aa, Homo sapiens
  CDR3 for beta chain variable domain of TCR clone 298439 (TRBV2, TRBJ1-1)
CASREGTEAFV

SEQ ID NO: 596879 - protein, 14 aa, Homo sapiens
  CDR3 for alpha chain variable domain of TCR clone 298440 (TRAV12-1, TRAJ17)
CVGNYKAAGSKLTF

SEQ ID NO: 596880 - protein, 17 aa, Homo sapiens
  CDR3 for beta chain variable domain of TCR clone 298440 (TRBV11-2, TRBJ2-1)
CASSLYPPGVEYNEQFF

SEQ ID NO: 596881 - protein, 18 aa, Homo sapiens
  CDR3 for alpha chain variable domain of TCR clone 298441 (TRAV21, TRAJ52)
CAVRPSPAGGTSYGKLTF

SEQ ID NO: 596882 - protein, 15 aa, Homo sapiens
  CDR3 for beta chain variable domain of TCR clone 298441 (TRBV20-1, TRBJ2-1)
CSATFSGTSGGEQFF

SEQ ID NO: 596883 - protein, 19 aa, Homo sapiens
  CDR3 for alpha chain variable domain of TCR clone 298442 (TRAV35, TRAJ22)
CAGQLATVDASGSARQLTF

SEQ ID NO: 596884 - protein, 17 aa, Homo sapiens
  CDR3 for beta chain variable domain of TCR clone 298442 (TRBV11-2, TRBJ2-1)
CASSLYPPGVEYNEQFF

SEQ ID NO: 596885 - protein, 18 aa, Homo sapiens
  CDR3 for alpha chain variable domain of TCR clone 298443 (TRAV29/DV5, TRAJ52)
CAAGFRGAGGTNYGKMTF

SEQ ID NO: 596886 - protein, 16 aa, Homo sapiens
  CDR3 for beta chain variable domain of TCR clone 298443 (TRBV7-3, TRBJ2-2)
CASSLKRGTLSGELFF

SEQ ID NO: 596887 - protein, 11 aa, Homo sapiens
  CDR3 for alpha chain variable domain of TCR clone 298444 (TRAV12-3, TRAJ41)
CAMNAREALNF

SEQ ID NO: 596888 - protein, 16 aa, Homo sapiens
  CDR3 for beta chain variable domain of TCR clone 298444 (TRBV7-8, TRBJ2-3)
CASSTEGQRETYTQYF

SEQ ID NO: 596889 - protein, 15 aa, Homo sapiens
  CDR3 for alpha chain variable domain of TCR clone 298445 (TRAV25, TRAJ52)
CAGTSGGTSYGKLTF

SEQ ID NO: 596890 - protein, 16 aa, Homo sapiens
  CDR3 for beta chain variable domain of TCR clone 298445 (TRBV15, TRBJ1-2)
CATSRGPSTGGGGYTF

SEQ ID NO: 596891 - protein, 14 aa, Homo sapiens
  CDR3 for alpha chain variable domain of TCR clone 298446 (TRAV12-2, TRAJ53)
CAVKGGGSNYKLTF

SEQ ID NO: 596892 - protein, 14 aa, Homo sapiens
  CDR3 for beta chain variable domain of TCR clone 298446 (TRBV7-7, TRBJ2-2)
CATRQDSDTGELFC

SEQ ID NO: 596893 - protein, 15 aa, Homo sapiens
  CDR3 for alpha chain variable domain of TCR clone 298447 (TRAV21, TRAJ52)
CAVRGGGTSYGTLTF

SEQ ID NO: 596894 - protein, 15 aa, Homo sapiens
  CDR3 for beta chain variable domain of TCR clone 298447 (TRBV18, TRBJ1-5)
CASSPSDRSNQPQHF

SEQ ID NO: 596895 - protein, 12 aa, Homo sapiens
  CDR3 for alpha chain variable domain of TCR clone 298448 (TRAV13-1, TRAJ27)
CAAHTNAGKSTF

SEQ ID NO: 596896 - protein, 14 aa, Homo sapiens
  CDR3 for beta chain variable domain of TCR clone 298448 (TRBV12-5, TRBJ2-5)
CASGSRTHQETQYV

SEQ ID NO: 596897 - protein, 12 aa, Homo sapiens
  CDR3 for alpha chain variable domain of TCR clone 298449 (TRAV3, TRAJ20)
CAVRDGDYKLSF

SEQ ID NO: 596898 - protein, 12 aa, Homo sapiens
  CDR3 for beta chain variable domain of TCR clone 298449 (TRBV2, TRBJ2-1)
CAYGPPGNEQFF

SEQ ID NO: 596899 - protein, 12 aa, Homo sapiens
  CDR3 for alpha chain variable domain of TCR clone 298450 (TRAV4, TRAJ26)
CLVGDYGQNFVF

SEQ ID NO: 596900 - protein, 16 aa, Homo sapiens
  CDR3 for beta chain variable domain of TCR clone 298450 (TRBV7-2, TRBJ1-2)
CASSSNQERRGHGYTF

SEQ ID NO: 596901 - protein, 17 aa, Homo sapiens
  CDR3 for alpha chain variable domain of TCR clone 298451 (TRAV3, TRAJ38)
CAVRDCLNAGNKRKLIC

SEQ ID NO: 596902 - protein, 14 aa, Homo sapiens
  CDR3 for beta chain variable domain of TCR clone 298451 (TRBV5-5, TRBJ1-5)
CASSGQGVDQPQHF

SEQ ID NO: 596903 - protein, 16 aa, Homo sapiens
  CDR3 for alpha chain variable domain of TCR clone 298452 (TRAV30, TRAJ24)
CGTEIVDADSWGTFQF

SEQ ID NO: 596904 - protein, 14 aa, Homo sapiens
  CDR3 for beta chain variable domain of TCR clone 298452 (TRBV19, TRBJ2-1)
CASPTFVLSGEQFF

SEQ ID NO: 596905 - protein, 19 aa, Homo sapiens
  CDR3 for alpha chain variable domain of TCR clone 298453 (TRAV26-1, TRAJ52)
CIVRAHRNAGGTSYGKLTF

SEQ ID NO: 596906 - protein, 15 aa, Homo sapiens
  CDR3 for beta chain variable domain of TCR clone 298453 (TRBV29-1, TRBJ2-1)
CSGRDRKSSYNERFF

SEQ ID NO: 596907 - protein, 15 aa, Homo sapiens
  CDR3 for alpha chain variable domain of TCR clone 298454 (TRAV3, TRAJ3)
CAVRDRRSSASKIIF

SEQ ID NO: 596908 - protein, 12 aa, Homo sapiens
  CDR3 for beta chain variable domain of TCR clone 298454 (TRBV7-8, TRBJ2-7)
CASSLGDREQYF

SEQ ID NO: 596909 - protein, 16 aa, Homo sapiens
  CDR3 for alpha chain variable domain of TCR clone 298455 (TRAV30, TRAJ24)
CGTEIVDADSWGKFQF

SEQ ID NO: 596910 - protein, 15 aa, Homo sapiens
  CDR3 for beta chain variable domain of TCR clone 298455 (TRBV7-2, TRBJ1-5)
CASSSGQGHAQPQHF

SEQ ID NO: 596911 - protein, 13 aa, Homo sapiens
  CDR3 for alpha chain variable domain of TCR clone 298456 (TRAV25, TRAJ10)
CAGRTGRGNKLNF

SEQ ID NO: 596912 - protein, 15 aa, Homo sapiens
  CDR3 for beta chain variable domain of TCR clone 298456 (TRBV19, TRBJ2-1)
CASSSPGVPLDEQFF

SEQ ID NO: 596913 - protein, 10 aa, Homo sapiens
  CDR3 for alpha chain variable domain of TCR clone 298457 (TRAV17, TRAJ31)
CATDGARLMF

SEQ ID NO: 596914 - protein, 13 aa, Homo sapiens
  CDR3 for beta chain variable domain of TCR clone 298457 (TRBV7-3, TRBJ1-1)
CASSQDWGAEAFF

SEQ ID NO: 596915 - protein, 13 aa, Homo sapiens
  CDR3 for alpha chain variable domain of TCR clone 298458 (TRAV27, TRAJ6)
CAGGTRGSYIPTF

SEQ ID NO: 596916 - protein, 15 aa, Homo sapiens
  CDR3 for beta chain variable domain of TCR clone 298458 (TRBV7-8, TRBJ2-1)
CASSLADSLYNEQFF

SEQ ID NO: 596917 - protein, 13 aa, Homo sapiens
  CDR3 for alpha chain variable domain of TCR clone 298459 (TRAV12-1, TRAJ53)
CVVNAESNYKLTF

SEQ ID NO: 596918 - protein, 15 aa, Homo sapiens
  CDR3 for beta chain variable domain of TCR clone 298459 (TRBV10-3, TRBJ2-2)
CAIRTDREDTGELFF

SEQ ID NO: 596919 - protein, 13 aa, Homo sapiens
  CDR3 for alpha chain variable domain of TCR clone 298460 (TRAV1-1, TRAJ9)
CAAKNTGGFKTIF

SEQ ID NO: 596920 - protein, 17 aa, Homo sapiens
  CDR3 for beta chain variable domain of TCR clone 298460 (TRBV15, TRBJ1-5)
CATSRAPPGTRNQPQHF

SEQ ID NO: 596921 - protein, 14 aa, Homo sapiens
  CDR3 for alpha chain variable domain of TCR clone 298461 (TRAV2, TRAJ15)
CAVGTGQAGTALIF

SEQ ID NO: 596922 - protein, 12 aa, Homo sapiens
  CDR3 for beta chain variable domain of TCR clone 298461 (TRBV5-1, TRBJ1-2)
CASSQDTYGYTF

SEQ ID NO: 596923 - protein, 12 aa, Homo sapiens
  CDR3 for alpha chain variable domain of TCR clone 298462 (TRAV27, TRAJ33)
CAGDGSNYQLIW

SEQ ID NO: 596924 - protein, 13 aa, Homo sapiens
  CDR3 for beta chain variable domain of TCR clone 298462 (TRBV19, TRBJ1-5)
CASSTRRDQPQHF

SEQ ID NO: 596925 - protein, 12 aa, Homo sapiens
  CDR3 for alpha chain variable domain of TCR clone 298463 (TRAV26-2, TRAJ21)
CILKGNVNKFYF

SEQ ID NO: 596926 - protein, 14 aa, Homo sapiens
  CDR3 for beta chain variable domain of TCR clone 298463 (TRBV7-2, TRBJ2-7)
CASSPKTSFYEQYF

SEQ ID NO: 596927 - protein, 16 aa, Homo sapiens
  CDR3 for alpha chain variable domain of TCR clone 298464 (TRAV30, TRAJ24)
CGTELVDADSWGKFQF

SEQ ID NO: 596928 - protein, 15 aa, Homo sapiens
  CDR3 for beta chain variable domain of TCR clone 298464 (TRBV12-4, TRBJ2-1)
CASSLLGRTYNEQFF

SEQ ID NO: 596929 - protein, 16 aa, Homo sapiens
  CDR3 for alpha chain variable domain of TCR clone 298465 (TRAV3, TRAJ4)
CAVRPSPSGGYYKLIF

SEQ ID NO: 596930 - protein, 12 aa, Homo sapiens
  CDR3 for beta chain variable domain of TCR clone 298465 (TRBV7-9, TRBJ2-7)
CASSQGVYEQYF

SEQ ID NO: 596931 - protein, 13 aa, Homo sapiens
  CDR3 for alpha chain variable domain of TCR clone 298466 (TRAV13-1, TRAJ36)
CAARVTGANNLFF

SEQ ID NO: 596932 - protein, 15 aa, Homo sapiens
  CDR3 for beta chain variable domain of TCR clone 298466 (TRBV4-3, TRBJ2-1)
CASSQMRGAHNEQFF

SEQ ID NO: 596933 - protein, 15 aa, Homo sapiens
  CDR3 for alpha chain variable domain of TCR clone 298467 (TRAV8-3, TRAJ11)
CAVGLLNSGYSTLNF

SEQ ID NO: 596934 - protein, 16 aa, Homo sapiens
  CDR3 for beta chain variable domain of TCR clone 298467 (TRBV7-9, TRBJ1-2)
CASSLGFSSGEDGYSF

SEQ ID NO: 596935 - protein, 13 aa, Homo sapiens
  CDR3 for alpha chain variable domain of TCR clone 298468 (TRAV8-4, TRAJ48)
FAVSLFGNEKLTF

SEQ ID NO: 596936 - protein, 15 aa, Homo sapiens
  CDR3 for beta chain variable domain of TCR clone 298468 (TRBV20-1, TRBJ2-7)
CSARKGLAESYEQYF

SEQ ID NO: 596937 - protein, 14 aa, Homo sapiens
  CDR3 for alpha chain variable domain of TCR clone 298469 (TRAV12-3, TRAJ10)
SHLPLTGGGNKLTF

SEQ ID NO: 596938 - protein, 15 aa, Homo sapiens
  CDR3 for beta chain variable domain of TCR clone 298469 (TRBV5-1, TRBJ1-5)
CASSFWVVSPSILVM

SEQ ID NO: 596939 - protein, 11 aa, Homo sapiens
  CDR3 for alpha chain variable domain of TCR clone 298470 (TRAV17, TRAJ49)
CATDAGNQLYF

SEQ ID NO: 596940 - protein, 16 aa, Homo sapiens
  CDR3 for beta chain variable domain of TCR clone 298470 (TRBV7-2, TRBJ1-2)
CASSPTSGTSLGGYTL

SEQ ID NO: 596941 - protein, 18 aa, Homo sapiens
  CDR3 for alpha chain variable domain of TCR clone 298471 (TRAV29/DV5, TRAJ52)
CAAGFRGAGGTSWGKLTF

SEQ ID NO: 596942 - protein, 16 aa, Homo sapiens
  CDR3 for beta chain variable domain of TCR clone 298471 (TRBV7-3, TRBJ2-2)
CASSVKRGTLSGELFF

SEQ ID NO: 596943 - protein, 17 aa, Homo sapiens
  CDR3 for alpha chain variable domain of TCR clone 298472 (TRAV13-1, TRAJ52)
CAASSGAGGTSYGKLTF

SEQ ID NO: 596944 - protein, 15 aa, Homo sapiens
  CDR3 for beta chain variable domain of TCR clone 298472 (TRBV28, TRBJ2-4)
CAAGSGTLLMGSQYF

SEQ ID NO: 596945 - protein, 14 aa, Homo sapiens
  CDR3 for alpha chain variable domain of TCR clone 298473 (TRAV1-2, TRAJ16)
CAVNRFSDGQKLLF

SEQ ID NO: 596946 - protein, 14 aa, Homo sapiens
  CDR3 for beta chain variable domain of TCR clone 298473 (TRBV4-1, TRBJ2-2)
CASSQAVNIGELFF

SEQ ID NO: 596947 - protein, 14 aa, Homo sapiens
  CDR3 for alpha chain variable domain of TCR clone 298474 (TRAV12-3, TRAJ10)
SHLPLTGGGNKLTF

SEQ ID NO: 596948 - protein, 15 aa, Homo sapiens
  CDR3 for beta chain variable domain of TCR clone 298474 (TRBV10-2, TRBJ2-6)
CASSEQGTGGNVLTF

SEQ ID NO: 596949 - protein, 14 aa, Homo sapiens
  CDR3 for alpha chain variable domain of TCR clone 298475 (TRAV10, TRAJ32)
CGEPRGGATNKLIF

SEQ ID NO: 596950 - protein, 13 aa, Homo sapiens
  CDR3 for beta chain variable domain of TCR clone 298475 (TRBV19, TRBJ2-7)
CASRKAGGSEQYF

SEQ ID NO: 596951 - protein, 13 aa, Homo sapiens
  CDR3 for alpha chain variable domain of TCR clone 298476 (TRAV30, TRAJ6)
CGTEAGGSDIPTF

SEQ ID NO: 596952 - protein, 16 aa, Homo sapiens
  CDR3 for beta chain variable domain of TCR clone 298476 (TRBV4-3, TRBJ2-3)
CASSLGLAGEGDTQYF

SEQ ID NO: 596953 - protein, 21 aa, Homo sapiens
  CDR3 for alpha chain variable domain of TCR clone 298477 (TRAV1-1, TRAJ6)
CLLLLRCERLERTGGSYIPTF

SEQ ID NO: 596954 - protein, 13 aa, Homo sapiens
  CDR3 for beta chain variable domain of TCR clone 298477 (TRBV4-1, TRBJ2-7)
CASSQGQAYEQYF

SEQ ID NO: 596955 - protein, 15 aa, Homo sapiens
  CDR3 for alpha chain variable domain of TCR clone 298478 (TRAV38-2/DV8, TRAJ39)
CAYRTSNNAGNMLTF

SEQ ID NO: 596956 - protein, 17 aa, Homo sapiens
  CDR3 for beta chain variable domain of TCR clone 298478 (TRBV7-3, TRBJ2-3)
CASSLMKRMRGADTQYF

SEQ ID NO: 596957 - protein, 15 aa, Homo sapiens
  CDR3 for alpha chain variable domain of TCR clone 298479 (TRAV4, TRAJ17)
CLVGDIGAAGNKLNF

SEQ ID NO: 596958 - protein, 14 aa, Homo sapiens
  CDR3 for beta chain variable domain of TCR clone 298479 (TRBV6-3, TRBJ2-7)
CASSYSVRVYEQYF

SEQ ID NO: 596959 - protein, 11 aa, Homo sapiens
  CDR3 for alpha chain variable domain of TCR clone 298480 (TRAV1-1, TRAJ3)
CAVRSASKIIF

SEQ ID NO: 596960 - protein, 13 aa, Homo sapiens
  CDR3 for beta chain variable domain of TCR clone 298480 (TRBV10-2, TRBJ2-7)
CASGASGGYEQYF

SEQ ID NO: 596961 - protein, 16 aa, Homo sapiens
  CDR3 for alpha chain variable domain of TCR clone 298481 (TRAV4, TRAJ18)
CCVLLIGGSTLGRLYF

SEQ ID NO: 596962 - protein, 12 aa, Homo sapiens
  CDR3 for beta chain variable domain of TCR clone 298481 (TRBV6-3, TRBJ2-7)
CASSLTPYEQYC

SEQ ID NO: 596963 - protein, 12 aa, Homo sapiens
  CDR3 for alpha chain variable domain of TCR clone 298482 (TRAV10, TRAJ34)
CVVSGKHGQAHL

SEQ ID NO: 596964 - protein, 14 aa, Homo sapiens
  CDR3 for beta chain variable domain of TCR clone 298482 (TRBV19, TRBJ2-1)
CASPTFVLSGEQFF

SEQ ID NO: 596965 - protein, 14 aa, Homo sapiens
  CDR3 for alpha chain variable domain of TCR clone 298483 (TRAV30, TRAJ26)
CGTEIVSYGQNFVF

SEQ ID NO: 596966 - protein, 16 aa, Homo sapiens
  CDR3 for beta chain variable domain of TCR clone 298483 (TRBV15, TRBJ2-1)
CATSRERLAGAYEQFF

SEQ ID NO: 596967 - protein, 15 aa, Homo sapiens
  CDR3 for alpha chain variable domain of TCR clone 298484 (TRAV12-2, TRAJ53)
CAVNGGGGSNYKLTF

SEQ ID NO: 596968 - protein, 14 aa, Homo sapiens
  CDR3 for beta chain variable domain of TCR clone 298484 (TRBV11-2, TRBJ2-7)
CASSLGAGAYEQYF

SEQ ID NO: 596969 - protein, 13 aa, Homo sapiens
  CDR3 for alpha chain variable domain of TCR clone 298485 (TRAV26-2, TRAJ43)
CILRAVNNNDMRF

SEQ ID NO: 596970 - protein, 17 aa, Homo sapiens
  CDR3 for beta chain variable domain of TCR clone 298485 (TRBV5-1, TRBJ2-7)
CASSKPEGREASYEQYF

SEQ ID NO: 596971 - protein, 16 aa, Homo sapiens
  CDR3 for alpha chain variable domain of TCR clone 298486 (TRAV4, TRAJ22)
CLVGDRYSGSARQLTF

SEQ ID NO: 596972 - protein, 16 aa, Homo sapiens
  CDR3 for beta chain variable domain of TCR clone 298486 (TRBV7-9, TRBJ2-3)
CASSPWREVGTDTQYF

SEQ ID NO: 596973 - protein, 11 aa, Homo sapiens
  CDR3 for alpha chain variable domain of TCR clone 298487 (TRAV2, TRAJ33)
CAVESNYQLIW

SEQ ID NO: 596974 - protein, 14 aa, Homo sapiens
  CDR3 for beta chain variable domain of TCR clone 298487 (TRBV4-1, TRBJ2-3)
CASSQEGSTDTQYF

SEQ ID NO: 596975 - protein, 16 aa, Homo sapiens
  CDR3 for alpha chain variable domain of TCR clone 298488 (TRAV12-3, TRAJ53)
WAMSPGSGGSNYKLTF

SEQ ID NO: 596976 - protein, 13 aa, Homo sapiens
  CDR3 for beta chain variable domain of TCR clone 298488 (TRBV12-5, TRBJ2-3)
CASGDRQSDTQYF

SEQ ID NO: 596977 - protein, 11 aa, Homo sapiens
  CDR3 for alpha chain variable domain of TCR clone 298489 (TRAV20, TRAJ23)
CACNQRGKLLF

SEQ ID NO: 596978 - protein, 16 aa, Homo sapiens
  CDR3 for beta chain variable domain of TCR clone 298489 (TRBV7-8, TRBJ2-5)
CASSFGGQPAQETQYF

SEQ ID NO: 596979 - protein, 15 aa, Homo sapiens
  CDR3 for alpha chain variable domain of TCR clone 298490 (TRAV12-1, TRAJ26)
CVVNSWVTMVRILSL

SEQ ID NO: 596980 - protein, 16 aa, Homo sapiens
  CDR3 for beta chain variable domain of TCR clone 298490 (TRBV7-7, TRBJ2-3)
CASSPGTSGSTDTQYF

SEQ ID NO: 596981 - protein, 12 aa, Homo sapiens
  CDR3 for alpha chain variable domain of TCR clone 298491 (TRAV2, TRAJ31)
CAVEDNNARLMF

SEQ ID NO: 596982 - protein, 14 aa, Homo sapiens
  CDR3 for beta chain variable domain of TCR clone 298491 (TRBV7-3, TRBJ2-1)
CASSLTGGANEQFF

SEQ ID NO: 596983 - protein, 13 aa, Homo sapiens
  CDR3 for alpha chain variable domain of TCR clone 298492 (TRAV9-2, TRAJ53)
CALSGGSNYKLTF

SEQ ID NO: 596984 - protein, 17 aa, Homo sapiens
  CDR3 for beta chain variable domain of TCR clone 298492 (TRBV11-2, TRBJ2-1)
CACSLYPPGVEYNEQFF

SEQ ID NO: 596985 - protein, 13 aa, Homo sapiens
  CDR3 for alpha chain variable domain of TCR clone 298493 (TRAV21, TRAJ27)
CAARPGNAGKSTF

SEQ ID NO: 596986 - protein, 14 aa, Homo sapiens
  CDR3 for beta chain variable domain of TCR clone 298493 (TRBV7-6, TRBJ2-3)
CASGLGTVTDTRYF

SEQ ID NO: 596987 - protein, 16 aa, Homo sapiens
  CDR3 for alpha chain variable domain of TCR clone 298494 (TRAV26-2, TRAJ45)
CTTASPIGGGADGLTF

SEQ ID NO: 596988 - protein, 20 aa, Homo sapiens
  CDR3 for beta chain variable domain of TCR clone 298494 (TRBV28, TRBJ2-1)
CASTPIGRAPGLAGGNEQFF

SEQ ID NO: 596989 - protein, 11 aa, Homo sapiens
  CDR3 for alpha chain variable domain of TCR clone 298495 (TRAV4, TRAJ28)
CLVGDNRAETL

SEQ ID NO: 596990 - protein, 13 aa, Homo sapiens
  CDR3 for beta chain variable domain of TCR clone 298495 (TRBV20-1, TRBJ2-7)
CSAPHTSGYEQYF

SEQ ID NO: 596991 - protein, 11 aa, Homo sapiens
  CDR3 for alpha chain variable domain of TCR clone 298496 (TRAV26-1, TRAJ37)
CIVRGDGSGNT

SEQ ID NO: 596992 - protein, 17 aa, Homo sapiens
  CDR3 for beta chain variable domain of TCR clone 298496 (TRBV4-1, TRBJ2-7)
CASSRDPLGVRGGEQYF

SEQ ID NO: 596993 - protein, 22 aa, Homo sapiens
  CDR3 for alpha chain variable domain of TCR clone 298497 (TRAV1-1, TRAJ30)
CAVRDQTGMTRSSFEKGHDFIF

SEQ ID NO: 596994 - protein, 12 aa, Homo sapiens
  CDR3 for beta chain variable domain of TCR clone 298497 (TRBV28, TRBJ2-6)
CAIQAGANVLTF

SEQ ID NO: 596995 - protein, 16 aa, Homo sapiens
  CDR3 for alpha chain variable domain of TCR clone 298498 (TRAV12-2, TRAJ18)
CAVTTARGSTLGRLYF

SEQ ID NO: 596996 - protein, 15 aa, Homo sapiens
  CDR3 for beta chain variable domain of TCR clone 298498 (TRBV9, TRBJ1-6)
CASSVAGTGDSPLHF

SEQ ID NO: 596997 - protein, 11 aa, Homo sapiens
  CDR3 for alpha chain variable domain of TCR clone 298499 (TRAV2, TRAJ13)
CASGGYQKVTF

SEQ ID NO: 596998 - protein, 19 aa, Homo sapiens
  CDR3 for beta chain variable domain of TCR clone 298499 (TRBV20-1, TRBJ2-7)
CSDAGTSGGEAPTSSTSGR

SEQ ID NO: 596999 - protein, 12 aa, Homo sapiens
  CDR3 for alpha chain variable domain of TCR clone 298500 (TRAV21, TRAJ37)
CAVRGNTGQLIF

SEQ ID NO: 597000 - protein, 14 aa, Homo sapiens
  CDR3 for beta chain variable domain of TCR clone 298500 (TRBV19, TRBJ2-1)
CASEVTGARNEQFF

SEQ ID NO: 597001 - protein, 15 aa, Homo sapiens
  CDR3 for alpha chain variable domain of TCR clone 298501 (TRAV36/DV7, TRAJ53)
WEGENSGGSNYKLTF

SEQ ID NO: 597002 - protein, 16 aa, Homo sapiens
  CDR3 for beta chain variable domain of TCR clone 298501 (TRBV5-1, TRBJ2-2)
CASSSRTGGRTGELFF

SEQ ID NO: 597003 - protein, 13 aa, Homo sapiens
  CDR3 for alpha chain variable domain of TCR clone 298502 (TRAV26-1, TRAJ29)
CIVRRSGNTPLVF

SEQ ID NO: 597004 - protein, 16 aa, Homo sapiens
  CDR3 for beta chain variable domain of TCR clone 298502 (TRBV11-2, TRBJ2-7)
CASRLAPTGVNYEQYF

SEQ ID NO: 597005 - protein, 16 aa, Homo sapiens
  CDR3 for alpha chain variable domain of TCR clone 298503 (TRAV14/DV4, TRAJ54)
CAMREGRIQGAQKLVF

SEQ ID NO: 597006 - protein, 13 aa, Homo sapiens
  CDR3 for beta chain variable domain of TCR clone 298503 (TRBV10-2, TRBJ2-7)
CAIGASGGYEQYF

SEQ ID NO: 597007 - protein, 11 aa, Homo sapiens
  CDR3 for alpha chain variable domain of TCR clone 298504 (TRAV23/DV6, TRAJ43)
CAASSENDIRF

SEQ ID NO: 597008 - protein, 14 aa, Homo sapiens
  CDR3 for beta chain variable domain of TCR clone 298504 (TRBV4-1, TRBJ1-2)
CASSQDPLPYGYTF

SEQ ID NO: 597009 - protein, 16 aa, Homo sapiens
  CDR3 for alpha chain variable domain of TCR clone 298505 (TRAV30, TRAJ24)
CGTEIVDADSWGKFQF

SEQ ID NO: 597010 - protein, 14 aa, Homo sapiens
  CDR3 for beta chain variable domain of TCR clone 298505 (TRBV12-5, TRBJ2-5)
CARGSRTHQGTQYF

SEQ ID NO: 597011 - protein, 13 aa, Homo sapiens
  CDR3 for alpha chain variable domain of TCR clone 298506 (TRAV12-1, TRAJ26)
SATYLYYGQNFVF

SEQ ID NO: 597012 - protein, 15 aa, Homo sapiens
  CDR3 for beta chain variable domain of TCR clone 298506 (TRBV5-1, TRBJ2-6)
CASSLDPSGANVLPF

SEQ ID NO: 597013 - protein, 16 aa, Homo sapiens
  CDR3 for alpha chain variable domain of TCR clone 298507 (TRAV17, TRAJ22)
CATDAISSGSSRQLTF

SEQ ID NO: 597014 - protein, 15 aa, Homo sapiens
  CDR3 for beta chain variable domain of TCR clone 298507 (TRBV5-1, TRBJ2-1)
CASSPPRAPYNEQFF

SEQ ID NO: 597015 - protein, 16 aa, Homo sapiens
  CDR3 for alpha chain variable domain of TCR clone 298508 (TRAV1-2, TRAJ10)
CPVRGVLTGGGNKLTF

SEQ ID NO: 597016 - protein, 12 aa, Homo sapiens
  CDR3 for beta chain variable domain of TCR clone 298508 (TRBV7-8, TRBJ2-7)
CASSLGDREQYF

SEQ ID NO: 597017 - protein, 15 aa, Homo sapiens
  CDR3 for alpha chain variable domain of TCR clone 298509 (TRAV3, TRAJ13)
CAVRVHSGGYQKVTF

SEQ ID NO: 597018 - protein, 15 aa, Homo sapiens
  CDR3 for beta chain variable domain of TCR clone 298509 (TRBV5-7, TRBJ1-2)
CASSLGVAANYGYTF

SEQ ID NO: 597019 - protein, 15 aa, Homo sapiens
  CDR3 for alpha chain variable domain of TCR clone 298510 (TRAV3, TRAJ42)
CAVRGGTGSQGNRIF

SEQ ID NO: 597020 - protein, 14 aa, Homo sapiens
  CDR3 for beta chain variable domain of TCR clone 298510 (TRBV19, TRBJ1-2)
CASSSLFARDVYTF

SEQ ID NO: 597021 - protein, 18 aa, Homo sapiens
  CDR3 for alpha chain variable domain of TCR clone 298511 (TRAV27, TRAJ17)
ASTSVQETIRAAGNKLTF

SEQ ID NO: 597022 - protein, 16 aa, Homo sapiens
  CDR3 for beta chain variable domain of TCR clone 298511 (TRBV5-7, TRBJ2-5)
CASTLAPAGGRETQYF

SEQ ID NO: 597023 - protein, 14 aa, Homo sapiens
  CDR3 for alpha chain variable domain of TCR clone 298512 (TRAV9-2, TRAJ39)
CALYIYNAGNMLAF

SEQ ID NO: 597024 - protein, 15 aa, Homo sapiens
  CDR3 for beta chain variable domain of TCR clone 298512 (TRBV27, TRBJ1-5)
CASSLGTGFDQPQHF

SEQ ID NO: 597025 - protein, 14 aa, Homo sapiens
  CDR3 for alpha chain variable domain of TCR clone 298513 (TRAV12-3, TRAJ10)
SHLPLTGGGNKLTF

SEQ ID NO: 597026 - protein, 13 aa, Homo sapiens
  CDR3 for beta chain variable domain of TCR clone 298513 (TRBV18, TRBJ2-5)
CASSLQGQETQYF

SEQ ID NO: 597027 - protein, 14 aa, Homo sapiens
  CDR3 for alpha chain variable domain of TCR clone 298514 (TRAV17, TRAJ12)
CATDEKDSSYKLIF

SEQ ID NO: 597028 - protein, 16 aa, Homo sapiens
  CDR3 for beta chain variable domain of TCR clone 298514 (TRBV11-2, TRBJ2-1)
CASSPRLAGGYNEQFF

SEQ ID NO: 597029 - protein, 15 aa, Homo sapiens
  CDR3 for alpha chain variable domain of TCR clone 298515 (TRAV13-1, TRAJ42)
CAASIAGGSQGNLIF

SEQ ID NO: 597030 - protein, 14 aa, Homo sapiens
  CDR3 for beta chain variable domain of TCR clone 298515 (TRBV7-2, TRBJ2-7)
CASSPKTSFYEQYF

SEQ ID NO: 597031 - protein, 13 aa, Homo sapiens
  CDR3 for alpha chain variable domain of TCR clone 298516 (TRAV12-3, TRAJ33)
CAMSVNSNYQLIW

SEQ ID NO: 597032 - protein, 19 aa, Homo sapiens
  CDR3 for beta chain variable domain of TCR clone 298516 (TRBV19, TRBJ2-5)
CASSIGQVTDFFLGETQYF

SEQ ID NO: 597033 - protein, 15 aa, Homo sapiens
  CDR3 for alpha chain variable domain of TCR clone 298517 (TRAV26-1, TRAJ48)
CIVRVGDFGNEKLTF

SEQ ID NO: 597034 - protein, 12 aa, Homo sapiens
  CDR3 for beta chain variable domain of TCR clone 298517 (TRBV11-2, TRBJ2-2)
CASSLGGGELFF

SEQ ID NO: 597035 - protein, 14 aa, Homo sapiens
  CDR3 for alpha chain variable domain of TCR clone 298518 (TRAV12-1, TRAJ13)
CVVIDSGGYQKVTF

SEQ ID NO: 597036 - protein, 14 aa, Homo sapiens
  CDR3 for beta chain variable domain of TCR clone 298518 (TRBV6-6, TRBJ1-4)
CASRTDREYEKLFF

SEQ ID NO: 597037 - protein, 15 aa, Homo sapiens
  CDR3 for alpha chain variable domain of TCR clone 298519 (TRAV26-1, TRAJ53)
CIVRVEGGSNYRLTF

SEQ ID NO: 597038 - protein, 13 aa, Homo sapiens
  CDR3 for beta chain variable domain of TCR clone 298519 (TRBV20-1, TRBJ1-1)
CSARGGGNTEAFF

SEQ ID NO: 597039 - protein, 14 aa, Homo sapiens
  CDR3 for alpha chain variable domain of TCR clone 298520 (TRAV21, TRAJ35)
CAVMPLGFGNVLHC

SEQ ID NO: 597040 - protein, 12 aa, Homo sapiens
  CDR3 for beta chain variable domain of TCR clone 298520 (TRBV7-9, TRBJ2-7)
CPSSIKREEQYF

SEQ ID NO: 597041 - protein, 14 aa, Homo sapiens
  CDR3 for alpha chain variable domain of TCR clone 298521 (TRAV17, TRAJ57)
CATDPQGGSEKLVF

SEQ ID NO: 597042 - protein, 14 aa, Homo sapiens
  CDR3 for beta chain variable domain of TCR clone 298521 (TRBV24-1, TRBJ1-1)
CATSIPRGDTEAFF

SEQ ID NO: 597043 - protein, 13 aa, Homo sapiens
  CDR3 for alpha chain variable domain of TCR clone 298522 (TRAV12-2, TRAJ52)
CAVSGTSYGKLTF

SEQ ID NO: 597044 - protein, 16 aa, Homo sapiens
  CDR3 for beta chain variable domain of TCR clone 298522 (TRBV5-7, TRBJ2-7)
CASSPTSGRELDEQYC

SEQ ID NO: 597045 - protein, 15 aa, Homo sapiens
  CDR3 for alpha chain variable domain of TCR clone 298523 (TRAV12-1, TRAJ41)
YVVNSRTGSGYALNF

SEQ ID NO: 597046 - protein, 11 aa, Homo sapiens
  CDR3 for beta chain variable domain of TCR clone 298523 (TRBV6-4, TRBJ2-1)
CASSDSYAQFF

SEQ ID NO: 597047 - protein, 16 aa, Homo sapiens
  CDR3 for alpha chain variable domain of TCR clone 298524 (TRAV3, TRAJ32)
CAVRDVEGGATNKLIF

SEQ ID NO: 597048 - protein, 11 aa, Homo sapiens
  CDR3 for beta chain variable domain of TCR clone 298524 (TRBV19, TRBJ2-1)
CASRRRYEQFF

SEQ ID NO: 597049 - protein, 16 aa, Homo sapiens
  CDR3 for alpha chain variable domain of TCR clone 298525 (TRAV13-1, TRAJ10)
CAASSHFTGGGNKLTF

SEQ ID NO: 597050 - protein, 15 aa, Homo sapiens
  CDR3 for beta chain variable domain of TCR clone 298525 (TRBV7-9, TRBJ1-6)
CASSSPGRGNSPLRF

SEQ ID NO: 597051 - protein, 18 aa, Homo sapiens
  CDR3 for alpha chain variable domain of TCR clone 298526 (TRAV13-1, TRAJ52)
CAASKSSAGGTSYGKLTL

SEQ ID NO: 597052 - protein, 13 aa, Homo sapiens
  CDR3 for beta chain variable domain of TCR clone 298526 (TRBV12-4, TRBJ1-2)
CASSLRQGKGYTF

SEQ ID NO: 597053 - protein, 11 aa, Homo sapiens
  CDR3 for alpha chain variable domain of TCR clone 298527 (TRAV19, TRAJ21)
CALSGFNKFYF

SEQ ID NO: 597054 - protein, 15 aa, Homo sapiens
  CDR3 for beta chain variable domain of TCR clone 298527 (TRBV5-1, TRBJ2-7)
CASSLNGGPAREQYF

SEQ ID NO: 597055 - protein, 14 aa, Homo sapiens
  CDR3 for alpha chain variable domain of TCR clone 298528 (TRAV3, TRAJ9)
CAVRLNTGGFKTIF

SEQ ID NO: 597056 - protein, 15 aa, Homo sapiens
  CDR3 for beta chain variable domain of TCR clone 298528 (TRBV7-2, TRBJ2-1)
RASSLASGRVNEQFF

SEQ ID NO: 597057 - protein, 15 aa, Homo sapiens
  CDR3 for alpha chain variable domain of TCR clone 298529 (TRAV27, TRAJ38)
CAARRNAGNNRKLLW

SEQ ID NO: 597058 - protein, 13 aa, Homo sapiens
  CDR3 for beta chain variable domain of TCR clone 298529 (TRBV12-5, TRBJ2-3)
CASGDRQSETQYF

SEQ ID NO: 597059 - protein, 14 aa, Homo sapiens
  CDR3 for alpha chain variable domain of TCR clone 298530 (TRAV38-1, TRAJ45)
CASHSGGGADGLTF

SEQ ID NO: 597060 - protein, 12 aa, Homo sapiens
  CDR3 for beta chain variable domain of TCR clone 298530 (TRBV5-1, TRBJ2-7)
CASSLDSYEQYF

SEQ ID NO: 597061 - protein, 16 aa, Homo sapiens
  CDR3 for alpha chain variable domain of TCR clone 298531 (TRAV26-1, TRAJ23)
CIVRVHPYNQGGKLIF

SEQ ID NO: 597062 - protein, 15 aa, Homo sapiens
  CDR3 for beta chain variable domain of TCR clone 298531 (TRBV5-7, TRBJ2-7)
CASSPYFGGSYEQYF

SEQ ID NO: 597063 - protein, 10 aa, Homo sapiens
  CDR3 for alpha chain variable domain of TCR clone 298532 (TRAV23/DV6, TRAJ57)
CAASSALSQG

SEQ ID NO: 597064 - protein, 14 aa, Homo sapiens
  CDR3 for beta chain variable domain of TCR clone 298532 (TRBV11-2, TRBJ2-1)
CASSLSGPYNEQFF

SEQ ID NO: 597065 - protein, 12 aa, Homo sapiens
  CDR3 for alpha chain variable domain of TCR clone 298533 (TRAV3, TRAJ43)
CAVRDPKNDMRF

SEQ ID NO: 597066 - protein, 13 aa, Homo sapiens
  CDR3 for beta chain variable domain of TCR clone 298533 (TRBV19, TRBJ1-2)
CASSVPGQDGYTF

SEQ ID NO: 597067 - protein, 14 aa, Homo sapiens
  CDR3 for alpha chain variable domain of TCR clone 298534 (TRAV26-1, TRAJ38)
CIADNAGNNRKLIW

SEQ ID NO: 597068 - protein, 15 aa, Homo sapiens
  CDR3 for beta chain variable domain of TCR clone 298534 (TRBV7-6, TRBJ1-4)
CASSLGAGAGERLFF

SEQ ID NO: 597069 - protein, 14 aa, Homo sapiens
  CDR3 for alpha chain variable domain of TCR clone 298535 (TRAV12-3, TRAJ6)
CAMSATGGSYIPTF

SEQ ID NO: 597070 - protein, 16 aa, Homo sapiens
  CDR3 for beta chain variable domain of TCR clone 298535 (TRBV4-2, TRBJ2-1)
CASSPRAGQGASEQFF

SEQ ID NO: 597071 - protein, 12 aa, Homo sapiens
  CDR3 for alpha chain variable domain of TCR clone 298536 (TRAV23/DV6, TRAJ30)
CAASKGDDKIIF

SEQ ID NO: 597072 - protein, 18 aa, Homo sapiens
  CDR3 for beta chain variable domain of TCR clone 298536 (TRBV10-3, TRBJ2-3)
CASSESRVGPMRGDTQYF

SEQ ID NO: 597073 - protein, 14 aa, Homo sapiens
  CDR3 for alpha chain variable domain of TCR clone 298537 (TRAV3, TRAJ5)
CAVRDLDTGRALTF

SEQ ID NO: 597074 - protein, 13 aa, Homo sapiens
  CDR3 for beta chain variable domain of TCR clone 298537 (TRBV12-4, TRBJ2-7)
CASSPTETYEQYF

SEQ ID NO: 597075 - protein, 12 aa, Homo sapiens
  CDR3 for alpha chain variable domain of TCR clone 298538 (TRAV27, TRAJ35)
CAGADFGNVLHC

SEQ ID NO: 597076 - protein, 18 aa, Homo sapiens
  CDR3 for beta chain variable domain of TCR clone 298538 (TRBV11-2, TRBJ2-3)
CASSLGGASRGAPNTQYF

SEQ ID NO: 597077 - protein, 11 aa, Homo sapiens
  CDR3 for alpha chain variable domain of TCR clone 298539 (TRAV21, TRAJ48)
CAVDGNEKLNF

SEQ ID NO: 597078 - protein, 15 aa, Homo sapiens
  CDR3 for beta chain variable domain of TCR clone 298539 (TRBV6-6, TRBJ2-5)
CASSPGGGLEETQYF

SEQ ID NO: 597079 - protein, 14 aa, Homo sapiens
  CDR3 for alpha chain variable domain of TCR clone 298540 (TRAV12-2, TRAJ13)
CAVKKTGGYQKVTF

SEQ ID NO: 597080 - protein, 12 aa, Homo sapiens
  CDR3 for beta chain variable domain of TCR clone 298540 (TRBV24-1, TRBJ2-3)
CATSDSTDTQYF

SEQ ID NO: 597081 - protein, 14 aa, Homo sapiens
  CDR3 for alpha chain variable domain of TCR clone 298541 (TRAV16, TRAJ42)
CALLAGGSQGNLIF

SEQ ID NO: 597082 - protein, 16 aa, Homo sapiens
  CDR3 for beta chain variable domain of TCR clone 298541 (TRBV7-7, TRBJ2-1)
CASSLASGTSYNEQFF

SEQ ID NO: 597083 - protein, 16 aa, Homo sapiens
  CDR3 for alpha chain variable domain of TCR clone 298542 (TRAV26-1, TRAJ45)
CIVEKYSGGGADGLTF

SEQ ID NO: 597084 - protein, 16 aa, Homo sapiens
  CDR3 for beta chain variable domain of TCR clone 298542 (TRBV10-3, TRBJ1-6)
CAISERRGQGNYPLHF

SEQ ID NO: 597085 - protein, 17 aa, Homo sapiens
  CDR3 for alpha chain variable domain of TCR clone 298543 (TRAV3, TRAJ38)
CAVRDCLNAGNNRKLIW

SEQ ID NO: 597086 - protein, 13 aa, Homo sapiens
  CDR3 for beta chain variable domain of TCR clone 298543 (TRBV4-2, TRBJ1-1)
CASSQGGNTEAFF

SEQ ID NO: 597087 - protein, 15 aa, Homo sapiens
  CDR3 for alpha chain variable domain of TCR clone 298544 (TRAV8-3, TRAJ11)
CAVGLLNSGYSTLTF

SEQ ID NO: 597088 - protein, 23 aa, Homo sapiens
  CDR3 for beta chain variable domain of TCR clone 298544 (TRBV7-9, TRBJ1-2)
EAQLEKSRLLSDRFFSGEDGYTF

SEQ ID NO: 597089 - protein, 16 aa, Homo sapiens
  CDR3 for alpha chain variable domain of TCR clone 298545 (TRAV17, TRAJ53)
CATDALSGGSNYKLKF

SEQ ID NO: 597090 - protein, 12 aa, Homo sapiens
  CDR3 for beta chain variable domain of TCR clone 298545 (TRBV5-1, TRBJ2-7)
CASSFRGYEQYF

SEQ ID NO: 597091 - protein, 14 aa, Homo sapiens
  CDR3 for alpha chain variable domain of TCR clone 298546 (TRAV12-2, TRAJ13)
CAVKKTGGDQKVTF

SEQ ID NO: 597092 - protein, 13 aa, Homo sapiens
  CDR3 for beta chain variable domain of TCR clone 298546 (TRBV27, TRBJ1-1)
CASSLSIGADAFF

SEQ ID NO: 597093 - protein, 12 aa, Homo sapiens
  CDR3 for alpha chain variable domain of TCR clone 298547 (TRAV16, TRAJ26)
YASKDGGQNFVF

SEQ ID NO: 597094 - protein, 13 aa, Homo sapiens
  CDR3 for beta chain variable domain of TCR clone 298547 (TRBV25-1, TRBJ1-1)
CASSDRGRAEAFF

SEQ ID NO: 597095 - protein, 14 aa, Homo sapiens
  CDR3 for alpha chain variable domain of TCR clone 298548 (TRAV26-1, TRAJ5)
CIVRVRFNRRALTF

SEQ ID NO: 597096 - protein, 17 aa, Homo sapiens
  CDR3 for beta chain variable domain of TCR clone 298548 (TRBV19, TRBJ2-6)
CASSTGQVFSGANVLTF

SEQ ID NO: 597097 - protein, 18 aa, Homo sapiens
  CDR3 for alpha chain variable domain of TCR clone 298549 (TRAV13-1, TRAJ52)
CAASKRSAGGTSYGNLTF

SEQ ID NO: 597098 - protein, 13 aa, Homo sapiens
  CDR3 for beta chain variable domain of TCR clone 298549 (TRBV12-4, TRBJ1-2)
CASSLRQGKGYTC

SEQ ID NO: 597099 - protein, 16 aa, Homo sapiens
  CDR3 for alpha chain variable domain of TCR clone 298550 (TRAV8-3, TRAJ13)
CAVGAYPSGGYQIVTF

SEQ ID NO: 597100 - protein, 14 aa, Homo sapiens
  CDR3 for beta chain variable domain of TCR clone 298550 (TRBV18, TRBJ2-5)
CASSPRASSETQYF

SEQ ID NO: 597101 - protein, 14 aa, Homo sapiens
  CDR3 for alpha chain variable domain of TCR clone 298551 (TRAV23/DV6, TRAJ24)
CAAGRPAAGGNCRL

SEQ ID NO: 597102 - protein, 15 aa, Homo sapiens
  CDR3 for beta chain variable domain of TCR clone 298551 (TRBV7-2, TRBJ1-2)
CASSPRAGWNYGYTF

SEQ ID NO: 597103 - protein, 13 aa, Homo sapiens
  CDR3 for alpha chain variable domain of TCR clone 298552 (TRAV17, TRAJ54)
CAAGIQGAQKLVF

SEQ ID NO: 597104 - protein, 15 aa, Homo sapiens
  CDR3 for beta chain variable domain of TCR clone 298552 (TRBV27, TRBJ2-1)
CASSNGGGSSNEQFF

SEQ ID NO: 597105 - protein, 15 aa, Homo sapiens
  CDR3 for alpha chain variable domain of TCR clone 298553 (TRAV2, TRAJ37)
CAVEDGSSKTGKLIF

SEQ ID NO: 597106 - protein, 13 aa, Homo sapiens
  CDR3 for beta chain variable domain of TCR clone 298553 (TRBV20-1, TRBJ1-6)
CSTFREGNSPLHF

SEQ ID NO: 597107 - protein, 16 aa, Homo sapiens
  CDR3 for alpha chain variable domain of TCR clone 298554 (TRAV3, TRAJ37)
CAVRPHGSGNTGKLIF

SEQ ID NO: 597108 - protein, 15 aa, Homo sapiens
  CDR3 for beta chain variable domain of TCR clone 298554 (TRBV2, TRBJ2-1)
CASSELARSYNDQFF

SEQ ID NO: 597109 - protein, 14 aa, Homo sapiens
  CDR3 for alpha chain variable domain of TCR clone 298555 (TRAV13-1, TRAJ44)
CAAKATGTASKLTF

SEQ ID NO: 597110 - protein, 13 aa, Homo sapiens
  CDR3 for beta chain variable domain of TCR clone 298555 (TRBV19, TRBJ2-2)
CASGIWSTGELFF

SEQ ID NO: 597111 - protein, 15 aa, Homo sapiens
  CDR3 for alpha chain variable domain of TCR clone 298556 (TRAV12-2, TRAJ53)
CAVNGGGGSNYKLTF

SEQ ID NO: 597112 - protein, 11 aa, Homo sapiens
  CDR3 for beta chain variable domain of TCR clone 298556 (TRBV11-2, TRBJ2-2)
CASSLPGELFF

SEQ ID NO: 597113 - protein, 14 aa, Homo sapiens
  CDR3 for alpha chain variable domain of TCR clone 298557 (TRAV2, TRAJ29)
CAVTPPSGNPPLVF

SEQ ID NO: 597114 - protein, 13 aa, Homo sapiens
  CDR3 for beta chain variable domain of TCR clone 298557 (TRBV11-2, TRBJ2-1)
CASSLGLAGGRFF

SEQ ID NO: 597115 - protein, 13 aa, Homo sapiens
  CDR3 for alpha chain variable domain of TCR clone 298558 (TRAV17, TRAJ31)
CATDENNNARLMF

SEQ ID NO: 597116 - protein, 14 aa, Homo sapiens
  CDR3 for beta chain variable domain of TCR clone 298558 (TRBV11-2, TRBJ2-1)
CPSSPSRQGGGQFF

SEQ ID NO: 597117 - protein, 19 aa, Homo sapiens
  CDR3 for alpha chain variable domain of TCR clone 298559 (TRAV25, TRAJ43)
TATQTTDVGTYFCAVFMRF

SEQ ID NO: 597118 - protein, 13 aa, Homo sapiens
  CDR3 for beta chain variable domain of TCR clone 298559 (TRBV20-1, TRBJ1-1)
CSARVGGNTEAFF

SEQ ID NO: 597119 - protein, 15 aa, Homo sapiens
  CDR3 for alpha chain variable domain of TCR clone 298560 (TRAV12-1, TRAJ44)
CVADLPTGTASKLTF

SEQ ID NO: 597120 - protein, 17 aa, Homo sapiens
  CDR3 for beta chain variable domain of TCR clone 298560 (TRBV7-3, TRBJ2-3)
CASSRGLAGQVPDTQYF

SEQ ID NO: 597121 - protein, 10 aa, Homo sapiens
  CDR3 for alpha chain variable domain of TCR clone 298561 (TRAV12-3, TRAJ49)
CAMNDDQFYF

SEQ ID NO: 597122 - protein, 13 aa, Homo sapiens
  CDR3 for beta chain variable domain of TCR clone 298561 (TRBV12-4, TRBJ1-1)
CASSPGTRFEAFF

SEQ ID NO: 597123 - protein, 15 aa, Homo sapiens
  CDR3 for alpha chain variable domain of TCR clone 298562 (TRAV3, TRAJ22)
CAVRDRGGSARQLNF

SEQ ID NO: 597124 - protein, 16 aa, Homo sapiens
  CDR3 for beta chain variable domain of TCR clone 298562 (TRBV5-4, TRBJ2-3)
CASQQPGAGGADTQYF

SEQ ID NO: 597125 - protein, 14 aa, Homo sapiens
  CDR3 for alpha chain variable domain of TCR clone 298563 (TRAV12-3, TRAJ12)
CAMSEVDSSYKLIF

SEQ ID NO: 597126 - protein, 12 aa, Homo sapiens
  CDR3 for beta chain variable domain of TCR clone 298563 (TRBV18, TRBJ1-4)
RASSPSREKLFF

SEQ ID NO: 597127 - protein, 12 aa, Homo sapiens
  CDR3 for alpha chain variable domain of TCR clone 298564 (TRAV25, TRAJ53)
CQSGGSNYKLTF

SEQ ID NO: 597128 - protein, 15 aa, Homo sapiens
  CDR3 for beta chain variable domain of TCR clone 298564 (TRBV5-1, TRBJ2-2)
GASSWTSPNTGELFF

SEQ ID NO: 597129 - protein, 13 aa, Homo sapiens
  CDR3 for alpha chain variable domain of TCR clone 298565 (TRAV12-3, TRAJ9)
CAMRNTGGFKTIS

SEQ ID NO: 597130 - protein, 14 aa, Homo sapiens
  CDR3 for beta chain variable domain of TCR clone 298565 (TRBV11-2, TRBJ2-7)
CASSSTGEGYEQYF

SEQ ID NO: 597131 - protein, 15 aa, Homo sapiens
  CDR3 for alpha chain variable domain of TCR clone 298566 (TRAV23/DV6, TRAJ30)
CAASSQESREDKIIF

SEQ ID NO: 597132 - protein, 17 aa, Homo sapiens
  CDR3 for beta chain variable domain of TCR clone 298566 (TRBV4-3, TRBJ2-1)
CASSQFSSGGRRVSSSS

SEQ ID NO: 597133 - protein, 16 aa, Homo sapiens
  CDR3 for alpha chain variable domain of TCR clone 298567 (TRAV27, TRAJ13)
CEGAKSDSGGYQKVTF

SEQ ID NO: 597134 - protein, 15 aa, Homo sapiens
  CDR3 for beta chain variable domain of TCR clone 298567 (TRBV29-1, TRBJ2-1)
CSVGRHALFYNEQFF

SEQ ID NO: 597135 - protein, 12 aa, Homo sapiens
  CDR3 for alpha chain variable domain of TCR clone 298568 (TRAV8-3, TRAJ26)
CAGDNYGQNFFF

SEQ ID NO: 597136 - protein, 12 aa, Homo sapiens
  CDR3 for beta chain variable domain of TCR clone 298568 (TRBV11-2, TRBJ2-1)
CASSPGNNGQFF

SEQ ID NO: 597137 - protein, 16 aa, Homo sapiens
  CDR3 for alpha chain variable domain of TCR clone 298569 (TRAV17, TRAJ18)
CATAPDRGSTLGRLYF

SEQ ID NO: 597138 - protein, 15 aa, Homo sapiens
  CDR3 for beta chain variable domain of TCR clone 298569 (TRBV27, TRBJ1-5)
CASSPGGYGNQPQHF

SEQ ID NO: 597139 - protein, 13 aa, Homo sapiens
  CDR3 for alpha chain variable domain of TCR clone 298570 (TRAV23/DV6, TRAJ21)
CAASIGNFNKFYF

SEQ ID NO: 597140 - protein, 14 aa, Homo sapiens
  CDR3 for beta chain variable domain of TCR clone 298570 (TRBV7-3, TRBJ1-1)
CASSLKGGNTEAFF

SEQ ID NO: 597141 - protein, 11 aa, Homo sapiens
  CDR3 for alpha chain variable domain of TCR clone 298571 (TRAV1-2, TRAJ20)
CAVANDYKLSF

SEQ ID NO: 597142 - protein, 15 aa, Homo sapiens
  CDR3 for beta chain variable domain of TCR clone 298571 (TRBV28, TRBJ2-1)
CASSRIAGGRSEQFF

SEQ ID NO: 597143 - protein, 14 aa, Homo sapiens
  CDR3 for alpha chain variable domain of TCR clone 298572 (TRAV3, TRAJ27)
CAVRDDTNAGKSTF

SEQ ID NO: 597144 - protein, 15 aa, Homo sapiens
  CDR3 for beta chain variable domain of TCR clone 298572 (TRBV7-7, TRBJ2-2)
CATSKLAKNTGELFV

SEQ ID NO: 597145 - protein, 14 aa, Homo sapiens
  CDR3 for alpha chain variable domain of TCR clone 298573 (TRAV12-2, TRAJ13)
CAVNPSGGYQKVTF

SEQ ID NO: 597146 - protein, 14 aa, Homo sapiens
  CDR3 for beta chain variable domain of TCR clone 298573 (TRBV25-1, TRBJ1-1)
CASTHLGGNTEAFF

SEQ ID NO: 597147 - protein, 14 aa, Homo sapiens
  CDR3 for alpha chain variable domain of TCR clone 298574 (TRAV12-1, TRAJ17)
CVVSYKAAGNKLTF

SEQ ID NO: 597148 - protein, 15 aa, Homo sapiens
  CDR3 for beta chain variable domain of TCR clone 298574 (TRBV7-2, TRBJ2-1)
CASTHGTGIYNEQFF

SEQ ID NO: 597149 - protein, 14 aa, Homo sapiens
  CDR3 for alpha chain variable domain of TCR clone 298575 (TRAV12-3, TRAJ10)
SHLPPTGGGNKLTF

SEQ ID NO: 597150 - protein, 13 aa, Homo sapiens
  CDR3 for beta chain variable domain of TCR clone 298575 (TRBV4-1, TRBJ2-2)
CASGQENTGELFF

SEQ ID NO: 597151 - protein, 12 aa, Homo sapiens
  CDR3 for alpha chain variable domain of TCR clone 298576 (TRAV8-3, TRAJ43)
CAVGAGNNDMRF

SEQ ID NO: 597152 - protein, 13 aa, Homo sapiens
  CDR3 for beta chain variable domain of TCR clone 298576 (TRBV11-3, TRBJ2-3)
CASSHDTKDTQYF

SEQ ID NO: 597153 - protein, 16 aa, Homo sapiens
  CDR3 for alpha chain variable domain of TCR clone 298577 (TRAV3, TRAJ37)
CAVRGNGSGNTGKLIF

SEQ ID NO: 597154 - protein, 11 aa, Homo sapiens
  CDR3 for beta chain variable domain of TCR clone 298577 (TRBV6-3, TRBJ2-3)
CATGQADTQYF

SEQ ID NO: 597155 - protein, 16 aa, Homo sapiens
  CDR3 for alpha chain variable domain of TCR clone 298578 (TRAV30, TRAJ24)
CGTEIVDADSWGEFQF

SEQ ID NO: 597156 - protein, 12 aa, Homo sapiens
  CDR3 for beta chain variable domain of TCR clone 298578 (TRBV11-2, TRBJ2-2)
CASSLGGGELFF

SEQ ID NO: 597157 - protein, 14 aa, Homo sapiens
  CDR3 for alpha chain variable domain of TCR clone 298579 (TRAV12-2, TRAJ13)
CAVKKTGGYQKVTF

SEQ ID NO: 597158 - protein, 16 aa, Homo sapiens
  CDR3 for beta chain variable domain of TCR clone 298579 (TRBV6-6, TRBJ2-3)
CASSYSHAGSTDTQYF

SEQ ID NO: 597159 - protein, 14 aa, Homo sapiens
  CDR3 for alpha chain variable domain of TCR clone 298580 (TRAV1-2, TRAJ16)
CAVNRFSDGQKLLF

SEQ ID NO: 597160 - protein, 15 aa, Homo sapiens
  CDR3 for beta chain variable domain of TCR clone 298580 (TRBV20-1, TRBJ2-7)
CSARGPLAGGREQYF

SEQ ID NO: 597161 - protein, 12 aa, Homo sapiens
  CDR3 for alpha chain variable domain of TCR clone 298581 (TRAV21, TRAJ23)
CAVGPQGGKLIF

SEQ ID NO: 597162 - protein, 12 aa, Homo sapiens
  CDR3 for beta chain variable domain of TCR clone 298581 (TRBV12-4, TRBJ1-2)
CASSFIWLHLRF

SEQ ID NO: 597163 - protein, 13 aa, Homo sapiens
  CDR3 for alpha chain variable domain of TCR clone 298582 (TRAV12-2, TRAJ24)
CAVSTDSWGKLQF

SEQ ID NO: 597164 - protein, 15 aa, Homo sapiens
  CDR3 for beta chain variable domain of TCR clone 298582 (TRBV7-9, TRBJ1-6)
CASSSPGRGNSPLHF

SEQ ID NO: 597165 - protein, 11 aa, Homo sapiens
  CDR3 for alpha chain variable domain of TCR clone 298583 (TRAV1-1, TRAJ16)
CAAGDGQKLLF

SEQ ID NO: 597166 - protein, 15 aa, Homo sapiens
  CDR3 for beta chain variable domain of TCR clone 298583 (TRBV28, TRBJ1-2)
CASIPQGSDGYGYTF

SEQ ID NO: 597167 - protein, 11 aa, Homo sapiens
  CDR3 for alpha chain variable domain of TCR clone 298584 (TRAV26-1, TRAJ22)
CIVRVSFWFCK

SEQ ID NO: 597168 - protein, 13 aa, Homo sapiens
  CDR3 for beta chain variable domain of TCR clone 298584 (TRBV7-6, TRBJ2-3)
CASSLRSDNTQYF

SEQ ID NO: 597169 - protein, 12 aa, Homo sapiens
  CDR3 for alpha chain variable domain of TCR clone 298585 (TRAV12-2, TRAJ43)
CAVNVNNNDMRF

SEQ ID NO: 597170 - protein, 14 aa, Homo sapiens
  CDR3 for beta chain variable domain of TCR clone 298585 (TRBV7-2, TRBJ2-7)
CASSFLGMVYEQYF

SEQ ID NO: 597171 - protein, 12 aa, Homo sapiens
  CDR3 for alpha chain variable domain of TCR clone 298586 (TRAV1-2, TRAJ33)
CAALDSNYQLIW

SEQ ID NO: 597172 - protein, 13 aa, Homo sapiens
  CDR3 for beta chain variable domain of TCR clone 298586 (TRBV19, TRBJ2-7)
CASRRAGGSEQYF

SEQ ID NO: 597173 - protein, 16 aa, Homo sapiens
  CDR3 for alpha chain variable domain of TCR clone 298587 (TRAV14/DV4, TRAJ54)
CAMREGRIQGAQKLVF

SEQ ID NO: 597174 - protein, 12 aa, Homo sapiens
  CDR3 for beta chain variable domain of TCR clone 298587 (TRBV14, TRBJ2-7)
CASSLNQRGQYF

SEQ ID NO: 597175 - protein, 11 aa, Homo sapiens
  CDR3 for alpha chain variable domain of TCR clone 298588 (TRAV17, TRAJ43)
CATPRSNDMRF

SEQ ID NO: 597176 - protein, 12 aa, Homo sapiens
  CDR3 for beta chain variable domain of TCR clone 298588 (TRBV6-3, TRBJ2-7)
CASSEPGFEQYF

SEQ ID NO: 597177 - protein, 13 aa, Homo sapiens
  CDR3 for alpha chain variable domain of TCR clone 298589 (TRAV36/DV7, TRAJ37)
CAVFSSSTGKLIF

SEQ ID NO: 597178 - protein, 12 aa, Homo sapiens
  CDR3 for beta chain variable domain of TCR clone 298589 (TRBV11-2, TRBJ2-2)
CASSLGGGELFF

SEQ ID NO: 597179 - protein, 14 aa, Homo sapiens
  CDR3 for alpha chain variable domain of TCR clone 298590 (TRAV23/DV6, TRAJ13)
CAAMYSGGYQKVTF

SEQ ID NO: 597180 - protein, 16 aa, Homo sapiens
  CDR3 for beta chain variable domain of TCR clone 298590 (TRBV9, TRBJ2-1)
CASSALGGIGNNEQFL

SEQ ID NO: 597181 - protein, 15 aa, Homo sapiens
  CDR3 for alpha chain variable domain of TCR clone 298591 (TRAV26-2, TRAJ39)
CSLRGNNNAGNMLTF

SEQ ID NO: 597182 - protein, 13 aa, Homo sapiens
  CDR3 for beta chain variable domain of TCR clone 298591 (TRBV28, TRBJ2-5)
CASSFAGGETQYF

SEQ ID NO: 597183 - protein, 13 aa, Homo sapiens
  CDR3 for alpha chain variable domain of TCR clone 298592 (TRAV2, TRAJ15)
CAVASQAGTALIF

SEQ ID NO: 597184 - protein, 15 aa, Homo sapiens
  CDR3 for beta chain variable domain of TCR clone 298592 (TRBV18, TRBJ2-1)
CASSPPSASYNEQFF

SEQ ID NO: 597185 - protein, 14 aa, Homo sapiens
  CDR3 for alpha chain variable domain of TCR clone 298593 (TRAV3, TRAJ21)
CALGRGSTNFTLDL

SEQ ID NO: 597186 - protein, 16 aa, Homo sapiens
  CDR3 for beta chain variable domain of TCR clone 298593 (TRBV20-1, TRBJ2-1)
CSALTWTSGSYNEQFF

SEQ ID NO: 597187 - protein, 14 aa, Homo sapiens
  CDR3 for alpha chain variable domain of TCR clone 298594 (TRAV12-1, TRAJ39)
CVVNFNNAGNMLTF

SEQ ID NO: 597188 - protein, 14 aa, Homo sapiens
  CDR3 for beta chain variable domain of TCR clone 298594 (TRBV12-4, TRBJ1-1)
CASSPGTGGTEAFF

SEQ ID NO: 597189 - protein, 13 aa, Homo sapiens
  CDR3 for alpha chain variable domain of TCR clone 298595 (TRAV21, TRAJ20)
CAVGLRVDYKLSF

SEQ ID NO: 597190 - protein, 15 aa, Homo sapiens
  CDR3 for beta chain variable domain of TCR clone 298595 (TRBV6-1, TRBJ1-1)
CASSRQGNTELSLDK

SEQ ID NO: 597191 - protein, 13 aa, Homo sapiens
  CDR3 for alpha chain variable domain of TCR clone 298596 (TRAV12-3, TRAJ40)
CAMSDSGTYKYIF

SEQ ID NO: 597192 - protein, 14 aa, Homo sapiens
  CDR3 for beta chain variable domain of TCR clone 298596 (TRBV7-2, TRBJ1-5)
CASSTQGAGQSQHF

SEQ ID NO: 597193 - protein, 23 aa, Homo sapiens
  CDR3 for alpha chain variable domain of TCR clone 298597 (TRAV12-2, TRAJ36)
SLLIRDSQPSVSATLERANNLFF

SEQ ID NO: 597194 - protein, 17 aa, Homo sapiens
  CDR3 for beta chain variable domain of TCR clone 298597 (TRBV3-1, TRBJ2-3)
CASSQLLDRGHTDTQYF

SEQ ID NO: 597195 - protein, 15 aa, Homo sapiens
  CDR3 for alpha chain variable domain of TCR clone 298598 (TRAV14/DV4, TRAJ10)
CAMRELTGGGNKLTF

SEQ ID NO: 597196 - protein, 17 aa, Homo sapiens
  CDR3 for beta chain variable domain of TCR clone 298598 (TRBV15, TRBJ1-2)
CATSGREIEVVNYGYTF

SEQ ID NO: 597197 - protein, 17 aa, Homo sapiens
  CDR3 for alpha chain variable domain of TCR clone 298599 (TRAV3, TRAJ6)
CAVRDGRRAGGSYIPTF

SEQ ID NO: 597198 - protein, 14 aa, Homo sapiens
  CDR3 for beta chain variable domain of TCR clone 298599 (TRBV7-2, TRBJ2-7)
CASSPKTSFYERYF

SEQ ID NO: 597199 - protein, 15 aa, Homo sapiens
  CDR3 for alpha chain variable domain of TCR clone 298600 (TRAV21, TRAJ53)
CATLNSGGSNYKLTF

SEQ ID NO: 597200 - protein, 13 aa, Homo sapiens
  CDR3 for beta chain variable domain of TCR clone 298600 (TRBV18, TRBJ1-2)
CASSASATEGYTF

SEQ ID NO: 597201 - protein, 14 aa, Homo sapiens
  CDR3 for alpha chain variable domain of TCR clone 298601 (TRAV17, TRAJ22)
CATSPSGSAGQLTF

SEQ ID NO: 597202 - protein, 14 aa, Homo sapiens
  CDR3 for beta chain variable domain of TCR clone 298601 (TRBV7-2, TRBJ1-2)
CASSSQGAHYGYTF

SEQ ID NO: 597203 - protein, 13 aa, Homo sapiens
  CDR3 for alpha chain variable domain of TCR clone 298602 (TRAV13-2, TRAJ22)
CLGWISSARQLTF

SEQ ID NO: 597204 - protein, 17 aa, Homo sapiens
  CDR3 for beta chain variable domain of TCR clone 298602 (TRBV13, TRBJ2-3)
CASSLSRVAGGRNTQYF

SEQ ID NO: 597205 - protein, 12 aa, Homo sapiens
  CDR3 for alpha chain variable domain of TCR clone 298603 (TRAV3, TRAJ43)
CCEMGRNNDMRF

SEQ ID NO: 597206 - protein, 12 aa, Homo sapiens
  CDR3 for beta chain variable domain of TCR clone 298603 (TRBV5-1, TRBJ2-7)
CASSLDSYEQYF

SEQ ID NO: 597207 - protein, 15 aa, Homo sapiens
  CDR3 for alpha chain variable domain of TCR clone 298604 (TRAV12-2, TRAJ38)
CAVKMGAGNNRKLIW

SEQ ID NO: 597208 - protein, 14 aa, Homo sapiens
  CDR3 for beta chain variable domain of TCR clone 298604 (TRBV4-1, TRBJ2-1)
CASRTSGVFHEQFF

SEQ ID NO: 597209 - protein, 14 aa, Homo sapiens
  CDR3 for alpha chain variable domain of TCR clone 298605 (TRAV16, TRAJ39)
CSLSKNNAGNMLTF

SEQ ID NO: 597210 - protein, 19 aa, Homo sapiens
  CDR3 for beta chain variable domain of TCR clone 298605 (TRBV6-6, TRBJ2-1)
AAPSQTSVYFCASSYEQFF

SEQ ID NO: 597211 - protein, 16 aa, Homo sapiens
  CDR3 for alpha chain variable domain of TCR clone 298606 (TRAV35, TRAJ29)
CAGPIRGISGNTPLVF

SEQ ID NO: 597212 - protein, 13 aa, Homo sapiens
  CDR3 for beta chain variable domain of TCR clone 298606 (TRBV7-9, TRBJ1-2)
CASSLKQNYGYTF

SEQ ID NO: 597213 - protein, 12 aa, Homo sapiens
  CDR3 for alpha chain variable domain of TCR clone 298607 (TRAV13-2, TRAJ8)
CAPWLGFQKLVF

SEQ ID NO: 597214 - protein, 14 aa, Homo sapiens
  CDR3 for beta chain variable domain of TCR clone 298607 (TRBV2, TRBJ2-3)
CAVGGTISTDTQYF

SEQ ID NO: 597215 - protein, 15 aa, Homo sapiens
  CDR3 for alpha chain variable domain of TCR clone 298608 (TRAV25, TRAJ53)
CAATGGGVSNYKLTF

SEQ ID NO: 597216 - protein, 19 aa, Homo sapiens
  CDR3 for beta chain variable domain of TCR clone 298608 (TRBV7-2, TRBJ2-3)
CASSFLSRNWGGGTDTQYF

SEQ ID NO: 597217 - protein, 14 aa, Homo sapiens
  CDR3 for alpha chain variable domain of TCR clone 298609 (TRAV8-3, TRAJ4)
CAVGAAGGYNKLIF

SEQ ID NO: 597218 - protein, 14 aa, Homo sapiens
  CDR3 for beta chain variable domain of TCR clone 298609 (TRBV12-5, TRBJ2-5)
CARGSRTHQETQYF

SEQ ID NO: 597219 - protein, 11 aa, Homo sapiens
  CDR3 for alpha chain variable domain of TCR clone 298610 (TRAV23/DV6, TRAJ58)
CAARLLRGETS

SEQ ID NO: 597220 - protein, 22 aa, Homo sapiens
  CDR3 for beta chain variable domain of TCR clone 298610 (TRBV12-4, TRBJ2-5)
CASSFETSGVIRRDPVLRARHA

SEQ ID NO: 597221 - protein, 12 aa, Homo sapiens
  CDR3 for alpha chain variable domain of TCR clone 298611 (TRAV12-2, TRAJ3)
CAVWSSASKIIF

SEQ ID NO: 597222 - protein, 17 aa, Homo sapiens
  CDR3 for beta chain variable domain of TCR clone 298611 (TRBV13, TRBJ2-3)
CASSLSRVAGGRNTQYF

SEQ ID NO: 597223 - protein, 15 aa, Homo sapiens
  CDR3 for alpha chain variable domain of TCR clone 298612 (TRAV21, TRAJ24)
CAARSSTDSWVTLQF

SEQ ID NO: 597224 - protein, 13 aa, Homo sapiens
  CDR3 for beta chain variable domain of TCR clone 298612 (TRBV11-2, TRBJ2-5)
CASSSTGEETQYF

SEQ ID NO: 597225 - protein, 17 aa, Homo sapiens
  CDR3 for alpha chain variable domain of TCR clone 298613 (TRAV4, TRAJ18)
CLVVAAGRGSPRGRLYF

SEQ ID NO: 597226 - protein, 17 aa, Homo sapiens
  CDR3 for beta chain variable domain of TCR clone 298613 (TRBV28, TRBJ2-2)
CASSLATGMGDAGELFF

SEQ ID NO: 597227 - protein, 13 aa, Homo sapiens
  CDR3 for alpha chain variable domain of TCR clone 298614 (TRAV13-1, TRAJ33)
SAASRAGNYQLIW

SEQ ID NO: 597228 - protein, 12 aa, Homo sapiens
  CDR3 for beta chain variable domain of TCR clone 298614 (TRBV11-2, TRBJ1-2)
CASSREGDGYTF

SEQ ID NO: 597229 - protein, 15 aa, Homo sapiens
  CDR3 for alpha chain variable domain of TCR clone 298615 (TRAV12-1, TRAJ44)
CVVFVNTGTASKLTF

SEQ ID NO: 597230 - protein, 14 aa, Homo sapiens
  CDR3 for beta chain variable domain of TCR clone 298615 (TRBV11-2, TRBJ2-3)
CASSRLARTDTQYF

SEQ ID NO: 597231 - protein, 16 aa, Homo sapiens
  CDR3 for alpha chain variable domain of TCR clone 298616 (TRAV21, TRAJ37)
CAVRPRGSSNTGKLIS

SEQ ID NO: 597232 - protein, 13 aa, Homo sapiens
  CDR3 for beta chain variable domain of TCR clone 298616 (TRBV19, TRBJ2-5)
CASSIRGRETQYF

SEQ ID NO: 597233 - protein, 16 aa, Homo sapiens
  CDR3 for alpha chain variable domain of TCR clone 298617 (TRAV3, TRAJ37)
CAVRVRGYGNTGKLIF

SEQ ID NO: 597234 - protein, 15 aa, Homo sapiens
  CDR3 for beta chain variable domain of TCR clone 298617 (TRBV3-1, TRBJ2-1)
CASSPRDSGFNEQFF

SEQ ID NO: 597235 - protein, 13 aa, Homo sapiens
  CDR3 for alpha chain variable domain of TCR clone 298618 (TRAV2, TRAJ29)
CAAQNSGNTPLVF

SEQ ID NO: 597236 - protein, 14 aa, Homo sapiens
  CDR3 for beta chain variable domain of TCR clone 298618 (TRBV7-9, TRBJ2-4)
CASSLATGGNIQYF

SEQ ID NO: 597237 - protein, 19 aa, Homo sapiens
  CDR3 for alpha chain variable domain of TCR clone 298619 (TRAV12-2, TRAJ52)
PATSVPLIGGGTSYGKLTF

SEQ ID NO: 597238 - protein, 13 aa, Homo sapiens
  CDR3 for beta chain variable domain of TCR clone 298619 (TRBV15, TRBJ2-7)
CATSTTGHYEQYF

SEQ ID NO: 597239 - protein, 14 aa, Homo sapiens
  CDR3 for alpha chain variable domain of TCR clone 298620 (TRAV12-2, TRAJ24)
CAVTPADSWGKCQF

SEQ ID NO: 597240 - protein, 12 aa, Homo sapiens
  CDR3 for beta chain variable domain of TCR clone 298620 (TRBV3-1, TRBJ2-1)
CASSQGSSGQFF

SEQ ID NO: 597241 - protein, 12 aa, Homo sapiens
  CDR3 for alpha chain variable domain of TCR clone 298621 (TRAV9-2, TRAJ26)
CALRGYGQHFVF

SEQ ID NO: 597242 - protein, 12 aa, Homo sapiens
  CDR3 for beta chain variable domain of TCR clone 298621 (TRBV2, TRBJ2-3)
CASSGRFDTQYF

SEQ ID NO: 597243 - protein, 13 aa, Homo sapiens
  CDR3 for alpha chain variable domain of TCR clone 298622 (TRAV23/DV6, TRAJ47)
CAASMTRGNKLVF

SEQ ID NO: 597244 - protein, 14 aa, Homo sapiens
  CDR3 for beta chain variable domain of TCR clone 298622 (TRBV7-8, TRBJ2-3)
CASSLEAGTDTQYF

SEQ ID NO: 597245 - protein, 14 aa, Homo sapiens
  CDR3 for alpha chain variable domain of TCR clone 298623 (TRAV16, TRAJ31)
YALSGRNNNARLMF

SEQ ID NO: 597246 - protein, 12 aa, Homo sapiens
  CDR3 for beta chain variable domain of TCR clone 298623 (TRBV11-2, TRBJ1-2)
CASSREGDGYTF

SEQ ID NO: 597247 - protein, 15 aa, Homo sapiens
  CDR3 for alpha chain variable domain of TCR clone 298624 (TRAV29/DV5, TRAJ40)
CAASAQGSGTYKYIF

SEQ ID NO: 597248 - protein, 11 aa, Homo sapiens
  CDR3 for beta chain variable domain of TCR clone 298624 (TRBV29-1, TRBJ2-5)
FSEDRTGTQYF

SEQ ID NO: 597249 - protein, 15 aa, Homo sapiens
  CDR3 for alpha chain variable domain of TCR clone 298625 (TRAV23/DV6, TRAJ18)
CAARYRGSTLGRLYF

SEQ ID NO: 597250 - protein, 15 aa, Homo sapiens
  CDR3 for beta chain variable domain of TCR clone 298625 (TRBV19, TRBJ1-2)
CASSVGQVLNYGYTF

SEQ ID NO: 597251 - protein, 12 aa, Homo sapiens
  CDR3 for alpha chain variable domain of TCR clone 298626 (TRAV1-2, TRAJ33)
CAALDSNYQLIW

SEQ ID NO: 597252 - protein, 13 aa, Homo sapiens
  CDR3 for beta chain variable domain of TCR clone 298626 (TRBV7-9, TRBJ1-2)
CASSLKQNYGYTY

SEQ ID NO: 597253 - protein, 12 aa, Homo sapiens
  CDR3 for alpha chain variable domain of TCR clone 298627 (TRAV8-4, TRAJ31)
CAVSDSNARLMF

SEQ ID NO: 597254 - protein, 14 aa, Homo sapiens
  CDR3 for beta chain variable domain of TCR clone 298627 (TRBV7-8, TRBJ2-2)
CASSSLKGTGELFF

SEQ ID NO: 597255 - protein, 14 aa, Homo sapiens
  CDR3 for alpha chain variable domain of TCR clone 298628 (TRAV1-2, TRAJ16)
CAVNRFSDGLKLLF

SEQ ID NO: 597256 - protein, 18 aa, Homo sapiens
  CDR3 for beta chain variable domain of TCR clone 298628 (TRBV11-1, TRBJ2-6)
CASSFPGAGISGANVLTF

SEQ ID NO: 597257 - protein, 14 aa, Homo sapiens
  CDR3 for alpha chain variable domain of TCR clone 298629 (TRAV13-1, TRAJ35)
CAASKGGFGNVLHC

SEQ ID NO: 597258 - protein, 14 aa, Homo sapiens
  CDR3 for beta chain variable domain of TCR clone 298629 (TRBV2, TRBJ2-1)
CASSEALIYNEQFF

SEQ ID NO: 597259 - protein, 14 aa, Homo sapiens
  CDR3 for alpha chain variable domain of TCR clone 298630 (TRAV8-3, TRAJ9)
CAVGAGTGGFKTIF

SEQ ID NO: 597260 - protein, 12 aa, Homo sapiens
  CDR3 for beta chain variable domain of TCR clone 298630 (TRBV7-8, TRBJ2-7)
CASSLGDREQYF

SEQ ID NO: 597261 - protein, 17 aa, Homo sapiens
  CDR3 for alpha chain variable domain of TCR clone 298631 (TRAV3, TRAJ6)
CAVRDGPRAGGSYIPTF

SEQ ID NO: 597262 - protein, 17 aa, Homo sapiens
  CDR3 for beta chain variable domain of TCR clone 298631 (TRBV7-9, TRBJ1-1)
CASSLGIAGAENTEAFF

SEQ ID NO: 597263 - protein, 14 aa, Homo sapiens
  CDR3 for alpha chain variable domain of TCR clone 298632 (TRAV23/DV6, TRAJ6)
CAAIPSGGSYIPTF

SEQ ID NO: 597264 - protein, 17 aa, Homo sapiens
  CDR3 for beta chain variable domain of TCR clone 298632 (TRBV7-2, TRBJ2-3)
CASSLGGRAAWRDTQYF

SEQ ID NO: 597265 - protein, 12 aa, Homo sapiens
  CDR3 for alpha chain variable domain of TCR clone 298633 (TRAV36/DV7, TRAJ54)
GAVVRGAQKRVF

SEQ ID NO: 597266 - protein, 14 aa, Homo sapiens
  CDR3 for beta chain variable domain of TCR clone 298633 (TRBV7-3, TRBJ1-1)
CASSLKGGNTEAFF

SEQ ID NO: 597267 - protein, 16 aa, Homo sapiens
  CDR3 for alpha chain variable domain of TCR clone 298634 (TRAV4, TRAJ9)
CLVGDPNRPGGFKTIF

SEQ ID NO: 597268 - protein, 16 aa, Homo sapiens
  CDR3 for beta chain variable domain of TCR clone 298634 (TRBV28, TRBJ1-4)
CASSPPYRRRSEKLFF

SEQ ID NO: 597269 - protein, 12 aa, Homo sapiens
  CDR3 for alpha chain variable domain of TCR clone 298635 (TRAV3, TRAJ39)
CAVIEWSNMLTF

SEQ ID NO: 597270 - protein, 17 aa, Homo sapiens
  CDR3 for beta chain variable domain of TCR clone 298635 (TRBV3-1, TRBJ2-2)
CASSQFRDKVDTGELFF

SEQ ID NO: 597271 - protein, 12 aa, Homo sapiens
  CDR3 for alpha chain variable domain of TCR clone 298636 (TRAV23/DV6, TRAJ16)
CAATGTGQKPLF

SEQ ID NO: 597272 - protein, 15 aa, Homo sapiens
  CDR3 for beta chain variable domain of TCR clone 298636 (TRBV5-1, TRBJ2-3)
CASSLETASTDTQYF

SEQ ID NO: 597273 - protein, 14 aa, Homo sapiens
  CDR3 for alpha chain variable domain of TCR clone 298637 (TRAV1-2, TRAJ8)
CAVREDTGFQKLVF

SEQ ID NO: 597274 - protein, 16 aa, Homo sapiens
  CDR3 for beta chain variable domain of TCR clone 298637 (TRBV12-5, TRBJ2-5)
CASGRRTSGNQETQYF

SEQ ID NO: 597275 - protein, 12 aa, Homo sapiens
  CDR3 for alpha chain variable domain of TCR clone 298638 (TRAV12-3, TRAJ39)
CATNNAGNMLTF

SEQ ID NO: 597276 - protein, 16 aa, Homo sapiens
  CDR3 for beta chain variable domain of TCR clone 298638 (TRBV15, TRBJ2-3)
CATSRDLGIVTDTQYF

SEQ ID NO: 597277 - protein, 14 aa, Homo sapiens
  CDR3 for alpha chain variable domain of TCR clone 298639 (TRAV12-3, TRAJ10)
SHLPLTGGGNKLIF

SEQ ID NO: 597278 - protein, 14 aa, Homo sapiens
  CDR3 for beta chain variable domain of TCR clone 298639 (TRBV19, TRBJ2-1)
CANPTFVFSGEQFF

SEQ ID NO: 597279 - protein, 11 aa, Homo sapiens
  CDR3 for alpha chain variable domain of TCR clone 298640 (TRAV27, TRAJ47)
CRSNQGDKLDF

SEQ ID NO: 597280 - protein, 16 aa, Homo sapiens
  CDR3 for beta chain variable domain of TCR clone 298640 (TRBV7-9, TRBJ2-1)
CASSDVAGGSYNEQFF

SEQ ID NO: 597281 - protein, 15 aa, Homo sapiens
  CDR3 for alpha chain variable domain of TCR clone 298641 (TRAV12-2, TRAJ57)
CAVSRGQCGSEKLVF

SEQ ID NO: 597282 - protein, 14 aa, Homo sapiens
  CDR3 for beta chain variable domain of TCR clone 298641 (TRBV20-1, TRBJ2-1)
CSAHPGLPYNEQFF

SEQ ID NO: 597283 - protein, 16 aa, Homo sapiens
  CDR3 for alpha chain variable domain of TCR clone 298642 (TRAV16, TRAJ4)
CALSRMFSGGYNKLIF

SEQ ID NO: 597284 - protein, 14 aa, Homo sapiens
  CDR3 for beta chain variable domain of TCR clone 298642 (TRBV7-2, TRBJ1-1)
CASSFLIGTTEAFF

SEQ ID NO: 597285 - protein, 13 aa, Homo sapiens
  CDR3 for alpha chain variable domain of TCR clone 298643 (TRAV12-3, TRAJ39)
CAMIDNAGNMLTF

SEQ ID NO: 597286 - protein, 14 aa, Homo sapiens
  CDR3 for beta chain variable domain of TCR clone 298643 (TRBV7-6, TRBJ2-3)
CASSLGTVTDTQYF

SEQ ID NO: 597287 - protein, 16 aa, Homo sapiens
  CDR3 for alpha chain variable domain of TCR clone 298644 (TRAV16, TRAJ4)
CALSRMFSGGYNKLIF

SEQ ID NO: 597288 - protein, 15 aa, Homo sapiens
  CDR3 for beta chain variable domain of TCR clone 298644 (TRBV12-4, TRBJ1-5)
CQQPTGRGVQSAQHF

SEQ ID NO: 597289 - protein, 13 aa, Homo sapiens
  CDR3 for alpha chain variable domain of TCR clone 298645 (TRAV29/DV5, TRAJ31)
CAASRNNNARLMF

SEQ ID NO: 597290 - protein, 12 aa, Homo sapiens
  CDR3 for beta chain variable domain of TCR clone 298645 (TRBV14, TRBJ1-1)
CASSQLKGLAVF

SEQ ID NO: 597291 - protein, 17 aa, Homo sapiens
  CDR3 for alpha chain variable domain of TCR clone 298646 (TRAV26-1, TRAJ47)
CIVPSLLYMEYGNKLVF

SEQ ID NO: 597292 - protein, 14 aa, Homo sapiens
  CDR3 for beta chain variable domain of TCR clone 298646 (TRBV7-3, TRBJ1-5)
RASSFSGCNHPQHF

SEQ ID NO: 597293 - protein, 12 aa, Homo sapiens
  CDR3 for alpha chain variable domain of TCR clone 298647 (TRAV2, TRAJ31)
CAVEDNNARLMF

SEQ ID NO: 597294 - protein, 16 aa, Homo sapiens
  CDR3 for beta chain variable domain of TCR clone 298647 (TRBV10-3, TRBJ2-1)
CAISGVGDGGGGEQYF

SEQ ID NO: 597295 - protein, 19 aa, Homo sapiens
  CDR3 for alpha chain variable domain of TCR clone 298648 (TRAV1-2, TRAJ26)
CLLPLCCERPDNYGQNFVF

SEQ ID NO: 597296 - protein, 14 aa, Homo sapiens
  CDR3 for beta chain variable domain of TCR clone 298648 (TRBV2, TRBJ2-5)
CASTWGRAQETQYF

SEQ ID NO: 597297 - protein, 12 aa, Homo sapiens
  CDR3 for alpha chain variable domain of TCR clone 298649 (TRAV2, TRAJ31)
CAVEDNNARLMF

SEQ ID NO: 597298 - protein, 16 aa, Homo sapiens
  CDR3 for beta chain variable domain of TCR clone 298649 (TRBV10-3, TRBJ2-7)
CAISGVGDGGGGEQYF

SEQ ID NO: 597299 - protein, 14 aa, Homo sapiens
  CDR3 for alpha chain variable domain of TCR clone 298650 (TRAV12-3, TRAJ54)
CAMSALQGAQKLVF

SEQ ID NO: 597300 - protein, 15 aa, Homo sapiens
  CDR3 for beta chain variable domain of TCR clone 298650 (TRBV19, TRBJ2-4)
CASSTPGIAKNIQCF

SEQ ID NO: 597301 - protein, 14 aa, Homo sapiens
  CDR3 for alpha chain variable domain of TCR clone 298651 (TRAV38-1, TRAJ45)
CASHSGGGADGLTF

SEQ ID NO: 597302 - protein, 19 aa, Homo sapiens
  CDR3 for beta chain variable domain of TCR clone 298651 (TRBV25-1, TRBJ2-2)
CAILVYRVDRGRKTGELFF

SEQ ID NO: 597303 - protein, 15 aa, Homo sapiens
  CDR3 for alpha chain variable domain of TCR clone 298652 (TRAV21, TRAJ38)
CAVRQDAGNNRKLIW

SEQ ID NO: 597304 - protein, 14 aa, Homo sapiens
  CDR3 for beta chain variable domain of TCR clone 298652 (TRBV15, TRBJ2-5)
CATSEDRGQETQYF

SEQ ID NO: 597305 - protein, 13 aa, Homo sapiens
  CDR3 for alpha chain variable domain of TCR clone 298653 (TRAV29/DV5, TRAJ31)
CAASRTNNARLMF

SEQ ID NO: 597306 - protein, 12 aa, Homo sapiens
  CDR3 for beta chain variable domain of TCR clone 298653 (TRBV14, TRBJ1-1)
CASSQRKGLAFF

SEQ ID NO: 597307 - protein, 13 aa, Homo sapiens
  CDR3 for alpha chain variable domain of TCR clone 298654 (TRAV13-2, TRAJ13)
CAERPGGYQKVTF

SEQ ID NO: 597308 - protein, 18 aa, Homo sapiens
  CDR3 for beta chain variable domain of TCR clone 298654 (TRBV7-6, TRBJ2-1)
CASSPRTSGVSSYNEQFF

SEQ ID NO: 597309 - protein, 14 aa, Homo sapiens
  CDR3 for alpha chain variable domain of TCR clone 298655 (TRAV1-2, TRAJ8)
CAVREDTGFQKLVF

SEQ ID NO: 597310 - protein, 15 aa, Homo sapiens
  CDR3 for beta chain variable domain of TCR clone 298655 (TRBV29-1, TRBJ2-1)
CSVPTGLALYNEQFF

SEQ ID NO: 597311 - protein, 14 aa, Homo sapiens
  CDR3 for alpha chain variable domain of TCR clone 298656 (TRAV8-1, TRAJ5)
CAVSMDTGRRALTF

SEQ ID NO: 597312 - protein, 13 aa, Homo sapiens
  CDR3 for beta chain variable domain of TCR clone 298656 (TRBV7-9, TRBJ1-2)
CASSLKQNYGYTF

SEQ ID NO: 597313 - protein, 15 aa, Homo sapiens
  CDR3 for alpha chain variable domain of TCR clone 298657 (TRAV35, TRAJ40)
CAGQLGTSGTYKYIF

SEQ ID NO: 597314 - protein, 12 aa, Homo sapiens
  CDR3 for beta chain variable domain of TCR clone 298657 (TRBV7-8, TRBJ2-7)
CASSLGDREQYF

SEQ ID NO: 597315 - protein, 16 aa, Homo sapiens
  CDR3 for alpha chain variable domain of TCR clone 298658 (TRAV26-1, TRAJ37)
CIYARHGSSNTGKLIF

SEQ ID NO: 597316 - protein, 19 aa, Homo sapiens
  CDR3 for beta chain variable domain of TCR clone 298658 (TRBV7-2, TRBJ2-3)
CASSFLSRNWGGGTDTQYF

SEQ ID NO: 597317 - protein, 12 aa, Homo sapiens
  CDR3 for alpha chain variable domain of TCR clone 298659 (TRAV21, TRAJ37)
CAVKGNTGKLIF

SEQ ID NO: 597318 - protein, 15 aa, Homo sapiens
  CDR3 for beta chain variable domain of TCR clone 298659 (TRBV5-1, TRBJ1-1)
CASSSTTGTNTEAFF

SEQ ID NO: 597319 - protein, 14 aa, Homo sapiens
  CDR3 for alpha chain variable domain of TCR clone 298660 (TRAV12-1, TRAJ6)
CVVKRSGGSYIPTF

SEQ ID NO: 597320 - protein, 14 aa, Homo sapiens
  CDR3 for beta chain variable domain of TCR clone 298660 (TRBV13, TRBJ2-5)
CASYRRLAEETQYF

SEQ ID NO: 597321 - protein, 14 aa, Homo sapiens
  CDR3 for alpha chain variable domain of TCR clone 298661 (TRAV1-1, TRAJ27)
CAVIYNTNAGKSTF

SEQ ID NO: 597322 - protein, 15 aa, Homo sapiens
  CDR3 for beta chain variable domain of TCR clone 298661 (TRBV7-2, TRBJ2-1)
CTSSSALAGGNEQFF

SEQ ID NO: 597323 - protein, 14 aa, Homo sapiens
  CDR3 for alpha chain variable domain of TCR clone 298662 (TRAV13-2, TRAJ17)
CAEIPTYNNNDMRF

SEQ ID NO: 597324 - protein, 12 aa, Homo sapiens
  CDR3 for beta chain variable domain of TCR clone 298662 (TRBV11-2, TRBJ2-2)
CASSLGGGELFF

SEQ ID NO: 597325 - protein, 15 aa, Homo sapiens
  CDR3 for alpha chain variable domain of TCR clone 298663 (TRAV3, TRAJ4)
CAVRDGTGGYNKLIF

SEQ ID NO: 597326 - protein, 15 aa, Homo sapiens
  CDR3 for beta chain variable domain of TCR clone 298663 (TRBV27, TRBJ1-6)
CASSFDRGLGSPLHF

SEQ ID NO: 597327 - protein, 14 aa, Homo sapiens
  CDR3 for alpha chain variable domain of TCR clone 298664 (TRAV3, TRAJ21)
CAVRDAYNFNKFYF

SEQ ID NO: 597328 - protein, 17 aa, Homo sapiens
  CDR3 for beta chain variable domain of TCR clone 298664 (TRBV20-1, TRBJ1-6)
CSARGGYTFSYNSPLHV

SEQ ID NO: 597329 - protein, 15 aa, Homo sapiens
  CDR3 for alpha chain variable domain of TCR clone 298665 (TRAV2, TRAJ22)
CAVPSRGGSARQLTF

SEQ ID NO: 597330 - protein, 15 aa, Homo sapiens
  CDR3 for beta chain variable domain of TCR clone 298665 (TRBV20-1, TRBJ2-7)
CSARVPAAYFYEQYF

SEQ ID NO: 597331 - protein, 14 aa, Homo sapiens
  CDR3 for alpha chain variable domain of TCR clone 298666 (TRAV13-2, TRAJ43)
CAEIPTYNNNDIRL

SEQ ID NO: 597332 - protein, 15 aa, Homo sapiens
  CDR3 for beta chain variable domain of TCR clone 298666 (TRBV7-9, TRBJ2-2)
CASGPLDTFPGELFF

SEQ ID NO: 597333 - protein, 16 aa, Homo sapiens
  CDR3 for alpha chain variable domain of TCR clone 298667 (TRAV20, TRAJ10)
CAVLRGLTGGGNKLAF

SEQ ID NO: 597334 - protein, 13 aa, Homo sapiens
  CDR3 for beta chain variable domain of TCR clone 298667 (TRBV4-2, TRBJ2-3)
CASSLTTTDTQYF

SEQ ID NO: 597335 - protein, 11 aa, Homo sapiens
  CDR3 for alpha chain variable domain of TCR clone 298668 (TRAV3, TRAJ22)
CAVRDPPLEGF

SEQ ID NO: 597336 - protein, 15 aa, Homo sapiens
  CDR3 for beta chain variable domain of TCR clone 298668 (TRBV10-3, TRBJ2-3)
CAISLTSGGTDTQYF

SEQ ID NO: 597337 - protein, 12 aa, Homo sapiens
  CDR3 for alpha chain variable domain of TCR clone 298669 (TRAV25, TRAJ16)
CAGQQDGQKLLL

SEQ ID NO: 597338 - protein, 14 aa, Homo sapiens
  CDR3 for beta chain variable domain of TCR clone 298669 (TRBV12-4, TRBJ2-1)
CASSLGQGASEQFF

SEQ ID NO: 597339 - protein, 19 aa, Homo sapiens
  CDR3 for alpha chain variable domain of TCR clone 298670 (TRAV26-1, TRAJ52)
CIVRAHRNAVGTSYGKLTF

SEQ ID NO: 597340 - protein, 15 aa, Homo sapiens
  CDR3 for beta chain variable domain of TCR clone 298670 (TRBV12-4, TRBJ2-5)
CASSPPTGLQETQYF

SEQ ID NO: 597341 - protein, 16 aa, Homo sapiens
  CDR3 for alpha chain variable domain of TCR clone 298671 (TRAV30, TRAJ24)
CGTEIVDAAGWGKFQF

SEQ ID NO: 597342 - protein, 14 aa, Homo sapiens
  CDR3 for beta chain variable domain of TCR clone 298671 (TRBV12-5, TRBJ2-5)
CASGSRTHQETQYF

SEQ ID NO: 597343 - protein, 13 aa, Homo sapiens
  CDR3 for alpha chain variable domain of TCR clone 298672 (TRAV12-1, TRAJ31)
CVVNMNNNARLMF

SEQ ID NO: 597344 - protein, 15 aa, Homo sapiens
  CDR3 for beta chain variable domain of TCR clone 298672 (TRBV4-1, TRBJ1-2)
CASSQGQGAAYGHTF

SEQ ID NO: 597345 - protein, 12 aa, Homo sapiens
  CDR3 for alpha chain variable domain of TCR clone 298673 (TRAV30, TRAJ43)
CGTEDRGNDMRF

SEQ ID NO: 597346 - protein, 11 aa, Homo sapiens
  CDR3 for beta chain variable domain of TCR clone 298673 (TRBV29-1, TRBJ2-5)
CSEDRTGTQYF

SEQ ID NO: 597347 - protein, 16 aa, Homo sapiens
  CDR3 for alpha chain variable domain of TCR clone 298674 (TRAV35, TRAJ28)
CAGYLYSGAGSYQLTF

SEQ ID NO: 597348 - protein, 16 aa, Homo sapiens
  CDR3 for beta chain variable domain of TCR clone 298674 (TRBV5-1, TRBJ2-1)
CASSHGLAGPQNAQFF

SEQ ID NO: 597349 - protein, 15 aa, Homo sapiens
  CDR3 for alpha chain variable domain of TCR clone 298675 (TRAV13-1, TRAJ27)
CAASLLNTNAGKSTI

SEQ ID NO: 597350 - protein, 13 aa, Homo sapiens
  CDR3 for beta chain variable domain of TCR clone 298675 (TRBV7-3, TRBJ1-1)
CASSQDWGAEAFF

SEQ ID NO: 597351 - protein, 13 aa, Homo sapiens
  CDR3 for alpha chain variable domain of TCR clone 298676 (TRAV4, TRAJ9)
CLVAEGGGFKTIF

SEQ ID NO: 597352 - protein, 14 aa, Homo sapiens
  CDR3 for beta chain variable domain of TCR clone 298676 (TRBV12-4, TRBJ2-7)
CASSLTGRAYEQYF

SEQ ID NO: 597353 - protein, 22 aa, Homo sapiens
  CDR3 for alpha chain variable domain of TCR clone 298677 (TRAV8-3, TRAJ32)
CAVEVVLQTSSSLERALCLLSS

SEQ ID NO: 597354 - protein, 12 aa, Homo sapiens
  CDR3 for beta chain variable domain of TCR clone 298677 (TRBV7-8, TRBJ2-7)
CASSLGDREQYF

SEQ ID NO: 597355 - protein, 14 aa, Homo sapiens
  CDR3 for alpha chain variable domain of TCR clone 298678 (TRAV8-2, TRAJ37)
CVVSISGNTGKLIF

SEQ ID NO: 597356 - protein, 15 aa, Homo sapiens
  CDR3 for beta chain variable domain of TCR clone 298678 (TRBV7-6, TRBJ1-2)
CASSSGGRGGYGYTF

SEQ ID NO: 597357 - protein, 13 aa, Homo sapiens
  CDR3 for alpha chain variable domain of TCR clone 298679 (TRAV21, TRAJ49)
CAVRQSTGNQFYF

SEQ ID NO: 597358 - protein, 14 aa, Homo sapiens
  CDR3 for beta chain variable domain of TCR clone 298679 (TRBV7-8, TRBJ2-3)
CASSLEAGTDTQYF

SEQ ID NO: 597359 - protein, 14 aa, Homo sapiens
  CDR3 for alpha chain variable domain of TCR clone 298680 (TRAV1-2, TRAJ8)
CAVREDTGFQKLVF

SEQ ID NO: 597360 - protein, 15 aa, Homo sapiens
  CDR3 for beta chain variable domain of TCR clone 298680 (TRBV20-1, TRBJ2-7)
CSARDRDSGMDEQYF

SEQ ID NO: 597361 - protein, 13 aa, Homo sapiens
  CDR3 for alpha chain variable domain of TCR clone 298681 (TRAV20, TRAJ34)
CAVSSYNTDKLIF

SEQ ID NO: 597362 - protein, 13 aa, Homo sapiens
  CDR3 for beta chain variable domain of TCR clone 298681 (TRBV7-9, TRBJ1-2)
CASSLKQNNGYTF

SEQ ID NO: 597363 - protein, 15 aa, Homo sapiens
  CDR3 for alpha chain variable domain of TCR clone 298682 (TRAV23/DV6, TRAJ44)
CAARTLTATASKLTL

SEQ ID NO: 597364 - protein, 17 aa, Homo sapiens
  CDR3 for beta chain variable domain of TCR clone 298682 (TRBV24-1, TRBJ2-1)
CATSDVSTSGTYNEQFF

SEQ ID NO: 597365 - protein, 13 aa, Homo sapiens
  CDR3 for alpha chain variable domain of TCR clone 298683 (TRAV13-1, TRAJ21)
CAASIYNFNKFYF

SEQ ID NO: 597366 - protein, 13 aa, Homo sapiens
  CDR3 for beta chain variable domain of TCR clone 298683 (TRBV7-2, TRBJ1-1)
CASNLKGAKVAFF

SEQ ID NO: 597367 - protein, 13 aa, Homo sapiens
  CDR3 for alpha chain variable domain of TCR clone 298684 (TRAV12-1, TRAJ6)
YVVFPGGSYIPTF

SEQ ID NO: 597368 - protein, 14 aa, Homo sapiens
  CDR3 for beta chain variable domain of TCR clone 298684 (TRBV20-1, TRBJ1-3)
CSASPTGAGNTIYF

SEQ ID NO: 597369 - protein, 13 aa, Homo sapiens
  CDR3 for alpha chain variable domain of TCR clone 298685 (TRAV17, TRAJ37)
CATDPGNTGKLIF

SEQ ID NO: 597370 - protein, 13 aa, Homo sapiens
  CDR3 for beta chain variable domain of TCR clone 298685 (TRBV5-5, TRBJ2-5)
CASSSLGQETHYF

SEQ ID NO: 597371 - protein, 22 aa, Homo sapiens
  CDR3 for alpha chain variable domain of TCR clone 298686 (TRAV2, TRAJ10)
ILQVREADAAVYYTGGGNKLTF

SEQ ID NO: 597372 - protein, 13 aa, Homo sapiens
  CDR3 for beta chain variable domain of TCR clone 298686 (TRBV12-4, TRBJ2-5)
CASRLAVQETQYF

SEQ ID NO: 597373 - protein, 14 aa, Homo sapiens
  CDR3 for alpha chain variable domain of TCR clone 298687 (TRAV12-3, TRAJ10)
SHLPLTGGGNKLTF

SEQ ID NO: 597374 - protein, 15 aa, Homo sapiens
  CDR3 for beta chain variable domain of TCR clone 298687 (TRBV10-2, TRBJ2-6)
CASSEQGTGVNVLTF

SEQ ID NO: 597375 - protein, 15 aa, Homo sapiens
  CDR3 for alpha chain variable domain of TCR clone 298688 (TRAV17, TRAJ22)
CATVAPSGSARQLTF

SEQ ID NO: 597376 - protein, 16 aa, Homo sapiens
  CDR3 for beta chain variable domain of TCR clone 298688 (TRBV11-2, TRBJ2-7)
CASSPTTGGVSYEQYF

SEQ ID NO: 597377 - protein, 12 aa, Homo sapiens
  CDR3 for alpha chain variable domain of TCR clone 298689 (TRAV13-2, TRAJ8)
CAPWLGFQKLVF

SEQ ID NO: 597378 - protein, 13 aa, Homo sapiens
  CDR3 for beta chain variable domain of TCR clone 298689 (TRBV12-4, TRBJ1-5)
CAGSPDRAQPQHF

SEQ ID NO: 597379 - protein, 11 aa, Homo sapiens
  CDR3 for alpha chain variable domain of TCR clone 298690 (TRAV1-2, TRAJ40)
CAVPGTYKYIF

SEQ ID NO: 597380 - protein, 16 aa, Homo sapiens
  CDR3 for beta chain variable domain of TCR clone 298690 (TRBV10-3, TRBJ2-1)
CAISGVGDGGGGEQFF

SEQ ID NO: 597381 - protein, 14 aa, Homo sapiens
  CDR3 for alpha chain variable domain of TCR clone 298691 (TRAV17, TRAJ12)
CATDEKDSSYKLIF

SEQ ID NO: 597382 - protein, 14 aa, Homo sapiens
  CDR3 for beta chain variable domain of TCR clone 298691 (TRBV12-5, TRBJ2-5)
CASGSRTHQETQYF

SEQ ID NO: 597383 - protein, 13 aa, Homo sapiens
  CDR3 for alpha chain variable domain of TCR clone 298692 (TRAV16, TRAJ58)
CALRWASGSRLTL

SEQ ID NO: 597384 - protein, 16 aa, Homo sapiens
  CDR3 for beta chain variable domain of TCR clone 298692 (TRBV18, TRBJ2-2)
CASSPPRTANTGELFF

SEQ ID NO: 597385 - protein, 11 aa, Homo sapiens
  CDR3 for alpha chain variable domain of TCR clone 298693 (TRAV17, TRAJ43)
CATPRSNDMRF

SEQ ID NO: 597386 - protein, 13 aa, Homo sapiens
  CDR3 for beta chain variable domain of TCR clone 298693 (TRBV7-9, TRBJ2-3)
CASSPGSTDTQYF

SEQ ID NO: 597387 - protein, 14 aa, Homo sapiens
  CDR3 for alpha chain variable domain of TCR clone 298694 (TRAV12-3, TRAJ10)
SHLPLTGGGNKLTF

SEQ ID NO: 597388 - protein, 17 aa, Homo sapiens
  CDR3 for beta chain variable domain of TCR clone 298694 (TRBV5-1, TRBJ2-2)
CASSLAGLSGGTGELFF

SEQ ID NO: 597389 - protein, 23 aa, Homo sapiens
  CDR3 for alpha chain variable domain of TCR clone 298695 (TRAV12-2, TRAJ22)
CAVSFRAHPGPPMVSGSARQLTF

SEQ ID NO: 597390 - protein, 13 aa, Homo sapiens
  CDR3 for beta chain variable domain of TCR clone 298695 (TRBV12-4, TRBJ1-2)
CASSLDSNYGYTF

SEQ ID NO: 597391 - protein, 17 aa, Homo sapiens
  CDR3 for alpha chain variable domain of TCR clone 298696 (TRAV3, TRAJ6)
CAVRDGTRAGGSYIPTF

SEQ ID NO: 597392 - protein, 16 aa, Homo sapiens
  CDR3 for beta chain variable domain of TCR clone 298696 (TRBV15, TRBJ2-5)
CATSRYLEAAQETQYF

SEQ ID NO: 597393 - protein, 15 aa, Homo sapiens
  CDR3 for alpha chain variable domain of TCR clone 298697 (TRAV8-4, TRAJ3)
CAVPGENLVQQCFQD

SEQ ID NO: 597394 - protein, 16 aa, Homo sapiens
  CDR3 for beta chain variable domain of TCR clone 298697 (TRBV4-2, TRBJ1-1)
CASSQAGFGMNTEAFF

SEQ ID NO: 597395 - protein, 14 aa, Homo sapiens
  CDR3 for alpha chain variable domain of TCR clone 298698 (TRAV20, TRAJ56)
CAVQYGGANSKLTF

SEQ ID NO: 597396 - protein, 13 aa, Homo sapiens
  CDR3 for beta chain variable domain of TCR clone 298698 (TRBV7-3, TRBJ1-1)
CASSQDWGAEAFF

SEQ ID NO: 597397 - protein, 12 aa, Homo sapiens
  CDR3 for alpha chain variable domain of TCR clone 298699 (TRAV3, TRAJ31)
CAVRDGNARLMF

SEQ ID NO: 597398 - protein, 18 aa, Homo sapiens
  CDR3 for beta chain variable domain of TCR clone 298699 (TRBV7-2, TRBJ2-3)
CASSLMREGSGITDTQYF

SEQ ID NO: 597399 - protein, 12 aa, Homo sapiens
  CDR3 for alpha chain variable domain of TCR clone 298700 (TRAV29/DV5, TRAJ34)
CAARHNTDKLIF

SEQ ID NO: 597400 - protein, 15 aa, Homo sapiens
  CDR3 for beta chain variable domain of TCR clone 298700 (TRBV7-2, TRBJ2-5)
CASSAARSLTETQYF

SEQ ID NO: 597401 - protein, 14 aa, Homo sapiens
  CDR3 for alpha chain variable domain of TCR clone 298701 (TRAV2, TRAJ9)
CAVEDRSGGFKTIF

SEQ ID NO: 597402 - protein, 17 aa, Homo sapiens
  CDR3 for beta chain variable domain of TCR clone 298701 (TRBV11-2, TRBJ2-1)
CACSLYPPGVEYNEQFF

SEQ ID NO: 597403 - protein, 15 aa, Homo sapiens
  CDR3 for alpha chain variable domain of TCR clone 298702 (TRAV3, TRAJ22)
CAVRDRDGSARQLTF

SEQ ID NO: 597404 - protein, 13 aa, Homo sapiens
  CDR3 for beta chain variable domain of TCR clone 298702 (TRBV20-1, TRBJ1-1)
CSARVGGNTEAFF

SEQ ID NO: 597405 - protein, 15 aa, Homo sapiens
  CDR3 for alpha chain variable domain of TCR clone 298703 (TRAV13-1, TRAJ32)
CAASNGWWCDKQAHL

SEQ ID NO: 597406 - protein, 17 aa, Homo sapiens
  CDR3 for beta chain variable domain of TCR clone 298703 (TRBV15, TRBJ1-2)
CATSGREIDVVNYGYTF

SEQ ID NO: 597407 - protein, 13 aa, Homo sapiens
  CDR3 for alpha chain variable domain of TCR clone 298704 (TRAV12-1, TRAJ3)
CVVNPRGASKIIF

SEQ ID NO: 597408 - protein, 13 aa, Homo sapiens
  CDR3 for beta chain variable domain of TCR clone 298704 (TRBV28, TRBJ1-5)
CASSDMGNQPQHF

SEQ ID NO: 597409 - protein, 10 aa, Homo sapiens
  CDR3 for alpha chain variable domain of TCR clone 298705 (TRAV27, TRAJ58)
SETSGSRLTF

SEQ ID NO: 597410 - protein, 14 aa, Homo sapiens
  CDR3 for beta chain variable domain of TCR clone 298705 (TRBV19, TRBJ2-3)
CASSAPRGTDTQYF

SEQ ID NO: 597411 - protein, 17 aa, Homo sapiens
  CDR3 for alpha chain variable domain of TCR clone 298706 (TRAV12-2, TRAJ6)
CAPQGPPRAGGSYIPTF

SEQ ID NO: 597412 - protein, 13 aa, Homo sapiens
  CDR3 for beta chain variable domain of TCR clone 298706 (TRBV4-1, TRBJ2-2)
CASSQENTGELFF

SEQ ID NO: 597413 - protein, 14 aa, Homo sapiens
  CDR3 for alpha chain variable domain of TCR clone 298707 (TRAV12-2, TRAJ32)
CAHPESGATNKLIF

SEQ ID NO: 597414 - protein, 15 aa, Homo sapiens
  CDR3 for beta chain variable domain of TCR clone 298707 (TRBV6-1, TRBJ2-1)
CASSEAAYSYNEQFF

SEQ ID NO: 597415 - protein, 16 aa, Homo sapiens
  CDR3 for alpha chain variable domain of TCR clone 298708 (TRAV1-2, TRAJ10)
FAVRGVLTGGGNKLTF

SEQ ID NO: 597416 - protein, 16 aa, Homo sapiens
  CDR3 for beta chain variable domain of TCR clone 298708 (TRBV29-1, TRBJ2-7)
CSVEVVGTSGSYEQYF

SEQ ID NO: 597417 - protein, 14 aa, Homo sapiens
  CDR3 for alpha chain variable domain of TCR clone 298709 (TRAV3, TRAJ9)
CAVRLNTGGFETSF

SEQ ID NO: 597418 - protein, 16 aa, Homo sapiens
  CDR3 for beta chain variable domain of TCR clone 298709 (TRBV12-5, TRBJ2-5)
CASGPRTSGNQETQYF

SEQ ID NO: 597419 - protein, 14 aa, Homo sapiens
  CDR3 for alpha chain variable domain of TCR clone 298710 (TRAV1-2, TRAJ16)
CAVNRFSDCQKLLF

SEQ ID NO: 597420 - protein, 14 aa, Homo sapiens
  CDR3 for beta chain variable domain of TCR clone 298710 (TRBV7-9, TRBJ2-2)
CASSTVLGRGELFF

SEQ ID NO: 597421 - protein, 16 aa, Homo sapiens
  CDR3 for alpha chain variable domain of TCR clone 298711 (TRAV30, TRAJ24)
CGTEIVDADSWGKLQF

SEQ ID NO: 597422 - protein, 14 aa, Homo sapiens
  CDR3 for beta chain variable domain of TCR clone 298711 (TRBV12-5, TRBJ2-5)
CASGPRTHQETQYF

SEQ ID NO: 597423 - protein, 12 aa, Homo sapiens
  CDR3 for alpha chain variable domain of TCR clone 298712 (TRAV2, TRAJ33)
CAVPDSNYQLIW

SEQ ID NO: 597424 - protein, 13 aa, Homo sapiens
  CDR3 for beta chain variable domain of TCR clone 298712 (TRBV12-4, TRBJ1-2)
CASSSGLTVTSTF

SEQ ID NO: 597425 - protein, 11 aa, Homo sapiens
  CDR3 for alpha chain variable domain of TCR clone 298713 (TRAV27, TRAJ45)
CAGAQEEGLTG

SEQ ID NO: 597426 - protein, 17 aa, Homo sapiens
  CDR3 for beta chain variable domain of TCR clone 298713 (TRBV11-2, TRBJ2-1)
CASSLYPPGVEYNEQFF

SEQ ID NO: 597427 - protein, 13 aa, Homo sapiens
  CDR3 for alpha chain variable domain of TCR clone 298714 (TRAV20, TRAJ9)
CAVPDTGGIKTIF

SEQ ID NO: 597428 - protein, 14 aa, Homo sapiens
  CDR3 for beta chain variable domain of TCR clone 298714 (TRBV7-2, TRBJ2-5)
CASSPRGSSETQYF

SEQ ID NO: 597429 - protein, 15 aa, Homo sapiens
  CDR3 for alpha chain variable domain of TCR clone 298715 (TRAV8-3, TRAJ45)
AASSYSGGGADGLTF

SEQ ID NO: 597430 - protein, 13 aa, Homo sapiens
  CDR3 for beta chain variable domain of TCR clone 298715 (TRBV10-3, TRBJ2-7)
CASKLAVNYEQYF

SEQ ID NO: 597431 - protein, 15 aa, Homo sapiens
  CDR3 for alpha chain variable domain of TCR clone 298716 (TRAV26-1, TRAJ56)
CIVRVATGANSKMTF

SEQ ID NO: 597432 - protein, 15 aa, Homo sapiens
  CDR3 for beta chain variable domain of TCR clone 298716 (TRBV27, TRBJ2-7)
CASSPQREGQREQYF

SEQ ID NO: 597433 - protein, 14 aa, Homo sapiens
  CDR3 for alpha chain variable domain of TCR clone 298717 (TRAV8-3, TRAJ6)
CAVSSSGGRYIPTF

SEQ ID NO: 597434 - protein, 18 aa, Homo sapiens
  CDR3 for beta chain variable domain of TCR clone 298717 (TRBV2, TRBJ2-3)
CASSEAGGQALGADTQYF

SEQ ID NO: 597435 - protein, 14 aa, Homo sapiens
  CDR3 for alpha chain variable domain of TCR clone 298718 (TRAV1-2, TRAJ16)
CAVNRFSDGQKLLF

SEQ ID NO: 597436 - protein, 18 aa, Homo sapiens
  CDR3 for beta chain variable domain of TCR clone 298718 (TRBV7-9, TRBJ2-1)
CASSLAVSGTSGRNEQFF

SEQ ID NO: 597437 - protein, 13 aa, Homo sapiens
  CDR3 for alpha chain variable domain of TCR clone 298719 (TRAV30, TRAJ24)
CGTVTDSWGKLQF

SEQ ID NO: 597438 - protein, 11 aa, Homo sapiens
  CDR3 for beta chain variable domain of TCR clone 298719 (TRBV19, TRBJ1-2)
CASSISSGYTF

SEQ ID NO: 597439 - protein, 12 aa, Homo sapiens
  CDR3 for alpha chain variable domain of TCR clone 298720 (TRAV16, TRAJ26)
CALRSYGQNFVF

SEQ ID NO: 597440 - protein, 14 aa, Homo sapiens
  CDR3 for beta chain variable domain of TCR clone 298720 (TRBV10-3, TRBJ2-1)
RAISSDLAYNEQFF

SEQ ID NO: 597441 - protein, 11 aa, Homo sapiens
  CDR3 for alpha chain variable domain of TCR clone 298721 (TRAV2, TRAJ33)
CAVASNYQLIW

SEQ ID NO: 597442 - protein, 15 aa, Homo sapiens
  CDR3 for beta chain variable domain of TCR clone 298721 (TRBV6-3, TRBJ2-7)
CASSSPGTVFYEQYF

SEQ ID NO: 597443 - protein, 11 aa, Homo sapiens
  CDR3 for alpha chain variable domain of TCR clone 298722 (TRAV12-2, TRAJ39)
CAVNNMLTFVG

SEQ ID NO: 597444 - protein, 16 aa, Homo sapiens
  CDR3 for beta chain variable domain of TCR clone 298722 (TRBV9, TRBJ2-7)
CASSAGPDRSPYEQYF

SEQ ID NO: 597445 - protein, 14 aa, Homo sapiens
  CDR3 for alpha chain variable domain of TCR clone 298723 (TRAV1-2, TRAJ16)
CAVNRFSDGQKLFF

SEQ ID NO: 597446 - protein, 16 aa, Homo sapiens
  CDR3 for beta chain variable domain of TCR clone 298723 (TRBV11-2, TRBJ1-2)
CASSLDTGSADYGYTF

SEQ ID NO: 597447 - protein, 18 aa, Homo sapiens
  CDR3 for alpha chain variable domain of TCR clone 298724 (TRAV21, TRAJ52)
CAVRPSPAGGTSYGKLTF

SEQ ID NO: 597448 - protein, 12 aa, Homo sapiens
  CDR3 for beta chain variable domain of TCR clone 298724 (TRBV4-1, TRBJ2-2)
RSQAVNTGELFF

SEQ ID NO: 597449 - protein, 13 aa, Homo sapiens
  CDR3 for alpha chain variable domain of TCR clone 298725 (TRAV27, TRAJ45)
CRSSGGGADGLTF

SEQ ID NO: 597450 - protein, 11 aa, Homo sapiens
  CDR3 for beta chain variable domain of TCR clone 298725 (TRBV4-1, TRBJ1-2)
CASSGRNGYTF

SEQ ID NO: 597451 - protein, 13 aa, Homo sapiens
  CDR3 for alpha chain variable domain of TCR clone 298726 (TRAV6, TRAJ16)
YALDDSDGQKLLF

SEQ ID NO: 597452 - protein, 14 aa, Homo sapiens
  CDR3 for beta chain variable domain of TCR clone 298726 (TRBV12-4, TRBJ1-6)
CASNLQGKGSPLHF

SEQ ID NO: 597453 - protein, 14 aa, Homo sapiens
  CDR3 for alpha chain variable domain of TCR clone 298727 (TRAV1-2, TRAJ8)
CAVREDTGFQKLVF

SEQ ID NO: 597454 - protein, 15 aa, Homo sapiens
  CDR3 for beta chain variable domain of TCR clone 298727 (TRBV7-9, TRBJ2-3)
CASSQDRGITDTQYF

SEQ ID NO: 597455 - protein, 16 aa, Homo sapiens
  CDR3 for alpha chain variable domain of TCR clone 298728 (TRAV1-2, TRAJ10)
CAVGGVLTGGGNKLTF

SEQ ID NO: 597456 - protein, 15 aa, Homo sapiens
  CDR3 for beta chain variable domain of TCR clone 298728 (TRBV19, TRBJ1-5)
CASSIVWADNQPQHF

SEQ ID NO: 597457 - protein, 10 aa, Homo sapiens
  CDR3 for alpha chain variable domain of TCR clone 298729 (TRAV23/DV6, TRAJ57)
CAASSTLSQG

SEQ ID NO: 597458 - protein, 15 aa, Homo sapiens
  CDR3 for beta chain variable domain of TCR clone 298729 (TRBV2, TRBJ2-1)
CASSELAGSYNEQFF

SEQ ID NO: 597459 - protein, 12 aa, Homo sapiens
  CDR3 for alpha chain variable domain of TCR clone 298730 (TRAV21, TRAJ33)
CAKMDSNYQLIW

SEQ ID NO: 597460 - protein, 15 aa, Homo sapiens
  CDR3 for beta chain variable domain of TCR clone 298730 (TRBV7-9, TRBJ1-6)
CASSSPGRGNSPLHF

SEQ ID NO: 597461 - protein, 14 aa, Homo sapiens
  CDR3 for alpha chain variable domain of TCR clone 298731 (TRAV13-1, TRAJ35)
CAASKGGFGNVLHC

SEQ ID NO: 597462 - protein, 13 aa, Homo sapiens
  CDR3 for beta chain variable domain of TCR clone 298731 (TRBV14, TRBJ1-1)
CASSREFGTEAFF

SEQ ID NO: 597463 - protein, 21 aa, Homo sapiens
  CDR3 for alpha chain variable domain of TCR clone 298732 (TRAV1-1, TRAJ6)
CLLLLRCERLERTGGSYIPTF

SEQ ID NO: 597464 - protein, 16 aa, Homo sapiens
  CDR3 for beta chain variable domain of TCR clone 298732 (TRBV13, TRBJ2-2)
CASSPRTGEHTGELFF

SEQ ID NO: 597465 - protein, 15 aa, Homo sapiens
  CDR3 for alpha chain variable domain of TCR clone 298733 (TRAV8-3, TRAJ40)
CAAPSLGSGTSKYIF

SEQ ID NO: 597466 - protein, 16 aa, Homo sapiens
  CDR3 for beta chain variable domain of TCR clone 298733 (TRBV7-3, TRBJ2-3)
CASSLSGYRPEGTQYF

SEQ ID NO: 597467 - protein, 14 aa, Homo sapiens
  CDR3 for alpha chain variable domain of TCR clone 298734 (TRAV16, TRAJ33)
CALSAMDSNHQLIW

SEQ ID NO: 597468 - protein, 17 aa, Homo sapiens
  CDR3 for beta chain variable domain of TCR clone 298734 (TRBV25-1, TRBJ2-7)
CASSDARVVFSSYEQYF

SEQ ID NO: 597469 - protein, 15 aa, Homo sapiens
  CDR3 for alpha chain variable domain of TCR clone 298735 (TRAV20, TRAJ50)
CAVRQMKTSYDKVIF

SEQ ID NO: 597470 - protein, 17 aa, Homo sapiens
  CDR3 for beta chain variable domain of TCR clone 298735 (TRBV28, TRBJ2-7)
CDSSPLHRASGVYEQYF

SEQ ID NO: 597471 - protein, 13 aa, Homo sapiens
  CDR3 for alpha chain variable domain of TCR clone 298736 (TRAV1-2, TRAJ9)
CAALNTGGFKTIF

SEQ ID NO: 597472 - protein, 16 aa, Homo sapiens
  CDR3 for beta chain variable domain of TCR clone 298736 (TRBV3-1, TRBJ2-5)
CASSPGQFNGFGTQYF

SEQ ID NO: 597473 - protein, 15 aa, Homo sapiens
  CDR3 for alpha chain variable domain of TCR clone 298737 (TRAV12-3, TRAJ13)
CAMSARSGGYQKVTF

SEQ ID NO: 597474 - protein, 13 aa, Homo sapiens
  CDR3 for beta chain variable domain of TCR clone 298737 (TRBV11-2, TRBJ2-7)
CASSTSRSLEQYF

SEQ ID NO: 597475 - protein, 14 aa, Homo sapiens
  CDR3 for alpha chain variable domain of TCR clone 298738 (TRAV1-2, TRAJ16)
CAVNRFSDGQKLLF

SEQ ID NO: 597476 - protein, 16 aa, Homo sapiens
  CDR3 for beta chain variable domain of TCR clone 298738 (TRBV28, TRBJ2-4)
CASSLTGGLAKNIQYF

SEQ ID NO: 597477 - protein, 13 aa, Homo sapiens
  CDR3 for alpha chain variable domain of TCR clone 298739 (TRAV2, TRAJ15)
CAVASQAGTALIF

SEQ ID NO: 597478 - protein, 15 aa, Homo sapiens
  CDR3 for beta chain variable domain of TCR clone 298739 (TRBV7-3, TRBJ2-2)
CASSETGQGTGELCF

SEQ ID NO: 597479 - protein, 14 aa, Homo sapiens
  CDR3 for alpha chain variable domain of TCR clone 298740 (TRAV12-2, TRAJ13)
CAVKKTGGYQKVTF

SEQ ID NO: 597480 - protein, 19 aa, Homo sapiens
  CDR3 for beta chain variable domain of TCR clone 298740 (TRBV25-1, TRBJ2-2)
CAILVSRVDRGRKTGELFF

SEQ ID NO: 597481 - protein, 15 aa, Homo sapiens
  CDR3 for alpha chain variable domain of TCR clone 298741 (TRAV27, TRAJ38)
CAARRNAGNNRKLIW

SEQ ID NO: 597482 - protein, 16 aa, Homo sapiens
  CDR3 for beta chain variable domain of TCR clone 298741 (TRBV18, TRBJ2-7)
CASSRTPGPRDYEQYF

SEQ ID NO: 597483 - protein, 13 aa, Homo sapiens
  CDR3 for alpha chain variable domain of TCR clone 298742 (TRAV12-2, TRAJ3)
CAFHYSSASKIIF

SEQ ID NO: 597484 - protein, 11 aa, Homo sapiens
  CDR3 for beta chain variable domain of TCR clone 298742 (TRBV20-1, TRBJ2-3)
CSGTSSTTQYF

SEQ ID NO: 597485 - protein, 16 aa, Homo sapiens
  CDR3 for alpha chain variable domain of TCR clone 298743 (TRAV3, TRAJ3)
CAVRDRAKSSASKIIF

SEQ ID NO: 597486 - protein, 16 aa, Homo sapiens
  CDR3 for beta chain variable domain of TCR clone 298743 (TRBV20-1, TRBJ2-4)
CSATSLAELAKNIHYF

SEQ ID NO: 597487 - protein, 16 aa, Homo sapiens
  CDR3 for alpha chain variable domain of TCR clone 298744 (TRAV12-3, TRAJ45)
YAMGWGSGGGADGLTF

SEQ ID NO: 597488 - protein, 15 aa, Homo sapiens
  CDR3 for beta chain variable domain of TCR clone 298744 (TRBV3-1, TRBJ1-2)
CASSHPGTPGYGYTF

SEQ ID NO: 597489 - protein, 13 aa, Homo sapiens
  CDR3 for alpha chain variable domain of TCR clone 298745 (TRAV5, TRAJ30)
CAEIANRDDKNIF

SEQ ID NO: 597490 - protein, 14 aa, Homo sapiens
  CDR3 for beta chain variable domain of TCR clone 298745 (TRBV4-1, TRBJ2-2)
CASSQAVNTGELFF

SEQ ID NO: 597491 - protein, 14 aa, Homo sapiens
  CDR3 for alpha chain variable domain of TCR clone 298746 (TRAV26-1, TRAJ39)
CIVFTNNAGNMLPF

SEQ ID NO: 597492 - protein, 15 aa, Homo sapiens
  CDR3 for beta chain variable domain of TCR clone 298746 (TRBV19, TRBJ2-4)
CASSLTGLTKNIQYF

SEQ ID NO: 597493 - protein, 13 aa, Homo sapiens
  CDR3 for alpha chain variable domain of TCR clone 298747 (TRAV8-3, TRAJ20)
CAVGRPNDYKLSF

SEQ ID NO: 597494 - protein, 14 aa, Homo sapiens
  CDR3 for beta chain variable domain of TCR clone 298747 (TRBV7-2, TRBJ2-7)
CASSPKTSFYEQYF

SEQ ID NO: 597495 - protein, 13 aa, Homo sapiens
  CDR3 for alpha chain variable domain of TCR clone 298748 (TRAV17, TRAJ34)
CATDLYNTDKLIF

SEQ ID NO: 597496 - protein, 15 aa, Homo sapiens
  CDR3 for beta chain variable domain of TCR clone 298748 (TRBV20-1, TRBJ2-3)
CSATGTRGFTDTQYF

SEQ ID NO: 597497 - protein, 10 aa, Homo sapiens
  CDR3 for alpha chain variable domain of TCR clone 298749 (TRAV16, TRAJ22)
SAMYLRQLTF

SEQ ID NO: 597498 - protein, 14 aa, Homo sapiens
  CDR3 for beta chain variable domain of TCR clone 298749 (TRBV7-9, TRBJ1-1)
CASTPLQSYTEAFF

SEQ ID NO: 597499 - protein, 11 aa, Homo sapiens
  CDR3 for alpha chain variable domain of TCR clone 298750 (TRAV27, TRAJ20)
CAGADDYKLSF

SEQ ID NO: 597500 - protein, 12 aa, Homo sapiens
  CDR3 for beta chain variable domain of TCR clone 298750 (TRBV2, TRBJ1-1)
CATPSRGTEALF

SEQ ID NO: 597501 - protein, 17 aa, Homo sapiens
  CDR3 for alpha chain variable domain of TCR clone 298751 (TRAV36/DV7, TRAJ52)
YAVAQRAGGTSYGKLTF

SEQ ID NO: 597502 - protein, 15 aa, Homo sapiens
  CDR3 for beta chain variable domain of TCR clone 298751 (TRBV6-5, TRBJ1-2)
CASSYSQAFNYGYTF

SEQ ID NO: 597503 - protein, 13 aa, Homo sapiens
  CDR3 for alpha chain variable domain of TCR clone 298752 (TRAV21, TRAJ27)
CAARPGNAGKSTF

SEQ ID NO: 597504 - protein, 14 aa, Homo sapiens
  CDR3 for beta chain variable domain of TCR clone 298752 (TRBV23-1, TRBJ2-5)
CASSFLRSHETQYF

SEQ ID NO: 597505 - protein, 13 aa, Homo sapiens
  CDR3 for alpha chain variable domain of TCR clone 298753 (TRAV13-2, TRAJ40)
CAEFTSGTYKYIF

SEQ ID NO: 597506 - protein, 14 aa, Homo sapiens
  CDR3 for beta chain variable domain of TCR clone 298753 (TRBV19, TRBJ2-1)
CASPTFVLSGEQFF

SEQ ID NO: 597507 - protein, 17 aa, Homo sapiens
  CDR3 for alpha chain variable domain of TCR clone 298754 (TRAV26-1, TRAJ37)
CIVRVITVSSNTGKLIF

SEQ ID NO: 597508 - protein, 14 aa, Homo sapiens
  CDR3 for beta chain variable domain of TCR clone 298754 (TRBV7-8, TRBJ2-3)
CASSLEAGTDTQYF

SEQ ID NO: 597509 - protein, 18 aa, Homo sapiens
  CDR3 for alpha chain variable domain of TCR clone 298755 (TRAV13-1, TRAJ52)
CAASKRMTGGTSYGKLTF

SEQ ID NO: 597510 - protein, 13 aa, Homo sapiens
  CDR3 for beta chain variable domain of TCR clone 298755 (TRBV12-4, TRBJ1-2)
CASSLRQGKGYTF

SEQ ID NO: 597511 - protein, 14 aa, Homo sapiens
  CDR3 for alpha chain variable domain of TCR clone 298756 (TRAV23/DV6, TRAJ8)
CSASKATGFQKLEF

SEQ ID NO: 597512 - protein, 15 aa, Homo sapiens
  CDR3 for beta chain variable domain of TCR clone 298756 (TRBV28, TRBJ2-3)
CASSPDRQGANTQYF

SEQ ID NO: 597513 - protein, 14 aa, Homo sapiens
  CDR3 for alpha chain variable domain of TCR clone 298757 (TRAV9-2, TRAJ57)
CALSPNSGSEKLVF

SEQ ID NO: 597514 - protein, 14 aa, Homo sapiens
  CDR3 for beta chain variable domain of TCR clone 298757 (TRBV2, TRBJ2-7)
CASSLTSGGYEQYF

SEQ ID NO: 597515 - protein, 12 aa, Homo sapiens
  CDR3 for alpha chain variable domain of TCR clone 298758 (TRAV21, TRAJ33)
CAVQDSKYQLIW

SEQ ID NO: 597516 - protein, 14 aa, Homo sapiens
  CDR3 for beta chain variable domain of TCR clone 298758 (TRBV28, TRBJ2-1)
CASSPGEGGNEQFF

SEQ ID NO: 597517 - protein, 14 aa, Homo sapiens
  CDR3 for alpha chain variable domain of TCR clone 298759 (TRAV14/DV4, TRAJ15)
CAMRRDQAGTALIF

SEQ ID NO: 597518 - protein, 13 aa, Homo sapiens
  CDR3 for beta chain variable domain of TCR clone 298759 (TRBV7-2, TRBJ2-7)
CASSSPSGSEQYF

SEQ ID NO: 597519 - protein, 14 aa, Homo sapiens
  CDR3 for alpha chain variable domain of TCR clone 298760 (TRAV13-1, TRAJ44)
CAAKATGTASKLTF

SEQ ID NO: 597520 - protein, 15 aa, Homo sapiens
  CDR3 for beta chain variable domain of TCR clone 298760 (TRBV19, TRBJ2-1)
CASIKGRGPYDEQFF

SEQ ID NO: 597521 - protein, 13 aa, Homo sapiens
  CDR3 for alpha chain variable domain of TCR clone 298761 (TRAV23/DV6, TRAJ34)
CAAIENNTDKLIF

SEQ ID NO: 597522 - protein, 13 aa, Homo sapiens
  CDR3 for beta chain variable domain of TCR clone 298761 (TRBV29-1, TRBJ2-7)
CSVGPSGGYERYF

SEQ ID NO: 597523 - protein, 13 aa, Homo sapiens
  CDR3 for alpha chain variable domain of TCR clone 298762 (TRAV36/DV7, TRAJ21)
CAVAAYNFNKFYF

SEQ ID NO: 597524 - protein, 14 aa, Homo sapiens
  CDR3 for beta chain variable domain of TCR clone 298762 (TRBV6-1, TRBJ1-1)
CASSGTGLNTEAFF

SEQ ID NO: 597525 - protein, 14 aa, Homo sapiens
  CDR3 for alpha chain variable domain of TCR clone 298763 (TRAV8-3, TRAJ39)
CAVGANNAGNMLTF

SEQ ID NO: 597526 - protein, 16 aa, Homo sapiens
  CDR3 for beta chain variable domain of TCR clone 298763 (TRBV11-2, TRBJ1-2)
CASSLDTGGADYGYTF

SEQ ID NO: 597527 - protein, 12 aa, Homo sapiens
  CDR3 for alpha chain variable domain of TCR clone 298764 (TRAV12-1, TRAJ40)
CVFYSGTYKYIF

SEQ ID NO: 597528 - protein, 15 aa, Homo sapiens
  CDR3 for beta chain variable domain of TCR clone 298764 (TRBV11-2, TRBJ1-6)
CASTLRGTGNSPLHF

SEQ ID NO: 597529 - protein, 14 aa, Homo sapiens
  CDR3 for alpha chain variable domain of TCR clone 298765 (TRAV12-2, TRAJ13)
CAVKKTGGYQKVTF

SEQ ID NO: 597530 - protein, 17 aa, Homo sapiens
  CDR3 for beta chain variable domain of TCR clone 298765 (TRBV4-1, TRBJ1-4)
CASSQEGPRGVEENLVF

SEQ ID NO: 597531 - protein, 10 aa, Homo sapiens
  CDR3 for alpha chain variable domain of TCR clone 298766 (TRAV1-1, TRAJ30)
CAVRDDKIIF

SEQ ID NO: 597532 - protein, 20 aa, Homo sapiens
  CDR3 for beta chain variable domain of TCR clone 298766 (TRBV10-3, TRBJ2-1)
CAISESTSGLAGWISNEQFF

SEQ ID NO: 597533 - protein, 14 aa, Homo sapiens
  CDR3 for alpha chain variable domain of TCR clone 298767 (TRAV29/DV5, TRAJ36)
CAARRKTGANNLFF

SEQ ID NO: 597534 - protein, 15 aa, Homo sapiens
  CDR3 for beta chain variable domain of TCR clone 298767 (TRBV3-1, TRBJ2-2)
CASSQDWTRAGELFF

SEQ ID NO: 597535 - protein, 14 aa, Homo sapiens
  CDR3 for alpha chain variable domain of TCR clone 298768 (TRAV1-2, TRAJ16)
CAVNRFSDGQKLLF

SEQ ID NO: 597536 - protein, 12 aa, Homo sapiens
  CDR3 for beta chain variable domain of TCR clone 298768 (TRBV27, TRBJ1-5)
CASSLPPSTGGG

SEQ ID NO: 597537 - protein, 15 aa, Homo sapiens
  CDR3 for alpha chain variable domain of TCR clone 298769 (TRAV13-1, )
CAANIQNPDPAVYQL

SEQ ID NO: 597538 - protein, 13 aa, Homo sapiens
  CDR3 for beta chain variable domain of TCR clone 298769 (TRBV7-7, TRBJ2-3)
CASSLSRADTQYF

SEQ ID NO: 597539 - protein, 13 aa, Homo sapiens
  CDR3 for alpha chain variable domain of TCR clone 298770 (TRAV12-1, TRAJ6)
CVVYPGGSYIPTF

SEQ ID NO: 597540 - protein, 16 aa, Homo sapiens
  CDR3 for beta chain variable domain of TCR clone 298770 (TRBV19, TRBJ2-2)
CASRSPGTWATGELFF

SEQ ID NO: 597541 - protein, 14 aa, Homo sapiens
  CDR3 for alpha chain variable domain of TCR clone 298771 (TRAV16, TRAJ37)
CALDISGNTGKLIF

SEQ ID NO: 597542 - protein, 14 aa, Homo sapiens
  CDR3 for beta chain variable domain of TCR clone 298771 (TRBV19, TRBJ2-2)
CASSGQGIAGELFF

SEQ ID NO: 597543 - protein, 16 aa, Homo sapiens
  CDR3 for alpha chain variable domain of TCR clone 298772 (TRAV8-6, TRAJ28)
CAVTSKPWAGSYQLTF

SEQ ID NO: 597544 - protein, 16 aa, Homo sapiens
  CDR3 for beta chain variable domain of TCR clone 298772 (TRBV12-4, TRBJ2-5)
CASSWRPSGDLETQYF

SEQ ID NO: 597545 - protein, 14 aa, Homo sapiens
  CDR3 for alpha chain variable domain of TCR clone 298773 (TRAV26-1, TRAJ26)
CIVRATFLGQNFVF

SEQ ID NO: 597546 - protein, 16 aa, Homo sapiens
  CDR3 for beta chain variable domain of TCR clone 298773 (TRBV12-4, TRBJ2-7)
CASRSTGTGPSYEQHF

SEQ ID NO: 597547 - protein, 19 aa, Homo sapiens
  CDR3 for alpha chain variable domain of TCR clone 298774 (TRAV1-2, TRAJ26)
CLLPLCCERPDNYGQNFVF

SEQ ID NO: 597548 - protein, 16 aa, Homo sapiens
  CDR3 for beta chain variable domain of TCR clone 298774 (TRBV4-2, TRBJ1-1)
CASRPLDGGGDTEAFF

SEQ ID NO: 597549 - protein, 13 aa, Homo sapiens
  CDR3 for alpha chain variable domain of TCR clone 298775 (TRAV1-2, TRAJ9)
CAALNTRGLKTIF

SEQ ID NO: 597550 - protein, 13 aa, Homo sapiens
  CDR3 for beta chain variable domain of TCR clone 298775 (TRBV19, TRBJ1-2)
CASSVPGQDGYTF

SEQ ID NO: 597551 - protein, 14 aa, Homo sapiens
  CDR3 for alpha chain variable domain of TCR clone 298776 (TRAV17, TRAJ49)
CATDARDTGNQFYF

SEQ ID NO: 597552 - protein, 16 aa, Homo sapiens
  CDR3 for beta chain variable domain of TCR clone 298776 (TRBV5-1, TRBJ1-1)
CASSSGGNSLNTEAFF

SEQ ID NO: 597553 - protein, 17 aa, Homo sapiens
  CDR3 for alpha chain variable domain of TCR clone 298777 (TRAV3, TRAJ6)
CAVRDGPRAGGSYIPTF

SEQ ID NO: 597554 - protein, 15 aa, Homo sapiens
  CDR3 for beta chain variable domain of TCR clone 298777 (TRBV20-1, TRBJ2-4)
CSVTTGLLAKNIQYF

SEQ ID NO: 597555 - protein, 14 aa, Homo sapiens
  CDR3 for alpha chain variable domain of TCR clone 298778 (TRAV12-2, TRAJ5)
CAVNRSTGRRALTF

SEQ ID NO: 597556 - protein, 15 aa, Homo sapiens
  CDR3 for beta chain variable domain of TCR clone 298778 (TRBV2, TRBJ2-1)
CASSELAGSYNEQFF

SEQ ID NO: 597557 - protein, 16 aa, Homo sapiens
  CDR3 for alpha chain variable domain of TCR clone 298779 (TRAV21, TRAJ37)
CTVRTAGSSNTGKLIF

SEQ ID NO: 597558 - protein, 13 aa, Homo sapiens
  CDR3 for beta chain variable domain of TCR clone 298779 (TRBV7-9, TRBJ2-5)
CASLPSGRETQYF

SEQ ID NO: 597559 - protein, 13 aa, Homo sapiens
  CDR3 for alpha chain variable domain of TCR clone 298780 (TRAV12-3, TRAJ9)
CAMRNTGGFKTIF

SEQ ID NO: 597560 - protein, 15 aa, Homo sapiens
  CDR3 for beta chain variable domain of TCR clone 298780 (TRBV7-9, TRBJ2-7)
CASSPTGLRTYEQYF

SEQ ID NO: 597561 - protein, 12 aa, Homo sapiens
  CDR3 for alpha chain variable domain of TCR clone 298781 (TRAV12-3, TRAJ17)
CAMTLTGNKLTF

SEQ ID NO: 597562 - protein, 11 aa, Homo sapiens
  CDR3 for beta chain variable domain of TCR clone 298781 (TRBV6-3, TRBJ2-3)
RATGQADTQYF

SEQ ID NO: 597563 - protein, 18 aa, Homo sapiens
  CDR3 for alpha chain variable domain of TCR clone 298782 (TRAV13-1, TRAJ52)
CAAKNPNAGGTSYGKLTF

SEQ ID NO: 597564 - protein, 13 aa, Homo sapiens
  CDR3 for beta chain variable domain of TCR clone 298782 (TRBV18, TRBJ2-3)
CASSTGRTDTQYF

SEQ ID NO: 597565 - protein, 13 aa, Homo sapiens
  CDR3 for alpha chain variable domain of TCR clone 298783 (TRAV13-2, TRAJ48)
CAEIDFGNEKLTF

SEQ ID NO: 597566 - protein, 15 aa, Homo sapiens
  CDR3 for beta chain variable domain of TCR clone 298783 (TRBV7-9, TRBJ1-6)
CSSSSPGRGNSPLHF

SEQ ID NO: 597567 - protein, 10 aa, Homo sapiens
  CDR3 for alpha chain variable domain of TCR clone 298784 (TRAV2, TRAJ34)
CAVVNDKLIF

SEQ ID NO: 597568 - protein, 11 aa, Homo sapiens
  CDR3 for beta chain variable domain of TCR clone 298784 (TRBV29-1, TRBJ2-5)
CSEDRTGTQYF

SEQ ID NO: 597569 - protein, 15 aa, Homo sapiens
  CDR3 for alpha chain variable domain of TCR clone 298785 (TRAV27, TRAJ38)
CAGRFNAGNNRKLIW

SEQ ID NO: 597570 - protein, 15 aa, Homo sapiens
  CDR3 for beta chain variable domain of TCR clone 298785 (TRBV5-1, TRBJ1-1)
CASSSTTGTNTEAFF

SEQ ID NO: 597571 - protein, 13 aa, Homo sapiens
  CDR3 for alpha chain variable domain of TCR clone 298786 (TRAV13-1, TRAJ10)
CAALEGGGNKLTF

SEQ ID NO: 597572 - protein, 13 aa, Homo sapiens
  CDR3 for beta chain variable domain of TCR clone 298786 (TRBV27, TRBJ1-1)
CASSLSIGAEAFF

SEQ ID NO: 597573 - protein, 14 aa, Homo sapiens
  CDR3 for alpha chain variable domain of TCR clone 298787 (TRAV26-2, TRAJ31)
CILIPGNNNARPMF

SEQ ID NO: 597574 - protein, 16 aa, Homo sapiens
  CDR3 for beta chain variable domain of TCR clone 298787 (TRBV7-3, TRBJ2-1)
CASSLVSGSANNEQFF

SEQ ID NO: 597575 - protein, 18 aa, Homo sapiens
  CDR3 for alpha chain variable domain of TCR clone 298788 (TRAV21, TRAJ52)
CAVRPSPAGGTSYGKLTF

SEQ ID NO: 597576 - protein, 14 aa, Homo sapiens
  CDR3 for beta chain variable domain of TCR clone 298788 (TRBV13, TRBJ1-5)
CASSGQGVDQHQHF

SEQ ID NO: 597577 - protein, 14 aa, Homo sapiens
  CDR3 for alpha chain variable domain of TCR clone 298789 (TRAV1-2, TRAJ16)
CAVNRFSDGQELLF

SEQ ID NO: 597578 - protein, 15 aa, Homo sapiens
  CDR3 for beta chain variable domain of TCR clone 298789 (TRBV11-2, TRBJ2-2)
CASSLETGVTGELFF

SEQ ID NO: 597579 - protein, 12 aa, Homo sapiens
  CDR3 for alpha chain variable domain of TCR clone 298790 (TRAV8-3, TRAJ5)
CAVGGGLRALTF

SEQ ID NO: 597580 - protein, 14 aa, Homo sapiens
  CDR3 for beta chain variable domain of TCR clone 298790 (TRBV19, TRBJ2-1)
CASPTFVLSGEQFF

SEQ ID NO: 597581 - protein, 17 aa, Homo sapiens
  CDR3 for alpha chain variable domain of TCR clone 298791 (TRAV19, TRAJ28)
CALSEASSGAGSYQLTF

SEQ ID NO: 597582 - protein, 13 aa, Homo sapiens
  CDR3 for beta chain variable domain of TCR clone 298791 (TRBV3-1, TRBJ1-1)
CASSPGAITEAFF

SEQ ID NO: 597583 - protein, 10 aa, Homo sapiens
  CDR3 for alpha chain variable domain of TCR clone 298792 (TRAV16, TRAJ22)
SAMYLRQLTF

SEQ ID NO: 597584 - protein, 14 aa, Homo sapiens
  CDR3 for beta chain variable domain of TCR clone 298792 (TRBV2, TRBJ2-1)
CASSEALDGNEQFF

SEQ ID NO: 597585 - protein, 16 aa, Homo sapiens
  CDR3 for alpha chain variable domain of TCR clone 298793 (TRAV12-3, TRAJ53)
CTMSPGSGGSNYKLIF

SEQ ID NO: 597586 - protein, 11 aa, Homo sapiens
  CDR3 for beta chain variable domain of TCR clone 298793 (TRBV29-1, TRBJ2-5)
CSEDRTGTQYF

SEQ ID NO: 597587 - protein, 15 aa, Homo sapiens
  CDR3 for alpha chain variable domain of TCR clone 298794 (TRAV13-2, TRAJ16)
CAEDDRFSDGQKLLF

SEQ ID NO: 597588 - protein, 18 aa, Homo sapiens
  CDR3 for beta chain variable domain of TCR clone 298794 (TRBV12-4, TRBJ2-2)
CASSLVAGTRGRTGELFF

SEQ ID NO: 597589 - protein, 15 aa, Homo sapiens
  CDR3 for alpha chain variable domain of TCR clone 298795 (TRAV12-2, TRAJ32)
CAVNHYGGTTNKLIF

SEQ ID NO: 597590 - protein, 13 aa, Homo sapiens
  CDR3 for beta chain variable domain of TCR clone 298795 (TRBV7-9, TRBJ1-2)
CASSLKQNYGYTF

SEQ ID NO: 597591 - protein, 13 aa, Homo sapiens
  CDR3 for alpha chain variable domain of TCR clone 298796 (TRAV13-2, TRAJ40)
CAEFTSGTYKYIF

SEQ ID NO: 597592 - protein, 14 aa, Homo sapiens
  CDR3 for beta chain variable domain of TCR clone 298796 (TRBV10-2, TRBJ1-5)
CASSSTGRNQPQHL

SEQ ID NO: 597593 - protein, 12 aa, Homo sapiens
  CDR3 for alpha chain variable domain of TCR clone 298797 (TRAV8-3, TRAJ26)
CAGDNYGLNFVF

SEQ ID NO: 597594 - protein, 13 aa, Homo sapiens
  CDR3 for beta chain variable domain of TCR clone 298797 (TRBV10-3, TRBJ2-7)
CASKLAVNYEQYF

SEQ ID NO: 597595 - protein, 14 aa, Homo sapiens
  CDR3 for alpha chain variable domain of TCR clone 298798 (TRAV38-1, TRAJ57)
CAFMNTGGAEKLVF

SEQ ID NO: 597596 - protein, 12 aa, Homo sapiens
  CDR3 for beta chain variable domain of TCR clone 298798 (TRBV20-1, TRBJ1-5)
CSTSQGNQPQHF

SEQ ID NO: 597597 - protein, 11 aa, Homo sapiens
  CDR3 for alpha chain variable domain of TCR clone 298799 (TRAV36/DV7, TRAJ45)
SGGGGADGLTF

SEQ ID NO: 597598 - protein, 15 aa, Homo sapiens
  CDR3 for beta chain variable domain of TCR clone 298799 (TRBV28, TRBJ2-7)
CASSPAGPTSSTSGR

SEQ ID NO: 597599 - protein, 13 aa, Homo sapiens
  CDR3 for alpha chain variable domain of TCR clone 298800 (TRAV3, TRAJ8)
CAMRFTGFQKHVF

SEQ ID NO: 597600 - protein, 12 aa, Homo sapiens
  CDR3 for beta chain variable domain of TCR clone 298800 (TRBV2, TRBJ1-2)
CASSGQTYGYTF

SEQ ID NO: 597601 - protein, 15 aa, Homo sapiens
  CDR3 for alpha chain variable domain of TCR clone 298801 (TRAV3, TRAJ22)
CAVRYRGGSARQLTF

SEQ ID NO: 597602 - protein, 13 aa, Homo sapiens
  CDR3 for beta chain variable domain of TCR clone 298801 (TRBV2, TRBJ1-5)
CATAGPGNQPQHF

SEQ ID NO: 597603 - protein, 12 aa, Homo sapiens
  CDR3 for alpha chain variable domain of TCR clone 298802 (TRAV27, TRAJ13)
CAGAGGYQKVTF

SEQ ID NO: 597604 - protein, 15 aa, Homo sapiens
  CDR3 for beta chain variable domain of TCR clone 298802 (TRBV20-1, TRBJ2-6)
SAVLGTGGLANVLTF

SEQ ID NO: 597605 - protein, 13 aa, Homo sapiens
  CDR3 for alpha chain variable domain of TCR clone 298803 (TRAV2, TRAJ40)
CAVVTSGTYKYIF

SEQ ID NO: 597606 - protein, 16 aa, Homo sapiens
  CDR3 for beta chain variable domain of TCR clone 298803 (TRBV7-3, TRBJ2-1)
CASSLEGYRSYNEQFC

SEQ ID NO: 597607 - protein, 12 aa, Homo sapiens
  CDR3 for alpha chain variable domain of TCR clone 298804 (TRAV12-2, TRAJ3)
CAVWSSASKIIF

SEQ ID NO: 597608 - protein, 11 aa, Homo sapiens
  CDR3 for beta chain variable domain of TCR clone 298804 (TRBV7-2, TRBJ2-3)
CASSLGDTQYF

SEQ ID NO: 597609 - protein, 12 aa, Homo sapiens
  CDR3 for alpha chain variable domain of TCR clone 298805 (TRAV13-2, TRAJ23)
CAERHRGGKLIF

SEQ ID NO: 597610 - protein, 18 aa, Homo sapiens
  CDR3 for beta chain variable domain of TCR clone 298805 (TRBV11-2, TRBJ2-3)
CASSVGGASRGAPNTQYF

SEQ ID NO: 597611 - protein, 15 aa, Homo sapiens
  CDR3 for alpha chain variable domain of TCR clone 298806 (TRAV17, TRAJ42)
CATDHYGGSQGNLIF

SEQ ID NO: 597612 - protein, 13 aa, Homo sapiens
  CDR3 for beta chain variable domain of TCR clone 298806 (TRBV2, TRBJ2-3)
CASIIPASDTQYF

SEQ ID NO: 597613 - protein, 12 aa, Homo sapiens
  CDR3 for alpha chain variable domain of TCR clone 298807 (TRAV12-1, TRAJ40)
CVFYSGTYKYIF

SEQ ID NO: 597614 - protein, 15 aa, Homo sapiens
  CDR3 for beta chain variable domain of TCR clone 298807 (TRBV4-1, TRBJ2-2)
CASSEGQGITGELFF

SEQ ID NO: 597615 - protein, 13 aa, Homo sapiens
  CDR3 for alpha chain variable domain of TCR clone 298808 (TRAV16, TRAJ26)
CITVLCLGQNFVF

SEQ ID NO: 597616 - protein, 12 aa, Homo sapiens
  CDR3 for beta chain variable domain of TCR clone 298808 (TRBV11-2, TRBJ2-1)
SASSPGNNEQFF

SEQ ID NO: 597617 - protein, 13 aa, Homo sapiens
  CDR3 for alpha chain variable domain of TCR clone 298809 (TRAV17, TRAJ29)
CATDAFRKHTSCL

SEQ ID NO: 597618 - protein, 15 aa, Homo sapiens
  CDR3 for beta chain variable domain of TCR clone 298809 (TRBV20-1, TRBJ1-1)
CSASRGVTGNTEAFF

SEQ ID NO: 597619 - protein, 11 aa, Homo sapiens
  CDR3 for alpha chain variable domain of TCR clone 298810 (TRAV2, TRAJ13)
CASGGYQKITF

SEQ ID NO: 597620 - protein, 15 aa, Homo sapiens
  CDR3 for beta chain variable domain of TCR clone 298810 (TRBV6-1, TRBJ2-2)
CASSRLRGDTGELFF

SEQ ID NO: 597621 - protein, 14 aa, Homo sapiens
  CDR3 for alpha chain variable domain of TCR clone 298811 (TRAV26-1, TRAJ49)
YIVRLTNTGNQFYF

SEQ ID NO: 597622 - protein, 11 aa, Homo sapiens
  CDR3 for beta chain variable domain of TCR clone 298811 (TRBV29-1, TRBJ2-5)
CSEDRTGTQYF

SEQ ID NO: 597623 - protein, 13 aa, Homo sapiens
  CDR3 for alpha chain variable domain of TCR clone 298812 (TRAV1-1, TRAJ9)
CAAKNTGGFKSIF

SEQ ID NO: 597624 - protein, 14 aa, Homo sapiens
  CDR3 for beta chain variable domain of TCR clone 298812 (TRBV20-1, TRBJ2-1)
CSAQIGGSANEQSF

SEQ ID NO: 597625 - protein, 22 aa, Homo sapiens
  CDR3 for alpha chain variable domain of TCR clone 298813 (TRAV8-3, TRAJ32)
CAVEVVLQTSSSLELALCLLSS

SEQ ID NO: 597626 - protein, 15 aa, Homo sapiens
  CDR3 for beta chain variable domain of TCR clone 298813 (TRBV4-1, TRBJ2-7)
CASSQNTGRLYEQYF

SEQ ID NO: 597627 - protein, 15 aa, Homo sapiens
  CDR3 for alpha chain variable domain of TCR clone 298814 (TRAV14/DV4, TRAJ12)
CAVREERGSSYKLIF

SEQ ID NO: 597628 - protein, 16 aa, Homo sapiens
  CDR3 for beta chain variable domain of TCR clone 298814 (TRBV11-2, TRBJ1-2)
CASSLDRGGNNYGYTF

SEQ ID NO: 597629 - protein, 14 aa, Homo sapiens
  CDR3 for alpha chain variable domain of TCR clone 298815 (TRAV8-3, TRAJ35)
CAVVPQGFGNVRHC

SEQ ID NO: 597630 - protein, 15 aa, Homo sapiens
  CDR3 for beta chain variable domain of TCR clone 298815 (TRBV6-1, TRBJ2-2)
CASSAGQGYTGELFF

SEQ ID NO: 597631 - protein, 13 aa, Homo sapiens
  CDR3 for alpha chain variable domain of TCR clone 298816 (TRAV29/DV5, TRAJ44)
CAASTGTASKLTF

SEQ ID NO: 597632 - protein, 14 aa, Homo sapiens
  CDR3 for beta chain variable domain of TCR clone 298816 (TRBV25-1, TRBJ1-1)
CASTHLGGNTEAFF

SEQ ID NO: 597633 - protein, 15 aa, Homo sapiens
  CDR3 for alpha chain variable domain of TCR clone 298817 (TRAV1-1, TRAJ4)
CAVRAFSGGYTKLIF

SEQ ID NO: 597634 - protein, 18 aa, Homo sapiens
  CDR3 for beta chain variable domain of TCR clone 298817 (TRBV12-4, TRBJ2-2)
CASSLVAGTRGRTGELFF

SEQ ID NO: 597635 - protein, 15 aa, Homo sapiens
  CDR3 for alpha chain variable domain of TCR clone 298818 (TRAV4, TRAJ26)
CLVGDMNNFGQNFVF

SEQ ID NO: 597636 - protein, 16 aa, Homo sapiens
  CDR3 for beta chain variable domain of TCR clone 298818 (TRBV28, TRBJ1-4)
CASSSRTGAANEKLFF

SEQ ID NO: 597637 - protein, 14 aa, Homo sapiens
  CDR3 for alpha chain variable domain of TCR clone 298819 (TRAV12-3, TRAJ9)
CAMSPNTGGFKTIF

SEQ ID NO: 597638 - protein, 14 aa, Homo sapiens
  CDR3 for beta chain variable domain of TCR clone 298819 (TRBV18, TRBJ2-5)
CASSPGVSQETQYF

SEQ ID NO: 597639 - protein, 14 aa, Homo sapiens
  CDR3 for alpha chain variable domain of TCR clone 298820 (TRAV8-3, TRAJ13)
CAVGARGVYQKVTF

SEQ ID NO: 597640 - protein, 16 aa, Homo sapiens
  CDR3 for beta chain variable domain of TCR clone 298820 (TRBV27, TRBJ2-7)
CASSLGSGTGPYEQYF

SEQ ID NO: 597641 - protein, 17 aa, Homo sapiens
  CDR3 for alpha chain variable domain of TCR clone 298821 (TRAV2, TRAJ36)
CAVEDRGNWGKQPLLSD

SEQ ID NO: 597642 - protein, 14 aa, Homo sapiens
  CDR3 for beta chain variable domain of TCR clone 298821 (TRBV7-9, TRBJ2-5)
CASSLDTAQETQYF

SEQ ID NO: 597643 - protein, 20 aa, Homo sapiens
  CDR3 for alpha chain variable domain of TCR clone 298822 (TRAV1-2, TRAJ10)
CLLPLCCERGTHGGGNKLTF

SEQ ID NO: 597644 - protein, 12 aa, Homo sapiens
  CDR3 for beta chain variable domain of TCR clone 298822 (TRBV7-8, TRBJ2-7)
CASSLGDREQYF

SEQ ID NO: 597645 - protein, 11 aa, Homo sapiens
  CDR3 for alpha chain variable domain of TCR clone 298823 (TRAV12-2, TRAJ29)
CAVPLRSPLVF

SEQ ID NO: 597646 - protein, 16 aa, Homo sapiens
  CDR3 for beta chain variable domain of TCR clone 298823 (TRBV19, TRBJ1-5)
CASSIDRGGPRQPQHF

SEQ ID NO: 597647 - protein, 12 aa, Homo sapiens
  CDR3 for alpha chain variable domain of TCR clone 298824 (TRAV29/DV5, TRAJ43)
CPAPYNNNDMRF

SEQ ID NO: 597648 - protein, 15 aa, Homo sapiens
  CDR3 for beta chain variable domain of TCR clone 298824 (TRBV18, TRBJ1-6)
CASSRIQGRNSPLHF

SEQ ID NO: 597649 - protein, 21 aa, Homo sapiens
  CDR3 for alpha chain variable domain of TCR clone 298825 (TRAV4, TRAJ30)
PRVSLSDTAVYYCLRDDKIIF

SEQ ID NO: 597650 - protein, 16 aa, Homo sapiens
  CDR3 for beta chain variable domain of TCR clone 298825 (TRBV7-3, TRBJ2-2)
CASSLKRGTLSGELFF

SEQ ID NO: 597651 - protein, 16 aa, Homo sapiens
  CDR3 for alpha chain variable domain of TCR clone 298826 (TRAV4, TRAJ22)
CLVGDLYSCSARQLTF

SEQ ID NO: 597652 - protein, 14 aa, Homo sapiens
  CDR3 for beta chain variable domain of TCR clone 298826 (TRBV28, TRBJ2-3)
CASSWRGRADTQYF

SEQ ID NO: 597653 - protein, 14 aa, Homo sapiens
  CDR3 for alpha chain variable domain of TCR clone 298827 (TRAV35, TRAJ13)
CAGSPYGGYQKVTF

SEQ ID NO: 597654 - protein, 14 aa, Homo sapiens
  CDR3 for beta chain variable domain of TCR clone 298827 (TRBV12-5, TRBJ2-5)
CASGSRTHQETQYF

SEQ ID NO: 597655 - protein, 13 aa, Homo sapiens
  CDR3 for alpha chain variable domain of TCR clone 298828 (TRAV36/DV7, TRAJ49)
CAGDSNTGNQFYF

SEQ ID NO: 597656 - protein, 15 aa, Homo sapiens
  CDR3 for beta chain variable domain of TCR clone 298828 (TRBV28, TRBJ2-5)
CASSSGRTIQETQYF

SEQ ID NO: 597657 - protein, 17 aa, Homo sapiens
  CDR3 for alpha chain variable domain of TCR clone 298829 (TRAV3, TRAJ6)
CAVRDGPRAGGSYIPPF

SEQ ID NO: 597658 - protein, 17 aa, Homo sapiens
  CDR3 for beta chain variable domain of TCR clone 298829 (TRBV28, TRBJ2-5)
CASSTPEGDALQETQYF

SEQ ID NO: 597659 - protein, 14 aa, Homo sapiens
  CDR3 for alpha chain variable domain of TCR clone 298830 (TRAV8-4, TRAJ9)
CAVRINTGGFKTIF

SEQ ID NO: 597660 - protein, 15 aa, Homo sapiens
  CDR3 for beta chain variable domain of TCR clone 298830 (TRBV5-1, TRBJ2-5)
CASSLGLAEQETQYF

SEQ ID NO: 597661 - protein, 12 aa, Homo sapiens
  CDR3 for alpha chain variable domain of TCR clone 298831 (TRAV12-2, TRAJ31)
CAVNTPDARLMF

SEQ ID NO: 597662 - protein, 20 aa, Homo sapiens
  CDR3 for beta chain variable domain of TCR clone 298831 (TRBV7-8, TRBJ2-2)
CASSHLFPGPTIHITGELFF

SEQ ID NO: 597663 - protein, 12 aa, Homo sapiens
  CDR3 for alpha chain variable domain of TCR clone 298832 (TRAV8-3, TRAJ26)
CAGDNYGQNLVF

SEQ ID NO: 597664 - protein, 11 aa, Homo sapiens
  CDR3 for beta chain variable domain of TCR clone 298832 (TRBV29-1, TRBJ2-5)
CSEDRTGTQYF

SEQ ID NO: 597665 - protein, 14 aa, Homo sapiens
  CDR3 for alpha chain variable domain of TCR clone 298833 (TRAV12-3, TRAJ9)
CAMSPNTGGFKTIF

SEQ ID NO: 597666 - protein, 17 aa, Homo sapiens
  CDR3 for beta chain variable domain of TCR clone 298833 (TRBV13, TRBJ2-3)
CAGSLSRVAGGRNTQYF

SEQ ID NO: 597667 - protein, 13 aa, Homo sapiens
  CDR3 for alpha chain variable domain of TCR clone 298834 (TRAV8-3, TRAJ4)
WVFYSGGYNKLNF

SEQ ID NO: 597668 - protein, 16 aa, Homo sapiens
  CDR3 for beta chain variable domain of TCR clone 298834 (TRBV7-8, TRBJ2-3)
CASSTEGQRETDTQYF

SEQ ID NO: 597669 - protein, 13 aa, Homo sapiens
  CDR3 for alpha chain variable domain of TCR clone 298835 (TRAV8-3, TRAJ48)
CCGCNCGNEKLTF

SEQ ID NO: 597670 - protein, 12 aa, Homo sapiens
  CDR3 for beta chain variable domain of TCR clone 298835 (TRBV7-2, TRBJ2-5)
CASSQYQETQYF

SEQ ID NO: 597671 - protein, 17 aa, Homo sapiens
  CDR3 for alpha chain variable domain of TCR clone 298836 (TRAV26-1, TRAJ58)
CIVRVGAEESSGSRLTF

SEQ ID NO: 597672 - protein, 18 aa, Homo sapiens
  CDR3 for beta chain variable domain of TCR clone 298836 (TRBV7-9, TRBJ2-7)
CASSLTTSGSRTWYEQYF

SEQ ID NO: 597673 - protein, 13 aa, Homo sapiens
  CDR3 for alpha chain variable domain of TCR clone 298837 (TRAV17, TRAJ5)
CALRGTGRRALTF

SEQ ID NO: 597674 - protein, 14 aa, Homo sapiens
  CDR3 for beta chain variable domain of TCR clone 298837 (TRBV11-3, TRBJ2-1)
CASSATTSGSIQFF

SEQ ID NO: 597675 - protein, 16 aa, Homo sapiens
  CDR3 for alpha chain variable domain of TCR clone 298838 (TRAV36/DV7, TRAJ30)
CAVETYGLDRDDKIIF

SEQ ID NO: 597676 - protein, 15 aa, Homo sapiens
  CDR3 for beta chain variable domain of TCR clone 298838 (TRBV6-6, TRBJ2-5)
CASSYGKIIEETQYF

SEQ ID NO: 597677 - protein, 14 aa, Homo sapiens
  CDR3 for alpha chain variable domain of TCR clone 298839 (TRAV8-4, TRAJ13)
CAVTLSGGYQKVTF

SEQ ID NO: 597678 - protein, 15 aa, Homo sapiens
  CDR3 for beta chain variable domain of TCR clone 298839 (TRBV5-1, TRBJ2-1)
CASKGLAGVYNEQFF

SEQ ID NO: 597679 - protein, 14 aa, Homo sapiens
  CDR3 for alpha chain variable domain of TCR clone 298840 (TRAV23/DV6, TRAJ15)
CAASKYQAGTALIF

SEQ ID NO: 597680 - protein, 17 aa, Homo sapiens
  CDR3 for beta chain variable domain of TCR clone 298840 (TRBV13, TRBJ2-3)
CASSLSRVAGGRNTQYF

SEQ ID NO: 597681 - protein, 14 aa, Homo sapiens
  CDR3 for alpha chain variable domain of TCR clone 298841 (TRAV4, TRAJ6)
CLGGEAGGSYIPTF

SEQ ID NO: 597682 - protein, 16 aa, Homo sapiens
  CDR3 for beta chain variable domain of TCR clone 298841 (TRBV7-6, TRBJ2-1)
CASSSNEGPSYNEQFF

SEQ ID NO: 597683 - protein, 16 aa, Homo sapiens
  CDR3 for alpha chain variable domain of TCR clone 298842 (TRAV4, TRAJ39)
CLVVALREGMRATCSP

SEQ ID NO: 597684 - protein, 16 aa, Homo sapiens
  CDR3 for beta chain variable domain of TCR clone 298842 (TRBV7-6, TRBJ2-7)
CASSGGTGALSYEQYF

SEQ ID NO: 597685 - protein, 14 aa, Homo sapiens
  CDR3 for alpha chain variable domain of TCR clone 298843 (TRAV8-3, TRAJ9)
CAVVCNTGGFKTIF

SEQ ID NO: 597686 - protein, 18 aa, Homo sapiens
  CDR3 for beta chain variable domain of TCR clone 298843 (TRBV4-1, TRBJ1-5)
CASSQDPRGQGLNQPQHF

SEQ ID NO: 597687 - protein, 15 aa, Homo sapiens
  CDR3 for alpha chain variable domain of TCR clone 298844 (TRAV29/DV5, TRAJ42)
CAAKTDGGSQGNLIF

SEQ ID NO: 597688 - protein, 17 aa, Homo sapiens
  CDR3 for beta chain variable domain of TCR clone 298844 (TRBV7-3, TRBJ2-5)
CASSLGSGRSGSETQYF

SEQ ID NO: 597689 - protein, 14 aa, Homo sapiens
  CDR3 for alpha chain variable domain of TCR clone 298845 (TRAV12-3, TRAJ29)
CAMILLSGNTPLVF

SEQ ID NO: 597690 - protein, 16 aa, Homo sapiens
  CDR3 for beta chain variable domain of TCR clone 298845 (TRBV28, TRBJ2-7)
CASSSGSSGRGYEQYF

SEQ ID NO: 597691 - protein, 11 aa, Homo sapiens
  CDR3 for alpha chain variable domain of TCR clone 298846 (TRAV21, TRAJ34)
CAHYNTDMLIF

SEQ ID NO: 597692 - protein, 13 aa, Homo sapiens
  CDR3 for beta chain variable domain of TCR clone 298846 (TRBV7-6, TRBJ1-2)
CASSLVADYGYTF

SEQ ID NO: 597693 - protein, 19 aa, Homo sapiens
  CDR3 for alpha chain variable domain of TCR clone 298847 (TRAV35, TRAJ30)
CAPGGMTRSSLEKGHDFIF

SEQ ID NO: 597694 - protein, 14 aa, Homo sapiens
  CDR3 for beta chain variable domain of TCR clone 298847 (TRBV7-6, TRBJ2-1)
CASSLGGGADGQFF

SEQ ID NO: 597695 - protein, 16 aa, Homo sapiens
  CDR3 for alpha chain variable domain of TCR clone 298848 (TRAV13-1, TRAJ52)
CAAFAKAGTSYGKLTF

SEQ ID NO: 597696 - protein, 13 aa, Homo sapiens
  CDR3 for beta chain variable domain of TCR clone 298848 (TRBV7-3, TRBJ1-1)
CASSQDWGAEAFF

SEQ ID NO: 597697 - protein, 14 aa, Homo sapiens
  CDR3 for alpha chain variable domain of TCR clone 298849 (TRAV4, TRAJ32)
CLVNYGGSTNKLIF

SEQ ID NO: 597698 - protein, 14 aa, Homo sapiens
  CDR3 for beta chain variable domain of TCR clone 298849 (TRBV15, TRBJ2-5)
CATSGGTRTETQYF

SEQ ID NO: 597699 - protein, 12 aa, Homo sapiens
  CDR3 for alpha chain variable domain of TCR clone 298850 (TRAV13-2, TRAJ40)
CRVYLRNLQIHF

SEQ ID NO: 597700 - protein, 14 aa, Homo sapiens
  CDR3 for beta chain variable domain of TCR clone 298850 (TRBV10-2, TRBJ1-5)
CASSSTGRNQPQHF

SEQ ID NO: 597701 - protein, 14 aa, Homo sapiens
  CDR3 for alpha chain variable domain of TCR clone 298851 (TRAV27, TRAJ13)
CMSSNSGGYQKVTF

SEQ ID NO: 597702 - protein, 12 aa, Homo sapiens
  CDR3 for beta chain variable domain of TCR clone 298851 (TRBV14, TRBJ2-5)
CASSQLKETQYF

SEQ ID NO: 597703 - protein, 14 aa, Homo sapiens
  CDR3 for alpha chain variable domain of TCR clone 298852 (TRAV8-4, TRAJ54)
CAVSEVLVAQKLVF

SEQ ID NO: 597704 - protein, 17 aa, Homo sapiens
  CDR3 for beta chain variable domain of TCR clone 298852 (TRBV4-1, TRBJ1-4)
CASSQEGPRGVEEKLFF

SEQ ID NO: 597705 - protein, 14 aa, Homo sapiens
  CDR3 for alpha chain variable domain of TCR clone 298853 (TRAV1-2, TRAJ8)
CAVREDTGFQKLVF

SEQ ID NO: 597706 - protein, 14 aa, Homo sapiens
  CDR3 for beta chain variable domain of TCR clone 298853 (TRBV24-1, TRBJ2-1)
CATADRGEYNEQFF

SEQ ID NO: 597707 - protein, 14 aa, Homo sapiens
  CDR3 for alpha chain variable domain of TCR clone 298854 (TRAV12-1, TRAJ33)
CVVNPEDSNYQLIW

SEQ ID NO: 597708 - protein, 13 aa, Homo sapiens
  CDR3 for beta chain variable domain of TCR clone 298854 (TRBV7-9, TRBJ1-2)
CASSLKQNYGYTF

SEQ ID NO: 597709 - protein, 16 aa, Homo sapiens
  CDR3 for alpha chain variable domain of TCR clone 298855 (TRAV3, TRAJ10)
CAVRDMRAGGGNKPTF

SEQ ID NO: 597710 - protein, 13 aa, Homo sapiens
  CDR3 for beta chain variable domain of TCR clone 298855 (TRBV20-1, TRBJ1-1)
CSARGGGNTEAFF

SEQ ID NO: 597711 - protein, 14 aa, Homo sapiens
  CDR3 for alpha chain variable domain of TCR clone 298856 (TRAV20, TRAJ56)
CAVQCGGANSKLTF

SEQ ID NO: 597712 - protein, 14 aa, Homo sapiens
  CDR3 for beta chain variable domain of TCR clone 298856 (TRBV20-1, TRBJ2-7)
CSAKRCRSSYEQYF

SEQ ID NO: 597713 - protein, 13 aa, Homo sapiens
  CDR3 for alpha chain variable domain of TCR clone 298857 (TRAV12-3, TRAJ40)
CAMSDAGTYKYIF

SEQ ID NO: 597714 - protein, 14 aa, Homo sapiens
  CDR3 for beta chain variable domain of TCR clone 298857 (TRBV7-2, TRBJ1-5)
CASSTQGAGQPQHF

SEQ ID NO: 597715 - protein, 14 aa, Homo sapiens
  CDR3 for alpha chain variable domain of TCR clone 298858 (TRAV8-3, TRAJ11)
CAVGSISGYSTLTF

SEQ ID NO: 597716 - protein, 14 aa, Homo sapiens
  CDR3 for beta chain variable domain of TCR clone 298858 (TRBV5-1, TRBJ2-7)
CASGLTSGGYEQYF

SEQ ID NO: 597717 - protein, 12 aa, Homo sapiens
  CDR3 for alpha chain variable domain of TCR clone 298859 (TRAV12-1, )
CVVNSWISRTLT

SEQ ID NO: 597718 - protein, 15 aa, Homo sapiens
  CDR3 for beta chain variable domain of TCR clone 298859 (TRBV6-6, TRBJ2-5)
CASSPGGGLEETQYF

SEQ ID NO: 597719 - protein, 14 aa, Homo sapiens
  CDR3 for alpha chain variable domain of TCR clone 298860 (TRAV35, TRAJ22)
CAGLRTGSARQLTF

SEQ ID NO: 597720 - protein, 15 aa, Homo sapiens
  CDR3 for beta chain variable domain of TCR clone 298860 (TRBV12-4, TRBJ2-5)
CASSPPTGVQETQYF

SEQ ID NO: 597721 - protein, 14 aa, Homo sapiens
  CDR3 for alpha chain variable domain of TCR clone 298861 (TRAV17, TRAJ49)
CATDARDTGNQFYF

SEQ ID NO: 597722 - protein, 14 aa, Homo sapiens
  CDR3 for beta chain variable domain of TCR clone 298861 (TRBV5-5, TRBJ1-2)
CASSFGEINYGYTF

SEQ ID NO: 597723 - protein, 13 aa, Homo sapiens
  CDR3 for alpha chain variable domain of TCR clone 298862 (TRAV3, TRAJ29)
CAVGDWGKTPLVF

SEQ ID NO: 597724 - protein, 15 aa, Homo sapiens
  CDR3 for beta chain variable domain of TCR clone 298862 (TRBV12-4, TRBJ2-5)
CASIGRTGEGETQYF

SEQ ID NO: 597725 - protein, 14 aa, Homo sapiens
  CDR3 for alpha chain variable domain of TCR clone 298863 (TRAV21, TRAJ15)
CAVSLNQAGTALVF

SEQ ID NO: 597726 - protein, 11 aa, Homo sapiens
  CDR3 for beta chain variable domain of TCR clone 298863 (TRBV20-1, TRBJ2-7)
RSARTSYEQYF

SEQ ID NO: 597727 - protein, 11 aa, Homo sapiens
  CDR3 for alpha chain variable domain of TCR clone 298864 (TRAV4, TRAJ28)
CLVGDNRAETL

SEQ ID NO: 597728 - protein, 13 aa, Homo sapiens
  CDR3 for beta chain variable domain of TCR clone 298864 (TRBV20-1, TRBJ2-7)
CSATHTSGYEQDF

SEQ ID NO: 597729 - protein, 14 aa, Homo sapiens
  CDR3 for alpha chain variable domain of TCR clone 298865 (TRAV8-6, TRAJ30)
CAVRPVNRDDKIIF

SEQ ID NO: 597730 - protein, 13 aa, Homo sapiens
  CDR3 for beta chain variable domain of TCR clone 298865 (TRBV11-2, TRBJ2-1)
CASSPPTHNEQFF

SEQ ID NO: 597731 - protein, 14 aa, Homo sapiens
  CDR3 for alpha chain variable domain of TCR clone 298866 (TRAV13-2, TRAJ43)
CAEIPTYNNNDMRF

SEQ ID NO: 597732 - protein, 12 aa, Homo sapiens
  CDR3 for beta chain variable domain of TCR clone 298866 (TRBV14, TRBJ2-7)
CASSLNQRGQYF

SEQ ID NO: 597733 - protein, 13 aa, Homo sapiens
  CDR3 for alpha chain variable domain of TCR clone 298867 (TRAV21, TRAJ27)
CAARPGNAGKSTL

SEQ ID NO: 597734 - protein, 14 aa, Homo sapiens
  CDR3 for beta chain variable domain of TCR clone 298867 (TRBV7-6, TRBJ2-3)
CASSLGTVTDTRYF

SEQ ID NO: 597735 - protein, 15 aa, Homo sapiens
  CDR3 for alpha chain variable domain of TCR clone 298868 (TRAV26-1, TRAJ29)
CIVRVEGSGNTPLVF

SEQ ID NO: 597736 - protein, 14 aa, Homo sapiens
  CDR3 for beta chain variable domain of TCR clone 298868 (TRBV7-2, TRBJ1-1)
CASSFLTGTAEAFF

SEQ ID NO: 597737 - protein, 14 aa, Homo sapiens
  CDR3 for alpha chain variable domain of TCR clone 298869 (TRAV23/DV6, TRAJ23)
CAACPYNQGGKLIF

SEQ ID NO: 597738 - protein, 17 aa, Homo sapiens
  CDR3 for beta chain variable domain of TCR clone 298869 (TRBV4-2, TRBJ1-1)
CASSQVATGGMNTEAFF

SEQ ID NO: 597739 - protein, 15 aa, Homo sapiens
  CDR3 for alpha chain variable domain of TCR clone 298870 (TRAV17, TRAJ56)
CATEPFTGANSKLTF

SEQ ID NO: 597740 - protein, 14 aa, Homo sapiens
  CDR3 for beta chain variable domain of TCR clone 298870 (TRBV4-1, TRBJ1-1)
CASSQQGNGNEAFF

SEQ ID NO: 597741 - protein, 11 aa, Homo sapiens
  CDR3 for alpha chain variable domain of TCR clone 298871 (TRAV1-2, TRAJ20)
CAVANDYKLSF

SEQ ID NO: 597742 - protein, 18 aa, Homo sapiens
  CDR3 for beta chain variable domain of TCR clone 298871 (TRBV20-1, TRBJ2-6)
CSAETTPTHGSWANVLTF

SEQ ID NO: 597743 - protein, 15 aa, Homo sapiens
  CDR3 for alpha chain variable domain of TCR clone 298872 (TRAV21, TRAJ24)
CAARSSTDSWGKLQF

SEQ ID NO: 597744 - protein, 15 aa, Homo sapiens
  CDR3 for beta chain variable domain of TCR clone 298872 (TRBV20-1, TRBJ1-5)
CSARGSVDSNQPQHF

SEQ ID NO: 597745 - protein, 16 aa, Homo sapiens
  CDR3 for alpha chain variable domain of TCR clone 298873 (TRAV4, TRAJ5)
CLVGPDHGHGQESTFF

SEQ ID NO: 597746 - protein, 15 aa, Homo sapiens
  CDR3 for beta chain variable domain of TCR clone 298873 (TRBV27, TRBJ2-5)
CASSLIPSGGETQYF

SEQ ID NO: 597747 - protein, 15 aa, Homo sapiens
  CDR3 for alpha chain variable domain of TCR clone 298874 (TRAV3, TRAJ22)
CAVRDRGGSARPLTF

SEQ ID NO: 597748 - protein, 14 aa, Homo sapiens
  CDR3 for beta chain variable domain of TCR clone 298874 (TRBV20-1, TRBJ2-5)
CSALVPGYQETQYF

SEQ ID NO: 597749 - protein, 13 aa, Homo sapiens
  CDR3 for alpha chain variable domain of TCR clone 298875 (TRAV20, TRAJ49)
CAVQAKTGNQFYF

SEQ ID NO: 597750 - protein, 14 aa, Homo sapiens
  CDR3 for beta chain variable domain of TCR clone 298875 (TRBV5-1, TRBJ1-1)
CASSLQGASTEAFF

SEQ ID NO: 597751 - protein, 16 aa, Homo sapiens
  CDR3 for alpha chain variable domain of TCR clone 298876 (TRAV17, TRAJ53)
CATDALSGGSNYKLTF

SEQ ID NO: 597752 - protein, 12 aa, Homo sapiens
  CDR3 for beta chain variable domain of TCR clone 298876 (TRBV5-1, TRBJ2-7)
CTSSFRGYEQYF

SEQ ID NO: 597753 - protein, 14 aa, Homo sapiens
  CDR3 for alpha chain variable domain of TCR clone 298877 (TRAV12-1, TRAJ9)
CVVTLNTGGFQNIF

SEQ ID NO: 597754 - protein, 11 aa, Homo sapiens
  CDR3 for beta chain variable domain of TCR clone 298877 (TRBV29-1, TRBJ2-5)
CSEDRTGTQYF

SEQ ID NO: 597755 - protein, 14 aa, Homo sapiens
  CDR3 for alpha chain variable domain of TCR clone 298878 (TRAV2, TRAJ23)
CAVGLRNQGGKLIF

SEQ ID NO: 597756 - protein, 14 aa, Homo sapiens
  CDR3 for beta chain variable domain of TCR clone 298878 (TRBV11-2, TRBJ2-5)
CASGRTGGIETQYF

SEQ ID NO: 597757 - protein, 16 aa, Homo sapiens
  CDR3 for alpha chain variable domain of TCR clone 298879 (TRAV12-3, TRAJ53)
CAMSPGSGGSNYKLTF

SEQ ID NO: 597758 - protein, 15 aa, Homo sapiens
  CDR3 for beta chain variable domain of TCR clone 298879 (TRBV28, TRBJ2-5)
CASSPGQGSIETQYF

SEQ ID NO: 597759 - protein, 13 aa, Homo sapiens
  CDR3 for alpha chain variable domain of TCR clone 298880 (TRAV12-1, TRAJ26)
CVVRRNYGQNFVF

SEQ ID NO: 597760 - protein, 17 aa, Homo sapiens
  CDR3 for beta chain variable domain of TCR clone 298880 (TRBV19, TRBJ2-7)
CASSISFYDSYPYEQYF

SEQ ID NO: 597761 - protein, 16 aa, Homo sapiens
  CDR3 for alpha chain variable domain of TCR clone 298881 (TRAV12-1, TRAJ42)
CVVTPYYGGSQGNLIF

SEQ ID NO: 597762 - protein, 14 aa, Homo sapiens
  CDR3 for beta chain variable domain of TCR clone 298881 (TRBV18, TRBJ2-7)
CASSPTSGGYEQYF

SEQ ID NO: 597763 - protein, 13 aa, Homo sapiens
  CDR3 for alpha chain variable domain of TCR clone 298882 (TRAV3, TRAJ21)
WAVREPDFNKFYF

SEQ ID NO: 597764 - protein, 14 aa, Homo sapiens
  CDR3 for beta chain variable domain of TCR clone 298882 (TRBV4-1, TRBJ2-2)
CASSQAVNTGELFF

SEQ ID NO: 597765 - protein, 11 aa, Homo sapiens
  CDR3 for alpha chain variable domain of TCR clone 298883 (TRAV23/DV6, TRAJ44)
CAAPTPGKLTS

SEQ ID NO: 597766 - protein, 13 aa, Homo sapiens
  CDR3 for beta chain variable domain of TCR clone 298883 (TRBV28, TRBJ2-7)
CASTPGLAGEQYF

SEQ ID NO: 597767 - protein, 13 aa, Homo sapiens
  CDR3 for alpha chain variable domain of TCR clone 298884 (TRAV26-1, TRAJ39)
CIVKVVAGNMLTF

SEQ ID NO: 597768 - protein, 14 aa, Homo sapiens
  CDR3 for beta chain variable domain of TCR clone 298884 (TRBV20-1, TRBJ2-5)
CSARRQGIRETQYF

SEQ ID NO: 597769 - protein, 14 aa, Homo sapiens
  CDR3 for alpha chain variable domain of TCR clone 298885 (TRAV12-3, TRAJ22)
CAMSLFGSARQLTF

SEQ ID NO: 597770 - protein, 15 aa, Homo sapiens
  CDR3 for beta chain variable domain of TCR clone 298885 (TRBV12-4, TRBJ2-1)
CASRETSGMSNEQFF

SEQ ID NO: 597771 - protein, 16 aa, Homo sapiens
  CDR3 for alpha chain variable domain of TCR clone 298886 (TRAV30, TRAJ24)
CGTEIVHADSWGKFQF

SEQ ID NO: 597772 - protein, 15 aa, Homo sapiens
  CDR3 for beta chain variable domain of TCR clone 298886 (TRBV5-1, TRBJ2-5)
CASSFKGGDQETQYF

SEQ ID NO: 597773 - protein, 11 aa, Homo sapiens
  CDR3 for alpha chain variable domain of TCR clone 298887 (TRAV39, TRAJ49)
CAVDISTQFYF

SEQ ID NO: 597774 - protein, 16 aa, Homo sapiens
  CDR3 for beta chain variable domain of TCR clone 298887 (TRBV5-1, TRBJ2-2)
CASSSKLAENTGELFF

SEQ ID NO: 597775 - protein, 16 aa, Homo sapiens
  CDR3 for alpha chain variable domain of TCR clone 298888 (TRAV30, TRAJ24)
CGTEIVAADSWGKFQF

SEQ ID NO: 597776 - protein, 18 aa, Homo sapiens
  CDR3 for beta chain variable domain of TCR clone 298888 (TRBV7-9, TRBJ2-7)
CASSLTTSGSRTWYEQYF

SEQ ID NO: 597777 - protein, 14 aa, Homo sapiens
  CDR3 for alpha chain variable domain of TCR clone 298889 (TRAV4, TRAJ17)
CLVGDPLVGNKPTF

SEQ ID NO: 597778 - protein, 20 aa, Homo sapiens
  CDR3 for beta chain variable domain of TCR clone 298889 (TRBV20-1, TRBJ2-1)
CSARPYSVAGGPSYYNEQFF

SEQ ID NO: 597779 - protein, 14 aa, Homo sapiens
  CDR3 for alpha chain variable domain of TCR clone 298890 (TRAV1-2, TRAJ16)
CAVNRFSDGQKLLF

SEQ ID NO: 597780 - protein, 14 aa, Homo sapiens
  CDR3 for beta chain variable domain of TCR clone 298890 (TRBV13, TRBJ2-5)
CASSLGRGQETQHF

SEQ ID NO: 597781 - protein, 14 aa, Homo sapiens
  CDR3 for alpha chain variable domain of TCR clone 298891 (TRAV21, TRAJ45)
CAVVSGGGADGLTF

SEQ ID NO: 597782 - protein, 14 aa, Homo sapiens
  CDR3 for beta chain variable domain of TCR clone 298891 (TRBV20-1, TRBJ2-3)
CSALGLEGADKQYF

SEQ ID NO: 597783 - protein, 17 aa, Homo sapiens
  CDR3 for alpha chain variable domain of TCR clone 298892 (TRAV17, TRAJ7)
CATLDRLAFGKGNQVVV

SEQ ID NO: 597784 - protein, 13 aa, Homo sapiens
  CDR3 for beta chain variable domain of TCR clone 298892 (TRBV12-4, TRBJ2-7)
CASSLERVREQYF

SEQ ID NO: 597785 - protein, 21 aa, Homo sapiens
  CDR3 for alpha chain variable domain of TCR clone 298893 (TRAV36/DV7, TRAJ39)
TATQTGDSAIYLPNAGNMLTF

SEQ ID NO: 597786 - protein, 17 aa, Homo sapiens
  CDR3 for beta chain variable domain of TCR clone 298893 (TRBV28, TRBJ2-5)
CASSRQGGLAGAETQYF

SEQ ID NO: 597787 - protein, 12 aa, Homo sapiens
  CDR3 for alpha chain variable domain of TCR clone 298894 (TRAV21, TRAJ33)
CAKMDRNYQLTW

SEQ ID NO: 597788 - protein, 17 aa, Homo sapiens
  CDR3 for beta chain variable domain of TCR clone 298894 (TRBV20-1, TRBJ2-2)
CSASGSGQGGLTGELFF

SEQ ID NO: 597789 - protein, 14 aa, Homo sapiens
  CDR3 for alpha chain variable domain of TCR clone 298895 (TRAV12-2, TRAJ13)
CAVKKTGGYQKVTF

SEQ ID NO: 597790 - protein, 17 aa, Homo sapiens
  CDR3 for beta chain variable domain of TCR clone 298895 (TRBV5-1, TRBJ2-2)
CASSPRTGGMNTGELFF

SEQ ID NO: 597791 - protein, 12 aa, Homo sapiens
  CDR3 for alpha chain variable domain of TCR clone 298896 (TRAV8-1, TRAJ26)
CAVNTYGQNFVF

SEQ ID NO: 597792 - protein, 15 aa, Homo sapiens
  CDR3 for beta chain variable domain of TCR clone 298896 (TRBV20-1, TRBJ1-1)
CSASWDRFLNTEAFF

SEQ ID NO: 597793 - protein, 15 aa, Homo sapiens
  CDR3 for alpha chain variable domain of TCR clone 298897 (TRAV8-6, TRAJ38)
CAVSSNAGNNRKLIW

SEQ ID NO: 597794 - protein, 14 aa, Homo sapiens
  CDR3 for beta chain variable domain of TCR clone 298897 (TRBV14, TRBJ2-1)
CASSQVQGKGEQFF

SEQ ID NO: 597795 - protein, 17 aa, Homo sapiens
  CDR3 for alpha chain variable domain of TCR clone 298898 (TRAV3, TRAJ42)
CAARDRDYGGSQGNLSF

SEQ ID NO: 597796 - protein, 15 aa, Homo sapiens
  CDR3 for beta chain variable domain of TCR clone 298898 (TRBV6-6, TRBJ2-7)
CASSYSYGGSYEQYF

SEQ ID NO: 597797 - protein, 13 aa, Homo sapiens
  CDR3 for alpha chain variable domain of TCR clone 298899 (TRAV3, TRAJ21)
CAVREQDFNKFYF

SEQ ID NO: 597798 - protein, 16 aa, Homo sapiens
  CDR3 for beta chain variable domain of TCR clone 298899 (TRBV27, TRBJ2-2)
CASSFRGLVRTGELFF

SEQ ID NO: 597799 - protein, 16 aa, Homo sapiens
  CDR3 for alpha chain variable domain of TCR clone 298900 (TRAV12-2, TRAJ50)
FAVGTATKTSYDTVIF

SEQ ID NO: 597800 - protein, 12 aa, Homo sapiens
  CDR3 for beta chain variable domain of TCR clone 298900 (TRBV12-4, TRBJ1-5)
CASSLGRQPQHF

SEQ ID NO: 597801 - protein, 14 aa, Homo sapiens
  CDR3 for alpha chain variable domain of TCR clone 298901 (TRAV1-2, TRAJ8)
CAVREDTGFQKLVF

SEQ ID NO: 597802 - protein, 13 aa, Homo sapiens
  CDR3 for beta chain variable domain of TCR clone 298901 (TRBV4-2, TRBJ2-2)
CASEDRGTGELFV

SEQ ID NO: 597803 - protein, 15 aa, Homo sapiens
  CDR3 for alpha chain variable domain of TCR clone 298902 (TRAV17, TRAJ28)
CAPVYFGAGSYQLTF

SEQ ID NO: 597804 - protein, 12 aa, Homo sapiens
  CDR3 for beta chain variable domain of TCR clone 298902 (TRBV7-2, TRBJ2-5)
CASSLAKETQYF

SEQ ID NO: 597805 - protein, 16 aa, Homo sapiens
  CDR3 for alpha chain variable domain of TCR clone 298903 (TRAV26-1, TRAJ23)
CIVRVERYKQGGKLIF

SEQ ID NO: 597806 - protein, 16 aa, Homo sapiens
  CDR3 for beta chain variable domain of TCR clone 298903 (TRBV9, TRBJ1-2)
CASSVDKGGGNYGYTF

SEQ ID NO: 597807 - protein, 12 aa, Homo sapiens
  CDR3 for alpha chain variable domain of TCR clone 298904 (TRAV13-1, TRAJ21)
CAAKEGFNKFYF

SEQ ID NO: 597808 - protein, 13 aa, Homo sapiens
  CDR3 for beta chain variable domain of TCR clone 298904 (TRBV27, TRBJ2-1)
CASRTLGVGEQFF

SEQ ID NO: 597809 - protein, 13 aa, Homo sapiens
  CDR3 for alpha chain variable domain of TCR clone 298905 (TRAV39, TRAJ33)
CAANPDSNYQLIW

SEQ ID NO: 597810 - protein, 13 aa, Homo sapiens
  CDR3 for beta chain variable domain of TCR clone 298905 (TRBV18, TRBJ1-1)
CASSWGRNTEAFF

SEQ ID NO: 597811 - protein, 13 aa, Homo sapiens
  CDR3 for alpha chain variable domain of TCR clone 298906 (TRAV12-1, TRAJ40)
CVVPTSGTYTYIF

SEQ ID NO: 597812 - protein, 16 aa, Homo sapiens
  CDR3 for beta chain variable domain of TCR clone 298906 (TRBV7-9, TRBJ1-2)
CASSLGFSSGEDGYTF

SEQ ID NO: 597813 - protein, 11 aa, Homo sapiens
  CDR3 for alpha chain variable domain of TCR clone 298907 (TRAV1-1, TRAJ23)
CAVRQGGKLIF

SEQ ID NO: 597814 - protein, 14 aa, Homo sapiens
  CDR3 for beta chain variable domain of TCR clone 298907 (TRBV19, TRBJ2-1)
CASPTFVFSGEQFF

SEQ ID NO: 597815 - protein, 10 aa, Homo sapiens
  CDR3 for alpha chain variable domain of TCR clone 298908 (TRAV3, TRAJ30)
CAVSEIEIIF

SEQ ID NO: 597816 - protein, 12 aa, Homo sapiens
  CDR3 for beta chain variable domain of TCR clone 298908 (TRBV20-1, TRBJ2-3)
CSADGAGDTQYF

SEQ ID NO: 597817 - protein, 17 aa, Homo sapiens
  CDR3 for alpha chain variable domain of TCR clone 298909 (TRAV26-1, TRAJ37)
SIVRVITVSSNTGKLIF

SEQ ID NO: 597818 - protein, 14 aa, Homo sapiens
  CDR3 for beta chain variable domain of TCR clone 298909 (TRBV19, TRBJ2-1)
CASPTFVLNGEQFF

SEQ ID NO: 597819 - protein, 16 aa, Homo sapiens
  CDR3 for alpha chain variable domain of TCR clone 298910 (TRAV3, TRAJ40)
CAVRDRIASGTYKYIF

SEQ ID NO: 597820 - protein, 15 aa, Homo sapiens
  CDR3 for beta chain variable domain of TCR clone 298910 (TRBV11-3, TRBJ2-3)
CASLKDGREGDTQYF

SEQ ID NO: 597821 - protein, 13 aa, Homo sapiens
  CDR3 for alpha chain variable domain of TCR clone 298911 (TRAV12-3, TRAJ33)
CAMSVNSNYQLIW

SEQ ID NO: 597822 - protein, 15 aa, Homo sapiens
  CDR3 for beta chain variable domain of TCR clone 298911 (TRBV20-1, TRBJ1-1)
CSARSAATSNTEAFF

SEQ ID NO: 597823 - protein, 15 aa, Homo sapiens
  CDR3 for alpha chain variable domain of TCR clone 298912 (TRAV29/DV5, TRAJ29)
CAASERSSGNTPLAL

SEQ ID NO: 597824 - protein, 17 aa, Homo sapiens
  CDR3 for beta chain variable domain of TCR clone 298912 (TRBV4-1, TRBJ1-4)
CASSQEGPRGVEEKLFF

SEQ ID NO: 597825 - protein, 12 aa, Homo sapiens
  CDR3 for alpha chain variable domain of TCR clone 298913 (TRAV25, TRAJ30)
CAGKNRDDKIIL

SEQ ID NO: 597826 - protein, 11 aa, Homo sapiens
  CDR3 for beta chain variable domain of TCR clone 298913 (TRBV12-4, TRBJ2-7)
CATPGKGEQYF

SEQ ID NO: 597827 - protein, 13 aa, Homo sapiens
  CDR3 for alpha chain variable domain of TCR clone 298914 (TRAV13-2, TRAJ15)
CAEMNQAGTALIF

SEQ ID NO: 597828 - protein, 15 aa, Homo sapiens
  CDR3 for beta chain variable domain of TCR clone 298914 (TRBV29-1, TRBJ2-5)
CSVAPGQGARETQYF

SEQ ID NO: 597829 - protein, 12 aa, Homo sapiens
  CDR3 for alpha chain variable domain of TCR clone 298915 (TRAV13-1, TRAJ48)
CAANFGNEKLTF

SEQ ID NO: 597830 - protein, 13 aa, Homo sapiens
  CDR3 for beta chain variable domain of TCR clone 298915 (TRBV7-3, TRBJ1-1)
CASSQDWGTEAFF

SEQ ID NO: 597831 - protein, 16 aa, Homo sapiens
  CDR3 for alpha chain variable domain of TCR clone 298916 (TRAV27, TRAJ13)
CAGAKSDCGGYQKVTF

SEQ ID NO: 597832 - protein, 15 aa, Homo sapiens
  CDR3 for beta chain variable domain of TCR clone 298916 (TRBV29-1, TRBJ2-1)
CSVGRHALFYNEQFF

SEQ ID NO: 597833 - protein, 12 aa, Homo sapiens
  CDR3 for alpha chain variable domain of TCR clone 298917 (TRAV13-1, TRAJ49)
CAASIRSNQFYF

SEQ ID NO: 597834 - protein, 14 aa, Homo sapiens
  CDR3 for beta chain variable domain of TCR clone 298917 (TRBV7-2, TRBJ2-1)
CASSPVLAGNERFF

SEQ ID NO: 597835 - protein, 13 aa, Homo sapiens
  CDR3 for alpha chain variable domain of TCR clone 298918 (TRAV17, TRAJ20)
CAPLGVDDYKLRF

SEQ ID NO: 597836 - protein, 12 aa, Homo sapiens
  CDR3 for beta chain variable domain of TCR clone 298918 (TRBV29-1, TRBJ2-3)
CSVTGGADTQYF

SEQ ID NO: 597837 - protein, 16 aa, Homo sapiens
  CDR3 for alpha chain variable domain of TCR clone 298919 (TRAV14/DV4, TRAJ53)
CAMREGGGGSNYKLTF

SEQ ID NO: 597838 - protein, 13 aa, Homo sapiens
  CDR3 for beta chain variable domain of TCR clone 298919 (TRBV4-2, TRBJ1-1)
CASSQAGDTEAFF

SEQ ID NO: 597839 - protein, 14 aa, Homo sapiens
  CDR3 for alpha chain variable domain of TCR clone 298920 (TRAV17, TRAJ31)
CATVPLSGNDRLMF

SEQ ID NO: 597840 - protein, 15 aa, Homo sapiens
  CDR3 for beta chain variable domain of TCR clone 298920 (TRBV15, TRBJ2-2)
CATSGTGGRVGELFF

SEQ ID NO: 597841 - protein, 19 aa, Homo sapiens
  CDR3 for alpha chain variable domain of TCR clone 298921 (TRAV40, )
CLPIPDIQNPDPAVYQLRD

SEQ ID NO: 597842 - protein, 15 aa, Homo sapiens
  CDR3 for beta chain variable domain of TCR clone 298921 (TRBV2, TRBJ1-2)
CASSEIGGVNYGYTF

SEQ ID NO: 597843 - protein, 17 aa, Homo sapiens
  CDR3 for alpha chain variable domain of TCR clone 298922 (TRAV4, TRAJ18)
CLVGERSVGSTLRRLYF

SEQ ID NO: 597844 - protein, 16 aa, Homo sapiens
  CDR3 for beta chain variable domain of TCR clone 298922 (TRBV19, TRBJ2-1)
CASSKAGPSSYNEQFF

SEQ ID NO: 597845 - protein, 14 aa, Homo sapiens
  CDR3 for alpha chain variable domain of TCR clone 298923 (TRAV26-1, TRAJ21)
CIVGPPYNFNKFYF

SEQ ID NO: 597846 - protein, 11 aa, Homo sapiens
  CDR3 for beta chain variable domain of TCR clone 298923 (TRBV10-3, TRBJ2-7)
CAISEGLEQYF

SEQ ID NO: 597847 - protein, 12 aa, Homo sapiens
  CDR3 for alpha chain variable domain of TCR clone 298924 (TRAV12-3, TRAJ17)
CAMTLTGNKLTF

SEQ ID NO: 597848 - protein, 15 aa, Homo sapiens
  CDR3 for beta chain variable domain of TCR clone 298924 (TRBV12-4, TRBJ1-5)
CASSFFGGRDQPQHF

SEQ ID NO: 597849 - protein, 13 aa, Homo sapiens
  CDR3 for alpha chain variable domain of TCR clone 298925 (TRAV2, TRAJ40)
CAVVTSGTYKYIF

SEQ ID NO: 597850 - protein, 14 aa, Homo sapiens
  CDR3 for beta chain variable domain of TCR clone 298925 (TRBV7-2, TRBJ2-1)
CASSPGLAGNEQFF

SEQ ID NO: 597851 - protein, 12 aa, Homo sapiens
  CDR3 for alpha chain variable domain of TCR clone 298926 (TRAV26-1, TRAJ17)
CIVRSAGNKLTF

SEQ ID NO: 597852 - protein, 18 aa, Homo sapiens
  CDR3 for beta chain variable domain of TCR clone 298926 (TRBV7-9, TRBJ2-7)
CASSLTTSGSRTWYEQYF

SEQ ID NO: 597853 - protein, 12 aa, Homo sapiens
  CDR3 for alpha chain variable domain of TCR clone 298927 (TRAV21, TRAJ37)
CAVRGNTGKLIF

SEQ ID NO: 597854 - protein, 15 aa, Homo sapiens
  CDR3 for beta chain variable domain of TCR clone 298927 (TRBV7-9, TRBJ1-4)
CASSRTGGFNEKLFF

SEQ ID NO: 597855 - protein, 16 aa, Homo sapiens
  CDR3 for alpha chain variable domain of TCR clone 298928 (TRAV3, TRAJ10)
CAVRDMRAGGGNKLTF

SEQ ID NO: 597856 - protein, 15 aa, Homo sapiens
  CDR3 for beta chain variable domain of TCR clone 298928 (TRBV9, TRBJ1-6)
CASSVAGTGESPLHF

SEQ ID NO: 597857 - protein, 14 aa, Homo sapiens
  CDR3 for alpha chain variable domain of TCR clone 298929 (TRAV29/DV5, TRAJ36)
CAARRKTGANNPFF

SEQ ID NO: 597858 - protein, 14 aa, Homo sapiens
  CDR3 for beta chain variable domain of TCR clone 298929 (TRBV12-5, TRBJ2-5)
CASGSRTHQETQYL

SEQ ID NO: 597859 - protein, 18 aa, Homo sapiens
  CDR3 for alpha chain variable domain of TCR clone 298930 (TRAV21, TRAJ52)
CAVRPSPAGGTSYGKLTV

SEQ ID NO: 597860 - protein, 20 aa, Homo sapiens
  CDR3 for beta chain variable domain of TCR clone 298930 (TRBV28, TRBJ2-1)
CASTPIGRSPGLAGGNEQFF

SEQ ID NO: 597861 - protein, 11 aa, Homo sapiens
  CDR3 for alpha chain variable domain of TCR clone 298931 (TRAV3, TRAJ21)
CAVGNFNKFYF

SEQ ID NO: 597862 - protein, 14 aa, Homo sapiens
  CDR3 for beta chain variable domain of TCR clone 298931 (TRBV5-7, TRBJ2-7)
CASSGGLSSYEQYF

SEQ ID NO: 597863 - protein, 16 aa, Homo sapiens
  CDR3 for alpha chain variable domain of TCR clone 298932 (TRAV1-2, TRAJ10)
CAVRGVLTGGGNKLTF

SEQ ID NO: 597864 - protein, 13 aa, Homo sapiens
  CDR3 for beta chain variable domain of TCR clone 298932 (TRBV28, TRBJ2-7)
CASSPSGTYEQYF

SEQ ID NO: 597865 - protein, 12 aa, Homo sapiens
  CDR3 for alpha chain variable domain of TCR clone 298933 (TRAV12-3, TRAJ17)
CAMTLTGKKLTF

SEQ ID NO: 597866 - protein, 13 aa, Homo sapiens
  CDR3 for beta chain variable domain of TCR clone 298933 (TRBV4-2, TRBJ1-1)
CASSQAGNTEAFF

SEQ ID NO: 597867 - protein, 15 aa, Homo sapiens
  CDR3 for alpha chain variable domain of TCR clone 298934 (TRAV14/DV4, TRAJ12)
CAMREERDSSYKLIF

SEQ ID NO: 597868 - protein, 16 aa, Homo sapiens
  CDR3 for beta chain variable domain of TCR clone 298934 (TRBV11-2, TRBJ1-2)
CASSLDRGGNNYGDTF

SEQ ID NO: 597869 - protein, 14 aa, Homo sapiens
  CDR3 for alpha chain variable domain of TCR clone 298935 (TRAV12-2, TRAJ17)
CAVLFKAAGNKLTF

SEQ ID NO: 597870 - protein, 14 aa, Homo sapiens
  CDR3 for beta chain variable domain of TCR clone 298935 (TRBV7-8, TRBJ2-5)
CASNATGGQETQYF

SEQ ID NO: 597871 - protein, 11 aa, Homo sapiens
  CDR3 for alpha chain variable domain of TCR clone 298936 (TRAV13-1, TRAJ5)
CAPKGRRALTF

SEQ ID NO: 597872 - protein, 17 aa, Homo sapiens
  CDR3 for beta chain variable domain of TCR clone 298936 (TRBV28, TRBJ2-5)
CASSTPGGDALQETQYF

SEQ ID NO: 597873 - protein, 14 aa, Homo sapiens
  CDR3 for alpha chain variable domain of TCR clone 298937 (TRAV9-2, TRAJ39)
CALYIYNAGNMLTF

SEQ ID NO: 597874 - protein, 13 aa, Homo sapiens
  CDR3 for beta chain variable domain of TCR clone 298937 (TRBV11-3, TRBJ2-3)
CASSHDTKDTQYF

SEQ ID NO: 597875 - protein, 14 aa, Homo sapiens
  CDR3 for alpha chain variable domain of TCR clone 298938 (TRAV35, TRAJ33)
CAGSSQDSNYQLIW

SEQ ID NO: 597876 - protein, 15 aa, Homo sapiens
  CDR3 for beta chain variable domain of TCR clone 298938 (TRBV20-1, TRBJ2-7)
CSAESGTSGAYEEYF

SEQ ID NO: 597877 - protein, 17 aa, Homo sapiens
  CDR3 for alpha chain variable domain of TCR clone 298939 (TRAV1-2, TRAJ6)
CAVRDTTRTGGSYIPTF

SEQ ID NO: 597878 - protein, 15 aa, Homo sapiens
  CDR3 for beta chain variable domain of TCR clone 298939 (TRBV7-9, TRBJ2-7)
CASSSSGLAVYEQYF

SEQ ID NO: 597879 - protein, 15 aa, Homo sapiens
  CDR3 for alpha chain variable domain of TCR clone 298940 (TRAV26-1, TRAJ44)
CIVRANTGTASKLTF

SEQ ID NO: 597880 - protein, 14 aa, Homo sapiens
  CDR3 for beta chain variable domain of TCR clone 298940 (TRBV15, TRBJ1-5)
CHQQRTGGNQPQHF

SEQ ID NO: 597881 - protein, 14 aa, Homo sapiens
  CDR3 for alpha chain variable domain of TCR clone 298941 (TRAV13-1, TRAJ23)
CAASRLGRGGKLIF

SEQ ID NO: 597882 - protein, 14 aa, Homo sapiens
  CDR3 for beta chain variable domain of TCR clone 298941 (TRBV20-1, TRBJ1-1)
SAGLHLGGGTEAFF

SEQ ID NO: 597883 - protein, 12 aa, Homo sapiens
  CDR3 for alpha chain variable domain of TCR clone 298942 (TRAV12-3, TRAJ17)
CAKTLTGNKLTF

SEQ ID NO: 597884 - protein, 14 aa, Homo sapiens
  CDR3 for beta chain variable domain of TCR clone 298942 (TRBV12-5, TRBJ2-5)
CASGSRTHQETQYF

SEQ ID NO: 597885 - protein, 13 aa, Homo sapiens
  CDR3 for alpha chain variable domain of TCR clone 298943 (TRAV13-1, TRAJ6)
CAASKGGSYIPTF

SEQ ID NO: 597886 - protein, 13 aa, Homo sapiens
  CDR3 for beta chain variable domain of TCR clone 298943 (TRBV7-9, TRBJ2-5)
CASLPSGRETKYF

SEQ ID NO: 597887 - protein, 15 aa, Homo sapiens
  CDR3 for alpha chain variable domain of TCR clone 298944 (TRAV8-1, TRAJ23)
CDVNSHYNQGGKLIF

SEQ ID NO: 597888 - protein, 15 aa, Homo sapiens
  CDR3 for beta chain variable domain of TCR clone 298944 (TRBV11-2, TRBJ1-6)
CASTLRGTGNSPLHF

SEQ ID NO: 597889 - protein, 16 aa, Homo sapiens
  CDR3 for alpha chain variable domain of TCR clone 298945 (TRAV12-3, TRAJ53)
CAMSPGSGGSNYKLTF

SEQ ID NO: 597890 - protein, 16 aa, Homo sapiens
  CDR3 for beta chain variable domain of TCR clone 298945 (TRBV6-1, TRBJ1-2)
CASSGAWQGRSHGYTF

SEQ ID NO: 597891 - protein, 11 aa, Homo sapiens
  CDR3 for alpha chain variable domain of TCR clone 298946 (TRAV21, TRAJ34)
CAVTNTAKLIF

SEQ ID NO: 597892 - protein, 17 aa, Homo sapiens
  CDR3 for beta chain variable domain of TCR clone 298946 (TRBV20-1, TRBJ2-1)
CSARSPSGGPPTMSSSS

SEQ ID NO: 597893 - protein, 18 aa, Homo sapiens
  CDR3 for alpha chain variable domain of TCR clone 298947 (TRAV21, TRAJ52)
CAVRPSPAGGTSYGNLTF

SEQ ID NO: 597894 - protein, 14 aa, Homo sapiens
  CDR3 for beta chain variable domain of TCR clone 298947 (TRBV7-2, TRBJ2-1)
CASSLEGGYNEQFF

SEQ ID NO: 597895 - protein, 18 aa, Homo sapiens
  CDR3 for alpha chain variable domain of TCR clone 298948 (TRAV29/DV5, TRAJ37)
CSVLLCSEGSGHTGKLIF

SEQ ID NO: 597896 - protein, 14 aa, Homo sapiens
  CDR3 for beta chain variable domain of TCR clone 298948 (TRBV5-1, TRBJ1-1)
CASSLAVGSGEAFF

SEQ ID NO: 597897 - protein, 11 aa, Homo sapiens
  CDR3 for alpha chain variable domain of TCR clone 298949 (TRAV3, TRAJ17)
PRGAAANKLTF

SEQ ID NO: 597898 - protein, 12 aa, Homo sapiens
  CDR3 for beta chain variable domain of TCR clone 298949 (TRBV11-2, TRBJ2-2)
CASSLGGGELFF

SEQ ID NO: 597899 - protein, 14 aa, Homo sapiens
  CDR3 for alpha chain variable domain of TCR clone 298950 (TRAV2, TRAJ29)
CAVTPPSGNTPLVF

SEQ ID NO: 597900 - protein, 14 aa, Homo sapiens
  CDR3 for beta chain variable domain of TCR clone 298950 (TRBV19, TRBJ2-5)
CASSMTGQQETQYF

SEQ ID NO: 597901 - protein, 17 aa, Homo sapiens
  CDR3 for alpha chain variable domain of TCR clone 298951 (TRAV13-1, TRAJ28)
CAASPPYSGAGSYQLTF

SEQ ID NO: 597902 - protein, 15 aa, Homo sapiens
  CDR3 for beta chain variable domain of TCR clone 298951 (TRBV29-1, TRBJ2-7)
CSVEFFDRGSYEQYF

SEQ ID NO: 597903 - protein, 16 aa, Homo sapiens
  CDR3 for alpha chain variable domain of TCR clone 298952 (TRAV30, TRAJ24)
CGTEIVDADSWGKFQF

SEQ ID NO: 597904 - protein, 13 aa, Homo sapiens
  CDR3 for beta chain variable domain of TCR clone 298952 (TRBV12-4, TRBJ1-2)
CASSSGSKDGYTF

SEQ ID NO: 597905 - protein, 15 aa, Homo sapiens
  CDR3 for alpha chain variable domain of TCR clone 298953 (TRAV8-3, TRAJ45)
CASSYSGGGADGLTF

SEQ ID NO: 597906 - protein, 14 aa, Homo sapiens
  CDR3 for beta chain variable domain of TCR clone 298953 (TRBV12-4, TRBJ2-7)
CASSASGGWYEQYF

SEQ ID NO: 597907 - protein, 13 aa, Homo sapiens
  CDR3 for alpha chain variable domain of TCR clone 298954 (TRAV29/DV5, TRAJ49)
CAASTNTGNQFYF

SEQ ID NO: 597908 - protein, 15 aa, Homo sapiens
  CDR3 for beta chain variable domain of TCR clone 298954 (TRBV7-9, TRBJ1-6)
CASSSPGRGNSPLHF

SEQ ID NO: 597909 - protein, 12 aa, Homo sapiens
  CDR3 for alpha chain variable domain of TCR clone 298955 (TRAV3, TRAJ20)
CAVRDLDYKLSF

SEQ ID NO: 597910 - protein, 15 aa, Homo sapiens
  CDR3 for beta chain variable domain of TCR clone 298955 (TRBV15, TRBJ1-1)
CATSLQGGRNTEAFF

SEQ ID NO: 597911 - protein, 13 aa, Homo sapiens
  CDR3 for alpha chain variable domain of TCR clone 298956 (TRAV23/DV6, TRAJ21)
CAASIGNFNKFYF

SEQ ID NO: 597912 - protein, 17 aa, Homo sapiens
  CDR3 for beta chain variable domain of TCR clone 298956 (TRBV6-5, TRBJ2-1)
CASRKSPRTGGHNEQFF

SEQ ID NO: 597913 - protein, 16 aa, Homo sapiens
  CDR3 for alpha chain variable domain of TCR clone 298957 (TRAV30, TRAJ24)
CGTEIVDADSWGKFKF

SEQ ID NO: 597914 - protein, 14 aa, Homo sapiens
  CDR3 for beta chain variable domain of TCR clone 298957 (TRBV5-7, TRBJ1-1)
CASSLAGDWTEAFF

SEQ ID NO: 597915 - protein, 15 aa, Homo sapiens
  CDR3 for alpha chain variable domain of TCR clone 298958 (TRAV36/DV7, TRAJ21)
CALKFYFGSGTKLNV

SEQ ID NO: 597916 - protein, 13 aa, Homo sapiens
  CDR3 for beta chain variable domain of TCR clone 298958 (TRBV11-3, TRBJ2-5)
CSSSSGLQETQYF

SEQ ID NO: 597917 - protein, 18 aa, Homo sapiens
  CDR3 for alpha chain variable domain of TCR clone 298959 (TRAV13-1, TRAJ52)
CAAKNPNAGGTSYGNLTF

SEQ ID NO: 597918 - protein, 11 aa, Homo sapiens
  CDR3 for beta chain variable domain of TCR clone 298959 (TRBV29-1, TRBJ2-5)
CSEDRTGTQYF

SEQ ID NO: 597919 - protein, 11 aa, Homo sapiens
  CDR3 for alpha chain variable domain of TCR clone 298960 (TRAV2, TRAJ13)
CASGGYQKVTF

SEQ ID NO: 597920 - protein, 15 aa, Homo sapiens
  CDR3 for beta chain variable domain of TCR clone 298960 (TRBV7-2, TRBJ2-1)
CASSSRTSREDEQFF

SEQ ID NO: 597921 - protein, 15 aa, Homo sapiens
  CDR3 for alpha chain variable domain of TCR clone 298961 (TRAV2, TRAJ13)
CATPSYSGGYQKVTF

SEQ ID NO: 597922 - protein, 14 aa, Homo sapiens
  CDR3 for beta chain variable domain of TCR clone 298961 (TRBV27, TRBJ2-2)
CASSLGAATEELFF

SEQ ID NO: 597923 - protein, 15 aa, Homo sapiens
  CDR3 for alpha chain variable domain of TCR clone 298962 (TRAV3, TRAJ5)
CAVRDRKTGRRALTF

SEQ ID NO: 597924 - protein, 15 aa, Homo sapiens
  CDR3 for beta chain variable domain of TCR clone 298962 (TRBV7-8, TRBJ2-1)
CASSLADSLYNEQYF

SEQ ID NO: 597925 - protein, 13 aa, Homo sapiens
  CDR3 for alpha chain variable domain of TCR clone 298963 (TRAV13-1, TRAJ20)
CAARVSNDYTLSF

SEQ ID NO: 597926 - protein, 12 aa, Homo sapiens
  CDR3 for beta chain variable domain of TCR clone 298963 (TRBV20-1, TRBJ2-1)
CSARLGTDEQFF

SEQ ID NO: 597927 - protein, 14 aa, Homo sapiens
  CDR3 for alpha chain variable domain of TCR clone 298964 (TRAV20, TRAJ20)
CAVRRGYNDYKLSF

SEQ ID NO: 597928 - protein, 13 aa, Homo sapiens
  CDR3 for beta chain variable domain of TCR clone 298964 (TRBV19, TRBJ2-5)
CASSQTAPETQYF

SEQ ID NO: 597929 - protein, 13 aa, Homo sapiens
  CDR3 for alpha chain variable domain of TCR clone 298965 (TRAV2, TRAJ5)
CAVPDTGRRALTF

SEQ ID NO: 597930 - protein, 15 aa, Homo sapiens
  CDR3 for beta chain variable domain of TCR clone 298965 (TRBV7-2, TRBJ2-2)
CASSARTGYTGELFF

SEQ ID NO: 597931 - protein, 16 aa, Homo sapiens
  CDR3 for alpha chain variable domain of TCR clone 298966 (TRAV8-3, TRAJ10)
CAVGPILTGGGNKLTF

SEQ ID NO: 597932 - protein, 15 aa, Homo sapiens
  CDR3 for beta chain variable domain of TCR clone 298966 (TRBV7-2, TRBJ2-5)
CQQLKWLSGQETQYF

SEQ ID NO: 597933 - protein, 23 aa, Homo sapiens
  CDR3 for alpha chain variable domain of TCR clone 298967 (TRAV8-1, TRAJ6)
CAVNTPPEEATYLHLEEEPALLL

SEQ ID NO: 597934 - protein, 14 aa, Homo sapiens
  CDR3 for beta chain variable domain of TCR clone 298967 (TRBV12-4, TRBJ2-1)
CASSLGQGASEQFF

SEQ ID NO: 597935 - protein, 16 aa, Homo sapiens
  CDR3 for alpha chain variable domain of TCR clone 298968 (TRAV30, TRAJ24)
CGTEIVDADSWGKFQF

SEQ ID NO: 597936 - protein, 17 aa, Homo sapiens
  CDR3 for beta chain variable domain of TCR clone 298968 (TRBV20-1, TRBJ1-1)
CSARGAGGGLGNTEAFF

SEQ ID NO: 597937 - protein, 12 aa, Homo sapiens
  CDR3 for alpha chain variable domain of TCR clone 298969 (TRAV13-2, TRAJ8)
CAPWLVFQKLVF

SEQ ID NO: 597938 - protein, 13 aa, Homo sapiens
  CDR3 for beta chain variable domain of TCR clone 298969 (TRBV12-4, TRBJ1-5)
CASSPDRAQPQHF

SEQ ID NO: 597939 - protein, 17 aa, Homo sapiens
  CDR3 for alpha chain variable domain of TCR clone 298970 (TRAV26-1, TRAJ10)
CIVSFRGLTGGGNKLTF

SEQ ID NO: 597940 - protein, 13 aa, Homo sapiens
  CDR3 for beta chain variable domain of TCR clone 298970 (TRBV20-1, TRBJ2-3)
CSASRQAADTQYS

SEQ ID NO: 597941 - protein, 15 aa, Homo sapiens
  CDR3 for alpha chain variable domain of TCR clone 298971 (TRAV3, TRAJ47)
CAVRDIGEYGNKLVF

SEQ ID NO: 597942 - protein, 13 aa, Homo sapiens
  CDR3 for beta chain variable domain of TCR clone 298971 (TRBV12-4, TRBJ2-7)
CASSFVPTAEQYF

SEQ ID NO: 597943 - protein, 12 aa, Homo sapiens
  CDR3 for alpha chain variable domain of TCR clone 298972 (TRAV13-2, TRAJ23)
CAVRHRGGKLIF

SEQ ID NO: 597944 - protein, 12 aa, Homo sapiens
  CDR3 for beta chain variable domain of TCR clone 298972 (TRBV11-2, TRBJ2-2)
CASSLGGGELFF

SEQ ID NO: 597945 - protein, 13 aa, Homo sapiens
  CDR3 for alpha chain variable domain of TCR clone 298973 (TRAV21, TRAJ27)
CAARPGNAVKSPF

SEQ ID NO: 597946 - protein, 13 aa, Homo sapiens
  CDR3 for beta chain variable domain of TCR clone 298973 (TRBV18, TRBJ2-7)
CASQSGGGYEQYF

SEQ ID NO: 597947 - protein, 13 aa, Homo sapiens
  CDR3 for alpha chain variable domain of TCR clone 298974 (TRAV30, TRAJ34)
CGTVGYNTDKLIF

SEQ ID NO: 597948 - protein, 16 aa, Homo sapiens
  CDR3 for beta chain variable domain of TCR clone 298974 (TRBV7-9, TRBJ1-2)
CASSLGSASGEDGYTF

SEQ ID NO: 597949 - protein, 13 aa, Homo sapiens
  CDR3 for alpha chain variable domain of TCR clone 298975 (TRAV8-3, TRAJ37)
CAVGSGNTGKLIF

SEQ ID NO: 597950 - protein, 13 aa, Homo sapiens
  CDR3 for beta chain variable domain of TCR clone 298975 (TRBV27, TRBJ2-7)
CASSFVSSYEQYF

SEQ ID NO: 597951 - protein, 11 aa, Homo sapiens
  CDR3 for alpha chain variable domain of TCR clone 298976 (TRAV2, TRAJ23)
CAVETRGKLIF

SEQ ID NO: 597952 - protein, 13 aa, Homo sapiens
  CDR3 for beta chain variable domain of TCR clone 298976 (TRBV2, TRBJ2-1)
CASSLDSYNEQFF

SEQ ID NO: 597953 - protein, 18 aa, Homo sapiens
  CDR3 for alpha chain variable domain of TCR clone 298977 (TRAV12-3, TRAJ52)
CAMSRTNAGGTSYGKLTF

SEQ ID NO: 597954 - protein, 16 aa, Homo sapiens
  CDR3 for beta chain variable domain of TCR clone 298977 (TRBV7-2, TRBJ2-3)
CASSLVALYSTDTQYF

SEQ ID NO: 597955 - protein, 15 aa, Homo sapiens
  CDR3 for alpha chain variable domain of TCR clone 298978 (TRAV21, TRAJ53)
CATLNSGGSNYKLTF

SEQ ID NO: 597956 - protein, 15 aa, Homo sapiens
  CDR3 for beta chain variable domain of TCR clone 298978 (TRBV7-2, TRBJ2-1)
CASSLVGSSCNEQFF

SEQ ID NO: 597957 - protein, 14 aa, Homo sapiens
  CDR3 for alpha chain variable domain of TCR clone 298979 (TRAV35, TRAJ22)
CAGLRPGSARQLTF

SEQ ID NO: 597958 - protein, 15 aa, Homo sapiens
  CDR3 for beta chain variable domain of TCR clone 298979 (TRBV19, TRBJ1-1)
CASTSGQIQNTEAFF

SEQ ID NO: 597959 - protein, 18 aa, Homo sapiens
  CDR3 for alpha chain variable domain of TCR clone 298980 (TRAV13-1, TRAJ52)
CAAKNPDAGVTSYGKLTF

SEQ ID NO: 597960 - protein, 13 aa, Homo sapiens
  CDR3 for beta chain variable domain of TCR clone 298980 (TRBV2, TRBJ1-1)
CASSEGGNTEAFF

SEQ ID NO: 597961 - protein, 13 aa, Homo sapiens
  CDR3 for alpha chain variable domain of TCR clone 298981 (TRAV17, TRAJ29)
CATGPSGSTPLVF

SEQ ID NO: 597962 - protein, 14 aa, Homo sapiens
  CDR3 for beta chain variable domain of TCR clone 298981 (TRBV2, TRBJ1-6)
CASEVSSYNSPLHF

SEQ ID NO: 597963 - protein, 11 aa, Homo sapiens
  CDR3 for alpha chain variable domain of TCR clone 298982 (TRAV17, TRAJ9)
CATTGGFKTIF

SEQ ID NO: 597964 - protein, 16 aa, Homo sapiens
  CDR3 for beta chain variable domain of TCR clone 298982 (TRBV2, TRBJ2-7)
CASSEPWTGPSYEQYF

SEQ ID NO: 597965 - protein, 16 aa, Homo sapiens
  CDR3 for alpha chain variable domain of TCR clone 298983 (TRAV26-1, TRAJ53)
CVVRVAMGGSNYKLPF

SEQ ID NO: 597966 - protein, 12 aa, Homo sapiens
  CDR3 for beta chain variable domain of TCR clone 298983 (TRBV7-9, TRBJ1-5)
CASSPQGQPQHF

SEQ ID NO: 597967 - protein, 13 aa, Homo sapiens
  CDR3 for alpha chain variable domain of TCR clone 298984 (TRAV3, TRAJ21)
CAVREPDFNKFYF

SEQ ID NO: 597968 - protein, 14 aa, Homo sapiens
  CDR3 for beta chain variable domain of TCR clone 298984 (TRBV7-2, TRBJ1-6)
CASSLQGANSPLHV

SEQ ID NO: 597969 - protein, 15 aa, Homo sapiens
  CDR3 for alpha chain variable domain of TCR clone 298985 (TRAV17, TRAJ34)
CATDPRMVDTDKHIF

SEQ ID NO: 597970 - protein, 12 aa, Homo sapiens
  CDR3 for beta chain variable domain of TCR clone 298985 (TRBV10-2, TRBJ2-3)
CASSEGLGPRYF

SEQ ID NO: 597971 - protein, 14 aa, Homo sapiens
  CDR3 for alpha chain variable domain of TCR clone 298986 (TRAV29/DV5, TRAJ32)
CAAAYGGATNKLIF

SEQ ID NO: 597972 - protein, 15 aa, Homo sapiens
  CDR3 for beta chain variable domain of TCR clone 298986 (TRBV27, TRBJ2-7)
CATSTAGTGSYEQYF

SEQ ID NO: 597973 - protein, 17 aa, Homo sapiens
  CDR3 for alpha chain variable domain of TCR clone 298987 (TRAV26-2, TRAJ42)
CILRDVGYGGGQGNLIF

SEQ ID NO: 597974 - protein, 15 aa, Homo sapiens
  CDR3 for beta chain variable domain of TCR clone 298987 (TRBV12-4, TRBJ2-7)
CQQFDCGTGTYEQYF

SEQ ID NO: 597975 - protein, 13 aa, Homo sapiens
  CDR3 for alpha chain variable domain of TCR clone 298988 (TRAV13-1, TRAJ21)
CAPSIYNFNKFYF

SEQ ID NO: 597976 - protein, 13 aa, Homo sapiens
  CDR3 for beta chain variable domain of TCR clone 298988 (TRBV27, TRBJ1-4)
CASSLMGDEKLFF

SEQ ID NO: 597977 - protein, 14 aa, Homo sapiens
  CDR3 for alpha chain variable domain of TCR clone 298989 (TRAV16, TRAJ39)
CALSKNNAGNMLTF

SEQ ID NO: 597978 - protein, 13 aa, Homo sapiens
  CDR3 for beta chain variable domain of TCR clone 298989 (TRBV2, TRBJ1-2)
CASTWTGEDGYTF

SEQ ID NO: 597979 - protein, 14 aa, Homo sapiens
  CDR3 for alpha chain variable domain of TCR clone 298990 (TRAV4, TRAJ20)
YLVGDFINDYKLSF

SEQ ID NO: 597980 - protein, 15 aa, Homo sapiens
  CDR3 for beta chain variable domain of TCR clone 298990 (TRBV6-5, TRBJ1-1)
CASSYLRGSVPEAFF

SEQ ID NO: 597981 - protein, 15 aa, Homo sapiens
  CDR3 for alpha chain variable domain of TCR clone 298991 (TRAV13-1, TRAJ52)
CAASSPSTSYGKLTF

SEQ ID NO: 597982 - protein, 13 aa, Homo sapiens
  CDR3 for beta chain variable domain of TCR clone 298991 (TRBV27, TRBJ2-5)
CASSLSSVETQYF

SEQ ID NO: 597983 - protein, 12 aa, Homo sapiens
  CDR3 for alpha chain variable domain of TCR clone 298992 (TRAV1-1, TRAJ9)
CAVDTGGFKTIF

SEQ ID NO: 597984 - protein, 13 aa, Homo sapiens
  CDR3 for beta chain variable domain of TCR clone 298992 (TRBV7-2, TRBJ2-7)
CASSSPSGSEQYF

SEQ ID NO: 597985 - protein, 16 aa, Homo sapiens
  CDR3 for alpha chain variable domain of TCR clone 298993 (TRAV3, TRAJ40)
CAVRDRIASGTYKYIF

SEQ ID NO: 597986 - protein, 20 aa, Homo sapiens
  CDR3 for beta chain variable domain of TCR clone 298993 (TRBV7-8, TRBJ2-1)
CASSLAHRLAGVRSYNEQFF

SEQ ID NO: 597987 - protein, 19 aa, Homo sapiens
  CDR3 for alpha chain variable domain of TCR clone 298994 (TRAV3, TRAJ6)
CAVIDRNPSRSGGSYIPTF

SEQ ID NO: 597988 - protein, 15 aa, Homo sapiens
  CDR3 for beta chain variable domain of TCR clone 298994 (TRBV18, TRBJ2-7)
CASSPTFMDSYEQYF

SEQ ID NO: 597989 - protein, 13 aa, Homo sapiens
  CDR3 for alpha chain variable domain of TCR clone 298995 (TRAV13-2, TRAJ13)
FAERPGGYQKVTF

SEQ ID NO: 597990 - protein, 15 aa, Homo sapiens
  CDR3 for beta chain variable domain of TCR clone 298995 (TRBV7-2, TRBJ2-2)
CASRRPGQNTGELFF

SEQ ID NO: 597991 - protein, 14 aa, Homo sapiens
  CDR3 for alpha chain variable domain of TCR clone 298996 (TRAV1-2, TRAJ16)
CAVNRFSDGQKMLF

SEQ ID NO: 597992 - protein, 13 aa, Homo sapiens
  CDR3 for beta chain variable domain of TCR clone 298996 (TRBV12-4, TRBJ2-5)
CASSLGGSRTQYF

SEQ ID NO: 597993 - protein, 12 aa, Homo sapiens
  CDR3 for alpha chain variable domain of TCR clone 298997 (TRAV21, TRAJ12)
CAVMDSSYKLFF

SEQ ID NO: 597994 - protein, 16 aa, Homo sapiens
  CDR3 for beta chain variable domain of TCR clone 298997 (TRBV7-9, TRBJ2-5)
CASRLEIGTRKETQYF

SEQ ID NO: 597995 - protein, 14 aa, Homo sapiens
  CDR3 for alpha chain variable domain of TCR clone 298998 (TRAV26-1, TRAJ30)
CIVRVRTEMTRSSF

SEQ ID NO: 597996 - protein, 18 aa, Homo sapiens
  CDR3 for beta chain variable domain of TCR clone 298998 (TRBV4-1, TRBJ1-5)
CASSQDPRGQGLNQPQHF

SEQ ID NO: 597997 - protein, 13 aa, Homo sapiens
  CDR3 for alpha chain variable domain of TCR clone 298999 (TRAV2, TRAJ21)
CAVEDNNFNKFYF

SEQ ID NO: 597998 - protein, 18 aa, Homo sapiens
  CDR3 for beta chain variable domain of TCR clone 298999 (TRBV7-8, TRBJ2-4)
CASSAERTLAKTFSTSAP

SEQ ID NO: 597999 - protein, 13 aa, Homo sapiens
  CDR3 for alpha chain variable domain of TCR clone 299000 (TRAV12-3, TRAJ7)
CAMSASGNNRLAF

SEQ ID NO: 598000 - protein, 15 aa, Homo sapiens
  CDR3 for beta chain variable domain of TCR clone 299000 (TRBV20-1, TRBJ2-7)
CSARDRVSGMDEQYF

SEQ ID NO: 598001 - protein, 10 aa, Homo sapiens
  CDR3 for alpha chain variable domain of TCR clone 299001 (TRAV12-1, TRAJ20)
CVVNPRKLSF

SEQ ID NO: 598002 - protein, 18 aa, Homo sapiens
  CDR3 for beta chain variable domain of TCR clone 299001 (TRBV12-4, TRBJ2-2)
CTSVPAAQGTQKPGSCFF

SEQ ID NO: 598003 - protein, 15 aa, Homo sapiens
  CDR3 for alpha chain variable domain of TCR clone 299002 (TRAV21, TRAJ53)
CAVRQSGGSNYKLTF

SEQ ID NO: 598004 - protein, 16 aa, Homo sapiens
  CDR3 for beta chain variable domain of TCR clone 299002 (TRBV19, TRBJ2-1)
CASSKGGPSAYNEQFF

SEQ ID NO: 598005 - protein, 12 aa, Homo sapiens
  CDR3 for alpha chain variable domain of TCR clone 299003 (TRAV21, TRAJ3)
CCLYSSASKIIF

SEQ ID NO: 598006 - protein, 16 aa, Homo sapiens
  CDR3 for beta chain variable domain of TCR clone 299003 (TRBV19, TRBJ2-1)
CASSRAGPSCYNEQFF

SEQ ID NO: 598007 - protein, 14 aa, Homo sapiens
  CDR3 for alpha chain variable domain of TCR clone 299004 (TRAV27, TRAJ12)
CAGARMDSSYKLIF

SEQ ID NO: 598008 - protein, 18 aa, Homo sapiens
  CDR3 for beta chain variable domain of TCR clone 299004 (TRBV10-3, TRBJ2-7)
CAISESGRPSGGWVEQYF

SEQ ID NO: 598009 - protein, 16 aa, Homo sapiens
  CDR3 for alpha chain variable domain of TCR clone 299005 (TRAV16, TRAJ42)
CALSGYYGGSQGNLIL

SEQ ID NO: 598010 - protein, 13 aa, Homo sapiens
  CDR3 for beta chain variable domain of TCR clone 299005 (TRBV7-9, TRBJ1-2)
CASSLKQNYGYTF

SEQ ID NO: 598011 - protein, 17 aa, Homo sapiens
  CDR3 for alpha chain variable domain of TCR clone 299006 (TRAV38-1, TRAJ28)
CAFMKPTSGAGSYELTF

SEQ ID NO: 598012 - protein, 15 aa, Homo sapiens
  CDR3 for beta chain variable domain of TCR clone 299006 (TRBV5-1, TRBJ2-4)
CASSLGGGGSYMQYF

SEQ ID NO: 598013 - protein, 11 aa, Homo sapiens
  CDR3 for alpha chain variable domain of TCR clone 299007 (TRAV27, TRAJ47)
SIVEYGNKLVF

SEQ ID NO: 598014 - protein, 14 aa, Homo sapiens
  CDR3 for beta chain variable domain of TCR clone 299007 (TRBV7-2, TRBJ2-7)
CASRSQGAAYEQYF

SEQ ID NO: 598015 - protein, 11 aa, Homo sapiens
  CDR3 for alpha chain variable domain of TCR clone 299008 (TRAV17, TRAJ36)
CAPTGANNLFF

SEQ ID NO: 598016 - protein, 17 aa, Homo sapiens
  CDR3 for beta chain variable domain of TCR clone 299008 (TRBV13, TRBJ2-3)
CASSLSRVAGGRNTQYF

SEQ ID NO: 598017 - protein, 12 aa, Homo sapiens
  CDR3 for alpha chain variable domain of TCR clone 299009 (TRAV29/DV5, TRAJ49)
CAALNTGNQFYF

SEQ ID NO: 598018 - protein, 12 aa, Homo sapiens
  CDR3 for beta chain variable domain of TCR clone 299009 (TRBV12-4, TRBJ2-7)
CASSLGGYEQYF

SEQ ID NO: 598019 - protein, 11 aa, Homo sapiens
  CDR3 for alpha chain variable domain of TCR clone 299010 (TRAV17, TRAJ31)
CATDPTARLMF

SEQ ID NO: 598020 - protein, 14 aa, Homo sapiens
  CDR3 for beta chain variable domain of TCR clone 299010 (TRBV4-2, TRBJ2-3)
CASSQERGTDTQYF

SEQ ID NO: 598021 - protein, 15 aa, Homo sapiens
  CDR3 for alpha chain variable domain of TCR clone 299011 (TRAV3, TRAJ22)
CAVRDRGGSARQMTF

SEQ ID NO: 598022 - protein, 15 aa, Homo sapiens
  CDR3 for beta chain variable domain of TCR clone 299011 (TRBV7-3, TRBJ2-1)
CASSPTGGGEVEQFF

SEQ ID NO: 598023 - protein, 16 aa, Homo sapiens
  CDR3 for alpha chain variable domain of TCR clone 299012 (TRAV20, TRAJ38)
CAVQASNAGYNRKPIW

SEQ ID NO: 598024 - protein, 16 aa, Homo sapiens
  CDR3 for beta chain variable domain of TCR clone 299012 (TRBV7-8, TRBJ2-6)
CASRVGDSSGANVLTF

SEQ ID NO: 598025 - protein, 12 aa, Homo sapiens
  CDR3 for alpha chain variable domain of TCR clone 299013 (TRAV8-3, TRAJ41)
CAVALSGYALNF

SEQ ID NO: 598026 - protein, 18 aa, Homo sapiens
  CDR3 for beta chain variable domain of TCR clone 299013 (TRBV20-1, TRBJ2-6)
CSAETTPTHGSGVNVLTF

SEQ ID NO: 598027 - protein, 14 aa, Homo sapiens
  CDR3 for alpha chain variable domain of TCR clone 299014 (TRAV9-2, TRAJ39)
CALFIYNAGNMLTF

SEQ ID NO: 598028 - protein, 15 aa, Homo sapiens
  CDR3 for beta chain variable domain of TCR clone 299014 (TRBV28, TRBJ2-1)
CASSIIAGGRSEQFF

SEQ ID NO: 598029 - protein, 16 aa, Homo sapiens
  CDR3 for alpha chain variable domain of TCR clone 299015 (TRAV3, TRAJ10)
CAVRDMRAGGGNKLTF

SEQ ID NO: 598030 - protein, 17 aa, Homo sapiens
  CDR3 for beta chain variable domain of TCR clone 299015 (TRBV7-9, TRBJ2-6)
CASSAGTGGAGANVLTF

SEQ ID NO: 598031 - protein, 16 aa, Homo sapiens
  CDR3 for alpha chain variable domain of TCR clone 299016 (TRAV3, TRAJ10)
CAVRDMRAGGGTKLTF

SEQ ID NO: 598032 - protein, 13 aa, Homo sapiens
  CDR3 for beta chain variable domain of TCR clone 299016 (TRBV4-2, TRBJ1-1)
CASSQAGNTEAFF

SEQ ID NO: 598033 - protein, 18 aa, Homo sapiens
  CDR3 for alpha chain variable domain of TCR clone 299017 (TRAV26-2, TRAJ54)
CILRDVEVGIQGAQKLVF

SEQ ID NO: 598034 - protein, 17 aa, Homo sapiens
  CDR3 for beta chain variable domain of TCR clone 299017 (TRBV20-1, TRBJ1-5)
CSASLSPAQGGNQPQHF

SEQ ID NO: 598035 - protein, 12 aa, Homo sapiens
  CDR3 for alpha chain variable domain of TCR clone 299018 (TRAV21, TRAJ33)
CAKMDSNYQLIW

SEQ ID NO: 598036 - protein, 16 aa, Homo sapiens
  CDR3 for beta chain variable domain of TCR clone 299018 (TRBV19, TRBJ1-1)
CASRFGGPVTGTEAFF

SEQ ID NO: 598037 - protein, 14 aa, Homo sapiens
  CDR3 for alpha chain variable domain of TCR clone 299019 (TRAV16, TRAJ3)
CALSQYSSASKIIF

SEQ ID NO: 598038 - protein, 11 aa, Homo sapiens
  CDR3 for beta chain variable domain of TCR clone 299019 (TRBV11-2, TRBJ2-2)
CASSLPGELFF

SEQ ID NO: 598039 - protein, 14 aa, Homo sapiens
  CDR3 for alpha chain variable domain of TCR clone 299020 (TRAV4, TRAJ17)
CLVGDMAAGTKLTF

SEQ ID NO: 598040 - protein, 15 aa, Homo sapiens
  CDR3 for beta chain variable domain of TCR clone 299020 (TRBV2, TRBJ2-1)
CASSELAGSYNEQFF

SEQ ID NO: 598041 - protein, 14 aa, Homo sapiens
  CDR3 for alpha chain variable domain of TCR clone 299021 (TRAV8-3, TRAJ26)
YAVAPGNYGQNFVF

SEQ ID NO: 598042 - protein, 16 aa, Homo sapiens
  CDR3 for beta chain variable domain of TCR clone 299021 (TRBV3-1, TRBJ2-1)
CASSQVGGTSYNEQFF

SEQ ID NO: 598043 - protein, 15 aa, Homo sapiens
  CDR3 for alpha chain variable domain of TCR clone 299022 (TRAV13-1, TRAJ45)
CAARGSGGGADGLTF

SEQ ID NO: 598044 - protein, 12 aa, Homo sapiens
  CDR3 for beta chain variable domain of TCR clone 299022 (TRBV11-2, TRBJ2-2)
CASSLGGGELFF

SEQ ID NO: 598045 - protein, 15 aa, Homo sapiens
  CDR3 for alpha chain variable domain of TCR clone 299023 (TRAV21, TRAJ53)
CATLNSGGSNYKLTF

SEQ ID NO: 598046 - protein, 16 aa, Homo sapiens
  CDR3 for beta chain variable domain of TCR clone 299023 (TRBV9, TRBJ2-1)
CASSVGGGGNYNELFF

SEQ ID NO: 598047 - protein, 15 aa, Homo sapiens
  CDR3 for alpha chain variable domain of TCR clone 299024 (TRAV27, TRAJ38)
CAARRNAGTNRKLIW

SEQ ID NO: 598048 - protein, 13 aa, Homo sapiens
  CDR3 for beta chain variable domain of TCR clone 299024 (TRBV12-5, TRBJ2-3)
CASGDRQSDTQYF

SEQ ID NO: 598049 - protein, 14 aa, Homo sapiens
  CDR3 for alpha chain variable domain of TCR clone 299025 (TRAV8-4, TRAJ15)
CAVTIREAGTALLF

SEQ ID NO: 598050 - protein, 16 aa, Homo sapiens
  CDR3 for beta chain variable domain of TCR clone 299025 (TRBV29-1, TRBJ2-6)
CSVEYITYSGANVLTF

SEQ ID NO: 598051 - protein, 18 aa, Homo sapiens
  CDR3 for alpha chain variable domain of TCR clone 299026 (TRAV1-1, TRAJ12)
CLLLLRCERGDSSYKLIF

SEQ ID NO: 598052 - protein, 15 aa, Homo sapiens
  CDR3 for beta chain variable domain of TCR clone 299026 (TRBV18, TRBJ2-5)
CASTDRGPRQETQDF

SEQ ID NO: 598053 - protein, 14 aa, Homo sapiens
  CDR3 for alpha chain variable domain of TCR clone 299027 (TRAV12-2, TRAJ4)
CAEDLSGGFNKLIF

SEQ ID NO: 598054 - protein, 13 aa, Homo sapiens
  CDR3 for beta chain variable domain of TCR clone 299027 (TRBV7-9, TRBJ1-2)
CASSLKQNYGYTF

SEQ ID NO: 598055 - protein, 14 aa, Homo sapiens
  CDR3 for alpha chain variable domain of TCR clone 299028 (TRAV26-1, TRAJ16)
CIAVPFSDGQKLLF

SEQ ID NO: 598056 - protein, 12 aa, Homo sapiens
  CDR3 for beta chain variable domain of TCR clone 299028 (TRBV4-2, TRBJ2-1)
CARSAQKNEQLF

SEQ ID NO: 598057 - protein, 17 aa, Homo sapiens
  CDR3 for alpha chain variable domain of TCR clone 299029 (TRAV29/DV5, TRAJ52)
CSASARAGGTSYGKLTF

SEQ ID NO: 598058 - protein, 15 aa, Homo sapiens
  CDR3 for beta chain variable domain of TCR clone 299029 (TRBV4-2, TRBJ1-1)
CASSQRSSGRTEAFF

SEQ ID NO: 598059 - protein, 16 aa, Homo sapiens
  CDR3 for alpha chain variable domain of TCR clone 299030 (TRAV12-3, TRAJ53)
CEMSLGSGGSNYKLTF

SEQ ID NO: 598060 - protein, 17 aa, Homo sapiens
  CDR3 for beta chain variable domain of TCR clone 299030 (TRBV28, TRBJ2-5)
CASSTPEGDALQETQYF

SEQ ID NO: 598061 - protein, 15 aa, Homo sapiens
  CDR3 for alpha chain variable domain of TCR clone 299031 (TRAV26-2, TRAJ42)
CILEGYGGSQGNLIF

SEQ ID NO: 598062 - protein, 15 aa, Homo sapiens
  CDR3 for beta chain variable domain of TCR clone 299031 (TRBV5-5, TRBJ1-5)
CASSSTPGSNQPQHF

SEQ ID NO: 598063 - protein, 12 aa, Homo sapiens
  CDR3 for alpha chain variable domain of TCR clone 299032 (TRAV16, TRAJ10)
CSRTGGGNKLTF

SEQ ID NO: 598064 - protein, 15 aa, Homo sapiens
  CDR3 for beta chain variable domain of TCR clone 299032 (TRBV6-3, TRBJ2-7)
CASCSPGTVFYEQYF

SEQ ID NO: 598065 - protein, 13 aa, Homo sapiens
  CDR3 for alpha chain variable domain of TCR clone 299033 (TRAV27, TRAJ42)
CAGARGSQGNLIF

SEQ ID NO: 598066 - protein, 12 aa, Homo sapiens
  CDR3 for beta chain variable domain of TCR clone 299033 (TRBV12-4, TRBJ2-3)
CASSTLPDTQYF

SEQ ID NO: 598067 - protein, 22 aa, Homo sapiens
  CDR3 for alpha chain variable domain of TCR clone 299034 (TRAV8-2, TRAJ45)
HLTKPSAHMSDAAEYSADGLTF

SEQ ID NO: 598068 - protein, 13 aa, Homo sapiens
  CDR3 for beta chain variable domain of TCR clone 299034 (TRBV2, TRBJ2-7)
CASSVGGSGEQYF

SEQ ID NO: 598069 - protein, 13 aa, Homo sapiens
  CDR3 for alpha chain variable domain of TCR clone 299035 (TRAV21, TRAJ34)
CAVSEGDTDKLNF

SEQ ID NO: 598070 - protein, 17 aa, Homo sapiens
  CDR3 for beta chain variable domain of TCR clone 299035 (TRBV20-1, TRBJ1-5)
CSARDPSAQGFNQPQHF

SEQ ID NO: 598071 - protein, 14 aa, Homo sapiens
  CDR3 for alpha chain variable domain of TCR clone 299036 (TRAV4, TRAJ30)
CLVGDMNRDDKIIF

SEQ ID NO: 598072 - protein, 16 aa, Homo sapiens
  CDR3 for beta chain variable domain of TCR clone 299036 (TRBV20-1, TRBJ1-4)
CSAPGQCLLTNEKLFF

SEQ ID NO: 598073 - protein, 13 aa, Homo sapiens
  CDR3 for alpha chain variable domain of TCR clone 299037 (TRAV38-1, TRAJ42)
CARWGGSQGNLIF

SEQ ID NO: 598074 - protein, 12 aa, Homo sapiens
  CDR3 for beta chain variable domain of TCR clone 299037 (TRBV5-1, TRBJ1-2)
CASSQDTYGYTF

SEQ ID NO: 598075 - protein, 12 aa, Homo sapiens
  CDR3 for alpha chain variable domain of TCR clone 299038 (TRAV12-3, TRAJ17)
CAMTLTGNKLTF

SEQ ID NO: 598076 - protein, 17 aa, Homo sapiens
  CDR3 for beta chain variable domain of TCR clone 299038 (TRBV7-3, TRBJ2-3)
CASSLMKRMRGADTQYS

SEQ ID NO: 598077 - protein, 14 aa, Homo sapiens
  CDR3 for alpha chain variable domain of TCR clone 299039 (TRAV26-1, TRAJ38)
CIADNAGNNRKRIW

SEQ ID NO: 598078 - protein, 17 aa, Homo sapiens
  CDR3 for beta chain variable domain of TCR clone 299039 (TRBV7-9, TRBJ2-3)
CASSPTVAGDLTDTQYF

SEQ ID NO: 598079 - protein, 13 aa, Homo sapiens
  CDR3 for alpha chain variable domain of TCR clone 299040 (TRAV12-1, TRAJ39)
CVVNYNAGNMLTF

SEQ ID NO: 598080 - protein, 14 aa, Homo sapiens
  CDR3 for beta chain variable domain of TCR clone 299040 (TRBV27, TRBJ2-3)
GASSPLGTTDTQYF

SEQ ID NO: 598081 - protein, 16 aa, Homo sapiens
  CDR3 for alpha chain variable domain of TCR clone 299041 (TRAV14/DV4, TRAJ54)
CAMREGRIQGAQKLVF

SEQ ID NO: 598082 - protein, 15 aa, Homo sapiens
  CDR3 for beta chain variable domain of TCR clone 299041 (TRBV7-8, TRBJ2-1)
RASSLAGGLYNEQFF

SEQ ID NO: 598083 - protein, 12 aa, Homo sapiens
  CDR3 for alpha chain variable domain of TCR clone 299042 (TRAV3, TRAJ20)
CAVRDPDYKLGF

SEQ ID NO: 598084 - protein, 13 aa, Homo sapiens
  CDR3 for beta chain variable domain of TCR clone 299042 (TRBV9, TRBJ2-1)
CASSVGQGGEQFF

SEQ ID NO: 598085 - protein, 12 aa, Homo sapiens
  CDR3 for alpha chain variable domain of TCR clone 299043 (TRAV13-1, TRAJ21)
CAAKEGYNKFYF

SEQ ID NO: 598086 - protein, 15 aa, Homo sapiens
  CDR3 for beta chain variable domain of TCR clone 299043 (TRBV7-3, TRBJ2-1)
CASSPTGGGEVEQFF

SEQ ID NO: 598087 - protein, 14 aa, Homo sapiens
  CDR3 for alpha chain variable domain of TCR clone 299044 (TRAV13-1, TRAJ3)
CAASKSSSASKIIF

SEQ ID NO: 598088 - protein, 16 aa, Homo sapiens
  CDR3 for beta chain variable domain of TCR clone 299044 (TRBV15, TRBJ2-3)
CATSRDLGIVTDTQYF

SEQ ID NO: 598089 - protein, 20 aa, Homo sapiens
  CDR3 for alpha chain variable domain of TCR clone 299045 (TRAV26-1, TRAJ42)
CCVLLHRQTYYGGSHGNLIF

SEQ ID NO: 598090 - protein, 14 aa, Homo sapiens
  CDR3 for beta chain variable domain of TCR clone 299045 (TRBV11-1, TRBJ2-7)
CASSFRQGSYEQHF

SEQ ID NO: 598091 - protein, 17 aa, Homo sapiens
  CDR3 for alpha chain variable domain of TCR clone 299046 (TRAV3, TRAJ42)
CAVRDRDYGGSKGNLIL

SEQ ID NO: 598092 - protein, 15 aa, Homo sapiens
  CDR3 for beta chain variable domain of TCR clone 299046 (TRBV6-6, TRBJ2-7)
CASSYSYGGSYEQYF

SEQ ID NO: 598093 - protein, 15 aa, Homo sapiens
  CDR3 for alpha chain variable domain of TCR clone 299047 (TRAV8-3, TRAJ11)
CAVGLLNSGYSTLTF

SEQ ID NO: 598094 - protein, 15 aa, Homo sapiens
  CDR3 for beta chain variable domain of TCR clone 299047 (TRBV6-4, TRBJ1-5)
CASSASSRINQPQHF

SEQ ID NO: 598095 - protein, 15 aa, Homo sapiens
  CDR3 for alpha chain variable domain of TCR clone 299048 (TRAV16, TRAJ17)
CALSGNKAAGNKPTF

SEQ ID NO: 598096 - protein, 16 aa, Homo sapiens
  CDR3 for beta chain variable domain of TCR clone 299048 (TRBV7-6, TRBJ1-6)
CASSSLPAGEYSPLHF

SEQ ID NO: 598097 - protein, 12 aa, Homo sapiens
  CDR3 for alpha chain variable domain of TCR clone 299049 (TRAV23/DV6, TRAJ33)
CAAEDSNDQLIW

SEQ ID NO: 598098 - protein, 14 aa, Homo sapiens
  CDR3 for beta chain variable domain of TCR clone 299049 (TRBV18, TRBJ1-5)
CASSRQQRNQPQHF

SEQ ID NO: 598099 - protein, 15 aa, Homo sapiens
  CDR3 for alpha chain variable domain of TCR clone 299050 (TRAV3, TRAJ22)
CAVRDRGGSARQLPF

SEQ ID NO: 598100 - protein, 15 aa, Homo sapiens
  CDR3 for beta chain variable domain of TCR clone 299050 (TRBV20-1, TRBJ1-1)
CSASRGVTGNTEAFF

SEQ ID NO: 598101 - protein, 15 aa, Homo sapiens
  CDR3 for alpha chain variable domain of TCR clone 299051 (TRAV8-3, TRAJ45)
CASSYSGGGADGLTF

SEQ ID NO: 598102 - protein, 12 aa, Homo sapiens
  CDR3 for beta chain variable domain of TCR clone 299051 (TRBV19, TRBJ2-7)
CASTDRGYEQYF

SEQ ID NO: 598103 - protein, 14 aa, Homo sapiens
  CDR3 for alpha chain variable domain of TCR clone 299052 (TRAV17, TRAJ57)
CATDPQGGSEKLVF

SEQ ID NO: 598104 - protein, 13 aa, Homo sapiens
  CDR3 for beta chain variable domain of TCR clone 299052 (TRBV10-3, TRBJ2-7)
CASKLEVNYEQYF

SEQ ID NO: 598105 - protein, 12 aa, Homo sapiens
  CDR3 for alpha chain variable domain of TCR clone 299053 (TRAV2, TRAJ31)
CAVEDNTARLMF

SEQ ID NO: 598106 - protein, 14 aa, Homo sapiens
  CDR3 for beta chain variable domain of TCR clone 299053 (TRBV19, TRBJ2-5)
CGSSMTGQQETQYF

SEQ ID NO: 598107 - protein, 12 aa, Homo sapiens
  CDR3 for alpha chain variable domain of TCR clone 299054 (TRAV1-1, TRAJ20)
CAVIEDDYKLSF

SEQ ID NO: 598108 - protein, 18 aa, Homo sapiens
  CDR3 for beta chain variable domain of TCR clone 299054 (TRBV20-1, TRBJ2-3)
CSAYGLAGGPGTTDTQYF

SEQ ID NO: 598109 - protein, 14 aa, Homo sapiens
  CDR3 for alpha chain variable domain of TCR clone 299055 (TRAV12-2, TRAJ13)
CAVKKTGGYQKVTF

SEQ ID NO: 598110 - protein, 18 aa, Homo sapiens
  CDR3 for beta chain variable domain of TCR clone 299055 (TRBV12-4, TRBJ2-2)
CASRPFGAGALNTGELFF

SEQ ID NO: 598111 - protein, 10 aa, Homo sapiens
  CDR3 for alpha chain variable domain of TCR clone 299056 (TRAV34, TRAJ44)
TTGTASKLTF

SEQ ID NO: 598112 - protein, 15 aa, Homo sapiens
  CDR3 for beta chain variable domain of TCR clone 299056 (TRBV5-7, TRBJ2-7)
CASSLGPGRGHEQYF

SEQ ID NO: 598113 - protein, 11 aa, Homo sapiens
  CDR3 for alpha chain variable domain of TCR clone 299057 (TRAV2, TRAJ13)
CASGGYQKVTF

SEQ ID NO: 598114 - protein, 16 aa, Homo sapiens
  CDR3 for beta chain variable domain of TCR clone 299057 (TRBV2, TRBJ1-5)
CASSELHKSGFQPQHF

SEQ ID NO: 598115 - protein, 14 aa, Homo sapiens
  CDR3 for alpha chain variable domain of TCR clone 299058 (TRAV35, TRAJ40)
CAGSTTSGTYKYIF

SEQ ID NO: 598116 - protein, 17 aa, Homo sapiens
  CDR3 for beta chain variable domain of TCR clone 299058 (TRBV13, TRBJ2-3)
CASSLSRVAGGRNTQYF

SEQ ID NO: 598117 - protein, 22 aa, Homo sapiens
  CDR3 for alpha chain variable domain of TCR clone 299059 (TRAV12-2, TRAJ32)
CSSETPSPVIQPPKSATNKLIF

SEQ ID NO: 598118 - protein, 16 aa, Homo sapiens
  CDR3 for beta chain variable domain of TCR clone 299059 (TRBV12-4, TRBJ1-5)
CASSRPVGGSNQPQHF

SEQ ID NO: 598119 - protein, 12 aa, Homo sapiens
  CDR3 for alpha chain variable domain of TCR clone 299060 (TRAV9-2, TRAJ36)
CALKKGANNLFF

SEQ ID NO: 598120 - protein, 14 aa, Homo sapiens
  CDR3 for beta chain variable domain of TCR clone 299060 (TRBV12-4, TRBJ1-1)
CASSLGTGGTEAFF

SEQ ID NO: 598121 - protein, 13 aa, Homo sapiens
  CDR3 for alpha chain variable domain of TCR clone 299061 (TRAV2, TRAJ15)
CAVASQAGTAQIF

SEQ ID NO: 598122 - protein, 15 aa, Homo sapiens
  CDR3 for beta chain variable domain of TCR clone 299061 (TRBV28, TRBJ2-3)
CASSPDRQGANTQYF

SEQ ID NO: 598123 - protein, 14 aa, Homo sapiens
  CDR3 for alpha chain variable domain of TCR clone 299062 (TRAV3, TRAJ22)
CAVRDYGSARQLTF

SEQ ID NO: 598124 - protein, 13 aa, Homo sapiens
  CDR3 for beta chain variable domain of TCR clone 299062 (TRBV11-2, TRBJ2-5)
CASGDGAKETQYF

SEQ ID NO: 598125 - protein, 13 aa, Homo sapiens
  CDR3 for alpha chain variable domain of TCR clone 299063 (TRAV22, TRAJ26)
CAVEHNYGQNFVF

SEQ ID NO: 598126 - protein, 16 aa, Homo sapiens
  CDR3 for beta chain variable domain of TCR clone 299063 (TRBV7-9, TRBJ1-2)
CASSLGFSSGEDGYTF

SEQ ID NO: 598127 - protein, 14 aa, Homo sapiens
  CDR3 for alpha chain variable domain of TCR clone 299064 (TRAV8-6, TRAJ53)
CAVSDIGSNYKLTF

SEQ ID NO: 598128 - protein, 12 aa, Homo sapiens
  CDR3 for beta chain variable domain of TCR clone 299064 (TRBV2, TRBJ2-1)
GRGLPSYNEQFF

SEQ ID NO: 598129 - protein, 12 aa, Homo sapiens
  CDR3 for alpha chain variable domain of TCR clone 299065 (TRAV1-1, TRAJ8)
CAGGTGFQKLVF

SEQ ID NO: 598130 - protein, 15 aa, Homo sapiens
  CDR3 for beta chain variable domain of TCR clone 299065 (TRBV7-9, TRBJ1-4)
CATSRTGGFNEKLFF

SEQ ID NO: 598131 - protein, 19 aa, Homo sapiens
  CDR3 for alpha chain variable domain of TCR clone 299066 (TRAV21, TRAJ45)
CAAEAPRGDQEEVLTDSPF

SEQ ID NO: 598132 - protein, 12 aa, Homo sapiens
  CDR3 for beta chain variable domain of TCR clone 299066 (TRBV29-1, TRBJ1-3)
CSTRDSGNTIYF

SEQ ID NO: 598133 - protein, 13 aa, Homo sapiens
  CDR3 for alpha chain variable domain of TCR clone 299067 (TRAV8-6, TRAJ49)
CAVITNTGNQFYF

SEQ ID NO: 598134 - protein, 14 aa, Homo sapiens
  CDR3 for beta chain variable domain of TCR clone 299067 (TRBV15, TRBJ2-5)
CATSIGGLGETRYF

SEQ ID NO: 598135 - protein, 23 aa, Homo sapiens
  CDR3 for alpha chain variable domain of TCR clone 299068 (TRAV1-1, TRAJ11)
LLQELQMKDSASYFCAGYNTLTF

SEQ ID NO: 598136 - protein, 15 aa, Homo sapiens
  CDR3 for beta chain variable domain of TCR clone 299068 (TRBV6-5, TRBJ2-1)
CASRGDFDSYNEQFF

SEQ ID NO: 598137 - protein, 14 aa, Homo sapiens
  CDR3 for alpha chain variable domain of TCR clone 299069 (TRAV17, TRAJ5)
CATVALTGRRGLTF

SEQ ID NO: 598138 - protein, 14 aa, Homo sapiens
  CDR3 for beta chain variable domain of TCR clone 299069 (TRBV28, TRBJ2-7)
CASSPYGMAYEQYF

SEQ ID NO: 598139 - protein, 13 aa, Homo sapiens
  CDR3 for alpha chain variable domain of TCR clone 299070 (TRAV5, TRAJ30)
CAEIANRDNKIIF

SEQ ID NO: 598140 - protein, 14 aa, Homo sapiens
  CDR3 for beta chain variable domain of TCR clone 299070 (TRBV4-1, TRBJ2-2)
CASSQAVNTGELFF

SEQ ID NO: 598141 - protein, 13 aa, Homo sapiens
  CDR3 for alpha chain variable domain of TCR clone 299071 (TRAV2, TRAJ40)
CAVVTSGTYKYIF

SEQ ID NO: 598142 - protein, 16 aa, Homo sapiens
  CDR3 for beta chain variable domain of TCR clone 299071 (TRBV5-1, TRBJ2-5)
CASSSSGLGGAETQYF

SEQ ID NO: 598143 - protein, 16 aa, Homo sapiens
  CDR3 for alpha chain variable domain of TCR clone 299072 (TRAV30, TRAJ24)
CGTEIVDADSWGKFQI

SEQ ID NO: 598144 - protein, 15 aa, Homo sapiens
  CDR3 for beta chain variable domain of TCR clone 299072 (TRBV7-9, TRBJ1-4)
CASSARTGGNEKLFF

SEQ ID NO: 598145 - protein, 17 aa, Homo sapiens
  CDR3 for alpha chain variable domain of TCR clone 299073 (TRAV3, TRAJ38)
CAVSDCLNAGNNRKLIW

SEQ ID NO: 598146 - protein, 16 aa, Homo sapiens
  CDR3 for beta chain variable domain of TCR clone 299073 (TRBV5-5, TRBJ1-5)
CASSDRESISPSILVM

SEQ ID NO: 598147 - protein, 14 aa, Homo sapiens
  CDR3 for alpha chain variable domain of TCR clone 299074 (TRAV8-3, TRAJ27)
CAVGARAMQANQPL

SEQ ID NO: 598148 - protein, 14 aa, Homo sapiens
  CDR3 for beta chain variable domain of TCR clone 299074 (TRBV19, TRBJ2-1)
CASPTFVLSGEQFF

SEQ ID NO: 598149 - protein, 14 aa, Homo sapiens
  CDR3 for alpha chain variable domain of TCR clone 299075 (TRAV17, TRAJ16)
CATADFSDGQKLLF

SEQ ID NO: 598150 - protein, 19 aa, Homo sapiens
  CDR3 for beta chain variable domain of TCR clone 299075 (TRBV6-3, TRBJ1-2)
CASSYSKGRTGPPNYGYTF

SEQ ID NO: 598151 - protein, 14 aa, Homo sapiens
  CDR3 for alpha chain variable domain of TCR clone 299076 (TRAV3, TRAJ34)
CAVRDINNTDKLIF

SEQ ID NO: 598152 - protein, 13 aa, Homo sapiens
  CDR3 for beta chain variable domain of TCR clone 299076 (TRBV3-1, TRBJ2-2)
CASLARGSGELFF

SEQ ID NO: 598153 - protein, 13 aa, Homo sapiens
  CDR3 for alpha chain variable domain of TCR clone 299077 (TRAV36/DV7, TRAJ49)
CAVEANTGNQFYF

SEQ ID NO: 598154 - protein, 14 aa, Homo sapiens
  CDR3 for beta chain variable domain of TCR clone 299077 (TRBV20-1, TRBJ2-5)
CSASSGRAAETQSF

SEQ ID NO: 598155 - protein, 13 aa, Homo sapiens
  CDR3 for alpha chain variable domain of TCR clone 299078 (TRAV12-1, TRAJ17)
CVVFLTAGNKLTF

SEQ ID NO: 598156 - protein, 13 aa, Homo sapiens
  CDR3 for beta chain variable domain of TCR clone 299078 (TRBV5-5, TRBJ1-2)
CASSFWRGEDYTF

SEQ ID NO: 598157 - protein, 14 aa, Homo sapiens
  CDR3 for alpha chain variable domain of TCR clone 299079 (TRAV26-1, TRAJ38)
CIADNAGNNRKLIW

SEQ ID NO: 598158 - protein, 15 aa, Homo sapiens
  CDR3 for beta chain variable domain of TCR clone 299079 (TRBV19, TRBJ2-1)
CASSSPGVPLDEQFF

SEQ ID NO: 598159 - protein, 17 aa, Homo sapiens
  CDR3 for alpha chain variable domain of TCR clone 299080 (TRAV1-1, TRAJ28)
CAVDPAYSGAGSYQLTF

SEQ ID NO: 598160 - protein, 20 aa, Homo sapiens
  CDR3 for beta chain variable domain of TCR clone 299080 (TRBV28, TRBJ2-1)
CASTPIGRSPGLAGGNEQFF

SEQ ID NO: 598161 - protein, 11 aa, Homo sapiens
  CDR3 for alpha chain variable domain of TCR clone 299081 (TRAV21, TRAJ7)
CAAYGNNRLAF

SEQ ID NO: 598162 - protein, 14 aa, Homo sapiens
  CDR3 for beta chain variable domain of TCR clone 299081 (TRBV4-1, TRBJ2-7)
CASSPVAGGDEQYF

SEQ ID NO: 598163 - protein, 13 aa, Homo sapiens
  CDR3 for alpha chain variable domain of TCR clone 299082 (TRAV1-2, TRAJ9)
CAALNTGGFKTIF

SEQ ID NO: 598164 - protein, 16 aa, Homo sapiens
  CDR3 for beta chain variable domain of TCR clone 299082 (TRBV19, TRBJ2-2)
CASTIGARAGAGELFF

SEQ ID NO: 598165 - protein, 16 aa, Homo sapiens
  CDR3 for alpha chain variable domain of TCR clone 299083 (TRAV12-3, TRAJ53)
CAMSVGSGGSKYKLTF

SEQ ID NO: 598166 - protein, 13 aa, Homo sapiens
  CDR3 for beta chain variable domain of TCR clone 299083 (TRBV7-6, TRBJ1-2)
CASSLVADYGYTF

SEQ ID NO: 598167 - protein, 19 aa, Homo sapiens
  CDR3 for alpha chain variable domain of TCR clone 299084 (TRAV29/DV5, TRAJ49)
CSVLLCSKLTVDTGNQFYF

SEQ ID NO: 598168 - protein, 17 aa, Homo sapiens
  CDR3 for beta chain variable domain of TCR clone 299084 (TRBV13, TRBJ2-3)
CASSLSRVAGGWNTQYF

SEQ ID NO: 598169 - protein, 13 aa, Homo sapiens
  CDR3 for alpha chain variable domain of TCR clone 299085 (TRAV21, TRAJ20)
CAVGLRVDYKLSF

SEQ ID NO: 598170 - protein, 15 aa, Homo sapiens
  CDR3 for beta chain variable domain of TCR clone 299085 (TRBV7-3, TRBJ2-1)
CASSPTGGGEVEQFF

SEQ ID NO: 598171 - protein, 18 aa, Homo sapiens
  CDR3 for alpha chain variable domain of TCR clone 299086 (TRAV26-2, TRAJ45)
CILRVDKYSGGGADGLTF

SEQ ID NO: 598172 - protein, 16 aa, Homo sapiens
  CDR3 for beta chain variable domain of TCR clone 299086 (TRBV19, TRBJ2-1)
CASSKAGPSSYNEQFF

SEQ ID NO: 598173 - protein, 15 aa, Homo sapiens
  CDR3 for alpha chain variable domain of TCR clone 299087 (TRAV3, TRAJ13)
CAVRVYSGGYRKVTF

SEQ ID NO: 598174 - protein, 15 aa, Homo sapiens
  CDR3 for beta chain variable domain of TCR clone 299087 (TRBV20-1, TRBJ2-7)
CSARDRVSGMDEQYF

SEQ ID NO: 598175 - protein, 14 aa, Homo sapiens
  CDR3 for alpha chain variable domain of TCR clone 299088 (TRAV1-2, TRAJ16)
CAVNRVSDGQKLLF

SEQ ID NO: 598176 - protein, 15 aa, Homo sapiens
  CDR3 for beta chain variable domain of TCR clone 299088 (TRBV27, TRBJ2-3)
CASSSLAGVIDTQYF

SEQ ID NO: 598177 - protein, 12 aa, Homo sapiens
  CDR3 for alpha chain variable domain of TCR clone 299089 (TRAV13-2, TRAJ23)
CAERHRGGKLIF

SEQ ID NO: 598178 - protein, 16 aa, Homo sapiens
  CDR3 for beta chain variable domain of TCR clone 299089 (TRBV7-2, TRBJ2-6)
CAILSGVASGANVLTF

SEQ ID NO: 598179 - protein, 14 aa, Homo sapiens
  CDR3 for alpha chain variable domain of TCR clone 299090 (TRAV12-2, TRAJ6)
CAVMTFGRGTSLIV

SEQ ID NO: 598180 - protein, 20 aa, Homo sapiens
  CDR3 for beta chain variable domain of TCR clone 299090 (TRBV7-8, TRBJ2-2)
CASSHLFPGPTIHITGELFF

SEQ ID NO: 598181 - protein, 16 aa, Homo sapiens
  CDR3 for alpha chain variable domain of TCR clone 299091 (TRAV17, TRAJ34)
CATDSLEGTTSSSLGL

SEQ ID NO: 598182 - protein, 13 aa, Homo sapiens
  CDR3 for beta chain variable domain of TCR clone 299091 (TRBV11-2, TRBJ2-7)
CASSGTRPYEQYF

SEQ ID NO: 598183 - protein, 13 aa, Homo sapiens
  CDR3 for alpha chain variable domain of TCR clone 299092 (TRAV21, TRAJ57)
CAVTQGGSEKLVF

SEQ ID NO: 598184 - protein, 13 aa, Homo sapiens
  CDR3 for beta chain variable domain of TCR clone 299092 (TRBV12-5, TRBJ1-2)
CASGVRTGNSYTF

SEQ ID NO: 598185 - protein, 12 aa, Homo sapiens
  CDR3 for alpha chain variable domain of TCR clone 299093 (TRAV35, TRAJ12)
CAGMDSSYKLIF

SEQ ID NO: 598186 - protein, 14 aa, Homo sapiens
  CDR3 for beta chain variable domain of TCR clone 299093 (TRBV28, TRBJ2-5)
CASSLYRGSETQYF

SEQ ID NO: 598187 - protein, 14 aa, Homo sapiens
  CDR3 for alpha chain variable domain of TCR clone 299094 (TRAV27, TRAJ44)
CAASFTGTASKLTF

SEQ ID NO: 598188 - protein, 12 aa, Homo sapiens
  CDR3 for beta chain variable domain of TCR clone 299094 (TRBV12-4, TRBJ2-3)
CASSTLPDTQYF

SEQ ID NO: 598189 - protein, 14 aa, Homo sapiens
  CDR3 for alpha chain variable domain of TCR clone 299095 (TRAV8-4, TRAJ8)
CAGSEDTGFQKLVF

SEQ ID NO: 598190 - protein, 16 aa, Homo sapiens
  CDR3 for beta chain variable domain of TCR clone 299095 (TRBV7-3, TRBJ2-1)
CASSKPLAGGYNEQFF

SEQ ID NO: 598191 - protein, 14 aa, Homo sapiens
  CDR3 for alpha chain variable domain of TCR clone 299096 (TRAV17, TRAJ45)
CATASGGGADGPTF

SEQ ID NO: 598192 - protein, 15 aa, Homo sapiens
  CDR3 for beta chain variable domain of TCR clone 299096 (TRBV11-2, TRBJ2-1)
CASSRNRGLMYEQFF

SEQ ID NO: 598193 - protein, 14 aa, Homo sapiens
  CDR3 for alpha chain variable domain of TCR clone 299097 (TRAV9-2, TRAJ39)
CALYIHNEGNMLTF

SEQ ID NO: 598194 - protein, 15 aa, Homo sapiens
  CDR3 for beta chain variable domain of TCR clone 299097 (TRBV4-1, TRBJ1-4)
CASSDTGGTNEKLFF

SEQ ID NO: 598195 - protein, 13 aa, Homo sapiens
  CDR3 for alpha chain variable domain of TCR clone 299098 (TRAV13-1, TRAJ9)
CAASGTGGFKTIF

SEQ ID NO: 598196 - protein, 16 aa, Homo sapiens
  CDR3 for beta chain variable domain of TCR clone 299098 (TRBV7-3, TRBJ2-2)
CASNLKRGTLSGELFF

SEQ ID NO: 598197 - protein, 14 aa, Homo sapiens
  CDR3 for alpha chain variable domain of TCR clone 299099 (TRAV1-2, TRAJ16)
CAVNRFSDGQKLLF

SEQ ID NO: 598198 - protein, 13 aa, Homo sapiens
  CDR3 for beta chain variable domain of TCR clone 299099 (TRBV7-6, TRBJ1-2)
CASSLVADYGYAF

SEQ ID NO: 598199 - protein, 11 aa, Homo sapiens
  CDR3 for alpha chain variable domain of TCR clone 299100 (TRAV14/DV4, TRAJ43)
CAMREREDMRF

SEQ ID NO: 598200 - protein, 14 aa, Homo sapiens
  CDR3 for beta chain variable domain of TCR clone 299100 (TRBV5-1, TRBJ2-7)
CASSLTSGGYEQYF

SEQ ID NO: 598201 - protein, 13 aa, Homo sapiens
  CDR3 for alpha chain variable domain of TCR clone 299101 (TRAV8-2, TRAJ13)
CVVSDLRYQKVTF

SEQ ID NO: 598202 - protein, 15 aa, Homo sapiens
  CDR3 for beta chain variable domain of TCR clone 299101 (TRBV7-9, TRBJ2-7)
CASSPGGGLTYEQYF

SEQ ID NO: 598203 - protein, 13 aa, Homo sapiens
  CDR3 for alpha chain variable domain of TCR clone 299102 (TRAV2, TRAJ29)
CAGYSSGNTPLVF

SEQ ID NO: 598204 - protein, 14 aa, Homo sapiens
  CDR3 for beta chain variable domain of TCR clone 299102 (TRBV7-9, TRBJ1-1)
CASSLGGLKTEAFF

SEQ ID NO: 598205 - protein, 14 aa, Homo sapiens
  CDR3 for alpha chain variable domain of TCR clone 299103 (TRAV8-2, TRAJ37)
CVVSISGNTGKLIF

SEQ ID NO: 598206 - protein, 11 aa, Homo sapiens
  CDR3 for beta chain variable domain of TCR clone 299103 (TRBV18, TRBJ2-5)
CASSPRETQYY

SEQ ID NO: 598207 - protein, 13 aa, Homo sapiens
  CDR3 for alpha chain variable domain of TCR clone 299104 (TRAV12-2, TRAJ20)
CAVYPSNDYKPSF

SEQ ID NO: 598208 - protein, 14 aa, Homo sapiens
  CDR3 for beta chain variable domain of TCR clone 299104 (TRBV7-3, TRBJ2-1)
CASSLAGGTNEQFF

SEQ ID NO: 598209 - protein, 14 aa, Homo sapiens
  CDR3 for alpha chain variable domain of TCR clone 299105 (TRAV8-2, TRAJ4)
CVASPSGGSNKLIF

SEQ ID NO: 598210 - protein, 15 aa, Homo sapiens
  CDR3 for beta chain variable domain of TCR clone 299105 (TRBV4-1, TRBJ1-4)
CASSDTGGTNEKLFF

SEQ ID NO: 598211 - protein, 15 aa, Homo sapiens
  CDR3 for alpha chain variable domain of TCR clone 299106 (TRAV13-1, TRAJ57)
CAASNTQGGTEKLVF

SEQ ID NO: 598212 - protein, 16 aa, Homo sapiens
  CDR3 for beta chain variable domain of TCR clone 299106 (TRBV19, TRBJ2-1)
CASSKAGPSSYNEQFF

SEQ ID NO: 598213 - protein, 12 aa, Homo sapiens
  CDR3 for alpha chain variable domain of TCR clone 299107 (TRAV2, TRAJ5)
CALDPGRRALTF

SEQ ID NO: 598214 - protein, 13 aa, Homo sapiens
  CDR3 for beta chain variable domain of TCR clone 299107 (TRBV15, TRBJ1-6)
CATSGGLNSPLHF

SEQ ID NO: 598215 - protein, 12 aa, Homo sapiens
  CDR3 for alpha chain variable domain of TCR clone 299108 (TRAV12-2, TRAJ30)
CAVRNRDDKIIF

SEQ ID NO: 598216 - protein, 11 aa, Homo sapiens
  CDR3 for beta chain variable domain of TCR clone 299108 (TRBV6-3, TRBJ1-5)
GSTGSNQPQHF

SEQ ID NO: 598217 - protein, 17 aa, Homo sapiens
  CDR3 for alpha chain variable domain of TCR clone 299109 (TRAV3, TRAJ6)
CAVRDGPRAGGSYIPPF

SEQ ID NO: 598218 - protein, 16 aa, Homo sapiens
  CDR3 for beta chain variable domain of TCR clone 299109 (TRBV7-7, TRBJ2-1)
CASSLASGTSYNEQFF

SEQ ID NO: 598219 - protein, 11 aa, Homo sapiens
  CDR3 for alpha chain variable domain of TCR clone 299110 (TRAV21, TRAJ9)
CAVPGGFKTIL

SEQ ID NO: 598220 - protein, 17 aa, Homo sapiens
  CDR3 for beta chain variable domain of TCR clone 299110 (TRBV7-9, TRBJ2-5)
CATSGGARDPVLRARHA

SEQ ID NO: 598221 - protein, 14 aa, Homo sapiens
  CDR3 for alpha chain variable domain of TCR clone 299111 (TRAV12-3, TRAJ54)
CAMRGIQGAQKLVF

SEQ ID NO: 598222 - protein, 11 aa, Homo sapiens
  CDR3 for beta chain variable domain of TCR clone 299111 (TRBV5-1, TRBJ1-1)
CASSSGGEAFF

SEQ ID NO: 598223 - protein, 13 aa, Homo sapiens
  CDR3 for alpha chain variable domain of TCR clone 299112 (TRAV8-6, TRAJ49)
CAVITITGNQFYF

SEQ ID NO: 598224 - protein, 14 aa, Homo sapiens
  CDR3 for beta chain variable domain of TCR clone 299112 (TRBV19, TRBJ2-1)
CASPTFVLSGEQFF

SEQ ID NO: 598225 - protein, 13 aa, Homo sapiens
  CDR3 for alpha chain variable domain of TCR clone 299113 (TRAV21, TRAJ57)
CAVTQGGSEKLFC

SEQ ID NO: 598226 - protein, 16 aa, Homo sapiens
  CDR3 for beta chain variable domain of TCR clone 299113 (TRBV29-1, TRBJ2-7)
CSVEDAEDGTAYEQYF

SEQ ID NO: 598227 - protein, 14 aa, Homo sapiens
  CDR3 for alpha chain variable domain of TCR clone 299114 (TRAV17, TRAJ34)
CATDSLEGTDKLIF

SEQ ID NO: 598228 - protein, 16 aa, Homo sapiens
  CDR3 for beta chain variable domain of TCR clone 299114 (TRBV7-2, TRBJ2-5)
CASSLVLWTKQETQYF

SEQ ID NO: 598229 - protein, 14 aa, Homo sapiens
  CDR3 for alpha chain variable domain of TCR clone 299115 (TRAV12-1, TRAJ13)
CVVIDSGGYQKVTF

SEQ ID NO: 598230 - protein, 14 aa, Homo sapiens
  CDR3 for beta chain variable domain of TCR clone 299115 (TRBV4-2, TRBJ2-1)
CASGLDRAYNEQFF

SEQ ID NO: 598231 - protein, 13 aa, Homo sapiens
  CDR3 for alpha chain variable domain of TCR clone 299116 (TRAV27, TRAJ45)
CRSSGGGADGLTF

SEQ ID NO: 598232 - protein, 17 aa, Homo sapiens
  CDR3 for beta chain variable domain of TCR clone 299116 (TRBV11-2, TRBJ2-1)
CASSLYPPGVEYNEQCF

SEQ ID NO: 598233 - protein, 12 aa, Homo sapiens
  CDR3 for alpha chain variable domain of TCR clone 299117 (TRAV12-1, TRAJ40)
CVVPSGTYKYIF

SEQ ID NO: 598234 - protein, 15 aa, Homo sapiens
  CDR3 for beta chain variable domain of TCR clone 299117 (TRBV12-4, TRBJ2-1)
CASSPLSGRNKEQFF

SEQ ID NO: 598235 - protein, 20 aa, Homo sapiens
  CDR3 for alpha chain variable domain of TCR clone 299118 (TRAV12-3, TRAJ41)
SLFIRDSQPSDSTTPEALNF

SEQ ID NO: 598236 - protein, 15 aa, Homo sapiens
  CDR3 for beta chain variable domain of TCR clone 299118 (TRBV5-1, TRBJ2-7)
CASSLDLTSSYEQYF

SEQ ID NO: 598237 - protein, 13 aa, Homo sapiens
  CDR3 for alpha chain variable domain of TCR clone 299119 (TRAV1-2, TRAJ8)
CAVGSTGFQKLVF

SEQ ID NO: 598238 - protein, 15 aa, Homo sapiens
  CDR3 for beta chain variable domain of TCR clone 299119 (TRBV20-1, TRBJ2-5)
CSAEGTGGLQETQYF

SEQ ID NO: 598239 - protein, 14 aa, Homo sapiens
  CDR3 for alpha chain variable domain of TCR clone 299120 (TRAV23/DV6, TRAJ8)
CAASKNTGFQKLLF

SEQ ID NO: 598240 - protein, 16 aa, Homo sapiens
  CDR3 for beta chain variable domain of TCR clone 299120 (TRBV4-1, TRBJ2-6)
CASSQVGEPGANVLTS

SEQ ID NO: 598241 - protein, 13 aa, Homo sapiens
  CDR3 for alpha chain variable domain of TCR clone 299121 (TRAV8-3, TRAJ44)
CAVVPGTASKLTF

SEQ ID NO: 598242 - protein, 13 aa, Homo sapiens
  CDR3 for beta chain variable domain of TCR clone 299121 (TRBV2, TRBJ1-1)
CASRWTVNTEAFF

SEQ ID NO: 598243 - protein, 18 aa, Homo sapiens
  CDR3 for alpha chain variable domain of TCR clone 299122 (TRAV21, TRAJ52)
CAVRPSPAGGTSYGKLTF

SEQ ID NO: 598244 - protein, 13 aa, Homo sapiens
  CDR3 for beta chain variable domain of TCR clone 299122 (TRBV7-2, TRBJ1-6)
CASSLKFDSPLHF

SEQ ID NO: 598245 - protein, 13 aa, Homo sapiens
  CDR3 for alpha chain variable domain of TCR clone 299123 (TRAV2, TRAJ40)
CAVVTSGTYKYIF

SEQ ID NO: 598246 - protein, 15 aa, Homo sapiens
  CDR3 for beta chain variable domain of TCR clone 299123 (TRBV19, TRBJ2-4)
CASSTPGIAKNMQYF

SEQ ID NO: 598247 - protein, 14 aa, Homo sapiens
  CDR3 for alpha chain variable domain of TCR clone 299124 (TRAV1-2, TRAJ8)
CAVREATGFQNLVF

SEQ ID NO: 598248 - protein, 14 aa, Homo sapiens
  CDR3 for beta chain variable domain of TCR clone 299124 (TRBV6-1, TRBJ1-3)
CASVQGGGGNTIYF

SEQ ID NO: 598249 - protein, 12 aa, Homo sapiens
  CDR3 for alpha chain variable domain of TCR clone 299125 (TRAV12-3, TRAJ40)
CAMSSGTYKYIF

SEQ ID NO: 598250 - protein, 16 aa, Homo sapiens
  CDR3 for beta chain variable domain of TCR clone 299125 (TRBV5-7, TRBJ2-5)
CASIRGQTGYQETQYF

SEQ ID NO: 598251 - protein, 12 aa, Homo sapiens
  CDR3 for alpha chain variable domain of TCR clone 299126 (TRAV9-2, TRAJ5)
CALSPGRRALTF

SEQ ID NO: 598252 - protein, 13 aa, Homo sapiens
  CDR3 for beta chain variable domain of TCR clone 299126 (TRBV4-2, TRBJ1-1)
CASSQAGNTEAFF

SEQ ID NO: 598253 - protein, 16 aa, Homo sapiens
  CDR3 for alpha chain variable domain of TCR clone 299127 (TRAV8-3, TRAJ44)
CAVGPLNTGTASKLTF

SEQ ID NO: 598254 - protein, 18 aa, Homo sapiens
  CDR3 for beta chain variable domain of TCR clone 299127 (TRBV3-1, TRBJ2-1)
CASSQDPPGRPLFDEQFF

SEQ ID NO: 598255 - protein, 11 aa, Homo sapiens
  CDR3 for alpha chain variable domain of TCR clone 299128 (TRAV1-2, TRAJ31)
CAVNNNARLMF

SEQ ID NO: 598256 - protein, 13 aa, Homo sapiens
  CDR3 for beta chain variable domain of TCR clone 299128 (TRBV12-4, TRBJ1-5)
CASSPDRAQPQHF

SEQ ID NO: 598257 - protein, 14 aa, Homo sapiens
  CDR3 for alpha chain variable domain of TCR clone 299129 (TRAV23/DV6, TRAJ4)
CEANLSGGYNKLIF

SEQ ID NO: 598258 - protein, 11 aa, Homo sapiens
  CDR3 for beta chain variable domain of TCR clone 299129 (TRBV7-9, TRBJ2-3)
CASSPTDTQYF

SEQ ID NO: 598259 - protein, 10 aa, Homo sapiens
  CDR3 for alpha chain variable domain of TCR clone 299130 (TRAV12-3, TRAJ49)
CAMHDDQFYF

SEQ ID NO: 598260 - protein, 13 aa, Homo sapiens
  CDR3 for beta chain variable domain of TCR clone 299130 (TRBV12-4, TRBJ1-1)
CASSPGTGCEAFF

SEQ ID NO: 598261 - protein, 17 aa, Homo sapiens
  CDR3 for alpha chain variable domain of TCR clone 299131 (TRAV3, TRAJ42)
CAVRHRDYGGSQGNLIF

SEQ ID NO: 598262 - protein, 14 aa, Homo sapiens
  CDR3 for beta chain variable domain of TCR clone 299131 (TRBV19, TRBJ2-5)
CASSMTGQQETQYF

SEQ ID NO: 598263 - protein, 17 aa, Homo sapiens
  CDR3 for alpha chain variable domain of TCR clone 299132 (TRAV16, TRAJ42)
CALSPKLYGGSQGNLTF

SEQ ID NO: 598264 - protein, 13 aa, Homo sapiens
  CDR3 for beta chain variable domain of TCR clone 299132 (TRBV19, TRBJ1-5)
CASSTRRDQPQHF

SEQ ID NO: 598265 - protein, 13 aa, Homo sapiens
  CDR3 for alpha chain variable domain of TCR clone 299133 (TRAV29/DV5, TRAJ31)
CAASRNNNARLMF

SEQ ID NO: 598266 - protein, 14 aa, Homo sapiens
  CDR3 for beta chain variable domain of TCR clone 299133 (TRBV7-9, TRBJ2-2)
CASSLVQDAGELFF

SEQ ID NO: 598267 - protein, 15 aa, Homo sapiens
  CDR3 for alpha chain variable domain of TCR clone 299134 (TRAV25, TRAJ53)
CPTSNSGGSNYKLTF

SEQ ID NO: 598268 - protein, 12 aa, Homo sapiens
  CDR3 for beta chain variable domain of TCR clone 299134 (TRBV12-4, TRBJ1-3)
CASSFSGNTIYF

SEQ ID NO: 598269 - protein, 15 aa, Homo sapiens
  CDR3 for alpha chain variable domain of TCR clone 299135 (TRAV17, TRAJ37)
CATDHGSSNTGKLIF

SEQ ID NO: 598270 - protein, 14 aa, Homo sapiens
  CDR3 for beta chain variable domain of TCR clone 299135 (TRBV7-2, TRBJ2-3)
CASSRTSGADTQCF

SEQ ID NO: 598271 - protein, 13 aa, Homo sapiens
  CDR3 for alpha chain variable domain of TCR clone 299136 (TRAV21, TRAJ20)
CAVGLRVDYKLSF

SEQ ID NO: 598272 - protein, 18 aa, Homo sapiens
  CDR3 for beta chain variable domain of TCR clone 299136 (TRBV20-1, TRBJ2-2)
CSARVQTARPAGTGELFF

SEQ ID NO: 598273 - protein, 16 aa, Homo sapiens
  CDR3 for alpha chain variable domain of TCR clone 299137 (TRAV30, TRAJ24)
CGTEIVDADSWGKFQF

SEQ ID NO: 598274 - protein, 12 aa, Homo sapiens
  CDR3 for beta chain variable domain of TCR clone 299137 (TRBV11-2, TRBJ2-2)
CASSLGCGELFF

SEQ ID NO: 598275 - protein, 14 aa, Homo sapiens
  CDR3 for alpha chain variable domain of TCR clone 299138 (TRAV25, TRAJ35)
CARRMEGFGNGLHC

SEQ ID NO: 598276 - protein, 13 aa, Homo sapiens
  CDR3 for beta chain variable domain of TCR clone 299138 (TRBV7-2, TRBJ1-4)
CASSIAGLEKLFF

SEQ ID NO: 598277 - protein, 15 aa, Homo sapiens
  CDR3 for alpha chain variable domain of TCR clone 299139 (TRAV23/DV6, TRAJ18)
CAARYRGSTLGRLYF

SEQ ID NO: 598278 - protein, 15 aa, Homo sapiens
  CDR3 for beta chain variable domain of TCR clone 299139 (TRBV19, TRBJ2-7)
CASSSAGTGDYEQYF

SEQ ID NO: 598279 - protein, 11 aa, Homo sapiens
  CDR3 for alpha chain variable domain of TCR clone 299140 (TRAV12-2, TRAJ31)
CAVTRWARLMF

SEQ ID NO: 598280 - protein, 14 aa, Homo sapiens
  CDR3 for beta chain variable domain of TCR clone 299140 (TRBV20-1, TRBJ1-1)
CSAQTRIGGTEAFF

SEQ ID NO: 598281 - protein, 14 aa, Homo sapiens
  CDR3 for alpha chain variable domain of TCR clone 299141 (TRAV13-1, TRAJ9)
CAASALTGGFKTIF

SEQ ID NO: 598282 - protein, 13 aa, Homo sapiens
  CDR3 for beta chain variable domain of TCR clone 299141 (TRBV20-1, TRBJ1-1)
CSAGNVGNTEAFF

SEQ ID NO: 598283 - protein, 15 aa, Homo sapiens
  CDR3 for alpha chain variable domain of TCR clone 299142 (TRAV26-1, TRAJ29)
CIVRVEGAGNTPLVF

SEQ ID NO: 598284 - protein, 15 aa, Homo sapiens
  CDR3 for beta chain variable domain of TCR clone 299142 (TRBV7-9, TRBJ1-5)
CASSQGHQPNQSQHF

SEQ ID NO: 598285 - protein, 16 aa, Homo sapiens
  CDR3 for alpha chain variable domain of TCR clone 299143 (TRAV12-2, TRAJ40)
CPVIRGGTSGTYKYIF

SEQ ID NO: 598286 - protein, 14 aa, Homo sapiens
  CDR3 for beta chain variable domain of TCR clone 299143 (TRBV20-1, TRBJ2-5)
CSARDGRAGETQYF

SEQ ID NO: 598287 - protein, 16 aa, Homo sapiens
  CDR3 for alpha chain variable domain of TCR clone 299144 (TRAV3, TRAJ6)
CAVRDGPGRRKLHTYI

SEQ ID NO: 598288 - protein, 14 aa, Homo sapiens
  CDR3 for beta chain variable domain of TCR clone 299144 (TRBV7-2, TRBJ2-7)
CASSPKTSFYEQYF

SEQ ID NO: 598289 - protein, 14 aa, Homo sapiens
  CDR3 for alpha chain variable domain of TCR clone 299145 (TRAV9-2, TRAJ39)
CALYIYNAGNMLTF

SEQ ID NO: 598290 - protein, 17 aa, Homo sapiens
  CDR3 for beta chain variable domain of TCR clone 299145 (TRBV10-3, TRBJ1-2)
CAISQTGSASGVDGYTF

SEQ ID NO: 598291 - protein, 13 aa, Homo sapiens
  CDR3 for alpha chain variable domain of TCR clone 299146 (TRAV13-1, TRAJ21)
CAASIYNFNKFYF

SEQ ID NO: 598292 - protein, 13 aa, Homo sapiens
  CDR3 for beta chain variable domain of TCR clone 299146 (TRBV27, TRBJ1-4)
CPSSLMGDEKLFF

SEQ ID NO: 598293 - protein, 14 aa, Homo sapiens
  CDR3 for alpha chain variable domain of TCR clone 299147 (TRAV26-1, TRAJ38)
CIAANAGNNRKLIW

SEQ ID NO: 598294 - protein, 15 aa, Homo sapiens
  CDR3 for beta chain variable domain of TCR clone 299147 (TRBV9, TRBJ2-1)
CASSLAGSSYNEQFF

SEQ ID NO: 598295 - protein, 14 aa, Homo sapiens
  CDR3 for alpha chain variable domain of TCR clone 299148 (TRAV12-3, TRAJ10)
SHLPLTGGGNQLTF

SEQ ID NO: 598296 - protein, 15 aa, Homo sapiens
  CDR3 for beta chain variable domain of TCR clone 299148 (TRBV6-6, TRBJ1-5)
CASSSIQGTNQPQHF

SEQ ID NO: 598297 - protein, 17 aa, Homo sapiens
  CDR3 for alpha chain variable domain of TCR clone 299149 (TRAV13-1, TRAJ52)
CAAGHNAGGTSYGKPTF

SEQ ID NO: 598298 - protein, 13 aa, Homo sapiens
  CDR3 for beta chain variable domain of TCR clone 299149 (TRBV7-2, TRBJ1-1)
CASNLKGAKVAFF

SEQ ID NO: 598299 - protein, 14 aa, Homo sapiens
  CDR3 for alpha chain variable domain of TCR clone 299150 (TRAV12-3, TRAJ53)
CGATSGGSIYKLTF

SEQ ID NO: 598300 - protein, 13 aa, Homo sapiens
  CDR3 for beta chain variable domain of TCR clone 299150 (TRBV19, TRBJ1-5)
CASSTQDGQPQHF

SEQ ID NO: 598301 - protein, 12 aa, Homo sapiens
  CDR3 for alpha chain variable domain of TCR clone 299151 (TRAV3, TRAJ20)
CAVRDHDYKLSF

SEQ ID NO: 598302 - protein, 13 aa, Homo sapiens
  CDR3 for beta chain variable domain of TCR clone 299151 (TRBV9, TRBJ2-7)
CASRVGQGGEQYF

SEQ ID NO: 598303 - protein, 13 aa, Homo sapiens
  CDR3 for alpha chain variable domain of TCR clone 299152 (TRAV26-2, TRAJ43)
CILRAVNNNDMRF

SEQ ID NO: 598304 - protein, 15 aa, Homo sapiens
  CDR3 for beta chain variable domain of TCR clone 299152 (TRBV7-2, TRBJ2-1)
CASTHGKGIYNEQFF

SEQ ID NO: 598305 - protein, 14 aa, Homo sapiens
  CDR3 for alpha chain variable domain of TCR clone 299153 (TRAV13-1, TRAJ35)
CAASKGGFGNVLHC

SEQ ID NO: 598306 - protein, 16 aa, Homo sapiens
  CDR3 for beta chain variable domain of TCR clone 299153 (TRBV25-1, TRBJ2-5)
CASSEMGSRAPETQYF

SEQ ID NO: 598307 - protein, 14 aa, Homo sapiens
  CDR3 for alpha chain variable domain of TCR clone 299154 (TRAV8-3, TRAJ31)
CAVGRALNNARLMF

SEQ ID NO: 598308 - protein, 15 aa, Homo sapiens
  CDR3 for beta chain variable domain of TCR clone 299154 (TRBV7-2, TRBJ2-2)
CASSLAGGLTGELFF

SEQ ID NO: 598309 - protein, 12 aa, Homo sapiens
  CDR3 for alpha chain variable domain of TCR clone 299155 (TRAV12-2, TRAJ10)
WGVTGGGNKLTF

SEQ ID NO: 598310 - protein, 14 aa, Homo sapiens
  CDR3 for beta chain variable domain of TCR clone 299155 (TRBV25-1, TRBJ1-1)
CASTNLGGNTEAFF

SEQ ID NO: 598311 - protein, 12 aa, Homo sapiens
  CDR3 for alpha chain variable domain of TCR clone 299156 (TRAV9-2, TRAJ48)
CALTKGNEKLTF

SEQ ID NO: 598312 - protein, 13 aa, Homo sapiens
  CDR3 for beta chain variable domain of TCR clone 299156 (TRBV11-2, TRBJ2-5)
CASSRGPSETQYF

SEQ ID NO: 598313 - protein, 13 aa, Homo sapiens
  CDR3 for alpha chain variable domain of TCR clone 299157 (TRAV16, TRAJ39)
CALKDNSGNMLTF

SEQ ID NO: 598314 - protein, 17 aa, Homo sapiens
  CDR3 for beta chain variable domain of TCR clone 299157 (TRBV6-1, TRBJ2-1)
CASSVDLRGGLYNEQFF

SEQ ID NO: 598315 - protein, 14 aa, Homo sapiens
  CDR3 for alpha chain variable domain of TCR clone 299158 (TRAV16, TRAJ26)
CITVLSAYGQNLVF

SEQ ID NO: 598316 - protein, 14 aa, Homo sapiens
  CDR3 for beta chain variable domain of TCR clone 299158 (TRBV7-2, TRBJ2-7)
CASRSQGAAYEQYF

SEQ ID NO: 598317 - protein, 14 aa, Homo sapiens
  CDR3 for alpha chain variable domain of TCR clone 299159 (TRAV12-3, TRAJ9)
CAMSPNTGGFKTIF

SEQ ID NO: 598318 - protein, 14 aa, Homo sapiens
  CDR3 for beta chain variable domain of TCR clone 299159 (TRBV13, TRBJ2-7)
CASSLKGASYEQYF

SEQ ID NO: 598319 - protein, 10 aa, Homo sapiens
  CDR3 for alpha chain variable domain of TCR clone 299160 (TRAV1-2, TRAJ31)
CVSEDARLMF

SEQ ID NO: 598320 - protein, 14 aa, Homo sapiens
  CDR3 for beta chain variable domain of TCR clone 299160 (TRBV7-9, TRBJ2-2)
CASSGLADTGELFF

SEQ ID NO: 598321 - protein, 15 aa, Homo sapiens
  CDR3 for alpha chain variable domain of TCR clone 299161 (TRAV8-3, TRAJ45)
CASSYSGGGADGLTF

SEQ ID NO: 598322 - protein, 15 aa, Homo sapiens
  CDR3 for beta chain variable domain of TCR clone 299161 (TRBV12-4, TRBJ2-5)
CASTLNSGRGETQYF

SEQ ID NO: 598323 - protein, 13 aa, Homo sapiens
  CDR3 for alpha chain variable domain of TCR clone 299162 (TRAV3, TRAJ20)
CAVRDTPRFKLSF

SEQ ID NO: 598324 - protein, 16 aa, Homo sapiens
  CDR3 for beta chain variable domain of TCR clone 299162 (TRBV20-1, TRBJ2-7)
CSARAPGLALSYEQYF

SEQ ID NO: 598325 - protein, 14 aa, Homo sapiens
  CDR3 for alpha chain variable domain of TCR clone 299163 (TRAV8-3, TRAJ4)
CAVGASGGSNKLFF

SEQ ID NO: 598326 - protein, 16 aa, Homo sapiens
  CDR3 for beta chain variable domain of TCR clone 299163 (TRBV4-3, TRBJ2-2)
CASSHLQGSGTGELFF

SEQ ID NO: 598327 - protein, 15 aa, Homo sapiens
  CDR3 for alpha chain variable domain of TCR clone 299164 (TRAV35, TRAJ40)
CAGQLGTSGTYKYIF

SEQ ID NO: 598328 - protein, 15 aa, Homo sapiens
  CDR3 for beta chain variable domain of TCR clone 299164 (TRBV2, TRBJ2-1)
CASSVVGSPGNEQFF

SEQ ID NO: 598329 - protein, 16 aa, Homo sapiens
  CDR3 for alpha chain variable domain of TCR clone 299165 (TRAV12-3, TRAJ53)
CAMSPGSGGSNYKLTF

SEQ ID NO: 598330 - protein, 12 aa, Homo sapiens
  CDR3 for beta chain variable domain of TCR clone 299165 (TRBV24-1, TRBJ1-1)
CATLYPDTEAFF

SEQ ID NO: 598331 - protein, 15 aa, Homo sapiens
  CDR3 for alpha chain variable domain of TCR clone 299166 (TRAV12-2, TRAJ50)
CAVNGLETSHDKVIF

SEQ ID NO: 598332 - protein, 17 aa, Homo sapiens
  CDR3 for beta chain variable domain of TCR clone 299166 (TRBV20-1, TRBJ2-1)
CSASSSGLAGSYNEQFF

SEQ ID NO: 598333 - protein, 11 aa, Homo sapiens
  CDR3 for alpha chain variable domain of TCR clone 299167 (TRAV17, TRAJ36)
CAPTGANNLFF

SEQ ID NO: 598334 - protein, 12 aa, Homo sapiens
  CDR3 for beta chain variable domain of TCR clone 299167 (TRBV29-1, TRBJ2-3)
CSGTGGADTQYF

SEQ ID NO: 598335 - protein, 14 aa, Homo sapiens
  CDR3 for alpha chain variable domain of TCR clone 299168 (TRAV8-2, TRAJ4)
CVVSPSGGYNKLIF

SEQ ID NO: 598336 - protein, 14 aa, Homo sapiens
  CDR3 for beta chain variable domain of TCR clone 299168 (TRBV7-3, TRBJ2-1)
CASSLTGGANEQFF

SEQ ID NO: 598337 - protein, 12 aa, Homo sapiens
  CDR3 for alpha chain variable domain of TCR clone 299169 (TRAV27, TRAJ35)
CAGADFGNELHC

SEQ ID NO: 598338 - protein, 16 aa, Homo sapiens
  CDR3 for beta chain variable domain of TCR clone 299169 (TRBV6-1, TRBJ2-1)
CASISRQGSSYNEQFF

SEQ ID NO: 598339 - protein, 16 aa, Homo sapiens
  CDR3 for alpha chain variable domain of TCR clone 299170 (TRAV3, TRAJ37)
CAVRPHGSGNTGKLIF

SEQ ID NO: 598340 - protein, 11 aa, Homo sapiens
  CDR3 for beta chain variable domain of TCR clone 299170 (TRBV10-3, TRBJ2-7)
CAISEGLEQNF

SEQ ID NO: 598341 - protein, 15 aa, Homo sapiens
  CDR3 for alpha chain variable domain of TCR clone 299171 (TRAV8-4, TRAJ3)
CAVTGENLVQQCFQD

SEQ ID NO: 598342 - protein, 14 aa, Homo sapiens
  CDR3 for beta chain variable domain of TCR clone 299171 (TRBV19, TRBJ2-7)
CASSMGQGAIEQYF

SEQ ID NO: 598343 - protein, 15 aa, Homo sapiens
  CDR3 for alpha chain variable domain of TCR clone 299172 (TRAV4, TRAJ39)
CLVGPNNNAGNMLTF

SEQ ID NO: 598344 - protein, 13 aa, Homo sapiens
  CDR3 for beta chain variable domain of TCR clone 299172 (TRBV7-3, TRBJ1-1)
CASSQDWGAEAFL

SEQ ID NO: 598345 - protein, 11 aa, Homo sapiens
  CDR3 for alpha chain variable domain of TCR clone 299173 (TRAV21, TRAJ11)
CAVHGYSPLTF

SEQ ID NO: 598346 - protein, 11 aa, Homo sapiens
  CDR3 for beta chain variable domain of TCR clone 299173 (TRBV19, TRBJ1-1)
CASSIGSEAFF

SEQ ID NO: 598347 - protein, 14 aa, Homo sapiens
  CDR3 for alpha chain variable domain of TCR clone 299174 (TRAV17, TRAJ57)
CATDPQGGSEKLVF

SEQ ID NO: 598348 - protein, 11 aa, Homo sapiens
  CDR3 for beta chain variable domain of TCR clone 299174 (TRBV7-9, TRBJ1-6)
CASSSNSPLHF

SEQ ID NO: 598349 - protein, 14 aa, Homo sapiens
  CDR3 for alpha chain variable domain of TCR clone 299175 (TRAV13-1, TRAJ35)
CAASKGGFGNALHC

SEQ ID NO: 598350 - protein, 18 aa, Homo sapiens
  CDR3 for beta chain variable domain of TCR clone 299175 (TRBV11-2, TRBJ2-3)
CASSLGGASRGAPNTQYF

SEQ ID NO: 598351 - protein, 14 aa, Homo sapiens
  CDR3 for alpha chain variable domain of TCR clone 299176 (TRAV23/DV6, TRAJ39)
CAASIGNAGNMLTF

SEQ ID NO: 598352 - protein, 13 aa, Homo sapiens
  CDR3 for beta chain variable domain of TCR clone 299176 (TRBV7-3, TRBJ1-1)
CASSQDWGAEAFF

SEQ ID NO: 598353 - protein, 19 aa, Homo sapiens
  CDR3 for alpha chain variable domain of TCR clone 299177 (TRAV26-1, TRAJ28)
CIVRVAHAYSGAGSYQLTS

SEQ ID NO: 598354 - protein, 12 aa, Homo sapiens
  CDR3 for beta chain variable domain of TCR clone 299177 (TRBV27, TRBJ2-2)
CASKLFTRELFF

SEQ ID NO: 598355 - protein, 14 aa, Homo sapiens
  CDR3 for alpha chain variable domain of TCR clone 299178 (TRAV13-1, TRAJ44)
CAAKATGTASKLTF

SEQ ID NO: 598356 - protein, 14 aa, Homo sapiens
  CDR3 for beta chain variable domain of TCR clone 299178 (TRBV6-6, TRBJ1-4)
CASRTDREYEKLFF

SEQ ID NO: 598357 - protein, 12 aa, Homo sapiens
  CDR3 for alpha chain variable domain of TCR clone 299179 (TRAV13-2, TRAJ23)
CAERHRAGKLIF

SEQ ID NO: 598358 - protein, 16 aa, Homo sapiens
  CDR3 for beta chain variable domain of TCR clone 299179 (TRBV20-1, TRBJ1-4)
CSAPGQGLLTNEKLFF

SEQ ID NO: 598359 - protein, 18 aa, Homo sapiens
  CDR3 for alpha chain variable domain of TCR clone 299180 (TRAV21, TRAJ52)
CAVRPSPAGGTSYGKLTF

SEQ ID NO: 598360 - protein, 15 aa, Homo sapiens
  CDR3 for beta chain variable domain of TCR clone 299180 (TRBV11-2, TRBJ2-1)
CASSSPSTRYNEQFF

SEQ ID NO: 598361 - protein, 14 aa, Homo sapiens
  CDR3 for alpha chain variable domain of TCR clone 299181 (TRAV4, TRAJ11)
CLVGEYSGYSTLTF

SEQ ID NO: 598362 - protein, 20 aa, Homo sapiens
  CDR3 for beta chain variable domain of TCR clone 299181 (TRBV7-8, TRBJ2-2)
CASSHLFPGPTIHITGELFF

SEQ ID NO: 598363 - protein, 15 aa, Homo sapiens
  CDR3 for alpha chain variable domain of TCR clone 299182 (TRAV12-2, TRAJ53)
CAVNGGGGSNYKPTF

SEQ ID NO: 598364 - protein, 12 aa, Homo sapiens
  CDR3 for beta chain variable domain of TCR clone 299182 (TRBV7-6, TRBJ2-5)
CASSLSQETQYF

SEQ ID NO: 598365 - protein, 16 aa, Homo sapiens
  CDR3 for alpha chain variable domain of TCR clone 299183 (TRAV3, TRAJ10)
CAVRNMRAGGGNKLTF

SEQ ID NO: 598366 - protein, 19 aa, Homo sapiens
  CDR3 for beta chain variable domain of TCR clone 299183 (TRBV6-3, TRBJ1-2)
CASSYSKGRTGPPNYGYTF

SEQ ID NO: 598367 - protein, 17 aa, Homo sapiens
  CDR3 for alpha chain variable domain of TCR clone 299184 (TRAV26-1, TRAJ53)
CIVRVDDSGGSNYKLTF

SEQ ID NO: 598368 - protein, 11 aa, Homo sapiens
  CDR3 for beta chain variable domain of TCR clone 299184 (TRBV11-2, TRBJ2-2)
CASSLPGELFF

SEQ ID NO: 598369 - protein, 13 aa, Homo sapiens
  CDR3 for alpha chain variable domain of TCR clone 299185 (TRAV12-3, TRAJ54)
CALVPQGAQELLF

SEQ ID NO: 598370 - protein, 15 aa, Homo sapiens
  CDR3 for beta chain variable domain of TCR clone 299185 (TRBV4-1, TRBJ2-2)
CASSQDSRGTGELFF

SEQ ID NO: 598371 - protein, 18 aa, Homo sapiens
  CDR3 for alpha chain variable domain of TCR clone 299186 (TRAV12-3, TRAJ52)
CAMSEGGAGGTSYGKLTF

SEQ ID NO: 598372 - protein, 15 aa, Homo sapiens
  CDR3 for beta chain variable domain of TCR clone 299186 (TRBV7-2, TRBJ1-2)
CASSPRAGWNYGYTF

SEQ ID NO: 598373 - protein, 14 aa, Homo sapiens
  CDR3 for alpha chain variable domain of TCR clone 299187 (TRAV21, TRAJ40)
CAVVWTSGTYKYTF

SEQ ID NO: 598374 - protein, 15 aa, Homo sapiens
  CDR3 for beta chain variable domain of TCR clone 299187 (TRBV20-1, TRBJ2-7)
CSARDRVSGMDEQYF

SEQ ID NO: 598375 - protein, 15 aa, Homo sapiens
  CDR3 for alpha chain variable domain of TCR clone 299188 (TRAV12-3, TRAJ49)
CAMAVTPNTGNQFYF

SEQ ID NO: 598376 - protein, 20 aa, Homo sapiens
  CDR3 for beta chain variable domain of TCR clone 299188 (TRBV7-9, TRBJ2-1)
CASSSPRAPRTRSSYNEQFF

SEQ ID NO: 598377 - protein, 16 aa, Homo sapiens
  CDR3 for alpha chain variable domain of TCR clone 299189 (TRAV23/DV6, TRAJ9)
CAASTGGNTGGFKTIF

SEQ ID NO: 598378 - protein, 12 aa, Homo sapiens
  CDR3 for beta chain variable domain of TCR clone 299189 (TRBV6-3, TRBJ2-7)
CASSEPGFEQYF

SEQ ID NO: 598379 - protein, 15 aa, Homo sapiens
  CDR3 for alpha chain variable domain of TCR clone 299190 (TRAV25, TRAJ52)
CAGRPGGTSYGKLTF

SEQ ID NO: 598380 - protein, 17 aa, Homo sapiens
  CDR3 for beta chain variable domain of TCR clone 299190 (TRBV7-8, TRBJ2-6)
CASSAGTAGAGANGLTF

SEQ ID NO: 598381 - protein, 15 aa, Homo sapiens
  CDR3 for alpha chain variable domain of TCR clone 299191 (TRAV8-3, TRAJ27)
CAVGPSKTSAGKTTF

SEQ ID NO: 598382 - protein, 15 aa, Homo sapiens
  CDR3 for beta chain variable domain of TCR clone 299191 (TRBV7-2, TRBJ2-1)
CASSSGLAGGNEQFF

SEQ ID NO: 598383 - protein, 15 aa, Homo sapiens
  CDR3 for alpha chain variable domain of TCR clone 299192 (TRAV29/DV5, TRAJ42)
CAAKTDGGSQGNHIF

SEQ ID NO: 598384 - protein, 15 aa, Homo sapiens
  CDR3 for beta chain variable domain of TCR clone 299192 (TRBV5-1, TRBJ2-2)
CASSSQGGNTGELFF

SEQ ID NO: 598385 - protein, 10 aa, Homo sapiens
  CDR3 for alpha chain variable domain of TCR clone 299193 (TRAV39, TRAJ44)
SAGTASKLTL

SEQ ID NO: 598386 - protein, 15 aa, Homo sapiens
  CDR3 for beta chain variable domain of TCR clone 299193 (TRBV5-1, TRBJ2-3)
CASSVTSGSTDTQYF

SEQ ID NO: 598387 - protein, 14 aa, Homo sapiens
  CDR3 for alpha chain variable domain of TCR clone 299194 (TRAV12-1, TRAJ26)
CVVKGSNYGQNFVF

SEQ ID NO: 598388 - protein, 17 aa, Homo sapiens
  CDR3 for beta chain variable domain of TCR clone 299194 (TRBV11-2, TRBJ2-6)
CASSQRDIFSGANVLTF

SEQ ID NO: 598389 - protein, 13 aa, Homo sapiens
  CDR3 for alpha chain variable domain of TCR clone 299195 (TRAV26-1, TRAJ41)
CIVRINSGYALNF

SEQ ID NO: 598390 - protein, 13 aa, Homo sapiens
  CDR3 for beta chain variable domain of TCR clone 299195 (TRBV20-1, TRBJ1-5)
CSATAAGVQPQHF

SEQ ID NO: 598391 - protein, 15 aa, Homo sapiens
  CDR3 for alpha chain variable domain of TCR clone 299196 (TRAV25, TRAJ53)
CPTSNSGVSNYKLTF

SEQ ID NO: 598392 - protein, 14 aa, Homo sapiens
  CDR3 for beta chain variable domain of TCR clone 299196 (TRBV11-2, TRBJ2-3)
CASSRLARTDTQYL

SEQ ID NO: 598393 - protein, 17 aa, Homo sapiens
  CDR3 for alpha chain variable domain of TCR clone 299197 (TRAV16, TRAJ58)
CITVLSNGETSGSRLTF

SEQ ID NO: 598394 - protein, 15 aa, Homo sapiens
  CDR3 for beta chain variable domain of TCR clone 299197 (TRBV29-1, TRBJ2-1)
CSGRDRKSSYNEQFF

SEQ ID NO: 598395 - protein, 13 aa, Homo sapiens
  CDR3 for alpha chain variable domain of TCR clone 299198 (TRAV21, TRAJ57)
CAVTQGGSEKLVF

SEQ ID NO: 598396 - protein, 14 aa, Homo sapiens
  CDR3 for beta chain variable domain of TCR clone 299198 (TRBV12-4, TRBJ2-7)
CASSPRQDLYEQYF

SEQ ID NO: 598397 - protein, 15 aa, Homo sapiens
  CDR3 for alpha chain variable domain of TCR clone 299199 (TRAV8-2, TRAJ16)
CVVSDGFSDGQKLFF

SEQ ID NO: 598398 - protein, 14 aa, Homo sapiens
  CDR3 for beta chain variable domain of TCR clone 299199 (TRBV7-3, TRBJ1-1)
CASSLGTGYTEAFF

SEQ ID NO: 598399 - protein, 15 aa, Homo sapiens
  CDR3 for alpha chain variable domain of TCR clone 299200 (TRAV8-1, TRAJ37)
CAVKKGSGNTGKLIF

SEQ ID NO: 598400 - protein, 14 aa, Homo sapiens
  CDR3 for beta chain variable domain of TCR clone 299200 (TRBV12-5, TRBJ2-5)
CASGSRTHQETQYF

SEQ ID NO: 598401 - protein, 12 aa, Homo sapiens
  CDR3 for alpha chain variable domain of TCR clone 299201 (TRAV21, TRAJ49)
CAVTNHGNQFYF

SEQ ID NO: 598402 - protein, 17 aa, Homo sapiens
  CDR3 for beta chain variable domain of TCR clone 299201 (TRBV13, TRBJ2-3)
CASSLSRVAGGRNTQYF

SEQ ID NO: 598403 - protein, 16 aa, Homo sapiens
  CDR3 for alpha chain variable domain of TCR clone 299202 (TRAV3, TRAJ21)
CAVRDIERGNFNKFYF

SEQ ID NO: 598404 - protein, 14 aa, Homo sapiens
  CDR3 for beta chain variable domain of TCR clone 299202 (TRBV7-2, TRBJ2-7)
CASSFLGRVYEQYF

SEQ ID NO: 598405 - protein, 17 aa, Homo sapiens
  CDR3 for alpha chain variable domain of TCR clone 299203 (TRAV23/DV6, TRAJ57)
CAASSTLSQGGSEKLVF

SEQ ID NO: 598406 - protein, 14 aa, Homo sapiens
  CDR3 for beta chain variable domain of TCR clone 299203 (TRBV25-1, TRBJ1-1)
CASTHLGGDTQAFF

SEQ ID NO: 598407 - protein, 16 aa, Homo sapiens
  CDR3 for alpha chain variable domain of TCR clone 299204 (TRAV26-1, TRAJ34)
CIVRPRGGYNTDKLIF

SEQ ID NO: 598408 - protein, 14 aa, Homo sapiens
  CDR3 for beta chain variable domain of TCR clone 299204 (TRBV2, TRBJ2-1)
CASSEALIYNEQFF

SEQ ID NO: 598409 - protein, 14 aa, Homo sapiens
  CDR3 for alpha chain variable domain of TCR clone 299205 (TRAV12-2, TRAJ17)
CAVLFKAAGNKLTF

SEQ ID NO: 598410 - protein, 15 aa, Homo sapiens
  CDR3 for beta chain variable domain of TCR clone 299205 (TRBV27, TRBJ2-7)
CASRFWGQGADEQYF

SEQ ID NO: 598411 - protein, 13 aa, Homo sapiens
  CDR3 for alpha chain variable domain of TCR clone 299206 (TRAV8-3, TRAJ6)
CAARRGGSDIPTF

SEQ ID NO: 598412 - protein, 15 aa, Homo sapiens
  CDR3 for beta chain variable domain of TCR clone 299206 (TRBV4-1, TRBJ2-3)
CASSNLAGGRDTQYL

SEQ ID NO: 598413 - protein, 15 aa, Homo sapiens
  CDR3 for alpha chain variable domain of TCR clone 299207 (TRAV12-2, TRAJ53)
CAVNGGGGSNYKLTF

SEQ ID NO: 598414 - protein, 13 aa, Homo sapiens
  CDR3 for beta chain variable domain of TCR clone 299207 (TRBV7-2, TRBJ2-4)
CASSREHANIQYF

SEQ ID NO: 598415 - protein, 14 aa, Homo sapiens
  CDR3 for alpha chain variable domain of TCR clone 299208 (TRAV12-1, TRAJ13)
CVVIDSGGYQKVTF

SEQ ID NO: 598416 - protein, 13 aa, Homo sapiens
  CDR3 for beta chain variable domain of TCR clone 299208 (TRBV20-1, TRBJ1-1)
CSAPPGGHTKAFF

SEQ ID NO: 598417 - protein, 11 aa, Homo sapiens
  CDR3 for alpha chain variable domain of TCR clone 299209 (TRAV21, TRAJ34)
CAVTNTDKLIF

SEQ ID NO: 598418 - protein, 13 aa, Homo sapiens
  CDR3 for beta chain variable domain of TCR clone 299209 (TRBV18, TRBJ2-5)
CASSLQGQETQYF

SEQ ID NO: 598419 - protein, 14 aa, Homo sapiens
  CDR3 for alpha chain variable domain of TCR clone 299210 (TRAV12-1, TRAJ17)
CVVNYKAAGYKLTF

SEQ ID NO: 598420 - protein, 17 aa, Homo sapiens
  CDR3 for beta chain variable domain of TCR clone 299210 (TRBV11-2, TRBJ2-1)
CASSLYPPGVEYNEQFF

SEQ ID NO: 598421 - protein, 15 aa, Homo sapiens
  CDR3 for alpha chain variable domain of TCR clone 299211 (TRAV21, TRAJ53)
CATLNSRRSNYKLTF

SEQ ID NO: 598422 - protein, 16 aa, Homo sapiens
  CDR3 for beta chain variable domain of TCR clone 299211 (TRBV9, TRBJ2-1)
CASSVGGGGNYNEQFF

SEQ ID NO: 598423 - protein, 19 aa, Homo sapiens
  CDR3 for alpha chain variable domain of TCR clone 299212 (TRAV25, TRAJ20)
TATQTTDVGILPHAYKLSF

SEQ ID NO: 598424 - protein, 15 aa, Homo sapiens
  CDR3 for beta chain variable domain of TCR clone 299212 (TRBV6-6, TRBJ1-5)
CASSSIQGTNQPQHF

SEQ ID NO: 598425 - protein, 11 aa, Homo sapiens
  CDR3 for alpha chain variable domain of TCR clone 299213 (TRAV12-1, TRAJ27)
CVVNNAGKSTF

SEQ ID NO: 598426 - protein, 14 aa, Homo sapiens
  CDR3 for beta chain variable domain of TCR clone 299213 (TRBV19, TRBJ1-2)
CASSLQGQAYGYTF

SEQ ID NO: 598427 - protein, 11 aa, Homo sapiens
  CDR3 for alpha chain variable domain of TCR clone 299214 (TRAV8-1, TRAJ8)
CAMTGFQKLAF

SEQ ID NO: 598428 - protein, 14 aa, Homo sapiens
  CDR3 for beta chain variable domain of TCR clone 299214 (TRBV5-4, TRBJ1-2)
CASTRQTDNYGYTF

SEQ ID NO: 598429 - protein, 12 aa, Homo sapiens
  CDR3 for alpha chain variable domain of TCR clone 299215 (TRAV12-3, TRAJ4)
CAMTGEGTRLAV

SEQ ID NO: 598430 - protein, 14 aa, Homo sapiens
  CDR3 for beta chain variable domain of TCR clone 299215 (TRBV10-3, TRBJ1-1)
CAISDTDRGVEAFF

SEQ ID NO: 598431 - protein, 17 aa, Homo sapiens
  CDR3 for alpha chain variable domain of TCR clone 299216 (TRAV3, TRAJ38)
CAVRDCLNVGNSRKLIW

SEQ ID NO: 598432 - protein, 14 aa, Homo sapiens
  CDR3 for beta chain variable domain of TCR clone 299216 (TRBV5-5, TRBJ1-5)
CASSGQGVDQPQHF

SEQ ID NO: 598433 - protein, 11 aa, Homo sapiens
  CDR3 for alpha chain variable domain of TCR clone 299217 (TRAV3, TRAJ21)
CAVGNFNKLYF

SEQ ID NO: 598434 - protein, 17 aa, Homo sapiens
  CDR3 for beta chain variable domain of TCR clone 299217 (TRBV24-1, TRBJ2-1)
CATSDGSTSGTYNEQFF

SEQ ID NO: 598435 - protein, 14 aa, Homo sapiens
  CDR3 for alpha chain variable domain of TCR clone 299218 (TRAV12-2, TRAJ40)
CAGEIPSGTYKYIF

SEQ ID NO: 598436 - protein, 14 aa, Homo sapiens
  CDR3 for beta chain variable domain of TCR clone 299218 (TRBV20-1, TRBJ1-1)
CSAQTRIGGTEAFF

SEQ ID NO: 598437 - protein, 14 aa, Homo sapiens
  CDR3 for alpha chain variable domain of TCR clone 299219 (TRAV17, TRAJ31)
CATVLRNNNARLMF

SEQ ID NO: 598438 - protein, 13 aa, Homo sapiens
  CDR3 for beta chain variable domain of TCR clone 299219 (TRBV10-3, TRBJ2-7)
CASKLAVNYEQYF

SEQ ID NO: 598439 - protein, 14 aa, Homo sapiens
  CDR3 for alpha chain variable domain of TCR clone 299220 (TRAV8-3, TRAJ4)
CAVGASGGYNKLIF

SEQ ID NO: 598440 - protein, 14 aa, Homo sapiens
  CDR3 for beta chain variable domain of TCR clone 299220 (TRBV7-2, TRBJ1-2)
CASSSQGAHYDYTF

SEQ ID NO: 598441 - protein, 14 aa, Homo sapiens
  CDR3 for alpha chain variable domain of TCR clone 299221 (TRAV35, TRAJ22)
CAGLRPGSARQLTF

SEQ ID NO: 598442 - protein, 14 aa, Homo sapiens
  CDR3 for beta chain variable domain of TCR clone 299221 (TRBV12-4, TRBJ2-7)
CASTFRGGPNEQYF

SEQ ID NO: 598443 - protein, 12 aa, Homo sapiens
  CDR3 for alpha chain variable domain of TCR clone 299222 (TRAV12-3, TRAJ17)
CAMTLTVNKLTF

SEQ ID NO: 598444 - protein, 15 aa, Homo sapiens
  CDR3 for beta chain variable domain of TCR clone 299222 (TRBV20-1, TRBJ2-7)
CSARDRVSGMDERYF

SEQ ID NO: 598445 - protein, 11 aa, Homo sapiens
  CDR3 for alpha chain variable domain of TCR clone 299223 (TRAV1-2, TRAJ20)
CAVSNDYKLSF

SEQ ID NO: 598446 - protein, 16 aa, Homo sapiens
  CDR3 for beta chain variable domain of TCR clone 299223 (TRBV12-4, TRBJ2-5)
CASSFFVRGRQETQYF

SEQ ID NO: 598447 - protein, 15 aa, Homo sapiens
  CDR3 for alpha chain variable domain of TCR clone 299224 (TRAV2, TRAJ9)
CAVEDRGTGGFKTIF

SEQ ID NO: 598448 - protein, 16 aa, Homo sapiens
  CDR3 for beta chain variable domain of TCR clone 299224 (TRBV19, TRBJ2-7)
CASSLTGTSELGEQYF

SEQ ID NO: 598449 - protein, 17 aa, Homo sapiens
  CDR3 for alpha chain variable domain of TCR clone 299225 (TRAV21, TRAJ24)
CAGIRPRSTDSWGKLQL

SEQ ID NO: 598450 - protein, 15 aa, Homo sapiens
  CDR3 for beta chain variable domain of TCR clone 299225 (TRBV7-2, TRBJ2-3)
CASSPRGLSTDTQYF

SEQ ID NO: 598451 - protein, 12 aa, Homo sapiens
  CDR3 for alpha chain variable domain of TCR clone 299226 (TRAV3, TRAJ43)
CAVRGPDNDMRF

SEQ ID NO: 598452 - protein, 13 aa, Homo sapiens
  CDR3 for beta chain variable domain of TCR clone 299226 (TRBV7-3, TRBJ1-1)
CASSQDWGAEAFF

SEQ ID NO: 598453 - protein, 12 aa, Homo sapiens
  CDR3 for alpha chain variable domain of TCR clone 299227 (TRAV12-1, TRAJ40)
CVVYSGTYKHIF

SEQ ID NO: 598454 - protein, 14 aa, Homo sapiens
  CDR3 for beta chain variable domain of TCR clone 299227 (TRBV7-9, TRBJ2-5)
CASSLDTAQETQYF

SEQ ID NO: 598455 - protein, 12 aa, Homo sapiens
  CDR3 for alpha chain variable domain of TCR clone 299228 (TRAV8-3, TRAJ26)
CAGDNYGQNFVF

SEQ ID NO: 598456 - protein, 15 aa, Homo sapiens
  CDR3 for beta chain variable domain of TCR clone 299228 (TRBV12-4, TRBJ2-5)
CASSPPTGLQETQYF

SEQ ID NO: 598457 - protein, 18 aa, Homo sapiens
  CDR3 for alpha chain variable domain of TCR clone 299229 (TRAV16, TRAJ26)
CALGLWSEFCLCSRNQIV

SEQ ID NO: 598458 - protein, 14 aa, Homo sapiens
  CDR3 for beta chain variable domain of TCR clone 299229 (TRBV7-2, TRBJ2-7)
CASRSQGAAYEQYF

SEQ ID NO: 598459 - protein, 15 aa, Homo sapiens
  CDR3 for alpha chain variable domain of TCR clone 299230 (TRAV12-3, TRAJ11)
CAMSEENSGYSTLTF

SEQ ID NO: 598460 - protein, 16 aa, Homo sapiens
  CDR3 for beta chain variable domain of TCR clone 299230 (TRBV12-5, TRBJ2-5)
CASGPRTNGNQETQYF

SEQ ID NO: 598461 - protein, 12 aa, Homo sapiens
  CDR3 for alpha chain variable domain of TCR clone 299231 (TRAV3, TRAJ43)
WAVRDPNNDMRF

SEQ ID NO: 598462 - protein, 15 aa, Homo sapiens
  CDR3 for beta chain variable domain of TCR clone 299231 (TRBV6-5, TRBJ2-1)
CASSYDAGAGNEQFF

SEQ ID NO: 598463 - protein, 15 aa, Homo sapiens
  CDR3 for alpha chain variable domain of TCR clone 299232 (TRAV13-1, TRAJ5)
CAASPRGHGQESTYF

SEQ ID NO: 598464 - protein, 17 aa, Homo sapiens
  CDR3 for beta chain variable domain of TCR clone 299232 (TRBV3-1, TRBJ2-2)
CASSQFRDKVETGELFF

SEQ ID NO: 598465 - protein, 14 aa, Homo sapiens
  CDR3 for alpha chain variable domain of TCR clone 299233 (TRAV1-1, TRAJ23)
CAVSIYNQGGKLIF

SEQ ID NO: 598466 - protein, 18 aa, Homo sapiens
  CDR3 for beta chain variable domain of TCR clone 299233 (TRBV12-4, TRBJ2-2)
CASSLVAGTRGRTGELFF

SEQ ID NO: 598467 - protein, 13 aa, Homo sapiens
  CDR3 for alpha chain variable domain of TCR clone 299234 (TRAV3, TRAJ27)
CAVRPLGAGKSTF

SEQ ID NO: 598468 - protein, 13 aa, Homo sapiens
  CDR3 for beta chain variable domain of TCR clone 299234 (TRBV7-9, TRBJ2-3)
CASSPGSTVTQYF

SEQ ID NO: 598469 - protein, 13 aa, Homo sapiens
  CDR3 for alpha chain variable domain of TCR clone 299235 (TRAV8-3, TRAJ36)
CAAGATGANNRFF

SEQ ID NO: 598470 - protein, 13 aa, Homo sapiens
  CDR3 for beta chain variable domain of TCR clone 299235 (TRBV12-4, TRBJ1-2)
CASSLRQGKGYTF

SEQ ID NO: 598471 - protein, 16 aa, Homo sapiens
  CDR3 for alpha chain variable domain of TCR clone 299236 (TRAV38-1, TRAJ56)
CSFMKRQTGANSKLTF

SEQ ID NO: 598472 - protein, 13 aa, Homo sapiens
  CDR3 for beta chain variable domain of TCR clone 299236 (TRBV11-2, TRBJ2-5)
CASSRGPSETQYF

SEQ ID NO: 598473 - protein, 12 aa, Homo sapiens
  CDR3 for alpha chain variable domain of TCR clone 299237 (TRAV16, TRAJ10)
CSRTGGGNKLTL

SEQ ID NO: 598474 - protein, 15 aa, Homo sapiens
  CDR3 for beta chain variable domain of TCR clone 299237 (TRBV5-1, TRBJ2-2)
CASSSQGGNTGELFF

SEQ ID NO: 598475 - protein, 14 aa, Homo sapiens
  CDR3 for alpha chain variable domain of TCR clone 299238 (TRAV13-1, TRAJ35)
CAASKGGFGNVLHC

SEQ ID NO: 598476 - protein, 13 aa, Homo sapiens
  CDR3 for beta chain variable domain of TCR clone 299238 (TRBV11-2, TRBJ1-1)
CASSLGNGAEAFF

SEQ ID NO: 598477 - protein, 11 aa, Homo sapiens
  CDR3 for alpha chain variable domain of TCR clone 299239 (TRAV13-2, TRAJ31)
CAENMDARLMF

SEQ ID NO: 598478 - protein, 15 aa, Homo sapiens
  CDR3 for beta chain variable domain of TCR clone 299239 (TRBV7-8, TRBJ1-2)
CASSLVRDGGRGYTF

SEQ ID NO: 598479 - protein, 15 aa, Homo sapiens
  CDR3 for alpha chain variable domain of TCR clone 299240 (TRAV12-1, TRAJ45)
CVVLSGGGGADGLTF

SEQ ID NO: 598480 - protein, 18 aa, Homo sapiens
  CDR3 for beta chain variable domain of TCR clone 299240 (TRBV11-2, TRBJ2-6)
CASSLNPFLGTGANVLTF

SEQ ID NO: 598481 - protein, 14 aa, Homo sapiens
  CDR3 for alpha chain variable domain of TCR clone 299241 (TRAV1-2, TRAJ16)
CAVNRFSDGQKLPF

SEQ ID NO: 598482 - protein, 14 aa, Homo sapiens
  CDR3 for beta chain variable domain of TCR clone 299241 (TRBV6-5, TRBJ1-2)
CASSYDGTGGGYTF

SEQ ID NO: 598483 - protein, 16 aa, Homo sapiens
  CDR3 for alpha chain variable domain of TCR clone 299242 (TRAV12-1, TRAJ22)
CVVNTISSGSARQLTF

SEQ ID NO: 598484 - protein, 13 aa, Homo sapiens
  CDR3 for beta chain variable domain of TCR clone 299242 (TRBV19, TRBJ2-1)
CASNGGVFSEQCF

SEQ ID NO: 598485 - protein, 13 aa, Homo sapiens
  CDR3 for alpha chain variable domain of TCR clone 299243 (TRAV12-2, TRAJ30)
CAVNLNRDNKIIF

SEQ ID NO: 598486 - protein, 14 aa, Homo sapiens
  CDR3 for beta chain variable domain of TCR clone 299243 (TRBV7-8, TRBJ2-7)
CASSLGRASYEQYF

SEQ ID NO: 598487 - protein, 13 aa, Homo sapiens
  CDR3 for alpha chain variable domain of TCR clone 299244 (TRAV27, TRAJ42)
CAGARGSQGNLIF

SEQ ID NO: 598488 - protein, 14 aa, Homo sapiens
  CDR3 for beta chain variable domain of TCR clone 299244 (TRBV20-1, TRBJ1-1)
CSAQTRIGGTEDFF

SEQ ID NO: 598489 - protein, 12 aa, Homo sapiens
  CDR3 for alpha chain variable domain of TCR clone 299245 (TRAV12-3, TRAJ17)
CAMTLTGNKLTF

SEQ ID NO: 598490 - protein, 16 aa, Homo sapiens
  CDR3 for beta chain variable domain of TCR clone 299245 (TRBV7-3, TRBJ2-1)
CASSLEGYRSYNEQFF

SEQ ID NO: 598491 - protein, 14 aa, Homo sapiens
  CDR3 for alpha chain variable domain of TCR clone 299246 (TRAV1-2, TRAJ8)
CAVREDTGLQKLVF

SEQ ID NO: 598492 - protein, 20 aa, Homo sapiens
  CDR3 for beta chain variable domain of TCR clone 299246 (TRBV28, TRBJ2-1)
CASTPIGRSPGLAGGNEQFF

SEQ ID NO: 598493 - protein, 11 aa, Homo sapiens
  CDR3 for alpha chain variable domain of TCR clone 299247 (TRAV3, TRAJ21)
CAVGNLNKFYF

SEQ ID NO: 598494 - protein, 11 aa, Homo sapiens
  CDR3 for beta chain variable domain of TCR clone 299247 (TRBV7-8, TRBJ2-7)
CASSLSLEQYF

SEQ ID NO: 598495 - protein, 12 aa, Homo sapiens
  CDR3 for alpha chain variable domain of TCR clone 299248 (TRAV27, TRAJ41)
CAGRNSGYALNF

SEQ ID NO: 598496 - protein, 15 aa, Homo sapiens
  CDR3 for beta chain variable domain of TCR clone 299248 (TRBV20-1, TRBJ1-5)
CSATSDGGLGQPQHF

SEQ ID NO: 598497 - protein, 14 aa, Homo sapiens
  CDR3 for alpha chain variable domain of TCR clone 299249 (TRAV21, TRAJ35)
CAVMPIGFGNVLHC

SEQ ID NO: 598498 - protein, 12 aa, Homo sapiens
  CDR3 for beta chain variable domain of TCR clone 299249 (TRBV7-9, TRBJ2-7)
CASSIKREEQNF

SEQ ID NO: 598499 - protein, 14 aa, Homo sapiens
  CDR3 for alpha chain variable domain of TCR clone 299250 (TRAV1-2, TRAJ16)
CAVNRFSDGQKLLF

SEQ ID NO: 598500 - protein, 16 aa, Homo sapiens
  CDR3 for beta chain variable domain of TCR clone 299250 (TRBV7-3, TRBJ2-3)
CSSSLSGYRPEDTQYF

SEQ ID NO: 598501 - protein, 13 aa, Homo sapiens
  CDR3 for alpha chain variable domain of TCR clone 299251 (TRAV12-3, TRAJ33)
CAMSVNSNYHLIW

SEQ ID NO: 598502 - protein, 11 aa, Homo sapiens
  CDR3 for beta chain variable domain of TCR clone 299251 (TRBV7-3, TRBJ2-5)
CASSLSETQYF

SEQ ID NO: 598503 - protein, 12 aa, Homo sapiens
  CDR3 for alpha chain variable domain of TCR clone 299252 (TRAV12-3, TRAJ49)
CAMSGTGNQFYF

SEQ ID NO: 598504 - protein, 13 aa, Homo sapiens
  CDR3 for beta chain variable domain of TCR clone 299252 (TRBV7-9, TRBJ1-2)
CASSLKQNYGYTF

SEQ ID NO: 598505 - protein, 11 aa, Homo sapiens
  CDR3 for alpha chain variable domain of TCR clone 299253 (TRAV2, TRAJ13)
CASGGYQKVTF

SEQ ID NO: 598506 - protein, 11 aa, Homo sapiens
  CDR3 for beta chain variable domain of TCR clone 299253 (TRBV19, TRBJ2-7)
CASGNSYEQYF

SEQ ID NO: 598507 - protein, 23 aa, Homo sapiens
  CDR3 for alpha chain variable domain of TCR clone 299254 (TRAV12-1, TRAJ23)
SSVIQPPTSVWWYGDNQGGKLIF

SEQ ID NO: 598508 - protein, 11 aa, Homo sapiens
  CDR3 for beta chain variable domain of TCR clone 299254 (TRBV4-1, TRBJ2-2)
CASEHTGELFF

SEQ ID NO: 598509 - protein, 14 aa, Homo sapiens
  CDR3 for alpha chain variable domain of TCR clone 299255 (TRAV17, TRAJ6)
CATDERRGSYIPTF

SEQ ID NO: 598510 - protein, 13 aa, Homo sapiens
  CDR3 for beta chain variable domain of TCR clone 299255 (TRBV27, TRBJ2-1)
CASSLGRICGQFF

SEQ ID NO: 598511 - protein, 12 aa, Homo sapiens
  CDR3 for alpha chain variable domain of TCR clone 299256 (TRAV13-1, TRAJ21)
CAAKEGFNKFYF

SEQ ID NO: 598512 - protein, 15 aa, Homo sapiens
  CDR3 for beta chain variable domain of TCR clone 299256 (TRBV2, TRBJ2-1)
CASSELEGSYNEQFF

SEQ ID NO: 598513 - protein, 16 aa, Homo sapiens
  CDR3 for alpha chain variable domain of TCR clone 299257 (TRAV27, TRAJ52)
CAGAPAGGTSYGKLTF

SEQ ID NO: 598514 - protein, 14 aa, Homo sapiens
  CDR3 for beta chain variable domain of TCR clone 299257 (TRBV6-1, TRBJ1-3)
CASVQGGGGNTIYF

SEQ ID NO: 598515 - protein, 13 aa, Homo sapiens
  CDR3 for alpha chain variable domain of TCR clone 299258 (TRAV13-1, TRAJ43)
CAASLSNNNDMRF

SEQ ID NO: 598516 - protein, 14 aa, Homo sapiens
  CDR3 for beta chain variable domain of TCR clone 299258 (TRBV13, TRBJ2-7)
CASSLKGASYEQYF

SEQ ID NO: 598517 - protein, 16 aa, Homo sapiens
  CDR3 for alpha chain variable domain of TCR clone 299259 (TRAV3, TRAJ21)
CAVRDIERGNFNKFYF

SEQ ID NO: 598518 - protein, 16 aa, Homo sapiens
  CDR3 for beta chain variable domain of TCR clone 299259 (TRBV12-4, TRBJ1-5)
CASSRQVGGSNQPQHF

SEQ ID NO: 598519 - protein, 11 aa, Homo sapiens
  CDR3 for alpha chain variable domain of TCR clone 299260 (TRAV2, TRAJ33)
CAVESNYQLIW

SEQ ID NO: 598520 - protein, 13 aa, Homo sapiens
  CDR3 for beta chain variable domain of TCR clone 299260 (TRBV12-4, TRBJ1-1)
CASSLGGTTEAFF

SEQ ID NO: 598521 - protein, 16 aa, Homo sapiens
  CDR3 for alpha chain variable domain of TCR clone 299261 (TRAV4, TRAJ22)
CLVGDLYSGSARQLTF

SEQ ID NO: 598522 - protein, 14 aa, Homo sapiens
  CDR3 for beta chain variable domain of TCR clone 299261 (TRBV7-8, TRBJ2-7)
CASSPKTSFYEQYF

SEQ ID NO: 598523 - protein, 14 aa, Homo sapiens
  CDR3 for alpha chain variable domain of TCR clone 299262 (TRAV12-3, TRAJ9)
CAISPNTGGFKTIF

SEQ ID NO: 598524 - protein, 12 aa, Homo sapiens
  CDR3 for beta chain variable domain of TCR clone 299262 (TRBV11-2, TRBJ2-2)
CASSLGGGELFF

SEQ ID NO: 598525 - protein, 14 aa, Homo sapiens
  CDR3 for alpha chain variable domain of TCR clone 299263 (TRAV1-2, TRAJ16)
CAVNRFSDGQKLLF

SEQ ID NO: 598526 - protein, 14 aa, Homo sapiens
  CDR3 for beta chain variable domain of TCR clone 299263 (TRBV6-5, TRBJ2-1)
CASRPQGRCNEQFF

SEQ ID NO: 598527 - protein, 10 aa, Homo sapiens
  CDR3 for alpha chain variable domain of TCR clone 299264 (TRAV36/DV7, TRAJ38)
CAANNRKLIW

SEQ ID NO: 598528 - protein, 13 aa, Homo sapiens
  CDR3 for beta chain variable domain of TCR clone 299264 (TRBV15, TRBJ1-6)
CATSGGLNSPLHF

SEQ ID NO: 598529 - protein, 18 aa, Homo sapiens
  CDR3 for alpha chain variable domain of TCR clone 299265 (TRAV21, TRAJ52)
CAVRPSPAGGTSYGKLPF

SEQ ID NO: 598530 - protein, 16 aa, Homo sapiens
  CDR3 for beta chain variable domain of TCR clone 299265 (TRBV11-2, TRBJ2-7)
CASSPTTGGVSYEQYF

SEQ ID NO: 598531 - protein, 13 aa, Homo sapiens
  CDR3 for alpha chain variable domain of TCR clone 299266 (TRAV2, TRAJ3)
CAVEDSSASKIIF

SEQ ID NO: 598532 - protein, 13 aa, Homo sapiens
  CDR3 for beta chain variable domain of TCR clone 299266 (TRBV10-3, TRBJ1-2)
CAISERDSYGYTF

SEQ ID NO: 598533 - protein, 18 aa, Homo sapiens
  CDR3 for alpha chain variable domain of TCR clone 299267 (TRAV17, TRAJ45)
CATSLDFYSGGGADGLTF

SEQ ID NO: 598534 - protein, 11 aa, Homo sapiens
  CDR3 for beta chain variable domain of TCR clone 299267 (TRBV19, TRBJ1-1)
CASSLNSEAFF

SEQ ID NO: 598535 - protein, 13 aa, Homo sapiens
  CDR3 for alpha chain variable domain of TCR clone 299268 (TRAV13-1, TRAJ10)
FAATAGGGNKLTF

SEQ ID NO: 598536 - protein, 12 aa, Homo sapiens
  CDR3 for beta chain variable domain of TCR clone 299268 (TRBV7-3, TRBJ2-1)
CASSFQSGPQFF

SEQ ID NO: 598537 - protein, 13 aa, Homo sapiens
  CDR3 for alpha chain variable domain of TCR clone 299269 (TRAV2, TRAJ40)
CAVVTSGTYKYIF

SEQ ID NO: 598538 - protein, 15 aa, Homo sapiens
  CDR3 for beta chain variable domain of TCR clone 299269 (TRBV7-7, TRBJ2-2)
YATSKLAKNTGELFF

SEQ ID NO: 598539 - protein, 14 aa, Homo sapiens
  CDR3 for alpha chain variable domain of TCR clone 299270 (TRAV2, TRAJ9)
CAVEDRSGGFKTIF

SEQ ID NO: 598540 - protein, 13 aa, Homo sapiens
  CDR3 for beta chain variable domain of TCR clone 299270 (TRBV12-4, TRBJ1-2)
CASTMTSNYGHTF

SEQ ID NO: 598541 - protein, 17 aa, Homo sapiens
  CDR3 for alpha chain variable domain of TCR clone 299271 (TRAV3, TRAJ6)
CAVRYGPRAVGSYIPTF

SEQ ID NO: 598542 - protein, 14 aa, Homo sapiens
  CDR3 for beta chain variable domain of TCR clone 299271 (TRBV7-2, TRBJ2-7)
CASSPKTSFYEQYF

SEQ ID NO: 598543 - protein, 14 aa, Homo sapiens
  CDR3 for alpha chain variable domain of TCR clone 299272 (TRAV1-2, TRAJ16)
CAVNRFPDGQKLLF

SEQ ID NO: 598544 - protein, 16 aa, Homo sapiens
  CDR3 for beta chain variable domain of TCR clone 299272 (TRBV7-3, TRBJ2-3)
CASSLSGYRPEDTQYF

SEQ ID NO: 598545 - protein, 12 aa, Homo sapiens
  CDR3 for alpha chain variable domain of TCR clone 299273 (TRAV12-2, TRAJ8)
CAVNTGFQKLVF

SEQ ID NO: 598546 - protein, 15 aa, Homo sapiens
  CDR3 for beta chain variable domain of TCR clone 299273 (TRBV7-8, TRBJ1-5)
CASSLERGGLEPQHF

SEQ ID NO: 598547 - protein, 14 aa, Homo sapiens
  CDR3 for alpha chain variable domain of TCR clone 299274 (TRAV12-2, TRAJ26)
CAVHDDNYGQNFVF

SEQ ID NO: 598548 - protein, 13 aa, Homo sapiens
  CDR3 for beta chain variable domain of TCR clone 299274 (TRBV3-1, TRBJ2-5)
CASSPVLSETQYF

SEQ ID NO: 598549 - protein, 13 aa, Homo sapiens
  CDR3 for alpha chain variable domain of TCR clone 299275 (TRAV29/DV5, TRAJ31)
CAASRNNNARLMF

SEQ ID NO: 598550 - protein, 15 aa, Homo sapiens
  CDR3 for beta chain variable domain of TCR clone 299275 (TRBV11-2, TRBJ2-2)
CASSSDRVNAGELFF

SEQ ID NO: 598551 - protein, 10 aa, Homo sapiens
  CDR3 for alpha chain variable domain of TCR clone 299276 (TRAV38-1, TRAJ53)
CAFMNHGLES

SEQ ID NO: 598552 - protein, 13 aa, Homo sapiens
  CDR3 for beta chain variable domain of TCR clone 299276 (TRBV19, TRBJ2-7)
CASSPRQSYEQYF

SEQ ID NO: 598553 - protein, 15 aa, Homo sapiens
  CDR3 for alpha chain variable domain of TCR clone 299277 (TRAV26-1, TRAJ29)
CIVRVEGAGNTPLVF

SEQ ID NO: 598554 - protein, 15 aa, Homo sapiens
  CDR3 for beta chain variable domain of TCR clone 299277 (TRBV28, TRBJ2-5)
CASSPGQGSIETQYF

SEQ ID NO: 598555 - protein, 14 aa, Homo sapiens
  CDR3 for alpha chain variable domain of TCR clone 299278 (TRAV21, TRAJ15)
RAVSLNQAGTALIF

SEQ ID NO: 598556 - protein, 11 aa, Homo sapiens
  CDR3 for beta chain variable domain of TCR clone 299278 (TRBV20-1, TRBJ2-7)
CSARTSYEQYF

SEQ ID NO: 598557 - protein, 14 aa, Homo sapiens
  CDR3 for alpha chain variable domain of TCR clone 299279 (TRAV8-3, TRAJ17)
CAVALQSCRQQANF

SEQ ID NO: 598558 - protein, 13 aa, Homo sapiens
  CDR3 for beta chain variable domain of TCR clone 299279 (TRBV15, TRBJ1-6)
CATSGGLNSPLHF

SEQ ID NO: 598559 - protein, 13 aa, Homo sapiens
  CDR3 for alpha chain variable domain of TCR clone 299280 (TRAV12-1, TRAJ11)
CVVTRGGYSTLTI

SEQ ID NO: 598560 - protein, 13 aa, Homo sapiens
  CDR3 for beta chain variable domain of TCR clone 299280 (TRBV20-1, TRBJ1-2)
CSARDQGAYGYTF

SEQ ID NO: 598561 - protein, 13 aa, Homo sapiens
  CDR3 for alpha chain variable domain of TCR clone 299281 (TRAV20, TRAJ56)
CAVHCLANSKLTS

SEQ ID NO: 598562 - protein, 12 aa, Homo sapiens
  CDR3 for beta chain variable domain of TCR clone 299281 (TRBV7-2, TRBJ2-1)
CASSPQDIEQFF

SEQ ID NO: 598563 - protein, 14 aa, Homo sapiens
  CDR3 for alpha chain variable domain of TCR clone 299282 (TRAV2, TRAJ9)
CAVEDRSGGFKTIS

SEQ ID NO: 598564 - protein, 15 aa, Homo sapiens
  CDR3 for beta chain variable domain of TCR clone 299282 (TRBV5-1, TRBJ1-1)
CASSVDRLGNTEAFF

SEQ ID NO: 598565 - protein, 14 aa, Homo sapiens
  CDR3 for alpha chain variable domain of TCR clone 299283 (TRAV13-1, TRAJ40)
CAASMTSGTYKYIF

SEQ ID NO: 598566 - protein, 17 aa, Homo sapiens
  CDR3 for beta chain variable domain of TCR clone 299283 (TRBV7-3, TRBJ2-3)
CASSLMKRMRGADTQYF

SEQ ID NO: 598567 - protein, 18 aa, Homo sapiens
  CDR3 for alpha chain variable domain of TCR clone 299284 (TRAV13-1, TRAJ52)
CAASKRSAGVTSYGKLTF

SEQ ID NO: 598568 - protein, 13 aa, Homo sapiens
  CDR3 for beta chain variable domain of TCR clone 299284 (TRBV12-4, TRBJ1-2)
CASSLRQGKGYAF

SEQ ID NO: 598569 - protein, 14 aa, Homo sapiens
  CDR3 for alpha chain variable domain of TCR clone 299285 (TRAV8-3, TRAJ44)
CAVGNTGTASKLTF

SEQ ID NO: 598570 - protein, 15 aa, Homo sapiens
  CDR3 for beta chain variable domain of TCR clone 299285 (TRBV7-2, TRBJ2-3)
CASSSTGLETDTQYF

SEQ ID NO: 598571 - protein, 10 aa, Homo sapiens
  CDR3 for alpha chain variable domain of TCR clone 299286 (TRAV12-2, TRAJ10)
CAAWTGVETH

SEQ ID NO: 598572 - protein, 13 aa, Homo sapiens
  CDR3 for beta chain variable domain of TCR clone 299286 (TRBV19, TRBJ1-2)
CASIVPGQDGYTF

SEQ ID NO: 598573 - protein, 13 aa, Homo sapiens
  CDR3 for alpha chain variable domain of TCR clone 299287 (TRAV36/DV7, TRAJ49)
CAVEANTGTQFYF

SEQ ID NO: 598574 - protein, 14 aa, Homo sapiens
  CDR3 for beta chain variable domain of TCR clone 299287 (TRBV20-1, TRBJ2-5)
CSASSGRDAETQYF

SEQ ID NO: 598575 - protein, 12 aa, Homo sapiens
  CDR3 for alpha chain variable domain of TCR clone 299288 (TRAV12-3, TRAJ5)
CAMDTGRKALTF

SEQ ID NO: 598576 - protein, 13 aa, Homo sapiens
  CDR3 for beta chain variable domain of TCR clone 299288 (TRBV7-7, TRBJ2-2)
CASSLTSAGELFF

SEQ ID NO: 598577 - protein, 14 aa, Homo sapiens
  CDR3 for alpha chain variable domain of TCR clone 299289 (TRAV12-3, TRAJ57)
CARALEGGSERLVF

SEQ ID NO: 598578 - protein, 15 aa, Homo sapiens
  CDR3 for beta chain variable domain of TCR clone 299289 (TRBV7-9, TRBJ1-6)
CASSSPGRGNSPLHF

SEQ ID NO: 598579 - protein, 14 aa, Homo sapiens
  CDR3 for alpha chain variable domain of TCR clone 299290 (TRAV21, TRAJ4)
CAAPGVGGYNKLIF

SEQ ID NO: 598580 - protein, 13 aa, Homo sapiens
  CDR3 for beta chain variable domain of TCR clone 299290 (TRBV19, TRBJ1-2)
CASSVPGQDGYTF

SEQ ID NO: 598581 - protein, 17 aa, Homo sapiens
  CDR3 for alpha chain variable domain of TCR clone 299291 (TRAV13-1, TRAJ28)
CAASPPYSGAGSYNLTF

SEQ ID NO: 598582 - protein, 13 aa, Homo sapiens
  CDR3 for beta chain variable domain of TCR clone 299291 (TRBV7-2, TRBJ2-7)
CASSSPSGSEQYS

SEQ ID NO: 598583 - protein, 15 aa, Homo sapiens
  CDR3 for alpha chain variable domain of TCR clone 299292 (TRAV1-2, TRAJ17)
CAVRGYGAAGNKLTF

SEQ ID NO: 598584 - protein, 23 aa, Homo sapiens
  CDR3 for beta chain variable domain of TCR clone 299292 (TRBV11-2, TRBJ2-5)
CASSSPGGEGAASRDPVRRARHA

SEQ ID NO: 598585 - protein, 14 aa, Homo sapiens
  CDR3 for alpha chain variable domain of TCR clone 299293 (TRAV1-2, TRAJ8)
CAVREDTGFPKLVF

SEQ ID NO: 598586 - protein, 17 aa, Homo sapiens
  CDR3 for beta chain variable domain of TCR clone 299293 (TRBV13, TRBJ2-3)
CASSLSRVAGGRNTQYF

SEQ ID NO: 598587 - protein, 14 aa, Homo sapiens
  CDR3 for alpha chain variable domain of TCR clone 299294 (TRAV38-1, TRAJ31)
CAFMKHDNNASIMF

SEQ ID NO: 598588 - protein, 16 aa, Homo sapiens
  CDR3 for beta chain variable domain of TCR clone 299294 (TRBV23-1, TRBJ2-1)
CISAPATGPTYNEQFF

SEQ ID NO: 598589 - protein, 12 aa, Homo sapiens
  CDR3 for alpha chain variable domain of TCR clone 299295 (TRAV38-1, TRAJ32)
CAPLGATNKLTF

SEQ ID NO: 598590 - protein, 14 aa, Homo sapiens
  CDR3 for beta chain variable domain of TCR clone 299295 (TRBV29-1, TRBJ2-5)
CSVETSGSGETQYF

SEQ ID NO: 598591 - protein, 13 aa, Homo sapiens
  CDR3 for alpha chain variable domain of TCR clone 299296 (TRAV20, TRAJ37)
CAGCSSNTGKLIF

SEQ ID NO: 598592 - protein, 16 aa, Homo sapiens
  CDR3 for beta chain variable domain of TCR clone 299296 (TRBV2, TRBJ1-3)
CASSRTGGSTGNTIYF

SEQ ID NO: 598593 - protein, 13 aa, Homo sapiens
  CDR3 for alpha chain variable domain of TCR clone 299297 (TRAV12-2, TRAJ39)
CAVNNNAGNMLTF

SEQ ID NO: 598594 - protein, 15 aa, Homo sapiens
  CDR3 for beta chain variable domain of TCR clone 299297 (TRBV7-9, TRBJ1-5)
CASSQGHQPNQPQHF

SEQ ID NO: 598595 - protein, 13 aa, Homo sapiens
  CDR3 for alpha chain variable domain of TCR clone 299298 (TRAV23/DV6, TRAJ34)
YAASIEGTDKLIF

SEQ ID NO: 598596 - protein, 15 aa, Homo sapiens
  CDR3 for beta chain variable domain of TCR clone 299298 (TRBV19, TRBJ2-7)
CASSPAGSGEALRYF

SEQ ID NO: 598597 - protein, 11 aa, Homo sapiens
  CDR3 for alpha chain variable domain of TCR clone 299299 (TRAV2, TRAJ13)
CASGGYQKVTF

SEQ ID NO: 598598 - protein, 16 aa, Homo sapiens
  CDR3 for beta chain variable domain of TCR clone 299299 (TRBV6-1, TRBJ2-7)
CASSETLDRGAETQYF

SEQ ID NO: 598599 - protein, 14 aa, Homo sapiens
  CDR3 for alpha chain variable domain of TCR clone 299300 (TRAV1-2, TRAJ16)
CAVNRFSDGQKLLF

SEQ ID NO: 598600 - protein, 15 aa, Homo sapiens
  CDR3 for beta chain variable domain of TCR clone 299300 (TRBV28, TRBJ1-3)
CASGATGNAGNTIYF

SEQ ID NO: 598601 - protein, 11 aa, Homo sapiens
  CDR3 for alpha chain variable domain of TCR clone 299301 (TRAV13-1, TRAJ20)
CAAKRRLQAQL

SEQ ID NO: 598602 - protein, 13 aa, Homo sapiens
  CDR3 for beta chain variable domain of TCR clone 299301 (TRBV19, TRBJ1-2)
CASSVPGQDGCTF

SEQ ID NO: 598603 - protein, 14 aa, Homo sapiens
  CDR3 for alpha chain variable domain of TCR clone 299302 (TRAV17, TRAJ34)
CATDSLEGTVKLIF

SEQ ID NO: 598604 - protein, 13 aa, Homo sapiens
  CDR3 for beta chain variable domain of TCR clone 299302 (TRBV11-2, TRBJ2-7)
CASSGTRPYEQYF

SEQ ID NO: 598605 - protein, 11 aa, Homo sapiens
  CDR3 for alpha chain variable domain of TCR clone 299303 (TRAV12-3, TRAJ43)
CAMGVSNDMRF

SEQ ID NO: 598606 - protein, 17 aa, Homo sapiens
  CDR3 for beta chain variable domain of TCR clone 299303 (TRBV7-3, TRBJ2-2)
CASSLSGTSGGTGELFF

SEQ ID NO: 598607 - protein, 13 aa, Homo sapiens
  CDR3 for alpha chain variable domain of TCR clone 299304 (TRAV13-1, TRAJ21)
CAASIYNFNKFYF

SEQ ID NO: 598608 - protein, 20 aa, Homo sapiens
  CDR3 for beta chain variable domain of TCR clone 299304 (TRBV7-8, TRBJ2-2)
CAGSHLFPGPTIHTTGELFF

SEQ ID NO: 598609 - protein, 11 aa, Homo sapiens
  CDR3 for alpha chain variable domain of TCR clone 299305 (TRAV12-1, TRAJ31)
CVVNGDARLMF

SEQ ID NO: 598610 - protein, 15 aa, Homo sapiens
  CDR3 for beta chain variable domain of TCR clone 299305 (TRBV28, TRBJ2-5)
CASSPGQGSIETQYF

SEQ ID NO: 598611 - protein, 13 aa, Homo sapiens
  CDR3 for alpha chain variable domain of TCR clone 299306 (TRAV13-2, TRAJ13)
CAERPGGYQKVTF

SEQ ID NO: 598612 - protein, 16 aa, Homo sapiens
  CDR3 for beta chain variable domain of TCR clone 299306 (TRBV5-4, TRBJ2-3)
CASQQPGAGGADTQYF

SEQ ID NO: 598613 - protein, 15 aa, Homo sapiens
  CDR3 for alpha chain variable domain of TCR clone 299307 (TRAV3, TRAJ32)
CAVSSYGGATNKRIF

SEQ ID NO: 598614 - protein, 13 aa, Homo sapiens
  CDR3 for beta chain variable domain of TCR clone 299307 (TRBV20-1, TRBJ2-7)
CSARPSTNYEQYF

SEQ ID NO: 598615 - protein, 18 aa, Homo sapiens
  CDR3 for alpha chain variable domain of TCR clone 299308 (TRAV9-2, TRAJ52)
CALSRHNAGGTSYGKLTF

SEQ ID NO: 598616 - protein, 15 aa, Homo sapiens
  CDR3 for beta chain variable domain of TCR clone 299308 (TRBV4-1, TRBJ1-4)
CASSDTGGTNEKLFF

SEQ ID NO: 598617 - protein, 10 aa, Homo sapiens
  CDR3 for alpha chain variable domain of TCR clone 299309 (TRAV20, TRAJ43)
CAVQADDMRF

SEQ ID NO: 598618 - protein, 15 aa, Homo sapiens
  CDR3 for beta chain variable domain of TCR clone 299309 (TRBV11-3, TRBJ2-3)
CASLKDGREGDTQYF

SEQ ID NO: 598619 - protein, 15 aa, Homo sapiens
  CDR3 for alpha chain variable domain of TCR clone 299310 (TRAV12-2, TRAJ50)
CAVNGLEPSYDKVIF

SEQ ID NO: 598620 - protein, 14 aa, Homo sapiens
  CDR3 for beta chain variable domain of TCR clone 299310 (TRBV7-2, TRBJ1-1)
CASSFLTGTTEAFF

SEQ ID NO: 598621 - protein, 14 aa, Homo sapiens
  CDR3 for alpha chain variable domain of TCR clone 299311 (TRAV8-3, TRAJ4)
CAVGAAGGYNKLIF

SEQ ID NO: 598622 - protein, 14 aa, Homo sapiens
  CDR3 for beta chain variable domain of TCR clone 299311 (TRBV7-3, TRBJ1-1)
CASSLKGGNTEAFF

SEQ ID NO: 598623 - protein, 12 aa, Homo sapiens
  CDR3 for alpha chain variable domain of TCR clone 299312 (TRAV21, TRAJ31)
CAVWGNNARLMF

SEQ ID NO: 598624 - protein, 16 aa, Homo sapiens
  CDR3 for beta chain variable domain of TCR clone 299312 (TRBV27, TRBJ2-5)
CARSYGPGGQKETQYF

SEQ ID NO: 598625 - protein, 17 aa, Homo sapiens
  CDR3 for alpha chain variable domain of TCR clone 299313 (TRAV26-1, TRAJ53)
CIVRVDDNGGSNYKLTF

SEQ ID NO: 598626 - protein, 15 aa, Homo sapiens
  CDR3 for beta chain variable domain of TCR clone 299313 (TRBV20-1, TRBJ2-7)
CSARVPAAYFYEQYF

SEQ ID NO: 598627 - protein, 14 aa, Homo sapiens
  CDR3 for alpha chain variable domain of TCR clone 299314 (TRAV4, TRAJ6)
CLVGEAGGSYIPTF

SEQ ID NO: 598628 - protein, 16 aa, Homo sapiens
  CDR3 for beta chain variable domain of TCR clone 299314 (TRBV7-6, TRBJ2-1)
RASSLNEGPSYNEQFF

SEQ ID NO: 598629 - protein, 15 aa, Homo sapiens
  CDR3 for alpha chain variable domain of TCR clone 299315 (TRAV26-1, TRAJ15)
CIVRAANQAGTALIF

SEQ ID NO: 598630 - protein, 15 aa, Homo sapiens
  CDR3 for beta chain variable domain of TCR clone 299315 (TRBV20-1, TRBJ1-1)
CSARSAGTSNTEAFF

SEQ ID NO: 598631 - protein, 15 aa, Homo sapiens
  CDR3 for alpha chain variable domain of TCR clone 299316 (TRAV20, TRAJ58)
YAVQDLETSGPRLTF

SEQ ID NO: 598632 - protein, 12 aa, Homo sapiens
  CDR3 for beta chain variable domain of TCR clone 299316 (TRBV9, TRBJ2-2)
CASSARTGELFF

SEQ ID NO: 598633 - protein, 13 aa, Homo sapiens
  CDR3 for alpha chain variable domain of TCR clone 299317 (TRAV1-2, TRAJ12)
CAVSMDSSYKLIF

SEQ ID NO: 598634 - protein, 15 aa, Homo sapiens
  CDR3 for beta chain variable domain of TCR clone 299317 (TRBV27, TRBJ2-5)
CASSLIASGGETQYF

SEQ ID NO: 598635 - protein, 15 aa, Homo sapiens
  CDR3 for alpha chain variable domain of TCR clone 299318 (TRAV27, TRAJ38)
CAARRNAGNNRKLIW

SEQ ID NO: 598636 - protein, 15 aa, Homo sapiens
  CDR3 for beta chain variable domain of TCR clone 299318 (TRBV5-1, TRBJ2-1)
RASSPPRAPYNEQFF

SEQ ID NO: 598637 - protein, 13 aa, Homo sapiens
  CDR3 for alpha chain variable domain of TCR clone 299319 (TRAV29/DV5, TRAJ31)
CAASRNNNARLMF

SEQ ID NO: 598638 - protein, 15 aa, Homo sapiens
  CDR3 for beta chain variable domain of TCR clone 299319 (TRBV2, TRBJ2-1)
CASSELAGSYNEQYF

SEQ ID NO: 598639 - protein, 15 aa, Homo sapiens
  CDR3 for alpha chain variable domain of TCR clone 299320 (TRAV8-3, TRAJ37)
CALGAPSSNQGKLIF

SEQ ID NO: 598640 - protein, 15 aa, Homo sapiens
  CDR3 for beta chain variable domain of TCR clone 299320 (TRBV11-2, TRBJ1-2)
CASSQMRGLNYGYTF

SEQ ID NO: 598641 - protein, 12 aa, Homo sapiens
  CDR3 for alpha chain variable domain of TCR clone 299321 (TRAV1-2, TRAJ26)
CAVRYYGQNFVF

SEQ ID NO: 598642 - protein, 17 aa, Homo sapiens
  CDR3 for beta chain variable domain of TCR clone 299321 (TRBV7-8, TRBJ2-6)
CASSAGTGGAGANVLTF

SEQ ID NO: 598643 - protein, 13 aa, Homo sapiens
  CDR3 for alpha chain variable domain of TCR clone 299322 (TRAV27, TRAJ54)
CAGAGQGAQKLVF

SEQ ID NO: 598644 - protein, 15 aa, Homo sapiens
  CDR3 for beta chain variable domain of TCR clone 299322 (TRBV18, TRBJ2-6)
CGSSPSYAGANVLTF

SEQ ID NO: 598645 - protein, 12 aa, Homo sapiens
  CDR3 for alpha chain variable domain of TCR clone 299323 (TRAV8-6, TRAJ11)
CAVSSGYSTLTF

SEQ ID NO: 598646 - protein, 11 aa, Homo sapiens
  CDR3 for beta chain variable domain of TCR clone 299323 (TRBV20-1, TRBJ1-5)
CSAQGDQPQHF

SEQ ID NO: 598647 - protein, 12 aa, Homo sapiens
  CDR3 for alpha chain variable domain of TCR clone 299324 (TRAV12-3, TRAJ17)
CAMTLTGNKLTF

SEQ ID NO: 598648 - protein, 15 aa, Homo sapiens
  CDR3 for beta chain variable domain of TCR clone 299324 (TRBV27, TRBJ2-1)
CAGSNGGGSSNEQFF

SEQ ID NO: 598649 - protein, 13 aa, Homo sapiens
  CDR3 for alpha chain variable domain of TCR clone 299325 (TRAV26-1, TRAJ39)
CIVRAVAGNMLTF

SEQ ID NO: 598650 - protein, 14 aa, Homo sapiens
  CDR3 for beta chain variable domain of TCR clone 299325 (TRBV20-1, TRBJ2-5)
CSARRQGIRETQYF

SEQ ID NO: 598651 - protein, 11 aa, Homo sapiens
  CDR3 for alpha chain variable domain of TCR clone 299326 (TRAV35, TRAJ30)
CAGPGDDKIIF

SEQ ID NO: 598652 - protein, 15 aa, Homo sapiens
  CDR3 for beta chain variable domain of TCR clone 299326 (TRBV9, TRBJ2-1)
CASSLAGSSYNEQFF

SEQ ID NO: 598653 - protein, 12 aa, Homo sapiens
  CDR3 for alpha chain variable domain of TCR clone 299327 (TRAV26-2, TRAJ48)
CILRKGNEKLTF

SEQ ID NO: 598654 - protein, 14 aa, Homo sapiens
  CDR3 for beta chain variable domain of TCR clone 299327 (TRBV28, TRBJ2-7)
CASSTLRGRFEQSF

SEQ ID NO: 598655 - protein, 15 aa, Homo sapiens
  CDR3 for alpha chain variable domain of TCR clone 299328 (TRAV1-2, TRAJ35)
CAVRDPGGFGNVLHC

SEQ ID NO: 598656 - protein, 14 aa, Homo sapiens
  CDR3 for beta chain variable domain of TCR clone 299328 (TRBV5-1, TRBJ2-1)
FASSLDDRFDEQFF

SEQ ID NO: 598657 - protein, 10 aa, Homo sapiens
  CDR3 for alpha chain variable domain of TCR clone 299329 (TRAV1-2, TRAJ23)
CGGQGGKLIF

SEQ ID NO: 598658 - protein, 16 aa, Homo sapiens
  CDR3 for beta chain variable domain of TCR clone 299329 (TRBV11-2, TRBJ1-1)
CASSLRQGGEHSKAFF

SEQ ID NO: 598659 - protein, 16 aa, Homo sapiens
  CDR3 for alpha chain variable domain of TCR clone 299330 (TRAV3, TRAJ37)
CAVRGKGSGNTGKLIF

SEQ ID NO: 598660 - protein, 21 aa, Homo sapiens
  CDR3 for beta chain variable domain of TCR clone 299330 (TRBV15, TRBJ2-1)
AWGTQPCTCVPPAEVDTALFF

SEQ ID NO: 598661 - protein, 16 aa, Homo sapiens
  CDR3 for alpha chain variable domain of TCR clone 299331 (TRAV3, TRAJ10)
CAVRYMRAGGGKKLTF

SEQ ID NO: 598662 - protein, 15 aa, Homo sapiens
  CDR3 for beta chain variable domain of TCR clone 299331 (TRBV20-1, TRBJ2-7)
CSARDRVSGMDEQYF

SEQ ID NO: 598663 - protein, 10 aa, Homo sapiens
  CDR3 for alpha chain variable domain of TCR clone 299332 (TRAV36/DV7, TRAJ49)
CALTGNQFYF

SEQ ID NO: 598664 - protein, 13 aa, Homo sapiens
  CDR3 for beta chain variable domain of TCR clone 299332 (TRBV12-4, TRBJ2-7)
CASSPTETYEQYF

SEQ ID NO: 598665 - protein, 16 aa, Homo sapiens
  CDR3 for alpha chain variable domain of TCR clone 299333 (TRAV26-1, TRAJ32)
CIVRTNYGGATNKLIF

SEQ ID NO: 598666 - protein, 14 aa, Homo sapiens
  CDR3 for beta chain variable domain of TCR clone 299333 (TRBV27, TRBJ1-1)
CASSLVSGLSEAFF

SEQ ID NO: 598667 - protein, 10 aa, Homo sapiens
  CDR3 for alpha chain variable domain of TCR clone 299334 (TRAV13-1, TRAJ15)
INQAGTALIF

SEQ ID NO: 598668 - protein, 15 aa, Homo sapiens
  CDR3 for beta chain variable domain of TCR clone 299334 (TRBV7-9, TRBJ1-6)
CASSSPGRGNSPLHF

SEQ ID NO: 598669 - protein, 15 aa, Homo sapiens
  CDR3 for alpha chain variable domain of TCR clone 299335 (TRAV23/DV6, TRAJ18)
CAARYRGSTLGRLYF

SEQ ID NO: 598670 - protein, 12 aa, Homo sapiens
  CDR3 for beta chain variable domain of TCR clone 299335 (TRBV29-1, TRBJ2-3)
CSVTGGADTQYF

SEQ ID NO: 598671 - protein, 15 aa, Homo sapiens
  CDR3 for alpha chain variable domain of TCR clone 299336 (TRAV12-1, TRAJ44)
CVVFVNTGTASKLTF

SEQ ID NO: 598672 - protein, 17 aa, Homo sapiens
  CDR3 for beta chain variable domain of TCR clone 299336 (TRBV4-1, TRBJ2-7)
CASSRDPLGVRGGEQYF

SEQ ID NO: 598673 - protein, 14 aa, Homo sapiens
  CDR3 for alpha chain variable domain of TCR clone 299337 (TRAV8-4, TRAJ48)
CAVSETFGNEKLTF

SEQ ID NO: 598674 - protein, 14 aa, Homo sapiens
  CDR3 for beta chain variable domain of TCR clone 299337 (TRBV13, TRBJ2-7)
CASSVKGASYEQYF

SEQ ID NO: 598675 - protein, 14 aa, Homo sapiens
  CDR3 for alpha chain variable domain of TCR clone 299338 (TRAV4, TRAJ9)
CLVGSGTGGFKTIF

SEQ ID NO: 598676 - protein, 19 aa, Homo sapiens
  CDR3 for beta chain variable domain of TCR clone 299338 (TRBV28, TRBJ2-7)
CASSYSGTSRLGWVYEQYF

SEQ ID NO: 598677 - protein, 13 aa, Homo sapiens
  CDR3 for alpha chain variable domain of TCR clone 299339 (TRAV3, TRAJ21)
CAVREQDFNKFYF

SEQ ID NO: 598678 - protein, 13 aa, Homo sapiens
  CDR3 for beta chain variable domain of TCR clone 299339 (TRBV9, TRBJ2-1)
CASSASGGNEQFF

SEQ ID NO: 598679 - protein, 13 aa, Homo sapiens
  CDR3 for alpha chain variable domain of TCR clone 299340 (TRAV17, TRAJ9)
CATDYTGGFKTSF

SEQ ID NO: 598680 - protein, 14 aa, Homo sapiens
  CDR3 for beta chain variable domain of TCR clone 299340 (TRBV19, TRBJ2-5)
CASSMTGQQETQYF

SEQ ID NO: 598681 - protein, 15 aa, Homo sapiens
  CDR3 for alpha chain variable domain of TCR clone 299341 (TRAV26-1, TRAJ40)
CIVRVTTSGTYKYIF

SEQ ID NO: 598682 - protein, 18 aa, Homo sapiens
  CDR3 for beta chain variable domain of TCR clone 299341 (TRBV11-2, TRBJ2-3)
CASSLGGASRGAPNTQYL

SEQ ID NO: 598683 - protein, 11 aa, Homo sapiens
  CDR3 for alpha chain variable domain of TCR clone 299342 (TRAV13-1, TRAJ39)
CASHAGNMLTF

SEQ ID NO: 598684 - protein, 13 aa, Homo sapiens
  CDR3 for beta chain variable domain of TCR clone 299342 (TRBV15, TRBJ1-6)
CATSGGLNSPLHF

SEQ ID NO: 598685 - protein, 15 aa, Homo sapiens
  CDR3 for alpha chain variable domain of TCR clone 299343 (TRAV13-2, TRAJ35)
CAESPNIGFGNVLHC

SEQ ID NO: 598686 - protein, 13 aa, Homo sapiens
  CDR3 for beta chain variable domain of TCR clone 299343 (TRBV10-2, TRBJ2-5)
CASITLARETQYF

SEQ ID NO: 598687 - protein, 10 aa, Homo sapiens
  CDR3 for alpha chain variable domain of TCR clone 299344 (TRAV8-4, TRAJ12)
WRDSSYKLIF

SEQ ID NO: 598688 - protein, 13 aa, Homo sapiens
  CDR3 for beta chain variable domain of TCR clone 299344 (TRBV14, TRBJ2-7)
CASSQDRRYEQYF

SEQ ID NO: 598689 - protein, 12 aa, Homo sapiens
  CDR3 for alpha chain variable domain of TCR clone 299345 (TRAV36/DV7, TRAJ54)
CAVVRGAQKLVF

SEQ ID NO: 598690 - protein, 14 aa, Homo sapiens
  CDR3 for beta chain variable domain of TCR clone 299345 (TRBV7-3, TRBJ1-1)
CANSLKGGNTEAFF

SEQ ID NO: 598691 - protein, 13 aa, Homo sapiens
  CDR3 for alpha chain variable domain of TCR clone 299346 (TRAV27, TRAJ8)
CAGGPTGFQKLVF

SEQ ID NO: 598692 - protein, 15 aa, Homo sapiens
  CDR3 for beta chain variable domain of TCR clone 299346 (TRBV28, TRBJ2-2)
CASTVAGANTGELFF

SEQ ID NO: 598693 - protein, 12 aa, Homo sapiens
  CDR3 for alpha chain variable domain of TCR clone 299347 (TRAV2, TRAJ5)
CASDTGRRALTF

SEQ ID NO: 598694 - protein, 15 aa, Homo sapiens
  CDR3 for beta chain variable domain of TCR clone 299347 (TRBV9, TRBJ1-6)
CASSVAGTGDSPLHF

SEQ ID NO: 598695 - protein, 13 aa, Homo sapiens
  CDR3 for alpha chain variable domain of TCR clone 299348 (TRAV3, TRAJ11)
CALTQSGYSTLTF

SEQ ID NO: 598696 - protein, 14 aa, Homo sapiens
  CDR3 for beta chain variable domain of TCR clone 299348 (TRBV19, TRBJ2-7)
CASSTTRSSYEQYF

SEQ ID NO: 598697 - protein, 14 aa, Homo sapiens
  CDR3 for alpha chain variable domain of TCR clone 299349 (TRAV12-3, TRAJ10)
SHLPLTGGGNKLTF

SEQ ID NO: 598698 - protein, 16 aa, Homo sapiens
  CDR3 for beta chain variable domain of TCR clone 299349 (TRBV5-4, TRBJ2-1)
CASSLVGSAQDNEQFF

SEQ ID NO: 598699 - protein, 14 aa, Homo sapiens
  CDR3 for alpha chain variable domain of TCR clone 299350 (TRAV36/DV7, TRAJ40)
CAVETTSGTYKYIF

SEQ ID NO: 598700 - protein, 17 aa, Homo sapiens
  CDR3 for beta chain variable domain of TCR clone 299350 (TRBV13, TRBJ2-3)
CASSLSRVAGGRNTQYF

SEQ ID NO: 598701 - protein, 12 aa, Homo sapiens
  CDR3 for alpha chain variable domain of TCR clone 299351 (TRAV12-3, TRAJ5)
CAMDTGRRALTS

SEQ ID NO: 598702 - protein, 13 aa, Homo sapiens
  CDR3 for beta chain variable domain of TCR clone 299351 (TRBV7-7, TRBJ2-2)
CASSLTSAGELFF

SEQ ID NO: 598703 - protein, 14 aa, Homo sapiens
  CDR3 for alpha chain variable domain of TCR clone 299352 (TRAV1-2, TRAJ6)
CAVSLSGGSNIPTF

SEQ ID NO: 598704 - protein, 14 aa, Homo sapiens
  CDR3 for beta chain variable domain of TCR clone 299352 (TRBV28, TRBJ2-4)
CASSPRARGNIQYF

SEQ ID NO: 598705 - protein, 15 aa, Homo sapiens
  CDR3 for alpha chain variable domain of TCR clone 299353 (TRAV13-1, TRAJ10)
CAATILTGGGNKLTS

SEQ ID NO: 598706 - protein, 15 aa, Homo sapiens
  CDR3 for beta chain variable domain of TCR clone 299353 (TRBV2, TRBJ2-7)
CASTLLGSGATEQYF

SEQ ID NO: 598707 - protein, 12 aa, Homo sapiens
  CDR3 for alpha chain variable domain of TCR clone 299354 (TRAV8-3, TRAJ26)
CAGENYGQNFVF

SEQ ID NO: 598708 - protein, 16 aa, Homo sapiens
  CDR3 for beta chain variable domain of TCR clone 299354 (TRBV20-1, TRBJ1-4)
CSAPGQGLLTNEKLFF

SEQ ID NO: 598709 - protein, 15 aa, Homo sapiens
  CDR3 for alpha chain variable domain of TCR clone 299355 (TRAV2, TRAJ24)
CAVVRLKNSWGKLQF

SEQ ID NO: 598710 - protein, 16 aa, Homo sapiens
  CDR3 for beta chain variable domain of TCR clone 299355 (TRBV7-7, TRBJ2-3)
FASSPGTSGSTDTQYF

SEQ ID NO: 598711 - protein, 13 aa, Homo sapiens
  CDR3 for alpha chain variable domain of TCR clone 299356 (TRAV8-4, TRAJ10)
CAAFMGGGNKLTF

SEQ ID NO: 598712 - protein, 12 aa, Homo sapiens
  CDR3 for beta chain variable domain of TCR clone 299356 (TRBV3-1, TRBJ2-1)
CASSQGSSGQFF

SEQ ID NO: 598713 - protein, 14 aa, Homo sapiens
  CDR3 for alpha chain variable domain of TCR clone 299357 (TRAV27, TRAJ48)
CAGAPGFGNEKLTF

SEQ ID NO: 598714 - protein, 16 aa, Homo sapiens
  CDR3 for beta chain variable domain of TCR clone 299357 (TRBV6-6, TRBJ1-5)
CASSYSTLVGNQPQHF

SEQ ID NO: 598715 - protein, 13 aa, Homo sapiens
  CDR3 for alpha chain variable domain of TCR clone 299358 (TRAV36/DV7, TRAJ21)
CAVEAYNFNKFYF

SEQ ID NO: 598716 - protein, 14 aa, Homo sapiens
  CDR3 for beta chain variable domain of TCR clone 299358 (TRBV6-1, TRBJ1-1)
CASSGTGLNTEAFC

SEQ ID NO: 598717 - protein, 13 aa, Homo sapiens
  CDR3 for alpha chain variable domain of TCR clone 299359 (TRAV16, TRAJ10)
CAPAREEETNPPL

SEQ ID NO: 598718 - protein, 15 aa, Homo sapiens
  CDR3 for beta chain variable domain of TCR clone 299359 (TRBV6-3, TRBJ2-7)
CASSSPGTVFYEQYF

SEQ ID NO: 598719 - protein, 14 aa, Homo sapiens
  CDR3 for alpha chain variable domain of TCR clone 299360 (TRAV12-2, TRAJ13)
CAVKKTGGYHKVTF

SEQ ID NO: 598720 - protein, 15 aa, Homo sapiens
  CDR3 for beta chain variable domain of TCR clone 299360 (TRBV11-2, TRBJ2-2)
CASSSDRVNAGELFF

SEQ ID NO: 598721 - protein, 12 aa, Homo sapiens
  CDR3 for alpha chain variable domain of TCR clone 299361 (TRAV12-1, TRAJ31)
CVSWSNNARLMF

SEQ ID NO: 598722 - protein, 15 aa, Homo sapiens
  CDR3 for beta chain variable domain of TCR clone 299361 (TRBV7-2, TRBJ1-5)
CASSLDRGQDQPQHF

SEQ ID NO: 598723 - protein, 12 aa, Homo sapiens
  CDR3 for alpha chain variable domain of TCR clone 299362 (TRAV26-1, TRAJ48)
CIDVFGNEKLTF

SEQ ID NO: 598724 - protein, 18 aa, Homo sapiens
  CDR3 for beta chain variable domain of TCR clone 299362 (TRBV7-2, TRBJ2-3)
CASSLETSRSRKADTQYF

SEQ ID NO: 598725 - protein, 14 aa, Homo sapiens
  CDR3 for alpha chain variable domain of TCR clone 299363 (TRAV29/DV5, TRAJ36)
CAARRKTGANNLFF

SEQ ID NO: 598726 - protein, 12 aa, Homo sapiens
  CDR3 for beta chain variable domain of TCR clone 299363 (TRBV7-2, TRBJ2-1)
CASSPQDIEQFF

SEQ ID NO: 598727 - protein, 16 aa, Homo sapiens
  CDR3 for alpha chain variable domain of TCR clone 299364 (TRAV14/DV4, TRAJ57)
CAMKLVGRGGAEKMVF

SEQ ID NO: 598728 - protein, 16 aa, Homo sapiens
  CDR3 for beta chain variable domain of TCR clone 299364 (TRBV29-1, TRBJ1-2)
CSVEANRDIANYGYTF

SEQ ID NO: 598729 - protein, 14 aa, Homo sapiens
  CDR3 for alpha chain variable domain of TCR clone 299365 (TRAV1-2, TRAJ8)
CAVREDTGFQKLVF

SEQ ID NO: 598730 - protein, 19 aa, Homo sapiens
  CDR3 for beta chain variable domain of TCR clone 299365 (TRBV28, TRBJ2-1)
CASSFSIRGSGRTRYEQFV

SEQ ID NO: 598731 - protein, 14 aa, Homo sapiens
  CDR3 for alpha chain variable domain of TCR clone 299366 (TRAV26-2, TRAJ32)
CCVGYGGATNKLIF

SEQ ID NO: 598732 - protein, 14 aa, Homo sapiens
  CDR3 for beta chain variable domain of TCR clone 299366 (TRBV18, TRBJ2-3)
CASSGLADTDTQYF

SEQ ID NO: 598733 - protein, 14 aa, Homo sapiens
  CDR3 for alpha chain variable domain of TCR clone 299367 (TRAV8-4, TRAJ43)
CAVSDPRHNNDMRF

SEQ ID NO: 598734 - protein, 15 aa, Homo sapiens
  CDR3 for beta chain variable domain of TCR clone 299367 (TRBV4-2, TRBJ1-2)
CASSQRTGGRDGYTF

SEQ ID NO: 598735 - protein, 16 aa, Homo sapiens
  CDR3 for alpha chain variable domain of TCR clone 299368 (TRAV27, TRAJ13)
CAGAKSDSGGYQKVTF

SEQ ID NO: 598736 - protein, 19 aa, Homo sapiens
  CDR3 for beta chain variable domain of TCR clone 299368 (TRBV11-2, TRBJ2-3)
CASSAPRAGGNPSTDTQYF

SEQ ID NO: 598737 - protein, 12 aa, Homo sapiens
  CDR3 for alpha chain variable domain of TCR clone 299369 (TRAV4, TRAJ26)
CLVGDYGQNFVF

SEQ ID NO: 598738 - protein, 13 aa, Homo sapiens
  CDR3 for beta chain variable domain of TCR clone 299369 (TRBV2, TRBJ2-5)
CASRGGGKETQYF

SEQ ID NO: 598739 - protein, 11 aa, Homo sapiens
  CDR3 for alpha chain variable domain of TCR clone 299370 (TRAV2, TRAJ33)
CAVDSNYQLIW

SEQ ID NO: 598740 - protein, 14 aa, Homo sapiens
  CDR3 for beta chain variable domain of TCR clone 299370 (TRBV7-2, TRBJ2-5)
CASSLSGGGETQYF

SEQ ID NO: 598741 - protein, 15 aa, Homo sapiens
  CDR3 for alpha chain variable domain of TCR clone 299371 (TRAV26-1, TRAJ23)
CIVRVAGYQGGKLIF

SEQ ID NO: 598742 - protein, 15 aa, Homo sapiens
  CDR3 for beta chain variable domain of TCR clone 299371 (TRBV20-1, TRBJ2-7)
CSARDRVSGMDEQYF

SEQ ID NO: 598743 - protein, 16 aa, Homo sapiens
  CDR3 for alpha chain variable domain of TCR clone 299372 (TRAV38-1, TRAJ37)
CAFKGDGSSNTVKLIF

SEQ ID NO: 598744 - protein, 13 aa, Homo sapiens
  CDR3 for beta chain variable domain of TCR clone 299372 (TRBV12-4, TRBJ2-5)
CASSLLRRETQYF

SEQ ID NO: 598745 - protein, 11 aa, Homo sapiens
  CDR3 for alpha chain variable domain of TCR clone 299373 (TRAV35, TRAJ34)
CWAINTDKLIF

SEQ ID NO: 598746 - protein, 14 aa, Homo sapiens
  CDR3 for beta chain variable domain of TCR clone 299373 (TRBV5-1, TRBJ2-7)
CASSRGESLYEQYF

SEQ ID NO: 598747 - protein, 16 aa, Homo sapiens
  CDR3 for alpha chain variable domain of TCR clone 299374 (TRAV21, TRAJ37)
CAVRTAGSSNTGKLIF

SEQ ID NO: 598748 - protein, 12 aa, Homo sapiens
  CDR3 for beta chain variable domain of TCR clone 299374 (TRBV7-9, TRBJ2-5)
CQPSVRTREQYF

SEQ ID NO: 598749 - protein, 12 aa, Homo sapiens
  CDR3 for alpha chain variable domain of TCR clone 299375 (TRAV8-3, TRAJ26)
CAGVNYGQNFAF

SEQ ID NO: 598750 - protein, 12 aa, Homo sapiens
  CDR3 for beta chain variable domain of TCR clone 299375 (TRBV11-2, TRBJ2-2)
CASSLGGGELFF

SEQ ID NO: 598751 - protein, 18 aa, Homo sapiens
  CDR3 for alpha chain variable domain of TCR clone 299376 (TRAV13-1, TRAJ52)
CAASKRSAGGTSYGKLTF

SEQ ID NO: 598752 - protein, 12 aa, Homo sapiens
  CDR3 for beta chain variable domain of TCR clone 299376 (TRBV29-1, TRBJ2-3)
CSVTGGADTQCF

SEQ ID NO: 598753 - protein, 13 aa, Homo sapiens
  CDR3 for alpha chain variable domain of TCR clone 299377 (TRAV1-2, TRAJ9)
CAAVNTGGFKTIF

SEQ ID NO: 598754 - protein, 16 aa, Homo sapiens
  CDR3 for beta chain variable domain of TCR clone 299377 (TRBV28, TRBJ2-2)
CASSLEGGSNTGELFF

SEQ ID NO: 598755 - protein, 13 aa, Homo sapiens
  CDR3 for alpha chain variable domain of TCR clone 299378 (TRAV36/DV7, TRAJ53)
CALSGGSNYKLTF

SEQ ID NO: 598756 - protein, 13 aa, Homo sapiens
  CDR3 for beta chain variable domain of TCR clone 299378 (TRBV28, TRBJ2-7)
CASSLPSRYEQYC

SEQ ID NO: 598757 - protein, 11 aa, Homo sapiens
  CDR3 for alpha chain variable domain of TCR clone 299379 (TRAV26-1, TRAJ37)
CIVRVGRKLIF

SEQ ID NO: 598758 - protein, 15 aa, Homo sapiens
  CDR3 for beta chain variable domain of TCR clone 299379 (TRBV7-2, TRBJ2-2)
CASSETGQGTGELFF

SEQ ID NO: 598759 - protein, 13 aa, Homo sapiens
  CDR3 for alpha chain variable domain of TCR clone 299380 (TRAV21, TRAJ27)
CAARPGNAGKSTL

SEQ ID NO: 598760 - protein, 13 aa, Homo sapiens
  CDR3 for beta chain variable domain of TCR clone 299380 (TRBV27, TRBJ1-1)
CASSLSIGAEAFF

SEQ ID NO: 598761 - protein, 12 aa, Homo sapiens
  CDR3 for alpha chain variable domain of TCR clone 299381 (TRAV3, TRAJ20)
CAVRDPDYKLSF

SEQ ID NO: 598762 - protein, 15 aa, Homo sapiens
  CDR3 for beta chain variable domain of TCR clone 299381 (TRBV4-1, TRBJ2-7)
CASSQQGQGFDKQYF

SEQ ID NO: 598763 - protein, 17 aa, Homo sapiens
  CDR3 for alpha chain variable domain of TCR clone 299382 (TRAV1-1, TRAJ11)
CAGYGTPTFGKGTMLLV

SEQ ID NO: 598764 - protein, 15 aa, Homo sapiens
  CDR3 for beta chain variable domain of TCR clone 299382 (TRBV6-5, TRBJ2-1)
CASRGDFDSYNEQFF

SEQ ID NO: 598765 - protein, 14 aa, Homo sapiens
  CDR3 for alpha chain variable domain of TCR clone 299383 (TRAV8-2, TRAJ37)
CVVSISGNTGKLIF

SEQ ID NO: 598766 - protein, 13 aa, Homo sapiens
  CDR3 for beta chain variable domain of TCR clone 299383 (TRBV7-9, TRBJ1-2)
CASSLKQNYGYTF

SEQ ID NO: 598767 - protein, 13 aa, Homo sapiens
  CDR3 for alpha chain variable domain of TCR clone 299384 (TRAV13-1, TRAJ41)
CADAPNSGYALNF

SEQ ID NO: 598768 - protein, 13 aa, Homo sapiens
  CDR3 for beta chain variable domain of TCR clone 299384 (TRBV19, TRBJ2-7)
CASEGTTTYEQCF

SEQ ID NO: 598769 - protein, 17 aa, Homo sapiens
  CDR3 for alpha chain variable domain of TCR clone 299385 (TRAV3, TRAJ6)
CAVRDGPRAGGSYIPTF

SEQ ID NO: 598770 - protein, 13 aa, Homo sapiens
  CDR3 for beta chain variable domain of TCR clone 299385 (TRBV7-9, TRBJ2-5)
CASLPSGRETQYF

SEQ ID NO: 598771 - protein, 13 aa, Homo sapiens
  CDR3 for alpha chain variable domain of TCR clone 299386 (TRAV1-2, TRAJ9)
CAALNTGGFKTIF

SEQ ID NO: 598772 - protein, 14 aa, Homo sapiens
  CDR3 for beta chain variable domain of TCR clone 299386 (TRBV27, TRBJ2-2)
CASRPGVNTGELFF

SEQ ID NO: 598773 - protein, 13 aa, Homo sapiens
  CDR3 for alpha chain variable domain of TCR clone 299387 (TRAV3, TRAJ21)
CAVREPDFNQFYF

SEQ ID NO: 598774 - protein, 16 aa, Homo sapiens
  CDR3 for beta chain variable domain of TCR clone 299387 (TRBV7-3, TRBJ2-2)
CASSLKRGTLSGELFF

SEQ ID NO: 598775 - protein, 14 aa, Homo sapiens
  CDR3 for alpha chain variable domain of TCR clone 299388 (TRAV2, TRAJ9)
CAVEDRSGGFKTIF

SEQ ID NO: 598776 - protein, 15 aa, Homo sapiens
  CDR3 for beta chain variable domain of TCR clone 299388 (TRBV7-3, TRBJ2-2)
CASSETGQGTGELFF

SEQ ID NO: 598777 - protein, 16 aa, Homo sapiens
  CDR3 for alpha chain variable domain of TCR clone 299389 (TRAV12-3, TRAJ53)
RAISPGSGGSNYKLTF

SEQ ID NO: 598778 - protein, 11 aa, Homo sapiens
  CDR3 for beta chain variable domain of TCR clone 299389 (TRBV29-1, TRBJ2-5)
CSEDRTGTQYF

SEQ ID NO: 598779 - protein, 14 aa, Homo sapiens
  CDR3 for alpha chain variable domain of TCR clone 299390 (TRAV8-2, TRAJ13)
CVVTASGGYQKVTF

SEQ ID NO: 598780 - protein, 13 aa, Homo sapiens
  CDR3 for beta chain variable domain of TCR clone 299390 (TRBV19, TRBJ2-7)
CASRKAGGSEQYF

SEQ ID NO: 598781 - protein, 14 aa, Homo sapiens
  CDR3 for alpha chain variable domain of TCR clone 299391 (TRAV12-2, TRAJ13)
CAVTKTGGYQKVTL

SEQ ID NO: 598782 - protein, 15 aa, Homo sapiens
  CDR3 for beta chain variable domain of TCR clone 299391 (TRBV27, TRBJ2-1)
CASSNGGGSSNEQFF

SEQ ID NO: 598783 - protein, 10 aa, Homo sapiens
  CDR3 for alpha chain variable domain of TCR clone 299392 (TRAV23/DV6, TRAJ57)
CAASSTPSQG

SEQ ID NO: 598784 - protein, 14 aa, Homo sapiens
  CDR3 for beta chain variable domain of TCR clone 299392 (TRBV25-1, TRBJ1-1)
RASTHLGGNTEAFF

SEQ ID NO: 598785 - protein, 12 aa, Homo sapiens
  CDR3 for alpha chain variable domain of TCR clone 299393 (TRAV4, TRAJ26)
CLVGDHGQNFVF

SEQ ID NO: 598786 - protein, 17 aa, Homo sapiens
  CDR3 for beta chain variable domain of TCR clone 299393 (TRBV15, TRBJ1-2)
CATSGREIDVVNYGYTF

SEQ ID NO: 598787 - protein, 11 aa, Homo sapiens
  CDR3 for alpha chain variable domain of TCR clone 299394 (TRAV3, TRAJ21)
CAVGNFNKFHF

SEQ ID NO: 598788 - protein, 15 aa, Homo sapiens
  CDR3 for beta chain variable domain of TCR clone 299394 (TRBV20-1, TRBJ2-7)
CSARDRVSGLDEQYF

SEQ ID NO: 598789 - protein, 18 aa, Homo sapiens
  CDR3 for alpha chain variable domain of TCR clone 299395 (TRAV17, TRAJ28)
CATDQPRGSGAGSYQLTF

SEQ ID NO: 598790 - protein, 15 aa, Homo sapiens
  CDR3 for beta chain variable domain of TCR clone 299395 (TRBV9, TRBJ2-1)
CASSLAGSSYNEQFF

SEQ ID NO: 598791 - protein, 17 aa, Homo sapiens
  CDR3 for alpha chain variable domain of TCR clone 299396 (TRAV3, TRAJ42)
CAVRDRDYGGSQGNLIF

SEQ ID NO: 598792 - protein, 13 aa, Homo sapiens
  CDR3 for beta chain variable domain of TCR clone 299396 (TRBV7-3, TRBJ2-1)
CASSLDSYNEQFF

SEQ ID NO: 598793 - protein, 15 aa, Homo sapiens
  CDR3 for alpha chain variable domain of TCR clone 299397 (TRAV13-1, TRAJ17)
CAASIERAAGNKLTF

SEQ ID NO: 598794 - protein, 15 aa, Homo sapiens
  CDR3 for beta chain variable domain of TCR clone 299397 (TRBV7-2, TRBJ2-3)
CASSLAGAFIDTQYF

SEQ ID NO: 598795 - protein, 13 aa, Homo sapiens
  CDR3 for alpha chain variable domain of TCR clone 299398 (TRAV12-2, TRAJ15)
CAVFNQGGTALIF

SEQ ID NO: 598796 - protein, 15 aa, Homo sapiens
  CDR3 for beta chain variable domain of TCR clone 299398 (TRBV7-8, TRBJ1-5)
CASSRGGGADQPQHF

SEQ ID NO: 598797 - protein, 12 aa, Homo sapiens
  CDR3 for alpha chain variable domain of TCR clone 299399 (TRAV12-3, TRAJ34)
CAMGYNTDKLIF

SEQ ID NO: 598798 - protein, 14 aa, Homo sapiens
  CDR3 for beta chain variable domain of TCR clone 299399 (TRBV5-7, TRBJ1-5)
CASCRTGGGQPQHF

SEQ ID NO: 598799 - protein, 13 aa, Homo sapiens
  CDR3 for alpha chain variable domain of TCR clone 299400 (TRAV27, TRAJ45)
CRSSGGGADGLTF

SEQ ID NO: 598800 - protein, 17 aa, Homo sapiens
  CDR3 for beta chain variable domain of TCR clone 299400 (TRBV11-2, TRBJ2-1)
YASSLYPPGVEYNEQFF

SEQ ID NO: 598801 - protein, 22 aa, Homo sapiens
  CDR3 for alpha chain variable domain of TCR clone 299401 (TRAV3, TRAJ38)
CAVRDCLNAGNNHIKNPDPAVY

SEQ ID NO: 598802 - protein, 19 aa, Homo sapiens
  CDR3 for beta chain variable domain of TCR clone 299401 (TRBV7-2, TRBJ2-3)
CASSFLSRNWGGGTDTQYF

SEQ ID NO: 598803 - protein, 14 aa, Homo sapiens
  CDR3 for alpha chain variable domain of TCR clone 299402 (TRAV26-1, TRAJ45)
CIEVTGGGADGLTF

SEQ ID NO: 598804 - protein, 13 aa, Homo sapiens
  CDR3 for beta chain variable domain of TCR clone 299402 (TRBV20-1, TRBJ1-1)
CSARGGGNTEAFF

SEQ ID NO: 598805 - protein, 16 aa, Homo sapiens
  CDR3 for alpha chain variable domain of TCR clone 299403 (TRAV16, TRAJ57)
CAPYLTTPGGSEKLVF

SEQ ID NO: 598806 - protein, 17 aa, Homo sapiens
  CDR3 for beta chain variable domain of TCR clone 299403 (TRBV24-1, TRBJ2-4)
CATSDAEARGIRNIQYF

SEQ ID NO: 598807 - protein, 12 aa, Homo sapiens
  CDR3 for alpha chain variable domain of TCR clone 299404 (TRAV21, TRAJ41)
CAVREFRVCTQL

SEQ ID NO: 598808 - protein, 15 aa, Homo sapiens
  CDR3 for beta chain variable domain of TCR clone 299404 (TRBV18, TRBJ1-5)
CASSPQARSNQHQHF

SEQ ID NO: 598809 - protein, 10 aa, Homo sapiens
  CDR3 for alpha chain variable domain of TCR clone 299405 (TRAV13-1, TRAJ52)
CAAKTPMLVV

SEQ ID NO: 598810 - protein, 17 aa, Homo sapiens
  CDR3 for beta chain variable domain of TCR clone 299405 (TRBV11-2, TRBJ2-1)
CASSLYPPGVEYNEQFF

SEQ ID NO: 598811 - protein, 14 aa, Homo sapiens
  CDR3 for alpha chain variable domain of TCR clone 299406 (TRAV17, TRAJ57)
CATDPQGGSEKLVF

SEQ ID NO: 598812 - protein, 15 aa, Homo sapiens
  CDR3 for beta chain variable domain of TCR clone 299406 (TRBV7-3, TRBJ2-1)
CASSPTGGGEVEQFF

SEQ ID NO: 598813 - protein, 14 aa, Homo sapiens
  CDR3 for alpha chain variable domain of TCR clone 299407 (TRAV8-4, TRAJ54)
CAVSEVWGAQQLVF

SEQ ID NO: 598814 - protein, 13 aa, Homo sapiens
  CDR3 for beta chain variable domain of TCR clone 299407 (TRBV27, TRBJ2-7)
CASSFVSSYEQYF

SEQ ID NO: 598815 - protein, 14 aa, Homo sapiens
  CDR3 for alpha chain variable domain of TCR clone 299408 (TRAV35, TRAJ10)
CAGILTGGGNKLTF

SEQ ID NO: 598816 - protein, 13 aa, Homo sapiens
  CDR3 for beta chain variable domain of TCR clone 299408 (TRBV2, TRBJ1-1)
CASRWTVNTEAFF

SEQ ID NO: 598817 - protein, 17 aa, Homo sapiens
  CDR3 for alpha chain variable domain of TCR clone 299409 (TRAV3, TRAJ6)
CAVRDGPRAGGSYIPKF

SEQ ID NO: 598818 - protein, 12 aa, Homo sapiens
  CDR3 for beta chain variable domain of TCR clone 299409 (TRBV5-4, TRBJ2-5)
CASSSTRETQYF

SEQ ID NO: 598819 - protein, 12 aa, Homo sapiens
  CDR3 for alpha chain variable domain of TCR clone 299410 (TRAV13-2, TRAJ54)
CGANEGAQKLVF

SEQ ID NO: 598820 - protein, 16 aa, Homo sapiens
  CDR3 for beta chain variable domain of TCR clone 299410 (TRBV12-5, TRBJ2-5)
CASGPRTSGNQETQYF

SEQ ID NO: 598821 - protein, 17 aa, Homo sapiens
  CDR3 for alpha chain variable domain of TCR clone 299411 (TRAV4, TRAJ18)
CLVGERSVGSTLGRLYF

SEQ ID NO: 598822 - protein, 18 aa, Homo sapiens
  CDR3 for beta chain variable domain of TCR clone 299411 (TRBV11-2, TRBJ2-3)
CASSLGGASRGAPNTQYV

SEQ ID NO: 598823 - protein, 14 aa, Homo sapiens
  CDR3 for alpha chain variable domain of TCR clone 299412 (TRAV12-3, TRAJ10)
SHLPLTGGGNKLTF

SEQ ID NO: 598824 - protein, 14 aa, Homo sapiens
  CDR3 for beta chain variable domain of TCR clone 299412 (TRBV3-1, TRBJ1-5)
CASSLGLDDQPQHF

SEQ ID NO: 598825 - protein, 14 aa, Homo sapiens
  CDR3 for alpha chain variable domain of TCR clone 299413 (TRAV13-2, TRAJ32)
CAENYGGATNKLIF

SEQ ID NO: 598826 - protein, 12 aa, Homo sapiens
  CDR3 for beta chain variable domain of TCR clone 299413 (TRBV7-9, TRBJ2-7)
CASSFGSYEQYF

SEQ ID NO: 598827 - protein, 18 aa, Homo sapiens
  CDR3 for alpha chain variable domain of TCR clone 299414 (TRAV20, TRAJ4)
CAVQPYYMFSGGYNMLIF

SEQ ID NO: 598828 - protein, 13 aa, Homo sapiens
  CDR3 for beta chain variable domain of TCR clone 299414 (TRBV19, TRBJ2-3)
CATWDKITDTQYF

SEQ ID NO: 598829 - protein, 13 aa, Homo sapiens
  CDR3 for alpha chain variable domain of TCR clone 299415 (TRAV12-3, TRAJ7)
CAMSASGDNRLAF

SEQ ID NO: 598830 - protein, 14 aa, Homo sapiens
  CDR3 for beta chain variable domain of TCR clone 299415 (TRBV13, TRBJ2-5)
CASSLGPRGETQYL

SEQ ID NO: 598831 - protein, 17 aa, Homo sapiens
  CDR3 for alpha chain variable domain of TCR clone 299416 (TRAV3, TRAJ6)
CAVRDGPRAGGRYIPPF

SEQ ID NO: 598832 - protein, 15 aa, Homo sapiens
  CDR3 for beta chain variable domain of TCR clone 299416 (TRBV7-6, TRBJ2-3)
CASSPIIYSTDTQYF

SEQ ID NO: 598833 - protein, 15 aa, Homo sapiens
  CDR3 for alpha chain variable domain of TCR clone 299417 (TRAV3, TRAJ4)
CAVRDGTGCYNKLIF

SEQ ID NO: 598834 - protein, 15 aa, Homo sapiens
  CDR3 for beta chain variable domain of TCR clone 299417 (TRBV27, TRBJ2-7)
CASSPDQGRLYEQYF

SEQ ID NO: 598835 - protein, 13 aa, Homo sapiens
  CDR3 for alpha chain variable domain of TCR clone 299418 (TRAV25, TRAJ30)
CAGRVDRDDKIIF

SEQ ID NO: 598836 - protein, 15 aa, Homo sapiens
  CDR3 for beta chain variable domain of TCR clone 299418 (TRBV27, TRBJ1-6)
CASSFDRGLGSPLHF

SEQ ID NO: 598837 - protein, 21 aa, Homo sapiens
  CDR3 for alpha chain variable domain of TCR clone 299419 (TRAV9-2, )
CALIQIGDIQNPDPAVSQLRD

SEQ ID NO: 598838 - protein, 13 aa, Homo sapiens
  CDR3 for beta chain variable domain of TCR clone 299419 (TRBV20-1, TRBJ1-1)
CSARGGGNTEAFF

SEQ ID NO: 598839 - protein, 13 aa, Homo sapiens
  CDR3 for alpha chain variable domain of TCR clone 299420 (TRAV13-1, TRAJ39)
CSKYSNASNMLTF

SEQ ID NO: 598840 - protein, 16 aa, Homo sapiens
  CDR3 for beta chain variable domain of TCR clone 299420 (TRBV7-2, TRBJ2-3)
CASSLVALYSTDTQYF

SEQ ID NO: 598841 - protein, 13 aa, Homo sapiens
  CDR3 for alpha chain variable domain of TCR clone 299421 (TRAV12-1, TRAJ9)
CVVLNTGGFKTIF

SEQ ID NO: 598842 - protein, 13 aa, Homo sapiens
  CDR3 for beta chain variable domain of TCR clone 299421 (TRBV19, TRBJ1-2)
CASSVPGQDGYTL

SEQ ID NO: 598843 - protein, 14 aa, Homo sapiens
  CDR3 for alpha chain variable domain of TCR clone 299422 (TRAV26-2, TRAJ32)
CILFLGGATNKLIF

SEQ ID NO: 598844 - protein, 16 aa, Homo sapiens
  CDR3 for beta chain variable domain of TCR clone 299422 (TRBV12-5, TRBJ2-5)
CASGPRTSGNQETQYF

SEQ ID NO: 598845 - protein, 14 aa, Homo sapiens
  CDR3 for alpha chain variable domain of TCR clone 299423 (TRAV12-2, TRAJ13)
CDVKKTGGYQKVTF

SEQ ID NO: 598846 - protein, 16 aa, Homo sapiens
  CDR3 for beta chain variable domain of TCR clone 299423 (TRBV4-2, TRBJ2-4)
CASSQELRRAKNIQYF

SEQ ID NO: 598847 - protein, 17 aa, Homo sapiens
  CDR3 for alpha chain variable domain of TCR clone 299424 (TRAV3, TRAJ6)
CAVRDGPRAGGSYIPTF

SEQ ID NO: 598848 - protein, 16 aa, Homo sapiens
  CDR3 for beta chain variable domain of TCR clone 299424 (TRBV28, TRBJ2-1)
CASSSRVRDSYNEQFF

SEQ ID NO: 598849 - protein, 11 aa, Homo sapiens
  CDR3 for alpha chain variable domain of TCR clone 299425 (TRAV21, TRAJ11)
CAVNGYSTLTF

SEQ ID NO: 598850 - protein, 19 aa, Homo sapiens
  CDR3 for beta chain variable domain of TCR clone 299425 (TRBV19, TRBJ2-5)
CASSIGQVTDFFLGETQYF

SEQ ID NO: 598851 - protein, 12 aa, Homo sapiens
  CDR3 for alpha chain variable domain of TCR clone 299426 (TRAV12-1, TRAJ31)
CVSWNNNARLMF

SEQ ID NO: 598852 - protein, 15 aa, Homo sapiens
  CDR3 for beta chain variable domain of TCR clone 299426 (TRBV7-2, TRBJ1-5)
YASSLDRGQDQPQHF

SEQ ID NO: 598853 - protein, 14 aa, Homo sapiens
  CDR3 for alpha chain variable domain of TCR clone 299427 (TRAV21, TRAJ15)
CAVSLNQAGTALIF

SEQ ID NO: 598854 - protein, 11 aa, Homo sapiens
  CDR3 for beta chain variable domain of TCR clone 299427 (TRBV20-1, TRBJ2-7)
CSSRTSYEQYF

SEQ ID NO: 598855 - protein, 15 aa, Homo sapiens
  CDR3 for alpha chain variable domain of TCR clone 299428 (TRAV26-1, TRAJ40)
CIVRVTTSGTYKYIF

SEQ ID NO: 598856 - protein, 12 aa, Homo sapiens
  CDR3 for beta chain variable domain of TCR clone 299428 (TRBV18, TRBJ2-3)
CASSPLSDTQYF

SEQ ID NO: 598857 - protein, 15 aa, Homo sapiens
  CDR3 for alpha chain variable domain of TCR clone 299429 (TRAV13-1, TRAJ49)
YAASTEGNTGNQFYF

SEQ ID NO: 598858 - protein, 12 aa, Homo sapiens
  CDR3 for beta chain variable domain of TCR clone 299429 (TRBV11-2, TRBJ2-2)
CASSLGGGELFF

SEQ ID NO: 598859 - protein, 13 aa, Homo sapiens
  CDR3 for alpha chain variable domain of TCR clone 299430 (TRAV12-1, TRAJ6)
CVVFPGGSYIPTF

SEQ ID NO: 598860 - protein, 18 aa, Homo sapiens
  CDR3 for beta chain variable domain of TCR clone 299430 (TRBV4-1, TRBJ1-5)
CASSQDPRGQGLNQPQHF

SEQ ID NO: 598861 - protein, 14 aa, Homo sapiens
  CDR3 for alpha chain variable domain of TCR clone 299431 (TRAV12-2, TRAJ5)
CAVNRSTGRRALTF

SEQ ID NO: 598862 - protein, 13 aa, Homo sapiens
  CDR3 for beta chain variable domain of TCR clone 299431 (TRBV7-9, TRBJ2-7)
CASSFAGAYEQYF

SEQ ID NO: 598863 - protein, 20 aa, Homo sapiens
  CDR3 for alpha chain variable domain of TCR clone 299432 (TRAV26-1, TRAJ42)
CCVLLHRQTYYGGSQGNLIF

SEQ ID NO: 598864 - protein, 14 aa, Homo sapiens
  CDR3 for beta chain variable domain of TCR clone 299432 (TRBV25-1, TRBJ1-1)
CASTHLGGNTEAFF

SEQ ID NO: 598865 - protein, 14 aa, Homo sapiens
  CDR3 for alpha chain variable domain of TCR clone 299433 (TRAV16, TRAJ37)
CALDISGNTGKLIF

SEQ ID NO: 598866 - protein, 16 aa, Homo sapiens
  CDR3 for beta chain variable domain of TCR clone 299433 (TRBV13, TRBJ2-2)
CASSPRTGEHTGELFF

SEQ ID NO: 598867 - protein, 10 aa, Homo sapiens
  CDR3 for alpha chain variable domain of TCR clone 299434 (TRAV21, TRAJ34)
CAADTDKLIF

SEQ ID NO: 598868 - protein, 12 aa, Homo sapiens
  CDR3 for beta chain variable domain of TCR clone 299434 (TRBV11-2, TRBJ2-2)
CASSLPTGELFF

SEQ ID NO: 598869 - protein, 15 aa, Homo sapiens
  CDR3 for alpha chain variable domain of TCR clone 299435 (TRAV3, TRAJ9)
CAVRARNTGGFKTIF

SEQ ID NO: 598870 - protein, 11 aa, Homo sapiens
  CDR3 for beta chain variable domain of TCR clone 299435 (TRBV19, TRBJ1-2)
CAWSVATPSVR

SEQ ID NO: 598871 - protein, 15 aa, Homo sapiens
  CDR3 for alpha chain variable domain of TCR clone 299436 (TRAV27, TRAJ38)
CAAPRNADNNRKLVW

SEQ ID NO: 598872 - protein, 13 aa, Homo sapiens
  CDR3 for beta chain variable domain of TCR clone 299436 (TRBV12-5, TRBJ2-3)
CASGDRQSDTQYF

SEQ ID NO: 598873 - protein, 13 aa, Homo sapiens
  CDR3 for alpha chain variable domain of TCR clone 299437 (TRAV1-2, TRAJ9)
CAVLHTGGFKPIF

SEQ ID NO: 598874 - protein, 14 aa, Homo sapiens
  CDR3 for beta chain variable domain of TCR clone 299437 (TRBV20-1, TRBJ2-3)
CSARGGTSTDTQYF

SEQ ID NO: 598875 - protein, 12 aa, Homo sapiens
  CDR3 for alpha chain variable domain of TCR clone 299438 (TRAV17, TRAJ16)
CATVLPGPKLPF

SEQ ID NO: 598876 - protein, 15 aa, Homo sapiens
  CDR3 for beta chain variable domain of TCR clone 299438 (TRBV6-3, TRBJ2-2)
CASSFLATLTGELFF

SEQ ID NO: 598877 - protein, 17 aa, Homo sapiens
  CDR3 for alpha chain variable domain of TCR clone 299439 (TRAV3, TRAJ38)
CAVRDCLNAGNNHIQTP

SEQ ID NO: 598878 - protein, 19 aa, Homo sapiens
  CDR3 for beta chain variable domain of TCR clone 299439 (TRBV7-2, TRBJ2-3)
CASSFLSRNWGGGTDTQYF

SEQ ID NO: 598879 - protein, 12 aa, Homo sapiens
  CDR3 for alpha chain variable domain of TCR clone 299440 (TRAV10, TRAJ33)
CVSGDSNYQLIW

SEQ ID NO: 598880 - protein, 13 aa, Homo sapiens
  CDR3 for beta chain variable domain of TCR clone 299440 (TRBV7-6, TRBJ2-3)
CQQRSGGTDTQYF

SEQ ID NO: 598881 - protein, 13 aa, Homo sapiens
  CDR3 for alpha chain variable domain of TCR clone 299441 (TRAV1-2, TRAJ9)
CAALNTGCFKTIF

SEQ ID NO: 598882 - protein, 12 aa, Homo sapiens
  CDR3 for beta chain variable domain of TCR clone 299441 (TRBV11-2, TRBJ2-2)
CASSLPTGELFF

SEQ ID NO: 598883 - protein, 14 aa, Homo sapiens
  CDR3 for alpha chain variable domain of TCR clone 299442 (TRAV9-2, TRAJ39)
CALYIYNAGNMLTF

SEQ ID NO: 598884 - protein, 16 aa, Homo sapiens
  CDR3 for beta chain variable domain of TCR clone 299442 (TRBV10-3, TRBJ2-6)
CAISTSGDLGANVLTF

SEQ ID NO: 598885 - protein, 13 aa, Homo sapiens
  CDR3 for alpha chain variable domain of TCR clone 299443 (TRAV27, TRAJ57)
CRSAQGGSEKLVF

SEQ ID NO: 598886 - protein, 16 aa, Homo sapiens
  CDR3 for beta chain variable domain of TCR clone 299443 (TRBV7-9, TRBJ1-2)
CASSLGFSSGEDGYTF

SEQ ID NO: 598887 - protein, 12 aa, Homo sapiens
  CDR3 for alpha chain variable domain of TCR clone 299444 (TRAV3, TRAJ43)
CAVRDPNNDMRF

SEQ ID NO: 598888 - protein, 17 aa, Homo sapiens
  CDR3 for beta chain variable domain of TCR clone 299444 (TRBV7-8, TRBJ2-6)
CASSAGTGGAGANVLTV

SEQ ID NO: 598889 - protein, 15 aa, Homo sapiens
  CDR3 for alpha chain variable domain of TCR clone 299445 (TRAV20, TRAJ41)
CAVQANPNSGYALNF

SEQ ID NO: 598890 - protein, 18 aa, Homo sapiens
  CDR3 for beta chain variable domain of TCR clone 299445 (TRBV7-9, TRBJ2-7)
CASSLTTSGSRTWYEQYF

SEQ ID NO: 598891 - protein, 13 aa, Homo sapiens
  CDR3 for alpha chain variable domain of TCR clone 299446 (TRAV21, TRAJ27)
CAARPGNAGKSTF

SEQ ID NO: 598892 - protein, 14 aa, Homo sapiens
  CDR3 for beta chain variable domain of TCR clone 299446 (TRBV11-3, TRBJ1-6)
CASSFSGGDSPLHF

SEQ ID NO: 598893 - protein, 14 aa, Homo sapiens
  CDR3 for alpha chain variable domain of TCR clone 299447 (TRAV21, TRAJ45)
CAVSSGGGADGLTF

SEQ ID NO: 598894 - protein, 15 aa, Homo sapiens
  CDR3 for beta chain variable domain of TCR clone 299447 (TRBV6-1, TRBJ2-4)
CASSEAVWTINIQSC

SEQ ID NO: 598895 - protein, 17 aa, Homo sapiens
  CDR3 for alpha chain variable domain of TCR clone 299448 (TRAV13-1, TRAJ28)
CAASPPYSGAGSYQLTF

SEQ ID NO: 598896 - protein, 12 aa, Homo sapiens
  CDR3 for beta chain variable domain of TCR clone 299448 (TRBV11-2, TRBJ2-2)
CPSSLPTGELFF

SEQ ID NO: 598897 - protein, 15 aa, Homo sapiens
  CDR3 for alpha chain variable domain of TCR clone 299449 (TRAV3, TRAJ13)
CAVRVYSGGYQKVTF

SEQ ID NO: 598898 - protein, 17 aa, Homo sapiens
  CDR3 for beta chain variable domain of TCR clone 299449 (TRBV4-1, TRBJ2-7)
CASSQGRGLQTSYEQYF

SEQ ID NO: 598899 - protein, 11 aa, Homo sapiens
  CDR3 for alpha chain variable domain of TCR clone 299450 (TRAV16, TRAJ31)
CALFNNARLMF

SEQ ID NO: 598900 - protein, 16 aa, Homo sapiens
  CDR3 for beta chain variable domain of TCR clone 299450 (TRBV19, TRBJ2-1)
CASSKAGPSSYNEQFF

SEQ ID NO: 598901 - protein, 13 aa, Homo sapiens
  CDR3 for alpha chain variable domain of TCR clone 299451 (TRAV2, TRAJ21)
CAVEERNFNKFYF

SEQ ID NO: 598902 - protein, 15 aa, Homo sapiens
  CDR3 for beta chain variable domain of TCR clone 299451 (TRBV28, TRBJ2-5)
CASSPGQGSIETQYF

SEQ ID NO: 598903 - protein, 16 aa, Homo sapiens
  CDR3 for alpha chain variable domain of TCR clone 299452 (TRAV3, TRAJ37)
CAVRPHGSGNTGKLIF

SEQ ID NO: 598904 - protein, 17 aa, Homo sapiens
  CDR3 for beta chain variable domain of TCR clone 299452 (TRBV20-1, TRBJ2-1)
CSASSSGLTGSYNEQFF

SEQ ID NO: 598905 - protein, 10 aa, Homo sapiens
  CDR3 for alpha chain variable domain of TCR clone 299453 (TRAV12-1, TRAJ37)
ARGNTGKLIF

SEQ ID NO: 598906 - protein, 15 aa, Homo sapiens
  CDR3 for beta chain variable domain of TCR clone 299453 (TRBV7-2, TRBJ2-3)
CDSSLEQGGTDTQYF

SEQ ID NO: 598907 - protein, 12 aa, Homo sapiens
  CDR3 for alpha chain variable domain of TCR clone 299454 (TRAV12-3, TRAJ3)
CAIDSSASKIIF

SEQ ID NO: 598908 - protein, 17 aa, Homo sapiens
  CDR3 for beta chain variable domain of TCR clone 299454 (TRBV7-9, TRBJ2-3)
CASSVGEAGAYPDTQYF

SEQ ID NO: 598909 - protein, 13 aa, Homo sapiens
  CDR3 for alpha chain variable domain of TCR clone 299455 (TRAV30, TRAJ24)
CGTVTDSWRKLQF

SEQ ID NO: 598910 - protein, 15 aa, Homo sapiens
  CDR3 for beta chain variable domain of TCR clone 299455 (TRBV7-6, TRBJ1-2)
CASSSGGRGGYGYTF

SEQ ID NO: 598911 - protein, 14 aa, Homo sapiens
  CDR3 for alpha chain variable domain of TCR clone 299456 (TRAV38-1, TRAJ43)
GAFMKHKNNNDMRF

SEQ ID NO: 598912 - protein, 15 aa, Homo sapiens
  CDR3 for beta chain variable domain of TCR clone 299456 (TRBV9, TRBJ1-6)
CASSVAGTGDSPLHF

SEQ ID NO: 598913 - protein, 18 aa, Homo sapiens
  CDR3 for alpha chain variable domain of TCR clone 299457 (TRAV1-2, TRAJ18)
CAVRDMGDRGSTLGRLNF

SEQ ID NO: 598914 - protein, 16 aa, Homo sapiens
  CDR3 for beta chain variable domain of TCR clone 299457 (TRBV29-1, TRBJ1-2)
CSVEANRDIANYGYTF

SEQ ID NO: 598915 - protein, 11 aa, Homo sapiens
  CDR3 for alpha chain variable domain of TCR clone 299458 (TRAV39, TRAJ49)
CTVDISTQFYF

SEQ ID NO: 598916 - protein, 11 aa, Homo sapiens
  CDR3 for beta chain variable domain of TCR clone 299458 (TRBV7-8, TRBJ2-7)
CASSLSLEQYF

SEQ ID NO: 598917 - protein, 14 aa, Homo sapiens
  CDR3 for alpha chain variable domain of TCR clone 299459 (TRAV1-2, TRAJ16)
CVVNLFSHGQKLLF

SEQ ID NO: 598918 - protein, 14 aa, Homo sapiens
  CDR3 for beta chain variable domain of TCR clone 299459 (TRBV19, TRBJ2-1)
CPSPTFVLSGEQFF

SEQ ID NO: 598919 - protein, 12 aa, Homo sapiens
  CDR3 for alpha chain variable domain of TCR clone 299460 (TRAV36/DV7, TRAJ54)
CAVVRGAQKLVF

SEQ ID NO: 598920 - protein, 15 aa, Homo sapiens
  CDR3 for beta chain variable domain of TCR clone 299460 (TRBV11-2, TRBJ2-1)
CASSSPATRYNEQFF

SEQ ID NO: 598921 - protein, 16 aa, Homo sapiens
  CDR3 for alpha chain variable domain of TCR clone 299461 (TRAV12-3, TRAJ53)
CAMSPGSGGRNYKLTF

SEQ ID NO: 598922 - protein, 13 aa, Homo sapiens
  CDR3 for beta chain variable domain of TCR clone 299461 (TRBV19, TRBJ1-2)
CASSVPGQDGYTF

SEQ ID NO: 598923 - protein, 14 aa, Homo sapiens
  CDR3 for alpha chain variable domain of TCR clone 299462 (TRAV29/DV5, TRAJ36)
CAARRKTGANNLFF

SEQ ID NO: 598924 - protein, 13 aa, Homo sapiens
  CDR3 for beta chain variable domain of TCR clone 299462 (TRBV12-4, TRBJ1-2)
CTSVPAVSYGYTF

SEQ ID NO: 598925 - protein, 15 aa, Homo sapiens
  CDR3 for alpha chain variable domain of TCR clone 299463 (TRAV3, TRAJ4)
CAVRDGTGGYNKLIF

SEQ ID NO: 598926 - protein, 16 aa, Homo sapiens
  CDR3 for beta chain variable domain of TCR clone 299463 (TRBV13, TRBJ2-2)
CASSPRTGEHTGELFF

SEQ ID NO: 598927 - protein, 14 aa, Homo sapiens
  CDR3 for alpha chain variable domain of TCR clone 299464 (TRAV23/DV6, TRAJ4)
CAAPSSGGYNKLIF

SEQ ID NO: 598928 - protein, 16 aa, Homo sapiens
  CDR3 for beta chain variable domain of TCR clone 299464 (TRBV19, TRBJ1-1)
CASRFGGAVTGTEAFF

SEQ ID NO: 598929 - protein, 15 aa, Homo sapiens
  CDR3 for alpha chain variable domain of TCR clone 299465 (TRAV23/DV6, TRAJ18)
CAARYRVSALGRLYF

SEQ ID NO: 598930 - protein, 15 aa, Homo sapiens
  CDR3 for beta chain variable domain of TCR clone 299465 (TRBV7-8, TRBJ2-1)
CASSLADSLYNEQFF

SEQ ID NO: 598931 - protein, 16 aa, Homo sapiens
  CDR3 for alpha chain variable domain of TCR clone 299466 (TRAV8-2, TRAJ48)
CVVSVAEGFGNEKLTF

SEQ ID NO: 598932 - protein, 15 aa, Homo sapiens
  CDR3 for beta chain variable domain of TCR clone 299466 (TRBV11-2, TRBJ2-1)
CASSKNRGLIYEQFF

SEQ ID NO: 598933 - protein, 15 aa, Homo sapiens
  CDR3 for alpha chain variable domain of TCR clone 299467 (TRAV27, TRAJ38)
CAARHNAGNNRKLIW

SEQ ID NO: 598934 - protein, 16 aa, Homo sapiens
  CDR3 for beta chain variable domain of TCR clone 299467 (TRBV5-1, TRBJ1-1)
CASSSGGNSLNTEAFF

SEQ ID NO: 598935 - protein, 15 aa, Homo sapiens
  CDR3 for alpha chain variable domain of TCR clone 299468 (TRAV13-1, TRAJ17)
CAASIDRAAGNKLTF

SEQ ID NO: 598936 - protein, 15 aa, Homo sapiens
  CDR3 for beta chain variable domain of TCR clone 299468 (TRBV6-3, TRBJ2-7)
CASSSPGTVFYEQYF

SEQ ID NO: 598937 - protein, 15 aa, Homo sapiens
  CDR3 for alpha chain variable domain of TCR clone 299469 (TRAV1-2, TRAJ30)
CAVRPHGNRDDKIIF

SEQ ID NO: 598938 - protein, 13 aa, Homo sapiens
  CDR3 for beta chain variable domain of TCR clone 299469 (TRBV4-1, TRBJ2-7)
SASSQGQAYEQYF

SEQ ID NO: 598939 - protein, 13 aa, Homo sapiens
  CDR3 for alpha chain variable domain of TCR clone 299470 (TRAV13-1, TRAJ33)
CAASRAGNYQVIW

SEQ ID NO: 598940 - protein, 15 aa, Homo sapiens
  CDR3 for beta chain variable domain of TCR clone 299470 (TRBV2, TRBJ2-7)
EDSAMYFCASSEQYF

SEQ ID NO: 598941 - protein, 15 aa, Homo sapiens
  CDR3 for alpha chain variable domain of TCR clone 299471 (TRAV29/DV5, TRAJ24)
CAASGATDSWGKFQF

SEQ ID NO: 598942 - protein, 13 aa, Homo sapiens
  CDR3 for beta chain variable domain of TCR clone 299471 (TRBV7-9, TRBJ1-2)
CASSVEQNYGYTF

SEQ ID NO: 598943 - protein, 14 aa, Homo sapiens
  CDR3 for alpha chain variable domain of TCR clone 299472 (TRAV12-3, TRAJ10)
SHLPLTGGGNKLTF

SEQ ID NO: 598944 - protein, 15 aa, Homo sapiens
  CDR3 for beta chain variable domain of TCR clone 299472 (TRBV7-3, TRBJ2-2)
CGSSETGQGTGELFF

SEQ ID NO: 598945 - protein, 19 aa, Homo sapiens
  CDR3 for alpha chain variable domain of TCR clone 299473 (TRAV13-1, TRAJ52)
CAASPYQNAGGTSYGKLTF

SEQ ID NO: 598946 - protein, 12 aa, Homo sapiens
  CDR3 for beta chain variable domain of TCR clone 299473 (TRBV14, TRBJ2-7)
CASSRLRGEQYF

SEQ ID NO: 598947 - protein, 16 aa, Homo sapiens
  CDR3 for alpha chain variable domain of TCR clone 299474 (TRAV30, TRAJ24)
CGTEIVDADSWGKFQF

SEQ ID NO: 598948 - protein, 15 aa, Homo sapiens
  CDR3 for beta chain variable domain of TCR clone 299474 (TRBV12-4, TRBJ2-5)
CASSPPTGLHETQYF

SEQ ID NO: 598949 - protein, 16 aa, Homo sapiens
  CDR3 for alpha chain variable domain of TCR clone 299475 (TRAV12-2, TRAJ6)
CAAPLAGSGGSYIPTF

SEQ ID NO: 598950 - protein, 10 aa, Homo sapiens
  CDR3 for beta chain variable domain of TCR clone 299475 (TRBV28, TRBJ1-2)
CASSSDRTVF

SEQ ID NO: 598951 - protein, 18 aa, Homo sapiens
  CDR3 for alpha chain variable domain of TCR clone 299476 (TRAV12-3, TRAJ52)
CAMSVGGAGGTSYGKLTF

SEQ ID NO: 598952 - protein, 15 aa, Homo sapiens
  CDR3 for beta chain variable domain of TCR clone 299476 (TRBV27, TRBJ1-6)
CASSFDRGLGSALHL

SEQ ID NO: 598953 - protein, 15 aa, Homo sapiens
  CDR3 for alpha chain variable domain of TCR clone 299477 (TRAV8-3, TRAJ45)
CASSYSGGGADGLTF

SEQ ID NO: 598954 - protein, 11 aa, Homo sapiens
  CDR3 for beta chain variable domain of TCR clone 299477 (TRBV6-6, TRBJ2-2)
CASQKTGELFF

SEQ ID NO: 598955 - protein, 12 aa, Homo sapiens
  CDR3 for alpha chain variable domain of TCR clone 299478 (TRAV3, TRAJ20)
CAVRDPDYKLSF

SEQ ID NO: 598956 - protein, 15 aa, Homo sapiens
  CDR3 for beta chain variable domain of TCR clone 299478 (TRBV2, TRBJ2-2)
CASSRETVGTGVLFF

SEQ ID NO: 598957 - protein, 19 aa, Homo sapiens
  CDR3 for alpha chain variable domain of TCR clone 299479 (TRAV26-1, TRAJ27)
CCVLLHRQSFNTNAGKSTF

SEQ ID NO: 598958 - protein, 13 aa, Homo sapiens
  CDR3 for beta chain variable domain of TCR clone 299479 (TRBV20-1, TRBJ2-7)
CSATHTSGYEQYF

SEQ ID NO: 598959 - protein, 12 aa, Homo sapiens
  CDR3 for alpha chain variable domain of TCR clone 299480 (TRAV12-3, TRAJ17)
CAMTLTGNKLTL

SEQ ID NO: 598960 - protein, 14 aa, Homo sapiens
  CDR3 for beta chain variable domain of TCR clone 299480 (TRBV7-7, TRBJ2-2)
CASSRDRSTGELFF

SEQ ID NO: 598961 - protein, 21 aa, Homo sapiens
  CDR3 for alpha chain variable domain of TCR clone 299481 (TRAV12-1, TRAJ32)
SSVIQPPTSMNYGGATNKLIF

SEQ ID NO: 598962 - protein, 13 aa, Homo sapiens
  CDR3 for beta chain variable domain of TCR clone 299481 (TRBV28, TRBJ2-2)
CASIRESTGELFF

SEQ ID NO: 598963 - protein, 14 aa, Homo sapiens
  CDR3 for alpha chain variable domain of TCR clone 299482 (TRAV29/DV5, TRAJ44)
CAAFIVGTASKLTF

SEQ ID NO: 598964 - protein, 15 aa, Homo sapiens
  CDR3 for beta chain variable domain of TCR clone 299482 (TRBV7-3, TRBJ2-2)
CASSETGQGTGELFF

SEQ ID NO: 598965 - protein, 14 aa, Homo sapiens
  CDR3 for alpha chain variable domain of TCR clone 299483 (TRAV12-2, TRAJ44)
CAVNPAGTASKLTF

SEQ ID NO: 598966 - protein, 13 aa, Homo sapiens
  CDR3 for beta chain variable domain of TCR clone 299483 (TRBV20-1, TRBJ2-2)
CSASAAGTGELFF

SEQ ID NO: 598967 - protein, 16 aa, Homo sapiens
  CDR3 for alpha chain variable domain of TCR clone 299484 (TRAV30, TRAJ24)
CGTEIVDADSWGKFQF

SEQ ID NO: 598968 - protein, 16 aa, Homo sapiens
  CDR3 for beta chain variable domain of TCR clone 299484 (TRBV24-1, TRBJ2-3)
CATSEAREGRGDTQYF

SEQ ID NO: 598969 - protein, 13 aa, Homo sapiens
  CDR3 for alpha chain variable domain of TCR clone 299485 (TRAV23/DV6, TRAJ47)
WAASIRNGIWKQT

SEQ ID NO: 598970 - protein, 13 aa, Homo sapiens
  CDR3 for beta chain variable domain of TCR clone 299485 (TRBV19, TRBJ1-2)
CASSQGQVYGYTF

SEQ ID NO: 598971 - protein, 11 aa, Homo sapiens
  CDR3 for alpha chain variable domain of TCR clone 299486 (TRAV21, TRAJ34)
CAHYNTDKLIF

SEQ ID NO: 598972 - protein, 18 aa, Homo sapiens
  CDR3 for beta chain variable domain of TCR clone 299486 (TRBV7-9, TRBJ2-7)
CASSLTTSGSRTWYEQYF

SEQ ID NO: 598973 - protein, 15 aa, Homo sapiens
  CDR3 for alpha chain variable domain of TCR clone 299487 (TRAV12-2, TRAJ50)
CAVNGLETSYDKVIF

SEQ ID NO: 598974 - protein, 13 aa, Homo sapiens
  CDR3 for beta chain variable domain of TCR clone 299487 (TRBV19, TRBJ2-7)
CASRKAGGSEQYF

SEQ ID NO: 598975 - protein, 18 aa, Homo sapiens
  CDR3 for alpha chain variable domain of TCR clone 299488 (TRAV21, TRAJ52)
CAVRPSPAGGTSYGKLTF

SEQ ID NO: 598976 - protein, 14 aa, Homo sapiens
  CDR3 for beta chain variable domain of TCR clone 299488 (TRBV2, TRBJ1-5)
CASSENRGGQPQHF

SEQ ID NO: 598977 - protein, 11 aa, Homo sapiens
  CDR3 for alpha chain variable domain of TCR clone 299489 (TRAV17, TRAJ34)
CATDNTDKPIF

SEQ ID NO: 598978 - protein, 14 aa, Homo sapiens
  CDR3 for beta chain variable domain of TCR clone 299489 (TRBV20-1, TRBJ1-1)
CSAQTRIGGTEAFF

SEQ ID NO: 598979 - protein, 15 aa, Homo sapiens
  CDR3 for alpha chain variable domain of TCR clone 299490 (TRAV2, TRAJ9)
GAVEDRGTGGFKTIF

SEQ ID NO: 598980 - protein, 16 aa, Homo sapiens
  CDR3 for beta chain variable domain of TCR clone 299490 (TRBV24-1, TRBJ2-3)
CATSDPGTGATDTQYF

SEQ ID NO: 598981 - protein, 11 aa, Homo sapiens
  CDR3 for alpha chain variable domain of TCR clone 299491 (TRAV12-2, TRAJ31)
CATLNNARLMF

SEQ ID NO: 598982 - protein, 13 aa, Homo sapiens
  CDR3 for beta chain variable domain of TCR clone 299491 (TRBV20-1, TRBJ1-1)
CSARLGQGTEAFF

SEQ ID NO: 598983 - protein, 11 aa, Homo sapiens
  CDR3 for alpha chain variable domain of TCR clone 299492 (TRAV27, TRAJ45)
CAGAQEEVLTD

SEQ ID NO: 598984 - protein, 15 aa, Homo sapiens
  CDR3 for beta chain variable domain of TCR clone 299492 (TRBV7-2, TRBJ2-4)
CASSLREVAKNIQYF

SEQ ID NO: 598985 - protein, 13 aa, Homo sapiens
  CDR3 for alpha chain variable domain of TCR clone 299493 (TRAV27, TRAJ45)
CRSSGGGADGLTF

SEQ ID NO: 598986 - protein, 13 aa, Homo sapiens
  CDR3 for beta chain variable domain of TCR clone 299493 (TRBV19, TRBJ2-2)
CASSIWSTGELLF

SEQ ID NO: 598987 - protein, 16 aa, Homo sapiens
  CDR3 for alpha chain variable domain of TCR clone 299494 (TRAV23/DV6, TRAJ48)
CAASGVVNFGNEKLTF

SEQ ID NO: 598988 - protein, 17 aa, Homo sapiens
  CDR3 for beta chain variable domain of TCR clone 299494 (TRBV7-9, TRBJ2-3)
CASSLEEAGAYPDTQYF

SEQ ID NO: 598989 - protein, 11 aa, Homo sapiens
  CDR3 for alpha chain variable domain of TCR clone 299495 (TRAV2, TRAJ13)
CASGGYQKVTF

SEQ ID NO: 598990 - protein, 18 aa, Homo sapiens
  CDR3 for beta chain variable domain of TCR clone 299495 (TRBV19, TRBJ2-6)
CASIGPTSGGAGANVLTF

SEQ ID NO: 598991 - protein, 12 aa, Homo sapiens
  CDR3 for alpha chain variable domain of TCR clone 299496 (TRAV12-2, TRAJ10)
WGVTGGGNKLTF

SEQ ID NO: 598992 - protein, 19 aa, Homo sapiens
  CDR3 for beta chain variable domain of TCR clone 299496 (TRBV25-1, TRBJ2-2)
CAILIYRVDRGRKTGELFF

SEQ ID NO: 598993 - protein, 11 aa, Homo sapiens
  CDR3 for alpha chain variable domain of TCR clone 299497 (TRAV12-3, TRAJ43)
CAMSVSNEMRF

SEQ ID NO: 598994 - protein, 15 aa, Homo sapiens
  CDR3 for beta chain variable domain of TCR clone 299497 (TRBV5-1, TRBJ2-1)
CASSPPRAPYNEQFF

SEQ ID NO: 598995 - protein, 16 aa, Homo sapiens
  CDR3 for alpha chain variable domain of TCR clone 299498 (TRAV30, TRAJ24)
CGAEIVDVDSWGKFQF

SEQ ID NO: 598996 - protein, 14 aa, Homo sapiens
  CDR3 for beta chain variable domain of TCR clone 299498 (TRBV12-5, TRBJ2-5)
CASGSRTHQETQYF

SEQ ID NO: 598997 - protein, 14 aa, Homo sapiens
  CDR3 for alpha chain variable domain of TCR clone 299499 (TRAV12-2, TRAJ17)
CAVNIKAAANKLTF

SEQ ID NO: 598998 - protein, 13 aa, Homo sapiens
  CDR3 for beta chain variable domain of TCR clone 299499 (TRBV7-8, TRBJ2-7)
CASSLTGGREQYF

SEQ ID NO: 598999 - protein, 17 aa, Homo sapiens
  CDR3 for alpha chain variable domain of TCR clone 299500 (TRAV26-1, TRAJ37)
CIVRVITVSSNQGKLIF

SEQ ID NO: 599000 - protein, 17 aa, Homo sapiens
  CDR3 for beta chain variable domain of TCR clone 299500 (TRBV7-3, TRBJ2-3)
CASSLMKRMRGADTQYF

SEQ ID NO: 599001 - protein, 15 aa, Homo sapiens
  CDR3 for alpha chain variable domain of TCR clone 299501 (TRAV26-1, TRAJ56)
CIVRVDNGANSKLTF

SEQ ID NO: 599002 - protein, 15 aa, Homo sapiens
  CDR3 for beta chain variable domain of TCR clone 299501 (TRBV20-1, TRBJ2-7)
CSARDPTEVEHEQYF

SEQ ID NO: 599003 - protein, 13 aa, Homo sapiens
  CDR3 for alpha chain variable domain of TCR clone 299502 (TRAV20, TRAJ37)
CAGCSSNTGKLIF

SEQ ID NO: 599004 - protein, 15 aa, Homo sapiens
  CDR3 for beta chain variable domain of TCR clone 299502 (TRBV7-3, TRBJ2-1)
CASSPTGGGEVEQFF

SEQ ID NO: 599005 - protein, 14 aa, Homo sapiens
  CDR3 for alpha chain variable domain of TCR clone 299503 (TRAV12-1, TRAJ17)
CVVNFKAAGNKLTF

SEQ ID NO: 599006 - protein, 16 aa, Homo sapiens
  CDR3 for beta chain variable domain of TCR clone 299503 (TRBV12-5, TRBJ2-5)
CASGPRTSGNQETQYF

SEQ ID NO: 599007 - protein, 13 aa, Homo sapiens
  CDR3 for alpha chain variable domain of TCR clone 299504 (TRAV21, TRAJ47)
CAVSGLYGNKLVF

SEQ ID NO: 599008 - protein, 13 aa, Homo sapiens
  CDR3 for beta chain variable domain of TCR clone 299504 (TRBV7-9, TRBJ1-2)
CASSLKQNYGYTF

SEQ ID NO: 599009 - protein, 14 aa, Homo sapiens
  CDR3 for alpha chain variable domain of TCR clone 299505 (TRAV12-2, TRAJ13)
CAVKKTGGYQKVTF

SEQ ID NO: 599010 - protein, 15 aa, Homo sapiens
  CDR3 for beta chain variable domain of TCR clone 299505 (TRBV2, TRBJ2-1)
CASSEEREGDNEQFF

SEQ ID NO: 599011 - protein, 14 aa, Homo sapiens
  CDR3 for alpha chain variable domain of TCR clone 299506 (TRAV4, TRAJ32)
CLVNYGGATNKLIF

SEQ ID NO: 599012 - protein, 14 aa, Homo sapiens
  CDR3 for beta chain variable domain of TCR clone 299506 (TRBV15, TRBJ2-5)
CATSGGTGTETQYF

SEQ ID NO: 599013 - protein, 14 aa, Homo sapiens
  CDR3 for alpha chain variable domain of TCR clone 299507 (TRAV8-1, TRAJ9)
CAVNAWTGGFNTIF

SEQ ID NO: 599014 - protein, 16 aa, Homo sapiens
  CDR3 for beta chain variable domain of TCR clone 299507 (TRBV28, TRBJ2-2)
CASSLEGGSNTGELFF

SEQ ID NO: 599015 - protein, 12 aa, Homo sapiens
  CDR3 for alpha chain variable domain of TCR clone 299508 (TRAV25, TRAJ5)
CAGGGGRRAITF

SEQ ID NO: 599016 - protein, 15 aa, Homo sapiens
  CDR3 for beta chain variable domain of TCR clone 299508 (TRBV19, TRBJ2-4)
CASRGPRRGENIQYF

SEQ ID NO: 599017 - protein, 16 aa, Homo sapiens
  CDR3 for alpha chain variable domain of TCR clone 299509 (TRAV16, TRAJ4)
CALSRMFSGGYNKLIF

SEQ ID NO: 599018 - protein, 16 aa, Homo sapiens
  CDR3 for beta chain variable domain of TCR clone 299509 (TRBV12-4, TRBJ1-5)
CASSRPVGGSNQPQQF

SEQ ID NO: 599019 - protein, 15 aa, Homo sapiens
  CDR3 for alpha chain variable domain of TCR clone 299510 (TRAV12-2, TRAJ43)
CAFDMRFGAGTRLTV

SEQ ID NO: 599020 - protein, 15 aa, Homo sapiens
  CDR3 for beta chain variable domain of TCR clone 299510 (TRBV20-1, TRBJ1-1)
CSASRGVTGNTEAFF

SEQ ID NO: 599021 - protein, 14 aa, Homo sapiens
  CDR3 for alpha chain variable domain of TCR clone 299511 (TRAV1-2, TRAJ16)
CAVNRFSDGQKLLF

SEQ ID NO: 599022 - protein, 13 aa, Homo sapiens
  CDR3 for beta chain variable domain of TCR clone 299511 (TRBV6-1, TRBJ1-1)
CASSVTGRLEAFF

SEQ ID NO: 599023 - protein, 12 aa, Homo sapiens
  CDR3 for alpha chain variable domain of TCR clone 299512 (TRAV13-2, TRAJ48)
VQMDFGDEKLTF

SEQ ID NO: 599024 - protein, 15 aa, Homo sapiens
  CDR3 for beta chain variable domain of TCR clone 299512 (TRBV7-3, TRBJ2-1)
CASSQRGGALIEQFF

SEQ ID NO: 599025 - protein, 11 aa, Homo sapiens
  CDR3 for alpha chain variable domain of TCR clone 299513 (TRAV13-1, TRAJ20)
CAASNDYKLSF

SEQ ID NO: 599026 - protein, 15 aa, Homo sapiens
  CDR3 for beta chain variable domain of TCR clone 299513 (TRBV28, TRBJ2-7)
CASSLEAYPIYEQYF

SEQ ID NO: 599027 - protein, 17 aa, Homo sapiens
  CDR3 for alpha chain variable domain of TCR clone 299514 (TRAV3, TRAJ6)
CAVRDGPRAGGSYIPTF

SEQ ID NO: 599028 - protein, 14 aa, Homo sapiens
  CDR3 for beta chain variable domain of TCR clone 299514 (TRBV20-1, TRBJ2-7)
SAVPELAGVGEQYF

SEQ ID NO: 599029 - protein, 14 aa, Homo sapiens
  CDR3 for alpha chain variable domain of TCR clone 299515 (TRAV13-1, TRAJ35)
CAASKGGFGNVLHC

SEQ ID NO: 599030 - protein, 14 aa, Homo sapiens
  CDR3 for beta chain variable domain of TCR clone 299515 (TRBV3-1, TRBJ2-5)
CASSQAVRQETQYF

SEQ ID NO: 599031 - protein, 14 aa, Homo sapiens
  CDR3 for alpha chain variable domain of TCR clone 299516 (TRAV12-2, TRAJ53)
CAVKGGGSNYKLTF

SEQ ID NO: 599032 - protein, 14 aa, Homo sapiens
  CDR3 for beta chain variable domain of TCR clone 299516 (TRBV7-7, TRBJ2-2)
CASRQDSDTGELFF

SEQ ID NO: 599033 - protein, 15 aa, Homo sapiens
  CDR3 for alpha chain variable domain of TCR clone 299517 (TRAV21, TRAJ37)
CAVRPTLSNTGILIF

SEQ ID NO: 599034 - protein, 16 aa, Homo sapiens
  CDR3 for beta chain variable domain of TCR clone 299517 (TRBV24-1, TRBJ2-3)
CATSDRRQDLTDTQYF

SEQ ID NO: 599035 - protein, 14 aa, Homo sapiens
  CDR3 for alpha chain variable domain of TCR clone 299518 (TRAV1-2, TRAJ16)
CAVSRFSDGQKLLF

SEQ ID NO: 599036 - protein, 15 aa, Homo sapiens
  CDR3 for beta chain variable domain of TCR clone 299518 (TRBV7-9, TRBJ1-6)
CASSFPGRGNSPLHF

SEQ ID NO: 599037 - protein, 17 aa, Homo sapiens
  CDR3 for alpha chain variable domain of TCR clone 299519 (TRAV3, TRAJ6)
CAVRDGPRAGGSYMPTF

SEQ ID NO: 599038 - protein, 18 aa, Homo sapiens
  CDR3 for beta chain variable domain of TCR clone 299519 (TRBV7-9, TRBJ2-7)
CASRLTTSGSRTWYEQYF

SEQ ID NO: 599039 - protein, 10 aa, Homo sapiens
  CDR3 for alpha chain variable domain of TCR clone 299520 (TRAV23/DV6, TRAJ43)
CAAAVAALEQ

SEQ ID NO: 599040 - protein, 13 aa, Homo sapiens
  CDR3 for beta chain variable domain of TCR clone 299520 (TRBV12-4, TRBJ1-2)
CASSLRQAKGYTF

SEQ ID NO: 599041 - protein, 12 aa, Homo sapiens
  CDR3 for alpha chain variable domain of TCR clone 299521 (TRAV35, TRAJ12)
CAGMDSSYKLIF

SEQ ID NO: 599042 - protein, 15 aa, Homo sapiens
  CDR3 for beta chain variable domain of TCR clone 299521 (TRBV5-1, TRBJ2-1)
CASSPPRAPYNEQFF

SEQ ID NO: 599043 - protein, 13 aa, Homo sapiens
  CDR3 for alpha chain variable domain of TCR clone 299522 (TRAV1-2, TRAJ31)
CSVRPHNHARLMF

SEQ ID NO: 599044 - protein, 14 aa, Homo sapiens
  CDR3 for beta chain variable domain of TCR clone 299522 (TRBV11-2, TRBJ2-1)
CASSLSGPYNEQFF

SEQ ID NO: 599045 - protein, 15 aa, Homo sapiens
  CDR3 for alpha chain variable domain of TCR clone 299523 (TRAV12-1, TRAJ44)
CVVDTPQGTASKLTF

SEQ ID NO: 599046 - protein, 13 aa, Homo sapiens
  CDR3 for beta chain variable domain of TCR clone 299523 (TRBV27, TRBJ2-1)
CASSSGSYNEQFV

SEQ ID NO: 599047 - protein, 13 aa, Homo sapiens
  CDR3 for alpha chain variable domain of TCR clone 299524 (TRAV8-3, TRAJ6)
CAARRGGSYIPTF

SEQ ID NO: 599048 - protein, 15 aa, Homo sapiens
  CDR3 for beta chain variable domain of TCR clone 299524 (TRBV4-1, TRBJ2-3)
CASSNLAGGSDTQYF

SEQ ID NO: 599049 - protein, 11 aa, Homo sapiens
  CDR3 for alpha chain variable domain of TCR clone 299525 (TRAV16, TRAJ31)
CALFNNARLMF

SEQ ID NO: 599050 - protein, 12 aa, Homo sapiens
  CDR3 for beta chain variable domain of TCR clone 299525 (TRBV11-2, TRBJ2-2)
CASSLPTGELFF

SEQ ID NO: 599051 - protein, 16 aa, Homo sapiens
  CDR3 for alpha chain variable domain of TCR clone 299526 (TRAV8-3, TRAJ13)
CAVGAYPSGGYQKVTF

SEQ ID NO: 599052 - protein, 18 aa, Homo sapiens
  CDR3 for beta chain variable domain of TCR clone 299526 (TRBV18, TRBJ1-3)
CASSPRGGAGPSGNTIYF

SEQ ID NO: 599053 - protein, 13 aa, Homo sapiens
  CDR3 for alpha chain variable domain of TCR clone 299527 (TRAV13-1, TRAJ40)
CAARTSGTYKYIF

SEQ ID NO: 599054 - protein, 17 aa, Homo sapiens
  CDR3 for beta chain variable domain of TCR clone 299527 (TRBV4-2, TRBJ1-1)
CASSQVATGGMNTEAFF

SEQ ID NO: 599055 - protein, 15 aa, Homo sapiens
  CDR3 for alpha chain variable domain of TCR clone 299528 (TRAV38-1, TRAJ57)
CALMDSQGGSEKLVF

SEQ ID NO: 599056 - protein, 16 aa, Homo sapiens
  CDR3 for beta chain variable domain of TCR clone 299528 (TRBV10-3, TRBJ2-1)
CASRGGGRGDYNEQFF

SEQ ID NO: 599057 - protein, 14 aa, Homo sapiens
  CDR3 for alpha chain variable domain of TCR clone 299529 (TRAV12-2, TRAJ40)
CAVKIPSGTYRYIF

SEQ ID NO: 599058 - protein, 14 aa, Homo sapiens
  CDR3 for beta chain variable domain of TCR clone 299529 (TRBV20-1, TRBJ1-1)
CGAQTRIGGTEAFF

SEQ ID NO: 599059 - protein, 11 aa, Homo sapiens
  CDR3 for alpha chain variable domain of TCR clone 299530 (TRAV12-3, TRAJ27)
CAMANAGKSTF

SEQ ID NO: 599060 - protein, 17 aa, Homo sapiens
  CDR3 for beta chain variable domain of TCR clone 299530 (TRBV4-2, TRBJ1-1)
CASTQFGGGSGNTEAFF

SEQ ID NO: 599061 - protein, 10 aa, Homo sapiens
  CDR3 for alpha chain variable domain of TCR clone 299531 (TRAV1-2, TRAJ31)
CAFFDARLMF

SEQ ID NO: 599062 - protein, 15 aa, Homo sapiens
  CDR3 for beta chain variable domain of TCR clone 299531 (TRBV4-1, TRBJ1-4)
YASSDTGGTNEKLFF

SEQ ID NO: 599063 - protein, 14 aa, Homo sapiens
  CDR3 for alpha chain variable domain of TCR clone 299532 (TRAV12-2, TRAJ40)
CAVKIPSGTYKYIF

SEQ ID NO: 599064 - protein, 14 aa, Homo sapiens
  CDR3 for beta chain variable domain of TCR clone 299532 (TRBV28, TRBJ2-7)
CASSLLRISYEQYF

SEQ ID NO: 599065 - protein, 15 aa, Homo sapiens
  CDR3 for alpha chain variable domain of TCR clone 299533 (TRAV12-1, TRAJ44)
CVADLPTGTASKLTF

SEQ ID NO: 599066 - protein, 15 aa, Homo sapiens
  CDR3 for beta chain variable domain of TCR clone 299533 (TRBV7-9, TRBJ1-4)
CASSARTGGNEKLFF

SEQ ID NO: 599067 - protein, 14 aa, Homo sapiens
  CDR3 for alpha chain variable domain of TCR clone 299534 (TRAV1-2, TRAJ16)
CAVNRFSDGQKLLF

SEQ ID NO: 599068 - protein, 15 aa, Homo sapiens
  CDR3 for beta chain variable domain of TCR clone 299534 (TRBV7-2, TRBJ2-5)
CASSLPGASGETQYF

SEQ ID NO: 599069 - protein, 13 aa, Homo sapiens
  CDR3 for alpha chain variable domain of TCR clone 299535 (TRAV1-2, TRAJ12)
CVVSMDSSYKLIF

SEQ ID NO: 599070 - protein, 15 aa, Homo sapiens
  CDR3 for beta chain variable domain of TCR clone 299535 (TRBV27, TRBJ2-5)
CASSLIPSGGETQYF

SEQ ID NO: 599071 - protein, 14 aa, Homo sapiens
  CDR3 for alpha chain variable domain of TCR clone 299536 (TRAV13-1, TRAJ17)
CAASRDAAGNKLTF

SEQ ID NO: 599072 - protein, 17 aa, Homo sapiens
  CDR3 for beta chain variable domain of TCR clone 299536 (TRBV11-2, TRBJ2-1)
CASSLYPPGVEYNEQFF

SEQ ID NO: 599073 - protein, 14 aa, Homo sapiens
  CDR3 for alpha chain variable domain of TCR clone 299537 (TRAV8-3, TRAJ39)
CAVGANNAGNMFTF

SEQ ID NO: 599074 - protein, 19 aa, Homo sapiens
  CDR3 for beta chain variable domain of TCR clone 299537 (TRBV25-1, TRBJ2-2)
CAILVYRVDRGRKTGELFF

SEQ ID NO: 599075 - protein, 14 aa, Homo sapiens
  CDR3 for alpha chain variable domain of TCR clone 299538 (TRAV8-3, TRAJ9)
CAVVYNTGGFKTIF

SEQ ID NO: 599076 - protein, 16 aa, Homo sapiens
  CDR3 for beta chain variable domain of TCR clone 299538 (TRBV7-3, TRBJ2-2)
CASSLKRGILSGELFF

SEQ ID NO: 599077 - protein, 14 aa, Homo sapiens
  CDR3 for alpha chain variable domain of TCR clone 299539 (TRAV29/DV5, TRAJ36)
CAARRKTGANNLFF

SEQ ID NO: 599078 - protein, 15 aa, Homo sapiens
  CDR3 for beta chain variable domain of TCR clone 299539 (TRBV20-1, TRBJ2-1)
CSARGIGGTYNEQFF

SEQ ID NO: 599079 - protein, 17 aa, Homo sapiens
  CDR3 for alpha chain variable domain of TCR clone 299540 (TRAV3, TRAJ38)
CSVRDCLNAGNNRKLIW

SEQ ID NO: 599080 - protein, 13 aa, Homo sapiens
  CDR3 for beta chain variable domain of TCR clone 299540 (TRBV23-1, TRBJ1-4)
CASRGKFNEKLFF

SEQ ID NO: 599081 - protein, 22 aa, Homo sapiens
  CDR3 for alpha chain variable domain of TCR clone 299541 (TRAV3, TRAJ36)
CAVRDGTGANNPFFVTVTRLTF

SEQ ID NO: 599082 - protein, 16 aa, Homo sapiens
  CDR3 for beta chain variable domain of TCR clone 299541 (TRBV7-3, TRBJ2-5)
CASIQPGGSVQETQYF

SEQ ID NO: 599083 - protein, 13 aa, Homo sapiens
  CDR3 for alpha chain variable domain of TCR clone 299542 (TRAV8-3, TRAJ28)
CAVGAVGSYQLTF

SEQ ID NO: 599084 - protein, 13 aa, Homo sapiens
  CDR3 for beta chain variable domain of TCR clone 299542 (TRBV19, TRBJ1-1)
CASTRRGDTEAFF

SEQ ID NO: 599085 - protein, 16 aa, Homo sapiens
  CDR3 for alpha chain variable domain of TCR clone 299543 (TRAV38-2/DV8, TRAJ47)
CAYRSAIMEYGNKMVF

SEQ ID NO: 599086 - protein, 14 aa, Homo sapiens
  CDR3 for beta chain variable domain of TCR clone 299543 (TRBV19, TRBJ2-7)
CASSIFAGTYEQYF

SEQ ID NO: 599087 - protein, 14 aa, Homo sapiens
  CDR3 for alpha chain variable domain of TCR clone 299544 (TRAV16, TRAJ17)
CAPRIKAAGNKLTF

SEQ ID NO: 599088 - protein, 13 aa, Homo sapiens
  CDR3 for beta chain variable domain of TCR clone 299544 (TRBV2, TRBJ1-1)
CARNPTGGFHAFF

SEQ ID NO: 599089 - protein, 14 aa, Homo sapiens
  CDR3 for alpha chain variable domain of TCR clone 299545 (TRAV4, TRAJ43)
CLVGPMYNNNDMRF

SEQ ID NO: 599090 - protein, 21 aa, Homo sapiens
  CDR3 for beta chain variable domain of TCR clone 299545 (TRBV11-1, TRBJ2-1)
CASSARERLRPEGPSCNEQFF

SEQ ID NO: 599091 - protein, 14 aa, Homo sapiens
  CDR3 for alpha chain variable domain of TCR clone 299546 (TRAV16, TRAJ54)
CALSLIQGAQKLVF

SEQ ID NO: 599092 - protein, 16 aa, Homo sapiens
  CDR3 for beta chain variable domain of TCR clone 299546 (TRBV5-7, TRBJ2-1)
CASSGGLAGTYNEQFF

SEQ ID NO: 599093 - protein, 14 aa, Homo sapiens
  CDR3 for alpha chain variable domain of TCR clone 299547 (TRAV1-2, TRAJ16)
CAVNRFSDGQKLLF

SEQ ID NO: 599094 - protein, 15 aa, Homo sapiens
  CDR3 for beta chain variable domain of TCR clone 299547 (TRBV4-2, TRBJ1-4)
CASSLVQREVEKLFF

SEQ ID NO: 599095 - protein, 14 aa, Homo sapiens
  CDR3 for alpha chain variable domain of TCR clone 299548 (TRAV29/DV5, TRAJ37)
CAASGSGKTGKLIF

SEQ ID NO: 599096 - protein, 17 aa, Homo sapiens
  CDR3 for beta chain variable domain of TCR clone 299548 (TRBV4-1, TRBJ2-7)
CASSPFLTSGGVVEQYF

SEQ ID NO: 599097 - protein, 14 aa, Homo sapiens
  CDR3 for alpha chain variable domain of TCR clone 299549 (TRAV17, TRAJ16)
CATADFSDGQKLLF

SEQ ID NO: 599098 - protein, 15 aa, Homo sapiens
  CDR3 for beta chain variable domain of TCR clone 299549 (TRBV18, TRBJ2-1)
CASSPPSASYNEQYF

SEQ ID NO: 599099 - protein, 14 aa, Homo sapiens
  CDR3 for alpha chain variable domain of TCR clone 299550 (TRAV21, TRAJ37)
CAVKGSSNTGKLIF

SEQ ID NO: 599100 - protein, 16 aa, Homo sapiens
  CDR3 for beta chain variable domain of TCR clone 299550 (TRBV7-6, TRBJ1-6)
CASSLSSRIGDSPLHF

SEQ ID NO: 599101 - protein, 14 aa, Homo sapiens
  CDR3 for alpha chain variable domain of TCR clone 299551 (TRAV1-2, TRAJ16)
FAVNRFSDGQKLLF

SEQ ID NO: 599102 - protein, 15 aa, Homo sapiens
  CDR3 for beta chain variable domain of TCR clone 299551 (TRBV2, TRBJ2-3)
CASSDFEKATDTQYF

SEQ ID NO: 599103 - protein, 13 aa, Homo sapiens
  CDR3 for alpha chain variable domain of TCR clone 299552 (TRAV13-1, TRAJ23)
CAASTILGGKLIF

SEQ ID NO: 599104 - protein, 12 aa, Homo sapiens
  CDR3 for beta chain variable domain of TCR clone 299552 (TRBV19, TRBJ1-4)
CASKDWPGGLFF

SEQ ID NO: 599105 - protein, 12 aa, Homo sapiens
  CDR3 for alpha chain variable domain of TCR clone 299553 (TRAV13-2, TRAJ23)
CAERHSGGKRIF

SEQ ID NO: 599106 - protein, 16 aa, Homo sapiens
  CDR3 for beta chain variable domain of TCR clone 299553 (TRBV20-1, TRBJ1-4)
CSAPGQGLLTNEKLFF

SEQ ID NO: 599107 - protein, 12 aa, Homo sapiens
  CDR3 for alpha chain variable domain of TCR clone 299554 (TRAV17, TRAJ20)
CATQANDYKLSF

SEQ ID NO: 599108 - protein, 12 aa, Homo sapiens
  CDR3 for beta chain variable domain of TCR clone 299554 (TRBV6-1, TRBJ1-1)
CASNPPTAEAFF

SEQ ID NO: 599109 - protein, 11 aa, Homo sapiens
  CDR3 for alpha chain variable domain of TCR clone 299555 (TRAV21, TRAJ34)
CAVTNTDKLIF

SEQ ID NO: 599110 - protein, 14 aa, Homo sapiens
  CDR3 for beta chain variable domain of TCR clone 299555 (TRBV5-1, TRBJ1-1)
CASSLTRRSTEAFF

SEQ ID NO: 599111 - protein, 11 aa, Homo sapiens
  CDR3 for alpha chain variable domain of TCR clone 299556 (TRAV2, TRAJ23)
CAVETRGKLIF

SEQ ID NO: 599112 - protein, 14 aa, Homo sapiens
  CDR3 for beta chain variable domain of TCR clone 299556 (TRBV2, TRBJ2-3)
CASSEGQTTDTQYF

SEQ ID NO: 599113 - protein, 13 aa, Homo sapiens
  CDR3 for alpha chain variable domain of TCR clone 299557 (TRAV2, TRAJ40)
CAVVTSGTYKYIF

SEQ ID NO: 599114 - protein, 15 aa, Homo sapiens
  CDR3 for beta chain variable domain of TCR clone 299557 (TRBV29-1, TRBJ2-7)
CSVEFFDRGSYERYF

SEQ ID NO: 599115 - protein, 14 aa, Homo sapiens
  CDR3 for alpha chain variable domain of TCR clone 299558 (TRAV13-2, TRAJ22)
CRDWWAGSARQLTF

SEQ ID NO: 599116 - protein, 20 aa, Homo sapiens
  CDR3 for beta chain variable domain of TCR clone 299558 (TRBV28, TRBJ2-1)
CASTPIGRSPGLAGGNEQFF

SEQ ID NO: 599117 - protein, 14 aa, Homo sapiens
  CDR3 for alpha chain variable domain of TCR clone 299559 (TRAV1-2, TRAJ10)
CAVRVTGGGNKLTF

SEQ ID NO: 599118 - protein, 12 aa, Homo sapiens
  CDR3 for beta chain variable domain of TCR clone 299559 (TRBV5-4, TRBJ1-1)
CASSFGQTEGVF

SEQ ID NO: 599119 - protein, 14 aa, Homo sapiens
  CDR3 for alpha chain variable domain of TCR clone 299560 (TRAV12-3, TRAJ22)
CAMSLFGSARQLTF

SEQ ID NO: 599120 - protein, 14 aa, Homo sapiens
  CDR3 for beta chain variable domain of TCR clone 299560 (TRBV12-4, TRBJ2-7)
CASSASGGWYEQYF

SEQ ID NO: 599121 - protein, 14 aa, Homo sapiens
  CDR3 for alpha chain variable domain of TCR clone 299561 (TRAV2, TRAJ9)
CAVDDRSGGFKTIF

SEQ ID NO: 599122 - protein, 13 aa, Homo sapiens
  CDR3 for beta chain variable domain of TCR clone 299561 (TRBV7-9, TRBJ1-2)
CASSLKQNYGYTF

SEQ ID NO: 599123 - protein, 18 aa, Homo sapiens
  CDR3 for alpha chain variable domain of TCR clone 299562 (TRAV21, TRAJ53)
CAVKGGENSGGSNYKLTF

SEQ ID NO: 599124 - protein, 14 aa, Homo sapiens
  CDR3 for beta chain variable domain of TCR clone 299562 (TRBV18, TRBJ2-5)
CASSPGVSQETQYF

SEQ ID NO: 599125 - protein, 12 aa, Homo sapiens
  CDR3 for alpha chain variable domain of TCR clone 299563 (TRAV2, TRAJ33)
CAVLDSNYQLIW

SEQ ID NO: 599126 - protein, 15 aa, Homo sapiens
  CDR3 for beta chain variable domain of TCR clone 299563 (TRBV10-2, TRBJ2-6)
CASSEQGTGANVLTF

SEQ ID NO: 599127 - protein, 15 aa, Homo sapiens
  CDR3 for alpha chain variable domain of TCR clone 299564 (TRAV8-1, TRAJ6)
CAVNTPPGGSYIPTF

SEQ ID NO: 599128 - protein, 17 aa, Homo sapiens
  CDR3 for beta chain variable domain of TCR clone 299564 (TRBV13, TRBJ2-3)
CASSLSRVAGGRNTQYF

SEQ ID NO: 599129 - protein, 14 aa, Homo sapiens
  CDR3 for alpha chain variable domain of TCR clone 299565 (TRAV13-1, TRAJ23)
CAASRLGRGGKIIF

SEQ ID NO: 599130 - protein, 15 aa, Homo sapiens
  CDR3 for beta chain variable domain of TCR clone 299565 (TRBV7-2, TRBJ2-1)
CASSLVAGRYNEQFF

SEQ ID NO: 599131 - protein, 13 aa, Homo sapiens
  CDR3 for alpha chain variable domain of TCR clone 299566 (TRAV23/DV6, TRAJ22)
CAPYSGSARQLTF

SEQ ID NO: 599132 - protein, 15 aa, Homo sapiens
  CDR3 for beta chain variable domain of TCR clone 299566 (TRBV11-2, TRBJ1-6)
CASSLDPWAVSPLLL

SEQ ID NO: 599133 - protein, 14 aa, Homo sapiens
  CDR3 for alpha chain variable domain of TCR clone 299567 (TRAV12-1, TRAJ17)
CVVHYKAAGNKLTF

SEQ ID NO: 599134 - protein, 14 aa, Homo sapiens
  CDR3 for beta chain variable domain of TCR clone 299567 (TRBV7-8, TRBJ2-3)
CASSLEAGTDTQYF

SEQ ID NO: 599135 - protein, 15 aa, Homo sapiens
  CDR3 for alpha chain variable domain of TCR clone 299568 (TRAV8-3, TRAJ11)
CAVGLLNSGYSTITF

SEQ ID NO: 599136 - protein, 16 aa, Homo sapiens
  CDR3 for beta chain variable domain of TCR clone 299568 (TRBV28, TRBJ2-1)
CASSLWGRTSGTLQFF

SEQ ID NO: 599137 - protein, 13 aa, Homo sapiens
  CDR3 for alpha chain variable domain of TCR clone 299569 (TRAV1-2, TRAJ20)
CAVRDGDDYKLSF

SEQ ID NO: 599138 - protein, 14 aa, Homo sapiens
  CDR3 for beta chain variable domain of TCR clone 299569 (TRBV7-2, TRBJ2-3)
CASSLGGGRDTQYF

SEQ ID NO: 599139 - protein, 15 aa, Homo sapiens
  CDR3 for alpha chain variable domain of TCR clone 299570 (TRAV3, TRAJ22)
CAGRDRGGSARQLTF

SEQ ID NO: 599140 - protein, 15 aa, Homo sapiens
  CDR3 for beta chain variable domain of TCR clone 299570 (TRBV20-1, TRBJ1-1)
YSASRGVTGNTEAFF

SEQ ID NO: 599141 - protein, 15 aa, Homo sapiens
  CDR3 for alpha chain variable domain of TCR clone 299571 (TRAV14/DV4, TRAJ39)
CAMRAVNNAGNMLTF

SEQ ID NO: 599142 - protein, 13 aa, Homo sapiens
  CDR3 for beta chain variable domain of TCR clone 299571 (TRBV7-2, TRBJ2-4)
CASSREHANIQYF

SEQ ID NO: 599143 - protein, 11 aa, Homo sapiens
  CDR3 for alpha chain variable domain of TCR clone 299572 (TRAV12-2, TRAJ31)
CAVTRWARLMF

SEQ ID NO: 599144 - protein, 15 aa, Homo sapiens
  CDR3 for beta chain variable domain of TCR clone 299572 (TRBV19, TRBJ2-7)
CASSIGGGLVNKQYF

SEQ ID NO: 599145 - protein, 15 aa, Homo sapiens
  CDR3 for alpha chain variable domain of TCR clone 299573 (TRAV30, TRAJ13)
CGTQGVTGGYQKVTF

SEQ ID NO: 599146 - protein, 17 aa, Homo sapiens
  CDR3 for beta chain variable domain of TCR clone 299573 (TRBV20-1, TRBJ2-2)
CSARVKRTHVRSGELFF

SEQ ID NO: 599147 - protein, 13 aa, Homo sapiens
  CDR3 for alpha chain variable domain of TCR clone 299574 (TRAV26-2, TRAJ54)
CIPRVGGAQKLVF

SEQ ID NO: 599148 - protein, 16 aa, Homo sapiens
  CDR3 for beta chain variable domain of TCR clone 299574 (TRBV4-1, TRBJ1-1)
CASSSMRERPNTEAFF

SEQ ID NO: 599149 - protein, 20 aa, Homo sapiens
  CDR3 for alpha chain variable domain of TCR clone 299575 (TRAV26-1, TRAJ42)
CCVLLHRQTYYGGSQGNLIF

SEQ ID NO: 599150 - protein, 13 aa, Homo sapiens
  CDR3 for beta chain variable domain of TCR clone 299575 (TRBV2, TRBJ2-3)
CASIIPASDTQYF

SEQ ID NO: 599151 - protein, 11 aa, Homo sapiens
  CDR3 for alpha chain variable domain of TCR clone 299576 (TRAV2, TRAJ26)
CAVEDGPWSEF

SEQ ID NO: 599152 - protein, 14 aa, Homo sapiens
  CDR3 for beta chain variable domain of TCR clone 299576 (TRBV27, TRBJ2-1)
CAGSIAETYNEQFF

SEQ ID NO: 599153 - protein, 12 aa, Homo sapiens
  CDR3 for alpha chain variable domain of TCR clone 299577 (TRAV12-3, TRAJ17)
CAMTLTGNKLTF

SEQ ID NO: 599154 - protein, 15 aa, Homo sapiens
  CDR3 for beta chain variable domain of TCR clone 299577 (TRBV5-1, TRBJ1-5)
CASSLAQGADQPQHF

SEQ ID NO: 599155 - protein, 18 aa, Homo sapiens
  CDR3 for alpha chain variable domain of TCR clone 299578 (TRAV13-1, TRAJ45)
CAAPPQEYSGGGTDGLTF

SEQ ID NO: 599156 - protein, 14 aa, Homo sapiens
  CDR3 for beta chain variable domain of TCR clone 299578 (TRBV19, TRBJ2-1)
CASPTFVLSGEQFF

SEQ ID NO: 599157 - protein, 14 aa, Homo sapiens
  CDR3 for alpha chain variable domain of TCR clone 299579 (TRAV13-2, TRAJ22)
CADGTLGSARQLTL

SEQ ID NO: 599158 - protein, 16 aa, Homo sapiens
  CDR3 for beta chain variable domain of TCR clone 299579 (TRBV19, TRBJ2-1)
CASSSKGTRSYNEQFF

SEQ ID NO: 599159 - protein, 12 aa, Homo sapiens
  CDR3 for alpha chain variable domain of TCR clone 299580 (TRAV12-3, TRAJ17)
RAMTLTGNKLTF

SEQ ID NO: 599160 - protein, 15 aa, Homo sapiens
  CDR3 for beta chain variable domain of TCR clone 299580 (TRBV20-1, TRBJ2-7)
CSARDWVPGMDEQYF

SEQ ID NO: 599161 - protein, 11 aa, Homo sapiens
  CDR3 for alpha chain variable domain of TCR clone 299581 (TRAV4, TRAJ18)
CLVVKGPWAQP

SEQ ID NO: 599162 - protein, 17 aa, Homo sapiens
  CDR3 for beta chain variable domain of TCR clone 299581 (TRBV13, TRBJ2-3)
CASSLSRVAGGRNTQYF

SEQ ID NO: 599163 - protein, 16 aa, Homo sapiens
  CDR3 for alpha chain variable domain of TCR clone 299582 (TRAV20, TRAJ38)
CAVQASNAGNNRKPMW

SEQ ID NO: 599164 - protein, 16 aa, Homo sapiens
  CDR3 for beta chain variable domain of TCR clone 299582 (TRBV7-8, TRBJ2-6)
CASRVGDSSGANVLTF

SEQ ID NO: 599165 - protein, 15 aa, Homo sapiens
  CDR3 for alpha chain variable domain of TCR clone 299583 (TRAV35, TRAJ52)
CAGPRGGTSYGKLTF

SEQ ID NO: 599166 - protein, 14 aa, Homo sapiens
  CDR3 for beta chain variable domain of TCR clone 299583 (TRBV20-1, TRBJ2-7)
CSAWTGLSSYEQYF

SEQ ID NO: 599167 - protein, 15 aa, Homo sapiens
  CDR3 for alpha chain variable domain of TCR clone 299584 (TRAV14/DV4, TRAJ12)
CAMREERDSSYELIF

SEQ ID NO: 599168 - protein, 16 aa, Homo sapiens
  CDR3 for beta chain variable domain of TCR clone 299584 (TRBV11-2, TRBJ1-2)
CASSLDRGGNNYGYTF

SEQ ID NO: 599169 - protein, 14 aa, Homo sapiens
  CDR3 for alpha chain variable domain of TCR clone 299585 (TRAV1-2, TRAJ16)
CAVNRFSDGQKLRF

SEQ ID NO: 599170 - protein, 14 aa, Homo sapiens
  CDR3 for beta chain variable domain of TCR clone 299585 (TRBV10-2, TRBJ1-5)
CASSSTGRNQPQHF

SEQ ID NO: 599171 - protein, 16 aa, Homo sapiens
  CDR3 for alpha chain variable domain of TCR clone 299586 (TRAV3, TRAJ10)
CAVRDMRAGGGNKLTF

SEQ ID NO: 599172 - protein, 20 aa, Homo sapiens
  CDR3 for beta chain variable domain of TCR clone 299586 (TRBV11-3, TRBJ2-7)
CASSQRTSVSLRAVLRAGHQ

SEQ ID NO: 599173 - protein, 15 aa, Homo sapiens
  CDR3 for alpha chain variable domain of TCR clone 299587 (TRAV5, TRAJ33)
CAEAPAMDSNYQLIW

SEQ ID NO: 599174 - protein, 16 aa, Homo sapiens
  CDR3 for beta chain variable domain of TCR clone 299587 (TRBV5-1, TRBJ2-1)
CASSGAGASDYNEQFF

SEQ ID NO: 599175 - protein, 11 aa, Homo sapiens
  CDR3 for alpha chain variable domain of TCR clone 299588 (TRAV4, TRAJ23)
CLVAPGGKLIF

SEQ ID NO: 599176 - protein, 15 aa, Homo sapiens
  CDR3 for beta chain variable domain of TCR clone 299588 (TRBV20-1, TRBJ2-7)
CRARDRASGMDEQYF

SEQ ID NO: 599177 - protein, 16 aa, Homo sapiens
  CDR3 for alpha chain variable domain of TCR clone 299589 (TRAV13-1, TRAJ48)
CSKYSESNFGNEKLTF

SEQ ID NO: 599178 - protein, 17 aa, Homo sapiens
  CDR3 for beta chain variable domain of TCR clone 299589 (TRBV28, TRBJ2-1)
CASSSARQALTYNEQFF

SEQ ID NO: 599179 - protein, 16 aa, Homo sapiens
  CDR3 for alpha chain variable domain of TCR clone 299590 (TRAV1-2, TRAJ10)
CAVRGVLTGGGNKLTF

SEQ ID NO: 599180 - protein, 12 aa, Homo sapiens
  CDR3 for beta chain variable domain of TCR clone 299590 (TRBV7-8, TRBJ2-1)
CASGLGDREQFF

SEQ ID NO: 599181 - protein, 12 aa, Homo sapiens
  CDR3 for alpha chain variable domain of TCR clone 299591 (TRAV16, TRAJ10)
CSRTGGGNELTF

SEQ ID NO: 599182 - protein, 13 aa, Homo sapiens
  CDR3 for beta chain variable domain of TCR clone 299591 (TRBV7-3, TRBJ1-1)
CASSQDWGAEAFF

SEQ ID NO: 599183 - protein, 13 aa, Homo sapiens
  CDR3 for alpha chain variable domain of TCR clone 299592 (TRAV8-3, TRAJ48)
CAVVRFGNEKLTF

SEQ ID NO: 599184 - protein, 16 aa, Homo sapiens
  CDR3 for beta chain variable domain of TCR clone 299592 (TRBV20-1, TRBJ2-5)
CSARDFASGIQETQYC

SEQ ID NO: 599185 - protein, 13 aa, Homo sapiens
  CDR3 for alpha chain variable domain of TCR clone 299593 (TRAV26-1, TRAJ34)
CIVRGQNTDKLIF

SEQ ID NO: 599186 - protein, 15 aa, Homo sapiens
  CDR3 for beta chain variable domain of TCR clone 299593 (TRBV4-1, TRBJ2-7)
CASSQEWGPSYEQYF

SEQ ID NO: 599187 - protein, 13 aa, Homo sapiens
  CDR3 for alpha chain variable domain of TCR clone 299594 (TRAV20, TRAJ21)
CAVEGYNFNKFYF

SEQ ID NO: 599188 - protein, 15 aa, Homo sapiens
  CDR3 for beta chain variable domain of TCR clone 299594 (TRBV20-1, TRBJ2-7)
CSARDRVSGMDEQYF

SEQ ID NO: 599189 - protein, 12 aa, Homo sapiens
  CDR3 for alpha chain variable domain of TCR clone 299595 (TRAV2, TRAJ5)
CALDTGRRALPF

SEQ ID NO: 599190 - protein, 15 aa, Homo sapiens
  CDR3 for beta chain variable domain of TCR clone 299595 (TRBV10-3, TRBJ2-1)
CAISDVQDRAYEQFF

SEQ ID NO: 599191 - protein, 16 aa, Homo sapiens
  CDR3 for alpha chain variable domain of TCR clone 299596 (TRAV4, TRAJ22)
CLVGDLYSGSARQLTF

SEQ ID NO: 599192 - protein, 16 aa, Homo sapiens
  CDR3 for beta chain variable domain of TCR clone 299596 (TRBV6-1, TRBJ2-5)
CASSETLDRGAENQYF

SEQ ID NO: 599193 - protein, 11 aa, Homo sapiens
  CDR3 for alpha chain variable domain of TCR clone 299597 (TRAV1-1, TRAJ23)
CAVRQGGKLIF

SEQ ID NO: 599194 - protein, 13 aa, Homo sapiens
  CDR3 for beta chain variable domain of TCR clone 299597 (TRBV4-1, TRBJ2-1)
CASSQAGGDEQFF

SEQ ID NO: 599195 - protein, 16 aa, Homo sapiens
  CDR3 for alpha chain variable domain of TCR clone 299598 (TRAV17, TRAJ22)
CATGPISSGSARQLTF

SEQ ID NO: 599196 - protein, 13 aa, Homo sapiens
  CDR3 for beta chain variable domain of TCR clone 299598 (TRBV11-2, TRBJ1-3)
CASSLEPVNTIYF

SEQ ID NO: 599197 - protein, 12 aa, Homo sapiens
  CDR3 for alpha chain variable domain of TCR clone 299599 (TRAV12-3, TRAJ17)
CAMTLTGNKLTF

SEQ ID NO: 599198 - protein, 14 aa, Homo sapiens
  CDR3 for beta chain variable domain of TCR clone 299599 (TRBV7-2, TRBJ1-6)
CASSLTGVNSPLHF

SEQ ID NO: 599199 - protein, 11 aa, Homo sapiens
  CDR3 for alpha chain variable domain of TCR clone 299600 (TRAV3, TRAJ21)
CAVGYFNKFYF

SEQ ID NO: 599200 - protein, 13 aa, Homo sapiens
  CDR3 for beta chain variable domain of TCR clone 299600 (TRBV7-9, TRBJ1-2)
CASSLKQNYGYTF

SEQ ID NO: 599201 - protein, 13 aa, Homo sapiens
  CDR3 for alpha chain variable domain of TCR clone 299601 (TRAV29/DV5, TRAJ47)
CAASAEYGNKLVF

SEQ ID NO: 599202 - protein, 13 aa, Homo sapiens
  CDR3 for beta chain variable domain of TCR clone 299601 (TRBV19, TRBJ2-7)
CASSIDRPYEQYF

SEQ ID NO: 599203 - protein, 13 aa, Homo sapiens
  CDR3 for alpha chain variable domain of TCR clone 299602 (TRAV8-3, TRAJ36)
CAVGATGANNLFF

SEQ ID NO: 599204 - protein, 16 aa, Homo sapiens
  CDR3 for beta chain variable domain of TCR clone 299602 (TRBV2, TRBJ2-7)
CASRKGSLGLVYEQYF

SEQ ID NO: 599205 - protein, 14 aa, Homo sapiens
  CDR3 for alpha chain variable domain of TCR clone 299603 (TRAV27, TRAJ44)
CAASFTGTASKLTF

SEQ ID NO: 599206 - protein, 15 aa, Homo sapiens
  CDR3 for beta chain variable domain of TCR clone 299603 (TRBV2, TRBJ2-1)
CASDIGLAGEGEQFF

SEQ ID NO: 599207 - protein, 14 aa, Homo sapiens
  CDR3 for alpha chain variable domain of TCR clone 299604 (TRAV35, TRAJ22)
CAGLRPGSGRQLTF

SEQ ID NO: 599208 - protein, 15 aa, Homo sapiens
  CDR3 for beta chain variable domain of TCR clone 299604 (TRBV12-4, TRBJ2-5)
CASSPPTGLQETQYF

SEQ ID NO: 599209 - protein, 12 aa, Homo sapiens
  CDR3 for alpha chain variable domain of TCR clone 299605 (TRAV13-1, TRAJ21)
CTAKEGFNKFYF

SEQ ID NO: 599210 - protein, 15 aa, Homo sapiens
  CDR3 for beta chain variable domain of TCR clone 299605 (TRBV3-1, TRBJ2-2)
CASSQDWTRAGELFF

SEQ ID NO: 599211 - protein, 11 aa, Homo sapiens
  CDR3 for alpha chain variable domain of TCR clone 299606 (TRAV2, TRAJ13)
CASGGYQKVTC

SEQ ID NO: 599212 - protein, 14 aa, Homo sapiens
  CDR3 for beta chain variable domain of TCR clone 299606 (TRBV6-1, TRBJ1-3)
CASVQGGGGNTIYF

SEQ ID NO: 599213 - protein, 15 aa, Homo sapiens
  CDR3 for alpha chain variable domain of TCR clone 299607 (TRAV8-3, TRAJ23)
CAVGDRYNQGGKLIF

SEQ ID NO: 599214 - protein, 22 aa, Homo sapiens
  CDR3 for beta chain variable domain of TCR clone 299607 (TRBV29-1, TRBJ2-5)
TASNMSPEDSSIYLCSAGTQYF

SEQ ID NO: 599215 - protein, 16 aa, Homo sapiens
  CDR3 for alpha chain variable domain of TCR clone 299608 (TRAV26-1, TRAJ32)
CIVRTNYGCATNKLIF

SEQ ID NO: 599216 - protein, 14 aa, Homo sapiens
  CDR3 for beta chain variable domain of TCR clone 299608 (TRBV19, TRBJ2-1)
CASPTFVLSGEQFF

SEQ ID NO: 599217 - protein, 13 aa, Homo sapiens
  CDR3 for alpha chain variable domain of TCR clone 299609 (TRAV29/DV5, TRAJ33)
CAASVESNSQLIW

SEQ ID NO: 599218 - protein, 14 aa, Homo sapiens
  CDR3 for beta chain variable domain of TCR clone 299609 (TRBV11-2, TRBJ2-5)
CASSRTGGIETQYF

SEQ ID NO: 599219 - protein, 13 aa, Homo sapiens
  CDR3 for alpha chain variable domain of TCR clone 299610 (TRAV38-2/DV8, TRAJ49)
CAYRRRTGNQFYF

SEQ ID NO: 599220 - protein, 15 aa, Homo sapiens
  CDR3 for beta chain variable domain of TCR clone 299610 (TRBV24-1, TRBJ1-1)
CATSDSKTANTEAFF

SEQ ID NO: 599221 - protein, 11 aa, Homo sapiens
  CDR3 for alpha chain variable domain of TCR clone 299611 (TRAV2, TRAJ13)
CASGGYQKVTF

SEQ ID NO: 599222 - protein, 13 aa, Homo sapiens
  CDR3 for beta chain variable domain of TCR clone 299611 (TRBV4-2, TRBJ1-1)
CASSQAGNTEASF

SEQ ID NO: 599223 - protein, 14 aa, Homo sapiens
  CDR3 for alpha chain variable domain of TCR clone 299612 (TRAV3, TRAJ9)
CAVRLNTGGFKTIF

SEQ ID NO: 599224 - protein, 15 aa, Homo sapiens
  CDR3 for beta chain variable domain of TCR clone 299612 (TRBV7-2, TRBJ2-1)
FASSLASGRVNEQFF

SEQ ID NO: 599225 - protein, 13 aa, Homo sapiens
  CDR3 for alpha chain variable domain of TCR clone 299613 (TRAV12-2, TRAJ37)
CAGGSGNTGKLIF

SEQ ID NO: 599226 - protein, 16 aa, Homo sapiens
  CDR3 for beta chain variable domain of TCR clone 299613 (TRBV29-1, TRBJ2-7)
CSVEVVGTSGSYEQYF

SEQ ID NO: 599227 - protein, 13 aa, Homo sapiens
  CDR3 for alpha chain variable domain of TCR clone 299614 (TRAV12-2, TRAJ15)
CAVFNQAGTALIF

SEQ ID NO: 599228 - protein, 15 aa, Homo sapiens
  CDR3 for beta chain variable domain of TCR clone 299614 (TRBV7-8, TRBJ1-5)
CQQPGGGGAGQPQHF

SEQ ID NO: 599229 - protein, 14 aa, Homo sapiens
  CDR3 for alpha chain variable domain of TCR clone 299615 (TRAV12-1, TRAJ3)
CGAARYSSASKIIF

SEQ ID NO: 599230 - protein, 15 aa, Homo sapiens
  CDR3 for beta chain variable domain of TCR clone 299615 (TRBV7-2, TRBJ2-6)
CASSREGAGANVLTF

SEQ ID NO: 599231 - protein, 11 aa, Homo sapiens
  CDR3 for alpha chain variable domain of TCR clone 299616 (TRAV8-3, TRAJ49)
CAVNTGNQFYF

SEQ ID NO: 599232 - protein, 12 aa, Homo sapiens
  CDR3 for beta chain variable domain of TCR clone 299616 (TRBV11-2, TRBJ2-7)
CASSHPADEQYF

SEQ ID NO: 599233 - protein, 11 aa, Homo sapiens
  CDR3 for alpha chain variable domain of TCR clone 299617 (TRAV1-1, TRAJ23)
CAVRQGGKLIF

SEQ ID NO: 599234 - protein, 13 aa, Homo sapiens
  CDR3 for beta chain variable domain of TCR clone 299617 (TRBV7-3, TRBJ1-1)
CASSQEWGAEAFF

SEQ ID NO: 599235 - protein, 13 aa, Homo sapiens
  CDR3 for alpha chain variable domain of TCR clone 299618 (TRAV8-3, TRAJ44)
CAVVPGTSSKLTF

SEQ ID NO: 599236 - protein, 14 aa, Homo sapiens
  CDR3 for beta chain variable domain of TCR clone 299618 (TRBV11-2, TRBJ2-3)
CASSRLARTDTQHF

SEQ ID NO: 599237 - protein, 14 aa, Homo sapiens
  CDR3 for alpha chain variable domain of TCR clone 299619 (TRAV29/DV5, TRAJ36)
CAARRKTGANNLLG

SEQ ID NO: 599238 - protein, 13 aa, Homo sapiens
  CDR3 for beta chain variable domain of TCR clone 299619 (TRBV24-1, TRBJ2-2)
CATSYWSTGELFF

SEQ ID NO: 599239 - protein, 13 aa, Homo sapiens
  CDR3 for alpha chain variable domain of TCR clone 299620 (TRAV3, TRAJ27)
CAVRPLGAGKSTF

SEQ ID NO: 599240 - protein, 15 aa, Homo sapiens
  CDR3 for beta chain variable domain of TCR clone 299620 (TRBV19, TRBJ1-2)
CASSVGQVLNYGYTL

SEQ ID NO: 599241 - protein, 16 aa, Homo sapiens
  CDR3 for alpha chain variable domain of TCR clone 299621 (TRAV12-3, TRAJ53)
CAMSPGSGGRHYKLTF

SEQ ID NO: 599242 - protein, 11 aa, Homo sapiens
  CDR3 for beta chain variable domain of TCR clone 299621 (TRBV29-1, TRBJ2-5)
CSEDRAGTQYF

SEQ ID NO: 599243 - protein, 13 aa, Homo sapiens
  CDR3 for alpha chain variable domain of TCR clone 299622 (TRAV3, TRAJ21)
CAVRAPDFNKFYF

SEQ ID NO: 599244 - protein, 18 aa, Homo sapiens
  CDR3 for beta chain variable domain of TCR clone 299622 (TRBV11-2, TRBJ2-3)
CASSLGVASRGAPNTQYF

SEQ ID NO: 599245 - protein, 16 aa, Homo sapiens
  CDR3 for alpha chain variable domain of TCR clone 299623 (TRAV14/DV4, TRAJ54)
CAMREGRIQVAQKLVF

SEQ ID NO: 599246 - protein, 15 aa, Homo sapiens
  CDR3 for beta chain variable domain of TCR clone 299623 (TRBV7-8, TRBJ2-1)
CASSLAGGLYNEQFF

SEQ ID NO: 599247 - protein, 14 aa, Homo sapiens
  CDR3 for alpha chain variable domain of TCR clone 299624 (TRAV6, TRAJ10)
CALDFTGGGNKLTF

SEQ ID NO: 599248 - protein, 13 aa, Homo sapiens
  CDR3 for beta chain variable domain of TCR clone 299624 (TRBV7-9, TRBJ1-2)
CASSLKQNYGYTF

SEQ ID NO: 599249 - protein, 16 aa, Homo sapiens
  CDR3 for alpha chain variable domain of TCR clone 299625 (TRAV30, TRAJ24)
CGTEIVDADSWGKFQF

SEQ ID NO: 599250 - protein, 14 aa, Homo sapiens
  CDR3 for beta chain variable domain of TCR clone 299625 (TRBV12-5, TRBJ2-5)
CVSGSRTHQETQYY

SEQ ID NO: 599251 - protein, 14 aa, Homo sapiens
  CDR3 for alpha chain variable domain of TCR clone 299626 (TRAV8-3, TRAJ23)
CAVIIYDQGGKLIF

SEQ ID NO: 599252 - protein, 15 aa, Homo sapiens
  CDR3 for beta chain variable domain of TCR clone 299626 (TRBV18, TRBJ2-1)
CASSPPSASYNEQFF

SEQ ID NO: 599253 - protein, 13 aa, Homo sapiens
  CDR3 for alpha chain variable domain of TCR clone 299627 (TRAV23/DV6, TRAJ24)
CAASTDSWGKFQF

SEQ ID NO: 599254 - protein, 14 aa, Homo sapiens
  CDR3 for beta chain variable domain of TCR clone 299627 (TRBV28, TRBJ1-2)
CASRIQGANYGYTF

SEQ ID NO: 599255 - protein, 16 aa, Homo sapiens
  CDR3 for alpha chain variable domain of TCR clone 299628 (TRAV29/DV5, TRAJ36)
CAASAGVETGANNLFF

SEQ ID NO: 599256 - protein, 16 aa, Homo sapiens
  CDR3 for beta chain variable domain of TCR clone 299628 (TRBV5-1, TRBJ2-3)
CASSLGLAVYTDPQYF

SEQ ID NO: 599257 - protein, 14 aa, Homo sapiens
  CDR3 for alpha chain variable domain of TCR clone 299629 (TRAV12-2, TRAJ17)
CAALFKAAGNKLTF

SEQ ID NO: 599258 - protein, 15 aa, Homo sapiens
  CDR3 for beta chain variable domain of TCR clone 299629 (TRBV12-4, TRBJ1-1)
CASSFGEDTEAFLDK

SEQ ID NO: 599259 - protein, 14 aa, Homo sapiens
  CDR3 for alpha chain variable domain of TCR clone 299630 (TRAV2, TRAJ9)
CAVEDRSGGLKTTF

SEQ ID NO: 599260 - protein, 15 aa, Homo sapiens
  CDR3 for beta chain variable domain of TCR clone 299630 (TRBV20-1, TRBJ2-7)
CSARDRVSGMDEQYF

SEQ ID NO: 599261 - protein, 16 aa, Homo sapiens
  CDR3 for alpha chain variable domain of TCR clone 299631 (TRAV26-1, TRAJ38)
CTVRVSGAGNNRKLIW

SEQ ID NO: 599262 - protein, 13 aa, Homo sapiens
  CDR3 for beta chain variable domain of TCR clone 299631 (TRBV7-3, TRBJ1-1)
CASSPAGGLEAFF

SEQ ID NO: 599263 - protein, 15 aa, Homo sapiens
  CDR3 for alpha chain variable domain of TCR clone 299632 (TRAV3, TRAJ10)
CAVRDCTGGGNKLTF

SEQ ID NO: 599264 - protein, 15 aa, Homo sapiens
  CDR3 for beta chain variable domain of TCR clone 299632 (TRBV4-2, TRBJ1-4)
CASSLVQREVEKLFF

SEQ ID NO: 599265 - protein, 21 aa, Homo sapiens
  CDR3 for alpha chain variable domain of TCR clone 299633 (TRAV8-3, TRAJ6)
CAVGGEEATYLHLEEEPALLF

SEQ ID NO: 599266 - protein, 17 aa, Homo sapiens
  CDR3 for beta chain variable domain of TCR clone 299633 (TRBV7-2, TRBJ2-3)
CACSLAGGLAGTAGQYF

SEQ ID NO: 599267 - protein, 15 aa, Homo sapiens
  CDR3 for alpha chain variable domain of TCR clone 299634 (TRAV8-3, TRAJ45)
CASSYSGGGADGLTF

SEQ ID NO: 599268 - protein, 17 aa, Homo sapiens
  CDR3 for beta chain variable domain of TCR clone 299634 (TRBV7-8, TRBJ2-6)
CVSSAGTGGAGANVLTF

SEQ ID NO: 599269 - protein, 12 aa, Homo sapiens
  CDR3 for alpha chain variable domain of TCR clone 299635 (TRAV1-1, TRAJ39)
CAVPAVGNMLTF

SEQ ID NO: 599270 - protein, 12 aa, Homo sapiens
  CDR3 for beta chain variable domain of TCR clone 299635 (TRBV2, TRBJ1-2)
CASSGQTYGYTF

SEQ ID NO: 599271 - protein, 14 aa, Homo sapiens
  CDR3 for alpha chain variable domain of TCR clone 299636 (TRAV26-1, TRAJ38)
CIADNAGNNRKRIW

SEQ ID NO: 599272 - protein, 13 aa, Homo sapiens
  CDR3 for beta chain variable domain of TCR clone 299636 (TRBV20-1, TRBJ1-1)
CSARGGGNTEASF

SEQ ID NO: 599273 - protein, 13 aa, Homo sapiens
  CDR3 for alpha chain variable domain of TCR clone 299637 (TRAV1-1, TRAJ9)
CAAKNTGGFKTIF

SEQ ID NO: 599274 - protein, 14 aa, Homo sapiens
  CDR3 for beta chain variable domain of TCR clone 299637 (TRBV20-1, TRBJ2-7)
CSAQIGGSANEQYF

SEQ ID NO: 599275 - protein, 13 aa, Homo sapiens
  CDR3 for alpha chain variable domain of TCR clone 299638 (TRAV12-3, TRAJ7)
CAMTPYGNNRLAF

SEQ ID NO: 599276 - protein, 13 aa, Homo sapiens
  CDR3 for beta chain variable domain of TCR clone 299638 (TRBV10-3, TRBJ2-7)
CASKLAVNYEQYF

SEQ ID NO: 599277 - protein, 14 aa, Homo sapiens
  CDR3 for alpha chain variable domain of TCR clone 299639 (TRAV13-2, TRAJ22)
CADGTLGSARQLTF

SEQ ID NO: 599278 - protein, 15 aa, Homo sapiens
  CDR3 for beta chain variable domain of TCR clone 299639 (TRBV6-3, TRBJ2-7)
CTSSSPGTVFYEQYF

SEQ ID NO: 599279 - protein, 11 aa, Homo sapiens
  CDR3 for alpha chain variable domain of TCR clone 299640 (TRAV3, TRAJ21)
CAVGNFNKFYF

SEQ ID NO: 599280 - protein, 15 aa, Homo sapiens
  CDR3 for beta chain variable domain of TCR clone 299640 (TRBV18, TRBJ2-7)
CASSPSSTGNYEQYF

SEQ ID NO: 599281 - protein, 13 aa, Homo sapiens
  CDR3 for alpha chain variable domain of TCR clone 299641 (TRAV22, TRAJ49)
CAVGMYTGNQFYF

SEQ ID NO: 599282 - protein, 14 aa, Homo sapiens
  CDR3 for beta chain variable domain of TCR clone 299641 (TRBV19, TRBJ2-1)
CARGARSFQWEQFF

SEQ ID NO: 599283 - protein, 14 aa, Homo sapiens
  CDR3 for alpha chain variable domain of TCR clone 299642 (TRAV1-2, TRAJ16)
CAVNRFSDGQKLLF

SEQ ID NO: 599284 - protein, 16 aa, Homo sapiens
  CDR3 for beta chain variable domain of TCR clone 299642 (TRBV7-2, TRBJ1-3)
CASSSGRVLSGNTIYF

SEQ ID NO: 599285 - protein, 14 aa, Homo sapiens
  CDR3 for alpha chain variable domain of TCR clone 299643 (TRAV13-1, TRAJ10)
CAAKEPGGGNKLTF

SEQ ID NO: 599286 - protein, 14 aa, Homo sapiens
  CDR3 for beta chain variable domain of TCR clone 299643 (TRBV6-6, TRBJ2-7)
CASSGSGAGYEQYF

SEQ ID NO: 599287 - protein, 13 aa, Homo sapiens
  CDR3 for alpha chain variable domain of TCR clone 299644 (TRAV1-2, TRAJ9)
CAVLNTGGFKTIF

SEQ ID NO: 599288 - protein, 17 aa, Homo sapiens
  CDR3 for beta chain variable domain of TCR clone 299644 (TRBV13, TRBJ2-3)
CASSPSRVAGGRNTQYF

SEQ ID NO: 599289 - protein, 15 aa, Homo sapiens
  CDR3 for alpha chain variable domain of TCR clone 299645 (TRAV12-3, TRAJ49)
CAMAVTPNTGNQFYF

SEQ ID NO: 599290 - protein, 15 aa, Homo sapiens
  CDR3 for beta chain variable domain of TCR clone 299645 (TRBV18, TRBJ1-1)
CASSDRGTGDTEAFF

SEQ ID NO: 599291 - protein, 22 aa, Homo sapiens
  CDR3 for alpha chain variable domain of TCR clone 299646 (TRAV2, TRAJ26)
CAGSPGGLWSEFCLWSRNQIVR

SEQ ID NO: 599292 - protein, 13 aa, Homo sapiens
  CDR3 for beta chain variable domain of TCR clone 299646 (TRBV7-9, TRBJ1-2)
CASSLKQNYGYTF

SEQ ID NO: 599293 - protein, 18 aa, Homo sapiens
  CDR3 for alpha chain variable domain of TCR clone 299647 (TRAV21, TRAJ52)
CAVRPSPAGGTSYGKLTF

SEQ ID NO: 599294 - protein, 16 aa, Homo sapiens
  CDR3 for beta chain variable domain of TCR clone 299647 (TRBV4-1, TRBJ2-2)
CASSLKRGTLSGELFF

SEQ ID NO: 599295 - protein, 12 aa, Homo sapiens
  CDR3 for alpha chain variable domain of TCR clone 299648 (TRAV12-2, TRAJ10)
WGVTGGGNKLTF

SEQ ID NO: 599296 - protein, 15 aa, Homo sapiens
  CDR3 for beta chain variable domain of TCR clone 299648 (TRBV27, TRBJ2-3)
CASSLGLAATDTQYF

SEQ ID NO: 599297 - protein, 13 aa, Homo sapiens
  CDR3 for alpha chain variable domain of TCR clone 299649 (TRAV27, TRAJ54)
CAGAGQGAQNLVF

SEQ ID NO: 599298 - protein, 15 aa, Homo sapiens
  CDR3 for beta chain variable domain of TCR clone 299649 (TRBV18, TRBJ2-6)
CASSPAYAGANVLTF

SEQ ID NO: 599299 - protein, 15 aa, Homo sapiens
  CDR3 for alpha chain variable domain of TCR clone 299650 (TRAV8-3, TRAJ45)
CASSYSGGGADGLTF

SEQ ID NO: 599300 - protein, 14 aa, Homo sapiens
  CDR3 for beta chain variable domain of TCR clone 299650 (TRBV11-2, TRBJ2-3)
CASSRLPRTDTQYF

SEQ ID NO: 599301 - protein, 16 aa, Homo sapiens
  CDR3 for alpha chain variable domain of TCR clone 299651 (TRAV30, TRAJ24)
CGTEIVDADSWGKFQF

SEQ ID NO: 599302 - protein, 12 aa, Homo sapiens
  CDR3 for beta chain variable domain of TCR clone 299651 (TRBV14, TRBJ2-5)
CASSQLKETHYF

SEQ ID NO: 599303 - protein, 15 aa, Homo sapiens
  CDR3 for alpha chain variable domain of TCR clone 299652 (TRAV13-1, TRAJ44)
CAASRGGGTASTLTF

SEQ ID NO: 599304 - protein, 12 aa, Homo sapiens
  CDR3 for beta chain variable domain of TCR clone 299652 (TRBV11-2, TRBJ2-2)
CASSLGGGELFF

SEQ ID NO: 599305 - protein, 13 aa, Homo sapiens
  CDR3 for alpha chain variable domain of TCR clone 299653 (TRAV13-1, TRAJ39)
CSKYSNAGNMLTF

SEQ ID NO: 599306 - protein, 16 aa, Homo sapiens
  CDR3 for beta chain variable domain of TCR clone 299653 (TRBV20-1, TRBJ1-4)
YSAPGQGLLTNEKLFF

SEQ ID NO: 599307 - protein, 13 aa, Homo sapiens
  CDR3 for alpha chain variable domain of TCR clone 299654 (TRAV12-1, TRAJ11)
CVVTRGGYSTLTF

SEQ ID NO: 599308 - protein, 11 aa, Homo sapiens
  CDR3 for beta chain variable domain of TCR clone 299654 (TRBV11-2, TRBJ2-2)
CSSLGGGELFF

SEQ ID NO: 599309 - protein, 14 aa, Homo sapiens
  CDR3 for alpha chain variable domain of TCR clone 299655 (TRAV20, TRAJ56)
CSVQFVGANSKLTF

SEQ ID NO: 599310 - protein, 14 aa, Homo sapiens
  CDR3 for beta chain variable domain of TCR clone 299655 (TRBV20-1, TRBJ2-7)
CSAKRGRSSYEQYF

SEQ ID NO: 599311 - protein, 14 aa, Homo sapiens
  CDR3 for alpha chain variable domain of TCR clone 299656 (TRAV29/DV5, TRAJ45)
CAASFRGGADGPTL

SEQ ID NO: 599312 - protein, 11 aa, Homo sapiens
  CDR3 for beta chain variable domain of TCR clone 299656 (TRBV11-2, TRBJ2-2)
CASSLPGELFF

SEQ ID NO: 599313 - protein, 16 aa, Homo sapiens
  CDR3 for alpha chain variable domain of TCR clone 299657 (TRAV4, TRAJ42)
CLVGDHYGGSQGNLIF

SEQ ID NO: 599314 - protein, 14 aa, Homo sapiens
  CDR3 for beta chain variable domain of TCR clone 299657 (TRBV7-8, TRBJ2-3)
CASSLEAGTDTQYF

SEQ ID NO: 599315 - protein, 14 aa, Homo sapiens
  CDR3 for alpha chain variable domain of TCR clone 299658 (TRAV1-1, TRAJ23)
CAVKAYNQGGKLIF

SEQ ID NO: 599316 - protein, 17 aa, Homo sapiens
  CDR3 for beta chain variable domain of TCR clone 299658 (TRBV7-2, TRBJ2-3)
CASTPTSGKQIRSILAQ

SEQ ID NO: 599317 - protein, 14 aa, Homo sapiens
  CDR3 for alpha chain variable domain of TCR clone 299659 (TRAV16, TRAJ17)
CALSGRAAGNKLTF

SEQ ID NO: 599318 - protein, 14 aa, Homo sapiens
  CDR3 for beta chain variable domain of TCR clone 299659 (TRBV7-6, TRBJ2-3)
CASSLGTVTDTQYC

SEQ ID NO: 599319 - protein, 13 aa, Homo sapiens
  CDR3 for alpha chain variable domain of TCR clone 299660 (TRAV12-1, TRAJ49)
CVLCSNTGNQFYF

SEQ ID NO: 599320 - protein, 15 aa, Homo sapiens
  CDR3 for beta chain variable domain of TCR clone 299660 (TRBV11-2, TRBJ2-1)
CASSKNRGLIYEQFF

SEQ ID NO: 599321 - protein, 14 aa, Homo sapiens
  CDR3 for alpha chain variable domain of TCR clone 299661 (TRAV12-1, TRAJ23)
CVVMIDNQGGQLIF

SEQ ID NO: 599322 - protein, 23 aa, Homo sapiens
  CDR3 for beta chain variable domain of TCR clone 299661 (TRBV7-3, TRBJ1-6)
CASSLTSRDEASDPSSYNSPLHF

SEQ ID NO: 599323 - protein, 13 aa, Homo sapiens
  CDR3 for alpha chain variable domain of TCR clone 299662 (TRAV25, TRAJ29)
CAGRFVGNTPLVF

SEQ ID NO: 599324 - protein, 15 aa, Homo sapiens
  CDR3 for beta chain variable domain of TCR clone 299662 (TRBV29-1, TRBJ2-1)
CSVRTSLSSYNDQFF

SEQ ID NO: 599325 - protein, 14 aa, Homo sapiens
  CDR3 for alpha chain variable domain of TCR clone 299663 (TRAV20, TRAJ42)
CAVQAGGSQGKLIF

SEQ ID NO: 599326 - protein, 16 aa, Homo sapiens
  CDR3 for beta chain variable domain of TCR clone 299663 (TRBV28, TRBJ2-7)
CASSLFFETGGPEQYF

SEQ ID NO: 599327 - protein, 16 aa, Homo sapiens
  CDR3 for alpha chain variable domain of TCR clone 299664 (TRAV12-3, TRAJ53)
CAMSPGSGGSNYKLKF

SEQ ID NO: 599328 - protein, 11 aa, Homo sapiens
  CDR3 for beta chain variable domain of TCR clone 299664 (TRBV29-1, TRBJ2-5)
CSEDRTGTQYF

SEQ ID NO: 599329 - protein, 12 aa, Homo sapiens
  CDR3 for alpha chain variable domain of TCR clone 299665 (TRAV12-3, TRAJ17)
RAMTLTGNKLTF

SEQ ID NO: 599330 - protein, 12 aa, Homo sapiens
  CDR3 for beta chain variable domain of TCR clone 299665 (TRBV2, TRBJ2-1)
CAYGPPGNEQFF

SEQ ID NO: 599331 - protein, 12 aa, Homo sapiens
  CDR3 for alpha chain variable domain of TCR clone 299666 (TRAV21, TRAJ33)
CAKMDSNYQLIW

SEQ ID NO: 599332 - protein, 14 aa, Homo sapiens
  CDR3 for beta chain variable domain of TCR clone 299666 (TRBV18, TRBJ1-4)
CASSPGPNGEKLFF

SEQ ID NO: 599333 - protein, 14 aa, Homo sapiens
  CDR3 for alpha chain variable domain of TCR clone 299667 (TRAV26-1, TRAJ45)
CIVRVVGGADGLTF

SEQ ID NO: 599334 - protein, 16 aa, Homo sapiens
  CDR3 for beta chain variable domain of TCR clone 299667 (TRBV7-9, TRBJ1-1)
CASSLAQVRSNTEAFF

SEQ ID NO: 599335 - protein, 11 aa, Homo sapiens
  CDR3 for alpha chain variable domain of TCR clone 299668 (TRAV12-1, TRAJ26)
CVVAYGQNFVF

SEQ ID NO: 599336 - protein, 14 aa, Homo sapiens
  CDR3 for beta chain variable domain of TCR clone 299668 (TRBV6-1, TRBJ1-3)
CASVQGGGGNTIYF

SEQ ID NO: 599337 - protein, 14 aa, Homo sapiens
  CDR3 for alpha chain variable domain of TCR clone 299669 (TRAV13-1, TRAJ26)
CAASRGNYGQNFVF

SEQ ID NO: 599338 - protein, 14 aa, Homo sapiens
  CDR3 for beta chain variable domain of TCR clone 299669 (TRBV5-1, TRBJ2-1)
CASSALWAGNEQFF

SEQ ID NO: 599339 - protein, 14 aa, Homo sapiens
  CDR3 for alpha chain variable domain of TCR clone 299670 (TRAV17, TRAJ31)
CATVLRNNNARLMF

SEQ ID NO: 599340 - protein, 14 aa, Homo sapiens
  CDR3 for beta chain variable domain of TCR clone 299670 (TRBV12-4, TRBJ2-5)
CASSLWQKQETQHF

SEQ ID NO: 599341 - protein, 13 aa, Homo sapiens
  CDR3 for alpha chain variable domain of TCR clone 299671 (TRAV12-1, TRAJ43)
CVVSHHNNNDMRL

SEQ ID NO: 599342 - protein, 15 aa, Homo sapiens
  CDR3 for beta chain variable domain of TCR clone 299671 (TRBV3-1, TRBJ2-5)
CASSLPSSSREAQYF

SEQ ID NO: 599343 - protein, 15 aa, Homo sapiens
  CDR3 for alpha chain variable domain of TCR clone 299672 (TRAV21, TRAJ22)
CAVRLFFWLCKATDL

SEQ ID NO: 599344 - protein, 14 aa, Homo sapiens
  CDR3 for beta chain variable domain of TCR clone 299672 (TRBV19, TRBJ1-5)
CASRAPDSLLSQHF

SEQ ID NO: 599345 - protein, 15 aa, Homo sapiens
  CDR3 for alpha chain variable domain of TCR clone 299673 (TRAV23/DV6, TRAJ38)
CAESAGAGNNRKLIW

SEQ ID NO: 599346 - protein, 13 aa, Homo sapiens
  CDR3 for beta chain variable domain of TCR clone 299673 (TRBV7-2, TRBJ1-2)
CASSLPGLYGYTF

SEQ ID NO: 599347 - protein, 13 aa, Homo sapiens
  CDR3 for alpha chain variable domain of TCR clone 299674 (TRAV21, TRAJ57)
CAVTQGGSGKLVF

SEQ ID NO: 599348 - protein, 15 aa, Homo sapiens
  CDR3 for beta chain variable domain of TCR clone 299674 (TRBV7-2, TRBJ2-7)
CASSLKGALTYEQYF

SEQ ID NO: 599349 - protein, 15 aa, Homo sapiens
  CDR3 for alpha chain variable domain of TCR clone 299675 (TRAV38-2/DV8, TRAJ45)
CAYWDSGGGADGLTF

SEQ ID NO: 599350 - protein, 16 aa, Homo sapiens
  CDR3 for beta chain variable domain of TCR clone 299675 (TRBV19, TRBJ1-1)
CASSPTRFWPGTESFF

SEQ ID NO: 599351 - protein, 16 aa, Homo sapiens
  CDR3 for alpha chain variable domain of TCR clone 299676 (TRAV1-2, TRAJ16)
CAVNRFSDARSCSLQG

SEQ ID NO: 599352 - protein, 15 aa, Homo sapiens
  CDR3 for beta chain variable domain of TCR clone 299676 (TRBV7-9, TRBJ1-6)
CASSSPGRGNSPLHF

SEQ ID NO: 599353 - protein, 10 aa, Homo sapiens
  CDR3 for alpha chain variable domain of TCR clone 299677 (TRAV13-1, TRAJ5)
CAASRRALTF

SEQ ID NO: 599354 - protein, 16 aa, Homo sapiens
  CDR3 for beta chain variable domain of TCR clone 299677 (TRBV4-3, TRBJ2-3)
YASSQGGLAGTDTQYF

SEQ ID NO: 599355 - protein, 15 aa, Homo sapiens
  CDR3 for alpha chain variable domain of TCR clone 299678 (TRAV3, TRAJ22)
CAVRDRGGSARQMTF

SEQ ID NO: 599356 - protein, 17 aa, Homo sapiens
  CDR3 for beta chain variable domain of TCR clone 299678 (TRBV13, TRBJ2-3)
CASSLSRVAGGRNTQYF

SEQ ID NO: 599357 - protein, 22 aa, Homo sapiens
  CDR3 for alpha chain variable domain of TCR clone 299679 (TRAV1-1, TRAJ38)
CASNAGNNHIQNPDPAVYQLRD

SEQ ID NO: 599358 - protein, 14 aa, Homo sapiens
  CDR3 for beta chain variable domain of TCR clone 299679 (TRBV15, TRBJ2-1)
CATSGVEDYNEQFL

SEQ ID NO: 599359 - protein, 16 aa, Homo sapiens
  CDR3 for alpha chain variable domain of TCR clone 299680 (TRAV3, TRAJ10)
CAVRDMRAGGGNKLTF

SEQ ID NO: 599360 - protein, 12 aa, Homo sapiens
  CDR3 for beta chain variable domain of TCR clone 299680 (TRBV5-1, TRBJ2-7)
CASSFRGYEQYF

SEQ ID NO: 599361 - protein, 13 aa, Homo sapiens
  CDR3 for alpha chain variable domain of TCR clone 299681 (TRAV16, TRAJ48)
CSPLNFRNEKLTF

SEQ ID NO: 599362 - protein, 13 aa, Homo sapiens
  CDR3 for beta chain variable domain of TCR clone 299681 (TRBV2, TRBJ1-1)
CASSEGGNTEAFF

SEQ ID NO: 599363 - protein, 11 aa, Homo sapiens
  CDR3 for alpha chain variable domain of TCR clone 299682 (TRAV17, TRAJ43)
CATPRSNDMRF

SEQ ID NO: 599364 - protein, 13 aa, Homo sapiens
  CDR3 for beta chain variable domain of TCR clone 299682 (TRBV7-3, TRBJ2-1)
CASSLDSYNEQFF

SEQ ID NO: 599365 - protein, 22 aa, Homo sapiens
  CDR3 for alpha chain variable domain of TCR clone 299683 (TRAV26-1, TRAJ42)
CVVRPIMDEAKEISSLEKALNS

SEQ ID NO: 599366 - protein, 16 aa, Homo sapiens
  CDR3 for beta chain variable domain of TCR clone 299683 (TRBV7-3, TRBJ2-2)
CASSLKRGTLSGELFF

SEQ ID NO: 599367 - protein, 16 aa, Homo sapiens
  CDR3 for alpha chain variable domain of TCR clone 299684 (TRAV8-3, TRAJ8)
CAVPRDGNTGCQKLVF

SEQ ID NO: 599368 - protein, 14 aa, Homo sapiens
  CDR3 for beta chain variable domain of TCR clone 299684 (TRBV28, TRBJ1-1)
CASSESGRGTEAFF

SEQ ID NO: 599369 - protein, 15 aa, Homo sapiens
  CDR3 for alpha chain variable domain of TCR clone 299685 (TRAV26-1, TRAJ17)
CIVRVVKAAGNKLTF

SEQ ID NO: 599370 - protein, 16 aa, Homo sapiens
  CDR3 for beta chain variable domain of TCR clone 299685 (TRBV7-9, TRBJ2-1)
CASSLVSGPSDNEQFF

SEQ ID NO: 599371 - protein, 12 aa, Homo sapiens
  CDR3 for alpha chain variable domain of TCR clone 299686 (TRAV13-1, TRAJ42)
VNYGGSQGNLIF

SEQ ID NO: 599372 - protein, 15 aa, Homo sapiens
  CDR3 for beta chain variable domain of TCR clone 299686 (TRBV20-1, TRBJ2-1)
CSASSAGGSYNEQFF

SEQ ID NO: 599373 - protein, 14 aa, Homo sapiens
  CDR3 for alpha chain variable domain of TCR clone 299687 (TRAV12-2, TRAJ13)
CAVKKTGGYQKVTF

SEQ ID NO: 599374 - protein, 13 aa, Homo sapiens
  CDR3 for beta chain variable domain of TCR clone 299687 (TRBV11-3, TRBJ2-7)
CASSLDKLYEQYF

SEQ ID NO: 599375 - protein, 13 aa, Homo sapiens
  CDR3 for alpha chain variable domain of TCR clone 299688 (TRAV13-2, TRAJ48)
CAEVNFGNEKLNF

SEQ ID NO: 599376 - protein, 15 aa, Homo sapiens
  CDR3 for beta chain variable domain of TCR clone 299688 (TRBV7-9, TRBJ1-6)
CASSSPGRGNSPLHF

SEQ ID NO: 599377 - protein, 14 aa, Homo sapiens
  CDR3 for alpha chain variable domain of TCR clone 299689 (TRAV2, TRAJ9)
CAVEDRSGGFKTIF

SEQ ID NO: 599378 - protein, 15 aa, Homo sapiens
  CDR3 for beta chain variable domain of TCR clone 299689 (TRBV7-3, TRBJ2-1)
CASSLAGAGADDQFF

SEQ ID NO: 599379 - protein, 10 aa, Homo sapiens
  CDR3 for alpha chain variable domain of TCR clone 299690 (TRAV23/DV6, TRAJ57)
CAASSTLSQG

SEQ ID NO: 599380 - protein, 14 aa, Homo sapiens
  CDR3 for beta chain variable domain of TCR clone 299690 (TRBV11-2, TRBJ1-2)
CASSLYRGNYGYTF

SEQ ID NO: 599381 - protein, 13 aa, Homo sapiens
  CDR3 for alpha chain variable domain of TCR clone 299691 (TRAV27, TRAJ8)
CAGGPTGFPKLVF

SEQ ID NO: 599382 - protein, 15 aa, Homo sapiens
  CDR3 for beta chain variable domain of TCR clone 299691 (TRBV20-1, TRBJ2-7)
CSARDRVSGMDEQYF

SEQ ID NO: 599383 - protein, 15 aa, Homo sapiens
  CDR3 for alpha chain variable domain of TCR clone 299692 (TRAV8-3, TRAJ40)
CAAPSLGSGTYKYIF

SEQ ID NO: 599384 - protein, 16 aa, Homo sapiens
  CDR3 for beta chain variable domain of TCR clone 299692 (TRBV7-3, TRBJ2-3)
CASSLSGYRPEDTQYF

SEQ ID NO: 599385 - protein, 11 aa, Homo sapiens
  CDR3 for alpha chain variable domain of TCR clone 299693 (TRAV4, TRAJ21)
CLIYNFNKFNF

SEQ ID NO: 599386 - protein, 13 aa, Homo sapiens
  CDR3 for beta chain variable domain of TCR clone 299693 (TRBV6-1, TRBJ2-7)
YASSADTSYERYF

SEQ ID NO: 599387 - protein, 16 aa, Homo sapiens
  CDR3 for alpha chain variable domain of TCR clone 299694 (TRAV3, TRAJ5)
CAVRNLMDTGRRALTF

SEQ ID NO: 599388 - protein, 15 aa, Homo sapiens
  CDR3 for beta chain variable domain of TCR clone 299694 (TRBV4-1, TRBJ1-4)
CASSDTGGTNEKLFF

SEQ ID NO: 599389 - protein, 15 aa, Homo sapiens
  CDR3 for alpha chain variable domain of TCR clone 299695 (TRAV8-1, TRAJ6)
CAVNAGAGGSYIPTF

SEQ ID NO: 599390 - protein, 15 aa, Homo sapiens
  CDR3 for beta chain variable domain of TCR clone 299695 (TRBV2, TRBJ2-1)
CASSELAGSYNEQFF

SEQ ID NO: 599391 - protein, 12 aa, Homo sapiens
  CDR3 for alpha chain variable domain of TCR clone 299696 (TRAV8-4, TRAJ3)
CAVTGENPVQQC

SEQ ID NO: 599392 - protein, 16 aa, Homo sapiens
  CDR3 for beta chain variable domain of TCR clone 299696 (TRBV4-2, TRBJ1-1)
CASSQAGFGMNTEAFF

SEQ ID NO: 599393 - protein, 15 aa, Homo sapiens
  CDR3 for alpha chain variable domain of TCR clone 299697 (TRAV14/DV4, TRAJ22)
CAMREGWPTARQLTF

SEQ ID NO: 599394 - protein, 13 aa, Homo sapiens
  CDR3 for beta chain variable domain of TCR clone 299697 (TRBV5-4, TRBJ1-2)
CASSSRENYGYTF

SEQ ID NO: 599395 - protein, 14 aa, Homo sapiens
  CDR3 for alpha chain variable domain of TCR clone 299698 (TRAV12-2, TRAJ6)
CASKWGGGSYIPTF

SEQ ID NO: 599396 - protein, 13 aa, Homo sapiens
  CDR3 for beta chain variable domain of TCR clone 299698 (TRBV7-9, TRBJ1-2)
CASSLKQNYGYTF

SEQ ID NO: 599397 - protein, 22 aa, Homo sapiens
  CDR3 for alpha chain variable domain of TCR clone 299699 (TRAV8-3, TRAJ32)
CAVEVVLQTSSSLELALCLLST

SEQ ID NO: 599398 - protein, 12 aa, Homo sapiens
  CDR3 for beta chain variable domain of TCR clone 299699 (TRBV7-8, TRBJ2-7)
CASSLGDREQYF

SEQ ID NO: 599399 - protein, 14 aa, Homo sapiens
  CDR3 for alpha chain variable domain of TCR clone 299700 (TRAV9-2, TRAJ44)
CALSEPGTASKLTF

SEQ ID NO: 599400 - protein, 13 aa, Homo sapiens
  CDR3 for beta chain variable domain of TCR clone 299700 (TRBV12-5, TRBJ2-3)
CASGDRQSDTQYL

SEQ ID NO: 599401 - protein, 13 aa, Homo sapiens
  CDR3 for alpha chain variable domain of TCR clone 299701 (TRAV16, TRAJ16)
CAPRSSDGQKLLF

SEQ ID NO: 599402 - protein, 14 aa, Homo sapiens
  CDR3 for beta chain variable domain of TCR clone 299701 (TRBV12-5, TRBJ2-5)
CASGSRTHQETQYF

SEQ ID NO: 599403 - protein, 16 aa, Homo sapiens
  CDR3 for alpha chain variable domain of TCR clone 299702 (TRAV35, TRAJ28)
CAGQRYSGAGSYQLTF

SEQ ID NO: 599404 - protein, 16 aa, Homo sapiens
  CDR3 for beta chain variable domain of TCR clone 299702 (TRBV12-5, TRBJ2-5)
CASGPRTSGNQETQYF

SEQ ID NO: 599405 - protein, 12 aa, Homo sapiens
  CDR3 for alpha chain variable domain of TCR clone 299703 (TRAV29/DV5, TRAJ49)
CAATDTGNQFYF

SEQ ID NO: 599406 - protein, 13 aa, Homo sapiens
  CDR3 for beta chain variable domain of TCR clone 299703 (TRBV7-2, TRBJ2-2)
CASSLAVTGELFF

SEQ ID NO: 599407 - protein, 14 aa, Homo sapiens
  CDR3 for alpha chain variable domain of TCR clone 299704 (TRAV12-2, TRAJ11)
CAVEGGSGYSTLTF

SEQ ID NO: 599408 - protein, 14 aa, Homo sapiens
  CDR3 for beta chain variable domain of TCR clone 299704 (TRBV11-2, TRBJ1-2)
CASSLGTANYGYTF

SEQ ID NO: 599409 - protein, 14 aa, Homo sapiens
  CDR3 for alpha chain variable domain of TCR clone 299705 (TRAV9-2, TRAJ39)
CALYIYNAGNMLTF

SEQ ID NO: 599410 - protein, 16 aa, Homo sapiens
  CDR3 for beta chain variable domain of TCR clone 299705 (TRBV4-1, TRBJ1-1)
CASSQDAGMGNTEAFF

SEQ ID NO: 599411 - protein, 14 aa, Homo sapiens
  CDR3 for alpha chain variable domain of TCR clone 299706 (TRAV1-2, TRAJ8)
CAVREDTGFQKLVF

SEQ ID NO: 599412 - protein, 15 aa, Homo sapiens
  CDR3 for beta chain variable domain of TCR clone 299706 (TRBV5-7, TRBJ2-3)
CASSPGLATTETQYF

SEQ ID NO: 599413 - protein, 15 aa, Homo sapiens
  CDR3 for alpha chain variable domain of TCR clone 299707 (TRAV26-1, TRAJ42)
FIVRVKGGSQGNLIF

SEQ ID NO: 599414 - protein, 14 aa, Homo sapiens
  CDR3 for beta chain variable domain of TCR clone 299707 (TRBV19, TRBJ2-2)
GATTGHANTGGLFF

SEQ ID NO: 599415 - protein, 16 aa, Homo sapiens
  CDR3 for alpha chain variable domain of TCR clone 299708 (TRAV8-6, TRAJ13)
CAVSDKGIWGLPESYL

SEQ ID NO: 599416 - protein, 13 aa, Homo sapiens
  CDR3 for beta chain variable domain of TCR clone 299708 (TRBV20-1, TRBJ1-1)
CSARVGGNTEAFF

SEQ ID NO: 599417 - protein, 16 aa, Homo sapiens
  CDR3 for alpha chain variable domain of TCR clone 299709 (TRAV4, TRAJ22)
CLVGDLYSGSARQLTF

SEQ ID NO: 599418 - protein, 13 aa, Homo sapiens
  CDR3 for beta chain variable domain of TCR clone 299709 (TRBV10-2, TRBJ2-7)
CASGASGGYEQYF

SEQ ID NO: 599419 - protein, 15 aa, Homo sapiens
  CDR3 for alpha chain variable domain of TCR clone 299710 (TRAV12-3, TRAJ11)
CAMSEENSGYSTLTF

SEQ ID NO: 599420 - protein, 20 aa, Homo sapiens
  CDR3 for beta chain variable domain of TCR clone 299710 (TRBV7-8, TRBJ2-2)
CASSHLFPGATIHITGELFF

SEQ ID NO: 599421 - protein, 12 aa, Homo sapiens
  CDR3 for alpha chain variable domain of TCR clone 299711 (TRAV20, TRAJ36)
CAVLTGANNLFF

SEQ ID NO: 599422 - protein, 15 aa, Homo sapiens
  CDR3 for beta chain variable domain of TCR clone 299711 (TRBV4-3, TRBJ2-7)
CASSQGGRGIYEQYF

SEQ ID NO: 599423 - protein, 12 aa, Homo sapiens
  CDR3 for alpha chain variable domain of TCR clone 299712 (TRAV6, TRAJ13)
CALAGGYQKVTF

SEQ ID NO: 599424 - protein, 16 aa, Homo sapiens
  CDR3 for beta chain variable domain of TCR clone 299712 (TRBV2, TRBJ2-3)
CASSTSVEGVTDTQYF

SEQ ID NO: 599425 - protein, 15 aa, Homo sapiens
  CDR3 for alpha chain variable domain of TCR clone 299713 (TRAV26-1, TRAJ29)
CIVRVTNSGKTPLVF

SEQ ID NO: 599426 - protein, 12 aa, Homo sapiens
  CDR3 for beta chain variable domain of TCR clone 299713 (TRBV20-1, TRBJ1-2)
CSASWQGYGYTF

SEQ ID NO: 599427 - protein, 18 aa, Homo sapiens
  CDR3 for alpha chain variable domain of TCR clone 299714 (TRAV12-3, TRAJ52)
CAMSRTNAGGTSYGKLTF

SEQ ID NO: 599428 - protein, 17 aa, Homo sapiens
  CDR3 for beta chain variable domain of TCR clone 299714 (TRBV7-3, TRBJ2-3)
CASSLMKKMRGADTQYF

SEQ ID NO: 599429 - protein, 16 aa, Homo sapiens
  CDR3 for alpha chain variable domain of TCR clone 299715 (TRAV30, TRAJ24)
CGIEIVDADSWGKFQF

SEQ ID NO: 599430 - protein, 19 aa, Homo sapiens
  CDR3 for beta chain variable domain of TCR clone 299715 (TRBV25-1, TRBJ2-2)
CAILVYRVDRGRKTGELFF

SEQ ID NO: 599431 - protein, 15 aa, Homo sapiens
  CDR3 for alpha chain variable domain of TCR clone 299716 (TRAV8-2, )
CVVNIQNPDPAVYQL

SEQ ID NO: 599432 - protein, 14 aa, Homo sapiens
  CDR3 for beta chain variable domain of TCR clone 299716 (TRBV7-2, TRBJ2-7)
CASRSQGAAYEQYF

SEQ ID NO: 599433 - protein, 15 aa, Homo sapiens
  CDR3 for alpha chain variable domain of TCR clone 299717 (TRAV8-4, TRAJ37)
CAVSRGPGNTGKLIF

SEQ ID NO: 599434 - protein, 16 aa, Homo sapiens
  CDR3 for beta chain variable domain of TCR clone 299717 (TRBV7-3, TRBJ2-3)
CASSLSGDRPEDTQYF

SEQ ID NO: 599435 - protein, 16 aa, Homo sapiens
  CDR3 for alpha chain variable domain of TCR clone 299718 (TRAV26-1, TRAJ32)
CIVRTNYGGATNKLIF

SEQ ID NO: 599436 - protein, 13 aa, Homo sapiens
  CDR3 for beta chain variable domain of TCR clone 299718 (TRBV7-8, TRBJ2-7)
RRVRLTEMGEQYF

SEQ ID NO: 599437 - protein, 14 aa, Homo sapiens
  CDR3 for alpha chain variable domain of TCR clone 299719 (TRAV17, TRAJ12)
CAILPMDSSYKLIF

SEQ ID NO: 599438 - protein, 12 aa, Homo sapiens
  CDR3 for beta chain variable domain of TCR clone 299719 (TRBV11-2, TRBJ2-2)
CASSLGGGELFF

SEQ ID NO: 599439 - protein, 13 aa, Homo sapiens
  CDR3 for alpha chain variable domain of TCR clone 299720 (TRAV2, TRAJ40)
CAVVTSGTYKYIF

SEQ ID NO: 599440 - protein, 14 aa, Homo sapiens
  CDR3 for beta chain variable domain of TCR clone 299720 (TRBV19, TRBJ2-1)
CASKDPSSYNEQFF

SEQ ID NO: 599441 - protein, 12 aa, Homo sapiens
  CDR3 for alpha chain variable domain of TCR clone 299721 (TRAV4, TRAJ26)
CLVGDYGQNFVF

SEQ ID NO: 599442 - protein, 16 aa, Homo sapiens
  CDR3 for beta chain variable domain of TCR clone 299721 (TRBV7-2, TRBJ1-2)
WASSSNQDRRGHGYTF

SEQ ID NO: 599443 - protein, 13 aa, Homo sapiens
  CDR3 for alpha chain variable domain of TCR clone 299722 (TRAV13-1, TRAJ33)
CAAWTGSNYHLIW

SEQ ID NO: 599444 - protein, 12 aa, Homo sapiens
  CDR3 for beta chain variable domain of TCR clone 299722 (TRBV5-1, TRBJ1-2)
CASSQDTYGYTF

SEQ ID NO: 599445 - protein, 15 aa, Homo sapiens
  CDR3 for alpha chain variable domain of TCR clone 299723 (TRAV10, TRAJ38)
CVVRINAGNNRKLIW

SEQ ID NO: 599446 - protein, 17 aa, Homo sapiens
  CDR3 for beta chain variable domain of TCR clone 299723 (TRBV25-1, TRBJ2-1)
CASSAYGQERGVYEQFF

SEQ ID NO: 599447 - protein, 14 aa, Homo sapiens
  CDR3 for alpha chain variable domain of TCR clone 299724 (TRAV20, TRAJ32)
CCGRYGGATNKLIF

SEQ ID NO: 599448 - protein, 18 aa, Homo sapiens
  CDR3 for beta chain variable domain of TCR clone 299724 (TRBV4-1, TRBJ1-5)
CASSQDPRGRGLNQPQHF

SEQ ID NO: 599449 - protein, 18 aa, Homo sapiens
  CDR3 for alpha chain variable domain of TCR clone 299725 (TRAV21, TRAJ52)
CAVRPSPAGGTSYGKLTF

SEQ ID NO: 599450 - protein, 13 aa, Homo sapiens
  CDR3 for beta chain variable domain of TCR clone 299725 (TRBV19, TRBJ1-2)
CASSVPGQDGYSF

SEQ ID NO: 599451 - protein, 15 aa, Homo sapiens
  CDR3 for alpha chain variable domain of TCR clone 299726 (TRAV13-2, TRAJ4)
CADPQERGGYSKLIF

SEQ ID NO: 599452 - protein, 13 aa, Homo sapiens
  CDR3 for beta chain variable domain of TCR clone 299726 (TRBV7-9, TRBJ1-2)
CASSLKQNYGYTF

SEQ ID NO: 599453 - protein, 12 aa, Homo sapiens
  CDR3 for alpha chain variable domain of TCR clone 299727 (TRAV22, TRAJ22)
CAPGGFCKATDL

SEQ ID NO: 599454 - protein, 13 aa, Homo sapiens
  CDR3 for beta chain variable domain of TCR clone 299727 (TRBV15, TRBJ1-6)
CATSVGLNSPLHF

SEQ ID NO: 599455 - protein, 13 aa, Homo sapiens
  CDR3 for alpha chain variable domain of TCR clone 299728 (TRAV20, TRAJ34)
CAVSSYNTVKLIF

SEQ ID NO: 599456 - protein, 13 aa, Homo sapiens
  CDR3 for beta chain variable domain of TCR clone 299728 (TRBV7-9, TRBJ1-2)
CASSLKQNYGYTF

SEQ ID NO: 599457 - protein, 12 aa, Homo sapiens
  CDR3 for alpha chain variable domain of TCR clone 299729 (TRAV12-1, TRAJ31)
CVVNMNNNATHV

SEQ ID NO: 599458 - protein, 15 aa, Homo sapiens
  CDR3 for beta chain variable domain of TCR clone 299729 (TRBV4-1, TRBJ1-2)
CASSQGQGAAYGYTF

SEQ ID NO: 599459 - protein, 11 aa, Homo sapiens
  CDR3 for alpha chain variable domain of TCR clone 299730 (TRAV3, TRAJ21)
CAVGNFNKFYF

SEQ ID NO: 599460 - protein, 16 aa, Homo sapiens
  CDR3 for beta chain variable domain of TCR clone 299730 (TRBV19, TRBJ2-1)
RASSKAGPSYYNEQFF

SEQ ID NO: 599461 - protein, 13 aa, Homo sapiens
  CDR3 for alpha chain variable domain of TCR clone 299731 (TRAV21, TRAJ20)
CAVGLRVDYKLSF

SEQ ID NO: 599462 - protein, 13 aa, Homo sapiens
  CDR3 for beta chain variable domain of TCR clone 299731 (TRBV28, TRBJ2-7)
CAGAQQGLDEQYF

SEQ ID NO: 599463 - protein, 13 aa, Homo sapiens
  CDR3 for alpha chain variable domain of TCR clone 299732 (TRAV13-1, TRAJ6)
CAASRGGSYLPTF

SEQ ID NO: 599464 - protein, 15 aa, Homo sapiens
  CDR3 for beta chain variable domain of TCR clone 299732 (TRBV25-1, TRBJ2-5)
CASSDTGTHQETQYF

SEQ ID NO: 599465 - protein, 15 aa, Homo sapiens
  CDR3 for alpha chain variable domain of TCR clone 299733 (TRAV38-2/DV8, TRAJ48)
GAYRSGGVGNEKLTF

SEQ ID NO: 599466 - protein, 16 aa, Homo sapiens
  CDR3 for beta chain variable domain of TCR clone 299733 (TRBV28, TRBJ2-7)
CASSPWVAAGDLSQYF

SEQ ID NO: 599467 - protein, 13 aa, Homo sapiens
  CDR3 for alpha chain variable domain of TCR clone 299734 (TRAV2, TRAJ23)
CAVMGNQGGKLIF

SEQ ID NO: 599468 - protein, 17 aa, Homo sapiens
  CDR3 for beta chain variable domain of TCR clone 299734 (TRBV24-1, TRBJ2-4)
CATSDAEARGVRNIQYF

SEQ ID NO: 599469 - protein, 12 aa, Homo sapiens
  CDR3 for alpha chain variable domain of TCR clone 299735 (TRAV36/DV7, TRAJ17)
CAVEAAGNKLTF

SEQ ID NO: 599470 - protein, 17 aa, Homo sapiens
  CDR3 for beta chain variable domain of TCR clone 299735 (TRBV7-9, TRBJ2-3)
CASSPTVAGDLTDTQYF

SEQ ID NO: 599471 - protein, 14 aa, Homo sapiens
  CDR3 for alpha chain variable domain of TCR clone 299736 (TRAV1-2, TRAJ16)
CAVNRFSDGQKLLF

SEQ ID NO: 599472 - protein, 13 aa, Homo sapiens
  CDR3 for beta chain variable domain of TCR clone 299736 (TRBV19, TRBJ1-2)
CASSAPGQDGYTF

SEQ ID NO: 599473 - protein, 13 aa, Homo sapiens
  CDR3 for alpha chain variable domain of TCR clone 299737 (TRAV2, TRAJ40)
CAVVTSGTYNYTF

SEQ ID NO: 599474 - protein, 14 aa, Homo sapiens
  CDR3 for beta chain variable domain of TCR clone 299737 (TRBV19, TRBJ2-1)
CASPTFVLSGEQFF

SEQ ID NO: 599475 - protein, 15 aa, Homo sapiens
  CDR3 for alpha chain variable domain of TCR clone 299738 (TRAV17, TRAJ22)
CSTVAPSGSARQLTF

SEQ ID NO: 599476 - protein, 14 aa, Homo sapiens
  CDR3 for beta chain variable domain of TCR clone 299738 (TRBV20-1, TRBJ1-5)
CSARDGGSGQPQHF

SEQ ID NO: 599477 - protein, 16 aa, Homo sapiens
  CDR3 for alpha chain variable domain of TCR clone 299739 (TRAV20, TRAJ38)
CAVQASNAGNNRKLIW

SEQ ID NO: 599478 - protein, 17 aa, Homo sapiens
  CDR3 for beta chain variable domain of TCR clone 299739 (TRBV2, TRBJ2-6)
CASSLQGRSSGANVLTF

SEQ ID NO: 599479 - protein, 15 aa, Homo sapiens
  CDR3 for alpha chain variable domain of TCR clone 299740 (TRAV20, TRAJ53)
CAVQASGGSNYKLTF

SEQ ID NO: 599480 - protein, 12 aa, Homo sapiens
  CDR3 for beta chain variable domain of TCR clone 299740 (TRBV7-8, TRBJ2-7)
CASSLGGREQYF

SEQ ID NO: 599481 - protein, 13 aa, Homo sapiens
  CDR3 for alpha chain variable domain of TCR clone 299741 (TRAV21, TRAJ27)
CAARPGNAGISTF

SEQ ID NO: 599482 - protein, 15 aa, Homo sapiens
  CDR3 for beta chain variable domain of TCR clone 299741 (TRBV2, TRBJ2-3)
CASSDAGGPPDTQYF

SEQ ID NO: 599483 - protein, 12 aa, Homo sapiens
  CDR3 for alpha chain variable domain of TCR clone 299742 (TRAV13-1, TRAJ22)
CVPRGFCKATDL

SEQ ID NO: 599484 - protein, 14 aa, Homo sapiens
  CDR3 for beta chain variable domain of TCR clone 299742 (TRBV5-1, TRBJ2-2)
CASSLIWIPGELFF

SEQ ID NO: 599485 - protein, 23 aa, Homo sapiens
  CDR3 for alpha chain variable domain of TCR clone 299743 (TRAV26-1, TRAJ38)
CIADNAGNNHIQNPDPAASQLRD

SEQ ID NO: 599486 - protein, 13 aa, Homo sapiens
  CDR3 for beta chain variable domain of TCR clone 299743 (TRBV20-1, TRBJ1-1)
CSARGGGNTEAFF

SEQ ID NO: 599487 - protein, 13 aa, Homo sapiens
  CDR3 for alpha chain variable domain of TCR clone 299744 (TRAV3, TRAJ27)
CAVRPLGAGKSTF

SEQ ID NO: 599488 - protein, 15 aa, Homo sapiens
  CDR3 for beta chain variable domain of TCR clone 299744 (TRBV7-2, TRBJ2-7)
CASSWGQGAIYEQYF

SEQ ID NO: 599489 - protein, 17 aa, Homo sapiens
  CDR3 for alpha chain variable domain of TCR clone 299745 (TRAV3, TRAJ6)
CAVRDGPRAGGSYIPTL

SEQ ID NO: 599490 - protein, 14 aa, Homo sapiens
  CDR3 for beta chain variable domain of TCR clone 299745 (TRBV7-2, TRBJ2-7)
SASSPKTSFYEQYF

SEQ ID NO: 599491 - protein, 14 aa, Homo sapiens
  CDR3 for alpha chain variable domain of TCR clone 299746 (TRAV23/DV6, TRAJ40)
CAARKNSGTHKYIF

SEQ ID NO: 599492 - protein, 14 aa, Homo sapiens
  CDR3 for beta chain variable domain of TCR clone 299746 (TRBV10-3, TRBJ2-5)
CAISERDYQETQYF

SEQ ID NO: 599493 - protein, 15 aa, Homo sapiens
  CDR3 for alpha chain variable domain of TCR clone 299747 (TRAV12-3, TRAJ27)
CAMRAYNTNAGKSTF

SEQ ID NO: 599494 - protein, 13 aa, Homo sapiens
  CDR3 for beta chain variable domain of TCR clone 299747 (TRBV11-2, TRBJ2-5)
CASNRGPSETQYF

SEQ ID NO: 599495 - protein, 13 aa, Homo sapiens
  CDR3 for alpha chain variable domain of TCR clone 299748 (TRAV12-3, TRAJ7)
CAMTQYGNNRPAF

SEQ ID NO: 599496 - protein, 16 aa, Homo sapiens
  CDR3 for beta chain variable domain of TCR clone 299748 (TRBV20-1, TRBJ1-4)
CSARPYGGELNEKLFF

SEQ ID NO: 599497 - protein, 14 aa, Homo sapiens
  CDR3 for alpha chain variable domain of TCR clone 299749 (TRAV1-2, TRAJ16)
CAVNRFSHGQKLLF

SEQ ID NO: 599498 - protein, 15 aa, Homo sapiens
  CDR3 for beta chain variable domain of TCR clone 299749 (TRBV3-1, TRBJ2-5)
CASSANLGGPETQYF

SEQ ID NO: 599499 - protein, 14 aa, Homo sapiens
  CDR3 for alpha chain variable domain of TCR clone 299750 (TRAV12-3, TRAJ53)
CGATSGGRNYKLTF

SEQ ID NO: 599500 - protein, 13 aa, Homo sapiens
  CDR3 for beta chain variable domain of TCR clone 299750 (TRBV19, TRBJ1-5)
CASSTQDGQPQHF

SEQ ID NO: 599501 - protein, 14 aa, Homo sapiens
  CDR3 for alpha chain variable domain of TCR clone 299751 (TRAV12-2, TRAJ17)
CAVLLKAAGNKLTF

SEQ ID NO: 599502 - protein, 17 aa, Homo sapiens
  CDR3 for beta chain variable domain of TCR clone 299751 (TRBV20-1, TRBJ2-2)
CSASGSGQGGFTGELFF

SEQ ID NO: 599503 - protein, 16 aa, Homo sapiens
  CDR3 for alpha chain variable domain of TCR clone 299752 (TRAV23/DV6, TRAJ9)
CAASIGGNTGGFKTTF

SEQ ID NO: 599504 - protein, 14 aa, Homo sapiens
  CDR3 for beta chain variable domain of TCR clone 299752 (TRBV19, TRBJ2-1)
CASPTFVLSGEQFF

SEQ ID NO: 599505 - protein, 15 aa, Homo sapiens
  CDR3 for alpha chain variable domain of TCR clone 299753 (TRAV8-4, TRAJ10)
CAVSDGLGGGNKLTF

SEQ ID NO: 599506 - protein, 13 aa, Homo sapiens
  CDR3 for beta chain variable domain of TCR clone 299753 (TRBV28, TRBJ1-3)
CASSFLGSGTIYF

SEQ ID NO: 599507 - protein, 15 aa, Homo sapiens
  CDR3 for alpha chain variable domain of TCR clone 299754 (TRAV21, TRAJ24)
CASRSSTDSWGKLPF

SEQ ID NO: 599508 - protein, 19 aa, Homo sapiens
  CDR3 for beta chain variable domain of TCR clone 299754 (TRBV14, TRBJ2-1)
CASSQDQLWEAPEYNEQFF

SEQ ID NO: 599509 - protein, 10 aa, Homo sapiens
  CDR3 for alpha chain variable domain of TCR clone 299755 (TRAV8-4, TRAJ30)
VFYRDDKIIF

SEQ ID NO: 599510 - protein, 17 aa, Homo sapiens
  CDR3 for beta chain variable domain of TCR clone 299755 (TRBV20-1, TRBJ2-2)
CSASGSGQGGLTGELFF

SEQ ID NO: 599511 - protein, 15 aa, Homo sapiens
  CDR3 for alpha chain variable domain of TCR clone 299756 (TRAV8-3, TRAJ45)
CASSYSGGGADGLTF

SEQ ID NO: 599512 - protein, 17 aa, Homo sapiens
  CDR3 for beta chain variable domain of TCR clone 299756 (TRBV15, TRBJ1-2)
CATSGRGIDVVNYGYTF

SEQ ID NO: 599513 - protein, 14 aa, Homo sapiens
  CDR3 for alpha chain variable domain of TCR clone 299757 (TRAV1-2, TRAJ16)
CAVNRFSDGQQLLF

SEQ ID NO: 599514 - protein, 16 aa, Homo sapiens
  CDR3 for beta chain variable domain of TCR clone 299757 (TRBV19, TRBJ2-1)
CASSEILAGDGNEQFF

SEQ ID NO: 599515 - protein, 14 aa, Homo sapiens
  CDR3 for alpha chain variable domain of TCR clone 299758 (TRAV21, TRAJ16)
CAVNRFSDGQKLLF

SEQ ID NO: 599516 - protein, 15 aa, Homo sapiens
  CDR3 for beta chain variable domain of TCR clone 299758 (TRBV20-1, TRBJ2-7)
CSARDRVSGMDEQYF

SEQ ID NO: 599517 - protein, 12 aa, Homo sapiens
  CDR3 for alpha chain variable domain of TCR clone 299759 (TRAV12-1, TRAJ23)
CVVNIPGGKLIF

SEQ ID NO: 599518 - protein, 13 aa, Homo sapiens
  CDR3 for beta chain variable domain of TCR clone 299759 (TRBV7-8, TRBJ2-1)
CAGTRDAVDEQFF

SEQ ID NO: 599519 - protein, 14 aa, Homo sapiens
  CDR3 for alpha chain variable domain of TCR clone 299760 (TRAV16, TRAJ44)
CALSTTGTASKLTF

SEQ ID NO: 599520 - protein, 15 aa, Homo sapiens
  CDR3 for beta chain variable domain of TCR clone 299760 (TRBV9, TRBJ1-6)
CASSVAGTGDSPLHF

SEQ ID NO: 599521 - protein, 16 aa, Homo sapiens
  CDR3 for alpha chain variable domain of TCR clone 299761 (TRAV3, TRAJ10)
CAVRDMGAGGGNKLTF

SEQ ID NO: 599522 - protein, 16 aa, Homo sapiens
  CDR3 for beta chain variable domain of TCR clone 299761 (TRBV7-3, TRBJ2-2)
CASSLKRGTLSGELFF

SEQ ID NO: 599523 - protein, 16 aa, Homo sapiens
  CDR3 for alpha chain variable domain of TCR clone 299762 (TRAV8-3, TRAJ13)
CAVGAYPSGGYQKVTF

SEQ ID NO: 599524 - protein, 13 aa, Homo sapiens
  CDR3 for beta chain variable domain of TCR clone 299762 (TRBV10-3, TRBJ2-7)
CASKLAVNYEQYF

SEQ ID NO: 599525 - protein, 14 aa, Homo sapiens
  CDR3 for alpha chain variable domain of TCR clone 299763 (TRAV8-3, TRAJ48)
CCGCGQFGNEKLTF

SEQ ID NO: 599526 - protein, 15 aa, Homo sapiens
  CDR3 for beta chain variable domain of TCR clone 299763 (TRBV28, TRBJ2-4)
CAAGSETLLMGIQYF

SEQ ID NO: 599527 - protein, 13 aa, Homo sapiens
  CDR3 for alpha chain variable domain of TCR clone 299764 (TRAV12-3, TRAJ6)
CATSSGGSYIPTF

SEQ ID NO: 599528 - protein, 17 aa, Homo sapiens
  CDR3 for beta chain variable domain of TCR clone 299764 (TRBV6-5, TRBJ2-5)
CASRDPDRVTSFETQYF

SEQ ID NO: 599529 - protein, 15 aa, Homo sapiens
  CDR3 for alpha chain variable domain of TCR clone 299765 (TRAV26-2, TRAJ57)
CILRDIRGGSEKLVF

SEQ ID NO: 599530 - protein, 14 aa, Homo sapiens
  CDR3 for beta chain variable domain of TCR clone 299765 (TRBV18, TRBJ2-7)
CASSPRGGAYEQYF

SEQ ID NO: 599531 - protein, 17 aa, Homo sapiens
  CDR3 for alpha chain variable domain of TCR clone 299766 (TRAV26-2, TRAJ42)
CILRDVGYGGSQGNLIF

SEQ ID NO: 599532 - protein, 14 aa, Homo sapiens
  CDR3 for beta chain variable domain of TCR clone 299766 (TRBV2, TRBJ2-5)
CASSEVLAQETQYF

SEQ ID NO: 599533 - protein, 14 aa, Homo sapiens
  CDR3 for alpha chain variable domain of TCR clone 299767 (TRAV13-1, TRAJ44)
CAAKATGTASKLTF

SEQ ID NO: 599534 - protein, 14 aa, Homo sapiens
  CDR3 for beta chain variable domain of TCR clone 299767 (TRBV7-2, TRBJ1-5)
CASSTQGAGQPQHF

SEQ ID NO: 599535 - protein, 14 aa, Homo sapiens
  CDR3 for alpha chain variable domain of TCR clone 299768 (TRAV13-1, TRAJ45)
CAALGGGGADGLTF

SEQ ID NO: 599536 - protein, 16 aa, Homo sapiens
  CDR3 for beta chain variable domain of TCR clone 299768 (TRBV7-2, TRBJ1-1)
CASSLGAGWTNTEAFF

SEQ ID NO: 599537 - protein, 13 aa, Homo sapiens
  CDR3 for alpha chain variable domain of TCR clone 299769 (TRAV12-1, TRAJ43)
CVVSHHNKNDMRF

SEQ ID NO: 599538 - protein, 14 aa, Homo sapiens
  CDR3 for beta chain variable domain of TCR clone 299769 (TRBV5-5, TRBJ2-2)
CASSLLGDTGELFF

SEQ ID NO: 599539 - protein, 11 aa, Homo sapiens
  CDR3 for alpha chain variable domain of TCR clone 299770 (TRAV21, TRAJ34)
CAHYNTDKLIF

SEQ ID NO: 599540 - protein, 13 aa, Homo sapiens
  CDR3 for beta chain variable domain of TCR clone 299770 (TRBV5-1, TRBJ2-1)
CASSLGSYNEQFF

SEQ ID NO: 599541 - protein, 14 aa, Homo sapiens
  CDR3 for alpha chain variable domain of TCR clone 299771 (TRAV20, TRAJ42)
CAVQAGGSQGNLIF

SEQ ID NO: 599542 - protein, 14 aa, Homo sapiens
  CDR3 for beta chain variable domain of TCR clone 299771 (TRBV7-9, TRBJ2-2)
CASSLVQDTGELFF

SEQ ID NO: 599543 - protein, 16 aa, Homo sapiens
  CDR3 for alpha chain variable domain of TCR clone 299772 (TRAV30, TRAJ24)
CGTEIVDADSWGKFQI

SEQ ID NO: 599544 - protein, 13 aa, Homo sapiens
  CDR3 for beta chain variable domain of TCR clone 299772 (TRBV7-2, TRBJ1-4)
CASSLAGLEKLFF

SEQ ID NO: 599545 - protein, 14 aa, Homo sapiens
  CDR3 for alpha chain variable domain of TCR clone 299773 (TRAV29/DV5, TRAJ45)
CAASFRGGADGLTF

SEQ ID NO: 599546 - protein, 15 aa, Homo sapiens
  CDR3 for beta chain variable domain of TCR clone 299773 (TRBV28, TRBJ2-4)
CAAGSGTLLMGIQYF

SEQ ID NO: 599547 - protein, 11 aa, Homo sapiens
  CDR3 for alpha chain variable domain of TCR clone 299774 (TRAV12-2, TRAJ43)
CAAYNNNDMRF

SEQ ID NO: 599548 - protein, 15 aa, Homo sapiens
  CDR3 for beta chain variable domain of TCR clone 299774 (TRBV5-1, TRBJ2-3)
CASSVTSGSTDTQYF

SEQ ID NO: 599549 - protein, 15 aa, Homo sapiens
  CDR3 for alpha chain variable domain of TCR clone 299775 (TRAV35, TRAJ40)
CAGQLWDSGTYKYIF

SEQ ID NO: 599550 - protein, 14 aa, Homo sapiens
  CDR3 for beta chain variable domain of TCR clone 299775 (TRBV7-3, TRBJ2-7)
CASSLSGVSYEQYF

SEQ ID NO: 599551 - protein, 10 aa, Homo sapiens
  CDR3 for alpha chain variable domain of TCR clone 299776 (TRAV21, TRAJ49)
CAVTGNQFYF

SEQ ID NO: 599552 - protein, 16 aa, Homo sapiens
  CDR3 for beta chain variable domain of TCR clone 299776 (TRBV6-1, TRBJ2-5)
CASSETLDRGAETQYF

SEQ ID NO: 599553 - protein, 14 aa, Homo sapiens
  CDR3 for alpha chain variable domain of TCR clone 299777 (TRAV12-2, TRAJ17)
CAVLFKAAGNTLTF

SEQ ID NO: 599554 - protein, 14 aa, Homo sapiens
  CDR3 for beta chain variable domain of TCR clone 299777 (TRBV12-5, TRBJ2-5)
CASGSRTHQDTQYF

SEQ ID NO: 599555 - protein, 14 aa, Homo sapiens
  CDR3 for alpha chain variable domain of TCR clone 299778 (TRAV3, TRAJ9)
CAVRLNTGGFKTIF

SEQ ID NO: 599556 - protein, 14 aa, Homo sapiens
  CDR3 for beta chain variable domain of TCR clone 299778 (TRBV18, TRBJ2-7)
CASSPRGGAYEQYF

SEQ ID NO: 599557 - protein, 14 aa, Homo sapiens
  CDR3 for alpha chain variable domain of TCR clone 299779 (TRAV17, TRAJ22)
CATSPSGSAMQLTF

SEQ ID NO: 599558 - protein, 13 aa, Homo sapiens
  CDR3 for beta chain variable domain of TCR clone 299779 (TRBV12-4, TRBJ1-2)
CASSLRQGKGYTF

SEQ ID NO: 599559 - protein, 14 aa, Homo sapiens
  CDR3 for alpha chain variable domain of TCR clone 299780 (TRAV12-2, TRAJ13)
CAVKKTGGYQKVTF

SEQ ID NO: 599560 - protein, 17 aa, Homo sapiens
  CDR3 for beta chain variable domain of TCR clone 299780 (TRBV20-1, TRBJ2-2)
CSASGSGQGGLTGELFF

SEQ ID NO: 599561 - protein, 14 aa, Homo sapiens
  CDR3 for alpha chain variable domain of TCR clone 299781 (TRAV35, TRAJ34)
CAGRGTPTSSSLRL

SEQ ID NO: 599562 - protein, 16 aa, Homo sapiens
  CDR3 for beta chain variable domain of TCR clone 299781 (TRBV27, TRBJ2-2)
CASSFRGLVRTGELFF

SEQ ID NO: 599563 - protein, 12 aa, Homo sapiens
  CDR3 for alpha chain variable domain of TCR clone 299782 (TRAV3, TRAJ43)
CAVRDPHNAMRF

SEQ ID NO: 599564 - protein, 13 aa, Homo sapiens
  CDR3 for beta chain variable domain of TCR clone 299782 (TRBV7-9, TRBJ1-2)
CASSLKQNYGYTF

SEQ ID NO: 599565 - protein, 13 aa, Homo sapiens
  CDR3 for alpha chain variable domain of TCR clone 299783 (TRAV8-3, TRAJ43)
CAVGADNNNDMRF

SEQ ID NO: 599566 - protein, 13 aa, Homo sapiens
  CDR3 for beta chain variable domain of TCR clone 299783 (TRBV29-1, TRBJ2-1)
CSVEGGRVNEQFF

SEQ ID NO: 599567 - protein, 14 aa, Homo sapiens
  CDR3 for alpha chain variable domain of TCR clone 299784 (TRAV12-2, TRAJ24)
CAVTPASSWGKLQF

SEQ ID NO: 599568 - protein, 12 aa, Homo sapiens
  CDR3 for beta chain variable domain of TCR clone 299784 (TRBV3-1, TRBJ2-1)
CASSQGSSGQFF

SEQ ID NO: 599569 - protein, 18 aa, Homo sapiens
  CDR3 for alpha chain variable domain of TCR clone 299785 (TRAV21, TRAJ52)
CAVRPSPAGGTNYGKLTF

SEQ ID NO: 599570 - protein, 15 aa, Homo sapiens
  CDR3 for beta chain variable domain of TCR clone 299785 (TRBV19, TRBJ1-1)
CASTSGQIQNTEAFF

SEQ ID NO: 599571 - protein, 13 aa, Homo sapiens
  CDR3 for alpha chain variable domain of TCR clone 299786 (TRAV16, TRAJ30)
CALAQNRDDKIIF

SEQ ID NO: 599572 - protein, 15 aa, Homo sapiens
  CDR3 for beta chain variable domain of TCR clone 299786 (TRBV2, TRBJ1-1)
RASTEPGQGASGAFF

SEQ ID NO: 599573 - protein, 12 aa, Homo sapiens
  CDR3 for alpha chain variable domain of TCR clone 299787 (TRAV3, TRAJ31)
CAVRPRGPRLMF

SEQ ID NO: 599574 - protein, 17 aa, Homo sapiens
  CDR3 for beta chain variable domain of TCR clone 299787 (TRBV7-9, TRBJ1-5)
CASSASQGGYSNQPKHF

SEQ ID NO: 599575 - protein, 14 aa, Homo sapiens
  CDR3 for alpha chain variable domain of TCR clone 299788 (TRAV1-2, TRAJ16)
CAVNRFSDGQKLLF

SEQ ID NO: 599576 - protein, 20 aa, Homo sapiens
  CDR3 for beta chain variable domain of TCR clone 299788 (TRBV6-1, TRBJ2-5)
CASSETLDRGAETSTSGQAR

SEQ ID NO: 599577 - protein, 14 aa, Homo sapiens
  CDR3 for alpha chain variable domain of TCR clone 299789 (TRAV1-2, TRAJ16)
CAVNRFSDDQKLLF

SEQ ID NO: 599578 - protein, 13 aa, Homo sapiens
  CDR3 for beta chain variable domain of TCR clone 299789 (TRBV19, TRBJ1-2)
CASSVPGQDGYTF

SEQ ID NO: 599579 - protein, 12 aa, Homo sapiens
  CDR3 for alpha chain variable domain of TCR clone 299790 (TRAV12-3, TRAJ17)
CAMTLTGNKLTF

SEQ ID NO: 599580 - protein, 13 aa, Homo sapiens
  CDR3 for beta chain variable domain of TCR clone 299790 (TRBV11-2, TRBJ2-5)
CASSRGPCETQYF

SEQ ID NO: 599581 - protein, 12 aa, Homo sapiens
  CDR3 for alpha chain variable domain of TCR clone 299791 (TRAV27, TRAJ35)
CAGAEFGNVLHC

SEQ ID NO: 599582 - protein, 15 aa, Homo sapiens
  CDR3 for beta chain variable domain of TCR clone 299791 (TRBV20-1, TRBJ2-7)
CSARDRVSGMDEQYF

SEQ ID NO: 599583 - protein, 21 aa, Homo sapiens
  CDR3 for alpha chain variable domain of TCR clone 299792 (TRAV36/DV7, TRAJ39)
TATQTGDSAIYLPNAGNMLTF

SEQ ID NO: 599584 - protein, 12 aa, Homo sapiens
  CDR3 for beta chain variable domain of TCR clone 299792 (TRBV12-4, TRBJ2-1)
CASSPGRNEQFF

SEQ ID NO: 599585 - protein, 10 aa, Homo sapiens
  CDR3 for alpha chain variable domain of TCR clone 299793 (TRAV12-3, TRAJ18)
CAMSAEAQPW

SEQ ID NO: 599586 - protein, 17 aa, Homo sapiens
  CDR3 for beta chain variable domain of TCR clone 299793 (TRBV11-2, TRBJ2-1)
CASSLYPPGVEYNEQFF

SEQ ID NO: 599587 - protein, 14 aa, Homo sapiens
  CDR3 for alpha chain variable domain of TCR clone 299794 (TRAV21, TRAJ35)
CAVMPIGLGNVLHC

SEQ ID NO: 599588 - protein, 12 aa, Homo sapiens
  CDR3 for beta chain variable domain of TCR clone 299794 (TRBV7-9, TRBJ2-7)
CASSTKREEQYF

SEQ ID NO: 599589 - protein, 14 aa, Homo sapiens
  CDR3 for alpha chain variable domain of TCR clone 299795 (TRAV3, TRAJ6)
CAVRDWGGSYIPTF

SEQ ID NO: 599590 - protein, 17 aa, Homo sapiens
  CDR3 for beta chain variable domain of TCR clone 299795 (TRBV6-5, TRBJ2-1)
CASRLSGRVESYNEQFF

SEQ ID NO: 599591 - protein, 10 aa, Homo sapiens
  CDR3 for alpha chain variable domain of TCR clone 299796 (TRAV36/DV7, TRAJ31)
CASNNARLMF

SEQ ID NO: 599592 - protein, 15 aa, Homo sapiens
  CDR3 for beta chain variable domain of TCR clone 299796 (TRBV10-2, TRBJ2-7)
CASWNRGQATYEQYF

SEQ ID NO: 599593 - protein, 14 aa, Homo sapiens
  CDR3 for alpha chain variable domain of TCR clone 299797 (TRAV8-4, TRAJ17)
CAVSDQTAGNKLTF

SEQ ID NO: 599594 - protein, 15 aa, Homo sapiens
  CDR3 for beta chain variable domain of TCR clone 299797 (TRBV7-2, TRBJ1-2)
CASSLAPDRGLGYTF

SEQ ID NO: 599595 - protein, 15 aa, Homo sapiens
  CDR3 for alpha chain variable domain of TCR clone 299798 (TRAV3, TRAJ5)
CAVRDLDPGRRALTF

SEQ ID NO: 599596 - protein, 13 aa, Homo sapiens
  CDR3 for beta chain variable domain of TCR clone 299798 (TRBV12-4, TRBJ2-7)
CASSPTETYEQCF

SEQ ID NO: 599597 - protein, 16 aa, Homo sapiens
  CDR3 for alpha chain variable domain of TCR clone 299799 (TRAV4, TRAJ22)
CLVGDLYSGSARQLTF

SEQ ID NO: 599598 - protein, 16 aa, Homo sapiens
  CDR3 for beta chain variable domain of TCR clone 299799 (TRBV7-9, TRBJ2-1)
CASSDVAGGSYNEGFF

SEQ ID NO: 599599 - protein, 13 aa, Homo sapiens
  CDR3 for alpha chain variable domain of TCR clone 299800 (TRAV17, TRAJ5)
CATMYTGRRALTF

SEQ ID NO: 599600 - protein, 15 aa, Homo sapiens
  CDR3 for beta chain variable domain of TCR clone 299800 (TRBV20-1, TRBJ2-5)
CSATRTSGSLETQYF

SEQ ID NO: 599601 - protein, 14 aa, Homo sapiens
  CDR3 for alpha chain variable domain of TCR clone 299801 (TRAV17, TRAJ4)
CATAPLGGYNKLIF

SEQ ID NO: 599602 - protein, 13 aa, Homo sapiens
  CDR3 for beta chain variable domain of TCR clone 299801 (TRBV20-1, TRBJ2-7)
CSAQTGLSYEQYF

SEQ ID NO: 599603 - protein, 15 aa, Homo sapiens
  CDR3 for alpha chain variable domain of TCR clone 299802 (TRAV8-3, TRAJ27)
CAVGPSKTNAGKSTF

SEQ ID NO: 599604 - protein, 14 aa, Homo sapiens
  CDR3 for beta chain variable domain of TCR clone 299802 (TRBV7-2, TRBJ2-1)
CQQLRTSAVNEQFF

SEQ ID NO: 599605 - protein, 13 aa, Homo sapiens
  CDR3 for alpha chain variable domain of TCR clone 299803 (TRAV13-1, TRAJ13)
CAASKGGYRKVTF

SEQ ID NO: 599606 - protein, 16 aa, Homo sapiens
  CDR3 for beta chain variable domain of TCR clone 299803 (TRBV18, TRBJ1-2)
CASSPPERVTIYGYTF

SEQ ID NO: 599607 - protein, 17 aa, Homo sapiens
  CDR3 for alpha chain variable domain of TCR clone 299804 (TRAV3, TRAJ6)
CAVRDGPRAGGSYIPTF

SEQ ID NO: 599608 - protein, 15 aa, Homo sapiens
  CDR3 for beta chain variable domain of TCR clone 299804 (TRBV20-1, TRBJ1-1)
CSASWDRFLNTEAFC

SEQ ID NO: 599609 - protein, 12 aa, Homo sapiens
  CDR3 for alpha chain variable domain of TCR clone 299805 (TRAV17, TRAJ47)
TSVPTYGNKLVF

SEQ ID NO: 599610 - protein, 16 aa, Homo sapiens
  CDR3 for beta chain variable domain of TCR clone 299805 (TRBV7-3, TRBJ2-2)
CASSLKRGTLSGELFF

SEQ ID NO: 599611 - protein, 16 aa, Homo sapiens
  CDR3 for alpha chain variable domain of TCR clone 299806 (TRAV14/DV4, TRAJ54)
CAMREGRIQGAQKLVF

SEQ ID NO: 599612 - protein, 16 aa, Homo sapiens
  CDR3 for beta chain variable domain of TCR clone 299806 (TRBV20-1, TRBJ2-4)
CSATSLAELAKNIQYF

SEQ ID NO: 599613 - protein, 14 aa, Homo sapiens
  CDR3 for alpha chain variable domain of TCR clone 299807 (TRAV8-4, TRAJ13)
CAVTLSGGYQKVTF

SEQ ID NO: 599614 - protein, 16 aa, Homo sapiens
  CDR3 for beta chain variable domain of TCR clone 299807 (TRBV27, TRBJ2-2)
CASSSSGVSNTGELFF

SEQ ID NO: 599615 - protein, 12 aa, Homo sapiens
  CDR3 for alpha chain variable domain of TCR clone 299808 (TRAV3, TRAJ26)
CAVRDYGQNFVF

SEQ ID NO: 599616 - protein, 15 aa, Homo sapiens
  CDR3 for beta chain variable domain of TCR clone 299808 (TRBV13, TRBJ1-2)
CASSLGRQPGYGYTF

SEQ ID NO: 599617 - protein, 15 aa, Homo sapiens
  CDR3 for alpha chain variable domain of TCR clone 299809 (TRAV3, TRAJ22)
CAVRDRRGSARQLTF

SEQ ID NO: 599618 - protein, 14 aa, Homo sapiens
  CDR3 for beta chain variable domain of TCR clone 299809 (TRBV19, TRBJ2-1)
CASSRLASINEQFF

SEQ ID NO: 599619 - protein, 18 aa, Homo sapiens
  CDR3 for alpha chain variable domain of TCR clone 299810 (TRAV13-1, TRAJ39)
CAASIVMQATCSPLEGEQ

SEQ ID NO: 599620 - protein, 13 aa, Homo sapiens
  CDR3 for beta chain variable domain of TCR clone 299810 (TRBV20-1, TRBJ1-1)
CSARGGGNTEAFF

SEQ ID NO: 599621 - protein, 13 aa, Homo sapiens
  CDR3 for alpha chain variable domain of TCR clone 299811 (TRAV2, TRAJ40)
CAVVTSGTYKYIF

SEQ ID NO: 599622 - protein, 16 aa, Homo sapiens
  CDR3 for beta chain variable domain of TCR clone 299811 (TRBV29-1, TRBJ1-2)
CSVESNRDIANYGYTF

SEQ ID NO: 599623 - protein, 14 aa, Homo sapiens
  CDR3 for alpha chain variable domain of TCR clone 299812 (TRAV2, TRAJ37)
CAVDFTSNTGTLIF

SEQ ID NO: 599624 - protein, 14 aa, Homo sapiens
  CDR3 for beta chain variable domain of TCR clone 299812 (TRBV6-1, TRBJ1-3)
CASVQGGGGNTIYF

SEQ ID NO: 599625 - protein, 14 aa, Homo sapiens
  CDR3 for alpha chain variable domain of TCR clone 299813 (TRAV12-2, TRAJ17)
CAVNIKAAGNKLTF

SEQ ID NO: 599626 - protein, 18 aa, Homo sapiens
  CDR3 for beta chain variable domain of TCR clone 299813 (TRBV11-2, TRBJ2-3)
CASSLGGAARGAPNTQYF

SEQ ID NO: 599627 - protein, 13 aa, Homo sapiens
  CDR3 for alpha chain variable domain of TCR clone 299814 (TRAV17, TRAJ9)
CATDYPGGFKTIF

SEQ ID NO: 599628 - protein, 14 aa, Homo sapiens
  CDR3 for beta chain variable domain of TCR clone 299814 (TRBV19, TRBJ2-5)
CASSMTGQQETQYF

SEQ ID NO: 599629 - protein, 18 aa, Homo sapiens
  CDR3 for alpha chain variable domain of TCR clone 299815 (TRAV13-1, TRAJ52)
CAAKNPNDGGTSYGKLTF

SEQ ID NO: 599630 - protein, 15 aa, Homo sapiens
  CDR3 for beta chain variable domain of TCR clone 299815 (TRBV6-1, TRBJ2-3)
CARSESGGIKDKKYF

SEQ ID NO: 599631 - protein, 19 aa, Homo sapiens
  CDR3 for alpha chain variable domain of TCR clone 299816 (TRAV1-2, TRAJ26)
CLLPLCCERPDDYGQNFVF

SEQ ID NO: 599632 - protein, 13 aa, Homo sapiens
  CDR3 for beta chain variable domain of TCR clone 299816 (TRBV27, TRBJ1-4)
CASSLMGDEKLFF

SEQ ID NO: 599633 - protein, 14 aa, Homo sapiens
  CDR3 for alpha chain variable domain of TCR clone 299817 (TRAV23/DV6, TRAJ22)
CADISSGSARQLTF

SEQ ID NO: 599634 - protein, 16 aa, Homo sapiens
  CDR3 for beta chain variable domain of TCR clone 299817 (TRBV5-7, TRBJ2-5)
CASIRGQTGCQETQYF

SEQ ID NO: 599635 - protein, 12 aa, Homo sapiens
  CDR3 for alpha chain variable domain of TCR clone 299818 (TRAV12-3, TRAJ17)
CAMTLTGNKQTF

SEQ ID NO: 599636 - protein, 15 aa, Homo sapiens
  CDR3 for beta chain variable domain of TCR clone 299818 (TRBV20-1, TRBJ2-7)
CSARDRVSGMDKQYF

SEQ ID NO: 599637 - protein, 12 aa, Homo sapiens
  CDR3 for alpha chain variable domain of TCR clone 299819 (TRAV13-1, TRAJ21)
CAAKEGFNKFYF

SEQ ID NO: 599638 - protein, 17 aa, Homo sapiens
  CDR3 for beta chain variable domain of TCR clone 299819 (TRBV13, TRBJ2-3)
CSSSLSRVAGGRNTQYF

SEQ ID NO: 599639 - protein, 13 aa, Homo sapiens
  CDR3 for alpha chain variable domain of TCR clone 299820 (TRAV3, TRAJ27)
CAVRPLGAGKSTF

SEQ ID NO: 599640 - protein, 15 aa, Homo sapiens
  CDR3 for beta chain variable domain of TCR clone 299820 (TRBV7-3, TRBJ2-3)
CASSLGLTLGDTQYF

SEQ ID NO: 599641 - protein, 16 aa, Homo sapiens
  CDR3 for alpha chain variable domain of TCR clone 299821 (TRAV26-1, TRAJ40)
FIVRGYPTSGTYKYIF

SEQ ID NO: 599642 - protein, 16 aa, Homo sapiens
  CDR3 for beta chain variable domain of TCR clone 299821 (TRBV5-1, TRBJ1-4)
CAGSSGQGGEKRFLAV

SEQ ID NO: 599643 - protein, 11 aa, Homo sapiens
  CDR3 for alpha chain variable domain of TCR clone 299822 (TRAV3, TRAJ13)
CAVTSYQKVTF

SEQ ID NO: 599644 - protein, 15 aa, Homo sapiens
  CDR3 for beta chain variable domain of TCR clone 299822 (TRBV7-9, TRBJ2-7)
CASRSSGLAVYEQYF

SEQ ID NO: 599645 - protein, 15 aa, Homo sapiens
  CDR3 for alpha chain variable domain of TCR clone 299823 (TRAV17, TRAJ4)
CATGTGSGGYNKLIF

SEQ ID NO: 599646 - protein, 15 aa, Homo sapiens
  CDR3 for beta chain variable domain of TCR clone 299823 (TRBV20-1, TRBJ2-7)
CSARDRVSGMDEQYF

SEQ ID NO: 599647 - protein, 13 aa, Homo sapiens
  CDR3 for alpha chain variable domain of TCR clone 299824 (TRAV30, TRAJ6)
CCFIEGGSYIPTF

SEQ ID NO: 599648 - protein, 13 aa, Homo sapiens
  CDR3 for beta chain variable domain of TCR clone 299824 (TRBV5-4, TRBJ2-5)
CASSPVSQETQYF

SEQ ID NO: 599649 - protein, 15 aa, Homo sapiens
  CDR3 for alpha chain variable domain of TCR clone 299825 (TRAV12-1, TRAJ45)
CVVLSGRGGADGLTF

SEQ ID NO: 599650 - protein, 13 aa, Homo sapiens
  CDR3 for beta chain variable domain of TCR clone 299825 (TRBV7-3, TRBJ1-1)
CASSQDWGAVAFF

SEQ ID NO: 599651 - protein, 14 aa, Homo sapiens
  CDR3 for alpha chain variable domain of TCR clone 299826 (TRAV16, TRAJ17)
CAPRIKAAGNKLTF

SEQ ID NO: 599652 - protein, 17 aa, Homo sapiens
  CDR3 for beta chain variable domain of TCR clone 299826 (TRBV7-2, TRBJ2-3)
CASSSYSGTIRADTQYF

SEQ ID NO: 599653 - protein, 16 aa, Homo sapiens
  CDR3 for alpha chain variable domain of TCR clone 299827 (TRAV17, TRAJ28)
CSTASVSGAWSYQLTF

SEQ ID NO: 599654 - protein, 11 aa, Homo sapiens
  CDR3 for beta chain variable domain of TCR clone 299827 (TRBV7-9, TRBJ2-5)
CASSLGETQYF

SEQ ID NO: 599655 - protein, 13 aa, Homo sapiens
  CDR3 for alpha chain variable domain of TCR clone 299828 (TRAV17, TRAJ39)
CATVSNAGNMLTF

SEQ ID NO: 599656 - protein, 15 aa, Homo sapiens
  CDR3 for beta chain variable domain of TCR clone 299828 (TRBV11-3, TRBJ2-2)
CASSLGGRPTGELFF

SEQ ID NO: 599657 - protein, 12 aa, Homo sapiens
  CDR3 for alpha chain variable domain of TCR clone 299829 (TRAV12-3, TRAJ34)
CAMGYNTDKLIF

SEQ ID NO: 599658 - protein, 12 aa, Homo sapiens
  CDR3 for beta chain variable domain of TCR clone 299829 (TRBV7-9, TRBJ2-3)
CASSFITDTQYF

SEQ ID NO: 599659 - protein, 13 aa, Homo sapiens
  CDR3 for alpha chain variable domain of TCR clone 299830 (TRAV16, TRAJ22)
SAMLAGSARQLTF

SEQ ID NO: 599660 - protein, 16 aa, Homo sapiens
  CDR3 for beta chain variable domain of TCR clone 299830 (TRBV5-1, TRBJ2-2)
CASSLWDTTNTGELFF

SEQ ID NO: 599661 - protein, 11 aa, Homo sapiens
  CDR3 for alpha chain variable domain of TCR clone 299831 (TRAV3, TRAJ21)
RAVGNFNKFYF

SEQ ID NO: 599662 - protein, 16 aa, Homo sapiens
  CDR3 for beta chain variable domain of TCR clone 299831 (TRBV19, TRBJ2-1)
CASSEAGPSSYNEQFF

SEQ ID NO: 599663 - protein, 14 aa, Homo sapiens
  CDR3 for alpha chain variable domain of TCR clone 299832 (TRAV8-4, TRAJ15)
CAVSPYQAGTALIF

SEQ ID NO: 599664 - protein, 17 aa, Homo sapiens
  CDR3 for beta chain variable domain of TCR clone 299832 (TRBV11-2, TRBJ2-1)
CASSLYPPGVEYNEQFF

SEQ ID NO: 599665 - protein, 13 aa, Homo sapiens
  CDR3 for alpha chain variable domain of TCR clone 299833 (TRAV8-3, TRAJ44)
CAVVPGTARKLTF

SEQ ID NO: 599666 - protein, 13 aa, Homo sapiens
  CDR3 for beta chain variable domain of TCR clone 299833 (TRBV10-3, TRBJ2-7)
CASKLAVNYEQYF

SEQ ID NO: 599667 - protein, 12 aa, Homo sapiens
  CDR3 for alpha chain variable domain of TCR clone 299834 (TRAV13-2, TRAJ23)
CAERHRGGKLIF

SEQ ID NO: 599668 - protein, 15 aa, Homo sapiens
  CDR3 for beta chain variable domain of TCR clone 299834 (TRBV7-2, TRBJ2-7)
CASSLDPAQGQEQYF

SEQ ID NO: 599669 - protein, 10 aa, Homo sapiens
  CDR3 for alpha chain variable domain of TCR clone 299835 (TRAV21, TRAJ43)
CDVRIGDMRF

SEQ ID NO: 599670 - protein, 13 aa, Homo sapiens
  CDR3 for beta chain variable domain of TCR clone 299835 (TRBV20-1, TRBJ2-7)
CSAPGLADYEQYF

SEQ ID NO: 599671 - protein, 15 aa, Homo sapiens
  CDR3 for alpha chain variable domain of TCR clone 299836 (TRAV12-1, TRAJ10)
CVVNKLTGGGSKLTF

SEQ ID NO: 599672 - protein, 15 aa, Homo sapiens
  CDR3 for beta chain variable domain of TCR clone 299836 (TRBV2, TRBJ2-5)
CASTRDGGPQETQYF

SEQ ID NO: 599673 - protein, 15 aa, Homo sapiens
  CDR3 for alpha chain variable domain of TCR clone 299837 (TRAV2, TRAJ15)
CAVEDRGQAGTALIF

SEQ ID NO: 599674 - protein, 13 aa, Homo sapiens
  CDR3 for beta chain variable domain of TCR clone 299837 (TRBV10-2, TRBJ2-7)
CASGASGRYEQYF

SEQ ID NO: 599675 - protein, 15 aa, Homo sapiens
  CDR3 for alpha chain variable domain of TCR clone 299838 (TRAV8-3, TRAJ45)
CASSYSGGGADGLTF

SEQ ID NO: 599676 - protein, 13 aa, Homo sapiens
  CDR3 for beta chain variable domain of TCR clone 299838 (TRBV20-1, TRBJ1-1)
CSAPLGGGTEAFF

SEQ ID NO: 599677 - protein, 16 aa, Homo sapiens
  CDR3 for alpha chain variable domain of TCR clone 299839 (TRAV23/DV6, TRAJ48)
CAASGVVNLGNEKLTF

SEQ ID NO: 599678 - protein, 15 aa, Homo sapiens
  CDR3 for beta chain variable domain of TCR clone 299839 (TRBV20-1, TRBJ2-5)
CSAGLAGVSQETQYF

SEQ ID NO: 599679 - protein, 14 aa, Homo sapiens
  CDR3 for alpha chain variable domain of TCR clone 299840 (TRAV13-1, TRAJ35)
CAASKGGFGNALHC

SEQ ID NO: 599680 - protein, 17 aa, Homo sapiens
  CDR3 for beta chain variable domain of TCR clone 299840 (TRBV7-3, TRBJ2-3)
CASSLMKRMRGADTQYF

SEQ ID NO: 599681 - protein, 13 aa, Homo sapiens
  CDR3 for alpha chain variable domain of TCR clone 299841 (TRAV27, TRAJ8)
CAGGPTGFQKLVF

SEQ ID NO: 599682 - protein, 15 aa, Homo sapiens
  CDR3 for beta chain variable domain of TCR clone 299841 (TRBV6-1, TRBJ2-7)
SASSESMGDFYEQYF

SEQ ID NO: 599683 - protein, 21 aa, Homo sapiens
  CDR3 for alpha chain variable domain of TCR clone 299842 (TRAV3, TRAJ26)
CAVVRILSLVPEPDCPCCPIS

SEQ ID NO: 599684 - protein, 17 aa, Homo sapiens
  CDR3 for beta chain variable domain of TCR clone 299842 (TRBV7-8, TRBJ2-6)
CASSAGTGGAGANVLTF

SEQ ID NO: 599685 - protein, 12 aa, Homo sapiens
  CDR3 for alpha chain variable domain of TCR clone 299843 (TRAV12-3, TRAJ17)
CSMKLTGNKLTF

SEQ ID NO: 599686 - protein, 15 aa, Homo sapiens
  CDR3 for beta chain variable domain of TCR clone 299843 (TRBV20-1, TRBJ2-7)
CSARDRVSGMDEQYF

SEQ ID NO: 599687 - protein, 14 aa, Homo sapiens
  CDR3 for alpha chain variable domain of TCR clone 299844 (TRAV12-3, TRAJ13)
CAMRNPGGYQKVTF

SEQ ID NO: 599688 - protein, 14 aa, Homo sapiens
  CDR3 for beta chain variable domain of TCR clone 299844 (TRBV4-1, TRBJ1-6)
CASSPGSDSSPFHF

SEQ ID NO: 599689 - protein, 22 aa, Homo sapiens
  CDR3 for alpha chain variable domain of TCR clone 299845 (TRAV12-2, TRAJ32)
CSSETPSPVIQPPKSATNKLIF

SEQ ID NO: 599690 - protein, 12 aa, Homo sapiens
  CDR3 for beta chain variable domain of TCR clone 299845 (TRBV11-2, TRBJ2-2)
CASSLGGGELFF

SEQ ID NO: 599691 - protein, 14 aa, Homo sapiens
  CDR3 for alpha chain variable domain of TCR clone 299846 (TRAV8-4, TRAJ43)
CAGSDPRNNNDMRF

SEQ ID NO: 599692 - protein, 15 aa, Homo sapiens
  CDR3 for beta chain variable domain of TCR clone 299846 (TRBV4-2, TRBJ1-2)
CASSQRTGGRDGYTF

SEQ ID NO: 599693 - protein, 14 aa, Homo sapiens
  CDR3 for alpha chain variable domain of TCR clone 299847 (TRAV29/DV5, TRAJ37)
CAASGSGNTGKLIF

SEQ ID NO: 599694 - protein, 17 aa, Homo sapiens
  CDR3 for beta chain variable domain of TCR clone 299847 (TRBV4-1, TRBJ2-7)
CASSPFLTGGGVVEQYF

SEQ ID NO: 599695 - protein, 14 aa, Homo sapiens
  CDR3 for alpha chain variable domain of TCR clone 299848 (TRAV2, TRAJ9)
CAVEDRSGGFKTIF

SEQ ID NO: 599696 - protein, 14 aa, Homo sapiens
  CDR3 for beta chain variable domain of TCR clone 299848 (TRBV5-1, TRBJ2-1)
CASSLDGDWNEQFF

SEQ ID NO: 599697 - protein, 17 aa, Homo sapiens
  CDR3 for alpha chain variable domain of TCR clone 299849 (TRAV3, TRAJ12)
CAVRDGGRMDSSYKLFF

SEQ ID NO: 599698 - protein, 14 aa, Homo sapiens
  CDR3 for beta chain variable domain of TCR clone 299849 (TRBV7-9, TRBJ1-2)
CASSRQGANYGYTF

SEQ ID NO: 599699 - protein, 13 aa, Homo sapiens
  CDR3 for alpha chain variable domain of TCR clone 299850 (TRAV8-3, TRAJ47)
CAVSREYGNKLVF

SEQ ID NO: 599700 - protein, 14 aa, Homo sapiens
  CDR3 for beta chain variable domain of TCR clone 299850 (TRBV2, TRBJ1-5)
CASSGTGFNQPQHF

SEQ ID NO: 599701 - protein, 12 aa, Homo sapiens
  CDR3 for alpha chain variable domain of TCR clone 299851 (TRAV3, TRAJ43)
CAVRDPNNDMRS

SEQ ID NO: 599702 - protein, 13 aa, Homo sapiens
  CDR3 for beta chain variable domain of TCR clone 299851 (TRBV19, TRBJ1-2)
CASSVPGQDGYTF

SEQ ID NO: 599703 - protein, 14 aa, Homo sapiens
  CDR3 for alpha chain variable domain of TCR clone 299852 (TRAV8-4, TRAJ8)
CAVSEDTGFNKLVF

SEQ ID NO: 599704 - protein, 16 aa, Homo sapiens
  CDR3 for beta chain variable domain of TCR clone 299852 (TRBV7-3, TRBJ2-1)
CASSKPLAGGYNEQFF

SEQ ID NO: 599705 - protein, 15 aa, Homo sapiens
  CDR3 for alpha chain variable domain of TCR clone 299853 (TRAV12-2, TRAJ52)
CAVTSGGTSYGKLTF

SEQ ID NO: 599706 - protein, 15 aa, Homo sapiens
  CDR3 for beta chain variable domain of TCR clone 299853 (TRBV7-2, TRBJ2-1)
CASSPGLISGNEQFF

SEQ ID NO: 599707 - protein, 16 aa, Homo sapiens
  CDR3 for alpha chain variable domain of TCR clone 299854 (TRAV17, TRAJ4)
CFLLLSTDGGYNKLIF

SEQ ID NO: 599708 - protein, 13 aa, Homo sapiens
  CDR3 for beta chain variable domain of TCR clone 299854 (TRBV29-1, TRBJ2-2)
CSTTGVNTGELFF

SEQ ID NO: 599709 - protein, 15 aa, Homo sapiens
  CDR3 for alpha chain variable domain of TCR clone 299855 (TRAV23/DV6, TRAJ22)
CAASFSSGSARQLTF

SEQ ID NO: 599710 - protein, 15 aa, Homo sapiens
  CDR3 for beta chain variable domain of TCR clone 299855 (TRBV7-9, TRBJ1-5)
CASSQGHQPNQPQHF

SEQ ID NO: 599711 - protein, 10 aa, Homo sapiens
  CDR3 for alpha chain variable domain of TCR clone 299856 (TRAV9-2, TRAJ49)
CALTGEQLYF

SEQ ID NO: 599712 - protein, 16 aa, Homo sapiens
  CDR3 for beta chain variable domain of TCR clone 299856 (TRBV19, TRBJ2-3)
CASSPGAASRTDTQYF

SEQ ID NO: 599713 - protein, 10 aa, Homo sapiens
  CDR3 for alpha chain variable domain of TCR clone 299857 (TRAV1-2, TRAJ31)
CVSEDARRMF

SEQ ID NO: 599714 - protein, 14 aa, Homo sapiens
  CDR3 for beta chain variable domain of TCR clone 299857 (TRBV19, TRBJ2-1)
CASPTFVVSGEQFF

SEQ ID NO: 599715 - protein, 15 aa, Homo sapiens
  CDR3 for alpha chain variable domain of TCR clone 299858 (TRAV14/DV4, TRAJ49)
CAMREGRDTGNQFYF

SEQ ID NO: 599716 - protein, 17 aa, Homo sapiens
  CDR3 for beta chain variable domain of TCR clone 299858 (TRBV12-4, TRBJ1-5)
CASSLRGERGPNQPQHF

SEQ ID NO: 599717 - protein, 13 aa, Homo sapiens
  CDR3 for alpha chain variable domain of TCR clone 299859 (TRAV13-2, TRAJ48)
CAEMDFGNEKLTF

SEQ ID NO: 599718 - protein, 13 aa, Homo sapiens
  CDR3 for beta chain variable domain of TCR clone 299859 (TRBV27, TRBJ1-1)
CASSLSIGAEAFF

SEQ ID NO: 599719 - protein, 15 aa, Homo sapiens
  CDR3 for alpha chain variable domain of TCR clone 299860 (TRAV13-1, TRAJ36)
CAASIRQTGANNLFS

SEQ ID NO: 599720 - protein, 14 aa, Homo sapiens
  CDR3 for beta chain variable domain of TCR clone 299860 (TRBV6-1, TRBJ1-3)
CASVQGGGGNTIYF

SEQ ID NO: 599721 - protein, 15 aa, Homo sapiens
  CDR3 for alpha chain variable domain of TCR clone 299861 (TRAV12-3, TRAJ6)
CAMSATSGGSYIPTF

SEQ ID NO: 599722 - protein, 12 aa, Homo sapiens
  CDR3 for beta chain variable domain of TCR clone 299861 (TRBV12-4, TRBJ2-3)
CASSLGQDTQYF

SEQ ID NO: 599723 - protein, 13 aa, Homo sapiens
  CDR3 for alpha chain variable domain of TCR clone 299862 (TRAV13-2, TRAJ48)
CAEMDFGNEKLTF

SEQ ID NO: 599724 - protein, 13 aa, Homo sapiens
  CDR3 for beta chain variable domain of TCR clone 299862 (TRBV7-9, TRBJ1-2)
CASSLKQNYGYNF

SEQ ID NO: 599725 - protein, 14 aa, Homo sapiens
  CDR3 for alpha chain variable domain of TCR clone 299863 (TRAV14/DV4, TRAJ42)
CPRGSLRSQENLIF

SEQ ID NO: 599726 - protein, 18 aa, Homo sapiens
  CDR3 for beta chain variable domain of TCR clone 299863 (TRBV20-1, TRBJ2-3)
CSASGLAGGPGTTDTQYF

SEQ ID NO: 599727 - protein, 10 aa, Homo sapiens
  CDR3 for alpha chain variable domain of TCR clone 299864 (TRAV2, TRAJ26)
CAVVGLWSEF

SEQ ID NO: 599728 - protein, 15 aa, Homo sapiens
  CDR3 for beta chain variable domain of TCR clone 299864 (TRBV9, TRBJ1-6)
CASSVAGTGDSPLHF

SEQ ID NO: 599729 - protein, 12 aa, Homo sapiens
  CDR3 for alpha chain variable domain of TCR clone 299865 (TRAV12-2, TRAJ10)
WGVTGGGNKLTF

SEQ ID NO: 599730 - protein, 16 aa, Homo sapiens
  CDR3 for beta chain variable domain of TCR clone 299865 (TRBV7-3, TRBJ2-1)
CASSLVGGSSNNEQFF

SEQ ID NO: 599731 - protein, 16 aa, Homo sapiens
  CDR3 for alpha chain variable domain of TCR clone 299866 (TRAV12-2, TRAJ10)
CAVNRVLTGGGNKLTF

SEQ ID NO: 599732 - protein, 15 aa, Homo sapiens
  CDR3 for beta chain variable domain of TCR clone 299866 (TRBV6-6, TRBJ2-7)
CASSYSYGGSYEQYF

SEQ ID NO: 599733 - protein, 13 aa, Homo sapiens
  CDR3 for alpha chain variable domain of TCR clone 299867 (TRAV13-1, TRAJ40)
CAAISPGTYKYIF

SEQ ID NO: 599734 - protein, 13 aa, Homo sapiens
  CDR3 for beta chain variable domain of TCR clone 299867 (TRBV10-3, TRBJ2-7)
CATRAGGPHEQYF

SEQ ID NO: 599735 - protein, 16 aa, Homo sapiens
  CDR3 for alpha chain variable domain of TCR clone 299868 (TRAV8-3, TRAJ44)
CAVGASNTGTASKLTF

SEQ ID NO: 599736 - protein, 15 aa, Homo sapiens
  CDR3 for beta chain variable domain of TCR clone 299868 (TRBV27, TRBJ1-5)
CVSTLNRGSNQPQHF

SEQ ID NO: 599737 - protein, 21 aa, Homo sapiens
  CDR3 for alpha chain variable domain of TCR clone 299869 (TRAV1-1, TRAJ6)
CLLLLRCERLERTGGSYIPTF

SEQ ID NO: 599738 - protein, 15 aa, Homo sapiens
  CDR3 for beta chain variable domain of TCR clone 299869 (TRBV7-2, TRBJ2-3)
CASSLVARGPDTQYF

SEQ ID NO: 599739 - protein, 14 aa, Homo sapiens
  CDR3 for alpha chain variable domain of TCR clone 299870 (TRAV12-2, TRAJ40)
CAVKIPSGTYKYIF

SEQ ID NO: 599740 - protein, 14 aa, Homo sapiens
  CDR3 for beta chain variable domain of TCR clone 299870 (TRBV5-7, TRBJ2-7)
CASSFKGATGEQYF

SEQ ID NO: 599741 - protein, 13 aa, Homo sapiens
  CDR3 for alpha chain variable domain of TCR clone 299871 (TRAV20, TRAJ42)
CAVQGGSQGNLIF

SEQ ID NO: 599742 - protein, 18 aa, Homo sapiens
  CDR3 for beta chain variable domain of TCR clone 299871 (TRBV12-4, TRBJ2-2)
CASSLVAGTRGRTGELFF

SEQ ID NO: 599743 - protein, 14 aa, Homo sapiens
  CDR3 for alpha chain variable domain of TCR clone 299872 (TRAV1-2, TRAJ16)
CAVNRFSDGQKLLF

SEQ ID NO: 599744 - protein, 15 aa, Homo sapiens
  CDR3 for beta chain variable domain of TCR clone 299872 (TRBV10-2, TRBJ2-6)
CASSEQGTWANVLTF

SEQ ID NO: 599745 - protein, 15 aa, Homo sapiens
  CDR3 for alpha chain variable domain of TCR clone 299873 (TRAV38-1, TRAJ37)
CAFIHGSGNTGKLIF

SEQ ID NO: 599746 - protein, 14 aa, Homo sapiens
  CDR3 for beta chain variable domain of TCR clone 299873 (TRBV29-1, TRBJ2-7)
CSVVTSGSGETQYF

SEQ ID NO: 599747 - protein, 13 aa, Homo sapiens
  CDR3 for alpha chain variable domain of TCR clone 299874 (TRAV21, TRAJ27)
CAALNTNAGKSTF

SEQ ID NO: 599748 - protein, 11 aa, Homo sapiens
  CDR3 for beta chain variable domain of TCR clone 299874 (TRBV6-1, TRBJ2-7)
CASSDLYEQYF

SEQ ID NO: 599749 - protein, 17 aa, Homo sapiens
  CDR3 for alpha chain variable domain of TCR clone 299875 (TRAV3, TRAJ42)
CAVRDRHYGGSQGNLIF

SEQ ID NO: 599750 - protein, 14 aa, Homo sapiens
  CDR3 for beta chain variable domain of TCR clone 299875 (TRBV7-2, TRBJ2-7)
CASSPKTSFYEQYF

SEQ ID NO: 599751 - protein, 15 aa, Homo sapiens
  CDR3 for alpha chain variable domain of TCR clone 299876 (TRAV8-4, TRAJ3)
CAVTGENLVQQCFQD

SEQ ID NO: 599752 - protein, 15 aa, Homo sapiens
  CDR3 for beta chain variable domain of TCR clone 299876 (TRBV19, TRBJ1-2)
CASSVGQVLNYGYTF

SEQ ID NO: 599753 - protein, 13 aa, Homo sapiens
  CDR3 for alpha chain variable domain of TCR clone 299877 (TRAV3, TRAJ21)
CDVREPDFNKFYF

SEQ ID NO: 599754 - protein, 14 aa, Homo sapiens
  CDR3 for beta chain variable domain of TCR clone 299877 (TRBV4-1, TRBJ2-2)
CASSQAVNTGELFF

SEQ ID NO: 599755 - protein, 12 aa, Homo sapiens
  CDR3 for alpha chain variable domain of TCR clone 299878 (TRAV13-2, TRAJ8)
CAPWLGFQKLVF

SEQ ID NO: 599756 - protein, 14 aa, Homo sapiens
  CDR3 for beta chain variable domain of TCR clone 299878 (TRBV7-9, TRBJ2-1)
CASRPTGLRNEQFF

SEQ ID NO: 599757 - protein, 16 aa, Homo sapiens
  CDR3 for alpha chain variable domain of TCR clone 299879 (TRAV23/DV6, TRAJ9)
CAASIGGNTGAFKTIF

SEQ ID NO: 599758 - protein, 14 aa, Homo sapiens
  CDR3 for beta chain variable domain of TCR clone 299879 (TRBV9, TRBJ2-7)
CASSVGVGSYEQYF

SEQ ID NO: 599759 - protein, 10 aa, Homo sapiens
  CDR3 for alpha chain variable domain of TCR clone 299880 (TRAV36/DV7, TRAJ48)
CAVGNEKLTL

SEQ ID NO: 599760 - protein, 13 aa, Homo sapiens
  CDR3 for beta chain variable domain of TCR clone 299880 (TRBV10-3, TRBJ2-7)
CASKLAVNYEQYF

SEQ ID NO: 599761 - protein, 15 aa, Homo sapiens
  CDR3 for alpha chain variable domain of TCR clone 299881 (TRAV12-1, TRAJ44)
CVADLPTGTASKLTF

SEQ ID NO: 599762 - protein, 14 aa, Homo sapiens
  CDR3 for beta chain variable domain of TCR clone 299881 (TRBV6-3, TRBJ2-5)
CASRRDGGEETQYF

SEQ ID NO: 599763 - protein, 13 aa, Homo sapiens
  CDR3 for alpha chain variable domain of TCR clone 299882 (TRAV29/DV5, TRAJ31)
CAASRDNNARLMF

SEQ ID NO: 599764 - protein, 12 aa, Homo sapiens
  CDR3 for beta chain variable domain of TCR clone 299882 (TRBV14, TRBJ2-7)
CASSSLKGEQYF

SEQ ID NO: 599765 - protein, 15 aa, Homo sapiens
  CDR3 for alpha chain variable domain of TCR clone 299883 (TRAV35, TRAJ58)
CAGRRQETSGPRLTF

SEQ ID NO: 599766 - protein, 14 aa, Homo sapiens
  CDR3 for beta chain variable domain of TCR clone 299883 (TRBV20-1, TRBJ1-1)
CSAQTRIGGTEAFF

SEQ ID NO: 599767 - protein, 13 aa, Homo sapiens
  CDR3 for alpha chain variable domain of TCR clone 299884 (TRAV21, TRAJ20)
CAVGLRVDYKLSF

SEQ ID NO: 599768 - protein, 14 aa, Homo sapiens
  CDR3 for beta chain variable domain of TCR clone 299884 (TRBV20-1, TRBJ2-1)
CSAMGQSSYNEQFF

SEQ ID NO: 599769 - protein, 16 aa, Homo sapiens
  CDR3 for alpha chain variable domain of TCR clone 299885 (TRAV8-3, TRAJ13)
CVVGAYPSGGYQKVTF

SEQ ID NO: 599770 - protein, 15 aa, Homo sapiens
  CDR3 for beta chain variable domain of TCR clone 299885 (TRBV19, TRBJ1-5)
CASSIVWADNQTQHF

SEQ ID NO: 599771 - protein, 14 aa, Homo sapiens
  CDR3 for alpha chain variable domain of TCR clone 299886 (TRAV26-1, TRAJ52)
CIPAGGTSYGKLAV

SEQ ID NO: 599772 - protein, 16 aa, Homo sapiens
  CDR3 for beta chain variable domain of TCR clone 299886 (TRBV19, TRBJ2-2)
CASTIGARAGAGELFF

SEQ ID NO: 599773 - protein, 14 aa, Homo sapiens
  CDR3 for alpha chain variable domain of TCR clone 299887 (TRAV38-1, TRAJ40)
CALRPTSGTYKYIF

SEQ ID NO: 599774 - protein, 16 aa, Homo sapiens
  CDR3 for beta chain variable domain of TCR clone 299887 (TRBV7-9, TRBJ2-3)
CASSPWREVGTDTQYF

SEQ ID NO: 599775 - protein, 14 aa, Homo sapiens
  CDR3 for alpha chain variable domain of TCR clone 299888 (TRAV12-1, TRAJ9)
CVVNGRTGGFKTIF

SEQ ID NO: 599776 - protein, 15 aa, Homo sapiens
  CDR3 for beta chain variable domain of TCR clone 299888 (TRBV28, TRBJ2-7)
CASSLISGGSYEQYF

SEQ ID NO: 599777 - protein, 13 aa, Homo sapiens
  CDR3 for alpha chain variable domain of TCR clone 299889 (TRAV3, TRAJ27)
CAVRPLGAGKSTF

SEQ ID NO: 599778 - protein, 13 aa, Homo sapiens
  CDR3 for beta chain variable domain of TCR clone 299889 (TRBV2, TRBJ1-5)
CASSVGWDQTQHF

SEQ ID NO: 599779 - protein, 12 aa, Homo sapiens
  CDR3 for alpha chain variable domain of TCR clone 299890 (TRAV2, TRAJ31)
CAVADNNARLMF

SEQ ID NO: 599780 - protein, 15 aa, Homo sapiens
  CDR3 for beta chain variable domain of TCR clone 299890 (TRBV11-2, TRBJ2-1)
CASSKNRGLIYEQFF

SEQ ID NO: 599781 - protein, 14 aa, Homo sapiens
  CDR3 for alpha chain variable domain of TCR clone 299891 (TRAV3, TRAJ21)
CAVESQANFNKFYF

SEQ ID NO: 599782 - protein, 16 aa, Homo sapiens
  CDR3 for beta chain variable domain of TCR clone 299891 (TRBV7-7, TRBJ2-1)
CASSLASGTSYNEQFF

SEQ ID NO: 599783 - protein, 18 aa, Homo sapiens
  CDR3 for alpha chain variable domain of TCR clone 299892 (TRAV26-2, TRAJ45)
CLLRVDKYSGGGADGLTF

SEQ ID NO: 599784 - protein, 11 aa, Homo sapiens
  CDR3 for beta chain variable domain of TCR clone 299892 (TRBV29-1, TRBJ2-5)
CSEDRTGTQYF

SEQ ID NO: 599785 - protein, 17 aa, Homo sapiens
  CDR3 for alpha chain variable domain of TCR clone 299893 (TRAV3, TRAJ6)
CAVRDGTRAGGSYIPTF

SEQ ID NO: 599786 - protein, 17 aa, Homo sapiens
  CDR3 for beta chain variable domain of TCR clone 299893 (TRBV13, TRBJ2-3)
CASSLSRVAGGRNTQYF

SEQ ID NO: 599787 - protein, 11 aa, Homo sapiens
  CDR3 for alpha chain variable domain of TCR clone 299894 (TRAV1-2, TRAJ20)
CAVSNDYKLSF

SEQ ID NO: 599788 - protein, 13 aa, Homo sapiens
  CDR3 for beta chain variable domain of TCR clone 299894 (TRBV10-3, TRBJ2-7)
CASKLAVNYEQYF

SEQ ID NO: 599789 - protein, 15 aa, Homo sapiens
  CDR3 for alpha chain variable domain of TCR clone 299895 (TRAV36/DV7, TRAJ42)
CAVEWYGGSQGNLIF

SEQ ID NO: 599790 - protein, 16 aa, Homo sapiens
  CDR3 for beta chain variable domain of TCR clone 299895 (TRBV6-6, TRBJ2-1)
CASSWGGQGPYNEQFF

SEQ ID NO: 599791 - protein, 14 aa, Homo sapiens
  CDR3 for alpha chain variable domain of TCR clone 299896 (TRAV12-3, TRAJ10)
SHLPLTGGGNKLTF

SEQ ID NO: 599792 - protein, 15 aa, Homo sapiens
  CDR3 for beta chain variable domain of TCR clone 299896 (TRBV10-2, TRBJ2-6)
CASSGQGTGANDLTF

SEQ ID NO: 599793 - protein, 12 aa, Homo sapiens
  CDR3 for alpha chain variable domain of TCR clone 299897 (TRAV1-1, TRAJ8)
CAGGTGFQKLVF

SEQ ID NO: 599794 - protein, 13 aa, Homo sapiens
  CDR3 for beta chain variable domain of TCR clone 299897 (TRBV4-1, TRBJ2-2)
CASSQENTGELFF

SEQ ID NO: 599795 - protein, 11 aa, Homo sapiens
  CDR3 for alpha chain variable domain of TCR clone 299898 (TRAV21, TRAJ34)
CAVTNTDKLIF

SEQ ID NO: 599796 - protein, 13 aa, Homo sapiens
  CDR3 for beta chain variable domain of TCR clone 299898 (TRBV19, TRBJ2-1)
CASSMYRVNEQFF

SEQ ID NO: 599797 - protein, 12 aa, Homo sapiens
  CDR3 for alpha chain variable domain of TCR clone 299899 (TRAV21, TRAJ49)
CAVTNTGNQFYF

SEQ ID NO: 599798 - protein, 17 aa, Homo sapiens
  CDR3 for beta chain variable domain of TCR clone 299899 (TRBV13, TRBJ2-3)
CASSLSRVAGGRNTKYF

SEQ ID NO: 599799 - protein, 18 aa, Homo sapiens
  CDR3 for alpha chain variable domain of TCR clone 299900 (TRAV8-4, TRAJ52)
CSVTRANAGGTSYGKLTF

SEQ ID NO: 599800 - protein, 20 aa, Homo sapiens
  CDR3 for beta chain variable domain of TCR clone 299900 (TRBV19, TRBJ2-1)
CASSIWRTVTSTRLNNEQFF

SEQ ID NO: 599801 - protein, 16 aa, Homo sapiens
  CDR3 for alpha chain variable domain of TCR clone 299901 (TRAV13-1, TRAJ48)
CAASIFGNFGNEKLTL

SEQ ID NO: 599802 - protein, 12 aa, Homo sapiens
  CDR3 for beta chain variable domain of TCR clone 299901 (TRBV14, TRBJ2-4)
CASSNLKSIQYF

SEQ ID NO: 599803 - protein, 14 aa, Homo sapiens
  CDR3 for alpha chain variable domain of TCR clone 299902 (TRAV1-2, TRAJ16)
CAVNRFSDGPKLLF

SEQ ID NO: 599804 - protein, 15 aa, Homo sapiens
  CDR3 for beta chain variable domain of TCR clone 299902 (TRBV5-5, TRBJ1-5)
CASSSTPGSNQPQHF

SEQ ID NO: 599805 - protein, 15 aa, Homo sapiens
  CDR3 for alpha chain variable domain of TCR clone 299903 (TRAV26-1, TRAJ29)
CIVRVEGSGNTPLVL

SEQ ID NO: 599806 - protein, 15 aa, Homo sapiens
  CDR3 for beta chain variable domain of TCR clone 299903 (TRBV7-9, TRBJ1-5)
CASSQGHQPNQPQNF

SEQ ID NO: 599807 - protein, 12 aa, Homo sapiens
  CDR3 for alpha chain variable domain of TCR clone 299904 (TRAV17, TRAJ12)
CAGGDSSYKFIF

SEQ ID NO: 599808 - protein, 12 aa, Homo sapiens
  CDR3 for beta chain variable domain of TCR clone 299904 (TRBV29-1, TRBJ1-1)
CSESDGNTEAFF

SEQ ID NO: 599809 - protein, 16 aa, Homo sapiens
  CDR3 for alpha chain variable domain of TCR clone 299905 (TRAV1-2, TRAJ10)
CAVRGVLTGGGKKLTF

SEQ ID NO: 599810 - protein, 13 aa, Homo sapiens
  CDR3 for beta chain variable domain of TCR clone 299905 (TRBV24-1, TRBJ2-2)
CATTATRTGELFF

SEQ ID NO: 599811 - protein, 15 aa, Homo sapiens
  CDR3 for alpha chain variable domain of TCR clone 299906 (TRAV12-3, TRAJ6)
RAMSATTGGSYIPTF

SEQ ID NO: 599812 - protein, 15 aa, Homo sapiens
  CDR3 for beta chain variable domain of TCR clone 299906 (TRBV28, TRBJ2-5)
CANSPPWSYQETQYF

SEQ ID NO: 599813 - protein, 18 aa, Homo sapiens
  CDR3 for alpha chain variable domain of TCR clone 299907 (TRAV12-3, TRAJ52)
CAMSVGGAGGTSYGKLTF

SEQ ID NO: 599814 - protein, 15 aa, Homo sapiens
  CDR3 for beta chain variable domain of TCR clone 299907 (TRBV11-2, TRBJ2-1)
CASSKNRGLIYEQFF

SEQ ID NO: 599815 - protein, 14 aa, Homo sapiens
  CDR3 for alpha chain variable domain of TCR clone 299908 (TRAV12-2, TRAJ9)
CAVRGQTGGFKTTF

SEQ ID NO: 599816 - protein, 15 aa, Homo sapiens
  CDR3 for beta chain variable domain of TCR clone 299908 (TRBV7-2, TRBJ2-7)
CASSFTGQGAQEQYF

SEQ ID NO: 599817 - protein, 14 aa, Homo sapiens
  CDR3 for alpha chain variable domain of TCR clone 299909 (TRAV29/DV5, TRAJ20)
CAATIRSNDYKLGF

SEQ ID NO: 599818 - protein, 15 aa, Homo sapiens
  CDR3 for beta chain variable domain of TCR clone 299909 (TRBV5-4, TRBJ2-3)
CASSLAGGITDTQYF

SEQ ID NO: 599819 - protein, 20 aa, Homo sapiens
  CDR3 for alpha chain variable domain of TCR clone 299910 (TRAV26-2, TRAJ48)
CCVLLHPETPFNFGNEKLTF

SEQ ID NO: 599820 - protein, 15 aa, Homo sapiens
  CDR3 for beta chain variable domain of TCR clone 299910 (TRBV20-1, TRBJ2-3)
CSARVEGTYTDTQYF

SEQ ID NO: 599821 - protein, 12 aa, Homo sapiens
  CDR3 for alpha chain variable domain of TCR clone 299911 (TRAV2, TRAJ31)
CAVEDNNARLMF

SEQ ID NO: 599822 - protein, 12 aa, Homo sapiens
  CDR3 for beta chain variable domain of TCR clone 299911 (TRBV5-5, TRBJ2-5)
CARSYFGETQYF

SEQ ID NO: 599823 - protein, 14 aa, Homo sapiens
  CDR3 for alpha chain variable domain of TCR clone 299912 (TRAV12-1, TRAJ17)
CVVNYKAAGNKPTF

SEQ ID NO: 599824 - protein, 17 aa, Homo sapiens
  CDR3 for beta chain variable domain of TCR clone 299912 (TRBV11-2, TRBJ2-1)
CASSLYPPGVEYNEQFF

SEQ ID NO: 599825 - protein, 14 aa, Homo sapiens
  CDR3 for alpha chain variable domain of TCR clone 299913 (TRAV23/DV6, TRAJ23)
CAAGPYNQGGKLIF

SEQ ID NO: 599826 - protein, 15 aa, Homo sapiens
  CDR3 for beta chain variable domain of TCR clone 299913 (TRBV7-2, TRBJ2-2)
CASRRPGQNTGELFF

SEQ ID NO: 599827 - protein, 13 aa, Homo sapiens
  CDR3 for alpha chain variable domain of TCR clone 299914 (TRAV21, TRAJ20)
CAVGVFADYKLSF

SEQ ID NO: 599828 - protein, 15 aa, Homo sapiens
  CDR3 for beta chain variable domain of TCR clone 299914 (TRBV5-5, TRBJ1-5)
CASSSTPGSNQPQHF

SEQ ID NO: 599829 - protein, 15 aa, Homo sapiens
  CDR3 for alpha chain variable domain of TCR clone 299915 (TRAV8-3, TRAJ37)
CAVGARDSNTGKRIF

SEQ ID NO: 599830 - protein, 15 aa, Homo sapiens
  CDR3 for beta chain variable domain of TCR clone 299915 (TRBV5-4, TRBJ2-3)
CASSLAGRVTDTQYF

SEQ ID NO: 599831 - protein, 13 aa, Homo sapiens
  CDR3 for alpha chain variable domain of TCR clone 299916 (TRAV1-1, TRAJ9)
CAAKNTGGFKTIF

SEQ ID NO: 599832 - protein, 13 aa, Homo sapiens
  CDR3 for beta chain variable domain of TCR clone 299916 (TRBV7-9, TRBJ1-2)
CASSLKKNYGYTF

SEQ ID NO: 599833 - protein, 13 aa, Homo sapiens
  CDR3 for alpha chain variable domain of TCR clone 299917 (TRAV13-1, TRAJ6)
CAASKGGSYIPTF

SEQ ID NO: 599834 - protein, 14 aa, Homo sapiens
  CDR3 for beta chain variable domain of TCR clone 299917 (TRBV7-2, TRBJ2-1)
CASSLRVGYNEQCF

SEQ ID NO: 599835 - protein, 14 aa, Homo sapiens
  CDR3 for alpha chain variable domain of TCR clone 299918 (TRAV1-1, TRAJ27)
CAVIYNTNAGKSSF

SEQ ID NO: 599836 - protein, 15 aa, Homo sapiens
  CDR3 for beta chain variable domain of TCR clone 299918 (TRBV7-2, TRBJ2-1)
CASSSGLAGGNEQFF

SEQ ID NO: 599837 - protein, 13 aa, Homo sapiens
  CDR3 for alpha chain variable domain of TCR clone 299919 (TRAV2, TRAJ29)
CAAQHSGNTPLAF

SEQ ID NO: 599838 - protein, 14 aa, Homo sapiens
  CDR3 for beta chain variable domain of TCR clone 299919 (TRBV7-9, TRBJ2-4)
CASSLAMGGNIQYF

SEQ ID NO: 599839 - protein, 15 aa, Homo sapiens
  CDR3 for alpha chain variable domain of TCR clone 299920 (TRAV17, TRAJ4)
CATGTWSGGYNKLIF

SEQ ID NO: 599840 - protein, 15 aa, Homo sapiens
  CDR3 for beta chain variable domain of TCR clone 299920 (TRBV7-2, TRBJ2-3)
CASSLRGGSTDTQYF

SEQ ID NO: 599841 - protein, 16 aa, Homo sapiens
  CDR3 for alpha chain variable domain of TCR clone 299921 (TRAV26-1, TRAJ37)
CIVRGDGYGNTGKLIF

SEQ ID NO: 599842 - protein, 15 aa, Homo sapiens
  CDR3 for beta chain variable domain of TCR clone 299921 (TRBV7-3, TRBJ2-1)
CASSPTGGGEVEQFC

SEQ ID NO: 599843 - protein, 15 aa, Homo sapiens
  CDR3 for alpha chain variable domain of TCR clone 299922 (TRAV4, TRAJ39)
GLVGPNNNAGNMLTF

SEQ ID NO: 599844 - protein, 13 aa, Homo sapiens
  CDR3 for beta chain variable domain of TCR clone 299922 (TRBV11-2, TRBJ2-5)
CASSSTGEETQYF

SEQ ID NO: 599845 - protein, 15 aa, Homo sapiens
  CDR3 for alpha chain variable domain of TCR clone 299923 (TRAV17, TRAJ52)
CSTEAVGTSYGKLTF

SEQ ID NO: 599846 - protein, 14 aa, Homo sapiens
  CDR3 for beta chain variable domain of TCR clone 299923 (TRBV28, TRBJ1-5)
CASSLGVLVKPQHF

SEQ ID NO: 599847 - protein, 17 aa, Homo sapiens
  CDR3 for alpha chain variable domain of TCR clone 299924 (TRAV38-1, TRAJ39)
CAFMYHHPSFAGNMLTF

SEQ ID NO: 599848 - protein, 14 aa, Homo sapiens
  CDR3 for beta chain variable domain of TCR clone 299924 (TRBV6-5, TRBJ2-2)
CASSSLPGTGELFF

SEQ ID NO: 599849 - protein, 14 aa, Homo sapiens
  CDR3 for alpha chain variable domain of TCR clone 299925 (TRAV20, TRAJ37)
ISVLGASNTGKLIF

SEQ ID NO: 599850 - protein, 11 aa, Homo sapiens
  CDR3 for beta chain variable domain of TCR clone 299925 (TRBV12-4, TRBJ2-3)
CASTATDTQYF

SEQ ID NO: 599851 - protein, 17 aa, Homo sapiens
  CDR3 for alpha chain variable domain of TCR clone 299926 (TRAV3, TRAJ42)
CAVRDRDYGGSQGNLIF

SEQ ID NO: 599852 - protein, 15 aa, Homo sapiens
  CDR3 for beta chain variable domain of TCR clone 299926 (TRBV20-1, TRBJ2-7)
CSAIDRVSGMDEQYF

SEQ ID NO: 599853 - protein, 11 aa, Homo sapiens
  CDR3 for alpha chain variable domain of TCR clone 299927 (TRAV21, TRAJ11)
CAVNGYSTLTF

SEQ ID NO: 599854 - protein, 11 aa, Homo sapiens
  CDR3 for beta chain variable domain of TCR clone 299927 (TRBV19, TRBJ1-1)
CDSSSGSEAFF

SEQ ID NO: 599855 - protein, 14 aa, Homo sapiens
  CDR3 for alpha chain variable domain of TCR clone 299928 (TRAV29/DV5, TRAJ47)
CAASSIEYGNKLVF

SEQ ID NO: 599856 - protein, 16 aa, Homo sapiens
  CDR3 for beta chain variable domain of TCR clone 299928 (TRBV3-1, TRBJ2-7)
CQQLTPYSGKGYEQYF

SEQ ID NO: 599857 - protein, 14 aa, Homo sapiens
  CDR3 for alpha chain variable domain of TCR clone 299929 (TRAV1-2, TRAJ16)
CAVNRFSDGQKLLF

SEQ ID NO: 599858 - protein, 15 aa, Homo sapiens
  CDR3 for beta chain variable domain of TCR clone 299929 (TRBV7-2, TRBJ2-7)
CASSLKVALTYEQYF

SEQ ID NO: 599859 - protein, 15 aa, Homo sapiens
  CDR3 for alpha chain variable domain of TCR clone 299930 (TRAV21, TRAJ53)
CATLNSGGSNYKLTF

SEQ ID NO: 599860 - protein, 15 aa, Homo sapiens
  CDR3 for beta chain variable domain of TCR clone 299930 (TRBV20-1, TRBJ2-7)
CSDRDRVSGMDEQYF

SEQ ID NO: 599861 - protein, 13 aa, Homo sapiens
  CDR3 for alpha chain variable domain of TCR clone 299931 (TRAV2, TRAJ15)
CAVASQAGTALIF

SEQ ID NO: 599862 - protein, 15 aa, Homo sapiens
  CDR3 for beta chain variable domain of TCR clone 299931 (TRBV28, TRBJ2-5)
CASSFRQGALETQSF

SEQ ID NO: 599863 - protein, 15 aa, Homo sapiens
  CDR3 for alpha chain variable domain of TCR clone 299932 (TRAV8-6, TRAJ11)
CAVNFMNSGYSTLTF

SEQ ID NO: 599864 - protein, 18 aa, Homo sapiens
  CDR3 for beta chain variable domain of TCR clone 299932 (TRBV7-9, TRBJ2-7)
CASSLTTSGSRTWYEQYF

SEQ ID NO: 599865 - protein, 13 aa, Homo sapiens
  CDR3 for alpha chain variable domain of TCR clone 299933 (TRAV21, TRAJ15)
CAVANQAGTALIF

SEQ ID NO: 599866 - protein, 12 aa, Homo sapiens
  CDR3 for beta chain variable domain of TCR clone 299933 (TRBV12-4, TRBJ1-3)
CASSFSGNTIYF

SEQ ID NO: 599867 - protein, 13 aa, Homo sapiens
  CDR3 for alpha chain variable domain of TCR clone 299934 (TRAV21, TRAJ27)
CAARPGNAGKSTY

SEQ ID NO: 599868 - protein, 18 aa, Homo sapiens
  CDR3 for beta chain variable domain of TCR clone 299934 (TRBV11-2, TRBJ2-3)
CASSLGGASRGAPNTQYF

SEQ ID NO: 599869 - protein, 14 aa, Homo sapiens
  CDR3 for alpha chain variable domain of TCR clone 299935 (TRAV1-2, TRAJ16)
CAVNRFSDGQKLLF

SEQ ID NO: 599870 - protein, 14 aa, Homo sapiens
  CDR3 for beta chain variable domain of TCR clone 299935 (TRBV7-9, TRBJ2-3)
CASILEDGTDTQYF

SEQ ID NO: 599871 - protein, 20 aa, Homo sapiens
  CDR3 for alpha chain variable domain of TCR clone 299936 (TRAV8-3, TRAJ44)
LSTSVLWVRLYTGTASKLTF

SEQ ID NO: 599872 - protein, 13 aa, Homo sapiens
  CDR3 for beta chain variable domain of TCR clone 299936 (TRBV3-1, TRBJ1-1)
CASSPGVITEAFF

SEQ ID NO: 599873 - protein, 20 aa, Homo sapiens
  CDR3 for alpha chain variable domain of TCR clone 299937 (TRAV27, TRAJ10)
ASTSVPSRGILTGGGNKLTF

SEQ ID NO: 599874 - protein, 17 aa, Homo sapiens
  CDR3 for beta chain variable domain of TCR clone 299937 (TRBV11-2, TRBJ2-1)
CASSVYPPGVEYNEQFF

SEQ ID NO: 599875 - protein, 13 aa, Homo sapiens
  CDR3 for alpha chain variable domain of TCR clone 299938 (TRAV21, TRAJ36)
CAVIKTGANNLFF

SEQ ID NO: 599876 - protein, 15 aa, Homo sapiens
  CDR3 for beta chain variable domain of TCR clone 299938 (TRBV20-1, TRBJ2-5)
CSATPLTGDQETQYF

SEQ ID NO: 599877 - protein, 14 aa, Homo sapiens
  CDR3 for alpha chain variable domain of TCR clone 299939 (TRAV17, TRAJ37)
CATDGSSNTGKIIF

SEQ ID NO: 599878 - protein, 13 aa, Homo sapiens
  CDR3 for beta chain variable domain of TCR clone 299939 (TRBV11-2, TRBJ2-1)
CASSLDLVNEQFF

SEQ ID NO: 599879 - protein, 13 aa, Homo sapiens
  CDR3 for alpha chain variable domain of TCR clone 299940 (TRAV21, TRAJ23)
CAVMLGRKAYLRT

SEQ ID NO: 599880 - protein, 14 aa, Homo sapiens
  CDR3 for beta chain variable domain of TCR clone 299940 (TRBV7-9, TRBJ1-4)
CAITEGEANEKLFF

SEQ ID NO: 599881 - protein, 13 aa, Homo sapiens
  CDR3 for alpha chain variable domain of TCR clone 299941 (TRAV8-6, TRAJ8)
CAVSNIGFQKLVF

SEQ ID NO: 599882 - protein, 15 aa, Homo sapiens
  CDR3 for beta chain variable domain of TCR clone 299941 (TRBV28, TRBJ2-5)
CASSSGRTIQETQYF

SEQ ID NO: 599883 - protein, 11 aa, Homo sapiens
  CDR3 for alpha chain variable domain of TCR clone 299942 (TRAV26-1, TRAJ47)
CIFFHGIWKQT

SEQ ID NO: 599884 - protein, 13 aa, Homo sapiens
  CDR3 for beta chain variable domain of TCR clone 299942 (TRBV24-1, TRBJ2-7)
CATSDVGPYEQYF

SEQ ID NO: 599885 - protein, 13 aa, Homo sapiens
  CDR3 for alpha chain variable domain of TCR clone 299943 (TRAV21, TRAJ15)
CAVANQAGTALIF

SEQ ID NO: 599886 - protein, 16 aa, Homo sapiens
  CDR3 for beta chain variable domain of TCR clone 299943 (TRBV12-4, TRBJ2-7)
CASSPEGQGSSYEQYF

SEQ ID NO: 599887 - protein, 12 aa, Homo sapiens
  CDR3 for alpha chain variable domain of TCR clone 299944 (TRAV12-2, TRAJ31)
CAVNTPDARHMF

SEQ ID NO: 599888 - protein, 12 aa, Homo sapiens
  CDR3 for beta chain variable domain of TCR clone 299944 (TRBV12-4, TRBJ2-7)
CASSLGGYEQYF

SEQ ID NO: 599889 - protein, 14 aa, Homo sapiens
  CDR3 for alpha chain variable domain of TCR clone 299945 (TRAV27, TRAJ22)
CAGVVPGSARQLTF

SEQ ID NO: 599890 - protein, 10 aa, Homo sapiens
  CDR3 for beta chain variable domain of TCR clone 299945 (TRBV28, TRBJ1-2)
CASSSDRAVF

SEQ ID NO: 599891 - protein, 16 aa, Homo sapiens
  CDR3 for alpha chain variable domain of TCR clone 299946 (TRAV3, TRAJ10)
CAVRDMRAGGGNKLTF

SEQ ID NO: 599892 - protein, 15 aa, Homo sapiens
  CDR3 for beta chain variable domain of TCR clone 299946 (TRBV11-2, TRBJ1-6)
CASTGFGTAISPLHF

SEQ ID NO: 599893 - protein, 16 aa, Homo sapiens
  CDR3 for alpha chain variable domain of TCR clone 299947 (TRAV25, )
CADIQNPDPAVYQLSD

SEQ ID NO: 599894 - protein, 15 aa, Homo sapiens
  CDR3 for beta chain variable domain of TCR clone 299947 (TRBV28, TRBJ1-4)
CASSVSGSGLEKLFF

SEQ ID NO: 599895 - protein, 14 aa, Homo sapiens
  CDR3 for alpha chain variable domain of TCR clone 299948 (TRAV13-1, TRAJ35)
CAVSKGGFGNVLHC

SEQ ID NO: 599896 - protein, 13 aa, Homo sapiens
  CDR3 for beta chain variable domain of TCR clone 299948 (TRBV7-3, TRBJ1-1)
CASSQAWGAEAFF

SEQ ID NO: 599897 - protein, 14 aa, Homo sapiens
  CDR3 for alpha chain variable domain of TCR clone 299949 (TRAV16, TRAJ26)
CALRLWSEFCLLSR

SEQ ID NO: 599898 - protein, 14 aa, Homo sapiens
  CDR3 for beta chain variable domain of TCR clone 299949 (TRBV7-2, TRBJ2-7)
CASRSQGAAYEQYF

SEQ ID NO: 599899 - protein, 13 aa, Homo sapiens
  CDR3 for alpha chain variable domain of TCR clone 299950 (TRAV8-3, TRAJ43)
CAVGPDNNNDMRF

SEQ ID NO: 599900 - protein, 14 aa, Homo sapiens
  CDR3 for beta chain variable domain of TCR clone 299950 (TRBV9, TRBJ1-1)
CASSATGVNTEAFF

SEQ ID NO: 599901 - protein, 13 aa, Homo sapiens
  CDR3 for alpha chain variable domain of TCR clone 299951 (TRAV12-2, TRAJ53)
CAGVGGSNYKLTF

SEQ ID NO: 599902 - protein, 15 aa, Homo sapiens
  CDR3 for beta chain variable domain of TCR clone 299951 (TRBV11-3, TRBJ2-3)
CASLKDGREGDTQYF

SEQ ID NO: 599903 - protein, 14 aa, Homo sapiens
  CDR3 for alpha chain variable domain of TCR clone 299952 (TRAV8-2, TRAJ4)
CVVSPSGGYTKRIF

SEQ ID NO: 599904 - protein, 15 aa, Homo sapiens
  CDR3 for beta chain variable domain of TCR clone 299952 (TRBV4-1, TRBJ1-4)
CASSDTGGTNEKLFF

SEQ ID NO: 599905 - protein, 12 aa, Homo sapiens
  CDR3 for alpha chain variable domain of TCR clone 299953 (TRAV17, TRAJ20)
CATDGDDYKLSF

SEQ ID NO: 599906 - protein, 16 aa, Homo sapiens
  CDR3 for beta chain variable domain of TCR clone 299953 (TRBV19, TRBJ2-2)
CASRSPGTGATGELFF

SEQ ID NO: 599907 - protein, 16 aa, Homo sapiens
  CDR3 for alpha chain variable domain of TCR clone 299954 (TRAV23/DV6, TRAJ9)
CAASIGGNTGGFKTIF

SEQ ID NO: 599908 - protein, 15 aa, Homo sapiens
  CDR3 for beta chain variable domain of TCR clone 299954 (TRBV15, TRBJ2-7)
CATSRGVTPTYEQYF

SEQ ID NO: 599909 - protein, 13 aa, Homo sapiens
  CDR3 for alpha chain variable domain of TCR clone 299955 (TRAV13-1, TRAJ49)
CAAMLYTGNQFYF

SEQ ID NO: 599910 - protein, 14 aa, Homo sapiens
  CDR3 for beta chain variable domain of TCR clone 299955 (TRBV7-9, TRBJ2-2)
CASSFDRGTGELFF

SEQ ID NO: 599911 - protein, 12 aa, Homo sapiens
  CDR3 for alpha chain variable domain of TCR clone 299956 (TRAV25, TRAJ5)
CAGGGGRSALTF

SEQ ID NO: 599912 - protein, 15 aa, Homo sapiens
  CDR3 for beta chain variable domain of TCR clone 299956 (TRBV19, TRBJ2-4)
CASRGPRRGENIQYF

SEQ ID NO: 599913 - protein, 15 aa, Homo sapiens
  CDR3 for alpha chain variable domain of TCR clone 299957 (TRAV3, TRAJ17)
CAVRDTGAAGNKLTF

SEQ ID NO: 599914 - protein, 18 aa, Homo sapiens
  CDR3 for beta chain variable domain of TCR clone 299957 (TRBV7-9, TRBJ2-7)
CASSLTTSGSRTWYEQYF

SEQ ID NO: 599915 - protein, 16 aa, Homo sapiens
  CDR3 for alpha chain variable domain of TCR clone 299958 (TRAV30, TRAJ24)
CGTEIVDADSWGKFQF

SEQ ID NO: 599916 - protein, 16 aa, Homo sapiens
  CDR3 for beta chain variable domain of TCR clone 299958 (TRBV7-3, TRBJ2-1)
RASSLLVGELVDEQFF

SEQ ID NO: 599917 - protein, 11 aa, Homo sapiens
  CDR3 for alpha chain variable domain of TCR clone 299959 (TRAV3, TRAJ21)
CAVGNFNTFYF

SEQ ID NO: 599918 - protein, 13 aa, Homo sapiens
  CDR3 for beta chain variable domain of TCR clone 299959 (TRBV2, TRBJ1-4)
CASSERAGEKLFF

SEQ ID NO: 599919 - protein, 13 aa, Homo sapiens
  CDR3 for alpha chain variable domain of TCR clone 299960 (TRAV12-3, TRAJ58)
CAMSVTSGSRLTF

SEQ ID NO: 599920 - protein, 16 aa, Homo sapiens
  CDR3 for beta chain variable domain of TCR clone 299960 (TRBV7-3, TRBJ2-2)
CASSLKRGTLSGELFF

SEQ ID NO: 599921 - protein, 15 aa, Homo sapiens
  CDR3 for alpha chain variable domain of TCR clone 299961 (TRAV3, TRAJ22)
CAVKDRGGSARQLTF

SEQ ID NO: 599922 - protein, 13 aa, Homo sapiens
  CDR3 for beta chain variable domain of TCR clone 299961 (TRBV7-3, TRBJ2-1)
CASSPVAYNEQFF

SEQ ID NO: 599923 - protein, 13 aa, Homo sapiens
  CDR3 for alpha chain variable domain of TCR clone 299962 (TRAV17, TRAJ31)
CATDENNNARLMF

SEQ ID NO: 599924 - protein, 14 aa, Homo sapiens
  CDR3 for beta chain variable domain of TCR clone 299962 (TRBV11-2, TRBJ1-2)
CASSLGTANYGYTF

SEQ ID NO: 599925 - protein, 12 aa, Homo sapiens
  CDR3 for alpha chain variable domain of TCR clone 299963 (TRAV1-2, TRAJ29)
CSVPSGNTPLVF

SEQ ID NO: 599926 - protein, 12 aa, Homo sapiens
  CDR3 for beta chain variable domain of TCR clone 299963 (TRBV12-4, TRBJ2-7)
CASSLGGYEQYF

SEQ ID NO: 599927 - protein, 13 aa, Homo sapiens
  CDR3 for alpha chain variable domain of TCR clone 299964 (TRAV21, TRAJ52)
CAVRPSPAGGTSY

SEQ ID NO: 599928 - protein, 13 aa, Homo sapiens
  CDR3 for beta chain variable domain of TCR clone 299964 (TRBV7-3, TRBJ1-1)
CASSQDWGAEAFF

SEQ ID NO: 599929 - protein, 12 aa, Homo sapiens
  CDR3 for alpha chain variable domain of TCR clone 299965 (TRAV2, TRAJ36)
SAELTGANNLFF

SEQ ID NO: 599930 - protein, 14 aa, Homo sapiens
  CDR3 for beta chain variable domain of TCR clone 299965 (TRBV18, TRBJ2-7)
CASSPRGGAYEQYF

SEQ ID NO: 599931 - protein, 15 aa, Homo sapiens
  CDR3 for alpha chain variable domain of TCR clone 299966 (TRAV21, TRAJ53)
CATLNSGGSNYKLTF

SEQ ID NO: 599932 - protein, 14 aa, Homo sapiens
  CDR3 for beta chain variable domain of TCR clone 299966 (TRBV7-2, TRBJ2-7)
CASRSQGSAYEQYF

SEQ ID NO: 599933 - protein, 13 aa, Homo sapiens
  CDR3 for alpha chain variable domain of TCR clone 299967 (TRAV20, TRAJ34)
CAVPSYNTDKLIF

SEQ ID NO: 599934 - protein, 15 aa, Homo sapiens
  CDR3 for beta chain variable domain of TCR clone 299967 (TRBV20-1, TRBJ1-2)
CSAAGGGARIYGYTF

SEQ ID NO: 599935 - protein, 18 aa, Homo sapiens
  CDR3 for alpha chain variable domain of TCR clone 299968 (TRAV21, TRAJ52)
CAVRPSPAGGTSYGKLTF

SEQ ID NO: 599936 - protein, 17 aa, Homo sapiens
  CDR3 for beta chain variable domain of TCR clone 299968 (TRBV13, TRBJ2-3)
CASSLSRGGGGRNTQYF

SEQ ID NO: 599937 - protein, 12 aa, Homo sapiens
  CDR3 for alpha chain variable domain of TCR clone 299969 (TRAV8-3, TRAJ41)
CAVALSGYALNF

SEQ ID NO: 599938 - protein, 17 aa, Homo sapiens
  CDR3 for beta chain variable domain of TCR clone 299969 (TRBV7-3, TRBJ2-2)
CASSLSVTSGGTGELFF

SEQ ID NO: 599939 - protein, 12 aa, Homo sapiens
  CDR3 for alpha chain variable domain of TCR clone 299970 (TRAV1-1, TRAJ30)
CAVRGRDDKIIF

SEQ ID NO: 599940 - protein, 14 aa, Homo sapiens
  CDR3 for beta chain variable domain of TCR clone 299970 (TRBV4-2, TRBJ2-1)
CASGLDRAYNESSS

SEQ ID NO: 599941 - protein, 14 aa, Homo sapiens
  CDR3 for alpha chain variable domain of TCR clone 299971 (TRAV1-2, TRAJ16)
CAVNRFSDGQKLLF

SEQ ID NO: 599942 - protein, 13 aa, Homo sapiens
  CDR3 for beta chain variable domain of TCR clone 299971 (TRBV5-5, TRBJ2-7)
CASSSQTRQRQYF

SEQ ID NO: 599943 - protein, 20 aa, Homo sapiens
  CDR3 for alpha chain variable domain of TCR clone 299972 (TRAV12-3, TRAJ17)
SPVIQPPTSAMTLTGNKLTF

SEQ ID NO: 599944 - protein, 11 aa, Homo sapiens
  CDR3 for beta chain variable domain of TCR clone 299972 (TRBV28, TRBJ2-1)
CASRRVNEQFF

SEQ ID NO: 599945 - protein, 12 aa, Homo sapiens
  CDR3 for alpha chain variable domain of TCR clone 299973 (TRAV3, TRAJ31)
CAVRDGNARLMF

SEQ ID NO: 599946 - protein, 14 aa, Homo sapiens
  CDR3 for beta chain variable domain of TCR clone 299973 (TRBV19, TRBJ2-7)
CASSIRLGDHEQYF

SEQ ID NO: 599947 - protein, 15 aa, Homo sapiens
  CDR3 for alpha chain variable domain of TCR clone 299974 (TRAV3, TRAJ3)
CAARDGHSSASKIIF

SEQ ID NO: 599948 - protein, 14 aa, Homo sapiens
  CDR3 for beta chain variable domain of TCR clone 299974 (TRBV28, TRBJ1-4)
CASSFGTFDEELFF

SEQ ID NO: 599949 - protein, 15 aa, Homo sapiens
  CDR3 for alpha chain variable domain of TCR clone 299975 (TRAV8-3, TRAJ27)
CAVGPSKTNAGKSTF

SEQ ID NO: 599950 - protein, 13 aa, Homo sapiens
  CDR3 for beta chain variable domain of TCR clone 299975 (TRBV7-9, TRBJ2-3)
CASSPGSTDTQYF

SEQ ID NO: 599951 - protein, 16 aa, Homo sapiens
  CDR3 for alpha chain variable domain of TCR clone 299976 (TRAV8-2, TRAJ50)
CVVSDHMKTSYDKVIF

SEQ ID NO: 599952 - protein, 13 aa, Homo sapiens
  CDR3 for beta chain variable domain of TCR clone 299976 (TRBV19, TRBJ2-7)
CASSPRQSYEQYF

SEQ ID NO: 599953 - protein, 13 aa, Homo sapiens
  CDR3 for alpha chain variable domain of TCR clone 299977 (TRAV8-3, TRAJ43)
CAVGPDNNNDMRF

SEQ ID NO: 599954 - protein, 19 aa, Homo sapiens
  CDR3 for beta chain variable domain of TCR clone 299977 (TRBV7-2, TRBJ2-3)
CASSFLARNWGGGTDTQYF

SEQ ID NO: 599955 - protein, 16 aa, Homo sapiens
  CDR3 for alpha chain variable domain of TCR clone 299978 (TRAV3, TRAJ10)
CAVRDMRAGGGNKLTF

SEQ ID NO: 599956 - protein, 14 aa, Homo sapiens
  CDR3 for beta chain variable domain of TCR clone 299978 (TRBV23-1, TRBJ2-5)
CASSFLRSQETQCF

SEQ ID NO: 599957 - protein, 11 aa, Homo sapiens
  CDR3 for alpha chain variable domain of TCR clone 299979 (TRAV27, TRAJ57)
SAQGGSEELVF

SEQ ID NO: 599958 - protein, 11 aa, Homo sapiens
  CDR3 for beta chain variable domain of TCR clone 299979 (TRBV11-2, TRBJ1-1)
CASSINTEAFF

SEQ ID NO: 599959 - protein, 13 aa, Homo sapiens
  CDR3 for alpha chain variable domain of TCR clone 299980 (TRAV3, TRAJ15)
CAVRDQAGTALIF

SEQ ID NO: 599960 - protein, 15 aa, Homo sapiens
  CDR3 for beta chain variable domain of TCR clone 299980 (TRBV11-1, TRBJ2-7)
CASSLNYGASYKQYF

SEQ ID NO: 599961 - protein, 17 aa, Homo sapiens
  CDR3 for alpha chain variable domain of TCR clone 299981 (TRAV3, TRAJ6)
CAVRDGPRAGGSYIPTF

SEQ ID NO: 599962 - protein, 20 aa, Homo sapiens
  CDR3 for beta chain variable domain of TCR clone 299981 (TRBV28, TRBJ2-1)
CASTPIGRSPGLAGGKEQFF

SEQ ID NO: 599963 - protein, 11 aa, Homo sapiens
  CDR3 for alpha chain variable domain of TCR clone 299982 (TRAV29/DV5, TRAJ49)
CAAVPGNQFYF

SEQ ID NO: 599964 - protein, 15 aa, Homo sapiens
  CDR3 for beta chain variable domain of TCR clone 299982 (TRBV5-1, TRBJ2-7)
CASSLGDFTTYEQYF

SEQ ID NO: 599965 - protein, 14 aa, Homo sapiens
  CDR3 for alpha chain variable domain of TCR clone 299983 (TRAV1-2, TRAJ16)
CAVNRFSDGQKLLF

SEQ ID NO: 599966 - protein, 16 aa, Homo sapiens
  CDR3 for beta chain variable domain of TCR clone 299983 (TRBV12-5, TRBJ2-5)
CASGPRTSGNQETQDF

SEQ ID NO: 599967 - protein, 12 aa, Homo sapiens
  CDR3 for alpha chain variable domain of TCR clone 299984 (TRAV12-2, TRAJ16)
CAVAPDGQKLLF

SEQ ID NO: 599968 - protein, 19 aa, Homo sapiens
  CDR3 for beta chain variable domain of TCR clone 299984 (TRBV25-1, TRBJ2-2)
CAILVYRVDRGRKTGELFF

SEQ ID NO: 599969 - protein, 13 aa, Homo sapiens
  CDR3 for alpha chain variable domain of TCR clone 299985 (TRAV12-3, TRAJ7)
CEVTPYGNNRLAF

SEQ ID NO: 599970 - protein, 16 aa, Homo sapiens
  CDR3 for beta chain variable domain of TCR clone 299985 (TRBV20-1, TRBJ1-4)
CSARPYGGELNEKLFF

SEQ ID NO: 599971 - protein, 12 aa, Homo sapiens
  CDR3 for alpha chain variable domain of TCR clone 299986 (TRAV21, TRAJ13)
PGPSGGYEKVTF

SEQ ID NO: 599972 - protein, 15 aa, Homo sapiens
  CDR3 for beta chain variable domain of TCR clone 299986 (TRBV7-9, TRBJ1-6)
CASSSPGRGNSPLHF

SEQ ID NO: 599973 - protein, 12 aa, Homo sapiens
  CDR3 for alpha chain variable domain of TCR clone 299987 (TRAV1-1, TRAJ33)
CTASDSNYQLIW

SEQ ID NO: 599974 - protein, 18 aa, Homo sapiens
  CDR3 for beta chain variable domain of TCR clone 299987 (TRBV20-1, TRBJ2-2)
CSARVQTARPSGTGELFF

SEQ ID NO: 599975 - protein, 11 aa, Homo sapiens
  CDR3 for alpha chain variable domain of TCR clone 299988 (TRAV21, TRAJ34)
CAVTNTDKLIF

SEQ ID NO: 599976 - protein, 16 aa, Homo sapiens
  CDR3 for beta chain variable domain of TCR clone 299988 (TRBV18, TRBJ1-1)
CASSPGVGGRVGEAFF

SEQ ID NO: 599977 - protein, 17 aa, Homo sapiens
  CDR3 for alpha chain variable domain of TCR clone 299989 (TRAV13-2, TRAJ28)
CAEEPVGSGAGSYQLTF

SEQ ID NO: 599978 - protein, 14 aa, Homo sapiens
  CDR3 for beta chain variable domain of TCR clone 299989 (TRBV4-2, TRBJ2-1)
CASGLDRAYNEQFF

SEQ ID NO: 599979 - protein, 14 aa, Homo sapiens
  CDR3 for alpha chain variable domain of TCR clone 299990 (TRAV20, TRAJ42)
CAVQAGGSQGNPIF

SEQ ID NO: 599980 - protein, 14 aa, Homo sapiens
  CDR3 for beta chain variable domain of TCR clone 299990 (TRBV28, TRBJ1-2)
CASRIQGANYGDTF

SEQ ID NO: 599981 - protein, 13 aa, Homo sapiens
  CDR3 for alpha chain variable domain of TCR clone 299991 (TRAV12-1, TRAJ35)
CVVRGGFGNVLHC

SEQ ID NO: 599982 - protein, 15 aa, Homo sapiens
  CDR3 for beta chain variable domain of TCR clone 299991 (TRBV7-2, TRBJ1-6)
CASSLGPDRGMPLHF

SEQ ID NO: 599983 - protein, 18 aa, Homo sapiens
  CDR3 for alpha chain variable domain of TCR clone 299992 (TRAV13-1, TRAJ52)
CAAKNPNAGGTSYGKLTF

SEQ ID NO: 599984 - protein, 15 aa, Homo sapiens
  CDR3 for beta chain variable domain of TCR clone 299992 (TRBV18, TRBJ1-1)
CASSPRQGENTEAFF

SEQ ID NO: 599985 - protein, 13 aa, Homo sapiens
  CDR3 for alpha chain variable domain of TCR clone 299993 (TRAV20, TRAJ20)
CAVRWVRDYKLSF

SEQ ID NO: 599986 - protein, 10 aa, Homo sapiens
  CDR3 for beta chain variable domain of TCR clone 299993 (TRBV19, TRBJ2-2)
CASTVTANTG

SEQ ID NO: 599987 - protein, 13 aa, Homo sapiens
  CDR3 for alpha chain variable domain of TCR clone 299994 (TRAV38-1, TRAJ57)
CVLVQGGSEKLVF

SEQ ID NO: 599988 - protein, 17 aa, Homo sapiens
  CDR3 for beta chain variable domain of TCR clone 299994 (TRBV29-1, TRBJ2-3)
CSVDSPPRGARTDTQYF

SEQ ID NO: 599989 - protein, 13 aa, Homo sapiens
  CDR3 for alpha chain variable domain of TCR clone 299995 (TRAV13-1, TRAJ20)
CAASVSNDYKPSF

SEQ ID NO: 599990 - protein, 12 aa, Homo sapiens
  CDR3 for beta chain variable domain of TCR clone 299995 (TRBV20-1, TRBJ2-1)
CSARLGTDEQFF

SEQ ID NO: 599991 - protein, 13 aa, Homo sapiens
  CDR3 for alpha chain variable domain of TCR clone 299996 (TRAV8-6, TRAJ13)
CAVRDVGYQKVTF

SEQ ID NO: 599992 - protein, 15 aa, Homo sapiens
  CDR3 for beta chain variable domain of TCR clone 299996 (TRBV7-9, TRBJ2-2)
CASRPEGTSTGELFF

SEQ ID NO: 599993 - protein, 16 aa, Homo sapiens
  CDR3 for alpha chain variable domain of TCR clone 299997 (TRAV30, TRAJ24)
CGTEIVDADSWGKFQF

SEQ ID NO: 599994 - protein, 15 aa, Homo sapiens
  CDR3 for beta chain variable domain of TCR clone 299997 (TRBV6-5, TRBJ1-2)
CASSYSPPRFYGYTF

SEQ ID NO: 599995 - protein, 17 aa, Homo sapiens
  CDR3 for alpha chain variable domain of TCR clone 299998 (TRAV12-2, TRAJ52)
CAVNPYAGGTSYGKLKF

SEQ ID NO: 599996 - protein, 16 aa, Homo sapiens
  CDR3 for beta chain variable domain of TCR clone 299998 (TRBV5-5, TRBJ2-2)
CASSGRREGATGELFF

SEQ ID NO: 599997 - protein, 14 aa, Homo sapiens
  CDR3 for alpha chain variable domain of TCR clone 299999 (TRAV1-2, TRAJ6)
CAVRSSGGGYIPTF

SEQ ID NO: 599998 - protein, 18 aa, Homo sapiens
  CDR3 for beta chain variable domain of TCR clone 299999 (TRBV20-1, TRBJ2-3)
CSASGLAGGPGTTDTRYF

SEQ ID NO: 599999 - protein, 15 aa, Homo sapiens
  CDR3 for alpha chain variable domain of TCR clone 300000 (TRAV3, TRAJ10)
CAVRDGTGGGNKLTF

SEQ ID NO: 600000 - protein, 14 aa, Homo sapiens
  CDR3 for beta chain variable domain of TCR clone 300000 (TRBV5-1, TRBJ2-5)
CASSFGGSQETQYF

SEQ ID NO: 600001 - protein, 11 aa, Homo sapiens
  CDR3 for alpha chain variable domain of TCR clone 300001 (TRAV21, TRAJ20)
CAVRDDYKLSF

SEQ ID NO: 600002 - protein, 15 aa, Homo sapiens
  CDR3 for beta chain variable domain of TCR clone 300001 (TRBV4-1, TRBJ2-5)
CASSQWDLYQETQYF

SEQ ID NO: 600003 - protein, 13 aa, Homo sapiens
  CDR3 for alpha chain variable domain of TCR clone 300002 (TRAV12-3, TRAJ13)
CAMTSGGYPKVTF

SEQ ID NO: 600004 - protein, 13 aa, Homo sapiens
  CDR3 for beta chain variable domain of TCR clone 300002 (TRBV20-1, TRBJ2-2)
CSALSGGAGELFF

SEQ ID NO: 600005 - protein, 12 aa, Homo sapiens
  CDR3 for alpha chain variable domain of TCR clone 300003 (TRAV34, TRAJ27)
CGADTNAGKSTF

SEQ ID NO: 600006 - protein, 15 aa, Homo sapiens
  CDR3 for beta chain variable domain of TCR clone 300003 (TRBV19, TRBJ1-5)
CASSIVWADNQPQHF

SEQ ID NO: 600007 - protein, 16 aa, Homo sapiens
  CDR3 for alpha chain variable domain of TCR clone 300004 (TRAV4, TRAJ18)
CCVLLIVGSTLGRLYF

SEQ ID NO: 600008 - protein, 14 aa, Homo sapiens
  CDR3 for beta chain variable domain of TCR clone 300004 (TRBV28, TRBJ2-3)
CASSWRGRADTQYF

SEQ ID NO: 600009 - protein, 16 aa, Homo sapiens
  CDR3 for alpha chain variable domain of TCR clone 300005 (TRAV12-2, TRAJ10)
CAVNRVLTGGGNKLTF

SEQ ID NO: 600010 - protein, 16 aa, Homo sapiens
  CDR3 for beta chain variable domain of TCR clone 300005 (TRBV12-4, TRBJ2-5)
CASSWRPSGDLETQYF

SEQ ID NO: 600011 - protein, 15 aa, Homo sapiens
  CDR3 for alpha chain variable domain of TCR clone 300006 (TRAV34, TRAJ36)
CGAPSRLGGANNLFF

SEQ ID NO: 600012 - protein, 16 aa, Homo sapiens
  CDR3 for beta chain variable domain of TCR clone 300006 (TRBV4-3, TRBJ2-1)
CARSSRRLGSWDEQFF

SEQ ID NO: 600013 - protein, 14 aa, Homo sapiens
  CDR3 for alpha chain variable domain of TCR clone 300007 (TRAV20, TRAJ16)
CAVRFFSDGQKLLF

SEQ ID NO: 600014 - protein, 14 aa, Homo sapiens
  CDR3 for beta chain variable domain of TCR clone 300007 (TRBV12-5, TRBJ2-5)
CASGSRTHQETQYF

SEQ ID NO: 600015 - protein, 14 aa, Homo sapiens
  CDR3 for alpha chain variable domain of TCR clone 300008 (TRAV12-2, TRAJ45)
CAVNIGGGADGLTF

SEQ ID NO: 600016 - protein, 15 aa, Homo sapiens
  CDR3 for beta chain variable domain of TCR clone 300008 (TRBV19, TRBJ2-1)
CASNAQGLAGREQFF

SEQ ID NO: 600017 - protein, 13 aa, Homo sapiens
  CDR3 for alpha chain variable domain of TCR clone 300009 (TRAV3, TRAJ27)
CAVRPPGAGKSTF

SEQ ID NO: 600018 - protein, 14 aa, Homo sapiens
  CDR3 for beta chain variable domain of TCR clone 300009 (TRBV11-2, TRBJ1-2)
CASSLGTANYGYTF

SEQ ID NO: 600019 - protein, 16 aa, Homo sapiens
  CDR3 for alpha chain variable domain of TCR clone 300010 (TRAV13-2, TRAJ53)
CAENANSGGSNYKLTF

SEQ ID NO: 600020 - protein, 19 aa, Homo sapiens
  CDR3 for beta chain variable domain of TCR clone 300010 (TRBV28, TRBJ2-7)
CASSYSGTRRLGWVYEQYF

SEQ ID NO: 600021 - protein, 13 aa, Homo sapiens
  CDR3 for alpha chain variable domain of TCR clone 300011 (TRAV1-1, TRAJ9)
CAAKNTGGFKTIF

SEQ ID NO: 600022 - protein, 14 aa, Homo sapiens
  CDR3 for beta chain variable domain of TCR clone 300011 (TRBV20-1, TRBJ2-1)
CCAQIGGSANEQFF

SEQ ID NO: 600023 - protein, 13 aa, Homo sapiens
  CDR3 for alpha chain variable domain of TCR clone 300012 (TRAV8-3, TRAJ44)
CAVVLGTASKLTF

SEQ ID NO: 600024 - protein, 14 aa, Homo sapiens
  CDR3 for beta chain variable domain of TCR clone 300012 (TRBV11-2, TRBJ2-3)
CASSRLARTDTQYF

SEQ ID NO: 600025 - protein, 15 aa, Homo sapiens
  CDR3 for alpha chain variable domain of TCR clone 300013 (TRAV8-3, TRAJ45)
CASSYSGGGADGPTF

SEQ ID NO: 600026 - protein, 13 aa, Homo sapiens
  CDR3 for beta chain variable domain of TCR clone 300013 (TRBV20-1, TRBJ2-2)
CSASAAGTGELFF

SEQ ID NO: 600027 - protein, 16 aa, Homo sapiens
  CDR3 for alpha chain variable domain of TCR clone 300014 (TRAV12-3, TRAJ58)
CAMTDTEETSGSRLTF

SEQ ID NO: 600028 - protein, 22 aa, Homo sapiens
  CDR3 for beta chain variable domain of TCR clone 300014 (TRBV23-1, TRBJ2-7)
CASSRRRDSGQGYVGGGYEQYF

SEQ ID NO: 600029 - protein, 14 aa, Homo sapiens
  CDR3 for alpha chain variable domain of TCR clone 300015 (TRAV2, TRAJ9)
CAVEDRGGGFKTIF

SEQ ID NO: 600030 - protein, 16 aa, Homo sapiens
  CDR3 for beta chain variable domain of TCR clone 300015 (TRBV5-4, TRBJ2-3)
CASQQPGAGGADTQYF

SEQ ID NO: 600031 - protein, 13 aa, Homo sapiens
  CDR3 for alpha chain variable domain of TCR clone 300016 (TRAV12-1, TRAJ31)
CVVNMNNTARLMF

SEQ ID NO: 600032 - protein, 15 aa, Homo sapiens
  CDR3 for beta chain variable domain of TCR clone 300016 (TRBV4-1, TRBJ1-2)
CASSQGRGAAYGYTF

SEQ ID NO: 600033 - protein, 14 aa, Homo sapiens
  CDR3 for alpha chain variable domain of TCR clone 300017 (TRAV1-2, TRAJ16)
CAVNRFSDGQKLLF

SEQ ID NO: 600034 - protein, 12 aa, Homo sapiens
  CDR3 for beta chain variable domain of TCR clone 300017 (TRBV20-1, TRBJ2-5)
CSALRSQETQYF

SEQ ID NO: 600035 - protein, 16 aa, Homo sapiens
  CDR3 for alpha chain variable domain of TCR clone 300018 (TRAV30, TRAJ24)
CGTEIVDADSWGKFQF

SEQ ID NO: 600036 - protein, 14 aa, Homo sapiens
  CDR3 for beta chain variable domain of TCR clone 300018 (TRBV4-2, TRBJ2-2)
CASRLAGDTGELFF

SEQ ID NO: 600037 - protein, 12 aa, Homo sapiens
  CDR3 for alpha chain variable domain of TCR clone 300019 (TRAV3, TRAJ39)
CAVIEWSNMLTF

SEQ ID NO: 600038 - protein, 14 aa, Homo sapiens
  CDR3 for beta chain variable domain of TCR clone 300019 (TRBV7-8, TRBJ2-3)
CASSFPVGQDTQYF

SEQ ID NO: 600039 - protein, 14 aa, Homo sapiens
  CDR3 for alpha chain variable domain of TCR clone 300020 (TRAV1-2, TRAJ16)
CAVNRFSDGQKLLF

SEQ ID NO: 600040 - protein, 17 aa, Homo sapiens
  CDR3 for beta chain variable domain of TCR clone 300020 (TRBV10-3, TRBJ2-4)
CTSAPSVNKGSKNIQYF

SEQ ID NO: 600041 - protein, 14 aa, Homo sapiens
  CDR3 for alpha chain variable domain of TCR clone 300021 (TRAV17, TRAJ22)
CAMVLSGSARQLTF

SEQ ID NO: 600042 - protein, 13 aa, Homo sapiens
  CDR3 for beta chain variable domain of TCR clone 300021 (TRBV15, TRBJ1-6)
CATSGGLNSPLHF

SEQ ID NO: 600043 - protein, 14 aa, Homo sapiens
  CDR3 for alpha chain variable domain of TCR clone 300022 (TRAV1-2, TRAJ16)
CAVNRFSDVQKLLF

SEQ ID NO: 600044 - protein, 15 aa, Homo sapiens
  CDR3 for beta chain variable domain of TCR clone 300022 (TRBV20-1, TRBJ2-7)
CSARKGLAESYEQYF

SEQ ID NO: 600045 - protein, 13 aa, Homo sapiens
  CDR3 for alpha chain variable domain of TCR clone 300023 (TRAV17, TRAJ7)
CATDNYGNNRLAF

SEQ ID NO: 600046 - protein, 13 aa, Homo sapiens
  CDR3 for beta chain variable domain of TCR clone 300023 (TRBV13, TRBJ2-5)
CASSPEVGETQYF

SEQ ID NO: 600047 - protein, 12 aa, Homo sapiens
  CDR3 for alpha chain variable domain of TCR clone 300024 (TRAV20, TRAJ54)
CAVKEGAQKLVF

SEQ ID NO: 600048 - protein, 17 aa, Homo sapiens
  CDR3 for beta chain variable domain of TCR clone 300024 (TRBV13, TRBJ2-3)
CASSLSRVAGGRNTQYF

SEQ ID NO: 600049 - protein, 19 aa, Homo sapiens
  CDR3 for alpha chain variable domain of TCR clone 300025 (TRAV17, TRAJ40)
TASRAADTASYFCAGKYIF

SEQ ID NO: 600050 - protein, 17 aa, Homo sapiens
  CDR3 for beta chain variable domain of TCR clone 300025 (TRBV11-2, TRBJ2-4)
CASSCLARGGAGDIQYF

SEQ ID NO: 600051 - protein, 11 aa, Homo sapiens
  CDR3 for alpha chain variable domain of TCR clone 300026 (TRAV3, TRAJ21)
CAGGNFNKFYF

SEQ ID NO: 600052 - protein, 15 aa, Homo sapiens
  CDR3 for beta chain variable domain of TCR clone 300026 (TRBV7-9, TRBJ1-5)
CASSLAQGLEGSQHF

SEQ ID NO: 600053 - protein, 12 aa, Homo sapiens
  CDR3 for alpha chain variable domain of TCR clone 300027 (TRAV27, TRAJ9)
CAGESGGFKTIF

SEQ ID NO: 600054 - protein, 16 aa, Homo sapiens
  CDR3 for beta chain variable domain of TCR clone 300027 (TRBV28, TRBJ2-7)
CASSLFFETGGPEQYF

SEQ ID NO: 600055 - protein, 13 aa, Homo sapiens
  CDR3 for alpha chain variable domain of TCR clone 300028 (TRAV12-2, TRAJ6)
CAVNVSRKLHTYI

SEQ ID NO: 600056 - protein, 15 aa, Homo sapiens
  CDR3 for beta chain variable domain of TCR clone 300028 (TRBV28, TRBJ2-4)
CAAGSGTLLMGIRYF

SEQ ID NO: 600057 - protein, 18 aa, Homo sapiens
  CDR3 for alpha chain variable domain of TCR clone 300029 (TRAV13-1, TRAJ52)
CAAKNPNAGGTSYGKLTF

SEQ ID NO: 600058 - protein, 14 aa, Homo sapiens
  CDR3 for beta chain variable domain of TCR clone 300029 (TRBV20-1, TRBJ2-7)
CSAWTALSSYEQYF

SEQ ID NO: 600059 - protein, 12 aa, Homo sapiens
  CDR3 for alpha chain variable domain of TCR clone 300030 (TRAV13-2, TRAJ8)
CAPWLGFQKLVF

SEQ ID NO: 600060 - protein, 14 aa, Homo sapiens
  CDR3 for beta chain variable domain of TCR clone 300030 (TRBV7-2, TRBJ2-6)
CASRQSSGANGLTF

SEQ ID NO: 600061 - protein, 12 aa, Homo sapiens
  CDR3 for alpha chain variable domain of TCR clone 300031 (TRAV1-2, TRAJ33)
CAALDSNYQLIW

SEQ ID NO: 600062 - protein, 16 aa, Homo sapiens
  CDR3 for beta chain variable domain of TCR clone 300031 (TRBV20-1, TRBJ2-4)
CSATSLAELAKNIQYF

SEQ ID NO: 600063 - protein, 15 aa, Homo sapiens
  CDR3 for alpha chain variable domain of TCR clone 300032 (TRAV8-3, TRAJ41)
CAVGSYSNSGYALNF

SEQ ID NO: 600064 - protein, 17 aa, Homo sapiens
  CDR3 for beta chain variable domain of TCR clone 300032 (TRBV25-1, TRBJ2-1)
CASSAYGQGRGVYEQFF

SEQ ID NO: 600065 - protein, 14 aa, Homo sapiens
  CDR3 for alpha chain variable domain of TCR clone 300033 (TRAV8-4, TRAJ5)
CAVSTDTGRRALTF

SEQ ID NO: 600066 - protein, 14 aa, Homo sapiens
  CDR3 for beta chain variable domain of TCR clone 300033 (TRBV2, TRBJ2-1)
CASSEALDGNEQFF

SEQ ID NO: 600067 - protein, 14 aa, Homo sapiens
  CDR3 for alpha chain variable domain of TCR clone 300034 (TRAV13-1, TRAJ35)
CAASKGGFVNVLHC

SEQ ID NO: 600068 - protein, 12 aa, Homo sapiens
  CDR3 for beta chain variable domain of TCR clone 300034 (TRBV11-2, TRBJ2-5)
CASSLVGETQYF

SEQ ID NO: 600069 - protein, 12 aa, Homo sapiens
  CDR3 for alpha chain variable domain of TCR clone 300035 (TRAV3, TRAJ43)
CAVRDPHNDMRF

SEQ ID NO: 600070 - protein, 13 aa, Homo sapiens
  CDR3 for beta chain variable domain of TCR clone 300035 (TRBV7-9, TRBJ1-2)
CASSLRQNYGYTF

SEQ ID NO: 600071 - protein, 14 aa, Homo sapiens
  CDR3 for alpha chain variable domain of TCR clone 300036 (TRAV1-1, TRAJ28)
CAAPSGAGSYQLTF

SEQ ID NO: 600072 - protein, 14 aa, Homo sapiens
  CDR3 for beta chain variable domain of TCR clone 300036 (TRBV7-2, TRBJ2-7)
CASSLDPGPYEQYF

SEQ ID NO: 600073 - protein, 16 aa, Homo sapiens
  CDR3 for alpha chain variable domain of TCR clone 300037 (TRAV16, TRAJ52)
CALSAAGGTSYGKLTF

SEQ ID NO: 600074 - protein, 17 aa, Homo sapiens
  CDR3 for beta chain variable domain of TCR clone 300037 (TRBV11-2, TRBJ2-1)
CASSLYPPGVEYNEQFV

SEQ ID NO: 600075 - protein, 12 aa, Homo sapiens
  CDR3 for alpha chain variable domain of TCR clone 300038 (TRAV35, TRAJ39)
LAPNNAGNMLTF

SEQ ID NO: 600076 - protein, 14 aa, Homo sapiens
  CDR3 for beta chain variable domain of TCR clone 300038 (TRBV7-9, TRBJ2-3)
CASSLEDGTDTQYF

SEQ ID NO: 600077 - protein, 16 aa, Homo sapiens
  CDR3 for alpha chain variable domain of TCR clone 300039 (TRAV3, TRAJ37)
CAVRPHGSGNTGKLIF

SEQ ID NO: 600078 - protein, 16 aa, Homo sapiens
  CDR3 for beta chain variable domain of TCR clone 300039 (TRBV19, TRBJ2-1)
CASSKAGPSTYNEQFF

SEQ ID NO: 600079 - protein, 14 aa, Homo sapiens
  CDR3 for alpha chain variable domain of TCR clone 300040 (TRAV17, TRAJ6)
CAMDASGGSYIPTF

SEQ ID NO: 600080 - protein, 15 aa, Homo sapiens
  CDR3 for beta chain variable domain of TCR clone 300040 (TRBV9, TRBJ2-1)
CASSLAGSSYNEQFF

SEQ ID NO: 600081 - protein, 14 aa, Homo sapiens
  CDR3 for alpha chain variable domain of TCR clone 300041 (TRAV13-1, TRAJ5)
CAASGGTGRRALTF

SEQ ID NO: 600082 - protein, 13 aa, Homo sapiens
  CDR3 for beta chain variable domain of TCR clone 300041 (TRBV28, TRBJ2-5)
CASSWGTQETQYF

SEQ ID NO: 600083 - protein, 18 aa, Homo sapiens
  CDR3 for alpha chain variable domain of TCR clone 300042 (TRAV12-3, TRAJ52)
CAMSVGGAGGTSYGKLTF

SEQ ID NO: 600084 - protein, 14 aa, Homo sapiens
  CDR3 for beta chain variable domain of TCR clone 300042 (TRBV27, TRBJ1-6)
CQSFDRGLGSPLHF

SEQ ID NO: 600085 - protein, 14 aa, Homo sapiens
  CDR3 for alpha chain variable domain of TCR clone 300043 (TRAV8-3, TRAJ6)
CAVGASGGSYIPTF

SEQ ID NO: 600086 - protein, 17 aa, Homo sapiens
  CDR3 for beta chain variable domain of TCR clone 300043 (TRBV18, TRBJ2-2)
CASSPSDPWQNTGELCF

SEQ ID NO: 600087 - protein, 14 aa, Homo sapiens
  CDR3 for alpha chain variable domain of TCR clone 300044 (TRAV8-2, TRAJ45)
CVVSAGVGADGLTF

SEQ ID NO: 600088 - protein, 12 aa, Homo sapiens
  CDR3 for beta chain variable domain of TCR clone 300044 (TRBV12-4, TRBJ2-1)
CASSLVRVEQFF

SEQ ID NO: 600089 - protein, 18 aa, Homo sapiens
  CDR3 for alpha chain variable domain of TCR clone 300045 (TRAV9-2, TRAJ52)
CALSRHNAGGTSYGKLTF

SEQ ID NO: 600090 - protein, 16 aa, Homo sapiens
  CDR3 for beta chain variable domain of TCR clone 300045 (TRBV27, TRBJ2-2)
CASSFRGLVRTGELFF

SEQ ID NO: 600091 - protein, 13 aa, Homo sapiens
  CDR3 for alpha chain variable domain of TCR clone 300046 (TRAV21, TRAJ57)
CAVTQGGSDKLVF

SEQ ID NO: 600092 - protein, 16 aa, Homo sapiens
  CDR3 for beta chain variable domain of TCR clone 300046 (TRBV29-1, TRBJ2-7)
CSVEGAEDGTAYEQYF

SEQ ID NO: 600093 - protein, 13 aa, Homo sapiens
  CDR3 for alpha chain variable domain of TCR clone 300047 (TRAV16, TRAJ58)
CALSIPSGSRLTF

SEQ ID NO: 600094 - protein, 13 aa, Homo sapiens
  CDR3 for beta chain variable domain of TCR clone 300047 (TRBV7-9, TRBJ1-2)
CASSLKQNYGYTF

SEQ ID NO: 600095 - protein, 16 aa, Homo sapiens
  CDR3 for alpha chain variable domain of TCR clone 300048 (TRAV17, TRAJ4)
CATAAHSSGGYNKLIF

SEQ ID NO: 600096 - protein, 14 aa, Homo sapiens
  CDR3 for beta chain variable domain of TCR clone 300048 (TRBV20-1, TRBJ1-1)
CSAQTRTGGTEAFF

SEQ ID NO: 600097 - protein, 18 aa, Homo sapiens
  CDR3 for alpha chain variable domain of TCR clone 300049 (TRAV12-3, TRAJ52)
CAMSVGGAGGTSYGKLTF

SEQ ID NO: 600098 - protein, 16 aa, Homo sapiens
  CDR3 for beta chain variable domain of TCR clone 300049 (TRBV15, TRBJ2-3)
CATSRDLGIVTDTQYF

SEQ ID NO: 600099 - protein, 12 aa, Homo sapiens
  CDR3 for alpha chain variable domain of TCR clone 300050 (TRAV21, TRAJ20)
CAVRRNDYKLSF

SEQ ID NO: 600100 - protein, 18 aa, Homo sapiens
  CDR3 for beta chain variable domain of TCR clone 300050 (TRBV11-2, TRBJ2-3)
CASSLGGASRGAPNTQYF

SEQ ID NO: 600101 - protein, 18 aa, Homo sapiens
  CDR3 for alpha chain variable domain of TCR clone 300051 (TRAV21, TRAJ52)
SAVRPSPAGGTSYGKRTF

SEQ ID NO: 600102 - protein, 13 aa, Homo sapiens
  CDR3 for beta chain variable domain of TCR clone 300051 (TRBV19, TRBJ1-2)
CASSVPGQDGYTF

SEQ ID NO: 600103 - protein, 13 aa, Homo sapiens
  CDR3 for alpha chain variable domain of TCR clone 300052 (TRAV12-2, TRAJ52)
CAVGGTSYGKLTF

SEQ ID NO: 600104 - protein, 14 aa, Homo sapiens
  CDR3 for beta chain variable domain of TCR clone 300052 (TRBV19, TRBJ2-1)
GASPTFVLSGEQFF

SEQ ID NO: 600105 - protein, 13 aa, Homo sapiens
  CDR3 for alpha chain variable domain of TCR clone 300053 (TRAV3, TRAJ33)
CAVRDRSNYQLIW

SEQ ID NO: 600106 - protein, 16 aa, Homo sapiens
  CDR3 for beta chain variable domain of TCR clone 300053 (TRBV4-2, TRBJ2-7)
CASSRGRGTSSYEQYF

SEQ ID NO: 600107 - protein, 16 aa, Homo sapiens
  CDR3 for alpha chain variable domain of TCR clone 300054 (TRAV20, TRAJ38)
CAVQASNAGNNRKLIW

SEQ ID NO: 600108 - protein, 16 aa, Homo sapiens
  CDR3 for beta chain variable domain of TCR clone 300054 (TRBV7-8, TRBJ2-6)
CASRLGDSSGANVLTF

SEQ ID NO: 600109 - protein, 14 aa, Homo sapiens
  CDR3 for alpha chain variable domain of TCR clone 300055 (TRAV35, TRAJ34)
CAGRGTPTSAPLGL

SEQ ID NO: 600110 - protein, 12 aa, Homo sapiens
  CDR3 for beta chain variable domain of TCR clone 300055 (TRBV11-2, TRBJ2-2)
CASSLGGGELFF

SEQ ID NO: 600111 - protein, 13 aa, Homo sapiens
  CDR3 for alpha chain variable domain of TCR clone 300056 (TRAV20, TRAJ24)
CAVQGLHWGKLQF

SEQ ID NO: 600112 - protein, 13 aa, Homo sapiens
  CDR3 for beta chain variable domain of TCR clone 300056 (TRBV10-3, TRBJ2-7)
CASKLAVNYEQYF

SEQ ID NO: 600113 - protein, 14 aa, Homo sapiens
  CDR3 for alpha chain variable domain of TCR clone 300057 (TRAV8-4, TRAJ38)
CARLNAGNNRKLIS

SEQ ID NO: 600114 - protein, 12 aa, Homo sapiens
  CDR3 for beta chain variable domain of TCR clone 300057 (TRBV6-1, TRBJ2-7)
CASSEPLYEQYF

SEQ ID NO: 600115 - protein, 14 aa, Homo sapiens
  CDR3 for alpha chain variable domain of TCR clone 300058 (TRAV3, TRAJ17)
CAVRDAAAGNKLTL

SEQ ID NO: 600116 - protein, 15 aa, Homo sapiens
  CDR3 for beta chain variable domain of TCR clone 300058 (TRBV9, TRBJ1-6)
CASSVAGTGDSPLHF

SEQ ID NO: 600117 - protein, 16 aa, Homo sapiens
  CDR3 for alpha chain variable domain of TCR clone 300059 (TRAV3, TRAJ10)
CAVRDMRAGGGNKLTF

SEQ ID NO: 600118 - protein, 18 aa, Homo sapiens
  CDR3 for beta chain variable domain of TCR clone 300059 (TRBV7-9, TRBJ2-3)
CARSPRGTSGTGTDTQYF

SEQ ID NO: 600119 - protein, 13 aa, Homo sapiens
  CDR3 for alpha chain variable domain of TCR clone 300060 (TRAV12-1, TRAJ7)
CVVNRRGNNRLAF

SEQ ID NO: 600120 - protein, 15 aa, Homo sapiens
  CDR3 for beta chain variable domain of TCR clone 300060 (TRBV27, TRBJ2-3)
CASSLGLAATDTQYF

SEQ ID NO: 600121 - protein, 11 aa, Homo sapiens
  CDR3 for alpha chain variable domain of TCR clone 300061 (TRAV12-1, TRAJ30)
CVVNSQDKIIF

SEQ ID NO: 600122 - protein, 12 aa, Homo sapiens
  CDR3 for beta chain variable domain of TCR clone 300061 (TRBV27, TRBJ2-2)
CASKRLTGELFF

SEQ ID NO: 600123 - protein, 14 aa, Homo sapiens
  CDR3 for alpha chain variable domain of TCR clone 300062 (TRAV12-3, TRAJ10)
SHLPLTGGGNKLIF

SEQ ID NO: 600124 - protein, 13 aa, Homo sapiens
  CDR3 for beta chain variable domain of TCR clone 300062 (TRBV7-6, TRBJ2-3)
CASSLAVGDTQYF

SEQ ID NO: 600125 - protein, 16 aa, Homo sapiens
  CDR3 for alpha chain variable domain of TCR clone 300063 (TRAV8-1, TRAJ40)
CAVNGGGRSGTYKYIF

SEQ ID NO: 600126 - protein, 16 aa, Homo sapiens
  CDR3 for beta chain variable domain of TCR clone 300063 (TRBV7-2, TRBJ1-2)
CASSSNQDRRGHGYTF

SEQ ID NO: 600127 - protein, 14 aa, Homo sapiens
  CDR3 for alpha chain variable domain of TCR clone 300064 (TRAV8-4, TRAJ9)
CAVGINTGGFKTIF

SEQ ID NO: 600128 - protein, 15 aa, Homo sapiens
  CDR3 for beta chain variable domain of TCR clone 300064 (TRBV4-1, TRBJ1-4)
CASSDTGGTNEKLFF

SEQ ID NO: 600129 - protein, 13 aa, Homo sapiens
  CDR3 for alpha chain variable domain of TCR clone 300065 (TRAV1-1, TRAJ31)
CASYLNNNARLMF

SEQ ID NO: 600130 - protein, 14 aa, Homo sapiens
  CDR3 for beta chain variable domain of TCR clone 300065 (TRBV5-7, TRBJ2-3)
CASGYFGQVHTQYF

SEQ ID NO: 600131 - protein, 16 aa, Homo sapiens
  CDR3 for alpha chain variable domain of TCR clone 300066 (TRAV27, TRAJ52)
CAGAPAGGTSYGKLTF

SEQ ID NO: 600132 - protein, 12 aa, Homo sapiens
  CDR3 for beta chain variable domain of TCR clone 300066 (TRBV27, TRBJ2-1)
CASRGFYNEQFF

SEQ ID NO: 600133 - protein, 14 aa, Homo sapiens
  CDR3 for alpha chain variable domain of TCR clone 300067 (TRAV26-1, TRAJ38)
CIADNAGNNRKLIC

SEQ ID NO: 600134 - protein, 16 aa, Homo sapiens
  CDR3 for beta chain variable domain of TCR clone 300067 (TRBV19, TRBJ2-1)
CASSKAGPSSYNEQFF

SEQ ID NO: 600135 - protein, 18 aa, Homo sapiens
  CDR3 for alpha chain variable domain of TCR clone 300068 (TRAV13-1, TRAJ52)
CAAKNTNAGGTSYGNLTF

SEQ ID NO: 600136 - protein, 15 aa, Homo sapiens
  CDR3 for beta chain variable domain of TCR clone 300068 (TRBV6-1, TRBJ2-3)
CASSERGGITDTQYF

SEQ ID NO: 600137 - protein, 16 aa, Homo sapiens
  CDR3 for alpha chain variable domain of TCR clone 300069 (TRAV8-3, TRAJ44)
CAVGAPNTGTASKLTF

SEQ ID NO: 600138 - protein, 15 aa, Homo sapiens
  CDR3 for beta chain variable domain of TCR clone 300069 (TRBV27, TRBJ1-5)
CASTFNRGSNQPQHF

SEQ ID NO: 600139 - protein, 15 aa, Homo sapiens
  CDR3 for alpha chain variable domain of TCR clone 300070 (TRAV27, TRAJ38)
CTGRFNAGNNRKLLW

SEQ ID NO: 600140 - protein, 13 aa, Homo sapiens
  CDR3 for beta chain variable domain of TCR clone 300070 (TRBV20-1, TRBJ2-1)
TSGALPPGNEQFF

SEQ ID NO: 600141 - protein, 13 aa, Homo sapiens
  CDR3 for alpha chain variable domain of TCR clone 300071 (TRAV8-6, TRAJ21)
CAVSPSSLNKFYF

SEQ ID NO: 600142 - protein, 18 aa, Homo sapiens
  CDR3 for beta chain variable domain of TCR clone 300071 (TRBV7-9, TRBJ2-5)
CASSLHGARDPVLRARHA

SEQ ID NO: 600143 - protein, 14 aa, Homo sapiens
  CDR3 for alpha chain variable domain of TCR clone 300072 (TRAV13-2, TRAJ43)
CAEIPTCNNNDMRF

SEQ ID NO: 600144 - protein, 15 aa, Homo sapiens
  CDR3 for beta chain variable domain of TCR clone 300072 (TRBV7-9, TRBJ2-2)
CASGPLDTFPGELSF

SEQ ID NO: 600145 - protein, 16 aa, Homo sapiens
  CDR3 for alpha chain variable domain of TCR clone 300073 (TRAV12-3, TRAJ53)
CAISPGSGGSNYKLTF

SEQ ID NO: 600146 - protein, 17 aa, Homo sapiens
  CDR3 for beta chain variable domain of TCR clone 300073 (TRBV28, TRBJ2-7)
CASSPLRGRRWKGGQYF

SEQ ID NO: 600147 - protein, 18 aa, Homo sapiens
  CDR3 for alpha chain variable domain of TCR clone 300074 (TRAV21, TRAJ52)
CAVRPSLAGGTSYGKLTF

SEQ ID NO: 600148 - protein, 14 aa, Homo sapiens
  CDR3 for beta chain variable domain of TCR clone 300074 (TRBV4-2, TRBJ1-5)
CASSRDRGNQPQHF

SEQ ID NO: 600149 - protein, 16 aa, Homo sapiens
  CDR3 for alpha chain variable domain of TCR clone 300075 (TRAV8-3, TRAJ4)
CAVGAAGGYNKRILEQ

SEQ ID NO: 600150 - protein, 15 aa, Homo sapiens
  CDR3 for beta chain variable domain of TCR clone 300075 (TRBV6-5, TRBJ2-1)
CASSYDAGAGNEQFF

SEQ ID NO: 600151 - protein, 15 aa, Homo sapiens
  CDR3 for alpha chain variable domain of TCR clone 300076 (TRAV26-1, TRAJ3)
CIVRSGYSSASKIIF

SEQ ID NO: 600152 - protein, 15 aa, Homo sapiens
  CDR3 for beta chain variable domain of TCR clone 300076 (TRBV7-3, TRBJ2-1)
CASSPTGGGEVEQFF

SEQ ID NO: 600153 - protein, 16 aa, Homo sapiens
  CDR3 for alpha chain variable domain of TCR clone 300077 (TRAV23/DV6, TRAJ9)
CAASIGGNTGGFKTIF

SEQ ID NO: 600154 - protein, 15 aa, Homo sapiens
  CDR3 for beta chain variable domain of TCR clone 300077 (TRBV19, TRBJ2-4)
CASSDGGGAKNIQYF

SEQ ID NO: 600155 - protein, 14 aa, Homo sapiens
  CDR3 for alpha chain variable domain of TCR clone 300078 (TRAV17, TRAJ37)
CATDGSSNTGKLIF

SEQ ID NO: 600156 - protein, 16 aa, Homo sapiens
  CDR3 for beta chain variable domain of TCR clone 300078 (TRBV7-3, TRBJ2-2)
CASSLKRGTLSGELFF

SEQ ID NO: 600157 - protein, 15 aa, Homo sapiens
  CDR3 for alpha chain variable domain of TCR clone 300079 (TRAV21, TRAJ53)
CATLNSGGSNYKLTF

SEQ ID NO: 600158 - protein, 12 aa, Homo sapiens
  CDR3 for beta chain variable domain of TCR clone 300079 (TRBV14, TRBJ2-4)
CASSNLKSTQYF

SEQ ID NO: 600159 - protein, 14 aa, Homo sapiens
  CDR3 for alpha chain variable domain of TCR clone 300080 (TRAV1-2, TRAJ16)
CAVNRFSDGQKLLF

SEQ ID NO: 600160 - protein, 12 aa, Homo sapiens
  CDR3 for beta chain variable domain of TCR clone 300080 (TRBV11-2, TRBJ2-1)
CASSPGNNEQFV

SEQ ID NO: 600161 - protein, 10 aa, Homo sapiens
  CDR3 for alpha chain variable domain of TCR clone 300081 (TRAV13-1, TRAJ26)
CAPYGQNFVF

SEQ ID NO: 600162 - protein, 12 aa, Homo sapiens
  CDR3 for beta chain variable domain of TCR clone 300081 (TRBV7-9, TRBJ2-7)
CASSIKREEQYF

SEQ ID NO: 600163 - protein, 14 aa, Homo sapiens
  CDR3 for alpha chain variable domain of TCR clone 300082 (TRAV12-3, TRAJ54)
CAMSALQGAQKLVV

SEQ ID NO: 600164 - protein, 15 aa, Homo sapiens
  CDR3 for beta chain variable domain of TCR clone 300082 (TRBV19, TRBJ2-4)
CASSTPGIAKNIQYF

SEQ ID NO: 600165 - protein, 12 aa, Homo sapiens
  CDR3 for alpha chain variable domain of TCR clone 300083 (TRAV2, TRAJ15)
CCGLQAGTALIF

SEQ ID NO: 600166 - protein, 18 aa, Homo sapiens
  CDR3 for beta chain variable domain of TCR clone 300083 (TRBV11-2, TRBJ2-3)
CASSLGGASRGAPNTQYF

SEQ ID NO: 600167 - protein, 13 aa, Homo sapiens
  CDR3 for alpha chain variable domain of TCR clone 300084 (TRAV3, TRAJ15)
CAVRDQAGTALIF

SEQ ID NO: 600168 - protein, 14 aa, Homo sapiens
  CDR3 for beta chain variable domain of TCR clone 300084 (TRBV11-3, TRBJ2-1)
CASSATTSGSIQFF

SEQ ID NO: 600169 - protein, 14 aa, Homo sapiens
  CDR3 for alpha chain variable domain of TCR clone 300085 (TRAV36/DV7, TRAJ48)
FAQRRDFGNEKLTF

SEQ ID NO: 600170 - protein, 14 aa, Homo sapiens
  CDR3 for beta chain variable domain of TCR clone 300085 (TRBV28, TRBJ2-4)
CASTQVTGVNIQYF

SEQ ID NO: 600171 - protein, 11 aa, Homo sapiens
  CDR3 for alpha chain variable domain of TCR clone 300086 (TRAV1-1, TRAJ23)
CAVSQGGKLNF

SEQ ID NO: 600172 - protein, 20 aa, Homo sapiens
  CDR3 for beta chain variable domain of TCR clone 300086 (TRBV7-8, TRBJ2-2)
CASSHLFPGPTIHITGELFF

SEQ ID NO: 600173 - protein, 11 aa, Homo sapiens
  CDR3 for alpha chain variable domain of TCR clone 300087 (TRAV1-1, TRAJ23)
CAVRQGGKLIF

SEQ ID NO: 600174 - protein, 16 aa, Homo sapiens
  CDR3 for beta chain variable domain of TCR clone 300087 (TRBV27, TRBJ2-2)
CTSSFRGLVRTGELFF

SEQ ID NO: 600175 - protein, 14 aa, Homo sapiens
  CDR3 for alpha chain variable domain of TCR clone 300088 (TRAV12-3, TRAJ10)
SHLPLTGGGNKLTF

SEQ ID NO: 600176 - protein, 15 aa, Homo sapiens
  CDR3 for beta chain variable domain of TCR clone 300088 (TRBV20-1, TRBJ2-7)
RSAREGRDSLYEQYF

SEQ ID NO: 600177 - protein, 13 aa, Homo sapiens
  CDR3 for alpha chain variable domain of TCR clone 300089 (TRAV8-3, TRAJ4)
WVFYSGGYNKLIY

SEQ ID NO: 600178 - protein, 14 aa, Homo sapiens
  CDR3 for beta chain variable domain of TCR clone 300089 (TRBV7-9, TRBJ2-3)
CASSLEDGTDTQYF

SEQ ID NO: 600179 - protein, 11 aa, Homo sapiens
  CDR3 for alpha chain variable domain of TCR clone 300090 (TRAV12-3, TRAJ43)
CAMSVSNDMRF

SEQ ID NO: 600180 - protein, 14 aa, Homo sapiens
  CDR3 for beta chain variable domain of TCR clone 300090 (TRBV12-5, TRBJ2-5)
CASGSRTHQETQYL

SEQ ID NO: 600181 - protein, 15 aa, Homo sapiens
  CDR3 for alpha chain variable domain of TCR clone 300091 (TRAV12-2, TRAJ9)
CAVNNERTGGFKTIF

SEQ ID NO: 600182 - protein, 14 aa, Homo sapiens
  CDR3 for beta chain variable domain of TCR clone 300091 (TRBV4-1, TRBJ1-4)
CASSQGRKNEKLFF

SEQ ID NO: 600183 - protein, 10 aa, Homo sapiens
  CDR3 for alpha chain variable domain of TCR clone 300092 (TRAV29/DV5, TRAJ48)
FAAGGEKLTF

SEQ ID NO: 600184 - protein, 14 aa, Homo sapiens
  CDR3 for beta chain variable domain of TCR clone 300092 (TRBV7-9, TRBJ2-5)
CASSLAPDQETQYF

SEQ ID NO: 600185 - protein, 13 aa, Homo sapiens
  CDR3 for alpha chain variable domain of TCR clone 300093 (TRAV12-1, TRAJ26)
CVVRRNYGQNFVF

SEQ ID NO: 600186 - protein, 14 aa, Homo sapiens
  CDR3 for beta chain variable domain of TCR clone 300093 (TRBV7-8, TRBJ2-3)
CASSFPDGQDTQYF

SEQ ID NO: 600187 - protein, 14 aa, Homo sapiens
  CDR3 for alpha chain variable domain of TCR clone 300094 (TRAV12-2, TRAJ13)
CAVKKTGGYQKVTF

SEQ ID NO: 600188 - protein, 16 aa, Homo sapiens
  CDR3 for beta chain variable domain of TCR clone 300094 (TRBV4-2, TRBJ2-5)
CASSQELVGSQETQHF

SEQ ID NO: 600189 - protein, 17 aa, Homo sapiens
  CDR3 for alpha chain variable domain of TCR clone 300095 (TRAV3, TRAJ6)
CAVRDGPRAGGSYIPTF

SEQ ID NO: 600190 - protein, 16 aa, Homo sapiens
  CDR3 for beta chain variable domain of TCR clone 300095 (TRBV5-1, TRBJ2-5)
CASSLRRTSGQETQYF

SEQ ID NO: 600191 - protein, 10 aa, Homo sapiens
  CDR3 for alpha chain variable domain of TCR clone 300096 (TRAV24, TRAJ53)
SGGSNYKLTF

SEQ ID NO: 600192 - protein, 14 aa, Homo sapiens
  CDR3 for beta chain variable domain of TCR clone 300096 (TRBV7-3, TRBJ2-1)
CASSTSGGWDEQFF

SEQ ID NO: 600193 - protein, 14 aa, Homo sapiens
  CDR3 for alpha chain variable domain of TCR clone 300097 (TRAV12-3, TRAJ56)
CAMSVTGANSKLTF

SEQ ID NO: 600194 - protein, 17 aa, Homo sapiens
  CDR3 for beta chain variable domain of TCR clone 300097 (TRBV20-1, TRBJ2-3)
CSASLLDRGGSADTQYF

SEQ ID NO: 600195 - protein, 15 aa, Homo sapiens
  CDR3 for alpha chain variable domain of TCR clone 300098 (TRAV3, TRAJ13)
CAVRDIAGGYQKVTF

SEQ ID NO: 600196 - protein, 13 aa, Homo sapiens
  CDR3 for beta chain variable domain of TCR clone 300098 (TRBV2, TRBJ2-2)
CASGKKNTGELFF

SEQ ID NO: 600197 - protein, 14 aa, Homo sapiens
  CDR3 for alpha chain variable domain of TCR clone 300099 (TRAV1-2, TRAJ16)
CAVNRFSDGQKLLF

SEQ ID NO: 600198 - protein, 17 aa, Homo sapiens
  CDR3 for beta chain variable domain of TCR clone 300099 (TRBV20-1, TRBJ2-1)
CSASSSGLAGSYNEQCF

SEQ ID NO: 600199 - protein, 15 aa, Homo sapiens
  CDR3 for alpha chain variable domain of TCR clone 300100 (TRAV13-1, TRAJ11)
CAASNRNSGYSTLTF

SEQ ID NO: 600200 - protein, 11 aa, Homo sapiens
  CDR3 for beta chain variable domain of TCR clone 300100 (TRBV20-1, TRBJ2-7)
GSARLSYEQYF

SEQ ID NO: 600201 - protein, 15 aa, Homo sapiens
  CDR3 for alpha chain variable domain of TCR clone 300101 (TRAV23/DV6, TRAJ45)
CAASARGGGADGLTL

SEQ ID NO: 600202 - protein, 15 aa, Homo sapiens
  CDR3 for beta chain variable domain of TCR clone 300101 (TRBV3-1, TRBJ2-5)
CASSRGQASWKTQYF

SEQ ID NO: 600203 - protein, 16 aa, Homo sapiens
  CDR3 for alpha chain variable domain of TCR clone 300102 (TRAV17, TRAJ28)
CATASVSGAGSYQLAF

SEQ ID NO: 600204 - protein, 11 aa, Homo sapiens
  CDR3 for beta chain variable domain of TCR clone 300102 (TRBV7-9, TRBJ2-5)
CASSLGETQYF

SEQ ID NO: 600205 - protein, 16 aa, Homo sapiens
  CDR3 for alpha chain variable domain of TCR clone 300103 (TRAV12-3, TRAJ53)
CAMSPGSGGSNYKLPF

SEQ ID NO: 600206 - protein, 11 aa, Homo sapiens
  CDR3 for beta chain variable domain of TCR clone 300103 (TRBV29-1, TRBJ2-5)
CSEDRTGTQYF

SEQ ID NO: 600207 - protein, 14 aa, Homo sapiens
  CDR3 for alpha chain variable domain of TCR clone 300104 (TRAV13-2, TRAJ9)
CAENSFTGGFKTIF

SEQ ID NO: 600208 - protein, 13 aa, Homo sapiens
  CDR3 for beta chain variable domain of TCR clone 300104 (TRBV20-1, TRBJ1-1)
CSARGGGNTEAFF

SEQ ID NO: 600209 - protein, 12 aa, Homo sapiens
  CDR3 for alpha chain variable domain of TCR clone 300105 (TRAV25, TRAJ29)
CRAVCGNTPLVF

SEQ ID NO: 600210 - protein, 15 aa, Homo sapiens
  CDR3 for beta chain variable domain of TCR clone 300105 (TRBV29-1, TRBJ2-1)
CSVRTSLSSYNEQFF

SEQ ID NO: 600211 - protein, 14 aa, Homo sapiens
  CDR3 for alpha chain variable domain of TCR clone 300106 (TRAV13-1, TRAJ20)
CAARPGSNDYKLSF

SEQ ID NO: 600212 - protein, 13 aa, Homo sapiens
  CDR3 for beta chain variable domain of TCR clone 300106 (TRBV12-4, TRBJ1-3)
CASSLASGNTIYF

SEQ ID NO: 600213 - protein, 16 aa, Homo sapiens
  CDR3 for alpha chain variable domain of TCR clone 300107 (TRAV30, TRAJ24)
CCTEIVDADSWGKFQF

SEQ ID NO: 600214 - protein, 14 aa, Homo sapiens
  CDR3 for beta chain variable domain of TCR clone 300107 (TRBV12-5, TRBJ2-5)
CASGSRTHQETQYL

SEQ ID NO: 600215 - protein, 14 aa, Homo sapiens
  CDR3 for alpha chain variable domain of TCR clone 300108 (TRAV17, TRAJ45)
CATASGGGADGLTF

SEQ ID NO: 600216 - protein, 15 aa, Homo sapiens
  CDR3 for beta chain variable domain of TCR clone 300108 (TRBV11-2, TRBJ2-1)
CASSRSRGLMYEQFF

SEQ ID NO: 600217 - protein, 11 aa, Homo sapiens
  CDR3 for alpha chain variable domain of TCR clone 300109 (TRAV4, TRAJ31)
CLVGDNARLMF

SEQ ID NO: 600218 - protein, 14 aa, Homo sapiens
  CDR3 for beta chain variable domain of TCR clone 300109 (TRBV28, TRBJ2-2)
CASTRRSGDGELFF

SEQ ID NO: 600219 - protein, 10 aa, Homo sapiens
  CDR3 for alpha chain variable domain of TCR clone 300110 (TRAV8-4, TRAJ43)
CAVSADDMRF

SEQ ID NO: 600220 - protein, 17 aa, Homo sapiens
  CDR3 for beta chain variable domain of TCR clone 300110 (TRBV20-1, TRBJ2-1)
CSARDPLAGVWDNEQFF

SEQ ID NO: 600221 - protein, 12 aa, Homo sapiens
  CDR3 for alpha chain variable domain of TCR clone 300111 (TRAV12-3, TRAJ17)
CAMTLTGNKLTF

SEQ ID NO: 600222 - protein, 15 aa, Homo sapiens
  CDR3 for beta chain variable domain of TCR clone 300111 (TRBV29-1, TRBJ2-6)
CSVGDRGSGANVLTF

SEQ ID NO: 600223 - protein, 16 aa, Homo sapiens
  CDR3 for alpha chain variable domain of TCR clone 300112 (TRAV23/DV6, TRAJ58)
CSKITKGETSGSRLTF

SEQ ID NO: 600224 - protein, 14 aa, Homo sapiens
  CDR3 for beta chain variable domain of TCR clone 300112 (TRBV7-3, TRBJ2-1)
CASSLAGGTNEQFF

SEQ ID NO: 600225 - protein, 12 aa, Homo sapiens
  CDR3 for alpha chain variable domain of TCR clone 300113 (TRAV12-2, TRAJ13)
CAPEGGYQKVTF

SEQ ID NO: 600226 - protein, 14 aa, Homo sapiens
  CDR3 for beta chain variable domain of TCR clone 300113 (TRBV7-2, TRBJ2-7)
CASSPKTSFYEQYF

SEQ ID NO: 600227 - protein, 16 aa, Homo sapiens
  CDR3 for alpha chain variable domain of TCR clone 300114 (TRAV3, TRAJ37)
CAVRGKGSGNTGKLIV

SEQ ID NO: 600228 - protein, 13 aa, Homo sapiens
  CDR3 for beta chain variable domain of TCR clone 300114 (TRBV14, TRBJ2-7)
CASSQDRRYEQYF

SEQ ID NO: 600229 - protein, 14 aa, Homo sapiens
  CDR3 for alpha chain variable domain of TCR clone 300115 (TRAV38-2/DV8, TRAJ54)
AAMYQIQGAQKLVF

SEQ ID NO: 600230 - protein, 13 aa, Homo sapiens
  CDR3 for beta chain variable domain of TCR clone 300115 (TRBV4-2, TRBJ1-1)
CASSQAGNTEAFF

SEQ ID NO: 600231 - protein, 16 aa, Homo sapiens
  CDR3 for alpha chain variable domain of TCR clone 300116 (TRAV1-2, TRAJ10)
CAVRGVLTGGGNKLTF

SEQ ID NO: 600232 - protein, 16 aa, Homo sapiens
  CDR3 for beta chain variable domain of TCR clone 300116 (TRBV12-4, TRBJ2-5)
CASSFFVRGRQETQYF

SEQ ID NO: 600233 - protein, 12 aa, Homo sapiens
  CDR3 for alpha chain variable domain of TCR clone 300117 (TRAV12-3, TRAJ17)
CAMTLTRNKLTF

SEQ ID NO: 600234 - protein, 15 aa, Homo sapiens
  CDR3 for beta chain variable domain of TCR clone 300117 (TRBV20-1, TRBJ2-7)
CSARDLVSGMDEQYF

SEQ ID NO: 600235 - protein, 12 aa, Homo sapiens
  CDR3 for alpha chain variable domain of TCR clone 300118 (TRAV13-2, TRAJ8)
CAPWLGFQKLVF

SEQ ID NO: 600236 - protein, 16 aa, Homo sapiens
  CDR3 for beta chain variable domain of TCR clone 300118 (TRBV5-1, TRBJ2-7)
CASSWEGLAGLYEQYF

SEQ ID NO: 600237 - protein, 15 aa, Homo sapiens
  CDR3 for alpha chain variable domain of TCR clone 300119 (TRAV8-3, TRAJ45)
CASSYSGGGADGLTF

SEQ ID NO: 600238 - protein, 14 aa, Homo sapiens
  CDR3 for beta chain variable domain of TCR clone 300119 (TRBV28, TRBJ1-5)
CASSLGVLVKPQHF

SEQ ID NO: 600239 - protein, 18 aa, Homo sapiens
  CDR3 for alpha chain variable domain of TCR clone 300120 (TRAV21, TRAJ52)
CAVRPSPAGGTSHGKLTF

SEQ ID NO: 600240 - protein, 14 aa, Homo sapiens
  CDR3 for beta chain variable domain of TCR clone 300120 (TRBV4-1, TRBJ2-2)
CASSQAENTGELFF

SEQ ID NO: 600241 - protein, 15 aa, Homo sapiens
  CDR3 for alpha chain variable domain of TCR clone 300121 (TRAV2, TRAJ9)
CAVEDRGTGGFTTIF

SEQ ID NO: 600242 - protein, 16 aa, Homo sapiens
  CDR3 for beta chain variable domain of TCR clone 300121 (TRBV24-1, TRBJ2-3)
CATSVPGTGATDTQYF

SEQ ID NO: 600243 - protein, 11 aa, Homo sapiens
  CDR3 for alpha chain variable domain of TCR clone 300122 (TRAV9-2, TRAJ7)
CALSGNNRLAF

SEQ ID NO: 600244 - protein, 17 aa, Homo sapiens
  CDR3 for beta chain variable domain of TCR clone 300122 (TRBV20-1, TRBJ2-2)
CSASGSGQGGLTGELFF

SEQ ID NO: 600245 - protein, 14 aa, Homo sapiens
  CDR3 for alpha chain variable domain of TCR clone 300123 (TRAV27, TRAJ58)
CAGDGETSGSRLTF

SEQ ID NO: 600246 - protein, 13 aa, Homo sapiens
  CDR3 for beta chain variable domain of TCR clone 300123 (TRBV11-3, TRBJ2-7)
CASSLDKLYEQYF

SEQ ID NO: 600247 - protein, 18 aa, Homo sapiens
  CDR3 for alpha chain variable domain of TCR clone 300124 (TRAV13-1, TRAJ52)
WAAKNPNAGGTSYGKLKF

SEQ ID NO: 600248 - protein, 15 aa, Homo sapiens
  CDR3 for beta chain variable domain of TCR clone 300124 (TRBV6-1, TRBJ2-3)
CASSERGGITDTQYF

SEQ ID NO: 600249 - protein, 12 aa, Homo sapiens
  CDR3 for alpha chain variable domain of TCR clone 300125 (TRAV16, TRAJ10)
CSRTGGGNKLTF

SEQ ID NO: 600250 - protein, 15 aa, Homo sapiens
  CDR3 for beta chain variable domain of TCR clone 300125 (TRBV7-2, TRBJ2-1)
CASTHGTGIYNEQFF

SEQ ID NO: 600251 - protein, 14 aa, Homo sapiens
  CDR3 for alpha chain variable domain of TCR clone 300126 (TRAV35, TRAJ33)
CWPRGRDSNYQLIW

SEQ ID NO: 600252 - protein, 16 aa, Homo sapiens
  CDR3 for beta chain variable domain of TCR clone 300126 (TRBV2, TRBJ2-1)
CASSVGGSLSYNEQFF

SEQ ID NO: 600253 - protein, 13 aa, Homo sapiens
  CDR3 for alpha chain variable domain of TCR clone 300127 (TRAV12-2, TRAJ37)
CAGGSGNTGKLIF

SEQ ID NO: 600254 - protein, 13 aa, Homo sapiens
  CDR3 for beta chain variable domain of TCR clone 300127 (TRBV12-4, TRBJ1-2)
CASSLRQGKGYTF

SEQ ID NO: 600255 - protein, 15 aa, Homo sapiens
  CDR3 for alpha chain variable domain of TCR clone 300128 (TRAV3, TRAJ5)
CAVSDLDTGRRALPF

SEQ ID NO: 600256 - protein, 13 aa, Homo sapiens
  CDR3 for beta chain variable domain of TCR clone 300128 (TRBV12-4, TRBJ2-7)
CASSPTETYEQYF

SEQ ID NO: 600257 - protein, 14 aa, Homo sapiens
  CDR3 for alpha chain variable domain of TCR clone 300129 (TRAV26-1, TRAJ34)
CIVRVAYNTDKLIS

SEQ ID NO: 600258 - protein, 16 aa, Homo sapiens
  CDR3 for beta chain variable domain of TCR clone 300129 (TRBV7-3, TRBJ2-2)
CASSLKRGTLSGELFF

SEQ ID NO: 600259 - protein, 15 aa, Homo sapiens
  CDR3 for alpha chain variable domain of TCR clone 300130 (TRAV4, TRAJ39)
FLVGPNNNAGNMLTF

SEQ ID NO: 600260 - protein, 15 aa, Homo sapiens
  CDR3 for beta chain variable domain of TCR clone 300130 (TRBV19, TRBJ1-1)
CASTSGQIQNTEAFF

SEQ ID NO: 600261 - protein, 15 aa, Homo sapiens
  CDR3 for alpha chain variable domain of TCR clone 300131 (TRAV2, TRAJ9)
CAVEGRGTGGFKSIF

SEQ ID NO: 600262 - protein, 14 aa, Homo sapiens
  CDR3 for beta chain variable domain of TCR clone 300131 (TRBV11-2, TRBJ2-7)
CASSLGAGAYEQYF

SEQ ID NO: 600263 - protein, 13 aa, Homo sapiens
  CDR3 for alpha chain variable domain of TCR clone 300132 (TRAV2, TRAJ40)
CAVVTSGTYKYIF

SEQ ID NO: 600264 - protein, 15 aa, Homo sapiens
  CDR3 for beta chain variable domain of TCR clone 300132 (TRBV29-1, TRBJ2-5)
CSVAGASGTQETQYF

SEQ ID NO: 600265 - protein, 12 aa, Homo sapiens
  CDR3 for alpha chain variable domain of TCR clone 300133 (TRAV3, TRAJ27)
CAVRDKAGESTF

SEQ ID NO: 600266 - protein, 14 aa, Homo sapiens
  CDR3 for beta chain variable domain of TCR clone 300133 (TRBV5-1, TRBJ1-2)
CASSVDSTNYGYTF

SEQ ID NO: 600267 - protein, 15 aa, Homo sapiens
  CDR3 for alpha chain variable domain of TCR clone 300134 (TRAV27, TRAJ38)
CAARRNAGNNCKLIW

SEQ ID NO: 600268 - protein, 14 aa, Homo sapiens
  CDR3 for beta chain variable domain of TCR clone 300134 (TRBV7-2, TRBJ2-7)
CASSPRDGAYEQYF

SEQ ID NO: 600269 - protein, 13 aa, Homo sapiens
  CDR3 for alpha chain variable domain of TCR clone 300135 (TRAV1-2, TRAJ11)
CAVRMEGYSTLTF

SEQ ID NO: 600270 - protein, 14 aa, Homo sapiens
  CDR3 for beta chain variable domain of TCR clone 300135 (TRBV25-1, TRBJ1-1)
CASTHLGGNTEAFF

SEQ ID NO: 600271 - protein, 15 aa, Homo sapiens
  CDR3 for alpha chain variable domain of TCR clone 300136 (TRAV8-4, TRAJ37)
CAVSVSPSNTGKLIF

SEQ ID NO: 600272 - protein, 12 aa, Homo sapiens
  CDR3 for beta chain variable domain of TCR clone 300136 (TRBV2, TRBJ2-7)
CASSDPDYEQYF

SEQ ID NO: 600273 - protein, 13 aa, Homo sapiens
  CDR3 for alpha chain variable domain of TCR clone 300137 (TRAV12-1, TRAJ33)
CGDAPDSNYQLIW

SEQ ID NO: 600274 - protein, 13 aa, Homo sapiens
  CDR3 for beta chain variable domain of TCR clone 300137 (TRBV7-2, TRBJ2-7)
CASSSPSGSEQYF

SEQ ID NO: 600275 - protein, 13 aa, Homo sapiens
  CDR3 for alpha chain variable domain of TCR clone 300138 (TRAV21, TRAJ20)
CAVGLRVYYKLSF

SEQ ID NO: 600276 - protein, 13 aa, Homo sapiens
  CDR3 for beta chain variable domain of TCR clone 300138 (TRBV6-1, TRBJ1-1)
CASSRQGNTGAFF

SEQ ID NO: 600277 - protein, 14 aa, Homo sapiens
  CDR3 for alpha chain variable domain of TCR clone 300139 (TRAV8-1, TRAJ34)
CAMNPSYNTDKLIF

SEQ ID NO: 600278 - protein, 16 aa, Homo sapiens
  CDR3 for beta chain variable domain of TCR clone 300139 (TRBV7-2, TRBJ2-6)
CASSLAGRSGANVLTF

SEQ ID NO: 600279 - protein, 11 aa, Homo sapiens
  CDR3 for alpha chain variable domain of TCR clone 300140 (TRAV3, TRAJ21)
CAVGNFNKFYF

SEQ ID NO: 600280 - protein, 15 aa, Homo sapiens
  CDR3 for beta chain variable domain of TCR clone 300140 (TRBV6-3, TRBJ1-4)
CASSSPGQENEKLFF

SEQ ID NO: 600281 - protein, 12 aa, Homo sapiens
  CDR3 for alpha chain variable domain of TCR clone 300141 (TRAV4, TRAJ26)
CLVGDYGQNSVF

SEQ ID NO: 600282 - protein, 16 aa, Homo sapiens
  CDR3 for beta chain variable domain of TCR clone 300141 (TRBV20-1, TRBJ1-2)
CSASMGQGVANYGYTF

SEQ ID NO: 600283 - protein, 12 aa, Homo sapiens
  CDR3 for alpha chain variable domain of TCR clone 300142 (TRAV3, TRAJ31)
CAAQRANARLIF

SEQ ID NO: 600284 - protein, 14 aa, Homo sapiens
  CDR3 for beta chain variable domain of TCR clone 300142 (TRBV5-5, TRBJ1-5)
CASSGQGVDQPQHF

SEQ ID NO: 600285 - protein, 14 aa, Homo sapiens
  CDR3 for alpha chain variable domain of TCR clone 300143 (TRAV1-2, TRAJ8)
CAVREDTGFEKLVF

SEQ ID NO: 600286 - protein, 14 aa, Homo sapiens
  CDR3 for beta chain variable domain of TCR clone 300143 (TRBV13, TRBJ2-7)
CASSLKGASYEQYF

SEQ ID NO: 600287 - protein, 12 aa, Homo sapiens
  CDR3 for alpha chain variable domain of TCR clone 300144 (TRAV16, TRAJ10)
CSRTGGGNKLTF

SEQ ID NO: 600288 - protein, 14 aa, Homo sapiens
  CDR3 for beta chain variable domain of TCR clone 300144 (TRBV29-1, TRBJ2-2)
CSVLAETNTGELFF

SEQ ID NO: 600289 - protein, 12 aa, Homo sapiens
  CDR3 for alpha chain variable domain of TCR clone 300145 (TRAV1-1, TRAJ8)
CAWGTGFQKLVF

SEQ ID NO: 600290 - protein, 13 aa, Homo sapiens
  CDR3 for beta chain variable domain of TCR clone 300145 (TRBV7-3, TRBJ1-1)
CASSQDWGAEAFF

SEQ ID NO: 600291 - protein, 13 aa, Homo sapiens
  CDR3 for alpha chain variable domain of TCR clone 300146 (TRAV29/DV5, TRAJ31)
CAASRNNNARVMF

SEQ ID NO: 600292 - protein, 12 aa, Homo sapiens
  CDR3 for beta chain variable domain of TCR clone 300146 (TRBV14, TRBJ2-5)
CASSQLKETQYF

SEQ ID NO: 600293 - protein, 16 aa, Homo sapiens
  CDR3 for alpha chain variable domain of TCR clone 300147 (TRAV26-1, )
CIDIQNPDPAVYQLRD

SEQ ID NO: 600294 - protein, 19 aa, Homo sapiens
  CDR3 for beta chain variable domain of TCR clone 300147 (TRBV19, TRBJ2-5)
CASSIGQVTDFLLGETQYF

SEQ ID NO: 600295 - protein, 14 aa, Homo sapiens
  CDR3 for alpha chain variable domain of TCR clone 300148 (TRAV17, TRAJ56)
CATVPAGANSKLTF

SEQ ID NO: 600296 - protein, 13 aa, Homo sapiens
  CDR3 for beta chain variable domain of TCR clone 300148 (TRBV7-3, TRBJ1-1)
CASSQDWGAEAFF

SEQ ID NO: 600297 - protein, 13 aa, Homo sapiens
  CDR3 for alpha chain variable domain of TCR clone 300149 (TRAV8-2, TRAJ49)
CVVSPSTGNQFYV

SEQ ID NO: 600298 - protein, 14 aa, Homo sapiens
  CDR3 for beta chain variable domain of TCR clone 300149 (TRBV11-2, TRBJ2-7)
CASSRSGGAGEQYF

SEQ ID NO: 600299 - protein, 14 aa, Homo sapiens
  CDR3 for alpha chain variable domain of TCR clone 300150 (TRAV12-2, TRAJ20)
CAVKGGFGAGTTVT

SEQ ID NO: 600300 - protein, 13 aa, Homo sapiens
  CDR3 for beta chain variable domain of TCR clone 300150 (TRBV12-4, TRBJ2-7)
CASSPGQLYEQYF

SEQ ID NO: 600301 - protein, 17 aa, Homo sapiens
  CDR3 for alpha chain variable domain of TCR clone 300151 (TRAV3, TRAJ6)
CAVRDGPRAGGSYIPTF

SEQ ID NO: 600302 - protein, 12 aa, Homo sapiens
  CDR3 for beta chain variable domain of TCR clone 300151 (TRBV5-7, TRBJ1-2)
CASSDRIHGYTF

SEQ ID NO: 600303 - protein, 14 aa, Homo sapiens
  CDR3 for alpha chain variable domain of TCR clone 300152 (TRAV1-2, TRAJ8)
CAVREDTGFHKLVF

SEQ ID NO: 600304 - protein, 11 aa, Homo sapiens
  CDR3 for beta chain variable domain of TCR clone 300152 (TRBV20-1, TRBJ2-5)
CSADREETQYF

SEQ ID NO: 600305 - protein, 17 aa, Homo sapiens
  CDR3 for alpha chain variable domain of TCR clone 300153 (TRAV13-1, TRAJ28)
CAASPPYSGAGSYQLTF

SEQ ID NO: 600306 - protein, 14 aa, Homo sapiens
  CDR3 for beta chain variable domain of TCR clone 300153 (TRBV11-2, TRBJ2-5)
CASRPLAGRETQYF

SEQ ID NO: 600307 - protein, 15 aa, Homo sapiens
  CDR3 for alpha chain variable domain of TCR clone 300154 (TRAV26-1, TRAJ23)
CIVRGLNNQGGKLIF

SEQ ID NO: 600308 - protein, 15 aa, Homo sapiens
  CDR3 for beta chain variable domain of TCR clone 300154 (TRBV11-3, TRBJ2-1)
CASSLAGQTYNEQFF

SEQ ID NO: 600309 - protein, 13 aa, Homo sapiens
  CDR3 for alpha chain variable domain of TCR clone 300155 (TRAV4, TRAJ40)
CLVEGSGTYKYIF

SEQ ID NO: 600310 - protein, 16 aa, Homo sapiens
  CDR3 for beta chain variable domain of TCR clone 300155 (TRBV7-2, TRBJ2-7)
CASSLDPGGGSGEQYF

SEQ ID NO: 600311 - protein, 15 aa, Homo sapiens
  CDR3 for alpha chain variable domain of TCR clone 300156 (TRAV12-2, TRAJ53)
CAVNGGGGSNYKLNF

SEQ ID NO: 600312 - protein, 13 aa, Homo sapiens
  CDR3 for beta chain variable domain of TCR clone 300156 (TRBV10-3, TRBJ2-7)
CASKLAVNYEQYF

SEQ ID NO: 600313 - protein, 15 aa, Homo sapiens
  CDR3 for alpha chain variable domain of TCR clone 300157 (TRAV4, TRAJ17)
CLVGDIGAAGNKLTF

SEQ ID NO: 600314 - protein, 14 aa, Homo sapiens
  CDR3 for beta chain variable domain of TCR clone 300157 (TRBV6-3, TRBJ2-7)
CASSYSVSVYEQYF

SEQ ID NO: 600315 - protein, 12 aa, Homo sapiens
  CDR3 for alpha chain variable domain of TCR clone 300158 (TRAV10, TRAJ31)
CVVRAHRSRLMF

SEQ ID NO: 600316 - protein, 13 aa, Homo sapiens
  CDR3 for beta chain variable domain of TCR clone 300158 (TRBV7-8, TRBJ2-1)
CASSLERLGEQFF

SEQ ID NO: 600317 - protein, 17 aa, Homo sapiens
  CDR3 for alpha chain variable domain of TCR clone 300159 (TRAV13-1, TRAJ28)
CAASPPYSGAGSYQLTF

SEQ ID NO: 600318 - protein, 12 aa, Homo sapiens
  CDR3 for beta chain variable domain of TCR clone 300159 (TRBV28, TRBJ2-1)
CASSFRGNEQFF

SEQ ID NO: 600319 - protein, 13 aa, Homo sapiens
  CDR3 for alpha chain variable domain of TCR clone 300160 (TRAV21, TRAJ27)
CAARPGNAGKSTF

SEQ ID NO: 600320 - protein, 15 aa, Homo sapiens
  CDR3 for beta chain variable domain of TCR clone 300160 (TRBV7-2, TRBJ2-3)
CASSLAGAFIDTQYF

SEQ ID NO: 600321 - protein, 14 aa, Homo sapiens
  CDR3 for alpha chain variable domain of TCR clone 300161 (TRAV1-2, TRAJ8)
CAVREDTGFQKLVF

SEQ ID NO: 600322 - protein, 14 aa, Homo sapiens
  CDR3 for beta chain variable domain of TCR clone 300161 (TRBV7-9, TRBJ1-1)
CASTPLQSYTKAFF

SEQ ID NO: 600323 - protein, 12 aa, Homo sapiens
  CDR3 for alpha chain variable domain of TCR clone 300162 (TRAV12-1, TRAJ40)
CVVYSGTYKYIF

SEQ ID NO: 600324 - protein, 12 aa, Homo sapiens
  CDR3 for beta chain variable domain of TCR clone 300162 (TRBV11-3, TRBJ2-3)
GASRGAPNTQYF

SEQ ID NO: 600325 - protein, 12 aa, Homo sapiens
  CDR3 for alpha chain variable domain of TCR clone 300163 (TRAV30, TRAJ43)
CGTEERGNDMRF

SEQ ID NO: 600326 - protein, 15 aa, Homo sapiens
  CDR3 for beta chain variable domain of TCR clone 300163 (TRBV10-2, TRBJ2-6)
CASSEQGTGANVLTF

SEQ ID NO: 600327 - protein, 14 aa, Homo sapiens
  CDR3 for alpha chain variable domain of TCR clone 300164 (TRAV21, TRAJ32)
CCGDYGGATNRLIF

SEQ ID NO: 600328 - protein, 13 aa, Homo sapiens
  CDR3 for beta chain variable domain of TCR clone 300164 (TRBV2, TRBJ1-6)
CASGRGGISHLHF

SEQ ID NO: 600329 - protein, 14 aa, Homo sapiens
  CDR3 for alpha chain variable domain of TCR clone 300165 (TRAV26-1, TRAJ49)
CTVRLTNTGNQFYF

SEQ ID NO: 600330 - protein, 13 aa, Homo sapiens
  CDR3 for beta chain variable domain of TCR clone 300165 (TRBV10-1, TRBJ1-1)
CASQGQTNTEAFF

SEQ ID NO: 600331 - protein, 14 aa, Homo sapiens
  CDR3 for alpha chain variable domain of TCR clone 300166 (TRAV2, TRAJ37)
CAVDFTSNTGKLIF

SEQ ID NO: 600332 - protein, 16 aa, Homo sapiens
  CDR3 for beta chain variable domain of TCR clone 300166 (TRBV7-9, TRBJ1-2)
CASSPGGGAINYGYTF

SEQ ID NO: 600333 - protein, 16 aa, Homo sapiens
  CDR3 for alpha chain variable domain of TCR clone 300167 (TRAV8-3, TRAJ44)
CAVGPLNTGTASKLTS

SEQ ID NO: 600334 - protein, 18 aa, Homo sapiens
  CDR3 for beta chain variable domain of TCR clone 300167 (TRBV3-1, TRBJ2-1)
WASSQDLPGRPLFDEQFF

SEQ ID NO: 600335 - protein, 13 aa, Homo sapiens
  CDR3 for alpha chain variable domain of TCR clone 300168 (TRAV8-3, TRAJ28)
CAVGAVGSYQLTF

SEQ ID NO: 600336 - protein, 15 aa, Homo sapiens
  CDR3 for beta chain variable domain of TCR clone 300168 (TRBV27, TRBJ2-3)
CASSLGLAATDTQYF

SEQ ID NO: 600337 - protein, 11 aa, Homo sapiens
  CDR3 for alpha chain variable domain of TCR clone 300169 (TRAV16, TRAJ20)
CALREGFKAAL

SEQ ID NO: 600338 - protein, 13 aa, Homo sapiens
  CDR3 for beta chain variable domain of TCR clone 300169 (TRBV7-3, TRBJ2-1)
CASSLDSSNEQFF

SEQ ID NO: 600339 - protein, 15 aa, Homo sapiens
  CDR3 for alpha chain variable domain of TCR clone 300170 (TRAV12-2, TRAJ53)
CAVNGGGGSNYKLTF

SEQ ID NO: 600340 - protein, 14 aa, Homo sapiens
  CDR3 for beta chain variable domain of TCR clone 300170 (TRBV4-3, TRBJ1-5)
CASSQGGQGWPQHF

SEQ ID NO: 600341 - protein, 17 aa, Homo sapiens
  CDR3 for alpha chain variable domain of TCR clone 300171 (TRAV26-1, TRAJ37)
CIVRVITVSSNTGKLIF

SEQ ID NO: 600342 - protein, 13 aa, Homo sapiens
  CDR3 for beta chain variable domain of TCR clone 300171 (TRBV12-4, TRBJ2-7)
CASSPTETYEQYF

SEQ ID NO: 600343 - protein, 14 aa, Homo sapiens
  CDR3 for alpha chain variable domain of TCR clone 300172 (TRAV2, TRAJ9)
CAVADRSGGFKTIF

SEQ ID NO: 600344 - protein, 15 aa, Homo sapiens
  CDR3 for beta chain variable domain of TCR clone 300172 (TRBV12-4, TRBJ2-5)
CASSLSGAFQETQYF

SEQ ID NO: 600345 - protein, 15 aa, Homo sapiens
  CDR3 for alpha chain variable domain of TCR clone 300173 (TRAV26-1, TRAJ15)
RIVRAANQAGTALIF

SEQ ID NO: 600346 - protein, 15 aa, Homo sapiens
  CDR3 for beta chain variable domain of TCR clone 300173 (TRBV20-1, TRBJ1-1)
CSARSAATSNTEAFF

SEQ ID NO: 600347 - protein, 12 aa, Homo sapiens
  CDR3 for alpha chain variable domain of TCR clone 300174 (TRAV4, TRAJ26)
CLVGDYGQNFVF

SEQ ID NO: 600348 - protein, 16 aa, Homo sapiens
  CDR3 for beta chain variable domain of TCR clone 300174 (TRBV7-2, TRBJ1-2)
CASSSNQDRPGHGYTF

SEQ ID NO: 600349 - protein, 13 aa, Homo sapiens
  CDR3 for alpha chain variable domain of TCR clone 300175 (TRAV35, TRAJ49)
CAGRLNTGNQFYF

SEQ ID NO: 600350 - protein, 17 aa, Homo sapiens
  CDR3 for beta chain variable domain of TCR clone 300175 (TRBV6-1, TRBJ2-1)
CASSEGGWGQFYTEQFF

SEQ ID NO: 600351 - protein, 11 aa, Homo sapiens
  CDR3 for alpha chain variable domain of TCR clone 300176 (TRAV3, TRAJ21)
CALGNFNKFYF

SEQ ID NO: 600352 - protein, 16 aa, Homo sapiens
  CDR3 for beta chain variable domain of TCR clone 300176 (TRBV19, TRBJ2-1)
CASSKAGPSAYNEQFF

SEQ ID NO: 600353 - protein, 13 aa, Homo sapiens
  CDR3 for alpha chain variable domain of TCR clone 300177 (TRAV13-2, TRAJ13)
CAARPGGYQKVTF

SEQ ID NO: 600354 - protein, 15 aa, Homo sapiens
  CDR3 for beta chain variable domain of TCR clone 300177 (TRBV4-1, TRBJ1-4)
CASSDTGGTNEKLFF

SEQ ID NO: 600355 - protein, 17 aa, Homo sapiens
  CDR3 for alpha chain variable domain of TCR clone 300178 (TRAV3, TRAJ42)
CAVRDRDYGGSQGNLIF

SEQ ID NO: 600356 - protein, 14 aa, Homo sapiens
  CDR3 for beta chain variable domain of TCR clone 300178 (TRBV7-2, TRBJ2-5)
WASSPRGSSETQYF

SEQ ID NO: 600357 - protein, 16 aa, Homo sapiens
  CDR3 for alpha chain variable domain of TCR clone 300179 (TRAV27, TRAJ13)
CAGAKSDSGGYQKVTF

SEQ ID NO: 600358 - protein, 20 aa, Homo sapiens
  CDR3 for beta chain variable domain of TCR clone 300179 (TRBV28, TRBJ2-1)
CASTPIGRSPGLAGGDEQFF

SEQ ID NO: 600359 - protein, 14 aa, Homo sapiens
  CDR3 for alpha chain variable domain of TCR clone 300180 (TRAV9-2, TRAJ39)
CALYIYNADNMLTF

SEQ ID NO: 600360 - protein, 14 aa, Homo sapiens
  CDR3 for beta chain variable domain of TCR clone 300180 (TRBV12-5, TRBJ2-5)
CASGSRTHQETQYF

SEQ ID NO: 600361 - protein, 12 aa, Homo sapiens
  CDR3 for alpha chain variable domain of TCR clone 300181 (TRAV20, TRAJ39)
CAVGNAGNMLTF

SEQ ID NO: 600362 - protein, 15 aa, Homo sapiens
  CDR3 for beta chain variable domain of TCR clone 300181 (TRBV2, TRBJ2-1)
CASSELAGSYNEQFF

SEQ ID NO: 600363 - protein, 14 aa, Homo sapiens
  CDR3 for alpha chain variable domain of TCR clone 300182 (TRAV13-1, TRAJ10)
CAAKETGGGNKLTF

SEQ ID NO: 600364 - protein, 14 aa, Homo sapiens
  CDR3 for beta chain variable domain of TCR clone 300182 (TRBV20-1, TRBJ1-1)
CSAQTRIGGTEAFF

SEQ ID NO: 600365 - protein, 14 aa, Homo sapiens
  CDR3 for alpha chain variable domain of TCR clone 300183 (TRAV12-2, TRAJ17)
CAVLFKAAGTKLPF

SEQ ID NO: 600366 - protein, 17 aa, Homo sapiens
  CDR3 for beta chain variable domain of TCR clone 300183 (TRBV20-1, TRBJ2-2)
CSASGSGQGGLTGELFF

SEQ ID NO: 600367 - protein, 13 aa, Homo sapiens
  CDR3 for alpha chain variable domain of TCR clone 300184 (TRAV12-3, TRAJ33)
CAMSVNSNYQLIC

SEQ ID NO: 600368 - protein, 13 aa, Homo sapiens
  CDR3 for beta chain variable domain of TCR clone 300184 (TRBV7-2, TRBJ2-2)
CASSVAVTGELFF

SEQ ID NO: 600369 - protein, 12 aa, Homo sapiens
  CDR3 for alpha chain variable domain of TCR clone 300185 (TRAV13-1, TRAJ53)
AASGGSKYKLKF

SEQ ID NO: 600370 - protein, 15 aa, Homo sapiens
  CDR3 for beta chain variable domain of TCR clone 300185 (TRBV5-1, TRBJ2-1)
CASSPPRAPYNEQFF

SEQ ID NO: 600371 - protein, 18 aa, Homo sapiens
  CDR3 for alpha chain variable domain of TCR clone 300186 (TRAV29/DV5, TRAJ52)
CAAGFRGAGGTSCGKLTF

SEQ ID NO: 600372 - protein, 16 aa, Homo sapiens
  CDR3 for beta chain variable domain of TCR clone 300186 (TRBV7-3, TRBJ2-2)
CASSLKRGTLSGELFF

SEQ ID NO: 600373 - protein, 14 aa, Homo sapiens
  CDR3 for alpha chain variable domain of TCR clone 300187 (TRAV12-2, TRAJ17)
CAVNIKAAGNKLTF

SEQ ID NO: 600374 - protein, 12 aa, Homo sapiens
  CDR3 for beta chain variable domain of TCR clone 300187 (TRBV28, TRBJ2-3)
CVSSLYRDTQYF

SEQ ID NO: 600375 - protein, 11 aa, Homo sapiens
  CDR3 for alpha chain variable domain of TCR clone 300188 (TRAV27, TRAJ43)
CAGANNNEMRF

SEQ ID NO: 600376 - protein, 19 aa, Homo sapiens
  CDR3 for beta chain variable domain of TCR clone 300188 (TRBV25-1, TRBJ2-2)
CAILVYRVDRGRKTGELFF

SEQ ID NO: 600377 - protein, 12 aa, Homo sapiens
  CDR3 for alpha chain variable domain of TCR clone 300189 (TRAV12-3, TRAJ34)
CAMGYNTDKLIF

SEQ ID NO: 600378 - protein, 14 aa, Homo sapiens
  CDR3 for beta chain variable domain of TCR clone 300189 (TRBV4-1, TRBJ2-2)
CASSQAVNTGDLFF

SEQ ID NO: 600379 - protein, 11 aa, Homo sapiens
  CDR3 for alpha chain variable domain of TCR clone 300190 (TRAV2, TRAJ13)
CASGGYQKVTF

SEQ ID NO: 600380 - protein, 14 aa, Homo sapiens
  CDR3 for beta chain variable domain of TCR clone 300190 (TRBV6-3, TRBJ1-1)
CASSNLLPGAEAVF

SEQ ID NO: 600381 - protein, 12 aa, Homo sapiens
  CDR3 for alpha chain variable domain of TCR clone 300191 (TRAV2, TRAJ33)
CAVPDSNYQLIW

SEQ ID NO: 600382 - protein, 14 aa, Homo sapiens
  CDR3 for beta chain variable domain of TCR clone 300191 (TRBV7-3, TRBJ2-2)
CASSSGGYTGELFF

SEQ ID NO: 600383 - protein, 17 aa, Homo sapiens
  CDR3 for alpha chain variable domain of TCR clone 300192 (TRAV3, TRAJ6)
CAGRDGPRAGGSYIPTF

SEQ ID NO: 600384 - protein, 13 aa, Homo sapiens
  CDR3 for beta chain variable domain of TCR clone 300192 (TRBV19, TRBJ2-7)
CASSIDRTYEQYF

SEQ ID NO: 600385 - protein, 14 aa, Homo sapiens
  CDR3 for alpha chain variable domain of TCR clone 300193 (TRAV1-2, TRAJ8)
CAVREDTGFQKLVF

SEQ ID NO: 600386 - protein, 15 aa, Homo sapiens
  CDR3 for beta chain variable domain of TCR clone 300193 (TRBV4-1, TRBJ1-2)
CASSQDRNRDYGYTF

SEQ ID NO: 600387 - protein, 11 aa, Homo sapiens
  CDR3 for alpha chain variable domain of TCR clone 300194 (TRAV13-2, TRAJ20)
CADSNDYKLSF

SEQ ID NO: 600388 - protein, 15 aa, Homo sapiens
  CDR3 for beta chain variable domain of TCR clone 300194 (TRBV5-1, TRBJ2-1)
CASSPPRAPYNEQFF

SEQ ID NO: 600389 - protein, 19 aa, Homo sapiens
  CDR3 for alpha chain variable domain of TCR clone 300195 (TRAV36/DV7, TRAJ44)
CAVEQIPALPVNSPLGLNK

SEQ ID NO: 600390 - protein, 18 aa, Homo sapiens
  CDR3 for beta chain variable domain of TCR clone 300195 (TRBV7-6, TRBJ2-1)
CASSPRTSGMSSYNEQFF

SEQ ID NO: 600391 - protein, 13 aa, Homo sapiens
  CDR3 for alpha chain variable domain of TCR clone 300196 (TRAV4, TRAJ31)
CLVALNNNARLMF

SEQ ID NO: 600392 - protein, 15 aa, Homo sapiens
  CDR3 for beta chain variable domain of TCR clone 300196 (TRBV29-1, TRBJ2-1)
CSGRDRKSSYNEQFS

SEQ ID NO: 600393 - protein, 15 aa, Homo sapiens
  CDR3 for alpha chain variable domain of TCR clone 300197 (TRAV23/DV6, TRAJ22)
CAASSLSGSARQLTF

SEQ ID NO: 600394 - protein, 15 aa, Homo sapiens
  CDR3 for beta chain variable domain of TCR clone 300197 (TRBV11-3, TRBJ2-3)
CASLKDGREGDTQYF

SEQ ID NO: 600395 - protein, 13 aa, Homo sapiens
  CDR3 for alpha chain variable domain of TCR clone 300198 (TRAV2, TRAJ40)
CAVVTSGTYTYII

SEQ ID NO: 600396 - protein, 14 aa, Homo sapiens
  CDR3 for beta chain variable domain of TCR clone 300198 (TRBV19, TRBJ2-1)
CASPTFVLSGEQFF

SEQ ID NO: 600397 - protein, 16 aa, Homo sapiens
  CDR3 for alpha chain variable domain of TCR clone 300199 (TRAV21, TRAJ17)
CAVRPGEAAAGNKLTF

SEQ ID NO: 600398 - protein, 18 aa, Homo sapiens
  CDR3 for beta chain variable domain of TCR clone 300199 (TRBV4-1, TRBJ1-1)
CASSQDSSGGGFWTEAFF

SEQ ID NO: 600399 - protein, 20 aa, Homo sapiens
  CDR3 for alpha chain variable domain of TCR clone 300200 (TRAV26-1, TRAJ42)
CCVLLHRQTYYGGSQGNLVF

SEQ ID NO: 600400 - protein, 16 aa, Homo sapiens
  CDR3 for beta chain variable domain of TCR clone 300200 (TRBV7-3, TRBJ2-2)
CASSLKRGILSGELFF

SEQ ID NO: 600401 - protein, 14 aa, Homo sapiens
  CDR3 for alpha chain variable domain of TCR clone 300201 (TRAV27, TRAJ22)
CAGLPSGSARQLPF

SEQ ID NO: 600402 - protein, 15 aa, Homo sapiens
  CDR3 for beta chain variable domain of TCR clone 300201 (TRBV20-1, TRBJ2-5)
CSASPLAGGQETQYF

SEQ ID NO: 600403 - protein, 12 aa, Homo sapiens
  CDR3 for alpha chain variable domain of TCR clone 300202 (TRAV21, TRAJ49)
CAVRNTGNQFYF

SEQ ID NO: 600404 - protein, 12 aa, Homo sapiens
  CDR3 for beta chain variable domain of TCR clone 300202 (TRBV7-9, TRBJ2-1)
CATRTDAYEQYF

SEQ ID NO: 600405 - protein, 14 aa, Homo sapiens
  CDR3 for alpha chain variable domain of TCR clone 300203 (TRAV2, TRAJ8)
CAGRGNTGFQKLVF

SEQ ID NO: 600406 - protein, 15 aa, Homo sapiens
  CDR3 for beta chain variable domain of TCR clone 300203 (TRBV6-5, TRBJ2-7)
CASRLAGSTSSTSGR

SEQ ID NO: 600407 - protein, 10 aa, Homo sapiens
  CDR3 for alpha chain variable domain of TCR clone 300204 (TRAV5, TRAJ34)
CVEDTDKLIF

SEQ ID NO: 600408 - protein, 12 aa, Homo sapiens
  CDR3 for beta chain variable domain of TCR clone 300204 (TRBV11-2, TRBJ2-2)
CASSLGGGELFF

SEQ ID NO: 600409 - protein, 15 aa, Homo sapiens
  CDR3 for alpha chain variable domain of TCR clone 300205 (TRAV8-3, TRAJ37)
CAVGARASNPGKLIF

SEQ ID NO: 600410 - protein, 15 aa, Homo sapiens
  CDR3 for beta chain variable domain of TCR clone 300205 (TRBV5-4, TRBJ2-3)
CASSLAGRVTDTQYF

SEQ ID NO: 600411 - protein, 15 aa, Homo sapiens
  CDR3 for alpha chain variable domain of TCR clone 300206 (TRAV12-1, TRAJ52)
CVGNAGGTSYGKLTY

SEQ ID NO: 600412 - protein, 14 aa, Homo sapiens
  CDR3 for beta chain variable domain of TCR clone 300206 (TRBV7-3, TRBJ2-2)
CASSPDPSGRELFF

SEQ ID NO: 600413 - protein, 15 aa, Homo sapiens
  CDR3 for alpha chain variable domain of TCR clone 300207 (TRAV3, TRAJ45)
CAVRTPWGGADGLTF

SEQ ID NO: 600414 - protein, 16 aa, Homo sapiens
  CDR3 for beta chain variable domain of TCR clone 300207 (TRBV6-1, TRBJ2-2)
YASSFGQGANTGELFF

SEQ ID NO: 600415 - protein, 14 aa, Homo sapiens
  CDR3 for alpha chain variable domain of TCR clone 300208 (TRAV12-3, TRAJ42)
CAMNYGGSQGNLIF

SEQ ID NO: 600416 - protein, 14 aa, Homo sapiens
  CDR3 for beta chain variable domain of TCR clone 300208 (TRBV19, TRBJ2-7)
CASSMGHGAIEQYF

SEQ ID NO: 600417 - protein, 12 aa, Homo sapiens
  CDR3 for alpha chain variable domain of TCR clone 300209 (TRAV26-1, TRAJ36)
CIVRVRADNLFF

SEQ ID NO: 600418 - protein, 13 aa, Homo sapiens
  CDR3 for beta chain variable domain of TCR clone 300209 (TRBV7-3, TRBJ1-1)
CASSQDWGAEAFF

SEQ ID NO: 600419 - protein, 16 aa, Homo sapiens
  CDR3 for alpha chain variable domain of TCR clone 300210 (TRAV4, TRAJ18)
CCVLLIGGSTLGRLYF

SEQ ID NO: 600420 - protein, 13 aa, Homo sapiens
  CDR3 for beta chain variable domain of TCR clone 300210 (TRBV7-3, TRBJ1-1)
CASSQDWGAEASF

SEQ ID NO: 600421 - protein, 16 aa, Homo sapiens
  CDR3 for alpha chain variable domain of TCR clone 300211 (TRAV4, TRAJ22)
CLVGDLYSGSARQLTF

SEQ ID NO: 600422 - protein, 15 aa, Homo sapiens
  CDR3 for beta chain variable domain of TCR clone 300211 (TRBV20-1, TRBJ2-7)
CSARKGRAEYYEQYF

SEQ ID NO: 600423 - protein, 11 aa, Homo sapiens
  CDR3 for alpha chain variable domain of TCR clone 300212 (TRAV1-1, TRAJ23)
CAVRQGGKLIF

SEQ ID NO: 600424 - protein, 15 aa, Homo sapiens
  CDR3 for beta chain variable domain of TCR clone 300212 (TRBV3-1, TRBJ1-2)
CASSHPGTPGYGYTF

SEQ ID NO: 600425 - protein, 11 aa, Homo sapiens
  CDR3 for alpha chain variable domain of TCR clone 300213 (TRAV2, TRAJ13)
CASGGYQKVTF

SEQ ID NO: 600426 - protein, 16 aa, Homo sapiens
  CDR3 for beta chain variable domain of TCR clone 300213 (TRBV7-3, TRBJ2-2)
CVSSLKRGTLSGELFF

SEQ ID NO: 600427 - protein, 11 aa, Homo sapiens
  CDR3 for alpha chain variable domain of TCR clone 300214 (TRAV2, TRAJ33)
CAVDSNYQLIW

SEQ ID NO: 600428 - protein, 15 aa, Homo sapiens
  CDR3 for beta chain variable domain of TCR clone 300214 (TRBV19, TRBJ1-2)
CASSVGQVLNYRHTF

SEQ ID NO: 600429 - protein, 10 aa, Homo sapiens
  CDR3 for alpha chain variable domain of TCR clone 300215 (TRAV12-3, TRAJ49)
SAMNDDQFYF

SEQ ID NO: 600430 - protein, 13 aa, Homo sapiens
  CDR3 for beta chain variable domain of TCR clone 300215 (TRBV12-4, TRBJ1-1)
CASSPGTGCEAFF

SEQ ID NO: 600431 - protein, 14 aa, Homo sapiens
  CDR3 for alpha chain variable domain of TCR clone 300216 (TRAV12-2, TRAJ13)
CAVKKTGGYQTVTF

SEQ ID NO: 600432 - protein, 13 aa, Homo sapiens
  CDR3 for beta chain variable domain of TCR clone 300216 (TRBV2, TRBJ1-4)
CASSERAGEKLFF

SEQ ID NO: 600433 - protein, 16 aa, Homo sapiens
  CDR3 for alpha chain variable domain of TCR clone 300217 (TRAV36/DV7, TRAJ33)
WRPGNKVQDSNYPLIW

SEQ ID NO: 600434 - protein, 15 aa, Homo sapiens
  CDR3 for beta chain variable domain of TCR clone 300217 (TRBV29-1, TRBJ2-1)
CSVGRHALFYNEQFF

SEQ ID NO: 600435 - protein, 16 aa, Homo sapiens
  CDR3 for alpha chain variable domain of TCR clone 300218 (TRAV12-2, TRAJ28)
CAVITDSGAGSYQLTF

SEQ ID NO: 600436 - protein, 14 aa, Homo sapiens
  CDR3 for beta chain variable domain of TCR clone 300218 (TRBV25-1, TRBJ1-1)
CASTHLGENTEAFF

SEQ ID NO: 600437 - protein, 12 aa, Homo sapiens
  CDR3 for alpha chain variable domain of TCR clone 300219 (TRAV13-1, TRAJ53)
AASGGSNYKLTF

SEQ ID NO: 600438 - protein, 15 aa, Homo sapiens
  CDR3 for beta chain variable domain of TCR clone 300219 (TRBV5-1, TRBJ2-1)
CASSPPRAPDNEQFF

SEQ ID NO: 600439 - protein, 15 aa, Homo sapiens
  CDR3 for alpha chain variable domain of TCR clone 300220 (TRAV13-1, TRAJ50)
CAAKGSETSYDKVIF

SEQ ID NO: 600440 - protein, 18 aa, Homo sapiens
  CDR3 for beta chain variable domain of TCR clone 300220 (TRBV10-3, TRBJ2-1)
CTSVPSVSRRGGVDEQFF

SEQ ID NO: 600441 - protein, 13 aa, Homo sapiens
  CDR3 for alpha chain variable domain of TCR clone 300221 (TRAV21, TRAJ20)
CAVGLRVDYKLSF

SEQ ID NO: 600442 - protein, 14 aa, Homo sapiens
  CDR3 for beta chain variable domain of TCR clone 300221 (TRBV19, TRBJ2-5)
CASSMTGQQETQYF

SEQ ID NO: 600443 - protein, 13 aa, Homo sapiens
  CDR3 for alpha chain variable domain of TCR clone 300222 (TRAV29/DV5, TRAJ31)
CAASRNNKARLMF

SEQ ID NO: 600444 - protein, 12 aa, Homo sapiens
  CDR3 for beta chain variable domain of TCR clone 300222 (TRBV14, TRBJ2-7)
CASSLYKDEQYF

SEQ ID NO: 600445 - protein, 15 aa, Homo sapiens
  CDR3 for alpha chain variable domain of TCR clone 300223 (TRAV3, TRAJ5)
CAVRDLDTGRRALTF

SEQ ID NO: 600446 - protein, 16 aa, Homo sapiens
  CDR3 for beta chain variable domain of TCR clone 300223 (TRBV7-6, TRBJ2-1)
CASSAPGPSSYNEQFF

SEQ ID NO: 600447 - protein, 13 aa, Homo sapiens
  CDR3 for alpha chain variable domain of TCR clone 300224 (TRAV21, TRAJ56)
CAVRTGATSKLTF

SEQ ID NO: 600448 - protein, 15 aa, Homo sapiens
  CDR3 for beta chain variable domain of TCR clone 300224 (TRBV7-9, TRBJ1-1)
CASSHRGTVNTEAFF

SEQ ID NO: 600449 - protein, 14 aa, Homo sapiens
  CDR3 for alpha chain variable domain of TCR clone 300225 (TRAV8-3, TRAJ4)
CAVGAAGDYNKLIF

SEQ ID NO: 600450 - protein, 15 aa, Homo sapiens
  CDR3 for beta chain variable domain of TCR clone 300225 (TRBV20-1, TRBJ2-5)
CSAPPRTGFGETQYF

SEQ ID NO: 600451 - protein, 15 aa, Homo sapiens
  CDR3 for alpha chain variable domain of TCR clone 300226 (TRAV23/DV6, TRAJ30)
CAASSQESRDDKIIF

SEQ ID NO: 600452 - protein, 17 aa, Homo sapiens
  CDR3 for beta chain variable domain of TCR clone 300226 (TRBV4-3, TRBJ2-1)
CASSQFSSGRASGEQLF

SEQ ID NO: 600453 - protein, 13 aa, Homo sapiens
  CDR3 for alpha chain variable domain of TCR clone 300227 (TRAV12-3, TRAJ57)
CAMVGAGSKKLVF

SEQ ID NO: 600454 - protein, 15 aa, Homo sapiens
  CDR3 for beta chain variable domain of TCR clone 300227 (TRBV7-2, TRBJ1-3)
CASSWGGITGNTIYF

SEQ ID NO: 600455 - protein, 15 aa, Homo sapiens
  CDR3 for alpha chain variable domain of TCR clone 300228 (TRAV4, TRAJ32)
CLVGEDGGSTNKLIF

SEQ ID NO: 600456 - protein, 14 aa, Homo sapiens
  CDR3 for beta chain variable domain of TCR clone 300228 (TRBV7-2, TRBJ2-5)
CASSPRGSSETQYF

SEQ ID NO: 600457 - protein, 10 aa, Homo sapiens
  CDR3 for alpha chain variable domain of TCR clone 300229 (TRAV13-1, TRAJ30)
CAARDDKIIF

SEQ ID NO: 600458 - protein, 15 aa, Homo sapiens
  CDR3 for beta chain variable domain of TCR clone 300229 (TRBV9, TRBJ1-6)
CASSVAGTGDSPLRF

SEQ ID NO: 600459 - protein, 12 aa, Homo sapiens
  CDR3 for alpha chain variable domain of TCR clone 300230 (TRAV23/DV6, TRAJ33)
CAAEDSNYQLIW

SEQ ID NO: 600460 - protein, 13 aa, Homo sapiens
  CDR3 for beta chain variable domain of TCR clone 300230 (TRBV10-3, TRBJ2-7)
CASKLAVNYEQYF

SEQ ID NO: 600461 - protein, 14 aa, Homo sapiens
  CDR3 for alpha chain variable domain of TCR clone 300231 (TRAV13-1, TRAJ44)
CAAKATGTASKLPF

SEQ ID NO: 600462 - protein, 16 aa, Homo sapiens
  CDR3 for beta chain variable domain of TCR clone 300231 (TRBV7-9, TRBJ2-6)
CASSLKGPLRANVLTF

SEQ ID NO: 600463 - protein, 13 aa, Homo sapiens
  CDR3 for alpha chain variable domain of TCR clone 300232 (TRAV3, TRAJ27)
CAAPPLAAGKSTF

SEQ ID NO: 600464 - protein, 13 aa, Homo sapiens
  CDR3 for beta chain variable domain of TCR clone 300232 (TRBV7-9, TRBJ2-3)
CASSPGSTDTQYF

SEQ ID NO: 600465 - protein, 13 aa, Homo sapiens
  CDR3 for alpha chain variable domain of TCR clone 300233 (TRAV12-3, TRAJ40)
CAMSASGTYKYIF

SEQ ID NO: 600466 - protein, 16 aa, Homo sapiens
  CDR3 for beta chain variable domain of TCR clone 300233 (TRBV20-1, TRBJ2-3)
CSGEAGLAGGQDTQYF

SEQ ID NO: 600467 - protein, 15 aa, Homo sapiens
  CDR3 for alpha chain variable domain of TCR clone 300234 (TRAV12-2, TRAJ53)
CAVNGGGGSNYKLTF

SEQ ID NO: 600468 - protein, 15 aa, Homo sapiens
  CDR3 for beta chain variable domain of TCR clone 300234 (TRBV7-2, TRBJ2-3)
CASSLNLRDTDTQYF

SEQ ID NO: 600469 - protein, 14 aa, Homo sapiens
  CDR3 for alpha chain variable domain of TCR clone 300235 (TRAV12-2, TRAJ11)
CAVNRESGYSTLTF

SEQ ID NO: 600470 - protein, 14 aa, Homo sapiens
  CDR3 for beta chain variable domain of TCR clone 300235 (TRBV7-8, TRBJ2-1)
CASSSQGTYNEQFF

SEQ ID NO: 600471 - protein, 16 aa, Homo sapiens
  CDR3 for alpha chain variable domain of TCR clone 300236 (TRAV8-6, TRAJ28)
CAVTSKPGAGSYQLTF

SEQ ID NO: 600472 - protein, 16 aa, Homo sapiens
  CDR3 for beta chain variable domain of TCR clone 300236 (TRBV12-4, TRBJ2-5)
CASIWRPSGDLETQYF

SEQ ID NO: 600473 - protein, 13 aa, Homo sapiens
  CDR3 for alpha chain variable domain of TCR clone 300237 (TRAV25, TRAJ10)
RAGRTGGGNKLTF

SEQ ID NO: 600474 - protein, 15 aa, Homo sapiens
  CDR3 for beta chain variable domain of TCR clone 300237 (TRBV19, TRBJ2-1)
CASSSPGVPLDEQFF

SEQ ID NO: 600475 - protein, 13 aa, Homo sapiens
  CDR3 for alpha chain variable domain of TCR clone 300238 (TRAV13-1, TRAJ11)
CAAVLAGYSTLTF

SEQ ID NO: 600476 - protein, 16 aa, Homo sapiens
  CDR3 for beta chain variable domain of TCR clone 300238 (TRBV25-1, TRBJ2-7)
CASDARVVFSSYEQYF

SEQ ID NO: 600477 - protein, 13 aa, Homo sapiens
  CDR3 for alpha chain variable domain of TCR clone 300239 (TRAV36/DV7, TRAJ54)
CAVDIQGAQKLVF

SEQ ID NO: 600478 - protein, 12 aa, Homo sapiens
  CDR3 for beta chain variable domain of TCR clone 300239 (TRBV11-2, TRBJ2-1)
CASSPGNNEQFF

SEQ ID NO: 600479 - protein, 11 aa, Homo sapiens
  CDR3 for alpha chain variable domain of TCR clone 300240 (TRAV17, TRAJ31)
CATSNNTRLMF

SEQ ID NO: 600480 - protein, 16 aa, Homo sapiens
  CDR3 for beta chain variable domain of TCR clone 300240 (TRBV7-8, TRBJ2-4)
CASSAERTLAKNIQYF

SEQ ID NO: 600481 - protein, 17 aa, Homo sapiens
  CDR3 for alpha chain variable domain of TCR clone 300241 (TRAV3, TRAJ6)
CAVRDGPRAGGSYIPTF

SEQ ID NO: 600482 - protein, 15 aa, Homo sapiens
  CDR3 for beta chain variable domain of TCR clone 300241 (TRBV5-5, TRBJ1-5)
CASSLEGASNQPQHF

SEQ ID NO: 600483 - protein, 18 aa, Homo sapiens
  CDR3 for alpha chain variable domain of TCR clone 300242 (TRAV13-1, TRAJ52)
CAAKNHNAGGTSYGQLTF

SEQ ID NO: 600484 - protein, 15 aa, Homo sapiens
  CDR3 for beta chain variable domain of TCR clone 300242 (TRBV6-1, TRBJ2-3)
CASSERGGITDTQYF

SEQ ID NO: 600485 - protein, 17 aa, Homo sapiens
  CDR3 for alpha chain variable domain of TCR clone 300243 (TRAV26-1, TRAJ53)
CIVRVDDSGGIIYKLTF

SEQ ID NO: 600486 - protein, 15 aa, Homo sapiens
  CDR3 for beta chain variable domain of TCR clone 300243 (TRBV20-1, TRBJ2-7)
CSARVPAAYFYEQYF

SEQ ID NO: 600487 - protein, 12 aa, Homo sapiens
  CDR3 for alpha chain variable domain of TCR clone 300244 (TRAV3, TRAJ27)
FAVRDGAGKSTF

SEQ ID NO: 600488 - protein, 15 aa, Homo sapiens
  CDR3 for beta chain variable domain of TCR clone 300244 (TRBV13, TRBJ2-2)
CASGYRGRRTGELFF

SEQ ID NO: 600489 - protein, 14 aa, Homo sapiens
  CDR3 for alpha chain variable domain of TCR clone 300245 (TRAV1-2, TRAJ8)
CAVREDTGFQKLVF

SEQ ID NO: 600490 - protein, 15 aa, Homo sapiens
  CDR3 for beta chain variable domain of TCR clone 300245 (TRBV7-9, TRBJ1-6)
CASSSPGSGNSPLHF

SEQ ID NO: 600491 - protein, 17 aa, Homo sapiens
  CDR3 for alpha chain variable domain of TCR clone 300246 (TRAV4, TRAJ10)
CLVQRREQTHLWDRQSA

SEQ ID NO: 600492 - protein, 16 aa, Homo sapiens
  CDR3 for beta chain variable domain of TCR clone 300246 (TRBV6-1, TRBJ2-1)
CASILRQGSSYNEQFF

SEQ ID NO: 600493 - protein, 12 aa, Homo sapiens
  CDR3 for alpha chain variable domain of TCR clone 300247 (TRAV3, TRAJ20)
CAVRDPDYKLSF

SEQ ID NO: 600494 - protein, 16 aa, Homo sapiens
  CDR3 for beta chain variable domain of TCR clone 300247 (TRBV5-1, TRBJ1-1)
CASSSGGNSLNTEAFF

SEQ ID NO: 600495 - protein, 14 aa, Homo sapiens
  CDR3 for alpha chain variable domain of TCR clone 300248 (TRAV8-3, TRAJ15)
SAVGRHQAGTALIF

SEQ ID NO: 600496 - protein, 13 aa, Homo sapiens
  CDR3 for beta chain variable domain of TCR clone 300248 (TRBV9, TRBJ2-7)
CASSASDSYEQYF

SEQ ID NO: 600497 - protein, 13 aa, Homo sapiens
  CDR3 for alpha chain variable domain of TCR clone 300249 (TRAV12-2, TRAJ52)
CAAHGTSYGNLTF

SEQ ID NO: 600498 - protein, 13 aa, Homo sapiens
  CDR3 for beta chain variable domain of TCR clone 300249 (TRBV10-3, TRBJ2-7)
CASKLAVNYEQYF

SEQ ID NO: 600499 - protein, 15 aa, Homo sapiens
  CDR3 for alpha chain variable domain of TCR clone 300250 (TRAV4, TRAJ36)
CLVGDRQTGANNLFF

SEQ ID NO: 600500 - protein, 15 aa, Homo sapiens
  CDR3 for beta chain variable domain of TCR clone 300250 (TRBV28, TRBJ2-1)
CASSIIAGGRSEQFF

SEQ ID NO: 600501 - protein, 13 aa, Homo sapiens
  CDR3 for alpha chain variable domain of TCR clone 300251 (TRAV12-3, TRAJ7)
CAMTPYGNNRLAF

SEQ ID NO: 600502 - protein, 13 aa, Homo sapiens
  CDR3 for beta chain variable domain of TCR clone 300251 (TRBV11-2, TRBJ2-2)
CASGRDREEELFF

SEQ ID NO: 600503 - protein, 17 aa, Homo sapiens
  CDR3 for alpha chain variable domain of TCR clone 300252 (TRAV4, TRAJ18)
CLVGERSVGSTLGRLYF

SEQ ID NO: 600504 - protein, 16 aa, Homo sapiens
  CDR3 for beta chain variable domain of TCR clone 300252 (TRBV15, TRBJ1-4)
CATSRDSPPRREKLFF

SEQ ID NO: 600505 - protein, 13 aa, Homo sapiens
  CDR3 for alpha chain variable domain of TCR clone 300253 (TRAV23/DV6, TRAJ47)
CAASIRHGIWKQT

SEQ ID NO: 600506 - protein, 13 aa, Homo sapiens
  CDR3 for beta chain variable domain of TCR clone 300253 (TRBV19, TRBJ1-2)
CASSQGQVYGYTF

SEQ ID NO: 600507 - protein, 18 aa, Homo sapiens
  CDR3 for alpha chain variable domain of TCR clone 300254 (TRAV1-1, TRAJ12)
CLLLLRCVRGDSSYKLIF

SEQ ID NO: 600508 - protein, 15 aa, Homo sapiens
  CDR3 for beta chain variable domain of TCR clone 300254 (TRBV18, TRBJ2-5)
CASTDRGPRQETQYF

SEQ ID NO: 600509 - protein, 11 aa, Homo sapiens
  CDR3 for alpha chain variable domain of TCR clone 300255 (TRAV17, TRAJ29)
CYVATDTPLVF

SEQ ID NO: 600510 - protein, 12 aa, Homo sapiens
  CDR3 for beta chain variable domain of TCR clone 300255 (TRBV7-9, TRBJ2-7)
CASSIKREEQYL

SEQ ID NO: 600511 - protein, 12 aa, Homo sapiens
  CDR3 for alpha chain variable domain of TCR clone 300256 (TRAV17, TRAJ57)
CATDGGSEKLVF

SEQ ID NO: 600512 - protein, 17 aa, Homo sapiens
  CDR3 for beta chain variable domain of TCR clone 300256 (TRBV28, TRBJ2-3)
CASRNPSYGFSTDTQYF

SEQ ID NO: 600513 - protein, 11 aa, Homo sapiens
  CDR3 for alpha chain variable domain of TCR clone 300257 (TRAV9-2, TRAJ11)
CVPAGYSTPTF

SEQ ID NO: 600514 - protein, 14 aa, Homo sapiens
  CDR3 for beta chain variable domain of TCR clone 300257 (TRBV2, TRBJ2-7)
CASSLTSGGYEQYF

SEQ ID NO: 600515 - protein, 14 aa, Homo sapiens
  CDR3 for alpha chain variable domain of TCR clone 300258 (TRAV12-3, TRAJ10)
SHLPLTGGGNKLTF

SEQ ID NO: 600516 - protein, 16 aa, Homo sapiens
  CDR3 for beta chain variable domain of TCR clone 300258 (TRBV11-3, TRBJ2-7)
CASSPHGAGGPYEQYF

SEQ ID NO: 600517 - protein, 17 aa, Homo sapiens
  CDR3 for alpha chain variable domain of TCR clone 300259 (TRAV8-3, TRAJ42)
CAVGNPEERRSQGNLIF

SEQ ID NO: 600518 - protein, 16 aa, Homo sapiens
  CDR3 for beta chain variable domain of TCR clone 300259 (TRBV20-1, TRBJ2-4)
CSATSLAELAKNIQYF

SEQ ID NO: 600519 - protein, 15 aa, Homo sapiens
  CDR3 for alpha chain variable domain of TCR clone 300260 (TRAV1-2, TRAJ9)
CAALNTGGFKTILEQ

SEQ ID NO: 600520 - protein, 13 aa, Homo sapiens
  CDR3 for beta chain variable domain of TCR clone 300260 (TRBV19, TRBJ1-2)
CASSVPGQDGYTF

SEQ ID NO: 600521 - protein, 17 aa, Homo sapiens
  CDR3 for alpha chain variable domain of TCR clone 300261 (TRAV23/DV6, TRAJ57)
CAASSTLSQGGPEKRGF

SEQ ID NO: 600522 - protein, 14 aa, Homo sapiens
  CDR3 for beta chain variable domain of TCR clone 300261 (TRBV25-1, TRBJ1-1)
CASTHLGGNTEAFF

SEQ ID NO: 600523 - protein, 23 aa, Homo sapiens
  CDR3 for alpha chain variable domain of TCR clone 300262 (TRAV8-4, TRAJ38)
CARLNAGNNHIHNPDPAVYQLRD

SEQ ID NO: 600524 - protein, 14 aa, Homo sapiens
  CDR3 for beta chain variable domain of TCR clone 300262 (TRBV7-8, TRBJ2-3)
CASSLEAGTDTQYF

SEQ ID NO: 600525 - protein, 13 aa, Homo sapiens
  CDR3 for alpha chain variable domain of TCR clone 300263 (TRAV21, TRAJ56)
CAGWVGANSKLTF

SEQ ID NO: 600526 - protein, 14 aa, Homo sapiens
  CDR3 for beta chain variable domain of TCR clone 300263 (TRBV7-2, TRBJ2-7)
CASSLYPGRYEQYF

SEQ ID NO: 600527 - protein, 14 aa, Homo sapiens
  CDR3 for alpha chain variable domain of TCR clone 300264 (TRAV17, TRAJ6)
CATNPAGGSYIPTF

SEQ ID NO: 600528 - protein, 14 aa, Homo sapiens
  CDR3 for beta chain variable domain of TCR clone 300264 (TRBV11-2, TRBJ2-7)
CASSSTGEGYEQYF

SEQ ID NO: 600529 - protein, 13 aa, Homo sapiens
  CDR3 for alpha chain variable domain of TCR clone 300265 (TRAV12-3, TRAJ43)
CAMIRPNNNDMPF

SEQ ID NO: 600530 - protein, 12 aa, Homo sapiens
  CDR3 for beta chain variable domain of TCR clone 300265 (TRBV11-2, TRBJ2-5)
CASGLGQETQYF

SEQ ID NO: 600531 - protein, 14 aa, Homo sapiens
  CDR3 for alpha chain variable domain of TCR clone 300266 (TRAV9-2, TRAJ38)
CALSNSGNNRKLIW

SEQ ID NO: 600532 - protein, 15 aa, Homo sapiens
  CDR3 for beta chain variable domain of TCR clone 300266 (TRBV19, TRBJ2-1)
CASSIQATSYNEQFF

SEQ ID NO: 600533 - protein, 12 aa, Homo sapiens
  CDR3 for alpha chain variable domain of TCR clone 300267 (TRAV13-1, TRAJ9)
CAASYLGFKTIF

SEQ ID NO: 600534 - protein, 15 aa, Homo sapiens
  CDR3 for beta chain variable domain of TCR clone 300267 (TRBV28, TRBJ2-7)
CASSPGGRGFYEQYF

SEQ ID NO: 600535 - protein, 13 aa, Homo sapiens
  CDR3 for alpha chain variable domain of TCR clone 300268 (TRAV16, TRAJ31)
CALSAHNNARLMF

SEQ ID NO: 600536 - protein, 15 aa, Homo sapiens
  CDR3 for beta chain variable domain of TCR clone 300268 (TRBV13, TRBJ2-1)
CASSLLSGLNNEQFF

SEQ ID NO: 600537 - protein, 15 aa, Homo sapiens
  CDR3 for alpha chain variable domain of TCR clone 300269 (TRAV2, TRAJ24)
CAVVRLKNSWGNCSL

SEQ ID NO: 600538 - protein, 16 aa, Homo sapiens
  CDR3 for beta chain variable domain of TCR clone 300269 (TRBV7-7, TRBJ2-3)
RASSPGTSGSTDKQYF

SEQ ID NO: 600539 - protein, 14 aa, Homo sapiens
  CDR3 for alpha chain variable domain of TCR clone 300270 (TRAV13-1, TRAJ35)
CAASKGGFWNVLHC

SEQ ID NO: 600540 - protein, 15 aa, Homo sapiens
  CDR3 for beta chain variable domain of TCR clone 300270 (TRBV7-3, TRBJ2-1)
CASSLGQGPFGEQFF

SEQ ID NO: 600541 - protein, 14 aa, Homo sapiens
  CDR3 for alpha chain variable domain of TCR clone 300271 (TRAV3, TRAJ33)
CAVRDMGGNYQLIW

SEQ ID NO: 600542 - protein, 17 aa, Homo sapiens
  CDR3 for beta chain variable domain of TCR clone 300271 (TRBV19, TRBJ2-1)
CASSIWSAQPTHNEQFF

SEQ ID NO: 600543 - protein, 14 aa, Homo sapiens
  CDR3 for alpha chain variable domain of TCR clone 300272 (TRAV26-1, TRAJ39)
FIVRGSRAGNMRTF

SEQ ID NO: 600544 - protein, 15 aa, Homo sapiens
  CDR3 for beta chain variable domain of TCR clone 300272 (TRBV7-9, TRBJ1-5)
CASSQGHQPNQPQHF

SEQ ID NO: 600545 - protein, 18 aa, Homo sapiens
  CDR3 for alpha chain variable domain of TCR clone 300273 (TRAV1-2, TRAJ18)
CAVRDMGDRGSTLGRPYF

SEQ ID NO: 600546 - protein, 16 aa, Homo sapiens
  CDR3 for beta chain variable domain of TCR clone 300273 (TRBV29-1, TRBJ1-2)
CSVEANRNIANYGYTF

SEQ ID NO: 600547 - protein, 14 aa, Homo sapiens
  CDR3 for alpha chain variable domain of TCR clone 300274 (TRAV3, TRAJ8)
CAVSLNTGFQKLVF

SEQ ID NO: 600548 - protein, 11 aa, Homo sapiens
  CDR3 for beta chain variable domain of TCR clone 300274 (TRBV11-2, TRBJ2-2)
CASSLPGELFF

SEQ ID NO: 600549 - protein, 15 aa, Homo sapiens
  CDR3 for alpha chain variable domain of TCR clone 300275 (TRAV23/DV6, TRAJ13)
CAAWPGGGGYQTVTF

SEQ ID NO: 600550 - protein, 17 aa, Homo sapiens
  CDR3 for beta chain variable domain of TCR clone 300275 (TRBV19, TRBJ2-7)
CASSISFYDSYPYEKYF

SEQ ID NO: 600551 - protein, 16 aa, Homo sapiens
  CDR3 for alpha chain variable domain of TCR clone 300276 (TRAV12-3, TRAJ53)
CAMGPGSGGSNYKLTF

SEQ ID NO: 600552 - protein, 13 aa, Homo sapiens
  CDR3 for beta chain variable domain of TCR clone 300276 (TRBV6-4, TRBJ1-5)
CASSADLNQPQHF

SEQ ID NO: 600553 - protein, 12 aa, Homo sapiens
  CDR3 for alpha chain variable domain of TCR clone 300277 (TRAV36/DV7, TRAJ54)
CAVVRGAQKLVF

SEQ ID NO: 600554 - protein, 14 aa, Homo sapiens
  CDR3 for beta chain variable domain of TCR clone 300277 (TRBV7-9, TRBJ2-2)
CASSLVQDTGELFF

SEQ ID NO: 600555 - protein, 18 aa, Homo sapiens
  CDR3 for alpha chain variable domain of TCR clone 300278 (TRAV12-3, TRAJ52)
CAMSRTNAGVTSYGMLTF

SEQ ID NO: 600556 - protein, 17 aa, Homo sapiens
  CDR3 for beta chain variable domain of TCR clone 300278 (TRBV7-3, TRBJ2-3)
CASSLMKRMRGADTQYF

SEQ ID NO: 600557 - protein, 11 aa, Homo sapiens
  CDR3 for alpha chain variable domain of TCR clone 300279 (TRAV2, TRAJ13)
CASGGYQKVTF

SEQ ID NO: 600558 - protein, 13 aa, Homo sapiens
  CDR3 for beta chain variable domain of TCR clone 300279 (TRBV2, TRBJ2-5)
CASGTPYQETQYF

SEQ ID NO: 600559 - protein, 15 aa, Homo sapiens
  CDR3 for alpha chain variable domain of TCR clone 300280 (TRAV3, TRAJ13)
CAVRVYSGGYQKVTF

SEQ ID NO: 600560 - protein, 15 aa, Homo sapiens
  CDR3 for beta chain variable domain of TCR clone 300280 (TRBV28, TRBJ2-1)
CASSIIAGGRSEQFF

SEQ ID NO: 600561 - protein, 13 aa, Homo sapiens
  CDR3 for alpha chain variable domain of TCR clone 300281 (TRAV3, TRAJ34)
CCERHKYTDKLIF

SEQ ID NO: 600562 - protein, 13 aa, Homo sapiens
  CDR3 for beta chain variable domain of TCR clone 300281 (TRBV20-1, TRBJ1-1)
CSARGGGNTEAFF

SEQ ID NO: 600563 - protein, 16 aa, Homo sapiens
  CDR3 for alpha chain variable domain of TCR clone 300282 (TRAV12-3, TRAJ53)
CAMSSGSGGSNYKLTF

SEQ ID NO: 600564 - protein, 16 aa, Homo sapiens
  CDR3 for beta chain variable domain of TCR clone 300282 (TRBV7-9, TRBJ1-2)
CASSLGFSSGEDGYTF

SEQ ID NO: 600565 - protein, 13 aa, Homo sapiens
  CDR3 for alpha chain variable domain of TCR clone 300283 (TRAV35, TRAJ39)
CAGQLGKGNMLTF

SEQ ID NO: 600566 - protein, 20 aa, Homo sapiens
  CDR3 for beta chain variable domain of TCR clone 300283 (TRBV7-8, TRBJ2-2)
CASSHLFPGPTIHITGELFF

SEQ ID NO: 600567 - protein, 12 aa, Homo sapiens
  CDR3 for alpha chain variable domain of TCR clone 300284 (TRAV12-2, TRAJ8)
CAVATGFQKLVF

SEQ ID NO: 600568 - protein, 14 aa, Homo sapiens
  CDR3 for beta chain variable domain of TCR clone 300284 (TRBV9, TRBJ2-3)
CASSPPALPDTQYF

SEQ ID NO: 600569 - protein, 15 aa, Homo sapiens
  CDR3 for alpha chain variable domain of TCR clone 300285 (TRAV21, TRAJ53)
SATLNNGGSNYKLTF

SEQ ID NO: 600570 - protein, 15 aa, Homo sapiens
  CDR3 for beta chain variable domain of TCR clone 300285 (TRBV5-1, TRBJ2-3)
CASSYTSGSTDTQYF

SEQ ID NO: 600571 - protein, 14 aa, Homo sapiens
  CDR3 for alpha chain variable domain of TCR clone 300286 (TRAV38-1, TRAJ54)
CAFMSPSGAQKLVS

SEQ ID NO: 600572 - protein, 16 aa, Homo sapiens
  CDR3 for beta chain variable domain of TCR clone 300286 (TRBV28, TRBJ2-1)
CASSLGGSGSYNEQFF

SEQ ID NO: 600573 - protein, 15 aa, Homo sapiens
  CDR3 for alpha chain variable domain of TCR clone 300287 (TRAV17, TRAJ57)
CATGPSQGGSEKLVF

SEQ ID NO: 600574 - protein, 13 aa, Homo sapiens
  CDR3 for beta chain variable domain of TCR clone 300287 (TRBV6-5, TRBJ2-5)
CASSHQGGETQYF

SEQ ID NO: 600575 - protein, 15 aa, Homo sapiens
  CDR3 for alpha chain variable domain of TCR clone 300288 (TRAV29/DV5, TRAJ24)
CAASGATDNWGKFQF

SEQ ID NO: 600576 - protein, 12 aa, Homo sapiens
  CDR3 for beta chain variable domain of TCR clone 300288 (TRBV11-2, TRBJ2-2)
CASSLPTGELFF

SEQ ID NO: 600577 - protein, 14 aa, Homo sapiens
  CDR3 for alpha chain variable domain of TCR clone 300289 (TRAV1-2, TRAJ8)
CAVREDTGIQKLVF

SEQ ID NO: 600578 - protein, 12 aa, Homo sapiens
  CDR3 for beta chain variable domain of TCR clone 300289 (TRBV2, TRBJ2-1)
CAYGPPGNEQFF

SEQ ID NO: 600579 - protein, 13 aa, Homo sapiens
  CDR3 for alpha chain variable domain of TCR clone 300290 (TRAV13-1, TRAJ10)
CAATAGGGNKLTF

SEQ ID NO: 600580 - protein, 16 aa, Homo sapiens
  CDR3 for beta chain variable domain of TCR clone 300290 (TRBV20-1, TRBJ2-6)
CSASSQGYDGANVLTF

SEQ ID NO: 600581 - protein, 14 aa, Homo sapiens
  CDR3 for alpha chain variable domain of TCR clone 300291 (TRAV12-2, TRAJ13)
CAVKKTGGYQRVTF

SEQ ID NO: 600582 - protein, 15 aa, Homo sapiens
  CDR3 for beta chain variable domain of TCR clone 300291 (TRBV27, TRBJ2-1)
WASSNGGGSSNEQFF

SEQ ID NO: 600583 - protein, 11 aa, Homo sapiens
  CDR3 for alpha chain variable domain of TCR clone 300292 (TRAV13-2, TRAJ36)
CAETGANNLFF

SEQ ID NO: 600584 - protein, 13 aa, Homo sapiens
  CDR3 for beta chain variable domain of TCR clone 300292 (TRBV7-9, TRBJ2-4)
CASEGLAGNIQYF

SEQ ID NO: 600585 - protein, 12 aa, Homo sapiens
  CDR3 for alpha chain variable domain of TCR clone 300293 (TRAV8-6, TRAJ43)
CAVSHNHNDMRF

SEQ ID NO: 600586 - protein, 14 aa, Homo sapiens
  CDR3 for beta chain variable domain of TCR clone 300293 (TRBV10-3, TRBJ1-1)
CAISDGSGVTEAFF

SEQ ID NO: 600587 - protein, 15 aa, Homo sapiens
  CDR3 for alpha chain variable domain of TCR clone 300294 (TRAV12-2, TRAJ42)
YAVNSHGGSQGNLIF

SEQ ID NO: 600588 - protein, 13 aa, Homo sapiens
  CDR3 for beta chain variable domain of TCR clone 300294 (TRBV27, TRBJ1-1)
CASSVSANTEAFF

SEQ ID NO: 600589 - protein, 13 aa, Homo sapiens
  CDR3 for alpha chain variable domain of TCR clone 300295 (TRAV30, TRAJ31)
CGTETRNNARLMF

SEQ ID NO: 600590 - protein, 16 aa, Homo sapiens
  CDR3 for beta chain variable domain of TCR clone 300295 (TRBV10-3, TRBJ2-3)
CAISVSRLALTDTQYF

SEQ ID NO: 600591 - protein, 12 aa, Homo sapiens
  CDR3 for alpha chain variable domain of TCR clone 300296 (TRAV12-3, TRAJ17)
CAMTLTGNNLTF

SEQ ID NO: 600592 - protein, 12 aa, Homo sapiens
  CDR3 for beta chain variable domain of TCR clone 300296 (TRBV19, TRBJ1-5)
CASSIAQQPQHF

SEQ ID NO: 600593 - protein, 12 aa, Homo sapiens
  CDR3 for alpha chain variable domain of TCR clone 300297 (TRAV27, TRAJ41)
CAGRNSGYALTF

SEQ ID NO: 600594 - protein, 15 aa, Homo sapiens
  CDR3 for beta chain variable domain of TCR clone 300297 (TRBV6-3, TRBJ2-7)
CASSSPGTVFYEQYF

SEQ ID NO: 600595 - protein, 16 aa, Homo sapiens
  CDR3 for alpha chain variable domain of TCR clone 300298 (TRAV16, TRAJ42)
CARKMNYGGSQGNLIF

SEQ ID NO: 600596 - protein, 13 aa, Homo sapiens
  CDR3 for beta chain variable domain of TCR clone 300298 (TRBV20-1, TRBJ2-7)
CSASPPSSYEQCF

SEQ ID NO: 600597 - protein, 17 aa, Homo sapiens
  CDR3 for alpha chain variable domain of TCR clone 300299 (TRAV23/DV6, TRAJ57)
CAASSTLSQGGSGKLVF

SEQ ID NO: 600598 - protein, 14 aa, Homo sapiens
  CDR3 for beta chain variable domain of TCR clone 300299 (TRBV7-2, TRBJ2-7)
CASRSQGAAYEQYF

SEQ ID NO: 600599 - protein, 15 aa, Homo sapiens
  CDR3 for alpha chain variable domain of TCR clone 300300 (TRAV21, TRAJ24)
CAARSSTGSWGKLQF

SEQ ID NO: 600600 - protein, 13 aa, Homo sapiens
  CDR3 for beta chain variable domain of TCR clone 300300 (TRBV10-3, TRBJ2-7)
CASKRAVNYEQYF

SEQ ID NO: 600601 - protein, 13 aa, Homo sapiens
  CDR3 for alpha chain variable domain of TCR clone 300301 (TRAV3, TRAJ20)
CAVRDIGDYKLSF

SEQ ID NO: 600602 - protein, 12 aa, Homo sapiens
  CDR3 for beta chain variable domain of TCR clone 300301 (TRBV3-1, TRBJ1-2)
CASTSGPYGYTF

SEQ ID NO: 600603 - protein, 19 aa, Homo sapiens
  CDR3 for alpha chain variable domain of TCR clone 300302 (TRAV1-2, TRAJ26)
CLLPLCCDRPDNYGQNFVF

SEQ ID NO: 600604 - protein, 12 aa, Homo sapiens
  CDR3 for beta chain variable domain of TCR clone 300302 (TRBV7-9, TRBJ2-7)
CATRTDAYEQYF

SEQ ID NO: 600605 - protein, 13 aa, Homo sapiens
  CDR3 for alpha chain variable domain of TCR clone 300303 (TRAV13-2, TRAJ48)
CAEMDFGNEKLTF

SEQ ID NO: 600606 - protein, 17 aa, Homo sapiens
  CDR3 for beta chain variable domain of TCR clone 300303 (TRBV7-7, TRBJ2-2)
CASSSVPAGGEIGELFF

SEQ ID NO: 600607 - protein, 14 aa, Homo sapiens
  CDR3 for alpha chain variable domain of TCR clone 300304 (TRAV36/DV7, TRAJ44)
CCGANTGSASKLTF

SEQ ID NO: 600608 - protein, 16 aa, Homo sapiens
  CDR3 for beta chain variable domain of TCR clone 300304 (TRBV7-9, TRBJ1-2)
CASSLGFSSGEDGYTF

SEQ ID NO: 600609 - protein, 13 aa, Homo sapiens
  CDR3 for alpha chain variable domain of TCR clone 300305 (TRAV12-2, TRAJ37)
CAGGSGNTGKLIF

SEQ ID NO: 600610 - protein, 17 aa, Homo sapiens
  CDR3 for beta chain variable domain of TCR clone 300305 (TRBV28, TRBJ2-5)
CASSTPEGDALQETQYF

SEQ ID NO: 600611 - protein, 13 aa, Homo sapiens
  CDR3 for alpha chain variable domain of TCR clone 300306 (TRAV23/DV6, TRAJ22)
CASYSGSARQLTF

SEQ ID NO: 600612 - protein, 15 aa, Homo sapiens
  CDR3 for beta chain variable domain of TCR clone 300306 (TRBV4-1, TRBJ2-3)
CASSLQRVGPDTQYF

SEQ ID NO: 600613 - protein, 12 aa, Homo sapiens
  CDR3 for alpha chain variable domain of TCR clone 300307 (TRAV27, TRAJ35)
CAGADFGNVLHC

SEQ ID NO: 600614 - protein, 16 aa, Homo sapiens
  CDR3 for beta chain variable domain of TCR clone 300307 (TRBV6-1, TRBJ2-1)
CASILRQRSSYNGQFF

SEQ ID NO: 600615 - protein, 13 aa, Homo sapiens
  CDR3 for alpha chain variable domain of TCR clone 300308 (TRAV12-2, TRAJ13)
CREEDWGYQKVTF

SEQ ID NO: 600616 - protein, 12 aa, Homo sapiens
  CDR3 for beta chain variable domain of TCR clone 300308 (TRBV11-2, TRBJ2-2)
CASSLGGGELFF

SEQ ID NO: 600617 - protein, 17 aa, Homo sapiens
  CDR3 for alpha chain variable domain of TCR clone 300309 (TRAV3, TRAJ6)
CAVRDGPRAGGSYIPTS

SEQ ID NO: 600618 - protein, 14 aa, Homo sapiens
  CDR3 for beta chain variable domain of TCR clone 300309 (TRBV7-2, TRBJ2-7)
CASSPKTSFCEQYF

SEQ ID NO: 600619 - protein, 12 aa, Homo sapiens
  CDR3 for alpha chain variable domain of TCR clone 300310 (TRAV23/DV6, TRAJ16)
RAARGRGQKLLF

SEQ ID NO: 600620 - protein, 15 aa, Homo sapiens
  CDR3 for beta chain variable domain of TCR clone 300310 (TRBV15, TRBJ2-1)
CATSRPGQGLHEQFF

SEQ ID NO: 600621 - protein, 13 aa, Homo sapiens
  CDR3 for alpha chain variable domain of TCR clone 300311 (TRAV12-3, TRAJ43)
CAMIRPNNNDMRF

SEQ ID NO: 600622 - protein, 12 aa, Homo sapiens
  CDR3 for beta chain variable domain of TCR clone 300311 (TRBV11-2, TRBJ2-5)
CASSLGQEIQYF

SEQ ID NO: 600623 - protein, 14 aa, Homo sapiens
  CDR3 for alpha chain variable domain of TCR clone 300312 (TRAV2, TRAJ9)
CAVEDRSGGFKTIF

SEQ ID NO: 600624 - protein, 16 aa, Homo sapiens
  CDR3 for beta chain variable domain of TCR clone 300312 (TRBV11-2, TRBJ2-1)
CQQLYPPGVEYNEQFF

SEQ ID NO: 600625 - protein, 11 aa, Homo sapiens
  CDR3 for alpha chain variable domain of TCR clone 300313 (TRAV35, TRAJ30)
CAPGGDDKIIF

SEQ ID NO: 600626 - protein, 13 aa, Homo sapiens
  CDR3 for beta chain variable domain of TCR clone 300313 (TRBV7-9, TRBJ2-1)
CASSLDVGNEQFF

SEQ ID NO: 600627 - protein, 16 aa, Homo sapiens
  CDR3 for alpha chain variable domain of TCR clone 300314 (TRAV30, TRAJ24)
CGTEIVDADSWGKFQF

SEQ ID NO: 600628 - protein, 17 aa, Homo sapiens
  CDR3 for beta chain variable domain of TCR clone 300314 (TRBV7-9, TRBJ1-1)
CASSLGIAGAENTEAFF

SEQ ID NO: 600629 - protein, 15 aa, Homo sapiens
  CDR3 for alpha chain variable domain of TCR clone 300315 (TRAV21, TRAJ53)
CATLNSGGSNYKLTF

SEQ ID NO: 600630 - protein, 15 aa, Homo sapiens
  CDR3 for beta chain variable domain of TCR clone 300315 (TRBV6-1, TRBJ2-4)
CASSEAVWTINSQYF

SEQ ID NO: 600631 - protein, 14 aa, Homo sapiens
  CDR3 for alpha chain variable domain of TCR clone 300316 (TRAV23/DV6, TRAJ13)
CAAMYSGGYQKVTF

SEQ ID NO: 600632 - protein, 13 aa, Homo sapiens
  CDR3 for beta chain variable domain of TCR clone 300316 (TRBV10-3, TRBJ2-7)
CASKLAVNYEQYF

SEQ ID NO: 600633 - protein, 14 aa, Homo sapiens
  CDR3 for alpha chain variable domain of TCR clone 300317 (TRAV2, TRAJ37)
CAVEGSSNTGKLIF

SEQ ID NO: 600634 - protein, 15 aa, Homo sapiens
  CDR3 for beta chain variable domain of TCR clone 300317 (TRBV11-2, TRBJ1-2)
CASSLEGVQRNGYTF

SEQ ID NO: 600635 - protein, 11 aa, Homo sapiens
  CDR3 for alpha chain variable domain of TCR clone 300318 (TRAV16, TRAJ49)
CSLNTGNQFYF

SEQ ID NO: 600636 - protein, 12 aa, Homo sapiens
  CDR3 for beta chain variable domain of TCR clone 300318 (TRBV7-9, TRBJ1-4)
CASSTDRGKLFF

SEQ ID NO: 600637 - protein, 16 aa, Homo sapiens
  CDR3 for alpha chain variable domain of TCR clone 300319 (TRAV26-1, TRAJ37)
CIYARHGSSNTGKLIF

SEQ ID NO: 600638 - protein, 13 aa, Homo sapiens
  CDR3 for beta chain variable domain of TCR clone 300319 (TRBV7-2, TRBJ2-7)
CASSSPSGSEQYF

SEQ ID NO: 600639 - protein, 12 aa, Homo sapiens
  CDR3 for alpha chain variable domain of TCR clone 300320 (TRAV23/DV6, TRAJ27)
CAASKSAGKSTF

SEQ ID NO: 600640 - protein, 14 aa, Homo sapiens
  CDR3 for beta chain variable domain of TCR clone 300320 (TRBV4-2, TRBJ2-1)
CASGLDRAYNEQFF

SEQ ID NO: 600641 - protein, 12 aa, Homo sapiens
  CDR3 for alpha chain variable domain of TCR clone 300321 (TRAV3, TRAJ27)
CAVRDKAGKSTF

SEQ ID NO: 600642 - protein, 14 aa, Homo sapiens
  CDR3 for beta chain variable domain of TCR clone 300321 (TRBV5-1, TRBJ1-2)
CASIVDSTNYGYTF

SEQ ID NO: 600643 - protein, 13 aa, Homo sapiens
  CDR3 for alpha chain variable domain of TCR clone 300322 (TRAV3, TRAJ20)
CCEAFCNDYKLSF

SEQ ID NO: 600644 - protein, 15 aa, Homo sapiens
  CDR3 for beta chain variable domain of TCR clone 300322 (TRBV7-2, TRBJ2-1)
CASTHGTGIYNEQFF

SEQ ID NO: 600645 - protein, 14 aa, Homo sapiens
  CDR3 for alpha chain variable domain of TCR clone 300323 (TRAV17, TRAJ35)
CATDRPGLGNVLHC

SEQ ID NO: 600646 - protein, 14 aa, Homo sapiens
  CDR3 for beta chain variable domain of TCR clone 300323 (TRBV7-8, TRBJ2-3)
CASSLEAGTDTQYF

SEQ ID NO: 600647 - protein, 17 aa, Homo sapiens
  CDR3 for alpha chain variable domain of TCR clone 300324 (TRAV3, TRAJ38)
CAVRDCLNAGNNHIQTP

SEQ ID NO: 600648 - protein, 14 aa, Homo sapiens
  CDR3 for beta chain variable domain of TCR clone 300324 (TRBV5-5, TRBJ1-5)
CASSGQGVDQPQHF

SEQ ID NO: 600649 - protein, 17 aa, Homo sapiens
  CDR3 for alpha chain variable domain of TCR clone 300325 (TRAV13-1, TRAJ31)
CAPRDRLMFGDGTQLVV

SEQ ID NO: 600650 - protein, 16 aa, Homo sapiens
  CDR3 for beta chain variable domain of TCR clone 300325 (TRBV4-3, TRBJ2-1)
CASSPALDRGVNEQFF

SEQ ID NO: 600651 - protein, 10 aa, Homo sapiens
  CDR3 for alpha chain variable domain of TCR clone 300326 (TRAV8-4, TRAJ43)
CGVSADDMRF

SEQ ID NO: 600652 - protein, 11 aa, Homo sapiens
  CDR3 for beta chain variable domain of TCR clone 300326 (TRBV12-4, TRBJ2-3)
CASTATDTQYF

SEQ ID NO: 600653 - protein, 14 aa, Homo sapiens
  CDR3 for alpha chain variable domain of TCR clone 300327 (TRAV16, TRAJ10)
CSKKHTGGGNKITF

SEQ ID NO: 600654 - protein, 14 aa, Homo sapiens
  CDR3 for beta chain variable domain of TCR clone 300327 (TRBV7-8, TRBJ2-3)
CASSLEAGTDTQYF

SEQ ID NO: 600655 - protein, 17 aa, Homo sapiens
  CDR3 for alpha chain variable domain of TCR clone 300328 (TRAV4, )
CLVDIQNPDPAVYQLRE

SEQ ID NO: 600656 - protein, 15 aa, Homo sapiens
  CDR3 for beta chain variable domain of TCR clone 300328 (TRBV20-1, TRBJ1-5)
CSARVGRVVSQPQHF

SEQ ID NO: 600657 - protein, 15 aa, Homo sapiens
  CDR3 for alpha chain variable domain of TCR clone 300329 (TRAV21, TRAJ53)
CATLDSGGSNYKLTF

SEQ ID NO: 600658 - protein, 16 aa, Homo sapiens
  CDR3 for beta chain variable domain of TCR clone 300329 (TRBV29-1, TRBJ1-2)
CSVDANRDIANYGYTF

SEQ ID NO: 600659 - protein, 14 aa, Homo sapiens
  CDR3 for alpha chain variable domain of TCR clone 300330 (TRAV8-6, TRAJ48)
CAVSESFGNEKLTV

SEQ ID NO: 600660 - protein, 15 aa, Homo sapiens
  CDR3 for beta chain variable domain of TCR clone 300330 (TRBV7-9, TRBJ2-5)
CASSRRTGGGETQYF

SEQ ID NO: 600661 - protein, 13 aa, Homo sapiens
  CDR3 for alpha chain variable domain of TCR clone 300331 (TRAV38-2/DV8, TRAJ34)
CAYRTWNTDKLIF

SEQ ID NO: 600662 - protein, 16 aa, Homo sapiens
  CDR3 for beta chain variable domain of TCR clone 300331 (TRBV19, TRBJ2-1)
CASSKAGPSSYSEQFF

SEQ ID NO: 600663 - protein, 15 aa, Homo sapiens
  CDR3 for alpha chain variable domain of TCR clone 300332 (TRAV3, TRAJ22)
CAVRHRGGSARQLTF

SEQ ID NO: 600664 - protein, 16 aa, Homo sapiens
  CDR3 for beta chain variable domain of TCR clone 300332 (TRBV11-2, TRBJ2-1)
CASARGSYSHHNEQFF

SEQ ID NO: 600665 - protein, 14 aa, Homo sapiens
  CDR3 for alpha chain variable domain of TCR clone 300333 (TRAV2, TRAJ3)
CALDRYSSASKIIF

SEQ ID NO: 600666 - protein, 16 aa, Homo sapiens
  CDR3 for beta chain variable domain of TCR clone 300333 (TRBV20-1, TRBJ1-5)
CSAELPGQQTKQPQHF

SEQ ID NO: 600667 - protein, 17 aa, Homo sapiens
  CDR3 for alpha chain variable domain of TCR clone 300334 (TRAV13-1, TRAJ31)
CAPRDRPMFGDGTQLAV

SEQ ID NO: 600668 - protein, 12 aa, Homo sapiens
  CDR3 for beta chain variable domain of TCR clone 300334 (TRBV7-9, TRBJ2-7)
CASSLEGYEQYF

SEQ ID NO: 600669 - protein, 14 aa, Homo sapiens
  CDR3 for alpha chain variable domain of TCR clone 300335 (TRAV12-3, TRAJ57)
CAMSAWGGSEKLVF

SEQ ID NO: 600670 - protein, 14 aa, Homo sapiens
  CDR3 for beta chain variable domain of TCR clone 300335 (TRBV4-2, TRBJ2-1)
CASGLDRAYNEQFF

SEQ ID NO: 600671 - protein, 14 aa, Homo sapiens
  CDR3 for alpha chain variable domain of TCR clone 300336 (TRAV12-2, TRAJ29)
CAVRRNSGNTRLVF

SEQ ID NO: 600672 - protein, 13 aa, Homo sapiens
  CDR3 for beta chain variable domain of TCR clone 300336 (TRBV12-4, TRBJ2-1)
CASSHYTDNEQFF

SEQ ID NO: 600673 - protein, 11 aa, Homo sapiens
  CDR3 for alpha chain variable domain of TCR clone 300337 (TRAV38-2/DV8, TRAJ23)
CAYRRGGKLIF

SEQ ID NO: 600674 - protein, 14 aa, Homo sapiens
  CDR3 for beta chain variable domain of TCR clone 300337 (TRBV11-3, TRBJ2-3)
CASSSGQGPDTQYF

SEQ ID NO: 600675 - protein, 13 aa, Homo sapiens
  CDR3 for alpha chain variable domain of TCR clone 300338 (TRAV17, TRAJ29)
CATDAFRKHTSCL

SEQ ID NO: 600676 - protein, 12 aa, Homo sapiens
  CDR3 for beta chain variable domain of TCR clone 300338 (TRBV5-7, TRBJ2-6)
CQHIQWANALTF

SEQ ID NO: 600677 - protein, 16 aa, Homo sapiens
  CDR3 for alpha chain variable domain of TCR clone 300339 (TRAV17, TRAJ53)
CATDALSGGSNYKLTF

SEQ ID NO: 600678 - protein, 14 aa, Homo sapiens
  CDR3 for beta chain variable domain of TCR clone 300339 (TRBV7-6, TRBJ2-3)
CASSLGTVTDTQYF

SEQ ID NO: 600679 - protein, 13 aa, Homo sapiens
  CDR3 for alpha chain variable domain of TCR clone 300340 (TRAV12-1, TRAJ34)
CVVTGYNTDKLIF

SEQ ID NO: 600680 - protein, 13 aa, Homo sapiens
  CDR3 for beta chain variable domain of TCR clone 300340 (TRBV28, TRBJ2-7)
CAIKAGGVYEQYF

SEQ ID NO: 600681 - protein, 11 aa, Homo sapiens
  CDR3 for alpha chain variable domain of TCR clone 300341 (TRAV3, TRAJ13)
CAVTSYQKVTF

SEQ ID NO: 600682 - protein, 19 aa, Homo sapiens
  CDR3 for beta chain variable domain of TCR clone 300341 (TRBV25-1, TRBJ2-2)
CAILVYRVDRGRKTGELFF

SEQ ID NO: 600683 - protein, 13 aa, Homo sapiens
  CDR3 for alpha chain variable domain of TCR clone 300342 (TRAV29/DV5, TRAJ31)
CAASRNNNARLMF

SEQ ID NO: 600684 - protein, 15 aa, Homo sapiens
  CDR3 for beta chain variable domain of TCR clone 300342 (TRBV19, TRBJ1-6)
CASSTQGAVGSPLHF

SEQ ID NO: 600685 - protein, 13 aa, Homo sapiens
  CDR3 for alpha chain variable domain of TCR clone 300343 (TRAV27, TRAJ29)
CAGAHSGNTPLVF

SEQ ID NO: 600686 - protein, 15 aa, Homo sapiens
  CDR3 for beta chain variable domain of TCR clone 300343 (TRBV15, TRBJ1-4)
CATSRDMGSYEKQFF

SEQ ID NO: 600687 - protein, 14 aa, Homo sapiens
  CDR3 for alpha chain variable domain of TCR clone 300344 (TRAV17, TRAJ54)
CATEVVQGAQKLVF

SEQ ID NO: 600688 - protein, 14 aa, Homo sapiens
  CDR3 for beta chain variable domain of TCR clone 300344 (TRBV13, TRBJ1-1)
CASTVITVNTEAFF

SEQ ID NO: 600689 - protein, 16 aa, Homo sapiens
  CDR3 for alpha chain variable domain of TCR clone 300345 (TRAV26-1, TRAJ45)
CIVEKYSGGGADGITF

SEQ ID NO: 600690 - protein, 16 aa, Homo sapiens
  CDR3 for beta chain variable domain of TCR clone 300345 (TRBV10-3, TRBJ1-6)
CAISERRGQGNSPLHF

SEQ ID NO: 600691 - protein, 13 aa, Homo sapiens
  CDR3 for alpha chain variable domain of TCR clone 300346 (TRAV38-2/DV8, TRAJ34)
CAYRNYNTDKPIF

SEQ ID NO: 600692 - protein, 15 aa, Homo sapiens
  CDR3 for beta chain variable domain of TCR clone 300346 (TRBV20-1, TRBJ2-5)
CSAEGTGGRQETQYF

SEQ ID NO: 600693 - protein, 15 aa, Homo sapiens
  CDR3 for alpha chain variable domain of TCR clone 300347 (TRAV26-2, TRAJ28)
CILVESGAGSYQLTF

SEQ ID NO: 600694 - protein, 14 aa, Homo sapiens
  CDR3 for beta chain variable domain of TCR clone 300347 (TRBV12-4, TRBJ2-3)
CASSLGQGTDTQYF

SEQ ID NO: 600695 - protein, 20 aa, Homo sapiens
  CDR3 for alpha chain variable domain of TCR clone 300348 (TRAV26-1, TRAJ52)
CCVLLHRPSAGGTSYGKLTF

SEQ ID NO: 600696 - protein, 14 aa, Homo sapiens
  CDR3 for beta chain variable domain of TCR clone 300348 (TRBV7-2, TRBJ1-4)
CASSHSETNEKLFF

SEQ ID NO: 600697 - protein, 10 aa, Homo sapiens
  CDR3 for alpha chain variable domain of TCR clone 300349 (TRAV1-2, TRAJ31)
CAFFRYQTHV

SEQ ID NO: 600698 - protein, 13 aa, Homo sapiens
  CDR3 for beta chain variable domain of TCR clone 300349 (TRBV7-9, TRBJ1-2)
CASSLKQNYGYTF

SEQ ID NO: 600699 - protein, 16 aa, Homo sapiens
  CDR3 for alpha chain variable domain of TCR clone 300350 (TRAV14/DV4, TRAJ15)
CAMREGPAQAGTALIF

SEQ ID NO: 600700 - protein, 14 aa, Homo sapiens
  CDR3 for beta chain variable domain of TCR clone 300350 (TRBV7-2, TRBJ2-7)
CASSPKTSFYEQYF

SEQ ID NO: 600701 - protein, 13 aa, Homo sapiens
  CDR3 for alpha chain variable domain of TCR clone 300351 (TRAV27, TRAJ17)
CAGAATAGNKLTF

SEQ ID NO: 600702 - protein, 15 aa, Homo sapiens
  CDR3 for beta chain variable domain of TCR clone 300351 (TRBV5-1, TRBJ2-3)
CASRNQAGITDTQYF

SEQ ID NO: 600703 - protein, 12 aa, Homo sapiens
  CDR3 for alpha chain variable domain of TCR clone 300352 (TRAV13-1, TRAJ21)
CAAKEGVNKFYF

SEQ ID NO: 600704 - protein, 17 aa, Homo sapiens
  CDR3 for beta chain variable domain of TCR clone 300352 (TRBV5-1, TRBJ2-5)
CASSPVALGQNQETQYF

SEQ ID NO: 600705 - protein, 14 aa, Homo sapiens
  CDR3 for alpha chain variable domain of TCR clone 300353 (TRAV13-1, TRAJ44)
CAASSGGTASKLTF

SEQ ID NO: 600706 - protein, 13 aa, Homo sapiens
  CDR3 for beta chain variable domain of TCR clone 300353 (TRBV19, TRBJ1-1)
CASSPSNGGEAFF

SEQ ID NO: 600707 - protein, 12 aa, Homo sapiens
  CDR3 for alpha chain variable domain of TCR clone 300354 (TRAV3, TRAJ39)
CAVIEWSSMLTF

SEQ ID NO: 600708 - protein, 14 aa, Homo sapiens
  CDR3 for beta chain variable domain of TCR clone 300354 (TRBV7-2, TRBJ1-1)
CASSFLTGTTEAFF

SEQ ID NO: 600709 - protein, 15 aa, Homo sapiens
  CDR3 for alpha chain variable domain of TCR clone 300355 (TRAV3, TRAJ3)
CAVRDGHSSASKIIF

SEQ ID NO: 600710 - protein, 14 aa, Homo sapiens
  CDR3 for beta chain variable domain of TCR clone 300355 (TRBV28, IGLJ6)
CASSFGTFDEKLFF

SEQ ID NO: 600711 - protein, 11 aa, Homo sapiens
  CDR3 for alpha chain variable domain of TCR clone 300356 (TRAV1-1, TRAJ20)
CAVRDRTKAQL

SEQ ID NO: 600712 - protein, 14 aa, Homo sapiens
  CDR3 for beta chain variable domain of TCR clone 300356 (TRBV7-2, TRBJ2-7)
CASRSQGAAYEQYF

SEQ ID NO: 600713 - protein, 20 aa, Homo sapiens
  CDR3 for alpha chain variable domain of TCR clone 300357 (TRAV25, TRAJ21)
TATQTTDVGTYPLSFNKFYF

SEQ ID NO: 600714 - protein, 14 aa, Homo sapiens
  CDR3 for beta chain variable domain of TCR clone 300357 (TRBV6-1, TRBJ2-1)
CASEKDGFYNEQFF

SEQ ID NO: 600715 - protein, 12 aa, Homo sapiens
  CDR3 for alpha chain variable domain of TCR clone 300358 (TRAV26-2, TRAJ48)
CILRKGNEKLTF

SEQ ID NO: 600716 - protein, 16 aa, Homo sapiens
  CDR3 for beta chain variable domain of TCR clone 300358 (TRBV12-4, TRBJ1-5)
CASSRPVGGSNQPQHF

SEQ ID NO: 600717 - protein, 11 aa, Homo sapiens
  CDR3 for alpha chain variable domain of TCR clone 300359 (TRAV2, TRAJ31)
CAVYNNARLMI

SEQ ID NO: 600718 - protein, 16 aa, Homo sapiens
  CDR3 for beta chain variable domain of TCR clone 300359 (TRBV28, TRBJ1-6)
CASSSLLEGDNSPLHF

SEQ ID NO: 600719 - protein, 10 aa, Homo sapiens
  CDR3 for alpha chain variable domain of TCR clone 300360 (TRAV30, TRAJ48)
CGFGNEKLTF

SEQ ID NO: 600720 - protein, 14 aa, Homo sapiens
  CDR3 for beta chain variable domain of TCR clone 300360 (TRBV7-6, TRBJ2-3)
CASSLGTVTDTQYF

SEQ ID NO: 600721 - protein, 17 aa, Homo sapiens
  CDR3 for alpha chain variable domain of TCR clone 300361 (TRAV3, TRAJ6)
CAVRDGPRAGGSYIPTF

SEQ ID NO: 600722 - protein, 11 aa, Homo sapiens
  CDR3 for beta chain variable domain of TCR clone 300361 (TRBV12-4, TRBJ2-3)
CASSFTDTQYF

SEQ ID NO: 600723 - protein, 14 aa, Homo sapiens
  CDR3 for alpha chain variable domain of TCR clone 300362 (TRAV23/DV6, TRAJ27)
CAASRDTNAGKSTF

SEQ ID NO: 600724 - protein, 14 aa, Homo sapiens
  CDR3 for beta chain variable domain of TCR clone 300362 (TRBV5-4, TRBJ1-1)
CASSLDSRRDEAFF

SEQ ID NO: 600725 - protein, 14 aa, Homo sapiens
  CDR3 for alpha chain variable domain of TCR clone 300363 (TRAV12-1, TRAJ3)
CVVNPGSSASKIIF

SEQ ID NO: 600726 - protein, 18 aa, Homo sapiens
  CDR3 for beta chain variable domain of TCR clone 300363 (TRBV4-2, TRBJ1-2)
CASSQDKVGHTVNCGYTF

SEQ ID NO: 600727 - protein, 14 aa, Homo sapiens
  CDR3 for alpha chain variable domain of TCR clone 300364 (TRAV6, TRAJ17)
CALDLKAAGNQLTF

SEQ ID NO: 600728 - protein, 17 aa, Homo sapiens
  CDR3 for beta chain variable domain of TCR clone 300364 (TRBV7-8, TRBJ2-7)
CASSFTSGRPPSYEQYF

SEQ ID NO: 600729 - protein, 14 aa, Homo sapiens
  CDR3 for alpha chain variable domain of TCR clone 300365 (TRAV1-2, TRAJ16)
CAVNRFSDGQKLLF

SEQ ID NO: 600730 - protein, 13 aa, Homo sapiens
  CDR3 for beta chain variable domain of TCR clone 300365 (TRBV7-7, TRBJ2-5)
CATTGGAMETQYF

SEQ ID NO: 600731 - protein, 17 aa, Homo sapiens
  CDR3 for alpha chain variable domain of TCR clone 300366 (TRAV26-2, TRAJ42)
CILRDVGYGGSQGNLIF

SEQ ID NO: 600732 - protein, 16 aa, Homo sapiens
  CDR3 for beta chain variable domain of TCR clone 300366 (TRBV6-5, TRBJ2-1)
CASSETSAGHYNEQFF

SEQ ID NO: 600733 - protein, 12 aa, Homo sapiens
  CDR3 for alpha chain variable domain of TCR clone 300367 (TRAV1-1, TRAJ8)
CAGGTGFQKLVF

SEQ ID NO: 600734 - protein, 15 aa, Homo sapiens
  CDR3 for beta chain variable domain of TCR clone 300367 (TRBV5-1, TRBJ2-3)
CASSVTSGSTDTQYF

SEQ ID NO: 600735 - protein, 14 aa, Homo sapiens
  CDR3 for alpha chain variable domain of TCR clone 300368 (TRAV12-1, TRAJ26)
CVVKGSNYGQNFVF

SEQ ID NO: 600736 - protein, 17 aa, Homo sapiens
  CDR3 for beta chain variable domain of TCR clone 300368 (TRBV11-2, TRBJ2-6)
CASSQRDIFSGANVLSF

SEQ ID NO: 600737 - protein, 11 aa, Homo sapiens
  CDR3 for alpha chain variable domain of TCR clone 300369 (TRAV1-2, TRAJ21)
CALYNFNKFYF

SEQ ID NO: 600738 - protein, 13 aa, Homo sapiens
  CDR3 for beta chain variable domain of TCR clone 300369 (TRBV7-9, TRBJ1-2)
CASSPSNFWGYTF

SEQ ID NO: 600739 - protein, 14 aa, Homo sapiens
  CDR3 for alpha chain variable domain of TCR clone 300370 (TRAV17, TRAJ22)
CATVLSGSARQLTC

SEQ ID NO: 600740 - protein, 13 aa, Homo sapiens
  CDR3 for beta chain variable domain of TCR clone 300370 (TRBV15, TRBJ1-6)
CATSGGLNSPLHF

SEQ ID NO: 600741 - protein, 14 aa, Homo sapiens
  CDR3 for alpha chain variable domain of TCR clone 300371 (TRAV12-3, TRAJ50)
CAMSPKTSYDKVRF

SEQ ID NO: 600742 - protein, 14 aa, Homo sapiens
  CDR3 for beta chain variable domain of TCR clone 300371 (TRBV19, TRBJ1-1)
CASSMGRNAFEAFF

SEQ ID NO: 600743 - protein, 15 aa, Homo sapiens
  CDR3 for alpha chain variable domain of TCR clone 300372 (TRAV13-1, TRAJ44)
WAASRGGGTASKLTF

SEQ ID NO: 600744 - protein, 14 aa, Homo sapiens
  CDR3 for beta chain variable domain of TCR clone 300372 (TRBV7-2, TRBJ2-5)
CASSPRGSSETQYF

SEQ ID NO: 600745 - protein, 14 aa, Homo sapiens
  CDR3 for alpha chain variable domain of TCR clone 300373 (TRAV27, TRAJ17)
CRSTIRAAGNKLTF

SEQ ID NO: 600746 - protein, 14 aa, Homo sapiens
  CDR3 for beta chain variable domain of TCR clone 300373 (TRBV6-1, TRBJ1-3)
CASVQGGGGNTIYF

SEQ ID NO: 600747 - protein, 11 aa, Homo sapiens
  CDR3 for alpha chain variable domain of TCR clone 300374 (TRAV25, TRAJ49)
CAGGTGNQFYF

SEQ ID NO: 600748 - protein, 12 aa, Homo sapiens
  CDR3 for beta chain variable domain of TCR clone 300374 (TRBV6-5, TRBJ2-1)
RASRNDRGQQFF

SEQ ID NO: 600749 - protein, 13 aa, Homo sapiens
  CDR3 for alpha chain variable domain of TCR clone 300375 (TRAV13-2, TRAJ13)
CAERPGGYQKVTF

SEQ ID NO: 600750 - protein, 13 aa, Homo sapiens
  CDR3 for beta chain variable domain of TCR clone 300375 (TRBV10-3, TRBJ2-7)
CVSKLAVNYEQYF

SEQ ID NO: 600751 - protein, 11 aa, Homo sapiens
  CDR3 for alpha chain variable domain of TCR clone 300376 (TRAV13-1, TRAJ15)
CAATPGTALIF

SEQ ID NO: 600752 - protein, 15 aa, Homo sapiens
  CDR3 for beta chain variable domain of TCR clone 300376 (TRBV28, TRBJ2-5)
CASSPSWSYQETQYF

SEQ ID NO: 600753 - protein, 15 aa, Homo sapiens
  CDR3 for alpha chain variable domain of TCR clone 300377 (TRAV16, TRAJ10)
CALEGLTGGGNKLTF

SEQ ID NO: 600754 - protein, 18 aa, Homo sapiens
  CDR3 for beta chain variable domain of TCR clone 300377 (TRBV5-7, TRBJ1-1)
CASSLVGPRGNTEAFLDK

SEQ ID NO: 600755 - protein, 14 aa, Homo sapiens
  CDR3 for alpha chain variable domain of TCR clone 300378 (TRAV13-1, TRAJ35)
CAASKGGFGNVLHC

SEQ ID NO: 600756 - protein, 15 aa, Homo sapiens
  CDR3 for beta chain variable domain of TCR clone 300378 (TRBV11-2, TRBJ2-1)
CASSRNRGLMYEQFF

SEQ ID NO: 600757 - protein, 12 aa, Homo sapiens
  CDR3 for alpha chain variable domain of TCR clone 300379 (TRAV16, TRAJ26)
CASKDGGQNFDF

SEQ ID NO: 600758 - protein, 13 aa, Homo sapiens
  CDR3 for beta chain variable domain of TCR clone 300379 (TRBV25-1, TRBJ1-1)
CASSDRGRAEAFF

SEQ ID NO: 600759 - protein, 14 aa, Homo sapiens
  CDR3 for alpha chain variable domain of TCR clone 300380 (TRAV9-2, TRAJ39)
CALYIYNAGNMLTF

SEQ ID NO: 600760 - protein, 16 aa, Homo sapiens
  CDR3 for beta chain variable domain of TCR clone 300380 (TRBV19, TRBJ2-2)
CASRSPGTGAAGELFF

SEQ ID NO: 600761 - protein, 14 aa, Homo sapiens
  CDR3 for alpha chain variable domain of TCR clone 300381 (TRAV17, TRAJ15)
CATDAWQAGTALIF

SEQ ID NO: 600762 - protein, 14 aa, Homo sapiens
  CDR3 for beta chain variable domain of TCR clone 300381 (TRBV12-4, TRBJ1-6)
CASRPDGYNSPLHF

SEQ ID NO: 600763 - protein, 14 aa, Homo sapiens
  CDR3 for alpha chain variable domain of TCR clone 300382 (TRAV3, TRAJ9)
CAVRLNTGGFKTIF

SEQ ID NO: 600764 - protein, 15 aa, Homo sapiens
  CDR3 for beta chain variable domain of TCR clone 300382 (TRBV6-1, TRBJ2-3)
CASSERGGITDTQYF

SEQ ID NO: 600765 - protein, 11 aa, Homo sapiens
  CDR3 for alpha chain variable domain of TCR clone 300383 (TRAV2, TRAJ37)
CAVDNTGKLIF

SEQ ID NO: 600766 - protein, 13 aa, Homo sapiens
  CDR3 for beta chain variable domain of TCR clone 300383 (TRBV28, TRBJ1-2)
CAGRDRGNYGYTF

SEQ ID NO: 600767 - protein, 16 aa, Homo sapiens
  CDR3 for alpha chain variable domain of TCR clone 300384 (TRAV12-3, TRAJ53)
CAMSPGSGGSNYKLTF

SEQ ID NO: 600768 - protein, 13 aa, Homo sapiens
  CDR3 for beta chain variable domain of TCR clone 300384 (TRBV7-3, TRBJ1-1)
CASSQDWGAEAFL

SEQ ID NO: 600769 - protein, 10 aa, Homo sapiens
  CDR3 for alpha chain variable domain of TCR clone 300385 (TRAV1-1, TRAJ5)
CAVIYESTYF

SEQ ID NO: 600770 - protein, 15 aa, Homo sapiens
  CDR3 for beta chain variable domain of TCR clone 300385 (TRBV4-1, TRBJ1-4)
CASSDTGGTNEKLFF

SEQ ID NO: 600771 - protein, 12 aa, Homo sapiens
  CDR3 for alpha chain variable domain of TCR clone 300386 (TRAV13-1, TRAJ48)
CAANFGNEKLNF

SEQ ID NO: 600772 - protein, 14 aa, Homo sapiens
  CDR3 for beta chain variable domain of TCR clone 300386 (TRBV6-3, TRBJ1-1)
CASSYQRRDTEAFF

SEQ ID NO: 600773 - protein, 11 aa, Homo sapiens
  CDR3 for alpha chain variable domain of TCR clone 300387 (TRAV12-2, TRAJ29)
CAVTLRSPLVF

SEQ ID NO: 600774 - protein, 13 aa, Homo sapiens
  CDR3 for beta chain variable domain of TCR clone 300387 (TRBV7-3, TRBJ1-1)
CASSQDWGAEAFF

SEQ ID NO: 600775 - protein, 15 aa, Homo sapiens
  CDR3 for alpha chain variable domain of TCR clone 300388 (TRAV25, TRAJ52)
CAGTSGGTSYGRLTF

SEQ ID NO: 600776 - protein, 13 aa, Homo sapiens
  CDR3 for beta chain variable domain of TCR clone 300388 (TRBV6-5, TRBJ2-5)
CASSPQGGETQYF

SEQ ID NO: 600777 - protein, 12 aa, Homo sapiens
  CDR3 for alpha chain variable domain of TCR clone 300389 (TRAV25, TRAJ38)
CAGTGNNRKLIR

SEQ ID NO: 600778 - protein, 14 aa, Homo sapiens
  CDR3 for beta chain variable domain of TCR clone 300389 (TRBV19, TRBJ1-5)
CASSKMTGPQPQHF

SEQ ID NO: 600779 - protein, 14 aa, Homo sapiens
  CDR3 for alpha chain variable domain of TCR clone 300390 (TRAV17, TRAJ45)
CATDAGGGADGLTF

SEQ ID NO: 600780 - protein, 14 aa, Homo sapiens
  CDR3 for beta chain variable domain of TCR clone 300390 (TRBV7-3, TRBJ2-1)
CASSLSRSDNEQFF

SEQ ID NO: 600781 - protein, 12 aa, Homo sapiens
  CDR3 for alpha chain variable domain of TCR clone 300391 (TRAV12-1, TRAJ23)
CVVNIPGGKLSF

SEQ ID NO: 600782 - protein, 15 aa, Homo sapiens
  CDR3 for beta chain variable domain of TCR clone 300391 (TRBV7-2, TRBJ2-7)
CASSLVYSGSYEQYF

SEQ ID NO: 600783 - protein, 15 aa, Homo sapiens
  CDR3 for alpha chain variable domain of TCR clone 300392 (TRAV8-1, TRAJ42)
CAVTNYGGSQGNLIF

SEQ ID NO: 600784 - protein, 11 aa, Homo sapiens
  CDR3 for beta chain variable domain of TCR clone 300392 (TRBV19, TRBJ2-5)
CASSIKETQYF

SEQ ID NO: 600785 - protein, 13 aa, Homo sapiens
  CDR3 for alpha chain variable domain of TCR clone 300393 (TRAV23/DV6, TRAJ12)
CAPRVDSSYKLIF

SEQ ID NO: 600786 - protein, 14 aa, Homo sapiens
  CDR3 for beta chain variable domain of TCR clone 300393 (TRBV7-9, TRBJ2-3)
CASSLEDGTDTQYF

SEQ ID NO: 600787 - protein, 10 aa, Homo sapiens
  CDR3 for alpha chain variable domain of TCR clone 300394 (TRAV8-2, TRAJ29)
CTGGNTPLVF

SEQ ID NO: 600788 - protein, 13 aa, Homo sapiens
  CDR3 for beta chain variable domain of TCR clone 300394 (TRBV20-1, TRBJ1-1)
CSARGGGNNEAFF

SEQ ID NO: 600789 - protein, 13 aa, Homo sapiens
  CDR3 for alpha chain variable domain of TCR clone 300395 (TRAV2, TRAJ15)
CAVTSQAGTALIF

SEQ ID NO: 600790 - protein, 14 aa, Homo sapiens
  CDR3 for beta chain variable domain of TCR clone 300395 (TRBV20-1, TRBJ1-1)
CSAQTRIGGTEAFF

SEQ ID NO: 600791 - protein, 15 aa, Homo sapiens
  CDR3 for alpha chain variable domain of TCR clone 300396 (TRAV8-6, TRAJ6)
CAVSGESGGSYIPTF

SEQ ID NO: 600792 - protein, 14 aa, Homo sapiens
  CDR3 for beta chain variable domain of TCR clone 300396 (TRBV7-9, TRBJ2-7)
CASSPKTSFYEQYF

SEQ ID NO: 600793 - protein, 16 aa, Homo sapiens
  CDR3 for alpha chain variable domain of TCR clone 300397 (TRAV16, TRAJ4)
CALSRMFSGGYNKLIF

SEQ ID NO: 600794 - protein, 15 aa, Homo sapiens
  CDR3 for beta chain variable domain of TCR clone 300397 (TRBV2, TRBJ2-4)
CASSLNRDSKNIQYF

SEQ ID NO: 600795 - protein, 16 aa, Homo sapiens
  CDR3 for alpha chain variable domain of TCR clone 300398 (TRAV23/DV6, TRAJ3)
CSKHAVSYSSASTILF

SEQ ID NO: 600796 - protein, 15 aa, Homo sapiens
  CDR3 for beta chain variable domain of TCR clone 300398 (TRBV27, TRBJ2-1)
CASSNGGGSSNEQFF

SEQ ID NO: 600797 - protein, 15 aa, Homo sapiens
  CDR3 for alpha chain variable domain of TCR clone 300399 (TRAV25, TRAJ53)
CPTSNSGGSNYKLTF

SEQ ID NO: 600798 - protein, 15 aa, Homo sapiens
  CDR3 for beta chain variable domain of TCR clone 300399 (TRBV28, TRBJ2-2)
CASNRQGRDTGELFF

SEQ ID NO: 600799 - protein, 13 aa, Homo sapiens
  CDR3 for alpha chain variable domain of TCR clone 300400 (TRAV27, TRAJ29)
CAGAHSGNTPLVF

SEQ ID NO: 600800 - protein, 15 aa, Homo sapiens
  CDR3 for beta chain variable domain of TCR clone 300400 (TRBV7-9, TRBJ2-5)
CASSLEGGSGETQYF

SEQ ID NO: 600801 - protein, 12 aa, Homo sapiens
  CDR3 for alpha chain variable domain of TCR clone 300401 (TRAV3, TRAJ20)
CAVRDGDYELSF

SEQ ID NO: 600802 - protein, 17 aa, Homo sapiens
  CDR3 for beta chain variable domain of TCR clone 300401 (TRBV15, TRBJ1-1)
CATSRVGGADGDTEAFF

SEQ ID NO: 600803 - protein, 15 aa, Homo sapiens
  CDR3 for alpha chain variable domain of TCR clone 300402 (TRAV2, TRAJ15)
CAVEDRGQAGTALIL

SEQ ID NO: 600804 - protein, 13 aa, Homo sapiens
  CDR3 for beta chain variable domain of TCR clone 300402 (TRBV10-2, TRBJ2-7)
CASGASGGYEQYL

SEQ ID NO: 600805 - protein, 14 aa, Homo sapiens
  CDR3 for alpha chain variable domain of TCR clone 300403 (TRAV16, TRAJ3)
CALSQYSSASKIIF

SEQ ID NO: 600806 - protein, 12 aa, Homo sapiens
  CDR3 for beta chain variable domain of TCR clone 300403 (TRBV3-1, TRBJ2-1)
CASSQGSSGQFF

SEQ ID NO: 600807 - protein, 14 aa, Homo sapiens
  CDR3 for alpha chain variable domain of TCR clone 300404 (TRAV1-2, TRAJ16)
CAVNRFSDGQNLLF

SEQ ID NO: 600808 - protein, 17 aa, Homo sapiens
  CDR3 for beta chain variable domain of TCR clone 300404 (TRBV7-3, TRBJ2-3)
CASSLMKRMRGADTQYF

SEQ ID NO: 600809 - protein, 15 aa, Homo sapiens
  CDR3 for alpha chain variable domain of TCR clone 300405 (TRAV21, TRAJ37)
CAVRPTLSNTGKRIF

SEQ ID NO: 600810 - protein, 16 aa, Homo sapiens
  CDR3 for beta chain variable domain of TCR clone 300405 (TRBV24-1, TRBJ2-3)
CATSDRRQDLTDTQYF

SEQ ID NO: 600811 - protein, 14 aa, Homo sapiens
  CDR3 for alpha chain variable domain of TCR clone 300406 (TRAV12-2, TRAJ13)
CAVKKTGGYQKVTF

SEQ ID NO: 600812 - protein, 15 aa, Homo sapiens
  CDR3 for beta chain variable domain of TCR clone 300406 (TRBV20-1, TRBJ2-7)
CSARDRVSGVDEQYF

SEQ ID NO: 600813 - protein, 13 aa, Homo sapiens
  CDR3 for alpha chain variable domain of TCR clone 300407 (TRAV3, TRAJ21)
CAVREPDFNKFYF

SEQ ID NO: 600814 - protein, 15 aa, Homo sapiens
  CDR3 for beta chain variable domain of TCR clone 300407 (TRBV2, TRBJ2-1)
CASRELAGGYNEQFF

SEQ ID NO: 600815 - protein, 18 aa, Homo sapiens
  CDR3 for alpha chain variable domain of TCR clone 300408 (TRAV17, TRAJ45)
CATSLDLYSGGGADGLTF

SEQ ID NO: 600816 - protein, 15 aa, Homo sapiens
  CDR3 for beta chain variable domain of TCR clone 300408 (TRBV19, TRBJ2-1)
CASSIVRGEGREQFF

SEQ ID NO: 600817 - protein, 18 aa, Homo sapiens
  CDR3 for alpha chain variable domain of TCR clone 300409 (TRAV13-1, TRAJ52)
CAASKRSAGGTSYGKLTF

SEQ ID NO: 600818 - protein, 14 aa, Homo sapiens
  CDR3 for beta chain variable domain of TCR clone 300409 (TRBV7-9, TRBJ2-5)
CASSLDTAQETQYF

SEQ ID NO: 600819 - protein, 15 aa, Homo sapiens
  CDR3 for alpha chain variable domain of TCR clone 300410 (TRAV8-2, TRAJ13)
CVVSDLSVGYQKVTF

SEQ ID NO: 600820 - protein, 16 aa, Homo sapiens
  CDR3 for beta chain variable domain of TCR clone 300410 (TRBV27, TRBJ2-2)
CASSFRGLVRTGELFF

SEQ ID NO: 600821 - protein, 16 aa, Homo sapiens
  CDR3 for alpha chain variable domain of TCR clone 300411 (TRAV3, TRAJ3)
CAVRDRAKSSASKIIF

SEQ ID NO: 600822 - protein, 16 aa, Homo sapiens
  CDR3 for beta chain variable domain of TCR clone 300411 (TRBV20-1, TRBJ2-7)
CSATSLAELAKNIQYF

SEQ ID NO: 600823 - protein, 13 aa, Homo sapiens
  CDR3 for alpha chain variable domain of TCR clone 300412 (TRAV2, TRAJ40)
CAVVTSGTYKYIF

SEQ ID NO: 600824 - protein, 15 aa, Homo sapiens
  CDR3 for beta chain variable domain of TCR clone 300412 (TRBV5-5, TRBJ2-7)
CASSLAAPLSYEQYF

SEQ ID NO: 600825 - protein, 21 aa, Homo sapiens
  CDR3 for alpha chain variable domain of TCR clone 300413 (TRAV1-2, TRAJ37)
CLLPLCCERFHGSGNTGKLIF

SEQ ID NO: 600826 - protein, 14 aa, Homo sapiens
  CDR3 for beta chain variable domain of TCR clone 300413 (TRBV2, TRBJ2-5)
CARSAVLAQETQYF

SEQ ID NO: 600827 - protein, 11 aa, Homo sapiens
  CDR3 for alpha chain variable domain of TCR clone 300414 (TRAV2, TRAJ13)
CASGGYQKVTF

SEQ ID NO: 600828 - protein, 15 aa, Homo sapiens
  CDR3 for beta chain variable domain of TCR clone 300414 (TRBV7-3, TRBJ2-7)
CASSPPVALNYEQYF

SEQ ID NO: 600829 - protein, 15 aa, Homo sapiens
  CDR3 for alpha chain variable domain of TCR clone 300415 (TRAV23/DV6, TRAJ18)
CAARYRGSTLVRLYF

SEQ ID NO: 600830 - protein, 13 aa, Homo sapiens
  CDR3 for beta chain variable domain of TCR clone 300415 (TRBV7-2, TRBJ2-7)
CASSSPSGSEQYF

SEQ ID NO: 600831 - protein, 14 aa, Homo sapiens
  CDR3 for alpha chain variable domain of TCR clone 300416 (TRAV13-1, TRAJ44)
CAAKATGPASKLTF

SEQ ID NO: 600832 - protein, 17 aa, Homo sapiens
  CDR3 for beta chain variable domain of TCR clone 300416 (TRBV7-3, TRBJ2-3)
RASGLMKRMRGADTQYF

SEQ ID NO: 600833 - protein, 13 aa, Homo sapiens
  CDR3 for alpha chain variable domain of TCR clone 300417 (TRAV8-3, TRAJ48)
CAVVPFGNEKLTF

SEQ ID NO: 600834 - protein, 16 aa, Homo sapiens
  CDR3 for beta chain variable domain of TCR clone 300417 (TRBV19, TRBJ1-6)
CASSVAPVAGNSPLHF

SEQ ID NO: 600835 - protein, 14 aa, Homo sapiens
  CDR3 for alpha chain variable domain of TCR clone 300418 (TRAV38-2/DV8, TRAJ57)
CARNTQGGSEKLVF

SEQ ID NO: 600836 - protein, 16 aa, Homo sapiens
  CDR3 for beta chain variable domain of TCR clone 300418 (TRBV5-1, TRBJ1-1)
CASSSGGNSLNTEAFF

SEQ ID NO: 600837 - protein, 14 aa, Homo sapiens
  CDR3 for alpha chain variable domain of TCR clone 300419 (TRAV3, TRAJ6)
CAVRDPWGSYIPTF

SEQ ID NO: 600838 - protein, 14 aa, Homo sapiens
  CDR3 for beta chain variable domain of TCR clone 300419 (TRBV28, TRBJ1-1)
CASSSEQGYTEAFF

SEQ ID NO: 600839 - protein, 20 aa, Homo sapiens
  CDR3 for alpha chain variable domain of TCR clone 300420 (TRAV1-2, TRAJ8)
CAVREDTLSETCIWNWHSTS

SEQ ID NO: 600840 - protein, 13 aa, Homo sapiens
  CDR3 for beta chain variable domain of TCR clone 300420 (TRBV7-3, TRBJ1-1)
CASSQDWGAEAFF

SEQ ID NO: 600841 - protein, 15 aa, Homo sapiens
  CDR3 for alpha chain variable domain of TCR clone 300421 (TRAV26-1, TRAJ44)
CFVRANTGTASKLTF

SEQ ID NO: 600842 - protein, 16 aa, Homo sapiens
  CDR3 for beta chain variable domain of TCR clone 300421 (TRBV7-7, TRBJ2-1)
CASSLASGTSYNEQFF

SEQ ID NO: 600843 - protein, 11 aa, Homo sapiens
  CDR3 for alpha chain variable domain of TCR clone 300422 (TRAV12-1, TRAJ26)
CVVAYGQNFVF

SEQ ID NO: 600844 - protein, 17 aa, Homo sapiens
  CDR3 for beta chain variable domain of TCR clone 300422 (TRBV7-3, TRBJ2-3)
CASSLMKRMRGADTQYF

SEQ ID NO: 600845 - protein, 12 aa, Homo sapiens
  CDR3 for alpha chain variable domain of TCR clone 300423 (TRAV1-1, TRAJ8)
CAGGTGFPKLVF

SEQ ID NO: 600846 - protein, 15 aa, Homo sapiens
  CDR3 for beta chain variable domain of TCR clone 300423 (TRBV7-2, TRBJ1-2)
CASSPRAGWNYGYTF

SEQ ID NO: 600847 - protein, 13 aa, Homo sapiens
  CDR3 for alpha chain variable domain of TCR clone 300424 (TRAV4, TRAJ28)
CLFIWGWELPTHF

SEQ ID NO: 600848 - protein, 14 aa, Homo sapiens
  CDR3 for beta chain variable domain of TCR clone 300424 (TRBV7-9, TRBJ2-5)
SASSLDTAQETQYF

SEQ ID NO: 600849 - protein, 13 aa, Homo sapiens
  CDR3 for alpha chain variable domain of TCR clone 300425 (TRAV3, TRAJ27)
CAVRPPGAGKSTC

SEQ ID NO: 600850 - protein, 13 aa, Homo sapiens
  CDR3 for beta chain variable domain of TCR clone 300425 (TRBV7-9, TRBJ2-3)
CASSPGSTDTQYF

SEQ ID NO: 600851 - protein, 18 aa, Homo sapiens
  CDR3 for alpha chain variable domain of TCR clone 300426 (TRAV13-1, TRAJ52)
CAASKRSAGGTSYGKLTF

SEQ ID NO: 600852 - protein, 14 aa, Homo sapiens
  CDR3 for beta chain variable domain of TCR clone 300426 (TRBV7-6, TRBJ2-3)
CASSVAGGTDTQYF

SEQ ID NO: 600853 - protein, 11 aa, Homo sapiens
  CDR3 for alpha chain variable domain of TCR clone 300427 (TRAV8-1, TRAJ8)
CAMTGFQKLVF

SEQ ID NO: 600854 - protein, 17 aa, Homo sapiens
  CDR3 for beta chain variable domain of TCR clone 300427 (TRBV11-2, TRBJ2-1)
CASSLYPPGVEYNEQFF

SEQ ID NO: 600855 - protein, 14 aa, Homo sapiens
  CDR3 for alpha chain variable domain of TCR clone 300428 (TRAV17, TRAJ17)
CATVVRGAGNKLTF

SEQ ID NO: 600856 - protein, 12 aa, Homo sapiens
  CDR3 for beta chain variable domain of TCR clone 300428 (TRBV12-4, TRBJ2-1)
CASSLVRVEQFF

SEQ ID NO: 600857 - protein, 14 aa, Homo sapiens
  CDR3 for alpha chain variable domain of TCR clone 300429 (TRAV23/DV6, TRAJ23)
CAASRRGQGGKLIF

SEQ ID NO: 600858 - protein, 14 aa, Homo sapiens
  CDR3 for beta chain variable domain of TCR clone 300429 (TRBV18, TRBJ2-5)
CASSPLRVQETQYF

SEQ ID NO: 600859 - protein, 13 aa, Homo sapiens
  CDR3 for alpha chain variable domain of TCR clone 300430 (TRAV12-1, TRAJ30)
CVGNTYRDDKIIF

SEQ ID NO: 600860 - protein, 13 aa, Homo sapiens
  CDR3 for beta chain variable domain of TCR clone 300430 (TRBV9, TRBJ1-2)
CASSRLGGGGYTF

SEQ ID NO: 600861 - protein, 13 aa, Homo sapiens
  CDR3 for alpha chain variable domain of TCR clone 300431 (TRAV3, TRAJ21)
CAVREPDFNKFYF

SEQ ID NO: 600862 - protein, 16 aa, Homo sapiens
  CDR3 for beta chain variable domain of TCR clone 300431 (TRBV5-1, TRBJ2-3)
GASSLGLAVYTDTQYF

SEQ ID NO: 600863 - protein, 16 aa, Homo sapiens
  CDR3 for alpha chain variable domain of TCR clone 300432 (TRAV14/DV4, TRAJ53)
CAMREGGGGSNYKLTF

SEQ ID NO: 600864 - protein, 12 aa, Homo sapiens
  CDR3 for beta chain variable domain of TCR clone 300432 (TRBV11-2, TRBJ2-2)
CASSLPTGELFF

SEQ ID NO: 600865 - protein, 14 aa, Homo sapiens
  CDR3 for alpha chain variable domain of TCR clone 300433 (TRAV8-1, TRAJ24)
CAVNAADSWGKLQF

SEQ ID NO: 600866 - protein, 17 aa, Homo sapiens
  CDR3 for beta chain variable domain of TCR clone 300433 (TRBV11-2, TRBJ2-1)
CTSSLYPPGVEYNEQFF

SEQ ID NO: 600867 - protein, 16 aa, Homo sapiens
  CDR3 for alpha chain variable domain of TCR clone 300434 (TRAV12-3, TRAJ58)
CAMTDTEETSGSRLTF

SEQ ID NO: 600868 - protein, 11 aa, Homo sapiens
  CDR3 for beta chain variable domain of TCR clone 300434 (TRBV11-2, TRBJ2-2)
CASSLPGELFF

SEQ ID NO: 600869 - protein, 16 aa, Homo sapiens
  CDR3 for alpha chain variable domain of TCR clone 300435 (TRAV1-2, TRAJ10)
CAVRGVLTGGGNKPTF

SEQ ID NO: 600870 - protein, 12 aa, Homo sapiens
  CDR3 for beta chain variable domain of TCR clone 300435 (TRBV7-8, TRBJ2-7)
CASSRGDRKQYF

SEQ ID NO: 600871 - protein, 13 aa, Homo sapiens
  CDR3 for alpha chain variable domain of TCR clone 300436 (TRAV1-2, TRAJ9)
CAALNTGGFKTIF

SEQ ID NO: 600872 - protein, 15 aa, Homo sapiens
  CDR3 for beta chain variable domain of TCR clone 300436 (TRBV6-3, TRBJ2-7)
GASSSPGTVFYEQYF

SEQ ID NO: 600873 - protein, 15 aa, Homo sapiens
  CDR3 for alpha chain variable domain of TCR clone 300437 (TRAV21, TRAJ53)
CATLHSGGSNYKLTF

SEQ ID NO: 600874 - protein, 13 aa, Homo sapiens
  CDR3 for beta chain variable domain of TCR clone 300437 (TRBV7-7, TRBJ1-1)
CASSLGANTEAFF

SEQ ID NO: 600875 - protein, 14 aa, Homo sapiens
  CDR3 for alpha chain variable domain of TCR clone 300438 (TRAV9-2, TRAJ39)
CALYIYNAGNMLTF

SEQ ID NO: 600876 - protein, 17 aa, Homo sapiens
  CDR3 for beta chain variable domain of TCR clone 300438 (TRBV20-1, TRBJ2-1)
CSAPDRGAGVAYNEQFF

SEQ ID NO: 600877 - protein, 15 aa, Homo sapiens
  CDR3 for alpha chain variable domain of TCR clone 300439 (TRAV3, TRAJ22)
CAVRDRGGPARQLTF

SEQ ID NO: 600878 - protein, 15 aa, Homo sapiens
  CDR3 for beta chain variable domain of TCR clone 300439 (TRBV4-3, TRBJ2-1)
CASSQDGVRQNEQFF

SEQ ID NO: 600879 - protein, 16 aa, Homo sapiens
  CDR3 for alpha chain variable domain of TCR clone 300440 (TRAV30, TRAJ24)
CGTEIVDADSWGQFQF

SEQ ID NO: 600880 - protein, 15 aa, Homo sapiens
  CDR3 for beta chain variable domain of TCR clone 300440 (TRBV20-1, TRBJ2-6)
CSARDRGPGANVLTF

SEQ ID NO: 600881 - protein, 16 aa, Homo sapiens
  CDR3 for alpha chain variable domain of TCR clone 300441 (TRAV3, TRAJ10)
CAVRDMRAGGGNKLTF

SEQ ID NO: 600882 - protein, 14 aa, Homo sapiens
  CDR3 for beta chain variable domain of TCR clone 300441 (TRBV25-1, TRBJ1-1)
FASTHLGGNTEAFF

SEQ ID NO: 600883 - protein, 17 aa, Homo sapiens
  CDR3 for alpha chain variable domain of TCR clone 300442 (TRAV3, TRAJ38)
CAVKDCLNAGNNRKLIW

SEQ ID NO: 600884 - protein, 13 aa, Homo sapiens
  CDR3 for beta chain variable domain of TCR clone 300442 (TRBV23-1, TRBJ1-4)
CASRGKFNEKLFF

SEQ ID NO: 600885 - protein, 15 aa, Homo sapiens
  CDR3 for alpha chain variable domain of TCR clone 300443 (TRAV3, TRAJ10)
CAVRDGTGGGNKLTF

SEQ ID NO: 600886 - protein, 16 aa, Homo sapiens
  CDR3 for beta chain variable domain of TCR clone 300443 (TRBV19, TRBJ2-1)
CASSKAGPSSYNEQFF

SEQ ID NO: 600887 - protein, 13 aa, Homo sapiens
  CDR3 for alpha chain variable domain of TCR clone 300444 (TRAV35, TRAJ42)
CARFPGSQGNLIF

SEQ ID NO: 600888 - protein, 14 aa, Homo sapiens
  CDR3 for beta chain variable domain of TCR clone 300444 (TRBV4-1, TRBJ2-2)
CASSQAVNTGELFF

SEQ ID NO: 600889 - protein, 12 aa, Homo sapiens
  CDR3 for alpha chain variable domain of TCR clone 300445 (TRAV13-1, TRAJ42)
VNYVGSQGNLIF

SEQ ID NO: 600890 - protein, 12 aa, Homo sapiens
  CDR3 for beta chain variable domain of TCR clone 300445 (TRBV7-9, TRBJ2-7)
CASSLEGYEQYF

SEQ ID NO: 600891 - protein, 15 aa, Homo sapiens
  CDR3 for alpha chain variable domain of TCR clone 300446 (TRAV12-3, TRAJ6)
CAMSATTGGSYIPTF

SEQ ID NO: 600892 - protein, 13 aa, Homo sapiens
  CDR3 for beta chain variable domain of TCR clone 300446 (TRBV27, TRBJ2-1)
CASRTRGVGEQFF

SEQ ID NO: 600893 - protein, 10 aa, Homo sapiens
  CDR3 for alpha chain variable domain of TCR clone 300447 (TRAV27, TRAJ43)
CAGANNDMRF

SEQ ID NO: 600894 - protein, 20 aa, Homo sapiens
  CDR3 for beta chain variable domain of TCR clone 300447 (TRBV6-1, TRBJ1-4)
CASSESLAGGMRATNETLFF

SEQ ID NO: 600895 - protein, 14 aa, Homo sapiens
  CDR3 for alpha chain variable domain of TCR clone 300448 (TRAV1-2, TRAJ16)
CAVNRFSDGQKLPF

SEQ ID NO: 600896 - protein, 16 aa, Homo sapiens
  CDR3 for beta chain variable domain of TCR clone 300448 (TRBV7-7, TRBJ2-1)
CASSLASGTSYNEQFF

SEQ ID NO: 600897 - protein, 10 aa, Homo sapiens
  CDR3 for alpha chain variable domain of TCR clone 300449 (TRAV13-1, TRAJ30)
CAAVDDKIIF

SEQ ID NO: 600898 - protein, 14 aa, Homo sapiens
  CDR3 for beta chain variable domain of TCR clone 300449 (TRBV7-9, TRBJ2-1)
CASSDNSGYNEQFF

SEQ ID NO: 600899 - protein, 18 aa, Homo sapiens
  CDR3 for alpha chain variable domain of TCR clone 300450 (TRAV21, TRAJ52)
CAVRPSPAGGTSYGKLTF

SEQ ID NO: 600900 - protein, 14 aa, Homo sapiens
  CDR3 for beta chain variable domain of TCR clone 300450 (TRBV6-1, TRBJ1-3)
CASSEDRGIDTIYF

SEQ ID NO: 600901 - protein, 15 aa, Homo sapiens
  CDR3 for alpha chain variable domain of TCR clone 300451 (TRAV26-1, TRAJ22)
CIVRVSFWFCKATDL

SEQ ID NO: 600902 - protein, 18 aa, Homo sapiens
  CDR3 for beta chain variable domain of TCR clone 300451 (TRBV6-6, TRBJ1-3)
CASSYSKWDSISGNTIYF

SEQ ID NO: 600903 - protein, 17 aa, Homo sapiens
  CDR3 for alpha chain variable domain of TCR clone 300452 (TRAV8-6, TRAJ58)
CAVSSWVGETSGSRLTF

SEQ ID NO: 600904 - protein, 14 aa, Homo sapiens
  CDR3 for beta chain variable domain of TCR clone 300452 (TRBV28, TRBJ2-3)
CASSWRGWADTQYF

SEQ ID NO: 600905 - protein, 15 aa, Homo sapiens
  CDR3 for alpha chain variable domain of TCR clone 300453 (TRAV12-1, TRAJ4)
CVVNPFSGGYNKLLF

SEQ ID NO: 600906 - protein, 13 aa, Homo sapiens
  CDR3 for beta chain variable domain of TCR clone 300453 (TRBV20-1, TRBJ1-2)
CSARGTADYGYTF

SEQ ID NO: 600907 - protein, 12 aa, Homo sapiens
  CDR3 for alpha chain variable domain of TCR clone 300454 (TRAV13-1, TRAJ9)
CASHAGGFKTIF

SEQ ID NO: 600908 - protein, 13 aa, Homo sapiens
  CDR3 for beta chain variable domain of TCR clone 300454 (TRBV12-4, TRBJ1-2)
CASSSGSKDGYTF

SEQ ID NO: 600909 - protein, 11 aa, Homo sapiens
  CDR3 for alpha chain variable domain of TCR clone 300455 (TRAV17, TRAJ49)
CATNTGNQFYF

SEQ ID NO: 600910 - protein, 12 aa, Homo sapiens
  CDR3 for beta chain variable domain of TCR clone 300455 (TRBV2, TRBJ2-7)
CASSGVSGIPCF

SEQ ID NO: 600911 - protein, 23 aa, Homo sapiens
  CDR3 for alpha chain variable domain of TCR clone 300456 (TRAV3, )
CAVRDCLNAGSNHIQNPDPAVYQ

SEQ ID NO: 600912 - protein, 19 aa, Homo sapiens
  CDR3 for beta chain variable domain of TCR clone 300456 (TRBV7-2, TRBJ2-3)
CASSFLSRNWGGGTDTQYF

SEQ ID NO: 600913 - protein, 13 aa, Homo sapiens
  CDR3 for alpha chain variable domain of TCR clone 300457 (TRAV12-1, TRAJ39)
CGDDNNAGNMLTF

SEQ ID NO: 600914 - protein, 16 aa, Homo sapiens
  CDR3 for beta chain variable domain of TCR clone 300457 (TRBV7-2, TRBJ1-2)
CASSANQDRRGHGYTF

SEQ ID NO: 600915 - protein, 15 aa, Homo sapiens
  CDR3 for alpha chain variable domain of TCR clone 300458 (TRAV12-2, TRAJ43)
CAFDMRFGAGTRLTV

SEQ ID NO: 600916 - protein, 16 aa, Homo sapiens
  CDR3 for beta chain variable domain of TCR clone 300458 (TRBV20-1, TRBJ1-4)
CSARPYGGELNEKLFF

SEQ ID NO: 600917 - protein, 15 aa, Homo sapiens
  CDR3 for alpha chain variable domain of TCR clone 300459 (TRAV16, TRAJ10)
CAIRELTGGGNKLTF

SEQ ID NO: 600918 - protein, 14 aa, Homo sapiens
  CDR3 for beta chain variable domain of TCR clone 300459 (TRBV5-5, TRBJ2-7)
CASSLGQGTYEQYF

SEQ ID NO: 600919 - protein, 14 aa, Homo sapiens
  CDR3 for alpha chain variable domain of TCR clone 300460 (TRAV4, TRAJ26)
CLVGPHNYGQNFVF

SEQ ID NO: 600920 - protein, 14 aa, Homo sapiens
  CDR3 for beta chain variable domain of TCR clone 300460 (TRBV7-2, TRBJ2-5)
CASSPRGSSETQYF

SEQ ID NO: 600921 - protein, 14 aa, Homo sapiens
  CDR3 for alpha chain variable domain of TCR clone 300461 (TRAV4, TRAJ31)
CLVGERLHHGQTHV

SEQ ID NO: 600922 - protein, 19 aa, Homo sapiens
  CDR3 for beta chain variable domain of TCR clone 300461 (TRBV12-4, TRBJ2-1)
CASTLAFDPRDKEANEQFF

SEQ ID NO: 600923 - protein, 14 aa, Homo sapiens
  CDR3 for alpha chain variable domain of TCR clone 300462 (TRAV13-1, TRAJ32)
CAARGSGTTNKLIF

SEQ ID NO: 600924 - protein, 15 aa, Homo sapiens
  CDR3 for beta chain variable domain of TCR clone 300462 (TRBV5-5, TRBJ1-1)
CASSLVGKDNTEAFF

SEQ ID NO: 600925 - protein, 13 aa, Homo sapiens
  CDR3 for alpha chain variable domain of TCR clone 300463 (TRAV21, TRAJ57)
CAVTQGGSEKLVF

SEQ ID NO: 600926 - protein, 13 aa, Homo sapiens
  CDR3 for beta chain variable domain of TCR clone 300463 (TRBV27, TRBJ2-7)
CASSFSRGYEQYF

SEQ ID NO: 600927 - protein, 13 aa, Homo sapiens
  CDR3 for alpha chain variable domain of TCR clone 300464 (TRAV26-1, TRAJ39)
CIGRVVAGNMLTF

SEQ ID NO: 600928 - protein, 14 aa, Homo sapiens
  CDR3 for beta chain variable domain of TCR clone 300464 (TRBV20-1, TRBJ2-5)
CSARRQGIRETQYF

SEQ ID NO: 600929 - protein, 14 aa, Homo sapiens
  CDR3 for alpha chain variable domain of TCR clone 300465 (TRAV1-2, TRAJ15)
CAVRDRQAGTSLIF

SEQ ID NO: 600930 - protein, 15 aa, Homo sapiens
  CDR3 for beta chain variable domain of TCR clone 300465 (TRBV7-2, TRBJ2-1)
CASSLASGRVNEQFF

SEQ ID NO: 600931 - protein, 14 aa, Homo sapiens
  CDR3 for alpha chain variable domain of TCR clone 300466 (TRAV23/DV6, TRAJ5)
CAAKRPAGRRALTF

SEQ ID NO: 600932 - protein, 14 aa, Homo sapiens
  CDR3 for beta chain variable domain of TCR clone 300466 (TRBV6-1, TRBJ1-3)
CASVQGGGGNTIYF

SEQ ID NO: 600933 - protein, 17 aa, Homo sapiens
  CDR3 for alpha chain variable domain of TCR clone 300467 (TRAV1-2, TRAJ26)
CAVRDLITMVRIFSLVL

SEQ ID NO: 600934 - protein, 13 aa, Homo sapiens
  CDR3 for beta chain variable domain of TCR clone 300467 (TRBV19, TRBJ1-2)
CASSQGQVYGYTF

SEQ ID NO: 600935 - protein, 13 aa, Homo sapiens
  CDR3 for alpha chain variable domain of TCR clone 300468 (TRAV38-2/DV8, TRAJ34)
CAYRYYNTDKLLF

SEQ ID NO: 600936 - protein, 15 aa, Homo sapiens
  CDR3 for beta chain variable domain of TCR clone 300468 (TRBV20-1, TRBJ2-5)
CSAEGTGGLQETQYF

SEQ ID NO: 600937 - protein, 14 aa, Homo sapiens
  CDR3 for alpha chain variable domain of TCR clone 300469 (TRAV17, TRAJ16)
CATADFSDGQKLLF

SEQ ID NO: 600938 - protein, 15 aa, Homo sapiens
  CDR3 for beta chain variable domain of TCR clone 300469 (TRBV18, TRBJ1-5)
CASSPSDRSNQPQHF

SEQ ID NO: 600939 - protein, 16 aa, Homo sapiens
  CDR3 for alpha chain variable domain of TCR clone 300470 (TRAV30, TRAJ24)
CGTEIEDADSWGKFQF

SEQ ID NO: 600940 - protein, 17 aa, Homo sapiens
  CDR3 for beta chain variable domain of TCR clone 300470 (TRBV28, TRBJ2-3)
CASRNPSYGFSTDTQYF

SEQ ID NO: 600941 - protein, 18 aa, Homo sapiens
  CDR3 for alpha chain variable domain of TCR clone 300471 (TRAV3, TRAJ32)
CAVRDIRGYGGATNKLIF

SEQ ID NO: 600942 - protein, 15 aa, Homo sapiens
  CDR3 for beta chain variable domain of TCR clone 300471 (TRBV12-4, TRBJ2-2)
CASNLGVRHTGELFF

SEQ ID NO: 600943 - protein, 14 aa, Homo sapiens
  CDR3 for alpha chain variable domain of TCR clone 300472 (TRAV36/DV7, TRAJ40)
CAVETTSGTYKYIF

SEQ ID NO: 600944 - protein, 13 aa, Homo sapiens
  CDR3 for beta chain variable domain of TCR clone 300472 (TRBV10-3, TRBJ2-5)
CAMTSGVGETQYF

SEQ ID NO: 600945 - protein, 19 aa, Homo sapiens
  CDR3 for alpha chain variable domain of TCR clone 300473 (TRAV12-3, TRAJ40)
SPVIQPPTSVQDRTYKYIF

SEQ ID NO: 600946 - protein, 14 aa, Homo sapiens
  CDR3 for beta chain variable domain of TCR clone 300473 (TRBV19, TRBJ2-1)
CASPTFVLSGEQFF

SEQ ID NO: 600947 - protein, 11 aa, Homo sapiens
  CDR3 for alpha chain variable domain of TCR clone 300474 (TRAV17, TRAJ43)
CATPRSNDMRF

SEQ ID NO: 600948 - protein, 17 aa, Homo sapiens
  CDR3 for beta chain variable domain of TCR clone 300474 (TRBV7-8, TRBJ2-6)
CASSAGTGGAGANVLTF

SEQ ID NO: 600949 - protein, 16 aa, Homo sapiens
  CDR3 for alpha chain variable domain of TCR clone 300475 (TRAV12-1, TRAJ53)
CVVTSVAGGSNYKLTF

SEQ ID NO: 600950 - protein, 16 aa, Homo sapiens
  CDR3 for beta chain variable domain of TCR clone 300475 (TRBV6-6, TRBJ2-3)
CASSSSHAGSTDTQYF

SEQ ID NO: 600951 - protein, 16 aa, Homo sapiens
  CDR3 for alpha chain variable domain of TCR clone 300476 (TRAV12-1, TRAJ45)
CVVNPSSGGGADGLTF

SEQ ID NO: 600952 - protein, 16 aa, Homo sapiens
  CDR3 for beta chain variable domain of TCR clone 300476 (TRBV12-5, TRBJ2-5)
CASGPRTSGNQETQYF

SEQ ID NO: 600953 - protein, 14 aa, Homo sapiens
  CDR3 for alpha chain variable domain of TCR clone 300477 (TRAV12-1, TRAJ42)
CVVIYGGSQGNLIF

SEQ ID NO: 600954 - protein, 17 aa, Homo sapiens
  CDR3 for beta chain variable domain of TCR clone 300477 (TRBV18, TRBJ2-5)
CASSPPGKETSTSGQAR

SEQ ID NO: 600955 - protein, 14 aa, Homo sapiens
  CDR3 for alpha chain variable domain of TCR clone 300478 (TRAV20, TRAJ10)
CAVRVEGGGNKLTF

SEQ ID NO: 600956 - protein, 18 aa, Homo sapiens
  CDR3 for beta chain variable domain of TCR clone 300478 (TRBV24-1, TRBJ2-1)
CATSDLMFLGRVVHEQFF

SEQ ID NO: 600957 - protein, 12 aa, Homo sapiens
  CDR3 for alpha chain variable domain of TCR clone 300479 (TRAV16, TRAJ10)
CSRTGGGNKLTF

SEQ ID NO: 600958 - protein, 11 aa, Homo sapiens
  CDR3 for beta chain variable domain of TCR clone 300479 (TRBV20-1, TRBJ2-7)
CSARTSYEQYF

SEQ ID NO: 600959 - protein, 14 aa, Homo sapiens
  CDR3 for alpha chain variable domain of TCR clone 300480 (TRAV12-2, TRAJ48)
CAVHAFFGNEKLTF

SEQ ID NO: 600960 - protein, 13 aa, Homo sapiens
  CDR3 for beta chain variable domain of TCR clone 300480 (TRBV28, TRBJ2-7)
CAGAQQGLDEQYF

SEQ ID NO: 600961 - protein, 10 aa, Homo sapiens
  CDR3 for alpha chain variable domain of TCR clone 300481 (TRAV13-1, TRAJ49)
CAVPGNQFYF

SEQ ID NO: 600962 - protein, 12 aa, Homo sapiens
  CDR3 for beta chain variable domain of TCR clone 300481 (TRBV6-1, TRBJ1-5)
CASAQVVQPQHF

SEQ ID NO: 600963 - protein, 18 aa, Homo sapiens
  CDR3 for alpha chain variable domain of TCR clone 300482 (TRAV2, TRAJ20)
LQVREADAAVYRDCKLSF

SEQ ID NO: 600964 - protein, 13 aa, Homo sapiens
  CDR3 for beta chain variable domain of TCR clone 300482 (TRBV7-3, TRBJ1-1)
CASSQDWGAEAFF

SEQ ID NO: 600965 - protein, 11 aa, Homo sapiens
  CDR3 for alpha chain variable domain of TCR clone 300483 (TRAV3, TRAJ21)
CALGNFNKFYF

SEQ ID NO: 600966 - protein, 17 aa, Homo sapiens
  CDR3 for beta chain variable domain of TCR clone 300483 (TRBV20-1, TRBJ2-1)
CSASSSGLAGSYNEQFF

SEQ ID NO: 600967 - protein, 13 aa, Homo sapiens
  CDR3 for alpha chain variable domain of TCR clone 300484 (TRAV20, TRAJ48)
CDVQGVGNEKLTF

SEQ ID NO: 600968 - protein, 14 aa, Homo sapiens
  CDR3 for beta chain variable domain of TCR clone 300484 (TRBV27, TRBJ2-7)
CASSFRDGPYEQYF

SEQ ID NO: 600969 - protein, 16 aa, Homo sapiens
  CDR3 for alpha chain variable domain of TCR clone 300485 (TRAV21, TRAJ37)
CAVRTAGPGNTGKLIF

SEQ ID NO: 600970 - protein, 13 aa, Homo sapiens
  CDR3 for beta chain variable domain of TCR clone 300485 (TRBV7-9, TRBJ2-5)
CASLPSGRETQYF

SEQ ID NO: 600971 - protein, 17 aa, Homo sapiens
  CDR3 for alpha chain variable domain of TCR clone 300486 (TRAV3, TRAJ6)
CAVRDGPRAGGSYIPTF

SEQ ID NO: 600972 - protein, 14 aa, Homo sapiens
  CDR3 for beta chain variable domain of TCR clone 300486 (TRBV9, TRBJ2-1)
CAGSVDPRGKEQFF

SEQ ID NO: 600973 - protein, 15 aa, Homo sapiens
  CDR3 for alpha chain variable domain of TCR clone 300487 (TRAV21, TRAJ53)
CATLNSGGSNYKLTF

SEQ ID NO: 600974 - protein, 17 aa, Homo sapiens
  CDR3 for beta chain variable domain of TCR clone 300487 (TRBV20-1, TRBJ2-2)
RSASGSRQGGLTGELFF

SEQ ID NO: 600975 - protein, 13 aa, Homo sapiens
  CDR3 for alpha chain variable domain of TCR clone 300488 (TRAV25, TRAJ30)
CAGRVDRDDKIIF

SEQ ID NO: 600976 - protein, 14 aa, Homo sapiens
  CDR3 for beta chain variable domain of TCR clone 300488 (TRBV27, TRBJ2-7)
CASSPDRVSYEQYF

SEQ ID NO: 600977 - protein, 14 aa, Homo sapiens
  CDR3 for alpha chain variable domain of TCR clone 300489 (TRAV17, TRAJ22)
CATSPSGSARQLTF

SEQ ID NO: 600978 - protein, 16 aa, Homo sapiens
  CDR3 for beta chain variable domain of TCR clone 300489 (TRBV29-1, TRBJ2-7)
CSVEVVGTSGSYEQYF

SEQ ID NO: 600979 - protein, 11 aa, Homo sapiens
  CDR3 for alpha chain variable domain of TCR clone 300490 (TRAV21, TRAJ27)
CAVRMQANQPL

SEQ ID NO: 600980 - protein, 15 aa, Homo sapiens
  CDR3 for beta chain variable domain of TCR clone 300490 (TRBV7-2, TRBJ2-1)
CASTHGTGIYNEQFF

SEQ ID NO: 600981 - protein, 19 aa, Homo sapiens
  CDR3 for alpha chain variable domain of TCR clone 300491 (TRAV26-1, TRAJ52)
CIVRAHRNAGGTSYGKLTF

SEQ ID NO: 600982 - protein, 17 aa, Homo sapiens
  CDR3 for beta chain variable domain of TCR clone 300491 (TRBV13, TRBJ2-3)
CASSLSRVAGGRNTQYF

SEQ ID NO: 600983 - protein, 14 aa, Homo sapiens
  CDR3 for alpha chain variable domain of TCR clone 300492 (TRAV17, TRAJ57)
CATDPQGGSEKLVF

SEQ ID NO: 600984 - protein, 15 aa, Homo sapiens
  CDR3 for beta chain variable domain of TCR clone 300492 (TRBV7-9, TRBJ2-7)
CASSPGGGLTYEQYF

SEQ ID NO: 600985 - protein, 13 aa, Homo sapiens
  CDR3 for alpha chain variable domain of TCR clone 300493 (TRAV36/DV7, TRAJ7)
CAVERYGNNRLAF

SEQ ID NO: 600986 - protein, 12 aa, Homo sapiens
  CDR3 for beta chain variable domain of TCR clone 300493 (TRBV7-8, TRBJ2-7)
CASSLAGYEQYF

SEQ ID NO: 600987 - protein, 15 aa, Homo sapiens
  CDR3 for alpha chain variable domain of TCR clone 300494 (TRAV3, TRAJ5)
CAVRDLDTGRRTLTF

SEQ ID NO: 600988 - protein, 13 aa, Homo sapiens
  CDR3 for beta chain variable domain of TCR clone 300494 (TRBV12-4, TRBJ2-7)
CASSQTETYEQYF

SEQ ID NO: 600989 - protein, 12 aa, Homo sapiens
  CDR3 for alpha chain variable domain of TCR clone 300495 (TRAV23/DV6, TRAJ53)
CAASKLGSGGSN

SEQ ID NO: 600990 - protein, 16 aa, Homo sapiens
  CDR3 for beta chain variable domain of TCR clone 300495 (TRBV11-2, TRBJ2-7)
CASSPTTGGVSYEQYF

SEQ ID NO: 600991 - protein, 16 aa, Homo sapiens
  CDR3 for alpha chain variable domain of TCR clone 300496 (TRAV16, TRAJ4)
CALSRMFYGGYNKLIF

SEQ ID NO: 600992 - protein, 16 aa, Homo sapiens
  CDR3 for beta chain variable domain of TCR clone 300496 (TRBV12-4, TRBJ1-5)
CASSRPVGGSNQPQHF

SEQ ID NO: 600993 - protein, 13 aa, Homo sapiens
  CDR3 for alpha chain variable domain of TCR clone 300497 (TRAV21, TRAJ45)
CAVMGGGADGLTF

SEQ ID NO: 600994 - protein, 16 aa, Homo sapiens
  CDR3 for beta chain variable domain of TCR clone 300497 (TRBV19, TRBJ2-2)
CASSPSGGLNTGELFF

SEQ ID NO: 600995 - protein, 14 aa, Homo sapiens
  CDR3 for alpha chain variable domain of TCR clone 300498 (TRAV1-2, TRAJ8)
CAVREDTGFQKLVF

SEQ ID NO: 600996 - protein, 14 aa, Homo sapiens
  CDR3 for beta chain variable domain of TCR clone 300498 (TRBV7-2, TRBJ2-1)
CASSLGVGYNEQFF

SEQ ID NO: 600997 - protein, 16 aa, Homo sapiens
  CDR3 for alpha chain variable domain of TCR clone 300499 (TRAV20, TRAJ53)
CAVQGNSGGSHYKLTF

SEQ ID NO: 600998 - protein, 14 aa, Homo sapiens
  CDR3 for beta chain variable domain of TCR clone 300499 (TRBV6-5, TRBJ2-7)
CASSPHRGLREQYF

SEQ ID NO: 600999 - protein, 12 aa, Homo sapiens
  CDR3 for alpha chain variable domain of TCR clone 300500 (TRAV17, TRAJ36)
CATLTGANNLFF

SEQ ID NO: 601000 - protein, 15 aa, Homo sapiens
  CDR3 for beta chain variable domain of TCR clone 300500 (TRBV19, TRBJ1-2)
CSSSTKTDTNYGYTF

SEQ ID NO: 601001 - protein, 17 aa, Homo sapiens
  CDR3 for alpha chain variable domain of TCR clone 300501 (TRAV4, TRAJ18)
CLVGERSVGSTLGRLYF

SEQ ID NO: 601002 - protein, 14 aa, Homo sapiens
  CDR3 for beta chain variable domain of TCR clone 300501 (TRBV6-5, TRBJ1-2)
WASRYDGTGGGYTF

SEQ ID NO: 601003 - protein, 15 aa, Homo sapiens
  CDR3 for alpha chain variable domain of TCR clone 300502 (TRAV30, TRAJ57)
CGTAIPQGGSEKLVC

SEQ ID NO: 601004 - protein, 13 aa, Homo sapiens
  CDR3 for beta chain variable domain of TCR clone 300502 (TRBV7-9, TRBJ1-2)
CASSPSNFWGYTF

SEQ ID NO: 601005 - protein, 17 aa, Homo sapiens
  CDR3 for alpha chain variable domain of TCR clone 300503 (TRAV3, TRAJ6)
CAARDGPRAGGSYIPTF

SEQ ID NO: 601006 - protein, 16 aa, Homo sapiens
  CDR3 for beta chain variable domain of TCR clone 300503 (TRBV5-1, TRBJ2-3)
CASSLGLAVYTDTQYF

SEQ ID NO: 601007 - protein, 13 aa, Homo sapiens
  CDR3 for alpha chain variable domain of TCR clone 300504 (TRAV9-2, TRAJ3)
CAPFYSSASKIIF

SEQ ID NO: 601008 - protein, 13 aa, Homo sapiens
  CDR3 for beta chain variable domain of TCR clone 300504 (TRBV12-3, TRBJ2-5)
CASSPGTVETQYF

SEQ ID NO: 601009 - protein, 13 aa, Homo sapiens
  CDR3 for alpha chain variable domain of TCR clone 300505 (TRAV38-2/DV8, TRAJ45)
CAYVGGGADGRTF

SEQ ID NO: 601010 - protein, 14 aa, Homo sapiens
  CDR3 for beta chain variable domain of TCR clone 300505 (TRBV19, TRBJ2-1)
CASPTFVLSGEQFF

SEQ ID NO: 601011 - protein, 13 aa, Homo sapiens
  CDR3 for alpha chain variable domain of TCR clone 300506 (TRAV12-3, TRAJ33)
CAMSVNSNYQLIW

SEQ ID NO: 601012 - protein, 16 aa, Homo sapiens
  CDR3 for beta chain variable domain of TCR clone 300506 (TRBV7-3, TRBJ2-3)
CACSLSGYRPEYTQYF

SEQ ID NO: 601013 - protein, 13 aa, Homo sapiens
  CDR3 for alpha chain variable domain of TCR clone 300507 (TRAV12-3, TRAJ13)
CAMTSGGYQKVTF

SEQ ID NO: 601014 - protein, 13 aa, Homo sapiens
  CDR3 for beta chain variable domain of TCR clone 300507 (TRBV20-1, TRBJ2-2)
CSALSGGAGDLFF

SEQ ID NO: 601015 - protein, 16 aa, Homo sapiens
  CDR3 for alpha chain variable domain of TCR clone 300508 (TRAV14/DV4, TRAJ53)
CAMREGGGGSNYKLTF

SEQ ID NO: 601016 - protein, 18 aa, Homo sapiens
  CDR3 for beta chain variable domain of TCR clone 300508 (TRBV7-8, TRBJ2-1)
CASSPAEGLAGGLNEQFF

SEQ ID NO: 601017 - protein, 12 aa, Homo sapiens
  CDR3 for alpha chain variable domain of TCR clone 300509 (TRAV12-3, TRAJ17)
CAMTLTGNKLPF

SEQ ID NO: 601018 - protein, 15 aa, Homo sapiens
  CDR3 for beta chain variable domain of TCR clone 300509 (TRBV20-1, TRBJ2-7)
CSARDRVSGMGEQYF

SEQ ID NO: 601019 - protein, 12 aa, Homo sapiens
  CDR3 for alpha chain variable domain of TCR clone 300510 (TRAV27, TRAJ9)
CAGESGGFKTIF

SEQ ID NO: 601020 - protein, 18 aa, Homo sapiens
  CDR3 for beta chain variable domain of TCR clone 300510 (TRBV24-1, TRBJ2-2)
CATSDSGQGTANTGELFF

SEQ ID NO: 601021 - protein, 15 aa, Homo sapiens
  CDR3 for alpha chain variable domain of TCR clone 300511 (TRAV26-1, TRAJ29)
CIVRVEGSGDTPLVF

SEQ ID NO: 601022 - protein, 13 aa, Homo sapiens
  CDR3 for beta chain variable domain of TCR clone 300511 (TRBV11-2, TRBJ2-7)
CASSGTRPYEQYF

SEQ ID NO: 601023 - protein, 14 aa, Homo sapiens
  CDR3 for alpha chain variable domain of TCR clone 300512 (TRAV12-1, TRAJ38)
CVVHNAGNNRKLIL

SEQ ID NO: 601024 - protein, 13 aa, Homo sapiens
  CDR3 for beta chain variable domain of TCR clone 300512 (TRBV19, TRBJ2-1)
CATSRGVYNEQFF

SEQ ID NO: 601025 - protein, 18 aa, Homo sapiens
  CDR3 for alpha chain variable domain of TCR clone 300513 (TRAV26-1, TRAJ52)
CIVRVERAGGTSYGKLTF

SEQ ID NO: 601026 - protein, 13 aa, Homo sapiens
  CDR3 for beta chain variable domain of TCR clone 300513 (TRBV7-3, TRBJ1-2)
CASSLKRGYGYTF

SEQ ID NO: 601027 - protein, 14 aa, Homo sapiens
  CDR3 for alpha chain variable domain of TCR clone 300514 (TRAV27, TRAJ41)
CAVRTQIPGMHSTS

SEQ ID NO: 601028 - protein, 16 aa, Homo sapiens
  CDR3 for beta chain variable domain of TCR clone 300514 (TRBV5-1, TRBJ2-3)
CASSVGLAVYTDTQYF

SEQ ID NO: 601029 - protein, 14 aa, Homo sapiens
  CDR3 for alpha chain variable domain of TCR clone 300515 (TRAV12-1, TRAJ43)
CVVNGRSNNNDMRF

SEQ ID NO: 601030 - protein, 14 aa, Homo sapiens
  CDR3 for beta chain variable domain of TCR clone 300515 (TRBV15, TRBJ1-2)
CATSRGQATHGYTF

SEQ ID NO: 601031 - protein, 13 aa, Homo sapiens
  CDR3 for alpha chain variable domain of TCR clone 300516 (TRAV38-1, TRAJ42)
CARWGGSQGNLIF

SEQ ID NO: 601032 - protein, 16 aa, Homo sapiens
  CDR3 for beta chain variable domain of TCR clone 300516 (TRBV13, TRBJ2-2)
CASSPRTGEHTGELFF

SEQ ID NO: 601033 - protein, 15 aa, Homo sapiens
  CDR3 for alpha chain variable domain of TCR clone 300517 (TRAV12-1, TRAJ49)
CVVNLPSNTGNQFYF

SEQ ID NO: 601034 - protein, 16 aa, Homo sapiens
  CDR3 for beta chain variable domain of TCR clone 300517 (TRBV7-9, TRBJ1-4)
CASSFDSHRRHEKLFF

SEQ ID NO: 601035 - protein, 14 aa, Homo sapiens
  CDR3 for alpha chain variable domain of TCR clone 300518 (TRAV26-2, TRAJ31)
CCVLLPLNNARLMF

SEQ ID NO: 601036 - protein, 13 aa, Homo sapiens
  CDR3 for beta chain variable domain of TCR clone 300518 (TRBV10-3, TRBJ1-2)
CAISERDSYGCTL

SEQ ID NO: 601037 - protein, 22 aa, Homo sapiens
  CDR3 for alpha chain variable domain of TCR clone 300519 (TRAV8-2, TRAJ45)
HLTKPSAHMSDAAGYSADGLTF

SEQ ID NO: 601038 - protein, 13 aa, Homo sapiens
  CDR3 for beta chain variable domain of TCR clone 300519 (TRBV7-3, TRBJ2-1)
CASSPVAYNEQFF

SEQ ID NO: 601039 - protein, 18 aa, Homo sapiens
  CDR3 for alpha chain variable domain of TCR clone 300520 (TRAV1-2, TRAJ18)
CAVRGMGDRGSTLGRLYF

SEQ ID NO: 601040 - protein, 16 aa, Homo sapiens
  CDR3 for beta chain variable domain of TCR clone 300520 (TRBV29-1, TRBJ1-2)
CSVEANRDIANYGYTF

SEQ ID NO: 601041 - protein, 15 aa, Homo sapiens
  CDR3 for alpha chain variable domain of TCR clone 300521 (TRAV8-3, TRAJ45)
CASSYSGGGADGLTF

SEQ ID NO: 601042 - protein, 12 aa, Homo sapiens
  CDR3 for beta chain variable domain of TCR clone 300521 (TRBV29-1, TRBJ2-3)
CGVTGGADTQYF

SEQ ID NO: 601043 - protein, 15 aa, Homo sapiens
  CDR3 for alpha chain variable domain of TCR clone 300522 (TRAV2, TRAJ15)
CAVEDREQAGTALIF

SEQ ID NO: 601044 - protein, 13 aa, Homo sapiens
  CDR3 for beta chain variable domain of TCR clone 300522 (TRBV10-2, TRBJ2-7)
CASGTSGGSEQYF

SEQ ID NO: 601045 - protein, 15 aa, Homo sapiens
  CDR3 for alpha chain variable domain of TCR clone 300523 (TRAV17, TRAJ4)
CSTGTWSGGYNKLIF

SEQ ID NO: 601046 - protein, 13 aa, Homo sapiens
  CDR3 for beta chain variable domain of TCR clone 300523 (TRBV4-2, TRBJ1-1)
CASSQAGNTEAFF

SEQ ID NO: 601047 - protein, 16 aa, Homo sapiens
  CDR3 for alpha chain variable domain of TCR clone 300524 (TRAV14/DV4, TRAJ20)
CAMREGRSRDDYKLCF

SEQ ID NO: 601048 - protein, 15 aa, Homo sapiens
  CDR3 for beta chain variable domain of TCR clone 300524 (TRBV2, TRBJ2-7)
CASSEGLARSYEQYF

SEQ ID NO: 601049 - protein, 16 aa, Homo sapiens
  CDR3 for alpha chain variable domain of TCR clone 300525 (TRAV3, TRAJ10)
CAVRDMNAGGGNKLTF

SEQ ID NO: 601050 - protein, 16 aa, Homo sapiens
  CDR3 for beta chain variable domain of TCR clone 300525 (TRBV6-3, TRBJ1-2)
CASSYSRRAYNYGYTF

SEQ ID NO: 601051 - protein, 13 aa, Homo sapiens
  CDR3 for alpha chain variable domain of TCR clone 300526 (TRAV12-2, TRAJ37)
CGGGSGNTGKLIF

SEQ ID NO: 601052 - protein, 14 aa, Homo sapiens
  CDR3 for beta chain variable domain of TCR clone 300526 (TRBV6-1, TRBJ2-6)
CASQQGAGANVLTF

SEQ ID NO: 601053 - protein, 13 aa, Homo sapiens
  CDR3 for alpha chain variable domain of TCR clone 300527 (TRAV13-2, TRAJ8)
CACMNTGFQKLVF

SEQ ID NO: 601054 - protein, 17 aa, Homo sapiens
  CDR3 for beta chain variable domain of TCR clone 300527 (TRBV28, TRBJ2-1)
CASSSARQALTYNEQFF

SEQ ID NO: 601055 - protein, 14 aa, Homo sapiens
  CDR3 for alpha chain variable domain of TCR clone 300528 (TRAV1-2, TRAJ16)
CAVNRFSDGQKLLF

SEQ ID NO: 601056 - protein, 15 aa, Homo sapiens
  CDR3 for beta chain variable domain of TCR clone 300528 (TRBV6-3, TRBJ2-7)
CASSSPGTVFYEQYV

SEQ ID NO: 601057 - protein, 23 aa, Homo sapiens
  CDR3 for alpha chain variable domain of TCR clone 300529 (TRAV26-1, )
CIADNAGNNHIQNPDPAVSQLRD

SEQ ID NO: 601058 - protein, 13 aa, Homo sapiens
  CDR3 for beta chain variable domain of TCR clone 300529 (TRBV5-4, TRBJ1-1)
CASSVDLGTEAFF

SEQ ID NO: 601059 - protein, 15 aa, Homo sapiens
  CDR3 for alpha chain variable domain of TCR clone 300530 (TRAV23/DV6, TRAJ18)
CTARYRGSTLGRLYF

SEQ ID NO: 601060 - protein, 13 aa, Homo sapiens
  CDR3 for beta chain variable domain of TCR clone 300530 (TRBV19, TRBJ1-1)
CASSPSNGGEAFF

SEQ ID NO: 601061 - protein, 19 aa, Homo sapiens
  CDR3 for alpha chain variable domain of TCR clone 300531 (TRAV21, TRAJ20)
SLVTQPPTSVLPNDYKLSF

SEQ ID NO: 601062 - protein, 14 aa, Homo sapiens
  CDR3 for beta chain variable domain of TCR clone 300531 (TRBV7-2, TRBJ1-3)
CVSSRLRSGNTIYF

SEQ ID NO: 601063 - protein, 10 aa, Homo sapiens
  CDR3 for alpha chain variable domain of TCR clone 300532 (TRAV1-2, TRAJ31)
CAFFDARLMF

SEQ ID NO: 601064 - protein, 15 aa, Homo sapiens
  CDR3 for beta chain variable domain of TCR clone 300532 (TRBV28, TRBJ2-5)
CASSPPWSYQETQYC

SEQ ID NO: 601065 - protein, 17 aa, Homo sapiens
  CDR3 for alpha chain variable domain of TCR clone 300533 (TRAV13-1, TRAJ52)
CAAGRNAGGTSYGKLTF

SEQ ID NO: 601066 - protein, 15 aa, Homo sapiens
  CDR3 for beta chain variable domain of TCR clone 300533 (TRBV6-3, TRBJ2-7)
CASSSPGTVFYEQYY

SEQ ID NO: 601067 - protein, 13 aa, Homo sapiens
  CDR3 for alpha chain variable domain of TCR clone 300534 (TRAV20, TRAJ21)
CAVEGYNFNKFYF

SEQ ID NO: 601068 - protein, 16 aa, Homo sapiens
  CDR3 for beta chain variable domain of TCR clone 300534 (TRBV7-2, TRBJ2-3)
CASSLVALYSTDTQYF

SEQ ID NO: 601069 - protein, 12 aa, Homo sapiens
  CDR3 for alpha chain variable domain of TCR clone 300535 (TRAV21, TRAJ39)
CAADNAGNKLTF

SEQ ID NO: 601070 - protein, 15 aa, Homo sapiens
  CDR3 for beta chain variable domain of TCR clone 300535 (TRBV27, TRBJ2-1)
CASSNGGGSSNEQFF

SEQ ID NO: 601071 - protein, 14 aa, Homo sapiens
  CDR3 for alpha chain variable domain of TCR clone 300536 (TRAV1-2, TRAJ16)
CAVNRFSDGQKRLF

SEQ ID NO: 601072 - protein, 13 aa, Homo sapiens
  CDR3 for beta chain variable domain of TCR clone 300536 (TRBV4-1, TRBJ2-1)
CASSQAGGDEQFF

SEQ ID NO: 601073 - protein, 15 aa, Homo sapiens
  CDR3 for alpha chain variable domain of TCR clone 300537 (TRAV38-2/DV8, TRAJ48)
CAYRSGVFGNEKLTF

SEQ ID NO: 601074 - protein, 16 aa, Homo sapiens
  CDR3 for beta chain variable domain of TCR clone 300537 (TRBV28, TRBJ2-7)
CASSPWVATGDLSQYF

SEQ ID NO: 601075 - protein, 17 aa, Homo sapiens
  CDR3 for alpha chain variable domain of TCR clone 300538 (TRAV3, TRAJ6)
CTVRDGPRAGGSYIPTF

SEQ ID NO: 601076 - protein, 15 aa, Homo sapiens
  CDR3 for beta chain variable domain of TCR clone 300538 (TRBV20-1, TRBJ1-1)
CSASWDRFLNTEAFF

SEQ ID NO: 601077 - protein, 14 aa, Homo sapiens
  CDR3 for alpha chain variable domain of TCR clone 300539 (TRAV8-4, TRAJ23)
CAVSAPGSGGKLIF

SEQ ID NO: 601078 - protein, 17 aa, Homo sapiens
  CDR3 for beta chain variable domain of TCR clone 300539 (TRBV4-3, TRBJ2-3)
CASSQDPLAGAVDTQYF

SEQ ID NO: 601079 - protein, 14 aa, Homo sapiens
  CDR3 for alpha chain variable domain of TCR clone 300540 (TRAV12-2, TRAJ17)
CAVNIKAAGNKLTF

SEQ ID NO: 601080 - protein, 14 aa, Homo sapiens
  CDR3 for beta chain variable domain of TCR clone 300540 (TRBV4-1, TRBJ2-2)
CASSQAVNTGELFF

SEQ ID NO: 601081 - protein, 14 aa, Homo sapiens
  CDR3 for alpha chain variable domain of TCR clone 300541 (TRAV12-1, TRAJ3)
CVVSGYSSAYKIIF

SEQ ID NO: 601082 - protein, 14 aa, Homo sapiens
  CDR3 for beta chain variable domain of TCR clone 300541 (TRBV6-6, TRBJ1-3)
CASSRQGSGNTIYF

SEQ ID NO: 601083 - protein, 16 aa, Homo sapiens
  CDR3 for alpha chain variable domain of TCR clone 300542 (TRAV12-2, TRAJ52)
CRLANGGGTSYGKLTF

SEQ ID NO: 601084 - protein, 13 aa, Homo sapiens
  CDR3 for beta chain variable domain of TCR clone 300542 (TRBV10-3, TRBJ2-7)
CASKLAVNYEQYF

SEQ ID NO: 601085 - protein, 12 aa, Homo sapiens
  CDR3 for alpha chain variable domain of TCR clone 300543 (TRAV10, TRAJ43)
CVEVRVGNDMRF

SEQ ID NO: 601086 - protein, 15 aa, Homo sapiens
  CDR3 for beta chain variable domain of TCR clone 300543 (TRBV2, TRBJ2-7)
CASSEGLARSYEQYF

SEQ ID NO: 601087 - protein, 23 aa, Homo sapiens
  CDR3 for alpha chain variable domain of TCR clone 300544 (TRAV26-1, TRAJ38)
CIADNAGNNHIHNPDPAVYQLRD

SEQ ID NO: 601088 - protein, 13 aa, Homo sapiens
  CDR3 for beta chain variable domain of TCR clone 300544 (TRBV20-1, TRBJ1-1)
CSARGGGSTEAFF

SEQ ID NO: 601089 - protein, 13 aa, Homo sapiens
  CDR3 for alpha chain variable domain of TCR clone 300545 (TRAV2, TRAJ24)
CAVSTDSWGKLQF

SEQ ID NO: 601090 - protein, 13 aa, Homo sapiens
  CDR3 for beta chain variable domain of TCR clone 300545 (TRBV20-1, TRBJ2-2)
SAVLVPRAPELFF

SEQ ID NO: 601091 - protein, 11 aa, Homo sapiens
  CDR3 for alpha chain variable domain of TCR clone 300546 (TRAV12-3, TRAJ49)
CAANTGNQFYF

SEQ ID NO: 601092 - protein, 13 aa, Homo sapiens
  CDR3 for beta chain variable domain of TCR clone 300546 (TRBV9, TRBJ2-1)
CASSPSGGNEQFF

SEQ ID NO: 601093 - protein, 14 aa, Homo sapiens
  CDR3 for alpha chain variable domain of TCR clone 300547 (TRAV38-2/DV8, TRAJ23)
CAYMSQNQGGKLIF

SEQ ID NO: 601094 - protein, 13 aa, Homo sapiens
  CDR3 for beta chain variable domain of TCR clone 300547 (TRBV24-1, TRBJ2-1)
CATSAGPYNEQFF

SEQ ID NO: 601095 - protein, 11 aa, Homo sapiens
  CDR3 for alpha chain variable domain of TCR clone 300548 (TRAV21, TRAJ11)
CAVNGYSTLTF

SEQ ID NO: 601096 - protein, 13 aa, Homo sapiens
  CDR3 for beta chain variable domain of TCR clone 300548 (TRBV19, TRBJ1-1)
CASSIGSELSLDK

SEQ ID NO: 601097 - protein, 15 aa, Homo sapiens
  CDR3 for alpha chain variable domain of TCR clone 300549 (TRAV12-1, TRAJ40)
CVVNRDTSGTYKYIF

SEQ ID NO: 601098 - protein, 13 aa, Homo sapiens
  CDR3 for beta chain variable domain of TCR clone 300549 (TRBV6-1, TRBJ2-1)
CASEGSSSKEQFF

SEQ ID NO: 601099 - protein, 13 aa, Homo sapiens
  CDR3 for alpha chain variable domain of TCR clone 300550 (TRAV35, TRAJ36)
SAGPRIGANNLFF

SEQ ID NO: 601100 - protein, 15 aa, Homo sapiens
  CDR3 for beta chain variable domain of TCR clone 300550 (TRBV28, TRBJ2-5)
CASSPPWSYQETQYF

SEQ ID NO: 601101 - protein, 14 aa, Homo sapiens
  CDR3 for alpha chain variable domain of TCR clone 300551 (TRAV26-1, TRAJ22)
CVVRVYGSARQLTF

SEQ ID NO: 601102 - protein, 17 aa, Homo sapiens
  CDR3 for beta chain variable domain of TCR clone 300551 (TRBV7-3, TRBJ2-3)
CASSPGGLAGFGDTQYF

SEQ ID NO: 601103 - protein, 17 aa, Homo sapiens
  CDR3 for alpha chain variable domain of TCR clone 300552 (TRAV3, TRAJ6)
CAVRDGPRAGGSYIPTF

SEQ ID NO: 601104 - protein, 14 aa, Homo sapiens
  CDR3 for beta chain variable domain of TCR clone 300552 (TRBV7-2, TRBJ2-7)
CASSPKASFYEQCF

SEQ ID NO: 601105 - protein, 12 aa, Homo sapiens
  CDR3 for alpha chain variable domain of TCR clone 300553 (TRAV27, TRAJ35)
CAGADFGNVLRC

SEQ ID NO: 601106 - protein, 16 aa, Homo sapiens
  CDR3 for beta chain variable domain of TCR clone 300553 (TRBV6-1, TRBJ2-1)
CASISRQGSSYNEQFF

SEQ ID NO: 601107 - protein, 15 aa, Homo sapiens
  CDR3 for alpha chain variable domain of TCR clone 300554 (TRAV8-2, TRAJ40)
CVALGTTSGTYKYIF

SEQ ID NO: 601108 - protein, 13 aa, Homo sapiens
  CDR3 for beta chain variable domain of TCR clone 300554 (TRBV7-3, TRBJ1-6)
CASSLKFDSPLHF

SEQ ID NO: 601109 - protein, 11 aa, Homo sapiens
  CDR3 for alpha chain variable domain of TCR clone 300555 (TRAV1-2, TRAJ8)
CAVSSFQKLAF

SEQ ID NO: 601110 - protein, 13 aa, Homo sapiens
  CDR3 for beta chain variable domain of TCR clone 300555 (TRBV7-3, TRBJ1-1)
CASSQDWGAESFF

SEQ ID NO: 601111 - protein, 15 aa, Homo sapiens
  CDR3 for alpha chain variable domain of TCR clone 300556 (TRAV35, TRAJ40)
CAGVPGASGTYKYIF

SEQ ID NO: 601112 - protein, 16 aa, Homo sapiens
  CDR3 for beta chain variable domain of TCR clone 300556 (TRBV7-9, TRBJ2-3)
CASSPWREVGTDTQYF

SEQ ID NO: 601113 - protein, 13 aa, Homo sapiens
  CDR3 for alpha chain variable domain of TCR clone 300557 (TRAV17, TRAJ4)
CATKSGGYNKLMF

SEQ ID NO: 601114 - protein, 14 aa, Homo sapiens
  CDR3 for beta chain variable domain of TCR clone 300557 (TRBV20-1, TRBJ1-5)
CSARDDRGNQPQHF

SEQ ID NO: 601115 - protein, 13 aa, Homo sapiens
  CDR3 for alpha chain variable domain of TCR clone 300558 (TRAV23/DV6, TRAJ34)
CAAIENNTDKLIF

SEQ ID NO: 601116 - protein, 13 aa, Homo sapiens
  CDR3 for beta chain variable domain of TCR clone 300558 (TRBV20-1, TRBJ2-5)
CSAREAFQETQYF

SEQ ID NO: 601117 - protein, 14 aa, Homo sapiens
  CDR3 for alpha chain variable domain of TCR clone 300559 (TRAV12-3, TRAJ10)
SHLPLTGGGKKLTF

SEQ ID NO: 601118 - protein, 13 aa, Homo sapiens
  CDR3 for beta chain variable domain of TCR clone 300559 (TRBV7-6, TRBJ2-3)
CASSLAVGDTQYF

SEQ ID NO: 601119 - protein, 11 aa, Homo sapiens
  CDR3 for alpha chain variable domain of TCR clone 300560 (TRAV16, TRAJ29)
WAPSGNTPLVF

SEQ ID NO: 601120 - protein, 15 aa, Homo sapiens
  CDR3 for beta chain variable domain of TCR clone 300560 (TRBV20-1, TRBJ2-7)
CSARDRVSGMDEQYF

SEQ ID NO: 601121 - protein, 13 aa, Homo sapiens
  CDR3 for alpha chain variable domain of TCR clone 300561 (TRAV8-1, TRAJ8)
CAVNRTGFQKLVF

SEQ ID NO: 601122 - protein, 15 aa, Homo sapiens
  CDR3 for beta chain variable domain of TCR clone 300561 (TRBV12-4, TRBJ2-1)
CASSLLATGNNEQFF

SEQ ID NO: 601123 - protein, 13 aa, Homo sapiens
  CDR3 for alpha chain variable domain of TCR clone 300562 (TRAV24, TRAJ17)
CAPCKAAGNKLTF

SEQ ID NO: 601124 - protein, 19 aa, Homo sapiens
  CDR3 for beta chain variable domain of TCR clone 300562 (TRBV3-1, TRBJ2-5)
CASSQGSPINRGRRETQYF

SEQ ID NO: 601125 - protein, 15 aa, Homo sapiens
  CDR3 for alpha chain variable domain of TCR clone 300563 (TRAV26-1, TRAJ42)
CIVRVKGGSQVNLIF

SEQ ID NO: 601126 - protein, 14 aa, Homo sapiens
  CDR3 for beta chain variable domain of TCR clone 300563 (TRBV19, TRBJ2-2)
CATTGHANTGELFF

SEQ ID NO: 601127 - protein, 11 aa, Homo sapiens
  CDR3 for alpha chain variable domain of TCR clone 300564 (TRAV23/DV6, TRAJ43)
CAASSGNDMRF

SEQ ID NO: 601128 - protein, 14 aa, Homo sapiens
  CDR3 for beta chain variable domain of TCR clone 300564 (TRBV4-1, TRBJ1-2)
CASSQDPLPYGYAF

SEQ ID NO: 601129 - protein, 15 aa, Homo sapiens
  CDR3 for alpha chain variable domain of TCR clone 300565 (TRAV26-1, TRAJ29)
CIVRVEGSGNTPLVV

SEQ ID NO: 601130 - protein, 15 aa, Homo sapiens
  CDR3 for beta chain variable domain of TCR clone 300565 (TRBV7-9, TRBJ1-5)
CASSQGHQPNQTQHF

SEQ ID NO: 601131 - protein, 13 aa, Homo sapiens
  CDR3 for alpha chain variable domain of TCR clone 300566 (TRAV12-2, TRAJ7)
SAVNLYGNSRLAF

SEQ ID NO: 601132 - protein, 14 aa, Homo sapiens
  CDR3 for beta chain variable domain of TCR clone 300566 (TRBV25-1, TRBJ1-2)
CASSEATGPYGYTF

SEQ ID NO: 601133 - protein, 13 aa, Homo sapiens
  CDR3 for alpha chain variable domain of TCR clone 300567 (TRAV12-2, TRAJ10)
CAVPTGGGNKLTF

SEQ ID NO: 601134 - protein, 12 aa, Homo sapiens
  CDR3 for beta chain variable domain of TCR clone 300567 (TRBV11-2, TRBJ2-5)
CASSLGQETQYF

SEQ ID NO: 601135 - protein, 15 aa, Homo sapiens
  CDR3 for alpha chain variable domain of TCR clone 300568 (TRAV13-1, TRAJ57)
QVPPLSQGGSEKLVF

SEQ ID NO: 601136 - protein, 13 aa, Homo sapiens
  CDR3 for beta chain variable domain of TCR clone 300568 (TRBV9, TRBJ2-1)
CASSVGQGGEQFF

SEQ ID NO: 601137 - protein, 14 aa, Homo sapiens
  CDR3 for alpha chain variable domain of TCR clone 300569 (TRAV12-3, TRAJ10)
SHLPLTGGGNKLTF

SEQ ID NO: 601138 - protein, 18 aa, Homo sapiens
  CDR3 for beta chain variable domain of TCR clone 300569 (TRBV25-1, TRBJ2-1)
CASSESRAGGPGYNEQFF

SEQ ID NO: 601139 - protein, 15 aa, Homo sapiens
  CDR3 for alpha chain variable domain of TCR clone 300570 (TRAV13-1, TRAJ57)
QVPPLSQGGSEKLVF

SEQ ID NO: 601140 - protein, 13 aa, Homo sapiens
  CDR3 for beta chain variable domain of TCR clone 300570 (TRBV4-2, TRBJ1-1)
CASSQAGNTEAFF

SEQ ID NO: 601141 - protein, 16 aa, Homo sapiens
  CDR3 for alpha chain variable domain of TCR clone 300571 (TRAV30, TRAJ24)
CGTEIVDADSWGKFSL

SEQ ID NO: 601142 - protein, 14 aa, Homo sapiens
  CDR3 for beta chain variable domain of TCR clone 300571 (TRBV29-1, TRBJ2-2)
CSVLAETNTGELFF

SEQ ID NO: 601143 - protein, 15 aa, Homo sapiens
  CDR3 for alpha chain variable domain of TCR clone 300572 (TRAV26-1, TRAJ22)
CIVRVSFWFCEATDL

SEQ ID NO: 601144 - protein, 13 aa, Homo sapiens
  CDR3 for beta chain variable domain of TCR clone 300572 (TRBV7-3, TRBJ1-1)
CASSQDWGAEAFF

SEQ ID NO: 601145 - protein, 13 aa, Homo sapiens
  CDR3 for alpha chain variable domain of TCR clone 300573 (TRAV26-1, TRAJ34)
CIVRPWITNKLIF

SEQ ID NO: 601146 - protein, 13 aa, Homo sapiens
  CDR3 for beta chain variable domain of TCR clone 300573 (TRBV5-1, TRBJ2-1)
CASSLGSYNEQFF

SEQ ID NO: 601147 - protein, 14 aa, Homo sapiens
  CDR3 for alpha chain variable domain of TCR clone 300574 (TRAV27, TRAJ12)
CAGARMDSSYKLIF

SEQ ID NO: 601148 - protein, 18 aa, Homo sapiens
  CDR3 for beta chain variable domain of TCR clone 300574 (TRBV10-3, TRBJ2-7)
CAISDSGSPSGGRVEQYF

SEQ ID NO: 601149 - protein, 16 aa, Homo sapiens
  CDR3 for alpha chain variable domain of TCR clone 300575 (TRAV13-1, TRAJ37)
CAARIGGLWQHRQTNL

SEQ ID NO: 601150 - protein, 14 aa, Homo sapiens
  CDR3 for beta chain variable domain of TCR clone 300575 (TRBV27, TRBJ2-2)
CASSLGAATGELFF

SEQ ID NO: 601151 - protein, 12 aa, Homo sapiens
  CDR3 for alpha chain variable domain of TCR clone 300576 (TRAV17, TRAJ39)
CATGAAGNMLTF

SEQ ID NO: 601152 - protein, 19 aa, Homo sapiens
  CDR3 for beta chain variable domain of TCR clone 300576 (TRBV7-9, TRBJ2-1)
CASSHNRGALLRSYNEQFF

SEQ ID NO: 601153 - protein, 13 aa, Homo sapiens
  CDR3 for alpha chain variable domain of TCR clone 300577 (TRAV12-3, TRAJ33)
CAMSVNSNYQLIW

SEQ ID NO: 601154 - protein, 15 aa, Homo sapiens
  CDR3 for beta chain variable domain of TCR clone 300577 (TRBV7-3, TRBJ2-2)
CQQLKAGTLSGELFF

SEQ ID NO: 601155 - protein, 16 aa, Homo sapiens
  CDR3 for alpha chain variable domain of TCR clone 300578 (TRAV30, TRAJ24)
CGTEIVDADSWGKFQF

SEQ ID NO: 601156 - protein, 14 aa, Homo sapiens
  CDR3 for beta chain variable domain of TCR clone 300578 (TRBV11-2, TRBJ2-5)
CASSRTGGIETQYL

SEQ ID NO: 601157 - protein, 19 aa, Homo sapiens
  CDR3 for alpha chain variable domain of TCR clone 300579 (TRAV25, TRAJ20)
TATQTTDVGILPHDYKLSF

SEQ ID NO: 601158 - protein, 13 aa, Homo sapiens
  CDR3 for beta chain variable domain of TCR clone 300579 (TRBV11-2, TRBJ2-7)
CASSTLDRYEQYF

SEQ ID NO: 601159 - protein, 15 aa, Homo sapiens
  CDR3 for alpha chain variable domain of TCR clone 300580 (TRAV13-1, TRAJ32)
CAASIYCGATNKLIF

SEQ ID NO: 601160 - protein, 12 aa, Homo sapiens
  CDR3 for beta chain variable domain of TCR clone 300580 (TRBV7-6, TRBJ2-3)
CASSTGTDTQYF

SEQ ID NO: 601161 - protein, 17 aa, Homo sapiens
  CDR3 for alpha chain variable domain of TCR clone 300581 (TRAV4, TRAJ18)
CLVGERSVGSTLGRRDF

SEQ ID NO: 601162 - protein, 16 aa, Homo sapiens
  CDR3 for beta chain variable domain of TCR clone 300581 (TRBV15, TRBJ1-4)
CATSRDSPPGRDKLFF

SEQ ID NO: 601163 - protein, 12 aa, Homo sapiens
  CDR3 for alpha chain variable domain of TCR clone 300582 (TRAV25, TRAJ30)
CAGKNRDDKIIL

SEQ ID NO: 601164 - protein, 11 aa, Homo sapiens
  CDR3 for beta chain variable domain of TCR clone 300582 (TRBV12-4, TRBJ2-7)
CATTEKGEQYF

SEQ ID NO: 601165 - protein, 13 aa, Homo sapiens
  CDR3 for alpha chain variable domain of TCR clone 300583 (TRAV3, TRAJ21)
CAVREPDLNKFYF

SEQ ID NO: 601166 - protein, 14 aa, Homo sapiens
  CDR3 for beta chain variable domain of TCR clone 300583 (TRBV4-2, TRBJ2-1)
CASGLDRAYNEQFF

SEQ ID NO: 601167 - protein, 12 aa, Homo sapiens
  CDR3 for alpha chain variable domain of TCR clone 300584 (TRAV12-3, TRAJ17)
CAMTLTGNKRTF

SEQ ID NO: 601168 - protein, 16 aa, Homo sapiens
  CDR3 for beta chain variable domain of TCR clone 300584 (TRBV19, TRBJ2-1)
CASSKAGPSSYNEQFF

SEQ ID NO: 601169 - protein, 15 aa, Homo sapiens
  CDR3 for alpha chain variable domain of TCR clone 300585 (TRAV8-3, TRAJ45)
CASSYSGGGADGLPF

SEQ ID NO: 601170 - protein, 13 aa, Homo sapiens
  CDR3 for beta chain variable domain of TCR clone 300585 (TRBV7-3, TRBJ1-1)
CASSQDWGAEAFF

SEQ ID NO: 601171 - protein, 13 aa, Homo sapiens
  CDR3 for alpha chain variable domain of TCR clone 300586 (TRAV13-1, TRAJ13)
CAASKEGYQKVTF

SEQ ID NO: 601172 - protein, 16 aa, Homo sapiens
  CDR3 for beta chain variable domain of TCR clone 300586 (TRBV18, TRBJ1-2)
CASSPPERVTIYGYTF

SEQ ID NO: 601173 - protein, 14 aa, Homo sapiens
  CDR3 for alpha chain variable domain of TCR clone 300587 (TRAV17, TRAJ57)
CATDPQGGSEKRVF

SEQ ID NO: 601174 - protein, 12 aa, Homo sapiens
  CDR3 for beta chain variable domain of TCR clone 300587 (TRBV11-2, TRBJ2-2)
CASSLPTGELFF

SEQ ID NO: 601175 - protein, 15 aa, Homo sapiens
  CDR3 for alpha chain variable domain of TCR clone 300588 (TRAV3, TRAJ22)
CAVRDRGGSARQLPF

SEQ ID NO: 601176 - protein, 14 aa, Homo sapiens
  CDR3 for beta chain variable domain of TCR clone 300588 (TRBV19, TRBJ1-5)
CASSLGLVGQPQHF

SEQ ID NO: 601177 - protein, 12 aa, Homo sapiens
  CDR3 for alpha chain variable domain of TCR clone 300589 (TRAV4, TRAJ34)
CLVGEGTDKLIF

SEQ ID NO: 601178 - protein, 15 aa, Homo sapiens
  CDR3 for beta chain variable domain of TCR clone 300589 (TRBV13, TRBJ1-2)
CASSLGRQPGYGYTF

SEQ ID NO: 601179 - protein, 12 aa, Homo sapiens
  CDR3 for alpha chain variable domain of TCR clone 300590 (TRAV12-1, TRAJ40)
CVVYSGTYKYTF

SEQ ID NO: 601180 - protein, 15 aa, Homo sapiens
  CDR3 for beta chain variable domain of TCR clone 300590 (TRBV28, TRBJ2-5)
CASSPPWSYQETQYF

SEQ ID NO: 601181 - protein, 15 aa, Homo sapiens
  CDR3 for alpha chain variable domain of TCR clone 300591 (TRAV12-2, TRAJ43)
CAFDMRFGAGTRLTV

SEQ ID NO: 601182 - protein, 16 aa, Homo sapiens
  CDR3 for beta chain variable domain of TCR clone 300591 (TRBV18, TRBJ1-5)
CASSPYRVEGNQPQHF

SEQ ID NO: 601183 - protein, 15 aa, Homo sapiens
  CDR3 for alpha chain variable domain of TCR clone 300592 (TRAV25, TRAJ53)
CPTSNSGGSNYKLTF

SEQ ID NO: 601184 - protein, 14 aa, Homo sapiens
  CDR3 for beta chain variable domain of TCR clone 300592 (TRBV11-2, TRBJ2-3)
CVSSRLARTDTQYF

SEQ ID NO: 601185 - protein, 12 aa, Homo sapiens
  CDR3 for alpha chain variable domain of TCR clone 300593 (TRAV21, TRAJ11)
CAATSGYSTLTF

SEQ ID NO: 601186 - protein, 16 aa, Homo sapiens
  CDR3 for beta chain variable domain of TCR clone 300593 (TRBV20-1, TRBJ2-7)
CSAPELAGVGESTSGR

SEQ ID NO: 601187 - protein, 15 aa, Homo sapiens
  CDR3 for alpha chain variable domain of TCR clone 300594 (TRAV9-2, TRAJ9)
CALSLTNTGGFKTIF

SEQ ID NO: 601188 - protein, 16 aa, Homo sapiens
  CDR3 for beta chain variable domain of TCR clone 300594 (TRBV5-1, TRBJ2-3)
CASSLQGRVGADTQYF

SEQ ID NO: 601189 - protein, 14 aa, Homo sapiens
  CDR3 for alpha chain variable domain of TCR clone 300595 (TRAV1-2, TRAJ16)
CAVNRFSDGQKLLF

SEQ ID NO: 601190 - protein, 13 aa, Homo sapiens
  CDR3 for beta chain variable domain of TCR clone 300595 (TRBV7-9, TRBJ1-2)
CAGSLKQNYGYAF

SEQ ID NO: 601191 - protein, 12 aa, Homo sapiens
  CDR3 for alpha chain variable domain of TCR clone 300596 (TRAV26-1, TRAJ39)
CIVGYAGNMLTF

SEQ ID NO: 601192 - protein, 17 aa, Homo sapiens
  CDR3 for beta chain variable domain of TCR clone 300596 (TRBV13, TRBJ2-3)
CASSLSRVAGGRNTQYF

SEQ ID NO: 601193 - protein, 13 aa, Homo sapiens
  CDR3 for alpha chain variable domain of TCR clone 300597 (TRAV12-1, TRAJ31)
CVVVPNNNARLMF

SEQ ID NO: 601194 - protein, 15 aa, Homo sapiens
  CDR3 for beta chain variable domain of TCR clone 300597 (TRBV19, TRBJ1-2)
CASNLGGETPYDYTF

SEQ ID NO: 601195 - protein, 14 aa, Homo sapiens
  CDR3 for alpha chain variable domain of TCR clone 300598 (TRAV4, TRAJ9)
CLVGSGTGGFKTIF

SEQ ID NO: 601196 - protein, 14 aa, Homo sapiens
  CDR3 for beta chain variable domain of TCR clone 300598 (TRBV7-8, TRBJ2-3)
CASSLEAGTDTQYF

SEQ ID NO: 601197 - protein, 14 aa, Homo sapiens
  CDR3 for alpha chain variable domain of TCR clone 300599 (TRAV38-1, TRAJ45)
CAYYSGGGVDGFTF

SEQ ID NO: 601198 - protein, 20 aa, Homo sapiens
  CDR3 for beta chain variable domain of TCR clone 300599 (TRBV28, TRBJ2-1)
CASTPIGRSPGRAGGNEQFF

SEQ ID NO: 601199 - protein, 13 aa, Homo sapiens
  CDR3 for alpha chain variable domain of TCR clone 300600 (TRAV4, TRAJ20)
CLVGSSNDYKLSF

SEQ ID NO: 601200 - protein, 15 aa, Homo sapiens
  CDR3 for beta chain variable domain of TCR clone 300600 (TRBV7-8, TRBJ2-1)
CASSLADSLYNEQFF

SEQ ID NO: 601201 - protein, 14 aa, Homo sapiens
  CDR3 for alpha chain variable domain of TCR clone 300601 (TRAV13-2, TRAJ22)
CADGTLGSARQLTF

SEQ ID NO: 601202 - protein, 13 aa, Homo sapiens
  CDR3 for beta chain variable domain of TCR clone 300601 (TRBV6-1, TRBJ2-1)
CASSHDRNNEQFF

SEQ ID NO: 601203 - protein, 14 aa, Homo sapiens
  CDR3 for alpha chain variable domain of TCR clone 300602 (TRAV8-1, TRAJ5)
CAVRTDTGRRALTF

SEQ ID NO: 601204 - protein, 16 aa, Homo sapiens
  CDR3 for beta chain variable domain of TCR clone 300602 (TRBV7-2, TRBJ2-5)
CASSPFPTGGEETQYF

SEQ ID NO: 601205 - protein, 11 aa, Homo sapiens
  CDR3 for alpha chain variable domain of TCR clone 300603 (TRAV12-2, TRAJ52)
GGGTSYGKLTF

SEQ ID NO: 601206 - protein, 13 aa, Homo sapiens
  CDR3 for beta chain variable domain of TCR clone 300603 (TRBV12-4, TRBJ1-1)
CASSPGTGFEAFF

SEQ ID NO: 601207 - protein, 12 aa, Homo sapiens
  CDR3 for alpha chain variable domain of TCR clone 300604 (TRAV1-2, TRAJ33)
WAALDSNYQLIW

SEQ ID NO: 601208 - protein, 17 aa, Homo sapiens
  CDR3 for beta chain variable domain of TCR clone 300604 (TRBV7-8, TRBJ2-6)
CASSAGTGGAGANVLTF

SEQ ID NO: 601209 - protein, 13 aa, Homo sapiens
  CDR3 for alpha chain variable domain of TCR clone 300605 (TRAV12-3, TRAJ7)
CAMTPYGNNRLPF

SEQ ID NO: 601210 - protein, 16 aa, Homo sapiens
  CDR3 for beta chain variable domain of TCR clone 300605 (TRBV20-1, TRBJ1-4)
CSARPYGGELNEKLFF

SEQ ID NO: 601211 - protein, 14 aa, Homo sapiens
  CDR3 for alpha chain variable domain of TCR clone 300606 (TRAV12-3, TRAJ6)
CAMSATGGSYIPTF

SEQ ID NO: 601212 - protein, 14 aa, Homo sapiens
  CDR3 for beta chain variable domain of TCR clone 300606 (TRBV7-6, TRBJ2-3)
CASSLGTVTDTQYF

SEQ ID NO: 601213 - protein, 12 aa, Homo sapiens
  CDR3 for alpha chain variable domain of TCR clone 300607 (TRAV22, TRAJ29)
CAPPSGNTPLVF

SEQ ID NO: 601214 - protein, 15 aa, Homo sapiens
  CDR3 for beta chain variable domain of TCR clone 300607 (TRBV7-3, TRBJ2-1)
CASSPTGGGEVEQFF

SEQ ID NO: 601215 - protein, 16 aa, Homo sapiens
  CDR3 for alpha chain variable domain of TCR clone 300608 (TRAV21, TRAJ33)
CAVSPASMDSNYQLIW

SEQ ID NO: 601216 - protein, 17 aa, Homo sapiens
  CDR3 for beta chain variable domain of TCR clone 300608 (TRBV2, TRBJ1-4)
CASSKRELTQGEEKPFF

SEQ ID NO: 601217 - protein, 16 aa, Homo sapiens
  CDR3 for alpha chain variable domain of TCR clone 300609 (TRAV30, TRAJ24)
CGTAIVDADSWGKFQF

SEQ ID NO: 601218 - protein, 16 aa, Homo sapiens
  CDR3 for beta chain variable domain of TCR clone 300609 (TRBV20-1, TRBJ1-1)
CSARALTQGMNTEAFF

SEQ ID NO: 601219 - protein, 14 aa, Homo sapiens
  CDR3 for alpha chain variable domain of TCR clone 300610 (TRAV12-3, TRAJ10)
SHLPLTGGGNKLTF

SEQ ID NO: 601220 - protein, 13 aa, Homo sapiens
  CDR3 for beta chain variable domain of TCR clone 300610 (TRBV6-6, TRBJ2-7)
CARSPKHLAEQYF

SEQ ID NO: 601221 - protein, 14 aa, Homo sapiens
  CDR3 for alpha chain variable domain of TCR clone 300611 (TRAV8-3, TRAJ13)
CAVGAAGGYQKVTF

SEQ ID NO: 601222 - protein, 14 aa, Homo sapiens
  CDR3 for beta chain variable domain of TCR clone 300611 (TRBV7-8, TRBJ2-2)
CASSLDPNTGGLFF

SEQ ID NO: 601223 - protein, 14 aa, Homo sapiens
  CDR3 for alpha chain variable domain of TCR clone 300612 (TRAV12-2, TRAJ40)
FAVKIPSGTYKYIF

SEQ ID NO: 601224 - protein, 14 aa, Homo sapiens
  CDR3 for beta chain variable domain of TCR clone 300612 (TRBV20-1, TRBJ1-1)
CSAQTRIGGTEAFL

SEQ ID NO: 601225 - protein, 15 aa, Homo sapiens
  CDR3 for alpha chain variable domain of TCR clone 300613 (TRAV3, TRAJ4)
CAVRDGTGGYNKLIF

SEQ ID NO: 601226 - protein, 15 aa, Homo sapiens
  CDR3 for beta chain variable domain of TCR clone 300613 (TRBV11-2, TRBJ2-1)
CASSKNRGLIYEQFF

SEQ ID NO: 601227 - protein, 15 aa, Homo sapiens
  CDR3 for alpha chain variable domain of TCR clone 300614 (TRAV21, TRAJ53)
CATLNSGGSNYKLTF

SEQ ID NO: 601228 - protein, 18 aa, Homo sapiens
  CDR3 for beta chain variable domain of TCR clone 300614 (TRBV24-1, TRBJ2-2)
CATGLSTGQWTQTGELFF

SEQ ID NO: 601229 - protein, 12 aa, Homo sapiens
  CDR3 for alpha chain variable domain of TCR clone 300615 (TRAV13-2, TRAJ23)
CAERHRGGKLIF

SEQ ID NO: 601230 - protein, 16 aa, Homo sapiens
  CDR3 for beta chain variable domain of TCR clone 300615 (TRBV19, TRBJ2-3)
CASSPGAASRTDTQYF

SEQ ID NO: 601231 - protein, 14 aa, Homo sapiens
  CDR3 for alpha chain variable domain of TCR clone 300616 (TRAV39, TRAJ42)
CAVDIARSQGNLIF

SEQ ID NO: 601232 - protein, 14 aa, Homo sapiens
  CDR3 for beta chain variable domain of TCR clone 300616 (TRBV18, TRBJ2-3)
CASSGLADTDTQYF

SEQ ID NO: 601233 - protein, 12 aa, Homo sapiens
  CDR3 for alpha chain variable domain of TCR clone 300617 (TRAV2, TRAJ9)
CAVGAGGFKTIF

SEQ ID NO: 601234 - protein, 12 aa, Homo sapiens
  CDR3 for beta chain variable domain of TCR clone 300617 (TRBV12-4, TRBJ2-7)
CASSLGGYEQYF

SEQ ID NO: 601235 - protein, 15 aa, Homo sapiens
  CDR3 for alpha chain variable domain of TCR clone 300618 (TRAV4, TRAJ39)
CLVGPNNNAGNMLTL

SEQ ID NO: 601236 - protein, 12 aa, Homo sapiens
  CDR3 for beta chain variable domain of TCR clone 300618 (TRBV12-4, TRBJ2-7)
CASNPGGGEQYF

SEQ ID NO: 601237 - protein, 11 aa, Homo sapiens
  CDR3 for alpha chain variable domain of TCR clone 300619 (TRAV17, TRAJ9)
CGVTGGFKIIF

SEQ ID NO: 601238 - protein, 14 aa, Homo sapiens
  CDR3 for beta chain variable domain of TCR clone 300619 (TRBV7-9, TRBJ2-2)
CASSLVQDTGELFS

SEQ ID NO: 601239 - protein, 13 aa, Homo sapiens
  CDR3 for alpha chain variable domain of TCR clone 300620 (TRAV8-3, TRAJ28)
CAVGAVGSCQLIF

SEQ ID NO: 601240 - protein, 15 aa, Homo sapiens
  CDR3 for beta chain variable domain of TCR clone 300620 (TRBV7-9, TRBJ1-5)
CASSQGHQPNQPQHF

SEQ ID NO: 601241 - protein, 14 aa, Homo sapiens
  CDR3 for alpha chain variable domain of TCR clone 300621 (TRAV12-1, TRAJ17)
CVVNYKASGNKITF

SEQ ID NO: 601242 - protein, 17 aa, Homo sapiens
  CDR3 for beta chain variable domain of TCR clone 300621 (TRBV20-1, TRBJ2-1)
CSASSSGLAGSYNEQFF

SEQ ID NO: 601243 - protein, 13 aa, Homo sapiens
  CDR3 for alpha chain variable domain of TCR clone 300622 (TRAV26-2, TRAJ37)
CIRGSSNTGKLIF

SEQ ID NO: 601244 - protein, 16 aa, Homo sapiens
  CDR3 for beta chain variable domain of TCR clone 300622 (TRBV7-2, TRBJ2-5)
CASSPGGARRGETRYF

SEQ ID NO: 601245 - protein, 13 aa, Homo sapiens
  CDR3 for alpha chain variable domain of TCR clone 300623 (TRAV2, TRAJ40)
CAVVTSGTYKYIF

SEQ ID NO: 601246 - protein, 13 aa, Homo sapiens
  CDR3 for beta chain variable domain of TCR clone 300623 (TRBV12-4, TRBJ2-1)
CASSLGTDNEQFF

SEQ ID NO: 601247 - protein, 16 aa, Homo sapiens
  CDR3 for alpha chain variable domain of TCR clone 300624 (TRAV30, TRAJ24)
CGTEIVDADSWGKFQF

SEQ ID NO: 601248 - protein, 15 aa, Homo sapiens
  CDR3 for beta chain variable domain of TCR clone 300624 (TRBV2, TRBJ2-1)
CASDIGLAGEGEQFF

SEQ ID NO: 601249 - protein, 14 aa, Homo sapiens
  CDR3 for alpha chain variable domain of TCR clone 300625 (TRAV20, TRAJ44)
CAVFNPGTASKLTF

SEQ ID NO: 601250 - protein, 14 aa, Homo sapiens
  CDR3 for beta chain variable domain of TCR clone 300625 (TRBV20-1, TRBJ2-3)
CSARGGTSTDTQYF

SEQ ID NO: 601251 - protein, 13 aa, Homo sapiens
  CDR3 for alpha chain variable domain of TCR clone 300626 (TRAV8-1, TRAJ30)
CAVIMNRDDKIIF

SEQ ID NO: 601252 - protein, 14 aa, Homo sapiens
  CDR3 for beta chain variable domain of TCR clone 300626 (TRBV5-5, TRBJ1-5)
CASSGQGVDQPQHF

SEQ ID NO: 601253 - protein, 12 aa, Homo sapiens
  CDR3 for alpha chain variable domain of TCR clone 300627 (TRAV30, TRAJ43)
CGTEERGNDMRF

SEQ ID NO: 601254 - protein, 12 aa, Homo sapiens
  CDR3 for beta chain variable domain of TCR clone 300627 (TRBV14, TRBJ1-1)
CASSQLKGLAFF

SEQ ID NO: 601255 - protein, 15 aa, Homo sapiens
  CDR3 for alpha chain variable domain of TCR clone 300628 (TRAV12-3, TRAJ42)
CAMSGHGGSQGNLIF

SEQ ID NO: 601256 - protein, 17 aa, Homo sapiens
  CDR3 for beta chain variable domain of TCR clone 300628 (TRBV20-1, TRBJ2-1)
CSASSSGLAGSYNEQFF

SEQ ID NO: 601257 - protein, 13 aa, Homo sapiens
  CDR3 for alpha chain variable domain of TCR clone 300629 (TRAV16, TRAJ48)
CSPLNFVNEKLTF

SEQ ID NO: 601258 - protein, 11 aa, Homo sapiens
  CDR3 for beta chain variable domain of TCR clone 300629 (TRBV7-9, TRBJ2-3)
CASSPTDTQYF

SEQ ID NO: 601259 - protein, 15 aa, Homo sapiens
  CDR3 for alpha chain variable domain of TCR clone 300630 (TRAV27, TRAJ53)
CRAINSGGSNYKLTF

SEQ ID NO: 601260 - protein, 13 aa, Homo sapiens
  CDR3 for beta chain variable domain of TCR clone 300630 (TRBV19, TRBJ1-2)
CASSVPGQDGYTF

SEQ ID NO: 601261 - protein, 13 aa, Homo sapiens
  CDR3 for alpha chain variable domain of TCR clone 300631 (TRAV13-2, TRAJ48)
CAEMDFGNEKLIF

SEQ ID NO: 601262 - protein, 14 aa, Homo sapiens
  CDR3 for beta chain variable domain of TCR clone 300631 (TRBV19, TRBJ2-7)
CASSMGQGAIEQYF

SEQ ID NO: 601263 - protein, 16 aa, Homo sapiens
  CDR3 for alpha chain variable domain of TCR clone 300632 (TRAV3, TRAJ4)
CAVRAFFSGGYNKLLF

SEQ ID NO: 601264 - protein, 16 aa, Homo sapiens
  CDR3 for beta chain variable domain of TCR clone 300632 (TRBV6-1, TRBJ1-6)
CASSERGGSGNSPLHF

SEQ ID NO: 601265 - protein, 15 aa, Homo sapiens
  CDR3 for alpha chain variable domain of TCR clone 300633 (TRAV26-1, TRAJ3)
CIGRSGYSSASKIIF

SEQ ID NO: 601266 - protein, 14 aa, Homo sapiens
  CDR3 for beta chain variable domain of TCR clone 300633 (TRBV13, TRBJ2-5)
CAGYRRLAEETQYF

SEQ ID NO: 601267 - protein, 14 aa, Homo sapiens
  CDR3 for alpha chain variable domain of TCR clone 300634 (TRAV1-2, TRAJ8)
CAVREDTCFQKLVF

SEQ ID NO: 601268 - protein, 15 aa, Homo sapiens
  CDR3 for beta chain variable domain of TCR clone 300634 (TRBV4-1, TRBJ2-7)
CASSQNTGRLYEQYF

SEQ ID NO: 601269 - protein, 13 aa, Homo sapiens
  CDR3 for alpha chain variable domain of TCR clone 300635 (TRAV25, TRAJ10)
CAGRTGGGNKLTF

SEQ ID NO: 601270 - protein, 14 aa, Homo sapiens
  CDR3 for beta chain variable domain of TCR clone 300635 (TRBV18, TRBJ2-1)
CASSPQGRFNEQFF

SEQ ID NO: 601271 - protein, 17 aa, Homo sapiens
  CDR3 for alpha chain variable domain of TCR clone 300636 (TRAV16, TRAJ58)
CITVLSNGETSGSRLTF

SEQ ID NO: 601272 - protein, 17 aa, Homo sapiens
  CDR3 for beta chain variable domain of TCR clone 300636 (TRBV18, TRBJ2-1)
CASSKGLSGGADNEQVF

SEQ ID NO: 601273 - protein, 14 aa, Homo sapiens
  CDR3 for alpha chain variable domain of TCR clone 300637 (TRAV13-1, TRAJ12)
CAASYMDSSYKLIF

SEQ ID NO: 601274 - protein, 13 aa, Homo sapiens
  CDR3 for beta chain variable domain of TCR clone 300637 (TRBV3-1, TRBJ1-1)
CASSQLQGAEAFF

SEQ ID NO: 601275 - protein, 13 aa, Homo sapiens
  CDR3 for alpha chain variable domain of TCR clone 300638 (TRAV2, TRAJ20)
CAVEVPSEYKLSF

SEQ ID NO: 601276 - protein, 16 aa, Homo sapiens
  CDR3 for beta chain variable domain of TCR clone 300638 (TRBV25-1, TRBJ2-7)
CASSELTGGGIYEQYF

SEQ ID NO: 601277 - protein, 13 aa, Homo sapiens
  CDR3 for alpha chain variable domain of TCR clone 300639 (TRAV27, TRAJ6)
CAGGTRGSYIPTF

SEQ ID NO: 601278 - protein, 15 aa, Homo sapiens
  CDR3 for beta chain variable domain of TCR clone 300639 (TRBV6-1, TRBJ1-1)
CASRRGEGQLSEAFF

SEQ ID NO: 601279 - protein, 14 aa, Homo sapiens
  CDR3 for alpha chain variable domain of TCR clone 300640 (TRAV14/DV4, TRAJ20)
GAMRESLNDYKLSF

SEQ ID NO: 601280 - protein, 15 aa, Homo sapiens
  CDR3 for beta chain variable domain of TCR clone 300640 (TRBV27, TRBJ2-1)
CASSNGGGSSNEQFF

SEQ ID NO: 601281 - protein, 16 aa, Homo sapiens
  CDR3 for alpha chain variable domain of TCR clone 300641 (TRAV3, TRAJ37)
CAVRPHGSGNTGTLHF

SEQ ID NO: 601282 - protein, 14 aa, Homo sapiens
  CDR3 for beta chain variable domain of TCR clone 300641 (TRBV25-1, TRBJ1-1)
CASTHLGGNTEAFF

SEQ ID NO: 601283 - protein, 13 aa, Homo sapiens
  CDR3 for alpha chain variable domain of TCR clone 300642 (TRAV21, TRAJ27)
CAARPGNAGKSTF

SEQ ID NO: 601284 - protein, 13 aa, Homo sapiens
  CDR3 for beta chain variable domain of TCR clone 300642 (TRBV10-3, TRBJ1-2)
CAISERDSYGYTF

SEQ ID NO: 601285 - protein, 15 aa, Homo sapiens
  CDR3 for alpha chain variable domain of TCR clone 300643 (TRAV8-2, TRAJ42)
CVVSAYMGSQGNLIF

SEQ ID NO: 601286 - protein, 11 aa, Homo sapiens
  CDR3 for beta chain variable domain of TCR clone 300643 (TRBV5-1, TRBJ2-1)
GASSIGQEQFF

SEQ ID NO: 601287 - protein, 15 aa, Homo sapiens
  CDR3 for alpha chain variable domain of TCR clone 300644 (TRAV21, TRAJ53)
CATLNSGGSNYKLTF

SEQ ID NO: 601288 - protein, 14 aa, Homo sapiens
  CDR3 for beta chain variable domain of TCR clone 300644 (TRBV7-2, TRBJ1-5)
CASSLTGNNQPQHF

SEQ ID NO: 601289 - protein, 15 aa, Homo sapiens
  CDR3 for alpha chain variable domain of TCR clone 300645 (TRAV4, TRAJ39)
CLVGPTNNAGNMLTF

SEQ ID NO: 601290 - protein, 15 aa, Homo sapiens
  CDR3 for beta chain variable domain of TCR clone 300645 (TRBV5-1, TRBJ2-1)
CASSPPRAPYNEQFF

SEQ ID NO: 601291 - protein, 16 aa, Homo sapiens
  CDR3 for alpha chain variable domain of TCR clone 300646 (TRAV30, TRAJ24)
CGTEIVDADSWGKFQF

SEQ ID NO: 601292 - protein, 15 aa, Homo sapiens
  CDR3 for beta chain variable domain of TCR clone 300646 (TRBV5-7, TRBJ1-2)
CASSLGVAANYGYTF

SEQ ID NO: 601293 - protein, 15 aa, Homo sapiens
  CDR3 for alpha chain variable domain of TCR clone 300647 (TRAV17, TRAJ28)
CATDPSGAGSYQLTF

SEQ ID NO: 601294 - protein, 13 aa, Homo sapiens
  CDR3 for beta chain variable domain of TCR clone 300647 (TRBV5-7, TRBJ2-5)
CASSLRLQETQYF

SEQ ID NO: 601295 - protein, 13 aa, Homo sapiens
  CDR3 for alpha chain variable domain of TCR clone 300648 (TRAV21, TRAJ36)
CAVIKTGANILFF

SEQ ID NO: 601296 - protein, 13 aa, Homo sapiens
  CDR3 for beta chain variable domain of TCR clone 300648 (TRBV29-1, TRBJ2-3)
CSATRGGRDTQYF

SEQ ID NO: 601297 - protein, 13 aa, Homo sapiens
  CDR3 for alpha chain variable domain of TCR clone 300649 (TRAV1-1, TRAJ9)
CAAKNTGGLKTIF

SEQ ID NO: 601298 - protein, 15 aa, Homo sapiens
  CDR3 for beta chain variable domain of TCR clone 300649 (TRBV5-1, TRBJ2-1)
CASTGSGRTYNEQFF

SEQ ID NO: 601299 - protein, 16 aa, Homo sapiens
  CDR3 for alpha chain variable domain of TCR clone 300650 (TRAV3, TRAJ37)
CAVRGKGSGNTGKLIF

SEQ ID NO: 601300 - protein, 13 aa, Homo sapiens
  CDR3 for beta chain variable domain of TCR clone 300650 (TRBV14, TRBJ2-7)
CASSQDRRYEHYF

SEQ ID NO: 601301 - protein, 15 aa, Homo sapiens
  CDR3 for alpha chain variable domain of TCR clone 300651 (TRAV3, TRAJ7)
CAVGDKDNGNNRLAF

SEQ ID NO: 601302 - protein, 19 aa, Homo sapiens
  CDR3 for beta chain variable domain of TCR clone 300651 (TRBV5-8, TRBJ2-3)
CASSFLGTSGSHRTDTQYF

SEQ ID NO: 601303 - protein, 23 aa, Homo sapiens
  CDR3 for alpha chain variable domain of TCR clone 300652 (TRAV26-1, TRAJ38)
CIADNAGNNHIQNPDPAVYQLRD

SEQ ID NO: 601304 - protein, 14 aa, Homo sapiens
  CDR3 for beta chain variable domain of TCR clone 300652 (TRBV7-3, TRBJ1-1)
CASSLGTGYTEAFF

SEQ ID NO: 601305 - protein, 13 aa, Homo sapiens
  CDR3 for alpha chain variable domain of TCR clone 300653 (TRAV3, TRAJ30)
CAVRDIPDDKINF

SEQ ID NO: 601306 - protein, 15 aa, Homo sapiens
  CDR3 for beta chain variable domain of TCR clone 300653 (TRBV7-9, TRBJ1-6)
CASSSPGRGNSPLHF

SEQ ID NO: 601307 - protein, 16 aa, Homo sapiens
  CDR3 for alpha chain variable domain of TCR clone 300654 (TRAV38-1, TRAJ45)
FAFMKGSGGGADGLTF

SEQ ID NO: 601308 - protein, 15 aa, Homo sapiens
  CDR3 for beta chain variable domain of TCR clone 300654 (TRBV20-1, TRBJ2-7)
CSAREGRDSLYEQYF

SEQ ID NO: 601309 - protein, 16 aa, Homo sapiens
  CDR3 for alpha chain variable domain of TCR clone 300655 (TRAV3, TRAJ37)
CAVRGKGSGNTGKLIF

SEQ ID NO: 601310 - protein, 11 aa, Homo sapiens
  CDR3 for beta chain variable domain of TCR clone 300655 (TRBV12-4, TRBJ2-2)
CASSSAGELFF

SEQ ID NO: 601311 - protein, 16 aa, Homo sapiens
  CDR3 for alpha chain variable domain of TCR clone 300656 (TRAV20, TRAJ22)
CAVRLVSSGSARQLTF

SEQ ID NO: 601312 - protein, 15 aa, Homo sapiens
  CDR3 for beta chain variable domain of TCR clone 300656 (TRBV4-2, TRBJ2-5)
CASSLSGQGEETQYF

SEQ ID NO: 601313 - protein, 13 aa, Homo sapiens
  CDR3 for alpha chain variable domain of TCR clone 300657 (TRAV8-3, TRAJ28)
CAVGAVGSYQLTF

SEQ ID NO: 601314 - protein, 15 aa, Homo sapiens
  CDR3 for beta chain variable domain of TCR clone 300657 (TRBV20-1, TRBJ2-7)
CSAESGTSGAYEQYF

SEQ ID NO: 601315 - protein, 13 aa, Homo sapiens
  CDR3 for alpha chain variable domain of TCR clone 300658 (TRAV3, TRAJ21)
CAVREPDFKKFYF

SEQ ID NO: 601316 - protein, 16 aa, Homo sapiens
  CDR3 for beta chain variable domain of TCR clone 300658 (TRBV27, TRBJ2-2)
CASSFRGLVRTGELFF

SEQ ID NO: 601317 - protein, 23 aa, Homo sapiens
  CDR3 for alpha chain variable domain of TCR clone 300659 (TRAV1-1, TRAJ11)
LLQELQMKDSASYFCAGYSTLTF

SEQ ID NO: 601318 - protein, 16 aa, Homo sapiens
  CDR3 for beta chain variable domain of TCR clone 300659 (TRBV19, TRBJ1-1)
CASRVDVTGAAWGAFF

SEQ ID NO: 601319 - protein, 14 aa, Homo sapiens
  CDR3 for alpha chain variable domain of TCR clone 300660 (TRAV12-3, TRAJ42)
CAMNYGGSQGNLIF

SEQ ID NO: 601320 - protein, 15 aa, Homo sapiens
  CDR3 for beta chain variable domain of TCR clone 300660 (TRBV13, TRBJ2-1)
CASSLLSGLNNEQFF

SEQ ID NO: 601321 - protein, 14 aa, Homo sapiens
  CDR3 for alpha chain variable domain of TCR clone 300661 (TRAV12-3, TRAJ53)
CAMSGGGSNYKLTF

SEQ ID NO: 601322 - protein, 13 aa, Homo sapiens
  CDR3 for beta chain variable domain of TCR clone 300661 (TRBV3-1, TRBJ1-1)
CASSRQGETEAFL

SEQ ID NO: 601323 - protein, 12 aa, Homo sapiens
  CDR3 for alpha chain variable domain of TCR clone 300662 (TRAV2, TRAJ31)
CAVEDNNARLMF

SEQ ID NO: 601324 - protein, 16 aa, Homo sapiens
  CDR3 for beta chain variable domain of TCR clone 300662 (TRBV10-3, TRBJ2-1)
CAISGVGDGGGGEQFS

SEQ ID NO: 601325 - protein, 14 aa, Homo sapiens
  CDR3 for alpha chain variable domain of TCR clone 300663 (TRAV8-2, TRAJ37)
CVVSISGNTGKLIF

SEQ ID NO: 601326 - protein, 16 aa, Homo sapiens
  CDR3 for beta chain variable domain of TCR clone 300663 (TRBV28, TRBJ2-6)
CASSNRRGSGANVLTF

SEQ ID NO: 601327 - protein, 14 aa, Homo sapiens
  CDR3 for alpha chain variable domain of TCR clone 300664 (TRAV12-1, TRAJ23)
CVVIVYNQGGKLIF

SEQ ID NO: 601328 - protein, 14 aa, Homo sapiens
  CDR3 for beta chain variable domain of TCR clone 300664 (TRBV12-5, TRBJ2-5)
CASGSRTHQETQYF

SEQ ID NO: 601329 - protein, 22 aa, Homo sapiens
  CDR3 for alpha chain variable domain of TCR clone 300665 (TRAV2, )
CAVEDFPSAGNNHIQNPDPAVY

SEQ ID NO: 601330 - protein, 15 aa, Homo sapiens
  CDR3 for beta chain variable domain of TCR clone 300665 (TRBV28, TRBJ1-4)
CASSLSAGTNEKLFF

SEQ ID NO: 601331 - protein, 15 aa, Homo sapiens
  CDR3 for alpha chain variable domain of TCR clone 300666 (TRAV25, TRAJ52)
CAGRPGGTSYGKLTF

SEQ ID NO: 601332 - protein, 13 aa, Homo sapiens
  CDR3 for beta chain variable domain of TCR clone 300666 (TRBV11-2, TRBJ1-6)
CASSLAGVSPLHF

SEQ ID NO: 601333 - protein, 19 aa, Homo sapiens
  CDR3 for alpha chain variable domain of TCR clone 300667 (TRAV26-1, TRAJ52)
CIVRAHRNAGGTSYGKLTF

SEQ ID NO: 601334 - protein, 15 aa, Homo sapiens
  CDR3 for beta chain variable domain of TCR clone 300667 (TRBV12-4, TRBJ2-5)
CASSPQTGLQETQYF

SEQ ID NO: 601335 - protein, 14 aa, Homo sapiens
  CDR3 for alpha chain variable domain of TCR clone 300668 (TRAV16, TRAJ39)
SALSKNNAGNMLTF

SEQ ID NO: 601336 - protein, 16 aa, Homo sapiens
  CDR3 for beta chain variable domain of TCR clone 300668 (TRBV6-6, TRBJ2-1)
CASSYSFSGSYNEQFF

SEQ ID NO: 601337 - protein, 13 aa, Homo sapiens
  CDR3 for alpha chain variable domain of TCR clone 300669 (TRAV12-2, TRAJ7)
RAVNLYGNNRLAF

SEQ ID NO: 601338 - protein, 14 aa, Homo sapiens
  CDR3 for beta chain variable domain of TCR clone 300669 (TRBV25-1, TRBJ1-2)
CASSEATGPYGYAF

SEQ ID NO: 601339 - protein, 13 aa, Homo sapiens
  CDR3 for alpha chain variable domain of TCR clone 300670 (TRAV21, TRAJ27)
CAARPGNAGKSTF

SEQ ID NO: 601340 - protein, 13 aa, Homo sapiens
  CDR3 for beta chain variable domain of TCR clone 300670 (TRBV7-6, TRBJ2-3)
CQSLGTVTDTQYF

SEQ ID NO: 601341 - protein, 13 aa, Homo sapiens
  CDR3 for alpha chain variable domain of TCR clone 300671 (TRAV3, TRAJ27)
CAVRPLGASKSTF

SEQ ID NO: 601342 - protein, 13 aa, Homo sapiens
  CDR3 for beta chain variable domain of TCR clone 300671 (TRBV7-9, TRBJ2-3)
CASSPGSTDSQYF

SEQ ID NO: 601343 - protein, 14 aa, Homo sapiens
  CDR3 for alpha chain variable domain of TCR clone 300672 (TRAV13-1, TRAJ40)
CAASMTSGTYKYIF

SEQ ID NO: 601344 - protein, 16 aa, Homo sapiens
  CDR3 for beta chain variable domain of TCR clone 300672 (TRBV11-2, TRBJ2-1)
CASARGSYSHHNEQFF

SEQ ID NO: 601345 - protein, 14 aa, Homo sapiens
  CDR3 for alpha chain variable domain of TCR clone 300673 (TRAV2, TRAJ23)
CAVGLRNQGGKLIF

SEQ ID NO: 601346 - protein, 15 aa, Homo sapiens
  CDR3 for beta chain variable domain of TCR clone 300673 (TRBV5-7, TRBJ1-2)
CASSLGVAANYGYTF

SEQ ID NO: 601347 - protein, 13 aa, Homo sapiens
  CDR3 for alpha chain variable domain of TCR clone 300674 (TRAV13-1, TRAJ15)
CAALYQAGTALIF

SEQ ID NO: 601348 - protein, 14 aa, Homo sapiens
  CDR3 for beta chain variable domain of TCR clone 300674 (TRBV6-1, TRBJ1-3)
CASVQGGGGNTIYF

SEQ ID NO: 601349 - protein, 13 aa, Homo sapiens
  CDR3 for alpha chain variable domain of TCR clone 300675 (TRAV2, TRAJ36)
CAVDQPGANNLFF

SEQ ID NO: 601350 - protein, 12 aa, Homo sapiens
  CDR3 for beta chain variable domain of TCR clone 300675 (TRBV19, TRBJ1-1)
CASMNRYTEAFF

SEQ ID NO: 601351 - protein, 17 aa, Homo sapiens
  CDR3 for alpha chain variable domain of TCR clone 300676 (TRAV3, TRAJ42)
CAVRDRDYGGSHGNLIF

SEQ ID NO: 601352 - protein, 15 aa, Homo sapiens
  CDR3 for beta chain variable domain of TCR clone 300676 (TRBV6-3, TRBJ2-7)
CASSSPGTVFYEQYF

SEQ ID NO: 601353 - protein, 13 aa, Homo sapiens
  CDR3 for alpha chain variable domain of TCR clone 300677 (TRAV29/DV5, TRAJ44)
CAASTGTASKLNF

SEQ ID NO: 601354 - protein, 13 aa, Homo sapiens
  CDR3 for beta chain variable domain of TCR clone 300677 (TRBV19, TRBJ2-7)
CASRKAGGSEQYF

SEQ ID NO: 601355 - protein, 12 aa, Homo sapiens
  CDR3 for alpha chain variable domain of TCR clone 300678 (TRAV12-3, TRAJ4)
CVMTGAGTRLAV

SEQ ID NO: 601356 - protein, 14 aa, Homo sapiens
  CDR3 for beta chain variable domain of TCR clone 300678 (TRBV10-3, TRBJ1-1)
CAISDTDRGVEAFF

SEQ ID NO: 601357 - protein, 15 aa, Homo sapiens
  CDR3 for alpha chain variable domain of TCR clone 300679 (TRAV3, TRAJ11)
CAVRDRWSGYSTLTF

SEQ ID NO: 601358 - protein, 13 aa, Homo sapiens
  CDR3 for beta chain variable domain of TCR clone 300679 (TRBV7-9, TRBJ1-2)
CASSLKQNYGYTF

SEQ ID NO: 601359 - protein, 14 aa, Homo sapiens
  CDR3 for alpha chain variable domain of TCR clone 300680 (TRAV2, TRAJ9)
CAVEDRSGGFKHIF

SEQ ID NO: 601360 - protein, 11 aa, Homo sapiens
  CDR3 for beta chain variable domain of TCR clone 300680 (TRBV7-9, TRBJ2-5)
CASSLGETQYF

SEQ ID NO: 601361 - protein, 12 aa, Homo sapiens
  CDR3 for alpha chain variable domain of TCR clone 300681 (TRAV2, TRAJ33)
CAVWGSNYQLIW

SEQ ID NO: 601362 - protein, 16 aa, Homo sapiens
  CDR3 for beta chain variable domain of TCR clone 300681 (TRBV20-1, TRBJ1-4)
CSAPVQGLLTNEKLFF

SEQ ID NO: 601363 - protein, 13 aa, Homo sapiens
  CDR3 for alpha chain variable domain of TCR clone 300682 (TRAV22, TRAJ42)
CAVDRGSQGNLIF

SEQ ID NO: 601364 - protein, 16 aa, Homo sapiens
  CDR3 for beta chain variable domain of TCR clone 300682 (TRBV10-3, TRBJ2-7)
CAISADFADRPYEQYF

SEQ ID NO: 601365 - protein, 14 aa, Homo sapiens
  CDR3 for alpha chain variable domain of TCR clone 300683 (TRAV1-2, TRAJ27)
CAPAEYTNAGKSTF

SEQ ID NO: 601366 - protein, 15 aa, Homo sapiens
  CDR3 for beta chain variable domain of TCR clone 300683 (TRBV4-1, TRBJ1-4)
CASSDTGGTNEKLFF

SEQ ID NO: 601367 - protein, 16 aa, Homo sapiens
  CDR3 for alpha chain variable domain of TCR clone 300684 (TRAV30, TRAJ24)
CGTEIVDADSWGKFQF

SEQ ID NO: 601368 - protein, 13 aa, Homo sapiens
  CDR3 for beta chain variable domain of TCR clone 300684 (TRBV5-1, TRBJ2-5)
CASSWEGEETQYF

SEQ ID NO: 601369 - protein, 14 aa, Homo sapiens
  CDR3 for alpha chain variable domain of TCR clone 300685 (TRAV1-2, TRAJ8)
CSEREDTGFQKLVF

SEQ ID NO: 601370 - protein, 15 aa, Homo sapiens
  CDR3 for beta chain variable domain of TCR clone 300685 (TRBV6-3, TRBJ2-7)
CASSSPGTVFYEQYF

SEQ ID NO: 601371 - protein, 14 aa, Homo sapiens
  CDR3 for alpha chain variable domain of TCR clone 300686 (TRAV23/DV6, TRAJ50)
CAADMKTSYDKVIF

SEQ ID NO: 601372 - protein, 19 aa, Homo sapiens
  CDR3 for beta chain variable domain of TCR clone 300686 (TRBV25-1, TRBJ2-2)
CAILVYRVDRGRKTGELFF

SEQ ID NO: 601373 - protein, 14 aa, Homo sapiens
  CDR3 for alpha chain variable domain of TCR clone 300687 (TRAV12-3, TRAJ10)
SHLTLTGGGNKLTF

SEQ ID NO: 601374 - protein, 15 aa, Homo sapiens
  CDR3 for beta chain variable domain of TCR clone 300687 (TRBV29-1, TRBJ2-7)
CSVEFFDRGSYEQYF

SEQ ID NO: 601375 - protein, 13 aa, Homo sapiens
  CDR3 for alpha chain variable domain of TCR clone 300688 (TRAV21, TRAJ27)
CAARPGTAGKSTF

SEQ ID NO: 601376 - protein, 15 aa, Homo sapiens
  CDR3 for beta chain variable domain of TCR clone 300688 (TRBV2, TRBJ2-3)
CASSDAGGPPDTQYF

SEQ ID NO: 601377 - protein, 11 aa, Homo sapiens
  CDR3 for alpha chain variable domain of TCR clone 300689 (TRAV3, TRAJ21)
CAAGNFNKFYF

SEQ ID NO: 601378 - protein, 14 aa, Homo sapiens
  CDR3 for beta chain variable domain of TCR clone 300689 (TRBV7-9, TRBJ2-2)
CASRPMGYTGELFF

SEQ ID NO: 601379 - protein, 13 aa, Homo sapiens
  CDR3 for alpha chain variable domain of TCR clone 300690 (TRAV27, TRAJ6)
CAGGTRGSYIPTF

SEQ ID NO: 601380 - protein, 16 aa, Homo sapiens
  CDR3 for beta chain variable domain of TCR clone 300690 (TRBV28, TRBJ2-5)
CASSFSPAGGWETQYF

SEQ ID NO: 601381 - protein, 12 aa, Homo sapiens
  CDR3 for alpha chain variable domain of TCR clone 300691 (TRAV13-2, TRAJ23)
CAERHRGGKLIF

SEQ ID NO: 601382 - protein, 16 aa, Homo sapiens
  CDR3 for beta chain variable domain of TCR clone 300691 (TRBV20-1, TRBJ1-4)
CSAPGQGFLTNEKLFF

SEQ ID NO: 601383 - protein, 15 aa, Homo sapiens
  CDR3 for alpha chain variable domain of TCR clone 300692 (TRAV23/DV6, TRAJ37)
CAAGEGSGNTGQLIF

SEQ ID NO: 601384 - protein, 17 aa, Homo sapiens
  CDR3 for beta chain variable domain of TCR clone 300692 (TRBV20-1, TRBJ2-7)
CSATRAGGVAGVEEQYF

SEQ ID NO: 601385 - protein, 14 aa, Homo sapiens
  CDR3 for alpha chain variable domain of TCR clone 300693 (TRAV12-2, TRAJ44)
CAVNPASTASKLTF

SEQ ID NO: 601386 - protein, 16 aa, Homo sapiens
  CDR3 for beta chain variable domain of TCR clone 300693 (TRBV2, TRBJ2-1)
CASSVGGSLSYNEQFF

SEQ ID NO: 601387 - protein, 14 aa, Homo sapiens
  CDR3 for alpha chain variable domain of TCR clone 300694 (TRAV38-1, TRAJ48)
CAFMANFGNEKLIF

SEQ ID NO: 601388 - protein, 16 aa, Homo sapiens
  CDR3 for beta chain variable domain of TCR clone 300694 (TRBV4-1, TRBJ2-7)
CASRPSGGGADNEQYF

SEQ ID NO: 601389 - protein, 11 aa, Homo sapiens
  CDR3 for alpha chain variable domain of TCR clone 300695 (TRAV1-1, TRAJ23)
CDVRQGGKLIF

SEQ ID NO: 601390 - protein, 22 aa, Homo sapiens
  CDR3 for beta chain variable domain of TCR clone 300695 (TRBV6-1, TRBJ1-3)
CASVQGGGWKHHIFWRGKLAHC

SEQ ID NO: 601391 - protein, 12 aa, Homo sapiens
  CDR3 for alpha chain variable domain of TCR clone 300696 (TRAV13-1, TRAJ15)
CAASQAGTALIF

SEQ ID NO: 601392 - protein, 15 aa, Homo sapiens
  CDR3 for beta chain variable domain of TCR clone 300696 (TRBV6-3, TRBJ2-7)
CASSSPGTVFYEQYF

SEQ ID NO: 601393 - protein, 13 aa, Homo sapiens
  CDR3 for alpha chain variable domain of TCR clone 300697 (TRAV3, TRAJ20)
CAVRSLNDYKPSF

SEQ ID NO: 601394 - protein, 13 aa, Homo sapiens
  CDR3 for beta chain variable domain of TCR clone 300697 (TRBV6-1, TRBJ2-1)
CAGMDATNNEQFF

SEQ ID NO: 601395 - protein, 14 aa, Homo sapiens
  CDR3 for alpha chain variable domain of TCR clone 300698 (TRAV8-1, TRAJ5)
CAARTDTGRRALTF

SEQ ID NO: 601396 - protein, 15 aa, Homo sapiens
  CDR3 for beta chain variable domain of TCR clone 300698 (TRBV7-3, TRBJ2-1)
CASSPTGGGEVEQFF

SEQ ID NO: 601397 - protein, 13 aa, Homo sapiens
  CDR3 for alpha chain variable domain of TCR clone 300699 (TRAV1-2, TRAJ9)
CAVLNTGGFKTIF

SEQ ID NO: 601398 - protein, 14 aa, Homo sapiens
  CDR3 for beta chain variable domain of TCR clone 300699 (TRBV7-9, TRBJ2-1)
CASSPRDSLYEQFF

SEQ ID NO: 601399 - protein, 15 aa, Homo sapiens
  CDR3 for alpha chain variable domain of TCR clone 300700 (TRAV8-3, TRAJ45)
CASSYSGGGADGLTF

SEQ ID NO: 601400 - protein, 16 aa, Homo sapiens
  CDR3 for beta chain variable domain of TCR clone 300700 (TRBV15, TRBJ2-3)
CATSRDLGIVTDTQYF

SEQ ID NO: 601401 - protein, 16 aa, Homo sapiens
  CDR3 for alpha chain variable domain of TCR clone 300701 (TRAV13-1, TRAJ18)
CAASRMRGSTLGRLYF

SEQ ID NO: 601402 - protein, 13 aa, Homo sapiens
  CDR3 for beta chain variable domain of TCR clone 300701 (TRBV7-2, TRBJ2-7)
CASSSPSGSEQHF

SEQ ID NO: 601403 - protein, 14 aa, Homo sapiens
  CDR3 for alpha chain variable domain of TCR clone 300702 (TRAV13-2, TRAJ17)
CAENSKAAGNKLTF

SEQ ID NO: 601404 - protein, 17 aa, Homo sapiens
  CDR3 for beta chain variable domain of TCR clone 300702 (TRBV11-2, TRBJ2-4)
CASSSVGPGGHRNIQYF

SEQ ID NO: 601405 - protein, 14 aa, Homo sapiens
  CDR3 for alpha chain variable domain of TCR clone 300703 (TRAV21, TRAJ35)
RAVMPIGFGNVLHC

SEQ ID NO: 601406 - protein, 12 aa, Homo sapiens
  CDR3 for beta chain variable domain of TCR clone 300703 (TRBV7-9, TRBJ2-7)
YASSIKREEQYF

SEQ ID NO: 601407 - protein, 11 aa, Homo sapiens
  CDR3 for alpha chain variable domain of TCR clone 300704 (TRAV13-2, TRAJ23)
CRASQGRKLIF

SEQ ID NO: 601408 - protein, 15 aa, Homo sapiens
  CDR3 for beta chain variable domain of TCR clone 300704 (TRBV9, TRBJ1-6)
CASSVAGTGDSPLHF

SEQ ID NO: 601409 - protein, 16 aa, Homo sapiens
  CDR3 for alpha chain variable domain of TCR clone 300705 (TRAV3, TRAJ37)
CAVRPHSSGNTGKLIF

SEQ ID NO: 601410 - protein, 17 aa, Homo sapiens
  CDR3 for beta chain variable domain of TCR clone 300705 (TRBV20-1, TRBJ2-1)
CSASSSGLAGSYNEQFF

SEQ ID NO: 601411 - protein, 11 aa, Homo sapiens
  CDR3 for alpha chain variable domain of TCR clone 300706 (TRAV4, TRAJ31)
CLVGDNARRIF

SEQ ID NO: 601412 - protein, 16 aa, Homo sapiens
  CDR3 for beta chain variable domain of TCR clone 300706 (TRBV7-2, TRBJ2-5)
CASSSKWLSGQEAQYF

SEQ ID NO: 601413 - protein, 12 aa, Homo sapiens
  CDR3 for alpha chain variable domain of TCR clone 300707 (TRAV16, TRAJ21)
CALLGNFNKFYF

SEQ ID NO: 601414 - protein, 17 aa, Homo sapiens
  CDR3 for beta chain variable domain of TCR clone 300707 (TRBV7-9, TRBJ2-3)
CASSLGGDKYYTDTQYF

SEQ ID NO: 601415 - protein, 14 aa, Homo sapiens
  CDR3 for alpha chain variable domain of TCR clone 300708 (TRAV8-4, TRAJ9)
CAVRINTGGFKTIF

SEQ ID NO: 601416 - protein, 15 aa, Homo sapiens
  CDR3 for beta chain variable domain of TCR clone 300708 (TRBV10-2, TRBJ2-6)
CASSGQETGANVLTF

SEQ ID NO: 601417 - protein, 13 aa, Homo sapiens
  CDR3 for alpha chain variable domain of TCR clone 300709 (TRAV26-1, TRAJ33)
CIVRDDSNYQLIW

SEQ ID NO: 601418 - protein, 15 aa, Homo sapiens
  CDR3 for beta chain variable domain of TCR clone 300709 (TRBV7-2, TRBJ1-5)
CASSFSAGINQPQHF

SEQ ID NO: 601419 - protein, 16 aa, Homo sapiens
  CDR3 for alpha chain variable domain of TCR clone 300710 (TRAV4, TRAJ8)
CLVGDSGNTGFQKLVF

SEQ ID NO: 601420 - protein, 15 aa, Homo sapiens
  CDR3 for beta chain variable domain of TCR clone 300710 (TRBV15, TRBJ1-2)
CATSRVWASGSGYTF

SEQ ID NO: 601421 - protein, 13 aa, Homo sapiens
  CDR3 for alpha chain variable domain of TCR clone 300711 (TRAV8-4, TRAJ49)
CAVRTLTGNQFYF

SEQ ID NO: 601422 - protein, 16 aa, Homo sapiens
  CDR3 for beta chain variable domain of TCR clone 300711 (TRBV5-7, TRBJ2-5)
CASTLAPAGGRETQYV

SEQ ID NO: 601423 - protein, 13 aa, Homo sapiens
  CDR3 for alpha chain variable domain of TCR clone 300712 (TRAV8-3, TRAJ30)
CCVDMNRDDKIIF

SEQ ID NO: 601424 - protein, 17 aa, Homo sapiens
  CDR3 for beta chain variable domain of TCR clone 300712 (TRBV19, TRBJ2-2)
CASSRNPGGFGTGELFF

SEQ ID NO: 601425 - protein, 14 aa, Homo sapiens
  CDR3 for alpha chain variable domain of TCR clone 300713 (TRAV13-1, TRAJ48)
CAASRSFGNEKLTF

SEQ ID NO: 601426 - protein, 15 aa, Homo sapiens
  CDR3 for beta chain variable domain of TCR clone 300713 (TRBV7-2, TRBJ2-3)
CASSLAGAFIDTQYF

SEQ ID NO: 601427 - protein, 13 aa, Homo sapiens
  CDR3 for alpha chain variable domain of TCR clone 300714 (TRAV3, TRAJ21)
CAVREPNFNKFYF

SEQ ID NO: 601428 - protein, 16 aa, Homo sapiens
  CDR3 for beta chain variable domain of TCR clone 300714 (TRBV7-8, TRBJ2-1)
CASSLVGGGPYNEQFF

SEQ ID NO: 601429 - protein, 15 aa, Homo sapiens
  CDR3 for alpha chain variable domain of TCR clone 300715 (TRAV3, TRAJ12)
CTSVPWMDSSYKLIF

SEQ ID NO: 601430 - protein, 14 aa, Homo sapiens
  CDR3 for beta chain variable domain of TCR clone 300715 (TRBV19, TRBJ2-1)
CASPTFVLSGEQFF

SEQ ID NO: 601431 - protein, 14 aa, Homo sapiens
  CDR3 for alpha chain variable domain of TCR clone 300716 (TRAV17, TRAJ34)
CATDSLEGTDKLIF

SEQ ID NO: 601432 - protein, 12 aa, Homo sapiens
  CDR3 for beta chain variable domain of TCR clone 300716 (TRBV19, TRBJ2-1)
CASSRQGAEQFF

SEQ ID NO: 601433 - protein, 12 aa, Homo sapiens
  CDR3 for alpha chain variable domain of TCR clone 300717 (TRAV12-3, TRAJ17)
CAMTLTGNKLTF

SEQ ID NO: 601434 - protein, 16 aa, Homo sapiens
  CDR3 for beta chain variable domain of TCR clone 300717 (TRBV20-1, TRBJ1-4)
CSAPGQGLLTNEKPFF

SEQ ID NO: 601435 - protein, 11 aa, Homo sapiens
  CDR3 for alpha chain variable domain of TCR clone 300718 (TRAV13-2, TRAJ20)
CADSNDFKLSF

SEQ ID NO: 601436 - protein, 14 aa, Homo sapiens
  CDR3 for beta chain variable domain of TCR clone 300718 (TRBV11-2, TRBJ1-5)
CASSLDRGRQPQHF

SEQ ID NO: 601437 - protein, 12 aa, Homo sapiens
  CDR3 for alpha chain variable domain of TCR clone 300719 (TRAV38-1, TRAJ20)
CAFICNDYKPSF

SEQ ID NO: 601438 - protein, 14 aa, Homo sapiens
  CDR3 for beta chain variable domain of TCR clone 300719 (TRBV27, TRBJ1-1)
CASSPQGKRAEAFF

SEQ ID NO: 601439 - protein, 14 aa, Homo sapiens
  CDR3 for alpha chain variable domain of TCR clone 300720 (TRAV17, TRAJ57)
CATDPQGGSEKLFF

SEQ ID NO: 601440 - protein, 17 aa, Homo sapiens
  CDR3 for beta chain variable domain of TCR clone 300720 (TRBV5-1, TRBJ2-2)
CASSLAGLSGGTGELFF

SEQ ID NO: 601441 - protein, 16 aa, Homo sapiens
  CDR3 for alpha chain variable domain of TCR clone 300721 (TRAV4, TRAJ5)
CLVGPDHGHGQESTYF

SEQ ID NO: 601442 - protein, 13 aa, Homo sapiens
  CDR3 for beta chain variable domain of TCR clone 300721 (TRBV4-2, TRBJ1-2)
CASSLSASGGYSF

SEQ ID NO: 601443 - protein, 15 aa, Homo sapiens
  CDR3 for alpha chain variable domain of TCR clone 300722 (TRAV25, TRAJ52)
CSGRPGGTSYGKLTF

SEQ ID NO: 601444 - protein, 17 aa, Homo sapiens
  CDR3 for beta chain variable domain of TCR clone 300722 (TRBV7-8, TRBJ2-6)
CASSAGTGGAGANDLTF

SEQ ID NO: 601445 - protein, 13 aa, Homo sapiens
  CDR3 for alpha chain variable domain of TCR clone 300723 (TRAV8-1, TRAJ30)
CAVIMNRDDKIIF

SEQ ID NO: 601446 - protein, 14 aa, Homo sapiens
  CDR3 for beta chain variable domain of TCR clone 300723 (TRBV7-2, TRBJ1-6)
CASSLPGANSPLHF

SEQ ID NO: 601447 - protein, 14 aa, Homo sapiens
  CDR3 for alpha chain variable domain of TCR clone 300724 (TRAV8-3, TRAJ22)
CAVKPPGSAKQLTF

SEQ ID NO: 601448 - protein, 14 aa, Homo sapiens
  CDR3 for beta chain variable domain of TCR clone 300724 (TRBV12-4, TRBJ2-2)
CASSLSQDNGELFF

SEQ ID NO: 601449 - protein, 12 aa, Homo sapiens
  CDR3 for alpha chain variable domain of TCR clone 300725 (TRAV13-1, TRAJ21)
CAAKEGFNKFYF

SEQ ID NO: 601450 - protein, 18 aa, Homo sapiens
  CDR3 for beta chain variable domain of TCR clone 300725 (TRBV20-1, TRBJ2-6)
CSAETTPTHGSGANGLSF

SEQ ID NO: 601451 - protein, 18 aa, Homo sapiens
  CDR3 for alpha chain variable domain of TCR clone 300726 (TRAV29/DV5, TRAJ52)
CAAGFRGAGGTSYEKLTF

SEQ ID NO: 601452 - protein, 16 aa, Homo sapiens
  CDR3 for beta chain variable domain of TCR clone 300726 (TRBV7-3, TRBJ2-2)
CASSLKRGTLSGELFF

SEQ ID NO: 601453 - protein, 12 aa, Homo sapiens
  CDR3 for alpha chain variable domain of TCR clone 300727 (TRAV12-3, TRAJ29)
CAAAKGNTPLVF

SEQ ID NO: 601454 - protein, 18 aa, Homo sapiens
  CDR3 for beta chain variable domain of TCR clone 300727 (TRBV20-1, TRBJ2-6)
CSAETTPTHGSGANVLTF

SEQ ID NO: 601455 - protein, 13 aa, Homo sapiens
  CDR3 for alpha chain variable domain of TCR clone 300728 (TRAV12-1, TRAJ33)
CGDAPDSNYQLIW

SEQ ID NO: 601456 - protein, 12 aa, Homo sapiens
  CDR3 for beta chain variable domain of TCR clone 300728 (TRBV19, TRBJ2-1)
CASSMQDTEQFF

SEQ ID NO: 601457 - protein, 12 aa, Homo sapiens
  CDR3 for alpha chain variable domain of TCR clone 300729 (TRAV8-3, TRAJ43)
CAVGAGHNYMRF

SEQ ID NO: 601458 - protein, 14 aa, Homo sapiens
  CDR3 for beta chain variable domain of TCR clone 300729 (TRBV4-2, TRBJ1-5)
CASSRDRGNQPQHF

SEQ ID NO: 601459 - protein, 12 aa, Homo sapiens
  CDR3 for alpha chain variable domain of TCR clone 300730 (TRAV12-3, TRAJ17)
CAMTLTGNKLTF

SEQ ID NO: 601460 - protein, 13 aa, Homo sapiens
  CDR3 for beta chain variable domain of TCR clone 300730 (TRBV27, TRBJ2-1)
CASRTLGIGEQFF

SEQ ID NO: 601461 - protein, 12 aa, Homo sapiens
  CDR3 for alpha chain variable domain of TCR clone 300731 (TRAV25, TRAJ53)
WQSGGSNYKLTF

SEQ ID NO: 601462 - protein, 15 aa, Homo sapiens
  CDR3 for beta chain variable domain of TCR clone 300731 (TRBV5-1, TRBJ2-2)
CASSWTSPNTGELFF

SEQ ID NO: 601463 - protein, 12 aa, Homo sapiens
  CDR3 for alpha chain variable domain of TCR clone 300732 (TRAV16, TRAJ10)
CSRTGGGNTLTF

SEQ ID NO: 601464 - protein, 16 aa, Homo sapiens
  CDR3 for beta chain variable domain of TCR clone 300732 (TRBV12-5, TRBJ2-5)
CASGPRTSGNQETQYF

SEQ ID NO: 601465 - protein, 14 aa, Homo sapiens
  CDR3 for alpha chain variable domain of TCR clone 300733 (TRAV12-3, TRAJ54)
CATRIIQGAQKLVF

SEQ ID NO: 601466 - protein, 16 aa, Homo sapiens
  CDR3 for beta chain variable domain of TCR clone 300733 (TRBV28, TRBJ2-1)
CASRVPASGRIGEQFF

SEQ ID NO: 601467 - protein, 14 aa, Homo sapiens
  CDR3 for alpha chain variable domain of TCR clone 300734 (TRAV12-3, TRAJ10)
SHLPLKGGGNKLTF

SEQ ID NO: 601468 - protein, 12 aa, Homo sapiens
  CDR3 for beta chain variable domain of TCR clone 300734 (TRBV11-3, TRBJ1-1)
CASSHRQGEAFF

SEQ ID NO: 601469 - protein, 16 aa, Homo sapiens
  CDR3 for alpha chain variable domain of TCR clone 300735 (TRAV3, TRAJ37)
CAVRGKGSGNTGKLIF

SEQ ID NO: 601470 - protein, 16 aa, Homo sapiens
  CDR3 for beta chain variable domain of TCR clone 300735 (TRBV28, TRBJ1-5)
CASSFRGGYSNQPQHC

SEQ ID NO: 601471 - protein, 14 aa, Homo sapiens
  CDR3 for alpha chain variable domain of TCR clone 300736 (TRAV13-1, TRAJ26)
CAASSAHYGQNFVF

SEQ ID NO: 601472 - protein, 17 aa, Homo sapiens
  CDR3 for beta chain variable domain of TCR clone 300736 (TRBV11-2, TRBJ2-3)
CASSPTGTGGLTDTQYF

SEQ ID NO: 601473 - protein, 13 aa, Homo sapiens
  CDR3 for alpha chain variable domain of TCR clone 300737 (TRAV12-1, TRAJ7)
CVVNMRGNNRLAY

SEQ ID NO: 601474 - protein, 15 aa, Homo sapiens
  CDR3 for beta chain variable domain of TCR clone 300737 (TRBV27, TRBJ2-3)
CASSLGLAATDTQYF

SEQ ID NO: 601475 - protein, 15 aa, Homo sapiens
  CDR3 for alpha chain variable domain of TCR clone 300738 (TRAV14/DV4, TRAJ33)
CAMREGRDSNYRLIW

SEQ ID NO: 601476 - protein, 15 aa, Homo sapiens
  CDR3 for beta chain variable domain of TCR clone 300738 (TRBV5-5, TRBJ1-5)
CDSSSTPGSNQPQHF

SEQ ID NO: 601477 - protein, 15 aa, Homo sapiens
  CDR3 for alpha chain variable domain of TCR clone 300739 (TRAV17, TRAJ23)
CATDAEDNQGWKLIF

SEQ ID NO: 601478 - protein, 12 aa, Homo sapiens
  CDR3 for beta chain variable domain of TCR clone 300739 (TRBV2, TRBJ2-1)
CAKREGYNEQFF

SEQ ID NO: 601479 - protein, 13 aa, Homo sapiens
  CDR3 for alpha chain variable domain of TCR clone 300740 (TRAV13-1, TRAJ21)
CAASIYNFNKFYF

SEQ ID NO: 601480 - protein, 16 aa, Homo sapiens
  CDR3 for beta chain variable domain of TCR clone 300740 (TRBV20-1, TRBJ1-4)
CSAPGQGLLTNVKLFF

SEQ ID NO: 601481 - protein, 15 aa, Homo sapiens
  CDR3 for alpha chain variable domain of TCR clone 300741 (TRAV8-3, TRAJ23)
CAVGDRYNQGGKLIF

SEQ ID NO: 601482 - protein, 17 aa, Homo sapiens
  CDR3 for beta chain variable domain of TCR clone 300741 (TRBV4-1, TRBJ1-4)
CASSQEGPRGVEEKLSF

SEQ ID NO: 601483 - protein, 12 aa, Homo sapiens
  CDR3 for alpha chain variable domain of TCR clone 300742 (TRAV27, TRAJ33)
CAGDGSNYQLIW

SEQ ID NO: 601484 - protein, 15 aa, Homo sapiens
  CDR3 for beta chain variable domain of TCR clone 300742 (TRBV6-1, TRBJ2-3)
CASSERGGITDTQYF

SEQ ID NO: 601485 - protein, 17 aa, Homo sapiens
  CDR3 for alpha chain variable domain of TCR clone 300743 (TRAV3, TRAJ6)
CAVRDGPRAGGSYIPTF

SEQ ID NO: 601486 - protein, 19 aa, Homo sapiens
  CDR3 for beta chain variable domain of TCR clone 300743 (TRBV4-1, TRBJ2-7)
CASSRDPLGSVGGSSTSGR

SEQ ID NO: 601487 - protein, 10 aa, Homo sapiens
  CDR3 for alpha chain variable domain of TCR clone 300744 (TRAV26-1, TRAJ22)
CIVSLNFFWF

SEQ ID NO: 601488 - protein, 15 aa, Homo sapiens
  CDR3 for beta chain variable domain of TCR clone 300744 (TRBV24-1, TRBJ2-4)
CATSDPRDRANIQYF

SEQ ID NO: 601489 - protein, 14 aa, Homo sapiens
  CDR3 for alpha chain variable domain of TCR clone 300745 (TRAV8-6, TRAJ17)
CAVRKKAAGNKLTF

SEQ ID NO: 601490 - protein, 16 aa, Homo sapiens
  CDR3 for beta chain variable domain of TCR clone 300745 (TRBV6-1, TRBJ2-5)
CASSETLDRGAETQYF

SEQ ID NO: 601491 - protein, 16 aa, Homo sapiens
  CDR3 for alpha chain variable domain of TCR clone 300746 (TRAV3, TRAJ22)
CAVRDMGSGSARQLTF

SEQ ID NO: 601492 - protein, 15 aa, Homo sapiens
  CDR3 for beta chain variable domain of TCR clone 300746 (TRBV7-9, TRBJ1-5)
CASSQGHQPNQPQHF

SEQ ID NO: 601493 - protein, 14 aa, Homo sapiens
  CDR3 for alpha chain variable domain of TCR clone 300747 (TRAV4, TRAJ43)
CLVGPMYNNNDMRC

SEQ ID NO: 601494 - protein, 21 aa, Homo sapiens
  CDR3 for beta chain variable domain of TCR clone 300747 (TRBV11-1, TRBJ2-1)
CASSARERLRPEGPSYNEQFF

SEQ ID NO: 601495 - protein, 15 aa, Homo sapiens
  CDR3 for alpha chain variable domain of TCR clone 300748 (TRAV23/DV6, TRAJ44)
CAASGGTCTASKLTF

SEQ ID NO: 601496 - protein, 16 aa, Homo sapiens
  CDR3 for beta chain variable domain of TCR clone 300748 (TRBV20-1, TRBJ2-3)
CSALAFDTGDPDTQYF

SEQ ID NO: 601497 - protein, 16 aa, Homo sapiens
  CDR3 for alpha chain variable domain of TCR clone 300749 (TRAV30, TRAJ24)
CGTEIVDADSWGKFQF

SEQ ID NO: 601498 - protein, 14 aa, Homo sapiens
  CDR3 for beta chain variable domain of TCR clone 300749 (TRBV18, TRBJ2-3)
CDSSPRTSTDTQYF

SEQ ID NO: 601499 - protein, 14 aa, Homo sapiens
  CDR3 for alpha chain variable domain of TCR clone 300750 (TRAV17, TRAJ57)
CATDPQGGSEKLVF

SEQ ID NO: 601500 - protein, 16 aa, Homo sapiens
  CDR3 for beta chain variable domain of TCR clone 300750 (TRBV4-2, TRBJ2-3)
CASSQELAGDTDTQYF

SEQ ID NO: 601501 - protein, 16 aa, Homo sapiens
  CDR3 for alpha chain variable domain of TCR clone 300751 (TRAV29/DV5, TRAJ39)
CAASLLFNNAGNMITF

SEQ ID NO: 601502 - protein, 16 aa, Homo sapiens
  CDR3 for beta chain variable domain of TCR clone 300751 (TRBV19, TRBJ2-6)
CASSMSGLSGANVLTF

SEQ ID NO: 601503 - protein, 10 aa, Homo sapiens
  CDR3 for alpha chain variable domain of TCR clone 300752 (TRAV13-1, TRAJ30)
CAASDDKIIF

SEQ ID NO: 601504 - protein, 15 aa, Homo sapiens
  CDR3 for beta chain variable domain of TCR clone 300752 (TRBV7-9, TRBJ1-2)
CASSLDREPNYGYTF

SEQ ID NO: 601505 - protein, 14 aa, Homo sapiens
  CDR3 for alpha chain variable domain of TCR clone 300753 (TRAV3, TRAJ6)
CAVRDWGGGHIPTF

SEQ ID NO: 601506 - protein, 17 aa, Homo sapiens
  CDR3 for beta chain variable domain of TCR clone 300753 (TRBV6-5, TRBJ2-1)
CASRLSGRFESYNEQFF

SEQ ID NO: 601507 - protein, 16 aa, Homo sapiens
  CDR3 for alpha chain variable domain of TCR clone 300754 (TRAV30, TRAJ24)
CGTEIVDADSWGKFSL

SEQ ID NO: 601508 - protein, 14 aa, Homo sapiens
  CDR3 for beta chain variable domain of TCR clone 300754 (TRBV7-2, TRBJ1-2)
CASSQTGSTYGYTF

SEQ ID NO: 601509 - protein, 17 aa, Homo sapiens
  CDR3 for alpha chain variable domain of TCR clone 300755 (TRAV3, TRAJ6)
CAVRDGPRAGGSYIPTF

SEQ ID NO: 601510 - protein, 13 aa, Homo sapiens
  CDR3 for beta chain variable domain of TCR clone 300755 (TRBV7-9, TRBJ1-2)
CASSLKQNYGYAF

SEQ ID NO: 601511 - protein, 17 aa, Homo sapiens
  CDR3 for alpha chain variable domain of TCR clone 300756 (TRAV26-1, TRAJ37)
CIVRVITVSRNTGKLIF

SEQ ID NO: 601512 - protein, 15 aa, Homo sapiens
  CDR3 for beta chain variable domain of TCR clone 300756 (TRBV19, TRBJ2-1)
CASSMGWNSNNEQFF

SEQ ID NO: 601513 - protein, 18 aa, Homo sapiens
  CDR3 for alpha chain variable domain of TCR clone 300757 (TRAV26-1, TRAJ30)
CCVLLHRQSTNRDDRIIF

SEQ ID NO: 601514 - protein, 18 aa, Homo sapiens
  CDR3 for beta chain variable domain of TCR clone 300757 (TRBV4-1, TRBJ1-5)
CASSQDPRGQGLNQPQHF

SEQ ID NO: 601515 - protein, 15 aa, Homo sapiens
  CDR3 for alpha chain variable domain of TCR clone 300758 (TRAV3, TRAJ29)
CAVRDSISGNTPLVF

SEQ ID NO: 601516 - protein, 14 aa, Homo sapiens
  CDR3 for beta chain variable domain of TCR clone 300758 (TRBV7-3, TRBJ1-1)
CASSLKGGNTEAFF

SEQ ID NO: 601517 - protein, 15 aa, Homo sapiens
  CDR3 for alpha chain variable domain of TCR clone 300759 (TRAV4, TRAJ42)
CPVGGYGGSQGNLIF

SEQ ID NO: 601518 - protein, 16 aa, Homo sapiens
  CDR3 for beta chain variable domain of TCR clone 300759 (TRBV27, TRBJ1-1)
CASSTRTGGVGTEAFF

SEQ ID NO: 601519 - protein, 12 aa, Homo sapiens
  CDR3 for alpha chain variable domain of TCR clone 300760 (TRAV12-2, TRAJ45)
CAVTGGADGLTF

SEQ ID NO: 601520 - protein, 14 aa, Homo sapiens
  CDR3 for beta chain variable domain of TCR clone 300760 (TRBV5-5, TRBJ2-7)
CASSLGQGTYEQFF

SEQ ID NO: 601521 - protein, 15 aa, Homo sapiens
  CDR3 for alpha chain variable domain of TCR clone 300761 (TRAV17, TRAJ57)
CATGPSQGGSKKLVV

SEQ ID NO: 601522 - protein, 16 aa, Homo sapiens
  CDR3 for beta chain variable domain of TCR clone 300761 (TRBV12-4, TRBJ1-5)
CASSRPVGGSNQPQHF

SEQ ID NO: 601523 - protein, 11 aa, Homo sapiens
  CDR3 for alpha chain variable domain of TCR clone 300762 (TRAV12-3, TRAJ27)
CAMANAGKSTF

SEQ ID NO: 601524 - protein, 15 aa, Homo sapiens
  CDR3 for beta chain variable domain of TCR clone 300762 (TRBV19, TRBJ1-2)
CASNLGGETPYGYTF

SEQ ID NO: 601525 - protein, 13 aa, Homo sapiens
  CDR3 for alpha chain variable domain of TCR clone 300763 (TRAV21, TRAJ27)
CAAHPGNAGKSTF

SEQ ID NO: 601526 - protein, 15 aa, Homo sapiens
  CDR3 for beta chain variable domain of TCR clone 300763 (TRBV5-1, TRBJ2-3)
CASSVTSGSTDTQYF

SEQ ID NO: 601527 - protein, 12 aa, Homo sapiens
  CDR3 for alpha chain variable domain of TCR clone 300764 (TRAV12-3, TRAJ42)
CAPGGSQGNLIF

SEQ ID NO: 601528 - protein, 14 aa, Homo sapiens
  CDR3 for beta chain variable domain of TCR clone 300764 (TRBV7-2, TRBJ2-7)
CASRSQGAAYEQYF

SEQ ID NO: 601529 - protein, 15 aa, Homo sapiens
  CDR3 for alpha chain variable domain of TCR clone 300765 (TRAV21, TRAJ24)
CAARSSSDSWGKLQF

SEQ ID NO: 601530 - protein, 13 aa, Homo sapiens
  CDR3 for beta chain variable domain of TCR clone 300765 (TRBV11-2, TRBJ2-5)
CASSSTGEETQYF

SEQ ID NO: 601531 - protein, 12 aa, Homo sapiens
  CDR3 for alpha chain variable domain of TCR clone 300766 (TRAV1-2, TRAJ42)
CVAGGSQGNLIF

SEQ ID NO: 601532 - protein, 14 aa, Homo sapiens
  CDR3 for beta chain variable domain of TCR clone 300766 (TRBV7-7, TRBJ2-2)
CATRQDSDTGELFF

SEQ ID NO: 601533 - protein, 13 aa, Homo sapiens
  CDR3 for alpha chain variable domain of TCR clone 300767 (TRAV21, TRAJ56)
CAVRLGAISKLTF

SEQ ID NO: 601534 - protein, 12 aa, Homo sapiens
  CDR3 for beta chain variable domain of TCR clone 300767 (TRBV12-4, TRBJ2-3)
CASSSTTDTQYF

SEQ ID NO: 601535 - protein, 16 aa, Homo sapiens
  CDR3 for alpha chain variable domain of TCR clone 300768 (TRAV4, TRAJ9)
CLVGDPNRPGGFKTIF

SEQ ID NO: 601536 - protein, 13 aa, Homo sapiens
  CDR3 for beta chain variable domain of TCR clone 300768 (TRBV20-1, TRBJ1-1)
QCKTRIGGTEAFF

SEQ ID NO: 601537 - protein, 12 aa, Homo sapiens
  CDR3 for alpha chain variable domain of TCR clone 300769 (TRAV2, TRAJ9)
CAVGAGGFKTIF

SEQ ID NO: 601538 - protein, 16 aa, Homo sapiens
  CDR3 for beta chain variable domain of TCR clone 300769 (TRBV7-2, TRBJ2-5)
CASSPRGRGGGETQYF

SEQ ID NO: 601539 - protein, 18 aa, Homo sapiens
  CDR3 for alpha chain variable domain of TCR clone 300770 (TRAV13-1, TRAJ52)
CAAKNPNAGGTSYGKLTF

SEQ ID NO: 601540 - protein, 14 aa, Homo sapiens
  CDR3 for beta chain variable domain of TCR clone 300770 (TRBV7-2, TRBJ2-7)
CASRSQGEAYEQYF

SEQ ID NO: 601541 - protein, 19 aa, Homo sapiens
  CDR3 for alpha chain variable domain of TCR clone 300771 (TRAV2, )
CAVEEDIQDPDPAVYQLRD

SEQ ID NO: 601542 - protein, 14 aa, Homo sapiens
  CDR3 for beta chain variable domain of TCR clone 300771 (TRBV19, TRBJ1-2)
CASNPGQAPYGYTF

SEQ ID NO: 601543 - protein, 14 aa, Homo sapiens
  CDR3 for alpha chain variable domain of TCR clone 300772 (TRAV12-2, TRAJ5)
CAVNRSTGRRALTF

SEQ ID NO: 601544 - protein, 15 aa, Homo sapiens
  CDR3 for beta chain variable domain of TCR clone 300772 (TRBV6-3, TRBJ2-2)
CASSFLATLTGELFF

SEQ ID NO: 601545 - protein, 12 aa, Homo sapiens
  CDR3 for alpha chain variable domain of TCR clone 300773 (TRAV12-3, TRAJ21)
CATFNNFNKFYF

SEQ ID NO: 601546 - protein, 16 aa, Homo sapiens
  CDR3 for beta chain variable domain of TCR clone 300773 (TRBV7-9, TRBJ1-2)
CASSLAPLRAAYGYTF

SEQ ID NO: 601547 - protein, 15 aa, Homo sapiens
  CDR3 for alpha chain variable domain of TCR clone 300774 (TRAV13-1, TRAJ5)
FAASKADTGRRALTF

SEQ ID NO: 601548 - protein, 15 aa, Homo sapiens
  CDR3 for beta chain variable domain of TCR clone 300774 (TRBV19, TRBJ2-1)
CASSMGWNSNNEKFF

SEQ ID NO: 601549 - protein, 15 aa, Homo sapiens
  CDR3 for alpha chain variable domain of TCR clone 300775 (TRAV38-1, TRAJ37)
CAFIHGSGNTAKLIF

SEQ ID NO: 601550 - protein, 12 aa, Homo sapiens
  CDR3 for beta chain variable domain of TCR clone 300775 (TRBV7-9, TRBJ2-7)
CASSFGSYEQYF

SEQ ID NO: 601551 - protein, 14 aa, Homo sapiens
  CDR3 for alpha chain variable domain of TCR clone 300776 (TRAV1-2, TRAJ16)
CAANRFSDGQKLLF

SEQ ID NO: 601552 - protein, 13 aa, Homo sapiens
  CDR3 for beta chain variable domain of TCR clone 300776 (TRBV4-1, TRBJ2-1)
CASSQAGGDEQFF

SEQ ID NO: 601553 - protein, 15 aa, Homo sapiens
  CDR3 for alpha chain variable domain of TCR clone 300777 (TRAV8-4, TRAJ13)
CAVSDRGGGYQKVTF

SEQ ID NO: 601554 - protein, 16 aa, Homo sapiens
  CDR3 for beta chain variable domain of TCR clone 300777 (TRBV6-4, TRBJ1-2)
CASSEAVGDPKYGYTF

SEQ ID NO: 601555 - protein, 14 aa, Homo sapiens
  CDR3 for alpha chain variable domain of TCR clone 300778 (TRAV12-3, TRAJ43)
CAMSLGEAGTRLTV

SEQ ID NO: 601556 - protein, 13 aa, Homo sapiens
  CDR3 for beta chain variable domain of TCR clone 300778 (TRBV7-9, TRBJ1-2)
CASSLKQNYGYTF

SEQ ID NO: 601557 - protein, 14 aa, Homo sapiens
  CDR3 for alpha chain variable domain of TCR clone 300779 (TRAV3, TRAJ6)
CAVRDWGGSYIPSF

SEQ ID NO: 601558 - protein, 17 aa, Homo sapiens
  CDR3 for beta chain variable domain of TCR clone 300779 (TRBV6-5, TRBJ2-1)
CASRLSRRFESYNEQFF

SEQ ID NO: 601559 - protein, 17 aa, Homo sapiens
  CDR3 for alpha chain variable domain of TCR clone 300780 (TRAV13-1, TRAJ28)
CAASPPYSGAGSYQLTF

SEQ ID NO: 601560 - protein, 16 aa, Homo sapiens
  CDR3 for beta chain variable domain of TCR clone 300780 (TRBV7-2, TRBJ2-5)
CASSPFPTGGEETQYF

SEQ ID NO: 601561 - protein, 13 aa, Homo sapiens
  CDR3 for alpha chain variable domain of TCR clone 300781 (TRAV13-1, TRAJ6)
CAASRGGSYIPTF

SEQ ID NO: 601562 - protein, 14 aa, Homo sapiens
  CDR3 for beta chain variable domain of TCR clone 300781 (TRBV4-2, TRBJ2-1)
CASGLDRAYNEQFF

SEQ ID NO: 601563 - protein, 23 aa, Homo sapiens
  CDR3 for alpha chain variable domain of TCR clone 300782 (TRAV26-1, TRAJ38)
CITDNAGNNHIQIPDPAVYQLRD

SEQ ID NO: 601564 - protein, 13 aa, Homo sapiens
  CDR3 for beta chain variable domain of TCR clone 300782 (TRBV20-1, TRBJ1-1)
CSARGGGNTEAFF

SEQ ID NO: 601565 - protein, 12 aa, Homo sapiens
  CDR3 for alpha chain variable domain of TCR clone 300783 (TRAV2, TRAJ31)
CAVEEGNARPMF

SEQ ID NO: 601566 - protein, 18 aa, Homo sapiens
  CDR3 for beta chain variable domain of TCR clone 300783 (TRBV7-9, TRBJ2-3)
CASSLDLAGLATPDTQYF

SEQ ID NO: 601567 - protein, 11 aa, Homo sapiens
  CDR3 for alpha chain variable domain of TCR clone 300784 (TRAV23/DV6, TRAJ58)
CAARLLRGETS

SEQ ID NO: 601568 - protein, 14 aa, Homo sapiens
  CDR3 for beta chain variable domain of TCR clone 300784 (TRBV7-9, TRBJ2-2)
CASSLGHRTGELFF

SEQ ID NO: 601569 - protein, 14 aa, Homo sapiens
  CDR3 for alpha chain variable domain of TCR clone 300785 (TRAV12-2, TRAJ45)
CALPERGGADGLTF

SEQ ID NO: 601570 - protein, 14 aa, Homo sapiens
  CDR3 for beta chain variable domain of TCR clone 300785 (TRBV18, TRBJ1-5)
CANSPGNSNQPQHF

SEQ ID NO: 601571 - protein, 14 aa, Homo sapiens
  CDR3 for alpha chain variable domain of TCR clone 300786 (TRAV27, TRAJ13)
CSSSNSGGYQKVTF

SEQ ID NO: 601572 - protein, 14 aa, Homo sapiens
  CDR3 for beta chain variable domain of TCR clone 300786 (TRBV7-6, TRBJ2-1)
CASSLGGGADEQFF

SEQ ID NO: 601573 - protein, 14 aa, Homo sapiens
  CDR3 for alpha chain variable domain of TCR clone 300787 (TRAV13-1, TRAJ35)
CAASKGGFENVLHC

SEQ ID NO: 601574 - protein, 14 aa, Homo sapiens
  CDR3 for beta chain variable domain of TCR clone 300787 (TRBV7-2, TRBJ2-7)
CASSPKTSFYEQYF

SEQ ID NO: 601575 - protein, 14 aa, Homo sapiens
  CDR3 for alpha chain variable domain of TCR clone 300788 (TRAV12-3, TRAJ10)
SHVPLTGGGNKLTF

SEQ ID NO: 601576 - protein, 12 aa, Homo sapiens
  CDR3 for beta chain variable domain of TCR clone 300788 (TRBV7-9, TRBJ2-7)
CATRTDAYEQYF

SEQ ID NO: 601577 - protein, 18 aa, Homo sapiens
  CDR3 for alpha chain variable domain of TCR clone 300789 (TRAV21, TRAJ52)
CAVRPSPAGGTIYGKLTF

SEQ ID NO: 601578 - protein, 15 aa, Homo sapiens
  CDR3 for beta chain variable domain of TCR clone 300789 (TRBV20-1, TRBJ2-7)
CSARDRVSGMDEQYF

SEQ ID NO: 601579 - protein, 12 aa, Homo sapiens
  CDR3 for alpha chain variable domain of TCR clone 300790 (TRAV12-3, TRAJ48)
CAMRIGNEELTF

SEQ ID NO: 601580 - protein, 12 aa, Homo sapiens
  CDR3 for beta chain variable domain of TCR clone 300790 (TRBV13, TRBJ2-7)
CASSLQAYEQYF

SEQ ID NO: 601581 - protein, 14 aa, Homo sapiens
  CDR3 for alpha chain variable domain of TCR clone 300791 (TRAV9-2, TRAJ39)
CALYIYNAGNMLTF

SEQ ID NO: 601582 - protein, 15 aa, Homo sapiens
  CDR3 for beta chain variable domain of TCR clone 300791 (TRBV5-1, TRBJ2-6)
CASSLDPSGANVLTF

SEQ ID NO: 601583 - protein, 14 aa, Homo sapiens
  CDR3 for alpha chain variable domain of TCR clone 300792 (TRAV2, TRAJ37)
CAVDFTSNTGKLIF

SEQ ID NO: 601584 - protein, 15 aa, Homo sapiens
  CDR3 for beta chain variable domain of TCR clone 300792 (TRBV11-3, TRBJ2-3)
CASLKDGREGDTQYC

SEQ ID NO: 601585 - protein, 12 aa, Homo sapiens
  CDR3 for alpha chain variable domain of TCR clone 300793 (TRAV12-1, TRAJ40)
FVVPSGTYKYIF

SEQ ID NO: 601586 - protein, 15 aa, Homo sapiens
  CDR3 for beta chain variable domain of TCR clone 300793 (TRBV12-4, TRBJ2-1)
CASSPLSGRNNEQFF

SEQ ID NO: 601587 - protein, 15 aa, Homo sapiens
  CDR3 for alpha chain variable domain of TCR clone 300794 (TRAV16, TRAJ20)
CALKGGLRADYKLSF

SEQ ID NO: 601588 - protein, 16 aa, Homo sapiens
  CDR3 for beta chain variable domain of TCR clone 300794 (TRBV11-3, TRBJ2-2)
CASSSRTGPGTGELFF

SEQ ID NO: 601589 - protein, 14 aa, Homo sapiens
  CDR3 for alpha chain variable domain of TCR clone 300795 (TRAV30, TRAJ33)
CGTVAPRSNYQLVW

SEQ ID NO: 601590 - protein, 16 aa, Homo sapiens
  CDR3 for beta chain variable domain of TCR clone 300795 (TRBV19, TRBJ2-2)
CASRSPGTGATGELFF

SEQ ID NO: 601591 - protein, 10 aa, Homo sapiens
  CDR3 for alpha chain variable domain of TCR clone 300796 (TRAV8-3, TRAJ33)
CAVGAIATIS

SEQ ID NO: 601592 - protein, 12 aa, Homo sapiens
  CDR3 for beta chain variable domain of TCR clone 300796 (TRBV11-2, TRBJ2-2)
CASSLPTGELFF

SEQ ID NO: 601593 - protein, 14 aa, Homo sapiens
  CDR3 for alpha chain variable domain of TCR clone 300797 (TRAV13-1, TRAJ13)
CAASRVGGYQKITF

SEQ ID NO: 601594 - protein, 17 aa, Homo sapiens
  CDR3 for beta chain variable domain of TCR clone 300797 (TRBV15, TRBJ1-5)
CATSRAPPGTRNQPQHF

SEQ ID NO: 601595 - protein, 14 aa, Homo sapiens
  CDR3 for alpha chain variable domain of TCR clone 300798 (TRAV12-2, TRAJ45)
CALPERGGADGLTF

SEQ ID NO: 601596 - protein, 14 aa, Homo sapiens
  CDR3 for beta chain variable domain of TCR clone 300798 (TRBV18, TRBJ1-5)
CASSPGNSNQPQHY

SEQ ID NO: 601597 - protein, 12 aa, Homo sapiens
  CDR3 for alpha chain variable domain of TCR clone 300799 (TRAV35, TRAJ49)
CAGWNTGNQFYF

SEQ ID NO: 601598 - protein, 16 aa, Homo sapiens
  CDR3 for beta chain variable domain of TCR clone 300799 (TRBV5-1, TRBJ2-2)
CASSLWDTTNTGELYF

SEQ ID NO: 601599 - protein, 12 aa, Homo sapiens
  CDR3 for alpha chain variable domain of TCR clone 300800 (TRAV3, TRAJ43)
CAVRDPNNDMRF

SEQ ID NO: 601600 - protein, 14 aa, Homo sapiens
  CDR3 for beta chain variable domain of TCR clone 300800 (TRBV5-1, TRBJ2-3)
CASILFGPTDTQYF

SEQ ID NO: 601601 - protein, 13 aa, Homo sapiens
  CDR3 for alpha chain variable domain of TCR clone 300801 (TRAV13-2, TRAJ48)
CAEMDFGNEKLTF

SEQ ID NO: 601602 - protein, 15 aa, Homo sapiens
  CDR3 for beta chain variable domain of TCR clone 300801 (TRBV19, TRBJ2-1)
CASSGGGTLYNEQFF

SEQ ID NO: 601603 - protein, 12 aa, Homo sapiens
  CDR3 for alpha chain variable domain of TCR clone 300802 (TRAV12-3, TRAJ5)
CAMDTGRRALTF

SEQ ID NO: 601604 - protein, 16 aa, Homo sapiens
  CDR3 for beta chain variable domain of TCR clone 300802 (TRBV12-5, TRBJ2-5)
CASGPRTSGNQETQYF

SEQ ID NO: 601605 - protein, 14 aa, Homo sapiens
  CDR3 for alpha chain variable domain of TCR clone 300803 (TRAV8-6, TRAJ52)
CAVIGGTSYGKLTF

SEQ ID NO: 601606 - protein, 13 aa, Homo sapiens
  CDR3 for beta chain variable domain of TCR clone 300803 (TRBV11-2, TRBJ2-5)
CASSSTGEETQYF

SEQ ID NO: 601607 - protein, 12 aa, Homo sapiens
  CDR3 for alpha chain variable domain of TCR clone 300804 (TRAV13-2, TRAJ47)
CAESLYGNKLVF

SEQ ID NO: 601608 - protein, 17 aa, Homo sapiens
  CDR3 for beta chain variable domain of TCR clone 300804 (TRBV10-3, TRBJ1-1)
CAISESGTGGGTTEAFF

SEQ ID NO: 601609 - protein, 16 aa, Homo sapiens
  CDR3 for alpha chain variable domain of TCR clone 300805 (TRAV3, TRAJ28)
CAVLPRSGAGSYQLPF

SEQ ID NO: 601610 - protein, 13 aa, Homo sapiens
  CDR3 for beta chain variable domain of TCR clone 300805 (TRBV12-4, TRBJ2-5)
CARRLAVQETQYF

SEQ ID NO: 601611 - protein, 13 aa, Homo sapiens
  CDR3 for alpha chain variable domain of TCR clone 300806 (TRAV38-2/DV8, TRAJ34)
CAYRNYNTDKLIF

SEQ ID NO: 601612 - protein, 17 aa, Homo sapiens
  CDR3 for beta chain variable domain of TCR clone 300806 (TRBV13, TRBJ2-3)
CASSRSRVAGGRNTQYF

SEQ ID NO: 601613 - protein, 15 aa, Homo sapiens
  CDR3 for alpha chain variable domain of TCR clone 300807 (TRAV16, TRAJ17)
CALSGNKAAGNKLTF

SEQ ID NO: 601614 - protein, 16 aa, Homo sapiens
  CDR3 for beta chain variable domain of TCR clone 300807 (TRBV7-6, TRBJ1-6)
CASSSLPAGEYSPLQF

SEQ ID NO: 601615 - protein, 14 aa, Homo sapiens
  CDR3 for alpha chain variable domain of TCR clone 300808 (TRAV12-1, TRAJ30)
CVPKGTNRDDKIIF

SEQ ID NO: 601616 - protein, 11 aa, Homo sapiens
  CDR3 for beta chain variable domain of TCR clone 300808 (TRBV4-1, TRBJ2-2)
CASEHTGELFF

SEQ ID NO: 601617 - protein, 16 aa, Homo sapiens
  CDR3 for alpha chain variable domain of TCR clone 300809 (TRAV38-1, TRAJ37)
CAFKGDGSSNTGKLIF

SEQ ID NO: 601618 - protein, 13 aa, Homo sapiens
  CDR3 for beta chain variable domain of TCR clone 300809 (TRBV12-4, TRBJ2-5)
CATSLFRRETQYF

SEQ ID NO: 601619 - protein, 13 aa, Homo sapiens
  CDR3 for alpha chain variable domain of TCR clone 300810 (TRAV20, TRAJ56)
CAVQAGANSKLTF

SEQ ID NO: 601620 - protein, 14 aa, Homo sapiens
  CDR3 for beta chain variable domain of TCR clone 300810 (TRBV28, TRBJ1-1)
CASSPRTRWAEAFV

SEQ ID NO: 601621 - protein, 16 aa, Homo sapiens
  CDR3 for alpha chain variable domain of TCR clone 300811 (TRAV16, TRAJ52)
CALSGVGGTSYGKLTF

SEQ ID NO: 601622 - protein, 19 aa, Homo sapiens
  CDR3 for beta chain variable domain of TCR clone 300811 (TRBV19, TRBJ2-5)
CASSIGQVTDFFLGETQYF

SEQ ID NO: 601623 - protein, 14 aa, Homo sapiens
  CDR3 for alpha chain variable domain of TCR clone 300812 (TRAV13-1, TRAJ44)
CAAKATGTASKLTF

SEQ ID NO: 601624 - protein, 14 aa, Homo sapiens
  CDR3 for beta chain variable domain of TCR clone 300812 (TRBV2, TRBJ2-1)
CASRTGSSYNEQFF

SEQ ID NO: 601625 - protein, 14 aa, Homo sapiens
  CDR3 for alpha chain variable domain of TCR clone 300813 (TRAV13-1, TRAJ44)
CAAKATGTASKLTF

SEQ ID NO: 601626 - protein, 15 aa, Homo sapiens
  CDR3 for beta chain variable domain of TCR clone 300813 (TRBV7-3, TRBJ2-1)
CASSPTGGGEVEQFF

SEQ ID NO: 601627 - protein, 14 aa, Homo sapiens
  CDR3 for alpha chain variable domain of TCR clone 300814 (TRAV1-1, TRAJ12)
CAVRDQDSSYKLIF

SEQ ID NO: 601628 - protein, 15 aa, Homo sapiens
  CDR3 for beta chain variable domain of TCR clone 300814 (TRBV5-1, TRBJ2-5)
GASSRTGTSGETQYF

SEQ ID NO: 601629 - protein, 14 aa, Homo sapiens
  CDR3 for alpha chain variable domain of TCR clone 300815 (TRAV12-3, TRAJ10)
SHLPLTGGGNKLTF

SEQ ID NO: 601630 - protein, 14 aa, Homo sapiens
  CDR3 for beta chain variable domain of TCR clone 300815 (TRBV5-1, TRBJ1-1)
CASSFTGRNTEAFF

SEQ ID NO: 601631 - protein, 14 aa, Homo sapiens
  CDR3 for alpha chain variable domain of TCR clone 300816 (TRAV17, TRAJ56)
CATVPAGANSKLTF

SEQ ID NO: 601632 - protein, 13 aa, Homo sapiens
  CDR3 for beta chain variable domain of TCR clone 300816 (TRBV12-4, TRBJ2-2)
CASSITGSGVLFF

SEQ ID NO: 601633 - protein, 13 aa, Homo sapiens
  CDR3 for alpha chain variable domain of TCR clone 300817 (TRAV36/DV7, TRAJ29)
CAVEPSGNTPLVF

SEQ ID NO: 601634 - protein, 13 aa, Homo sapiens
  CDR3 for beta chain variable domain of TCR clone 300817 (TRBV19, TRBJ1-2)
CASSVPGQDGYTF

SEQ ID NO: 601635 - protein, 12 aa, Homo sapiens
  CDR3 for alpha chain variable domain of TCR clone 300818 (TRAV8-3, TRAJ26)
CAGDNYGQNFVF

SEQ ID NO: 601636 - protein, 15 aa, Homo sapiens
  CDR3 for beta chain variable domain of TCR clone 300818 (TRBV7-3, TRBJ1-1)
CASSPRADRNTEAFF

SEQ ID NO: 601637 - protein, 15 aa, Homo sapiens
  CDR3 for alpha chain variable domain of TCR clone 300819 (TRAV9-2, TRAJ10)
CALSDLGGGGNKLTF

SEQ ID NO: 601638 - protein, 18 aa, Homo sapiens
  CDR3 for beta chain variable domain of TCR clone 300819 (TRBV4-1, TRBJ1-5)
CASSQDPRGQGLNQPQRF

SEQ ID NO: 601639 - protein, 14 aa, Homo sapiens
  CDR3 for alpha chain variable domain of TCR clone 300820 (TRAV12-1, TRAJ30)
CVVNIGGRDDKIIF

SEQ ID NO: 601640 - protein, 15 aa, Homo sapiens
  CDR3 for beta chain variable domain of TCR clone 300820 (TRBV18, TRBJ1-2)
CASSTSNTPNYGYTF

SEQ ID NO: 601641 - protein, 20 aa, Homo sapiens
  CDR3 for alpha chain variable domain of TCR clone 300821 (TRAV12-3, TRAJ41)
SLFIRDSQPSDSATPEALNF

SEQ ID NO: 601642 - protein, 14 aa, Homo sapiens
  CDR3 for beta chain variable domain of TCR clone 300821 (TRBV7-2, TRBJ2-7)
CASSPRTSFYEQYF

SEQ ID NO: 601643 - protein, 14 aa, Homo sapiens
  CDR3 for alpha chain variable domain of TCR clone 300822 (TRAV12-3, TRAJ9)
CAMSPNTGGFKTIF

SEQ ID NO: 601644 - protein, 14 aa, Homo sapiens
  CDR3 for beta chain variable domain of TCR clone 300822 (TRBV5-4, TRBJ1-1)
CASSLDSRRDEAFF

SEQ ID NO: 601645 - protein, 11 aa, Homo sapiens
  CDR3 for alpha chain variable domain of TCR clone 300823 (TRAV1-2, TRAJ11)
CAVRGYSNLTF

SEQ ID NO: 601646 - protein, 13 aa, Homo sapiens
  CDR3 for beta chain variable domain of TCR clone 300823 (TRBV10-3, TRBJ2-7)
CASKLAVNYEQYF

SEQ ID NO: 601647 - protein, 15 aa, Homo sapiens
  CDR3 for alpha chain variable domain of TCR clone 300824 (TRAV8-3, TRAJ40)
CAAPSLGSGTYRYIF

SEQ ID NO: 601648 - protein, 16 aa, Homo sapiens
  CDR3 for beta chain variable domain of TCR clone 300824 (TRBV12-5, TRBJ2-5)
CASGPRTSGNQETQYF

SEQ ID NO: 601649 - protein, 16 aa, Homo sapiens
  CDR3 for alpha chain variable domain of TCR clone 300825 (TRAV4, TRAJ22)
CLVGDLYSGSARQLTF

SEQ ID NO: 601650 - protein, 16 aa, Homo sapiens
  CDR3 for beta chain variable domain of TCR clone 300825 (TRBV12-5, TRBJ2-5)
CASGPRTSGNQETQYF

SEQ ID NO: 601651 - protein, 14 aa, Homo sapiens
  CDR3 for alpha chain variable domain of TCR clone 300826 (TRAV4, TRAJ26)
CLVGPHNYGQTFVF

SEQ ID NO: 601652 - protein, 17 aa, Homo sapiens
  CDR3 for beta chain variable domain of TCR clone 300826 (TRBV20-1, TRBJ2-1)
CSASSSGLAGSYNEQFF

SEQ ID NO: 601653 - protein, 14 aa, Homo sapiens
  CDR3 for alpha chain variable domain of TCR clone 300827 (TRAV9-2, TRAJ39)
CALYIYNAGNMLTF

SEQ ID NO: 601654 - protein, 19 aa, Homo sapiens
  CDR3 for beta chain variable domain of TCR clone 300827 (TRBV12-5, TRBJ2-2)
CASGLGQGTMFANTGELFF

SEQ ID NO: 601655 - protein, 13 aa, Homo sapiens
  CDR3 for alpha chain variable domain of TCR clone 300828 (TRAV25, TRAJ44)
CAGFTGTASKLTF

SEQ ID NO: 601656 - protein, 15 aa, Homo sapiens
  CDR3 for beta chain variable domain of TCR clone 300828 (TRBV27, TRBJ1-2)
CASSLSVDLGYGYTF

SEQ ID NO: 601657 - protein, 12 aa, Homo sapiens
  CDR3 for alpha chain variable domain of TCR clone 300829 (TRAV21, TRAJ58)
CAAETSVSRLTF

SEQ ID NO: 601658 - protein, 18 aa, Homo sapiens
  CDR3 for beta chain variable domain of TCR clone 300829 (TRBV20-1, TRBJ2-6)
CSAETTPTHGSGANVLTF

SEQ ID NO: 601659 - protein, 14 aa, Homo sapiens
  CDR3 for alpha chain variable domain of TCR clone 300830 (TRAV8-2, TRAJ37)
CVVRISGNTGKLIF

SEQ ID NO: 601660 - protein, 11 aa, Homo sapiens
  CDR3 for beta chain variable domain of TCR clone 300830 (TRBV18, TRBJ2-5)
CASSPRETQYF

SEQ ID NO: 601661 - protein, 15 aa, Homo sapiens
  CDR3 for alpha chain variable domain of TCR clone 300831 (TRAV13-1, TRAJ27)
CAALELNTNAGKSTF

SEQ ID NO: 601662 - protein, 14 aa, Homo sapiens
  CDR3 for beta chain variable domain of TCR clone 300831 (TRBV6-5, TRBJ1-2)
CASSYTRDRGRYTF

SEQ ID NO: 601663 - protein, 16 aa, Homo sapiens
  CDR3 for alpha chain variable domain of TCR clone 300832 (TRAV3, TRAJ5)
CAVRNLMDTGRRALTF

SEQ ID NO: 601664 - protein, 14 aa, Homo sapiens
  CDR3 for beta chain variable domain of TCR clone 300832 (TRBV7-7, TRBJ2-2)
CATRQDSDTGELFF

SEQ ID NO: 601665 - protein, 21 aa, Homo sapiens
  CDR3 for alpha chain variable domain of TCR clone 300833 (TRAV26-1, )
CIADNAGTNHIQNPDPAVYQL

SEQ ID NO: 601666 - protein, 13 aa, Homo sapiens
  CDR3 for beta chain variable domain of TCR clone 300833 (TRBV20-1, TRBJ1-1)
CSARGGGNTEAFF

SEQ ID NO: 601667 - protein, 18 aa, Homo sapiens
  CDR3 for alpha chain variable domain of TCR clone 300834 (TRAV12-3, TRAJ52)
CAMSVGGAGGTSYGKLTF

SEQ ID NO: 601668 - protein, 14 aa, Homo sapiens
  CDR3 for beta chain variable domain of TCR clone 300834 (TRBV7-2, TRBJ2-7)
CASRSQGEAYGQYF

SEQ ID NO: 601669 - protein, 13 aa, Homo sapiens
  CDR3 for alpha chain variable domain of TCR clone 300835 (TRAV38-1, TRAJ42)
CARWGASQGNLIF

SEQ ID NO: 601670 - protein, 17 aa, Homo sapiens
  CDR3 for beta chain variable domain of TCR clone 300835 (TRBV20-1, TRBJ2-1)
CSARDPLAGVWDNEQFF

SEQ ID NO: 601671 - protein, 13 aa, Homo sapiens
  CDR3 for alpha chain variable domain of TCR clone 300836 (TRAV13-2, TRAJ13)
CAERPVGYQKVTF

SEQ ID NO: 601672 - protein, 15 aa, Homo sapiens
  CDR3 for beta chain variable domain of TCR clone 300836 (TRBV11-3, TRBJ2-7)
CASSPGPASSYEQYF

SEQ ID NO: 601673 - protein, 13 aa, Homo sapiens
  CDR3 for alpha chain variable domain of TCR clone 300837 (TRAV17, TRAJ5)
CAPMDTGRRALTF

SEQ ID NO: 601674 - protein, 14 aa, Homo sapiens
  CDR3 for beta chain variable domain of TCR clone 300837 (TRBV7-8, TRBJ2-3)
CASSFKSSTDTQYF

SEQ ID NO: 601675 - protein, 11 aa, Homo sapiens
  CDR3 for alpha chain variable domain of TCR clone 300838 (TRAV8-6, TRAJ13)
CALGIYQKVTF

SEQ ID NO: 601676 - protein, 14 aa, Homo sapiens
  CDR3 for beta chain variable domain of TCR clone 300838 (TRBV7-2, TRBJ1-6)
CASSLQGANSPLHF

SEQ ID NO: 601677 - protein, 11 aa, Homo sapiens
  CDR3 for alpha chain variable domain of TCR clone 300839 (TRAV21, TRAJ11)
CAVNGYSTLTF

SEQ ID NO: 601678 - protein, 13 aa, Homo sapiens
  CDR3 for beta chain variable domain of TCR clone 300839 (TRBV10-2, TRBJ2-7)
CASGASGGYEQYF

SEQ ID NO: 601679 - protein, 13 aa, Homo sapiens
  CDR3 for alpha chain variable domain of TCR clone 300840 (TRAV16, TRAJ54)
CALKVRGAQKLVF

SEQ ID NO: 601680 - protein, 17 aa, Homo sapiens
  CDR3 for beta chain variable domain of TCR clone 300840 (TRBV7-3, TRBJ2-3)
CASSLRKRMRGADTQYF

SEQ ID NO: 601681 - protein, 11 aa, Homo sapiens
  CDR3 for alpha chain variable domain of TCR clone 300841 (TRAV1-1, TRAJ23)
CAVRQGGKLIF

SEQ ID NO: 601682 - protein, 13 aa, Homo sapiens
  CDR3 for beta chain variable domain of TCR clone 300841 (TRBV7-2, TRBJ1-5)
CASTPTVNQPQHF

SEQ ID NO: 601683 - protein, 14 aa, Homo sapiens
  CDR3 for alpha chain variable domain of TCR clone 300842 (TRAV1-2, TRAJ8)
CAVREDTGFQILVF

SEQ ID NO: 601684 - protein, 14 aa, Homo sapiens
  CDR3 for beta chain variable domain of TCR clone 300842 (TRBV7-9, TRBJ1-1)
CASSLGGANTEAFF

SEQ ID NO: 601685 - protein, 12 aa, Homo sapiens
  CDR3 for alpha chain variable domain of TCR clone 300843 (TRAV27, TRAJ35)
CAGADFGNVLHC

SEQ ID NO: 601686 - protein, 13 aa, Homo sapiens
  CDR3 for beta chain variable domain of TCR clone 300843 (TRBV20-1, TRBJ2-5)
CSAREAFQETQYF

SEQ ID NO: 601687 - protein, 15 aa, Homo sapiens
  CDR3 for alpha chain variable domain of TCR clone 300844 (TRAV12-3, TRAJ49)
CAMAVTPNTGNQFYF

SEQ ID NO: 601688 - protein, 15 aa, Homo sapiens
  CDR3 for beta chain variable domain of TCR clone 300844 (TRBV6-3, TRBJ2-7)
CASSSPGTVFYEQYF

SEQ ID NO: 601689 - protein, 15 aa, Homo sapiens
  CDR3 for alpha chain variable domain of TCR clone 300845 (TRAV3, TRAJ13)
CAVRVYSGGYQKVTF

SEQ ID NO: 601690 - protein, 15 aa, Homo sapiens
  CDR3 for beta chain variable domain of TCR clone 300845 (TRBV7-9, TRBJ1-5)
CASSQGHQPNQPQHF

SEQ ID NO: 601691 - protein, 17 aa, Homo sapiens
  CDR3 for alpha chain variable domain of TCR clone 300846 (TRAV1-1, TRAJ32)
CAVRVDELWWCYKQAHL

SEQ ID NO: 601692 - protein, 12 aa, Homo sapiens
  CDR3 for beta chain variable domain of TCR clone 300846 (TRBV7-8, TRBJ2-1)
CASSLGHNAQFF

SEQ ID NO: 601693 - protein, 16 aa, Homo sapiens
  CDR3 for alpha chain variable domain of TCR clone 300847 (TRAV30, TRAJ24)
CGTEIVDAYSWGKFHF

SEQ ID NO: 601694 - protein, 12 aa, Homo sapiens
  CDR3 for beta chain variable domain of TCR clone 300847 (TRBV29-1, TRBJ2-7)
CSVGQTNYEQYF

SEQ ID NO: 601695 - protein, 16 aa, Homo sapiens
  CDR3 for alpha chain variable domain of TCR clone 300848 (TRAV26-1, TRAJ37)
CIVRGDGPGNTGKRIF

SEQ ID NO: 601696 - protein, 17 aa, Homo sapiens
  CDR3 for beta chain variable domain of TCR clone 300848 (TRBV4-1, TRBJ2-7)
CASSRDPLGVRGGEQYF

SEQ ID NO: 601697 - protein, 10 aa, Homo sapiens
  CDR3 for alpha chain variable domain of TCR clone 300849 (TRAV38-2/DV8, TRAJ40)
CASGTYKYIF

SEQ ID NO: 601698 - protein, 12 aa, Homo sapiens
  CDR3 for beta chain variable domain of TCR clone 300849 (TRBV11-2, TRBJ2-2)
CASSLGGGELFF

SEQ ID NO: 601699 - protein, 12 aa, Homo sapiens
  CDR3 for alpha chain variable domain of TCR clone 300850 (TRAV25, TRAJ5)
CAGGGGRRALTF

SEQ ID NO: 601700 - protein, 14 aa, Homo sapiens
  CDR3 for beta chain variable domain of TCR clone 300850 (TRBV18, TRBJ2-7)
CASSPRGGAYEQYF

SEQ ID NO: 601701 - protein, 13 aa, Homo sapiens
  CDR3 for alpha chain variable domain of TCR clone 300851 (TRAV23/DV6, TRAJ35)
CAAQLGFGNVLHC

SEQ ID NO: 601702 - protein, 15 aa, Homo sapiens
  CDR3 for beta chain variable domain of TCR clone 300851 (TRBV27, TRBJ2-2)
CASSKQGARTGELFF

SEQ ID NO: 601703 - protein, 18 aa, Homo sapiens
  CDR3 for alpha chain variable domain of TCR clone 300852 (TRAV13-1, TRAJ52)
CAASKRSAGGTSYGNLTF

SEQ ID NO: 601704 - protein, 14 aa, Homo sapiens
  CDR3 for beta chain variable domain of TCR clone 300852 (TRBV12-4, TRBJ1-1)
CASSLGTGGTEAFF

SEQ ID NO: 601705 - protein, 14 aa, Homo sapiens
  CDR3 for alpha chain variable domain of TCR clone 300853 (TRAV12-3, TRAJ15)
CAMIPPQAGNALIF

SEQ ID NO: 601706 - protein, 12 aa, Homo sapiens
  CDR3 for beta chain variable domain of TCR clone 300853 (TRBV11-2, TRBJ2-2)
CASSFGGGELFF

SEQ ID NO: 601707 - protein, 13 aa, Homo sapiens
  CDR3 for alpha chain variable domain of TCR clone 300854 (TRAV26-1, TRAJ34)
CIVRPWITDKLIF

SEQ ID NO: 601708 - protein, 16 aa, Homo sapiens
  CDR3 for beta chain variable domain of TCR clone 300854 (TRBV12-5, TRBJ2-5)
CASGPRTSGNQETQYF

SEQ ID NO: 601709 - protein, 12 aa, Homo sapiens
  CDR3 for alpha chain variable domain of TCR clone 300855 (TRAV13-2, TRAJ8)
CAPWLGFQKLVF

SEQ ID NO: 601710 - protein, 13 aa, Homo sapiens
  CDR3 for beta chain variable domain of TCR clone 300855 (TRBV2, TRBJ1-2)
CASSVRGNYGYTF

SEQ ID NO: 601711 - protein, 16 aa, Homo sapiens
  CDR3 for alpha chain variable domain of TCR clone 300856 (TRAV4, TRAJ22)
CLVGDLYSGSERQLTF

SEQ ID NO: 601712 - protein, 14 aa, Homo sapiens
  CDR3 for beta chain variable domain of TCR clone 300856 (TRBV28, TRBJ2-3)
CASSWRGRADTQYF

SEQ ID NO: 601713 - protein, 23 aa, Homo sapiens
  CDR3 for alpha chain variable domain of TCR clone 300857 (TRAV26-1, TRAJ38)
CIADNAGNNHIQNPDHAVSQLRD

SEQ ID NO: 601714 - protein, 13 aa, Homo sapiens
  CDR3 for beta chain variable domain of TCR clone 300857 (TRBV20-1, TRBJ1-1)
CSARGGGNTEAFF

SEQ ID NO: 601715 - protein, 13 aa, Homo sapiens
  CDR3 for alpha chain variable domain of TCR clone 300858 (TRAV8-3, TRAJ28)
CAVGAVGSYQLTF

SEQ ID NO: 601716 - protein, 13 aa, Homo sapiens
  CDR3 for beta chain variable domain of TCR clone 300858 (TRBV12-5, TRBJ2-3)
RASGDRQSDTQYF

SEQ ID NO: 601717 - protein, 14 aa, Homo sapiens
  CDR3 for alpha chain variable domain of TCR clone 300859 (TRAV35, TRAJ13)
CSGSPSGGYQKVTF

SEQ ID NO: 601718 - protein, 13 aa, Homo sapiens
  CDR3 for beta chain variable domain of TCR clone 300859 (TRBV29-1, TRBJ1-1)
CSVGDSRNTEAFF

SEQ ID NO: 601719 - protein, 12 aa, Homo sapiens
  CDR3 for alpha chain variable domain of TCR clone 300860 (TRAV8-6, TRAJ43)
CAVANNNNDMRF

SEQ ID NO: 601720 - protein, 15 aa, Homo sapiens
  CDR3 for beta chain variable domain of TCR clone 300860 (TRBV7-3, TRBJ2-6)
CASSLGGSGANVLTF

SEQ ID NO: 601721 - protein, 16 aa, Homo sapiens
  CDR3 for alpha chain variable domain of TCR clone 300861 (TRAV13-1, TRAJ18)
GAASRMRSSTLGRLYF

SEQ ID NO: 601722 - protein, 16 aa, Homo sapiens
  CDR3 for beta chain variable domain of TCR clone 300861 (TRBV27, TRBJ1-1)
CASSSRGRTGYTEAFF

SEQ ID NO: 601723 - protein, 13 aa, Homo sapiens
  CDR3 for alpha chain variable domain of TCR clone 300862 (TRAV21, TRAJ20)
CAVGLRVDCKLSF

SEQ ID NO: 601724 - protein, 15 aa, Homo sapiens
  CDR3 for beta chain variable domain of TCR clone 300862 (TRBV7-9, TRBJ1-5)
CASSQGHQPNQPQHF

SEQ ID NO: 601725 - protein, 14 aa, Homo sapiens
  CDR3 for alpha chain variable domain of TCR clone 300863 (TRAV12-3, TRAJ47)
CAMSVREYGNKLAF

SEQ ID NO: 601726 - protein, 15 aa, Homo sapiens
  CDR3 for beta chain variable domain of TCR clone 300863 (TRBV20-1, TRBJ2-2)
CSARDARLNAGELLF

SEQ ID NO: 601727 - protein, 11 aa, Homo sapiens
  CDR3 for alpha chain variable domain of TCR clone 300864 (TRAV21, TRAJ34)
CAVTNTDKLIF

SEQ ID NO: 601728 - protein, 15 aa, Homo sapiens
  CDR3 for beta chain variable domain of TCR clone 300864 (TRBV28, TRBJ2-2)
CASSLRTGNTGELFF

SEQ ID NO: 601729 - protein, 18 aa, Homo sapiens
  CDR3 for alpha chain variable domain of TCR clone 300865 (TRAV12-3, TRAJ52)
CAMSRTNAGGTSYGKLTF

SEQ ID NO: 601730 - protein, 16 aa, Homo sapiens
  CDR3 for beta chain variable domain of TCR clone 300865 (TRBV7-6, TRBJ1-6)
CASSLSSRIGDSPLHF

SEQ ID NO: 601731 - protein, 14 aa, Homo sapiens
  CDR3 for alpha chain variable domain of TCR clone 300866 (TRAV23/DV6, TRAJ40)
CAASLTSGTYKYIF

SEQ ID NO: 601732 - protein, 14 aa, Homo sapiens
  CDR3 for beta chain variable domain of TCR clone 300866 (TRBV5-1, TRBJ2-3)
YASSRGQGGGTQYF

SEQ ID NO: 601733 - protein, 13 aa, Homo sapiens
  CDR3 for alpha chain variable domain of TCR clone 300867 (TRAV27, TRAJ41)
CAGAGNSGYALNF

SEQ ID NO: 601734 - protein, 14 aa, Homo sapiens
  CDR3 for beta chain variable domain of TCR clone 300867 (TRBV7-2, TRBJ1-1)
CASSFVTGTTEAFF

SEQ ID NO: 601735 - protein, 13 aa, Homo sapiens
  CDR3 for alpha chain variable domain of TCR clone 300868 (TRAV3, TRAJ21)
CAVREPDFNKFYF

SEQ ID NO: 601736 - protein, 17 aa, Homo sapiens
  CDR3 for beta chain variable domain of TCR clone 300868 (TRBV7-8, TRBJ2-6)
CARSAGTGGAGANVLTF

SEQ ID NO: 601737 - protein, 13 aa, Homo sapiens
  CDR3 for alpha chain variable domain of TCR clone 300869 (TRAV27, TRAJ27)
CAGGITNAGKSTF

SEQ ID NO: 601738 - protein, 13 aa, Homo sapiens
  CDR3 for beta chain variable domain of TCR clone 300869 (TRBV20-1, TRBJ1-2)
CSASLGVGYGDTF

SEQ ID NO: 601739 - protein, 12 aa, Homo sapiens
  CDR3 for alpha chain variable domain of TCR clone 300870 (TRAV16, TRAJ10)
CSRTGGGNKRTF

SEQ ID NO: 601740 - protein, 19 aa, Homo sapiens
  CDR3 for beta chain variable domain of TCR clone 300870 (TRBV25-1, TRBJ2-2)
CAILVYRVDRGRKTGELFF

SEQ ID NO: 601741 - protein, 12 aa, Homo sapiens
  CDR3 for alpha chain variable domain of TCR clone 300871 (TRAV13-2, TRAJ23)
CAERLRGGKLIF

SEQ ID NO: 601742 - protein, 14 aa, Homo sapiens
  CDR3 for beta chain variable domain of TCR clone 300871 (TRBV5-1, TRBJ1-2)
CASSPQGANYGYTF

SEQ ID NO: 601743 - protein, 14 aa, Homo sapiens
  CDR3 for alpha chain variable domain of TCR clone 300872 (TRAV12-2, TRAJ45)
CAVNIGGGADGLTF

SEQ ID NO: 601744 - protein, 13 aa, Homo sapiens
  CDR3 for beta chain variable domain of TCR clone 300872 (TRBV19, TRBJ2-2)
CASGIWSTGELFC

SEQ ID NO: 601745 - protein, 16 aa, Homo sapiens
  CDR3 for alpha chain variable domain of TCR clone 300873 (TRAV3, TRAJ10)
CAVSDMRAGGGNKLTF

SEQ ID NO: 601746 - protein, 17 aa, Homo sapiens
  CDR3 for beta chain variable domain of TCR clone 300873 (TRBV28, TRBJ2-5)
CASSTPEGDALQETQYF

SEQ ID NO: 601747 - protein, 13 aa, Homo sapiens
  CDR3 for alpha chain variable domain of TCR clone 300874 (TRAV21, TRAJ33)
CAVAGDSNFQLIL

SEQ ID NO: 601748 - protein, 12 aa, Homo sapiens
  CDR3 for beta chain variable domain of TCR clone 300874 (TRBV19, TRBJ2-7)
CASTSVGSEQYF

SEQ ID NO: 601749 - protein, 14 aa, Homo sapiens
  CDR3 for alpha chain variable domain of TCR clone 300875 (TRAV9-2, TRAJ39)
CALYIYNAGNMLTF

SEQ ID NO: 601750 - protein, 14 aa, Homo sapiens
  CDR3 for beta chain variable domain of TCR clone 300875 (TRBV19, TRBJ1-2)
CASSLQGQAYGYTF

SEQ ID NO: 601751 - protein, 11 aa, Homo sapiens
  CDR3 for alpha chain variable domain of TCR clone 300876 (TRAV29/DV5, TRAJ31)
CAASYRDRLMF

SEQ ID NO: 601752 - protein, 19 aa, Homo sapiens
  CDR3 for beta chain variable domain of TCR clone 300876 (TRBV19, TRBJ2-5)
CASSIGQVTDFFLGETQNF

SEQ ID NO: 601753 - protein, 13 aa, Homo sapiens
  CDR3 for alpha chain variable domain of TCR clone 300877 (TRAV13-2, TRAJ48)
CAEMDFGNEKLTF

SEQ ID NO: 601754 - protein, 14 aa, Homo sapiens
  CDR3 for beta chain variable domain of TCR clone 300877 (TRBV4-3, TRBJ1-4)
CASSPLQRNEKLFF

SEQ ID NO: 601755 - protein, 15 aa, Homo sapiens
  CDR3 for alpha chain variable domain of TCR clone 300878 (TRAV1-2, TRAJ15)
CAVDVMGSTGTALIF

SEQ ID NO: 601756 - protein, 16 aa, Homo sapiens
  CDR3 for beta chain variable domain of TCR clone 300878 (TRBV12-5, TRBJ2-5)
CASGPRTSGNQETQYF

SEQ ID NO: 601757 - protein, 15 aa, Homo sapiens
  CDR3 for alpha chain variable domain of TCR clone 300879 (TRAV3, TRAJ24)
CAVRDKMTAGGNCSL

SEQ ID NO: 601758 - protein, 14 aa, Homo sapiens
  CDR3 for beta chain variable domain of TCR clone 300879 (TRBV7-2, TRBJ2-3)
RASSQTGSSYKQYF

SEQ ID NO: 601759 - protein, 13 aa, Homo sapiens
  CDR3 for alpha chain variable domain of TCR clone 300880 (TRAV3, TRAJ21)
CAVREPDFNKFYF

SEQ ID NO: 601760 - protein, 17 aa, Homo sapiens
  CDR3 for beta chain variable domain of TCR clone 300880 (TRBV2, TRBJ2-1)
CASSRNSLLAGGDEQFF

SEQ ID NO: 601761 - protein, 15 aa, Homo sapiens
  CDR3 for alpha chain variable domain of TCR clone 300881 (TRAV26-1, TRAJ53)
CSVRVEGGSNYKLTF

SEQ ID NO: 601762 - protein, 14 aa, Homo sapiens
  CDR3 for beta chain variable domain of TCR clone 300881 (TRBV4-3, TRBJ2-1)
CASSQDRWRGEQFF

SEQ ID NO: 601763 - protein, 14 aa, Homo sapiens
  CDR3 for alpha chain variable domain of TCR clone 300882 (TRAV14/DV4, TRAJ32)
SNVLPLTPTNKLSF

SEQ ID NO: 601764 - protein, 17 aa, Homo sapiens
  CDR3 for beta chain variable domain of TCR clone 300882 (TRBV20-1, TRBJ2-1)
CSASSSGLAGSYNEQFF

SEQ ID NO: 601765 - protein, 13 aa, Homo sapiens
  CDR3 for alpha chain variable domain of TCR clone 300883 (TRAV27, TRAJ8)
CAGGPTGFQKLVF

SEQ ID NO: 601766 - protein, 15 aa, Homo sapiens
  CDR3 for beta chain variable domain of TCR clone 300883 (TRBV6-1, TRBJ2-7)
CASSESMGDFYELYF

SEQ ID NO: 601767 - protein, 16 aa, Homo sapiens
  CDR3 for alpha chain variable domain of TCR clone 300884 (TRAV12-3, TRAJ53)
CAMSPGSGGSNYKLTF

SEQ ID NO: 601768 - protein, 17 aa, Homo sapiens
  CDR3 for beta chain variable domain of TCR clone 300884 (TRBV11-2, TRBJ2-1)
CASSLYPPGVEYNGQFF

SEQ ID NO: 601769 - protein, 10 aa, Homo sapiens
  CDR3 for alpha chain variable domain of TCR clone 300885 (TRAV26-1, TRAJ22)
CIAGSRQLTF

SEQ ID NO: 601770 - protein, 17 aa, Homo sapiens
  CDR3 for beta chain variable domain of TCR clone 300885 (TRBV5-4, TRBJ1-1)
CASFPPKGRLQNNEAFF

SEQ ID NO: 601771 - protein, 14 aa, Homo sapiens
  CDR3 for alpha chain variable domain of TCR clone 300886 (TRAV12-2, TRAJ6)
CAVIASGGSYIPTF

SEQ ID NO: 601772 - protein, 16 aa, Homo sapiens
  CDR3 for beta chain variable domain of TCR clone 300886 (TRBV7-2, TRBJ2-3)
CASSLAGAGSGDTRYF

SEQ ID NO: 601773 - protein, 14 aa, Homo sapiens
  CDR3 for alpha chain variable domain of TCR clone 300887 (TRAV12-1, TRAJ12)
CVVTRMDSSYKLVF

SEQ ID NO: 601774 - protein, 13 aa, Homo sapiens
  CDR3 for beta chain variable domain of TCR clone 300887 (TRBV24-1, TRBJ2-1)
CATSAGPYNEQFF

SEQ ID NO: 601775 - protein, 11 aa, Homo sapiens
  CDR3 for alpha chain variable domain of TCR clone 300888 (TRAV1-1, TRAJ23)
CAVRQGGKLIF

SEQ ID NO: 601776 - protein, 15 aa, Homo sapiens
  CDR3 for beta chain variable domain of TCR clone 300888 (TRBV6-1, TRBJ2-3)
CASSERGGITDTQYF

SEQ ID NO: 601777 - protein, 13 aa, Homo sapiens
  CDR3 for alpha chain variable domain of TCR clone 300889 (TRAV27, TRAJ41)
CAGEGNSGYALNF

SEQ ID NO: 601778 - protein, 13 aa, Homo sapiens
  CDR3 for beta chain variable domain of TCR clone 300889 (TRBV6-6, TRBJ2-7)
CASSSSGSYEQYF

SEQ ID NO: 601779 - protein, 14 aa, Homo sapiens
  CDR3 for alpha chain variable domain of TCR clone 300890 (TRAV14/DV4, TRAJ42)
CSRGSLRSQGNLIF

SEQ ID NO: 601780 - protein, 18 aa, Homo sapiens
  CDR3 for beta chain variable domain of TCR clone 300890 (TRBV20-1, TRBJ2-3)
CSASGLAGGPGTTDTQYF

SEQ ID NO: 601781 - protein, 12 aa, Homo sapiens
  CDR3 for alpha chain variable domain of TCR clone 300891 (TRAV3, TRAJ43)
CAVRDPTNDMRF

SEQ ID NO: 601782 - protein, 15 aa, Homo sapiens
  CDR3 for beta chain variable domain of TCR clone 300891 (TRBV27, TRBJ1-5)
CASSIGTGFDQPQHF

SEQ ID NO: 601783 - protein, 17 aa, Homo sapiens
  CDR3 for alpha chain variable domain of TCR clone 300892 (TRAV3, TRAJ6)
RAVRDGPRAGGSYIPTF

SEQ ID NO: 601784 - protein, 17 aa, Homo sapiens
  CDR3 for beta chain variable domain of TCR clone 300892 (TRBV13, TRBJ2-3)
CASSLSRVAGGRNTQYF

SEQ ID NO: 601785 - protein, 16 aa, Homo sapiens
  CDR3 for alpha chain variable domain of TCR clone 300893 (TRAV27, TRAJ13)
CAGAKSDSGGYQKVTF

SEQ ID NO: 601786 - protein, 15 aa, Homo sapiens
  CDR3 for beta chain variable domain of TCR clone 300893 (TRBV28, TRBJ2-1)
CASSIIAGGRSEQFF

SEQ ID NO: 601787 - protein, 13 aa, Homo sapiens
  CDR3 for alpha chain variable domain of TCR clone 300894 (TRAV17, TRAJ5)
YALRGTGRRALTF

SEQ ID NO: 601788 - protein, 14 aa, Homo sapiens
  CDR3 for beta chain variable domain of TCR clone 300894 (TRBV7-2, TRBJ2-7)
CASRSQGAAYEQYF

SEQ ID NO: 601789 - protein, 14 aa, Homo sapiens
  CDR3 for alpha chain variable domain of TCR clone 300895 (TRAV12-2, TRAJ44)
CAVNPAGAASKLTF

SEQ ID NO: 601790 - protein, 14 aa, Homo sapiens
  CDR3 for beta chain variable domain of TCR clone 300895 (TRBV7-2, TRBJ1-3)
CASSRLRSGNTIYF

SEQ ID NO: 601791 - protein, 13 aa, Homo sapiens
  CDR3 for alpha chain variable domain of TCR clone 300896 (TRAV3, TRAJ20)
CAVRDTPRYKLSF

SEQ ID NO: 601792 - protein, 15 aa, Homo sapiens
  CDR3 for beta chain variable domain of TCR clone 300896 (TRBV19, TRBJ1-1)
CASTSGQIQNTEAFF

SEQ ID NO: 601793 - protein, 13 aa, Homo sapiens
  CDR3 for alpha chain variable domain of TCR clone 300897 (TRAV1-2, TRAJ9)
CAALTTGGFKTIF

SEQ ID NO: 601794 - protein, 15 aa, Homo sapiens
  CDR3 for beta chain variable domain of TCR clone 300897 (TRBV19, TRBJ1-1)
CASTSGQIQNTEAFF

SEQ ID NO: 601795 - protein, 13 aa, Homo sapiens
  CDR3 for alpha chain variable domain of TCR clone 300898 (TRAV12-3, TRAJ47)
CAMKKEYGNKLVF

SEQ ID NO: 601796 - protein, 15 aa, Homo sapiens
  CDR3 for beta chain variable domain of TCR clone 300898 (TRBV3-1, TRBJ2-6)
CQQPSWVSGANVLTF

SEQ ID NO: 601797 - protein, 14 aa, Homo sapiens
  CDR3 for alpha chain variable domain of TCR clone 300899 (TRAV12-2, TRAJ48)
SATYLFASNEKLTF

SEQ ID NO: 601798 - protein, 16 aa, Homo sapiens
  CDR3 for beta chain variable domain of TCR clone 300899 (TRBV7-3, TRBJ2-2)
CASSLKRGTLSGELFF

SEQ ID NO: 601799 - protein, 13 aa, Homo sapiens
  CDR3 for alpha chain variable domain of TCR clone 300900 (TRAV13-1, TRAJ10)
CAATAGGGNKLTF

SEQ ID NO: 601800 - protein, 14 aa, Homo sapiens
  CDR3 for beta chain variable domain of TCR clone 300900 (TRBV7-3, TRBJ2-1)
CASSLTGGANEQFF

SEQ ID NO: 601801 - protein, 14 aa, Homo sapiens
  CDR3 for alpha chain variable domain of TCR clone 300901 (TRAV12-2, TRAJ24)
YAVTPADSWGKLQF

SEQ ID NO: 601802 - protein, 16 aa, Homo sapiens
  CDR3 for beta chain variable domain of TCR clone 300901 (TRBV6-4, TRBJ2-3)
APSEGGRAWGTDTQYF

SEQ ID NO: 601803 - protein, 14 aa, Homo sapiens
  CDR3 for alpha chain variable domain of TCR clone 300902 (TRAV9-2, TRAJ39)
CALYIYNAGNMLTF

SEQ ID NO: 601804 - protein, 13 aa, Homo sapiens
  CDR3 for beta chain variable domain of TCR clone 300902 (TRBV2, TRBJ2-3)
CASIIPASDTQYF

SEQ ID NO: 601805 - protein, 12 aa, Homo sapiens
  CDR3 for alpha chain variable domain of TCR clone 300903 (TRAV17, TRAJ12)
CATLRSSYKFIF

SEQ ID NO: 601806 - protein, 14 aa, Homo sapiens
  CDR3 for beta chain variable domain of TCR clone 300903 (TRBV19, TRBJ2-1)
CARGARSFQWEQFF

SEQ ID NO: 601807 - protein, 14 aa, Homo sapiens
  CDR3 for alpha chain variable domain of TCR clone 300904 (TRAV13-1, TRAJ12)
CAASYMDSGYKLIF

SEQ ID NO: 601808 - protein, 13 aa, Homo sapiens
  CDR3 for beta chain variable domain of TCR clone 300904 (TRBV2, TRBJ2-5)
CASSDGIQETQYF

SEQ ID NO: 601809 - protein, 14 aa, Homo sapiens
  CDR3 for alpha chain variable domain of TCR clone 300905 (TRAV34, TRAJ22)
CGADTSGSARQLTF

SEQ ID NO: 601810 - protein, 16 aa, Homo sapiens
  CDR3 for beta chain variable domain of TCR clone 300905 (TRBV2, TRBJ2-3)
CQHRGAPRRWIDTQYF

SEQ ID NO: 601811 - protein, 12 aa, Homo sapiens
  CDR3 for alpha chain variable domain of TCR clone 300906 (TRAV21, TRAJ20)
CAVRRNDYKLSF

SEQ ID NO: 601812 - protein, 15 aa, Homo sapiens
  CDR3 for beta chain variable domain of TCR clone 300906 (TRBV24-1, TRBJ2-3)
CATAFPGDGVDTQYF

SEQ ID NO: 601813 - protein, 12 aa, Homo sapiens
  CDR3 for alpha chain variable domain of TCR clone 300907 (TRAV29/DV5, TRAJ26)
CAASEYGQNFVF

SEQ ID NO: 601814 - protein, 14 aa, Homo sapiens
  CDR3 for beta chain variable domain of TCR clone 300907 (TRBV19, TRBJ2-5)
CASSMTGQQETQYF

SEQ ID NO: 601815 - protein, 11 aa, Homo sapiens
  CDR3 for alpha chain variable domain of TCR clone 300908 (TRAV12-1, TRAJ34)
CVVNKGRELIF

SEQ ID NO: 601816 - protein, 14 aa, Homo sapiens
  CDR3 for beta chain variable domain of TCR clone 300908 (TRBV7-6, TRBJ2-3)
CASNSGGDANTQYF

SEQ ID NO: 601817 - protein, 14 aa, Homo sapiens
  CDR3 for alpha chain variable domain of TCR clone 300909 (TRAV13-1, TRAJ35)
CAASKGGFGNVMHC

SEQ ID NO: 601818 - protein, 13 aa, Homo sapiens
  CDR3 for beta chain variable domain of TCR clone 300909 (TRBV12-4, TRBJ2-7)
CASSPTETYEQYF

SEQ ID NO: 601819 - protein, 15 aa, Homo sapiens
  CDR3 for alpha chain variable domain of TCR clone 300910 (TRAV14/DV4, TRAJ33)
CAIREGRDSNYQLIW

SEQ ID NO: 601820 - protein, 15 aa, Homo sapiens
  CDR3 for beta chain variable domain of TCR clone 300910 (TRBV5-5, TRBJ1-5)
CASSSTPGSNQPQHF

SEQ ID NO: 601821 - protein, 10 aa, Homo sapiens
  CDR3 for alpha chain variable domain of TCR clone 300911 (TRAV8-4, TRAJ43)
GAVSADDMRF

SEQ ID NO: 601822 - protein, 11 aa, Homo sapiens
  CDR3 for beta chain variable domain of TCR clone 300911 (TRBV6-3, TRBJ2-3)
CATGQADTQYF

SEQ ID NO: 601823 - protein, 22 aa, Homo sapiens
  CDR3 for alpha chain variable domain of TCR clone 300912 (TRAV27, )
CAVRTHIPDIQNPDPAGYQLRD

SEQ ID NO: 601824 - protein, 16 aa, Homo sapiens
  CDR3 for beta chain variable domain of TCR clone 300912 (TRBV5-1, TRBJ2-3)
CASSLGLAVYTDTQYF

SEQ ID NO: 601825 - protein, 21 aa, Homo sapiens
  CDR3 for alpha chain variable domain of TCR clone 300913 (TRAV12-1, TRAJ32)
SSVIQPPTSMNYGGATNKLIF

SEQ ID NO: 601826 - protein, 19 aa, Homo sapiens
  CDR3 for beta chain variable domain of TCR clone 300913 (TRBV12-4, TRBJ2-1)
CASTLAFDPRDKEANEQFF

SEQ ID NO: 601827 - protein, 16 aa, Homo sapiens
  CDR3 for alpha chain variable domain of TCR clone 300914 (TRAV2, TRAJ32)
CAVEDGDGGATNKLIF

SEQ ID NO: 601828 - protein, 13 aa, Homo sapiens
  CDR3 for beta chain variable domain of TCR clone 300914 (TRBV4-1, TRBJ2-2)
CASSQENTGELFF

SEQ ID NO: 601829 - protein, 16 aa, Homo sapiens
  CDR3 for alpha chain variable domain of TCR clone 300915 (TRAV12-2, TRAJ40)
CAVIRGGTSGTYKYIF

SEQ ID NO: 601830 - protein, 18 aa, Homo sapiens
  CDR3 for beta chain variable domain of TCR clone 300915 (TRBV11-2, TRBJ2-3)
CASSLGGASRGAPNTQYF

SEQ ID NO: 601831 - protein, 16 aa, Homo sapiens
  CDR3 for alpha chain variable domain of TCR clone 300916 (TRAV30, TRAJ24)
CGTEIVDADSWGKFQF

SEQ ID NO: 601832 - protein, 12 aa, Homo sapiens
  CDR3 for beta chain variable domain of TCR clone 300916 (TRBV11-2, TRBJ2-1)
CDSSPGNNEQFF

SEQ ID NO: 601833 - protein, 13 aa, Homo sapiens
  CDR3 for alpha chain variable domain of TCR clone 300917 (TRAV26-2, TRAJ43)
CILRAVNNNDMRF

SEQ ID NO: 601834 - protein, 11 aa, Homo sapiens
  CDR3 for beta chain variable domain of TCR clone 300917 (TRBV29-1, TRBJ2-5)
CSEDRMGTQYF

SEQ ID NO: 601835 - protein, 17 aa, Homo sapiens
  CDR3 for alpha chain variable domain of TCR clone 300918 (TRAV3, TRAJ6)
CAVRDGPRAGGSYIPTF

SEQ ID NO: 601836 - protein, 15 aa, Homo sapiens
  CDR3 for beta chain variable domain of TCR clone 300918 (TRBV11-2, TRBJ2-7)
CASSLRSPGPYEQYF

SEQ ID NO: 601837 - protein, 12 aa, Homo sapiens
  CDR3 for alpha chain variable domain of TCR clone 300919 (TRAV13-2, TRAJ23)
CAERHRGGKLIF

SEQ ID NO: 601838 - protein, 15 aa, Homo sapiens
  CDR3 for beta chain variable domain of TCR clone 300919 (TRBV7-6, TRBJ2-1)
CASSPGQGPCNEQFF

SEQ ID NO: 601839 - protein, 12 aa, Homo sapiens
  CDR3 for alpha chain variable domain of TCR clone 300920 (TRAV3, TRAJ43)
CAVRDPNNDMGF

SEQ ID NO: 601840 - protein, 15 aa, Homo sapiens
  CDR3 for beta chain variable domain of TCR clone 300920 (TRBV6-5, TRBJ2-1)
CASSYDAGAGNEQFF

SEQ ID NO: 601841 - protein, 15 aa, Homo sapiens
  CDR3 for alpha chain variable domain of TCR clone 300921 (TRAV16, TRAJ4)
CALEDPSGGHNKLIF

SEQ ID NO: 601842 - protein, 13 aa, Homo sapiens
  CDR3 for beta chain variable domain of TCR clone 300921 (TRBV7-3, TRBJ2-7)
CASSQAGGYEQYF

SEQ ID NO: 601843 - protein, 15 aa, Homo sapiens
  CDR3 for alpha chain variable domain of TCR clone 300922 (TRAV27, TRAJ38)
CAARRNAGNNRKLLW

SEQ ID NO: 601844 - protein, 16 aa, Homo sapiens
  CDR3 for beta chain variable domain of TCR clone 300922 (TRBV7-2, TRBJ2-1)
CASSPRLAGSNNEQFF

SEQ ID NO: 601845 - protein, 14 aa, Homo sapiens
  CDR3 for alpha chain variable domain of TCR clone 300923 (TRAV17, TRAJ12)
CATDEKDSSYKLIF

SEQ ID NO: 601846 - protein, 16 aa, Homo sapiens
  CDR3 for beta chain variable domain of TCR clone 300923 (TRBV11-2, TRBJ2-1)
CASSPRLAGSYNEQFF

SEQ ID NO: 601847 - protein, 13 aa, Homo sapiens
  CDR3 for alpha chain variable domain of TCR clone 300924 (TRAV36/DV7, TRAJ37)
WAVFPSNTGKLIF

SEQ ID NO: 601848 - protein, 12 aa, Homo sapiens
  CDR3 for beta chain variable domain of TCR clone 300924 (TRBV11-2, TRBJ2-2)
CASSLGGGELFF

SEQ ID NO: 601849 - protein, 12 aa, Homo sapiens
  CDR3 for alpha chain variable domain of TCR clone 300925 (TRAV23/DV6, TRAJ16)
CAATGTGQKLLF

SEQ ID NO: 601850 - protein, 15 aa, Homo sapiens
  CDR3 for beta chain variable domain of TCR clone 300925 (TRBV11-2, TRBJ2-1)
CASSKNRGLIYEQFF

SEQ ID NO: 601851 - protein, 14 aa, Homo sapiens
  CDR3 for alpha chain variable domain of TCR clone 300926 (TRAV38-1, TRAJ29)
CAFITPSGNTPLVF

SEQ ID NO: 601852 - protein, 16 aa, Homo sapiens
  CDR3 for beta chain variable domain of TCR clone 300926 (TRBV7-9, TRBJ1-2)
CASSPGGGAINYGYTF

SEQ ID NO: 601853 - protein, 13 aa, Homo sapiens
  CDR3 for alpha chain variable domain of TCR clone 300927 (TRAV8-1, TRAJ15)
CAVKNQAGTALIF

SEQ ID NO: 601854 - protein, 13 aa, Homo sapiens
  CDR3 for beta chain variable domain of TCR clone 300927 (TRBV19, TRBJ1-1)
CASSPSNGGEAFF

SEQ ID NO: 601855 - protein, 14 aa, Homo sapiens
  CDR3 for alpha chain variable domain of TCR clone 300928 (TRAV8-3, TRAJ4)
CAVGAAGGYNKLIF

SEQ ID NO: 601856 - protein, 14 aa, Homo sapiens
  CDR3 for beta chain variable domain of TCR clone 300928 (TRBV6-1, TRBJ1-3)
CASVQGGGGNTMYF

SEQ ID NO: 601857 - protein, 15 aa, Homo sapiens
  CDR3 for alpha chain variable domain of TCR clone 300929 (TRAV12-1, TRAJ36)
CVVNEHQTGANNLFF

SEQ ID NO: 601858 - protein, 12 aa, Homo sapiens
  CDR3 for beta chain variable domain of TCR clone 300929 (TRBV29-1, TRBJ2-3)
CSVTGGADKQYF

SEQ ID NO: 601859 - protein, 13 aa, Homo sapiens
  CDR3 for alpha chain variable domain of TCR clone 300930 (TRAV12-2, TRAJ49)
CAVNMRTGNQFYF

SEQ ID NO: 601860 - protein, 11 aa, Homo sapiens
  CDR3 for beta chain variable domain of TCR clone 300930 (TRBV5-5, TRBJ1-1)
CASSLRVEAFF

SEQ ID NO: 601861 - protein, 13 aa, Homo sapiens
  CDR3 for alpha chain variable domain of TCR clone 300931 (TRAV2, TRAJ5)
CAVPDTGRRALNF

SEQ ID NO: 601862 - protein, 15 aa, Homo sapiens
  CDR3 for beta chain variable domain of TCR clone 300931 (TRBV7-2, TRBJ2-2)
CASSTRTGYTGELFF

SEQ ID NO: 601863 - protein, 13 aa, Homo sapiens
  CDR3 for alpha chain variable domain of TCR clone 300932 (TRAV12-2, TRAJ10)
CAVPTGGGNKLTF

SEQ ID NO: 601864 - protein, 12 aa, Homo sapiens
  CDR3 for beta chain variable domain of TCR clone 300932 (TRBV7-2, TRBJ1-6)
CASSLSSSPLHF

SEQ ID NO: 601865 - protein, 14 aa, Homo sapiens
  CDR3 for alpha chain variable domain of TCR clone 300933 (TRAV1-1, TRAJ34)
CAVSPSYNTDKLIF

SEQ ID NO: 601866 - protein, 15 aa, Homo sapiens
  CDR3 for beta chain variable domain of TCR clone 300933 (TRBV6-1, TRBJ2-3)
CASSERGGITDTQYF

SEQ ID NO: 601867 - protein, 15 aa, Homo sapiens
  CDR3 for alpha chain variable domain of TCR clone 300934 (TRAV3, TRAJ5)
CAVRDLDTGRRALTF

SEQ ID NO: 601868 - protein, 15 aa, Homo sapiens
  CDR3 for beta chain variable domain of TCR clone 300934 (TRBV2, TRBJ2-2)
CASSRETVGTGELFF

SEQ ID NO: 601869 - protein, 13 aa, Homo sapiens
  CDR3 for alpha chain variable domain of TCR clone 300935 (TRAV29/DV5, TRAJ31)
CAASRNNNARLMF

SEQ ID NO: 601870 - protein, 16 aa, Homo sapiens
  CDR3 for beta chain variable domain of TCR clone 300935 (TRBV19, TRBJ2-2)
CASRSPGTGATWELFF

SEQ ID NO: 601871 - protein, 14 aa, Homo sapiens
  CDR3 for alpha chain variable domain of TCR clone 300936 (TRAV9-2, TRAJ39)
CALYIYNAGNMLTF

SEQ ID NO: 601872 - protein, 13 aa, Homo sapiens
  CDR3 for beta chain variable domain of TCR clone 300936 (TRBV7-8, TRBJ2-7)
RRVRLTEMGEQYF

SEQ ID NO: 601873 - protein, 12 aa, Homo sapiens
  CDR3 for alpha chain variable domain of TCR clone 300937 (TRAV12-1, TRAJ40)
CVFYSGAYKYIF

SEQ ID NO: 601874 - protein, 18 aa, Homo sapiens
  CDR3 for beta chain variable domain of TCR clone 300937 (TRBV12-4, TRBJ2-2)
CASSLVAGTRGQTGELFF

SEQ ID NO: 601875 - protein, 12 aa, Homo sapiens
  CDR3 for alpha chain variable domain of TCR clone 300938 (TRAV27, TRAJ33)
CAGDGSNYQLIW

SEQ ID NO: 601876 - protein, 16 aa, Homo sapiens
  CDR3 for beta chain variable domain of TCR clone 300938 (TRBV4-1, TRBJ2-1)
CASSQQDAWESNEQFF

SEQ ID NO: 601877 - protein, 16 aa, Homo sapiens
  CDR3 for alpha chain variable domain of TCR clone 300939 (TRAV23/DV6, TRAJ9)
CAASIGGNTGGSKTIL

SEQ ID NO: 601878 - protein, 14 aa, Homo sapiens
  CDR3 for beta chain variable domain of TCR clone 300939 (TRBV9, TRBJ2-7)
CASSVGVGSYEQYF

SEQ ID NO: 601879 - protein, 10 aa, Homo sapiens
  CDR3 for alpha chain variable domain of TCR clone 300940 (TRAV12-3, TRAJ34)
CAMSAAKLIF

SEQ ID NO: 601880 - protein, 15 aa, Homo sapiens
  CDR3 for beta chain variable domain of TCR clone 300940 (TRBV27, TRBJ2-1)
CASSNGGGSSNEQFF

SEQ ID NO: 601881 - protein, 14 aa, Homo sapiens
  CDR3 for alpha chain variable domain of TCR clone 300941 (TRAV12-1, TRAJ12)
CVVTRVDSSYKLIF

SEQ ID NO: 601882 - protein, 18 aa, Homo sapiens
  CDR3 for beta chain variable domain of TCR clone 300941 (TRBV20-1, TRBJ2-6)
CSAETTPTHGSGANVLTF

SEQ ID NO: 601883 - protein, 13 aa, Homo sapiens
  CDR3 for alpha chain variable domain of TCR clone 300942 (TRAV8-3, TRAJ43)
CAVGPDNNNDMRF

SEQ ID NO: 601884 - protein, 12 aa, Homo sapiens
  CDR3 for beta chain variable domain of TCR clone 300942 (TRBV7-2, TRBJ1-6)
CASSLSSSPHHF

SEQ ID NO: 601885 - protein, 17 aa, Homo sapiens
  CDR3 for alpha chain variable domain of TCR clone 300943 (TRAV13-2, TRAJ42)
CAEGASHYGGSQGNLIF

SEQ ID NO: 601886 - protein, 16 aa, Homo sapiens
  CDR3 for beta chain variable domain of TCR clone 300943 (TRBV12-5, TRBJ2-5)
CASGPRTSGNQETQYF

SEQ ID NO: 601887 - protein, 13 aa, Homo sapiens
  CDR3 for alpha chain variable domain of TCR clone 300944 (TRAV21, TRAJ27)
CAARPGNAGKSTF

SEQ ID NO: 601888 - protein, 15 aa, Homo sapiens
  CDR3 for beta chain variable domain of TCR clone 300944 (TRBV19, TRBJ2-2)
CASSPRTGWTGELFF

SEQ ID NO: 601889 - protein, 18 aa, Homo sapiens
  CDR3 for alpha chain variable domain of TCR clone 300945 (TRAV26-1, TRAJ23)
CIVRVGLEVWNQGGKRTF

SEQ ID NO: 601890 - protein, 15 aa, Homo sapiens
  CDR3 for beta chain variable domain of TCR clone 300945 (TRBV9, TRBJ1-6)
CASSVAGTGDSPLHF

SEQ ID NO: 601891 - protein, 15 aa, Homo sapiens
  CDR3 for alpha chain variable domain of TCR clone 300946 (TRAV29/DV5, TRAJ29)
CAASERSSGHTPLVF

SEQ ID NO: 601892 - protein, 17 aa, Homo sapiens
  CDR3 for beta chain variable domain of TCR clone 300946 (TRBV4-1, TRBJ1-4)
CASSQEGPRGVEEKLFF

SEQ ID NO: 601893 - protein, 10 aa, Homo sapiens
  CDR3 for alpha chain variable domain of TCR clone 300947 (TRAV12-3, TRAJ18)
CAMSEEDKTW

SEQ ID NO: 601894 - protein, 13 aa, Homo sapiens
  CDR3 for beta chain variable domain of TCR clone 300947 (TRBV15, TRBJ1-6)
CATSGGLNSPLHF

SEQ ID NO: 601895 - protein, 14 aa, Homo sapiens
  CDR3 for alpha chain variable domain of TCR clone 300948 (TRAV16, TRAJ13)
CALRLSGGYQKVTF

SEQ ID NO: 601896 - protein, 15 aa, Homo sapiens
  CDR3 for beta chain variable domain of TCR clone 300948 (TRBV6-1, TRBJ1-5)
CASSELREGNQPQHF

SEQ ID NO: 601897 - protein, 15 aa, Homo sapiens
  CDR3 for alpha chain variable domain of TCR clone 300949 (TRAV26-1, TRAJ22)
CIVRVSFWFCKSTDL

SEQ ID NO: 601898 - protein, 14 aa, Homo sapiens
  CDR3 for beta chain variable domain of TCR clone 300949 (TRBV4-1, TRBJ2-2)
CASSQAVNTGELFF

SEQ ID NO: 601899 - protein, 13 aa, Homo sapiens
  CDR3 for alpha chain variable domain of TCR clone 300950 (TRAV30, TRAJ49)
CGTESQPVTSSIL

SEQ ID NO: 601900 - protein, 12 aa, Homo sapiens
  CDR3 for beta chain variable domain of TCR clone 300950 (TRBV12-4, TRBJ2-1)
CASSKDRRGQFF

SEQ ID NO: 601901 - protein, 18 aa, Homo sapiens
  CDR3 for alpha chain variable domain of TCR clone 300951 (TRAV13-1, TRAJ52)
CAASKRSAGGTSYGKLTF

SEQ ID NO: 601902 - protein, 13 aa, Homo sapiens
  CDR3 for beta chain variable domain of TCR clone 300951 (TRBV19, TRBJ1-2)
CASSQGQVYGYTF

SEQ ID NO: 601903 - protein, 13 aa, Homo sapiens
  CDR3 for alpha chain variable domain of TCR clone 300952 (TRAV26-1, TRAJ33)
CIIRVDSNYQLIW

SEQ ID NO: 601904 - protein, 15 aa, Homo sapiens
  CDR3 for beta chain variable domain of TCR clone 300952 (TRBV7-2, TRBJ1-5)
CASSFSAGINQPQHF

SEQ ID NO: 601905 - protein, 11 aa, Homo sapiens
  CDR3 for alpha chain variable domain of TCR clone 300953 (TRAV3, TRAJ21)
CAVGNFNKPYF

SEQ ID NO: 601906 - protein, 16 aa, Homo sapiens
  CDR3 for beta chain variable domain of TCR clone 300953 (TRBV19, TRBJ2-1)
CASSKAGPSSYNEQFF

SEQ ID NO: 601907 - protein, 16 aa, Homo sapiens
  CDR3 for alpha chain variable domain of TCR clone 300954 (TRAV3, TRAJ3)
CAVRDRAKSSASKIIF

SEQ ID NO: 601908 - protein, 15 aa, Homo sapiens
  CDR3 for beta chain variable domain of TCR clone 300954 (TRBV27, TRBJ1-6)
CASSFDRGLGSPLHF

SEQ ID NO: 601909 - protein, 15 aa, Homo sapiens
  CDR3 for alpha chain variable domain of TCR clone 300955 (TRAV21, TRAJ53)
CATLNSGGSNYKLTF

SEQ ID NO: 601910 - protein, 11 aa, Homo sapiens
  CDR3 for beta chain variable domain of TCR clone 300955 (TRBV7-9, TRBJ2-3)
CASSGPDTQYF

SEQ ID NO: 601911 - protein, 14 aa, Homo sapiens
  CDR3 for alpha chain variable domain of TCR clone 300956 (TRAV9-2, TRAJ39)
CALYIYNAGNMLTF

SEQ ID NO: 601912 - protein, 16 aa, Homo sapiens
  CDR3 for beta chain variable domain of TCR clone 300956 (TRBV5-1, TRBJ2-3)
CASSLGLAVYTDTRYF

SEQ ID NO: 601913 - protein, 14 aa, Homo sapiens
  CDR3 for alpha chain variable domain of TCR clone 300957 (TRAV35, TRAJ33)
CAVSSQDSNYQLIW

SEQ ID NO: 601914 - protein, 15 aa, Homo sapiens
  CDR3 for beta chain variable domain of TCR clone 300957 (TRBV5-1, TRBJ1-4)
FAPAAWKDGNEKLFF

SEQ ID NO: 601915 - protein, 13 aa, Homo sapiens
  CDR3 for alpha chain variable domain of TCR clone 300958 (TRAV16, TRAJ31)
CALSAHNNARLMF

SEQ ID NO: 601916 - protein, 17 aa, Homo sapiens
  CDR3 for beta chain variable domain of TCR clone 300958 (TRBV12-4, TRBJ2-1)
RTSSPGLAGGRINEQFF

SEQ ID NO: 601917 - protein, 14 aa, Homo sapiens
  CDR3 for alpha chain variable domain of TCR clone 300959 (TRAV26-1, TRAJ49)
CIVRLTNTGKQFYF

SEQ ID NO: 601918 - protein, 16 aa, Homo sapiens
  CDR3 for beta chain variable domain of TCR clone 300959 (TRBV29-1, TRBJ2-7)
CSVEVVGTSGSYEQYF

SEQ ID NO: 601919 - protein, 15 aa, Homo sapiens
  CDR3 for alpha chain variable domain of TCR clone 300960 (TRAV13-2, TRAJ23)
CAERGFYNQGGRLIF

SEQ ID NO: 601920 - protein, 14 aa, Homo sapiens
  CDR3 for beta chain variable domain of TCR clone 300960 (TRBV4-1, TRBJ2-3)
CASSQDWSTDTQYF

SEQ ID NO: 601921 - protein, 19 aa, Homo sapiens
  CDR3 for alpha chain variable domain of TCR clone 300961 (TRAV1-2, TRAJ26)
CLLPLCCERPDNYGQSFVF

SEQ ID NO: 601922 - protein, 12 aa, Homo sapiens
  CDR3 for beta chain variable domain of TCR clone 300961 (TRBV7-9, TRBJ2-7)
CATRTDAYEQYF

SEQ ID NO: 601923 - protein, 10 aa, Homo sapiens
  CDR3 for alpha chain variable domain of TCR clone 300962 (TRAV23/DV6, TRAJ57)
CAASSTLSQG

SEQ ID NO: 601924 - protein, 13 aa, Homo sapiens
  CDR3 for beta chain variable domain of TCR clone 300962 (TRBV15, TRBJ1-6)
CATSGGLNSPLLF

SEQ ID NO: 601925 - protein, 13 aa, Homo sapiens
  CDR3 for alpha chain variable domain of TCR clone 300963 (TRAV20, TRAJ49)
CAVQARTGNQFSF

SEQ ID NO: 601926 - protein, 14 aa, Homo sapiens
  CDR3 for beta chain variable domain of TCR clone 300963 (TRBV7-2, TRBJ2-7)
CASSPKTSFYEQYF

SEQ ID NO: 601927 - protein, 19 aa, Homo sapiens
  CDR3 for alpha chain variable domain of TCR clone 300964 (TRAV17, TRAJ17)
CATDGRPGVIKAAGNKLTF

SEQ ID NO: 601928 - protein, 12 aa, Homo sapiens
  CDR3 for beta chain variable domain of TCR clone 300964 (TRBV12-4, TRBJ2-1)
CASSPGRNEQFF

SEQ ID NO: 601929 - protein, 16 aa, Homo sapiens
  CDR3 for alpha chain variable domain of TCR clone 300965 (TRAV1-2, TRAJ10)
CAVRGVLTGGGNRLTL

SEQ ID NO: 601930 - protein, 12 aa, Homo sapiens
  CDR3 for beta chain variable domain of TCR clone 300965 (TRBV7-8, TRBJ2-7)
CASSLGDREQYF

SEQ ID NO: 601931 - protein, 15 aa, Homo sapiens
  CDR3 for alpha chain variable domain of TCR clone 300966 (TRAV17, TRAJ16)
CATALRFSDGQRLLL

SEQ ID NO: 601932 - protein, 12 aa, Homo sapiens
  CDR3 for beta chain variable domain of TCR clone 300966 (TRBV2, TRBJ2-7)
CASSDPDYEQYF

SEQ ID NO: 601933 - protein, 17 aa, Homo sapiens
  CDR3 for alpha chain variable domain of TCR clone 300967 (TRAV23/DV6, TRAJ57)
CAASSTLSQGGSEKLVF

SEQ ID NO: 601934 - protein, 14 aa, Homo sapiens
  CDR3 for beta chain variable domain of TCR clone 300967 (TRBV25-1, TRBJ1-1)
CASTLLGGSPDAFF

SEQ ID NO: 601935 - protein, 10 aa, Homo sapiens
  CDR3 for alpha chain variable domain of TCR clone 300968 (TRAV23/DV6, TRAJ18)
CAARYRGPTL

SEQ ID NO: 601936 - protein, 13 aa, Homo sapiens
  CDR3 for beta chain variable domain of TCR clone 300968 (TRBV7-2, TRBJ2-7)
CASSSPSGSEQYF

SEQ ID NO: 601937 - protein, 13 aa, Homo sapiens
  CDR3 for alpha chain variable domain of TCR clone 300969 (TRAV27, TRAJ40)
CAGPPSGTHKYIF

SEQ ID NO: 601938 - protein, 14 aa, Homo sapiens
  CDR3 for beta chain variable domain of TCR clone 300969 (TRBV23-1, TRBJ2-5)
CASSFLRSQETQYF

SEQ ID NO: 601939 - protein, 12 aa, Homo sapiens
  CDR3 for alpha chain variable domain of TCR clone 300970 (TRAV2, TRAJ9)
CAVGAGGFKTIF

SEQ ID NO: 601940 - protein, 15 aa, Homo sapiens
  CDR3 for beta chain variable domain of TCR clone 300970 (TRBV20-1, TRBJ1-5)
CSATSDRGLGQPQHF

SEQ ID NO: 601941 - protein, 13 aa, Homo sapiens
  CDR3 for alpha chain variable domain of TCR clone 300971 (TRAV22, TRAJ29)
CAVGGSGNTPLVF

SEQ ID NO: 601942 - protein, 13 aa, Homo sapiens
  CDR3 for beta chain variable domain of TCR clone 300971 (TRBV11-2, TRBJ2-1)
CASSLGLAGGRFF

SEQ ID NO: 601943 - protein, 13 aa, Homo sapiens
  CDR3 for alpha chain variable domain of TCR clone 300972 (TRAV3, TRAJ20)
CAVRDGGGYKLSF

SEQ ID NO: 601944 - protein, 16 aa, Homo sapiens
  CDR3 for beta chain variable domain of TCR clone 300972 (TRBV4-1, TRBJ2-5)
CASSQTSGGPLETQYF

SEQ ID NO: 601945 - protein, 11 aa, Homo sapiens
  CDR3 for alpha chain variable domain of TCR clone 300973 (TRAV2, TRAJ33)
CAVDSNYQLIW

SEQ ID NO: 601946 - protein, 14 aa, Homo sapiens
  CDR3 for beta chain variable domain of TCR clone 300973 (TRBV11-2, TRBJ2-3)
RASSRLARTDTQYF

SEQ ID NO: 601947 - protein, 18 aa, Homo sapiens
  CDR3 for alpha chain variable domain of TCR clone 300974 (TRAV20, TRAJ4)
CAVQPYYMFSGGYNKLIF

SEQ ID NO: 601948 - protein, 13 aa, Homo sapiens
  CDR3 for beta chain variable domain of TCR clone 300974 (TRBV19, TRBJ2-3)
CATCDKITDTQYF

SEQ ID NO: 601949 - protein, 14 aa, Homo sapiens
  CDR3 for alpha chain variable domain of TCR clone 300975 (TRAV27, TRAJ22)
CAGLPSGSARQLTF

SEQ ID NO: 601950 - protein, 12 aa, Homo sapiens
  CDR3 for beta chain variable domain of TCR clone 300975 (TRBV28, TRBJ1-2)
CASSRSGYGYTF

SEQ ID NO: 601951 - protein, 13 aa, Homo sapiens
  CDR3 for alpha chain variable domain of TCR clone 300976 (TRAV12-2, TRAJ40)
CVVPTSGTYKYIF

SEQ ID NO: 601952 - protein, 16 aa, Homo sapiens
  CDR3 for beta chain variable domain of TCR clone 300976 (TRBV7-9, TRBJ1-2)
CASSLGFSSGEDGYTF

SEQ ID NO: 601953 - protein, 11 aa, Homo sapiens
  CDR3 for alpha chain variable domain of TCR clone 300977 (TRAV2, TRAJ23)
CAVETRGKLIF

SEQ ID NO: 601954 - protein, 14 aa, Homo sapiens
  CDR3 for beta chain variable domain of TCR clone 300977 (TRBV5-1, TRBJ2-2)
CASSLGGGSGELFF

SEQ ID NO: 601955 - protein, 14 aa, Homo sapiens
  CDR3 for alpha chain variable domain of TCR clone 300978 (TRAV26-1, TRAJ38)
CIADNAGNNRKLLW

SEQ ID NO: 601956 - protein, 12 aa, Homo sapiens
  CDR3 for beta chain variable domain of TCR clone 300978 (TRBV5-1, TRBJ2-7)
CASSFRGYEQYF

SEQ ID NO: 601957 - protein, 11 aa, Homo sapiens
  CDR3 for alpha chain variable domain of TCR clone 300979 (TRAV12-1, TRAJ43)
CVGIRNNDMRF

SEQ ID NO: 601958 - protein, 16 aa, Homo sapiens
  CDR3 for beta chain variable domain of TCR clone 300979 (TRBV14, TRBJ2-1)
CASSPRLAGEGNEQFF

SEQ ID NO: 601959 - protein, 17 aa, Homo sapiens
  CDR3 for alpha chain variable domain of TCR clone 300980 (TRAV8-2, )
CVVNIQNPDPAVYQLRH

SEQ ID NO: 601960 - protein, 14 aa, Homo sapiens
  CDR3 for beta chain variable domain of TCR clone 300980 (TRBV7-9, TRBJ2-5)
CASSLVGGEETQYF

SEQ ID NO: 601961 - protein, 13 aa, Homo sapiens
  CDR3 for alpha chain variable domain of TCR clone 300981 (TRAV17, TRAJ5)
CAPVDTGRRALTF

SEQ ID NO: 601962 - protein, 16 aa, Homo sapiens
  CDR3 for beta chain variable domain of TCR clone 300981 (TRBV27, TRBJ2-7)
CASSSERRDSAYEQYF

SEQ ID NO: 601963 - protein, 11 aa, Homo sapiens
  CDR3 for alpha chain variable domain of TCR clone 300982 (TRAV27, TRAJ45)
CAGAQEEVLTD

SEQ ID NO: 601964 - protein, 13 aa, Homo sapiens
  CDR3 for beta chain variable domain of TCR clone 300982 (TRBV7-7, TRBJ2-5)
CSSSRSGQETQYF

SEQ ID NO: 601965 - protein, 13 aa, Homo sapiens
  CDR3 for alpha chain variable domain of TCR clone 300983 (TRAV2, TRAJ39)
TTVHNNAGNMLTF

SEQ ID NO: 601966 - protein, 15 aa, Homo sapiens
  CDR3 for beta chain variable domain of TCR clone 300983 (TRBV24-1, TRBJ2-3)
CHQWIPGQDTDTQYF

SEQ ID NO: 601967 - protein, 17 aa, Homo sapiens
  CDR3 for alpha chain variable domain of TCR clone 300984 (TRAV12-2, TRAJ4)
CAVNVRPVSGGYNKLIL

SEQ ID NO: 601968 - protein, 17 aa, Homo sapiens
  CDR3 for beta chain variable domain of TCR clone 300984 (TRBV6-3, TRBJ2-1)
CASSYSPGTRGLDEQFF

SEQ ID NO: 601969 - protein, 15 aa, Homo sapiens
  CDR3 for alpha chain variable domain of TCR clone 300985 (TRAV21, TRAJ24)
CAARSSTASWGKLQF

SEQ ID NO: 601970 - protein, 13 aa, Homo sapiens
  CDR3 for beta chain variable domain of TCR clone 300985 (TRBV7-9, TRBJ2-3)
CASSPGSTDTQYF

SEQ ID NO: 601971 - protein, 16 aa, Homo sapiens
  CDR3 for alpha chain variable domain of TCR clone 300986 (TRAV8-3, TRAJ44)
CAVGTLMTGTASKLTF

SEQ ID NO: 601972 - protein, 15 aa, Homo sapiens
  CDR3 for beta chain variable domain of TCR clone 300986 (TRBV5-1, TRBJ1-5)
CASSLLGGRNQPQHF

SEQ ID NO: 601973 - protein, 15 aa, Homo sapiens
  CDR3 for alpha chain variable domain of TCR clone 300987 (TRAV12-1, TRAJ44)
CVVFVNTGTASKLAF

SEQ ID NO: 601974 - protein, 17 aa, Homo sapiens
  CDR3 for beta chain variable domain of TCR clone 300987 (TRBV13, TRBJ2-3)
CASSLSRVAGGRNTQYF

SEQ ID NO: 601975 - protein, 11 aa, Homo sapiens
  CDR3 for alpha chain variable domain of TCR clone 300988 (TRAV3, TRAJ17)
PRGAAGNKLTF

SEQ ID NO: 601976 - protein, 13 aa, Homo sapiens
  CDR3 for beta chain variable domain of TCR clone 300988 (TRBV19, TRBJ1-2)
CASSVPGQDGYTF

SEQ ID NO: 601977 - protein, 14 aa, Homo sapiens
  CDR3 for alpha chain variable domain of TCR clone 300989 (TRAV1-2, TRAJ16)
CAVNRFSDGQKLLF

SEQ ID NO: 601978 - protein, 17 aa, Homo sapiens
  CDR3 for beta chain variable domain of TCR clone 300989 (TRBV7-6, TRBJ2-2)
CASSFTSGADNTGELFF

SEQ ID NO: 601979 - protein, 13 aa, Homo sapiens
  CDR3 for alpha chain variable domain of TCR clone 300990 (TRAV8-3, TRAJ6)
CAVEKGGSYIPTC

SEQ ID NO: 601980 - protein, 15 aa, Homo sapiens
  CDR3 for beta chain variable domain of TCR clone 300990 (TRBV28, TRBJ2-5)
CASSADRGRGETQYF

SEQ ID NO: 601981 - protein, 10 aa, Homo sapiens
  CDR3 for alpha chain variable domain of TCR clone 300991 (TRAV17, TRAJ36)
CATVAGNLFF

SEQ ID NO: 601982 - protein, 15 aa, Homo sapiens
  CDR3 for beta chain variable domain of TCR clone 300991 (TRBV28, TRBJ2-5)
CASSPGQGSIETQYF

SEQ ID NO: 601983 - protein, 13 aa, Homo sapiens
  CDR3 for alpha chain variable domain of TCR clone 300992 (TRAV1-1, TRAJ9)
CAAKNTGGFKTIF

SEQ ID NO: 601984 - protein, 14 aa, Homo sapiens
  CDR3 for beta chain variable domain of TCR clone 300992 (TRBV20-1, TRBJ2-1)
YSAQIGGSANEQYF

SEQ ID NO: 601985 - protein, 14 aa, Homo sapiens
  CDR3 for alpha chain variable domain of TCR clone 300993 (TRAV1-2, TRAJ16)
CAVNRFSDGLKLLF

SEQ ID NO: 601986 - protein, 14 aa, Homo sapiens
  CDR3 for beta chain variable domain of TCR clone 300993 (TRBV7-2, TRBJ2-7)
CASSLYPGRYEQYF

SEQ ID NO: 601987 - protein, 19 aa, Homo sapiens
  CDR3 for alpha chain variable domain of TCR clone 300994 (TRAV2, TRAJ20)
ILQVREADAAVYRDCRLSF

SEQ ID NO: 601988 - protein, 13 aa, Homo sapiens
  CDR3 for beta chain variable domain of TCR clone 300994 (TRBV15, TRBJ1-6)
CATSGGLNSPLHF

SEQ ID NO: 601989 - protein, 11 aa, Homo sapiens
  CDR3 for alpha chain variable domain of TCR clone 300995 (TRAV2, TRAJ33)
CAVESNYQLIW

SEQ ID NO: 601990 - protein, 19 aa, Homo sapiens
  CDR3 for beta chain variable domain of TCR clone 300995 (TRBV5-1, TRBJ2-6)
CASSRGVGRAFGGANVLTF

SEQ ID NO: 601991 - protein, 18 aa, Homo sapiens
  CDR3 for alpha chain variable domain of TCR clone 300996 (TRAV13-1, TRAJ52)
CAASKRSAGGTSYGKLTF

SEQ ID NO: 601992 - protein, 16 aa, Homo sapiens
  CDR3 for beta chain variable domain of TCR clone 300996 (TRBV20-1, TRBJ1-2)
CSASMGQGVANYGYTF

SEQ ID NO: 601993 - protein, 14 aa, Homo sapiens
  CDR3 for alpha chain variable domain of TCR clone 300997 (TRAV12-3, TRAJ12)
CAMSEVDSSYKLIF

SEQ ID NO: 601994 - protein, 12 aa, Homo sapiens
  CDR3 for beta chain variable domain of TCR clone 300997 (TRBV18, TRBJ1-4)
CASSPSGEKLFF

SEQ ID NO: 601995 - protein, 12 aa, Homo sapiens
  CDR3 for alpha chain variable domain of TCR clone 300998 (TRAV12-3, TRAJ5)
CAMDTGRRALTF

SEQ ID NO: 601996 - protein, 15 aa, Homo sapiens
  CDR3 for beta chain variable domain of TCR clone 300998 (TRBV2, TRBJ2-1)
CASSEEREGDNEQFF

SEQ ID NO: 601997 - protein, 23 aa, Homo sapiens
  CDR3 for alpha chain variable domain of TCR clone 300999 (TRAV26-1, )
CIADNAGNNNIQNPDPAVYQLRD

SEQ ID NO: 601998 - protein, 13 aa, Homo sapiens
  CDR3 for beta chain variable domain of TCR clone 300999 (TRBV20-1, TRBJ1-1)
CSARGGGTTEAFF

SEQ ID NO: 601999 - protein, 14 aa, Homo sapiens
  CDR3 for alpha chain variable domain of TCR clone 301000 (TRAV29/DV5, TRAJ36)
CSARRKTGANNFFF

SEQ ID NO: 602000 - protein, 14 aa, Homo sapiens
  CDR3 for beta chain variable domain of TCR clone 301000 (TRBV12-5, TRBJ2-5)
CASGSRTHQETQYF

SEQ ID NO: 602001 - protein, 14 aa, Homo sapiens
  CDR3 for alpha chain variable domain of TCR clone 301001 (TRAV8-3, TRAJ4)
CAVGAADGYNKLIF

SEQ ID NO: 602002 - protein, 13 aa, Homo sapiens
  CDR3 for beta chain variable domain of TCR clone 301001 (TRBV7-9, TRBJ1-2)
CASSLKQNYGYTF

SEQ ID NO: 602003 - protein, 14 aa, Homo sapiens
  CDR3 for alpha chain variable domain of TCR clone 301002 (TRAV36/DV7, TRAJ44)
CCGANTGTASKLTF

SEQ ID NO: 602004 - protein, 15 aa, Homo sapiens
  CDR3 for beta chain variable domain of TCR clone 301002 (TRBV11-1, TRBJ2-1)
CASSLFRDTYNEQFF

SEQ ID NO: 602005 - protein, 16 aa, Homo sapiens
  CDR3 for alpha chain variable domain of TCR clone 301003 (TRAV30, TRAJ24)
CGTEIVDADSWGKFQF

SEQ ID NO: 602006 - protein, 14 aa, Homo sapiens
  CDR3 for beta chain variable domain of TCR clone 301003 (TRBV7-3, TRBJ1-1)
CASSPTGGVSEAFF

SEQ ID NO: 602007 - protein, 15 aa, Homo sapiens
  CDR3 for alpha chain variable domain of TCR clone 301004 (TRAV27, TRAJ33)
GAGADIMDSNDQLIW

SEQ ID NO: 602008 - protein, 13 aa, Homo sapiens
  CDR3 for beta chain variable domain of TCR clone 301004 (TRBV28, TRBJ1-2)
CASSLQGRGGYTF

SEQ ID NO: 602009 - protein, 13 aa, Homo sapiens
  CDR3 for alpha chain variable domain of TCR clone 301005 (TRAV16, TRAJ54)
CALMVQGAQKLVF

SEQ ID NO: 602010 - protein, 12 aa, Homo sapiens
  CDR3 for beta chain variable domain of TCR clone 301005 (TRBV18, TRBJ2-7)
CASSTAMVEQYF

SEQ ID NO: 602011 - protein, 14 aa, Homo sapiens
  CDR3 for alpha chain variable domain of TCR clone 301006 (TRAV16, TRAJ26)
CITVLSAYGQNFDF

SEQ ID NO: 602012 - protein, 14 aa, Homo sapiens
  CDR3 for beta chain variable domain of TCR clone 301006 (TRBV7-2, TRBJ2-7)
CASRSQGAAYEQYF

SEQ ID NO: 602013 - protein, 15 aa, Homo sapiens
  CDR3 for alpha chain variable domain of TCR clone 301007 (TRAV12-3, TRAJ6)
CAMSATTGGSNIPTF

SEQ ID NO: 602014 - protein, 16 aa, Homo sapiens
  CDR3 for beta chain variable domain of TCR clone 301007 (TRBV20-1, TRBJ1-2)
CSASRGQGVANYGYTF

SEQ ID NO: 602015 - protein, 13 aa, Homo sapiens
  CDR3 for alpha chain variable domain of TCR clone 301008 (TRAV1-2, TRAJ12)
CAVSMDSSYRLIF

SEQ ID NO: 602016 - protein, 15 aa, Homo sapiens
  CDR3 for beta chain variable domain of TCR clone 301008 (TRBV27, TRBJ2-5)
CASSLIPSGGETQYF

SEQ ID NO: 602017 - protein, 12 aa, Homo sapiens
  CDR3 for alpha chain variable domain of TCR clone 301009 (TRAV8-3, TRAJ26)
CAGDNYGQNFVF

SEQ ID NO: 602018 - protein, 13 aa, Homo sapiens
  CDR3 for beta chain variable domain of TCR clone 301009 (TRBV4-1, TRBJ2-7)
CASSQGQAYEQYF

SEQ ID NO: 602019 - protein, 16 aa, Homo sapiens
  CDR3 for alpha chain variable domain of TCR clone 301010 (TRAV12-2, TRAJ10)
CAVNRVLTGGGNKPTF

SEQ ID NO: 602020 - protein, 12 aa, Homo sapiens
  CDR3 for beta chain variable domain of TCR clone 301010 (TRBV28, TRBJ2-7)
CASSFSSYEQYF

SEQ ID NO: 602021 - protein, 14 aa, Homo sapiens
  CDR3 for alpha chain variable domain of TCR clone 301011 (TRAV1-2, TRAJ16)
CAVNRFSDGQKRRF

SEQ ID NO: 602022 - protein, 18 aa, Homo sapiens
  CDR3 for beta chain variable domain of TCR clone 301011 (TRBV11-2, TRBJ2-3)
CASSLGGASRGAPSTQYF

SEQ ID NO: 602023 - protein, 14 aa, Homo sapiens
  CDR3 for alpha chain variable domain of TCR clone 301012 (TRAV16, TRAJ15)
CALRPKQAGTALIF

SEQ ID NO: 602024 - protein, 16 aa, Homo sapiens
  CDR3 for beta chain variable domain of TCR clone 301012 (TRBV6-5, TRBJ2-2)
CASSYGRVPDTGELFF

SEQ ID NO: 602025 - protein, 16 aa, Homo sapiens
  CDR3 for alpha chain variable domain of TCR clone 301013 (TRAV23/DV6, TRAJ9)
CAASIGGNTGGFKTIF

SEQ ID NO: 602026 - protein, 16 aa, Homo sapiens
  CDR3 for beta chain variable domain of TCR clone 301013 (TRBV24-1, TRBJ2-3)
CATSDPGTGATDTQYF

SEQ ID NO: 602027 - protein, 17 aa, Homo sapiens
  CDR3 for alpha chain variable domain of TCR clone 301014 (TRAV3, TRAJ6)
CAVRDGPRAGGSYIPTF

SEQ ID NO: 602028 - protein, 20 aa, Homo sapiens
  CDR3 for beta chain variable domain of TCR clone 301014 (TRBV28, TRBJ2-1)
CGSTPIGRSPGLAGGNEQFF

SEQ ID NO: 602029 - protein, 15 aa, Homo sapiens
  CDR3 for alpha chain variable domain of TCR clone 301015 (TRAV29/DV5, TRAJ28)
CAAGYSGAGSYQLTF

SEQ ID NO: 602030 - protein, 14 aa, Homo sapiens
  CDR3 for beta chain variable domain of TCR clone 301015 (TRBV4-1, TRBJ2-2)
CASSQAVNTGELFF

SEQ ID NO: 602031 - protein, 15 aa, Homo sapiens
  CDR3 for alpha chain variable domain of TCR clone 301016 (TRAV3, TRAJ20)
CAVRDIKLSDYKLSF

SEQ ID NO: 602032 - protein, 13 aa, Homo sapiens
  CDR3 for beta chain variable domain of TCR clone 301016 (TRBV18, TRBJ2-7)
CSSPRGGAYEQYF

SEQ ID NO: 602033 - protein, 16 aa, Homo sapiens
  CDR3 for alpha chain variable domain of TCR clone 301017 (TRAV21, TRAJ52)
CAVTNAGGTSYGKLTF

SEQ ID NO: 602034 - protein, 11 aa, Homo sapiens
  CDR3 for beta chain variable domain of TCR clone 301017 (TRBV2, TRBJ1-1)
CASRERTEAFF

SEQ ID NO: 602035 - protein, 11 aa, Homo sapiens
  CDR3 for alpha chain variable domain of TCR clone 301018 (TRAV8-3, TRAJ42)
NYGGSQGNLIF

SEQ ID NO: 602036 - protein, 14 aa, Homo sapiens
  CDR3 for beta chain variable domain of TCR clone 301018 (TRBV7-3, TRBJ1-1)
CASSLKGGNTEAFF

SEQ ID NO: 602037 - protein, 11 aa, Homo sapiens
  CDR3 for alpha chain variable domain of TCR clone 301019 (TRAV3, TRAJ17)
PRGAADNTLTF

SEQ ID NO: 602038 - protein, 16 aa, Homo sapiens
  CDR3 for beta chain variable domain of TCR clone 301019 (TRBV7-6, TRBJ2-1)
CASSAPGPSSYNEQFF

SEQ ID NO: 602039 - protein, 12 aa, Homo sapiens
  CDR3 for alpha chain variable domain of TCR clone 301020 (TRAV21, TRAJ29)
CAVTSVNTPLVF

SEQ ID NO: 602040 - protein, 15 aa, Homo sapiens
  CDR3 for beta chain variable domain of TCR clone 301020 (TRBV12-4, TRBJ1-2)
CASRLGVAGNYGYTF

SEQ ID NO: 602041 - protein, 13 aa, Homo sapiens
  CDR3 for alpha chain variable domain of TCR clone 301021 (TRAV26-2, TRAJ57)
CILSRGGSEKLVF

SEQ ID NO: 602042 - protein, 12 aa, Homo sapiens
  CDR3 for beta chain variable domain of TCR clone 301021 (TRBV7-9, TRBJ2-7)
CASSIKREEQYF

SEQ ID NO: 602043 - protein, 15 aa, Homo sapiens
  CDR3 for alpha chain variable domain of TCR clone 301022 (TRAV21, TRAJ43)
CAVRPSKAVFDDMRF

SEQ ID NO: 602044 - protein, 15 aa, Homo sapiens
  CDR3 for beta chain variable domain of TCR clone 301022 (TRBV5-1, TRBJ2-7)
CASSLNGGPAREQYF

SEQ ID NO: 602045 - protein, 12 aa, Homo sapiens
  CDR3 for alpha chain variable domain of TCR clone 301023 (TRAV17, TRAJ20)
CATDGDDYKLSF

SEQ ID NO: 602046 - protein, 16 aa, Homo sapiens
  CDR3 for beta chain variable domain of TCR clone 301023 (TRBV2, TRBJ2-3)
CASSTSVEGVTDTQYF

SEQ ID NO: 602047 - protein, 11 aa, Homo sapiens
  CDR3 for alpha chain variable domain of TCR clone 301024 (TRAV22, TRAJ30)
CAGNRDDKIIF

SEQ ID NO: 602048 - protein, 15 aa, Homo sapiens
  CDR3 for beta chain variable domain of TCR clone 301024 (TRBV6-1, TRBJ2-5)
CASSEGWGIQETQYF

SEQ ID NO: 602049 - protein, 15 aa, Homo sapiens
  CDR3 for alpha chain variable domain of TCR clone 301025 (TRAV17, TRAJ56)
CATEPFTGANSKLTF

SEQ ID NO: 602050 - protein, 15 aa, Homo sapiens
  CDR3 for beta chain variable domain of TCR clone 301025 (TRBV7-2, TRBJ2-1)
CASSLVGSSYNEQFF

SEQ ID NO: 602051 - protein, 10 aa, Homo sapiens
  CDR3 for alpha chain variable domain of TCR clone 301026 (TRAV23/DV6, TRAJ57)
CAASSTLSQG

SEQ ID NO: 602052 - protein, 14 aa, Homo sapiens
  CDR3 for beta chain variable domain of TCR clone 301026 (TRBV5-7, TRBJ1-1)
CASTHLGGNTEAFF

SEQ ID NO: 602053 - protein, 14 aa, Homo sapiens
  CDR3 for alpha chain variable domain of TCR clone 301027 (TRAV12-2, TRAJ40)
VAVKIPSGTYKYIF

SEQ ID NO: 602054 - protein, 14 aa, Homo sapiens
  CDR3 for beta chain variable domain of TCR clone 301027 (TRBV4-1, TRBJ2-2)
CASSQAVNTGELFF

SEQ ID NO: 602055 - protein, 14 aa, Homo sapiens
  CDR3 for alpha chain variable domain of TCR clone 301028 (TRAV12-2, TRAJ17)
CAVLFKAAGNKLTF

SEQ ID NO: 602056 - protein, 14 aa, Homo sapiens
  CDR3 for beta chain variable domain of TCR clone 301028 (TRBV12-4, TRBJ1-1)
CASSLGTGGTEASF

SEQ ID NO: 602057 - protein, 15 aa, Homo sapiens
  CDR3 for alpha chain variable domain of TCR clone 301029 (TRAV21, TRAJ24)
CAARSSTASWGKLQF

SEQ ID NO: 602058 - protein, 15 aa, Homo sapiens
  CDR3 for beta chain variable domain of TCR clone 301029 (TRBV4-1, TRBJ2-7)
CASSQNTGRLYEQYF

SEQ ID NO: 602059 - protein, 13 aa, Homo sapiens
  CDR3 for alpha chain variable domain of TCR clone 301030 (TRAV1-2, TRAJ9)
CAALNTGGFKTIF

SEQ ID NO: 602060 - protein, 17 aa, Homo sapiens
  CDR3 for beta chain variable domain of TCR clone 301030 (TRBV7-9, TRBJ2-3)
CASSLEEAGAYPDTQYF

SEQ ID NO: 602061 - protein, 20 aa, Homo sapiens
  CDR3 for alpha chain variable domain of TCR clone 301031 (TRAV26-1, TRAJ38)
CIADNAGNNHIQNPDPAVHQ

SEQ ID NO: 602062 - protein, 13 aa, Homo sapiens
  CDR3 for beta chain variable domain of TCR clone 301031 (TRBV20-1, TRBJ1-1)
CSARGGGNTEAFF

SEQ ID NO: 602063 - protein, 10 aa, Homo sapiens
  CDR3 for alpha chain variable domain of TCR clone 301032 (TRAV8-4, TRAJ43)
CAVSADDMRF

SEQ ID NO: 602064 - protein, 15 aa, Homo sapiens
  CDR3 for beta chain variable domain of TCR clone 301032 (TRBV5-1, TRBJ2-3)
CASSVTSESTDMQYF

SEQ ID NO: 602065 - protein, 13 aa, Homo sapiens
  CDR3 for alpha chain variable domain of TCR clone 301033 (TRAV12-2, TRAJ34)
CAVRGYNTDKLLF

SEQ ID NO: 602066 - protein, 15 aa, Homo sapiens
  CDR3 for beta chain variable domain of TCR clone 301033 (TRBV28, TRBJ2-1)
CASRTGAGVIARQFF

SEQ ID NO: 602067 - protein, 14 aa, Homo sapiens
  CDR3 for alpha chain variable domain of TCR clone 301034 (TRAV38-1, TRAJ29)
RAFITPSGNTPLVF

SEQ ID NO: 602068 - protein, 14 aa, Homo sapiens
  CDR3 for beta chain variable domain of TCR clone 301034 (TRBV18, TRBJ2-7)
CASSPRGGAYEQYF

SEQ ID NO: 602069 - protein, 16 aa, Homo sapiens
  CDR3 for alpha chain variable domain of TCR clone 301035 (TRAV3, TRAJ10)
CAVRDMRAGGGNKIPF

SEQ ID NO: 602070 - protein, 14 aa, Homo sapiens
  CDR3 for beta chain variable domain of TCR clone 301035 (TRBV7-2, TRBJ2-7)
CASSPKTSFYEQYF

SEQ ID NO: 602071 - protein, 12 aa, Homo sapiens
  CDR3 for alpha chain variable domain of TCR clone 301036 (TRAV16, TRAJ57)
CALEGGSEKLVF

SEQ ID NO: 602072 - protein, 12 aa, Homo sapiens
  CDR3 for beta chain variable domain of TCR clone 301036 (TRBV28, TRBJ2-7)
CASSGRPYKQYF

SEQ ID NO: 602073 - protein, 15 aa, Homo sapiens
  CDR3 for alpha chain variable domain of TCR clone 301037 (TRAV4, TRAJ39)
CLVGPNNNAGNMLTF

SEQ ID NO: 602074 - protein, 15 aa, Homo sapiens
  CDR3 for beta chain variable domain of TCR clone 301037 (TRBV11-2, TRBJ2-2)
CASRGLAANTGELFF

SEQ ID NO: 602075 - protein, 16 aa, Homo sapiens
  CDR3 for alpha chain variable domain of TCR clone 301038 (TRAV12-3, TRAJ53)
CAMSPGSGGSHYKLSF

SEQ ID NO: 602076 - protein, 11 aa, Homo sapiens
  CDR3 for beta chain variable domain of TCR clone 301038 (TRBV29-1, TRBJ2-5)
CSEDRTGTQYF

SEQ ID NO: 602077 - protein, 14 aa, Homo sapiens
  CDR3 for alpha chain variable domain of TCR clone 301039 (TRAV2, TRAJ3)
CAVEDNSSASKIIF

SEQ ID NO: 602078 - protein, 14 aa, Homo sapiens
  CDR3 for beta chain variable domain of TCR clone 301039 (TRBV6-3, TRBJ2-7)
CASRISGGPGEQYL

SEQ ID NO: 602079 - protein, 13 aa, Homo sapiens
  CDR3 for alpha chain variable domain of TCR clone 301040 (TRAV12-1, TRAJ13)
CVVALLGYQKVTF

SEQ ID NO: 602080 - protein, 13 aa, Homo sapiens
  CDR3 for beta chain variable domain of TCR clone 301040 (TRBV20-1, TRBJ2-5)
CSAILTGQETEYF

SEQ ID NO: 602081 - protein, 14 aa, Homo sapiens
  CDR3 for alpha chain variable domain of TCR clone 301041 (TRAV12-2, TRAJ13)
CAVKKTGGYQKVTF

SEQ ID NO: 602082 - protein, 15 aa, Homo sapiens
  CDR3 for beta chain variable domain of TCR clone 301041 (TRBV27, TRBJ2-1)
CASCNGGGSSNEQFF

SEQ ID NO: 602083 - protein, 16 aa, Homo sapiens
  CDR3 for alpha chain variable domain of TCR clone 301042 (TRAV26-2, TRAJ57)
CILRDVGSGGSEKLVF

SEQ ID NO: 602084 - protein, 13 aa, Homo sapiens
  CDR3 for beta chain variable domain of TCR clone 301042 (TRBV18, TRBJ2-3)
CASSPGVSDTQYF

SEQ ID NO: 602085 - protein, 20 aa, Homo sapiens
  CDR3 for alpha chain variable domain of TCR clone 301043 (TRAV1-2, TRAJ34)
LLKELQMKDSASPNTDKLIF

SEQ ID NO: 602086 - protein, 14 aa, Homo sapiens
  CDR3 for beta chain variable domain of TCR clone 301043 (TRBV2, TRBJ2-7)
CASSLTSGGYEQYF

SEQ ID NO: 602087 - protein, 13 aa, Homo sapiens
  CDR3 for alpha chain variable domain of TCR clone 301044 (TRAV8-3, TRAJ42)
CARYGGSQGNLIV

SEQ ID NO: 602088 - protein, 14 aa, Homo sapiens
  CDR3 for beta chain variable domain of TCR clone 301044 (TRBV20-1, TRBJ2-1)
CSALDRGTYNEQFF

SEQ ID NO: 602089 - protein, 14 aa, Homo sapiens
  CDR3 for alpha chain variable domain of TCR clone 301045 (TRAV12-2, TRAJ13)
CAVKKTGGYQKVTF

SEQ ID NO: 602090 - protein, 14 aa, Homo sapiens
  CDR3 for beta chain variable domain of TCR clone 301045 (TRBV4-2, TRBJ2-1)
CARGLDRAYNEQFF

SEQ ID NO: 602091 - protein, 14 aa, Homo sapiens
  CDR3 for alpha chain variable domain of TCR clone 301046 (TRAV8-3, TRAJ4)
CAVGAAGGYNKLIF

SEQ ID NO: 602092 - protein, 15 aa, Homo sapiens
  CDR3 for beta chain variable domain of TCR clone 301046 (TRBV20-1, TRBJ2-7)
CSAESGTSGAYEQYF

SEQ ID NO: 602093 - protein, 17 aa, Homo sapiens
  CDR3 for alpha chain variable domain of TCR clone 301047 (TRAV3, TRAJ6)
CAVRDGPRAGGSYMPTF

SEQ ID NO: 602094 - protein, 14 aa, Homo sapiens
  CDR3 for beta chain variable domain of TCR clone 301047 (TRBV7-2, TRBJ2-7)
CASSPKTGFYEQYF

SEQ ID NO: 602095 - protein, 13 aa, Homo sapiens
  CDR3 for alpha chain variable domain of TCR clone 301048 (TRAV13-1, TRAJ6)
CAAIKGGSYIPTF

SEQ ID NO: 602096 - protein, 14 aa, Homo sapiens
  CDR3 for beta chain variable domain of TCR clone 301048 (TRBV7-2, TRBJ2-1)
CASSLGVGYNEQFF

SEQ ID NO: 602097 - protein, 14 aa, Homo sapiens
  CDR3 for alpha chain variable domain of TCR clone 301049 (TRAV26-1, TRAJ39)
CVVRGSRAGNMLTF

SEQ ID NO: 602098 - protein, 15 aa, Homo sapiens
  CDR3 for beta chain variable domain of TCR clone 301049 (TRBV7-9, TRBJ1-5)
CPSSQGHQPNQPQHF

SEQ ID NO: 602099 - protein, 15 aa, Homo sapiens
  CDR3 for alpha chain variable domain of TCR clone 301050 (TRAV4, TRAJ39)
CLVGPNNNAGNMLTF

SEQ ID NO: 602100 - protein, 17 aa, Homo sapiens
  CDR3 for beta chain variable domain of TCR clone 301050 (TRBV4-1, TRBJ1-4)
CASSQEGPRGVEEKLFF

SEQ ID NO: 602101 - protein, 15 aa, Homo sapiens
  CDR3 for alpha chain variable domain of TCR clone 301051 (TRAV3, TRAJ5)
CAVRGLNTGRRALTF

SEQ ID NO: 602102 - protein, 13 aa, Homo sapiens
  CDR3 for beta chain variable domain of TCR clone 301051 (TRBV12-4, TRBJ2-7)
CASSPTETYEQYF

SEQ ID NO: 602103 - protein, 14 aa, Homo sapiens
  CDR3 for alpha chain variable domain of TCR clone 301052 (TRAV8-6, TRAJ57)
CAAYTQGGSEKLVF

SEQ ID NO: 602104 - protein, 14 aa, Homo sapiens
  CDR3 for beta chain variable domain of TCR clone 301052 (TRBV7-6, TRBJ1-6)
CASSLNRGDSPLHF

SEQ ID NO: 602105 - protein, 15 aa, Homo sapiens
  CDR3 for alpha chain variable domain of TCR clone 301053 (TRAV25, TRAJ52)
CAGRPGGTSYVKRTF

SEQ ID NO: 602106 - protein, 17 aa, Homo sapiens
  CDR3 for beta chain variable domain of TCR clone 301053 (TRBV7-8, TRBJ2-6)
CASSAGTGGAGANVLTF

SEQ ID NO: 602107 - protein, 14 aa, Homo sapiens
  CDR3 for alpha chain variable domain of TCR clone 301054 (TRAV1-2, TRAJ8)
CAVREDTGFQKLEF

SEQ ID NO: 602108 - protein, 14 aa, Homo sapiens
  CDR3 for beta chain variable domain of TCR clone 301054 (TRBV11-2, TRBJ2-3)
CASSRLARTDTQYF

SEQ ID NO: 602109 - protein, 11 aa, Homo sapiens
  CDR3 for alpha chain variable domain of TCR clone 301055 (TRAV21, TRAJ34)
CAVTDTDKLIF

SEQ ID NO: 602110 - protein, 15 aa, Homo sapiens
  CDR3 for beta chain variable domain of TCR clone 301055 (TRBV11-3, TRBJ2-3)
CASLKDGREGDTQYF

SEQ ID NO: 602111 - protein, 23 aa, Homo sapiens
  CDR3 for alpha chain variable domain of TCR clone 301056 (TRAV26-1, )
CIADNAGINHIQNPDPAVYQLRD

SEQ ID NO: 602112 - protein, 12 aa, Homo sapiens
  CDR3 for beta chain variable domain of TCR clone 301056 (TRBV11-2, TRBJ2-2)
CASSLGGGELFF

SEQ ID NO: 602113 - protein, 14 aa, Homo sapiens
  CDR3 for alpha chain variable domain of TCR clone 301057 (TRAV12-3, TRAJ42)
CAMNYGGSQRNLIF

SEQ ID NO: 602114 - protein, 14 aa, Homo sapiens
  CDR3 for beta chain variable domain of TCR clone 301057 (TRBV25-1, TRBJ1-1)
CASTHPGGNTEAFF

SEQ ID NO: 602115 - protein, 10 aa, Homo sapiens
  CDR3 for alpha chain variable domain of TCR clone 301058 (TRAV12-1, TRAJ43)
CVVHNNDMRF

SEQ ID NO: 602116 - protein, 15 aa, Homo sapiens
  CDR3 for beta chain variable domain of TCR clone 301058 (TRBV7-3, TRBJ2-1)
CASSPTGGGEVEQFF

SEQ ID NO: 602117 - protein, 16 aa, Homo sapiens
  CDR3 for alpha chain variable domain of TCR clone 301059 (TRAV8-3, TRAJ8)
CAVPSDGNTGFQKLVL

SEQ ID NO: 602118 - protein, 15 aa, Homo sapiens
  CDR3 for beta chain variable domain of TCR clone 301059 (TRBV6-1, TRBJ2-6)
CASSSRPSGANVLTF

SEQ ID NO: 602119 - protein, 14 aa, Homo sapiens
  CDR3 for alpha chain variable domain of TCR clone 301060 (TRAV12-1, TRAJ20)
CVVNPLSNDYKLSF

SEQ ID NO: 602120 - protein, 14 aa, Homo sapiens
  CDR3 for beta chain variable domain of TCR clone 301060 (TRBV19, TRBJ2-1)
CASPTFVLSGEQFF

SEQ ID NO: 602121 - protein, 12 aa, Homo sapiens
  CDR3 for alpha chain variable domain of TCR clone 301061 (TRAV17, TRAJ20)
CATDSNDYKLSF

SEQ ID NO: 602122 - protein, 16 aa, Homo sapiens
  CDR3 for beta chain variable domain of TCR clone 301061 (TRBV7-2, TRBJ1-2)
CASSSNQDRRGHGYPF

SEQ ID NO: 602123 - protein, 14 aa, Homo sapiens
  CDR3 for alpha chain variable domain of TCR clone 301062 (TRAV12-2, TRAJ13)
CAVKKTGVYQKVIF

SEQ ID NO: 602124 - protein, 15 aa, Homo sapiens
  CDR3 for beta chain variable domain of TCR clone 301062 (TRBV27, TRBJ2-1)
CASSNGGGSSNEQFF

SEQ ID NO: 602125 - protein, 11 aa, Homo sapiens
  CDR3 for alpha chain variable domain of TCR clone 301063 (TRAV2, TRAJ13)
CASGGYQKVTF

SEQ ID NO: 602126 - protein, 20 aa, Homo sapiens
  CDR3 for beta chain variable domain of TCR clone 301063 (TRBV28, TRBJ2-1)
CASTPSGRSPGLAGGNEQFF

SEQ ID NO: 602127 - protein, 13 aa, Homo sapiens
  CDR3 for alpha chain variable domain of TCR clone 301064 (TRAV17, TRAJ9)
CATDYTGGLKTIF

SEQ ID NO: 602128 - protein, 16 aa, Homo sapiens
  CDR3 for beta chain variable domain of TCR clone 301064 (TRBV7-7, TRBJ2-1)
CARSLASGTSYNEQFF

SEQ ID NO: 602129 - protein, 16 aa, Homo sapiens
  CDR3 for alpha chain variable domain of TCR clone 301065 (TRAV12-2, TRAJ32)
CAVNLGQGGATTKPIF

SEQ ID NO: 602130 - protein, 13 aa, Homo sapiens
  CDR3 for beta chain variable domain of TCR clone 301065 (TRBV9, TRBJ2-2)
CASSPRPAGELFF

SEQ ID NO: 602131 - protein, 16 aa, Homo sapiens
  CDR3 for alpha chain variable domain of TCR clone 301066 (TRAV30, TRAJ24)
CGTESVDADSWGKFQF

SEQ ID NO: 602132 - protein, 13 aa, Homo sapiens
  CDR3 for beta chain variable domain of TCR clone 301066 (TRBV6-5, TRBJ2-5)
CASSPQGGETQYF

SEQ ID NO: 602133 - protein, 12 aa, Homo sapiens
  CDR3 for alpha chain variable domain of TCR clone 301067 (TRAV16, TRAJ56)
CAPTGANSKLTF

SEQ ID NO: 602134 - protein, 14 aa, Homo sapiens
  CDR3 for beta chain variable domain of TCR clone 301067 (TRBV7-2, TRBJ2-7)
CASSPKTSFYEQYF

SEQ ID NO: 602135 - protein, 14 aa, Homo sapiens
  CDR3 for alpha chain variable domain of TCR clone 301068 (TRAV1-1, TRAJ27)
CAVIYNTNAGKSTS

SEQ ID NO: 602136 - protein, 14 aa, Homo sapiens
  CDR3 for beta chain variable domain of TCR clone 301068 (TRBV6-5, TRBJ1-2)
CASSYDGTGGGYTF

SEQ ID NO: 602137 - protein, 12 aa, Homo sapiens
  CDR3 for alpha chain variable domain of TCR clone 301069 (TRAV16, TRAJ12)
CAHGDSSYKLIF

SEQ ID NO: 602138 - protein, 12 aa, Homo sapiens
  CDR3 for beta chain variable domain of TCR clone 301069 (TRBV28, TRBJ2-1)
CASSRQVGEQFF

SEQ ID NO: 602139 - protein, 15 aa, Homo sapiens
  CDR3 for alpha chain variable domain of TCR clone 301070 (TRAV12-1, TRAJ40)
CVVNMHFPGTYKYIF

SEQ ID NO: 602140 - protein, 13 aa, Homo sapiens
  CDR3 for beta chain variable domain of TCR clone 301070 (TRBV12-4, TRBJ2-7)
CASSPTETYEQYF

SEQ ID NO: 602141 - protein, 15 aa, Homo sapiens
  CDR3 for alpha chain variable domain of TCR clone 301071 (TRAV3, TRAJ23)
CAVRDRGNQGGKLIF

SEQ ID NO: 602142 - protein, 15 aa, Homo sapiens
  CDR3 for beta chain variable domain of TCR clone 301071 (TRBV7-3, TRBJ2-1)
CQQPAPSGSYNEQFF

SEQ ID NO: 602143 - protein, 16 aa, Homo sapiens
  CDR3 for alpha chain variable domain of TCR clone 301072 (TRAV30, TRAJ24)
CGTEIVEADRWGKFQF

SEQ ID NO: 602144 - protein, 14 aa, Homo sapiens
  CDR3 for beta chain variable domain of TCR clone 301072 (TRBV12-5, TRBJ2-5)
CASGSRTHQETQYF

SEQ ID NO: 602145 - protein, 13 aa, Homo sapiens
  CDR3 for alpha chain variable domain of TCR clone 301073 (TRAV13-2, TRAJ40)
CAELISGTYKYIF

SEQ ID NO: 602146 - protein, 12 aa, Homo sapiens
  CDR3 for beta chain variable domain of TCR clone 301073 (TRBV12-5, TRBJ2-5)
CASGQGVETQYF

SEQ ID NO: 602147 - protein, 12 aa, Homo sapiens
  CDR3 for alpha chain variable domain of TCR clone 301074 (TRAV3, TRAJ43)
CAVRDPNNDMRF

SEQ ID NO: 602148 - protein, 13 aa, Homo sapiens
  CDR3 for beta chain variable domain of TCR clone 301074 (TRBV10-3, TRBJ2-7)
CAAKLAVNYEQYF

SEQ ID NO: 602149 - protein, 14 aa, Homo sapiens
  CDR3 for alpha chain variable domain of TCR clone 301075 (TRAV30, TRAJ33)
CGTVAPRSNYQLIW

SEQ ID NO: 602150 - protein, 14 aa, Homo sapiens
  CDR3 for beta chain variable domain of TCR clone 301075 (TRBV19, TRBJ2-1)
CASPTVVLSGGQFF

SEQ ID NO: 602151 - protein, 13 aa, Homo sapiens
  CDR3 for alpha chain variable domain of TCR clone 301076 (TRAV27, TRAJ40)
CAGPPSGTYTYIF

SEQ ID NO: 602152 - protein, 13 aa, Homo sapiens
  CDR3 for beta chain variable domain of TCR clone 301076 (TRBV28, TRBJ1-2)
CAGRDRGNYGYTF

SEQ ID NO: 602153 - protein, 12 aa, Homo sapiens
  CDR3 for alpha chain variable domain of TCR clone 301077 (TRAV23/DV6, TRAJ47)
CSKHDTGNKLVF

SEQ ID NO: 602154 - protein, 14 aa, Homo sapiens
  CDR3 for beta chain variable domain of TCR clone 301077 (TRBV7-3, TRBJ1-1)
CASSLKGGNTEAVF

SEQ ID NO: 602155 - protein, 14 aa, Homo sapiens
  CDR3 for alpha chain variable domain of TCR clone 301078 (TRAV1-2, TRAJ8)
CAVREDTGFQNLVF

SEQ ID NO: 602156 - protein, 13 aa, Homo sapiens
  CDR3 for beta chain variable domain of TCR clone 301078 (TRBV7-3, TRBJ1-1)
CASSQDWGAEASF

SEQ ID NO: 602157 - protein, 14 aa, Homo sapiens
  CDR3 for alpha chain variable domain of TCR clone 301079 (TRAV35, TRAJ38)
CAHCGAGNNRKLIW

SEQ ID NO: 602158 - protein, 15 aa, Homo sapiens
  CDR3 for beta chain variable domain of TCR clone 301079 (TRBV12-4, TRBJ2-5)
CASSPPTGLQETQYF

SEQ ID NO: 602159 - protein, 11 aa, Homo sapiens
  CDR3 for alpha chain variable domain of TCR clone 301080 (TRAV12-1, TRAJ30)
CVVNVQDKIIF

SEQ ID NO: 602160 - protein, 15 aa, Homo sapiens
  CDR3 for beta chain variable domain of TCR clone 301080 (TRBV20-1, TRBJ2-7)
CSAREGRDSLYEQYF

SEQ ID NO: 602161 - protein, 14 aa, Homo sapiens
  CDR3 for alpha chain variable domain of TCR clone 301081 (TRAV13-1, TRAJ35)
CAASKGGFGNVLHF

SEQ ID NO: 602162 - protein, 13 aa, Homo sapiens
  CDR3 for beta chain variable domain of TCR clone 301081 (TRBV7-3, TRBJ1-1)
CASSQDWGAEASF

SEQ ID NO: 602163 - protein, 14 aa, Homo sapiens
  CDR3 for alpha chain variable domain of TCR clone 301082 (TRAV2, TRAJ9)
CAVEDRSGGFKTIF

SEQ ID NO: 602164 - protein, 15 aa, Homo sapiens
  CDR3 for beta chain variable domain of TCR clone 301082 (TRBV7-2, TRBJ2-1)
CASSSRTSREDEQFF

SEQ ID NO: 602165 - protein, 14 aa, Homo sapiens
  CDR3 for alpha chain variable domain of TCR clone 301083 (TRAV2, TRAJ9)
CAVEDRSGGFNTIF

SEQ ID NO: 602166 - protein, 16 aa, Homo sapiens
  CDR3 for beta chain variable domain of TCR clone 301083 (TRBV5-5, TRBJ2-2)
CASSGRREGATGELFF

SEQ ID NO: 602167 - protein, 13 aa, Homo sapiens
  CDR3 for alpha chain variable domain of TCR clone 301084 (TRAV20, TRAJ31)
CAVQAWNNARLMF

SEQ ID NO: 602168 - protein, 14 aa, Homo sapiens
  CDR3 for beta chain variable domain of TCR clone 301084 (TRBV4-2, TRBJ2-1)
CASGLDRAYNEQFF

SEQ ID NO: 602169 - protein, 16 aa, Homo sapiens
  CDR3 for alpha chain variable domain of TCR clone 301085 (TRAV30, TRAJ24)
CGTEIVDADSWGKFQF

SEQ ID NO: 602170 - protein, 19 aa, Homo sapiens
  CDR3 for beta chain variable domain of TCR clone 301085 (TRBV12-4, TRBJ2-5)
CASRPPTGLQDPVLRARHA

SEQ ID NO: 602171 - protein, 10 aa, Homo sapiens
  CDR3 for alpha chain variable domain of TCR clone 301086 (TRAV30, TRAJ48)
CGIGNEKLTF

SEQ ID NO: 602172 - protein, 14 aa, Homo sapiens
  CDR3 for beta chain variable domain of TCR clone 301086 (TRBV7-2, TRBJ2-7)
CASRSQGAAYEQYF

SEQ ID NO: 602173 - protein, 14 aa, Homo sapiens
  CDR3 for alpha chain variable domain of TCR clone 301087 (TRAV17, TRAJ57)
CAMDPQGGSEKLVF

SEQ ID NO: 602174 - protein, 15 aa, Homo sapiens
  CDR3 for beta chain variable domain of TCR clone 301087 (TRBV5-1, TRBJ2-7)
CASSLDLTSSYEQYF

SEQ ID NO: 602175 - protein, 17 aa, Homo sapiens
  CDR3 for alpha chain variable domain of TCR clone 301088 (TRAV3, TRAJ6)
FAVRDGPRAGGSYIPTF

SEQ ID NO: 602176 - protein, 13 aa, Homo sapiens
  CDR3 for beta chain variable domain of TCR clone 301088 (TRBV20-1, TRBJ1-6)
CSAPLGVGSPLHF

SEQ ID NO: 602177 - protein, 14 aa, Homo sapiens
  CDR3 for alpha chain variable domain of TCR clone 301089 (TRAV8-1, TRAJ5)
CAVSMGTGRRALTF

SEQ ID NO: 602178 - protein, 16 aa, Homo sapiens
  CDR3 for beta chain variable domain of TCR clone 301089 (TRBV12-5, TRBJ2-5)
CASGPRTSGNQETQYF

SEQ ID NO: 602179 - protein, 13 aa, Homo sapiens
  CDR3 for alpha chain variable domain of TCR clone 301090 (TRAV35, TRAJ42)
CAGFQGSQGNLIF

SEQ ID NO: 602180 - protein, 14 aa, Homo sapiens
  CDR3 for beta chain variable domain of TCR clone 301090 (TRBV19, TRBJ2-1)
CASPTFVLSGEQFF

SEQ ID NO: 602181 - protein, 11 aa, Homo sapiens
  CDR3 for alpha chain variable domain of TCR clone 301091 (TRAV21, TRAJ39)
LLVNAGKMLTF

SEQ ID NO: 602182 - protein, 18 aa, Homo sapiens
  CDR3 for beta chain variable domain of TCR clone 301091 (TRBV7-2, TRBJ2-7)
CASSLSGRGLAGGYEQYF

SEQ ID NO: 602183 - protein, 16 aa, Homo sapiens
  CDR3 for alpha chain variable domain of TCR clone 301092 (TRAV17, TRAJ52)
CATSNAGGTSYGKLTF

SEQ ID NO: 602184 - protein, 13 aa, Homo sapiens
  CDR3 for beta chain variable domain of TCR clone 301092 (TRBV27, TRBJ1-6)
CASSLVLVSALHF

SEQ ID NO: 602185 - protein, 14 aa, Homo sapiens
  CDR3 for alpha chain variable domain of TCR clone 301093 (TRAV30, TRAJ26)
CGTEIVSYGQNFVF

SEQ ID NO: 602186 - protein, 17 aa, Homo sapiens
  CDR3 for beta chain variable domain of TCR clone 301093 (TRBV7-3, TRBJ2-3)
CASSLMKRMRGADTQYF

SEQ ID NO: 602187 - protein, 11 aa, Homo sapiens
  CDR3 for alpha chain variable domain of TCR clone 301094 (TRAV1-1, TRAJ23)
CAVRQGGKLIF

SEQ ID NO: 602188 - protein, 14 aa, Homo sapiens
  CDR3 for beta chain variable domain of TCR clone 301094 (TRBV20-1, TRBJ2-5)
CSAHRQGLWETQYF

SEQ ID NO: 602189 - protein, 21 aa, Homo sapiens
  CDR3 for alpha chain variable domain of TCR clone 301095 (TRAV3, )
CAGRPTPDIQNPDPAVYQLRD

SEQ ID NO: 602190 - protein, 15 aa, Homo sapiens
  CDR3 for beta chain variable domain of TCR clone 301095 (TRBV11-3, TRBJ2-5)
CASSDTSGGIETQYF

SEQ ID NO: 602191 - protein, 13 aa, Homo sapiens
  CDR3 for alpha chain variable domain of TCR clone 301096 (TRAV8-3, TRAJ48)
CAVVPFGNEKLTF

SEQ ID NO: 602192 - protein, 15 aa, Homo sapiens
  CDR3 for beta chain variable domain of TCR clone 301096 (TRBV11-2, TRBJ2-1)
CASSSPSTRYNAQFL

SEQ ID NO: 602193 - protein, 18 aa, Homo sapiens
  CDR3 for alpha chain variable domain of TCR clone 301097 (TRAV12-3, TRAJ52)
CAMSVGGAGGTCYGKLTF

SEQ ID NO: 602194 - protein, 15 aa, Homo sapiens
  CDR3 for beta chain variable domain of TCR clone 301097 (TRBV27, TRBJ1-6)
CASSFDRGLGSPLHF

SEQ ID NO: 602195 - protein, 14 aa, Homo sapiens
  CDR3 for alpha chain variable domain of TCR clone 301098 (TRAV26-1, TRAJ34)
CIVRVAYNNDKLIF

SEQ ID NO: 602196 - protein, 14 aa, Homo sapiens
  CDR3 for beta chain variable domain of TCR clone 301098 (TRBV12-5, TRBJ2-5)
CASGSRTHQETQYF

SEQ ID NO: 602197 - protein, 13 aa, Homo sapiens
  CDR3 for alpha chain variable domain of TCR clone 301099 (TRAV13-2, TRAJ13)
CADISGGYQKVTF

SEQ ID NO: 602198 - protein, 15 aa, Homo sapiens
  CDR3 for beta chain variable domain of TCR clone 301099 (TRBV19, TRBJ1-1)
CASSIGGGRNTEAFF

SEQ ID NO: 602199 - protein, 15 aa, Homo sapiens
  CDR3 for alpha chain variable domain of TCR clone 301100 (TRAV12-3, TRAJ49)
CAMAVTPNTGNQFYF

SEQ ID NO: 602200 - protein, 17 aa, Homo sapiens
  CDR3 for beta chain variable domain of TCR clone 301100 (TRBV4-1, TRBJ1-4)
CASSQEGPRGVEEKLFF

SEQ ID NO: 602201 - protein, 14 aa, Homo sapiens
  CDR3 for alpha chain variable domain of TCR clone 301101 (TRAV13-2, TRAJ43)
CAEIPTYNNNDMRF

SEQ ID NO: 602202 - protein, 14 aa, Homo sapiens
  CDR3 for beta chain variable domain of TCR clone 301101 (TRBV27, TRBJ2-2)
CASRPGVNTGELFF

SEQ ID NO: 602203 - protein, 12 aa, Homo sapiens
  CDR3 for alpha chain variable domain of TCR clone 301102 (TRAV1-2, TRAJ20)
CAVISNDYKLSF

SEQ ID NO: 602204 - protein, 16 aa, Homo sapiens
  CDR3 for beta chain variable domain of TCR clone 301102 (TRBV6-3, TRBJ2-2)
CASSFSGTDNTGELFF

SEQ ID NO: 602205 - protein, 22 aa, Homo sapiens
  CDR3 for alpha chain variable domain of TCR clone 301103 (TRAV26-1, TRAJ38)
CIADNAGNNHNQNPDPAGYQLR

SEQ ID NO: 602206 - protein, 13 aa, Homo sapiens
  CDR3 for beta chain variable domain of TCR clone 301103 (TRBV20-1, TRBJ1-1)
CSARGGGNTEAFF

SEQ ID NO: 602207 - protein, 12 aa, Homo sapiens
  CDR3 for alpha chain variable domain of TCR clone 301104 (TRAV13-1, TRAJ20)
CATSMGDYKLSF

SEQ ID NO: 602208 - protein, 14 aa, Homo sapiens
  CDR3 for beta chain variable domain of TCR clone 301104 (TRBV20-1, TRBJ2-5)
CSASDSGSGETQYF

SEQ ID NO: 602209 - protein, 14 aa, Homo sapiens
  CDR3 for alpha chain variable domain of TCR clone 301105 (TRAV16, TRAJ32)
CALKSGGATNKLTF

SEQ ID NO: 602210 - protein, 17 aa, Homo sapiens
  CDR3 for beta chain variable domain of TCR clone 301105 (TRBV20-1, TRBJ2-1)
CSASSSGLAGSYNEQFF

SEQ ID NO: 602211 - protein, 16 aa, Homo sapiens
  CDR3 for alpha chain variable domain of TCR clone 301106 (TRAV13-1, TRAJ48)
CAASIFGNFGNEKLTF

SEQ ID NO: 602212 - protein, 14 aa, Homo sapiens
  CDR3 for beta chain variable domain of TCR clone 301106 (TRBV24-1, TRBJ1-1)
CATSIPKGDTEAFV

SEQ ID NO: 602213 - protein, 12 aa, Homo sapiens
  CDR3 for alpha chain variable domain of TCR clone 301107 (TRAV8-3, TRAJ43)
CAVGAGNNDMRF

SEQ ID NO: 602214 - protein, 15 aa, Homo sapiens
  CDR3 for beta chain variable domain of TCR clone 301107 (TRBV7-3, TRBJ2-2)
CASSETGQGTGELFF

SEQ ID NO: 602215 - protein, 12 aa, Homo sapiens
  CDR3 for alpha chain variable domain of TCR clone 301108 (TRAV23/DV6, TRAJ16)
CAARGRGQRLLF

SEQ ID NO: 602216 - protein, 15 aa, Homo sapiens
  CDR3 for beta chain variable domain of TCR clone 301108 (TRBV15, TRBJ2-1)
CATSRPGQGLHEQFF

SEQ ID NO: 602217 - protein, 15 aa, Homo sapiens
  CDR3 for alpha chain variable domain of TCR clone 301109 (TRAV23/DV6, TRAJ18)
CAARYRGSTLGRLHF

SEQ ID NO: 602218 - protein, 16 aa, Homo sapiens
  CDR3 for beta chain variable domain of TCR clone 301109 (TRBV20-1, TRBJ1-2)
CSASMGQGVANYGDTL

SEQ ID NO: 602219 - protein, 12 aa, Homo sapiens
  CDR3 for alpha chain variable domain of TCR clone 301110 (TRAV1-1, TRAJ39)
CAVPVVGNMLTF

SEQ ID NO: 602220 - protein, 15 aa, Homo sapiens
  CDR3 for beta chain variable domain of TCR clone 301110 (TRBV7-3, TRBJ2-2)
CASSETGQGTGKLFF

SEQ ID NO: 602221 - protein, 14 aa, Homo sapiens
  CDR3 for alpha chain variable domain of TCR clone 301111 (TRAV23/DV6, TRAJ40)
CAASLTSGTHKYIF

SEQ ID NO: 602222 - protein, 14 aa, Homo sapiens
  CDR3 for beta chain variable domain of TCR clone 301111 (TRBV5-1, TRBJ2-3)
CASSRGQGGGTQYF

SEQ ID NO: 602223 - protein, 13 aa, Homo sapiens
  CDR3 for alpha chain variable domain of TCR clone 301112 (TRAV2, TRAJ40)
GAVVTSGTYKYIF

SEQ ID NO: 602224 - protein, 15 aa, Homo sapiens
  CDR3 for beta chain variable domain of TCR clone 301112 (TRBV11-3, TRBJ2-3)
CASLKDGREGDTQYF

SEQ ID NO: 602225 - protein, 14 aa, Homo sapiens
  CDR3 for alpha chain variable domain of TCR clone 301113 (TRAV3, TRAJ44)
CAVNNTGTASKLTS

SEQ ID NO: 602226 - protein, 14 aa, Homo sapiens
  CDR3 for beta chain variable domain of TCR clone 301113 (TRBV11-2, TRBJ2-3)
CASSLGGGTDTQYF

SEQ ID NO: 602227 - protein, 13 aa, Homo sapiens
  CDR3 for alpha chain variable domain of TCR clone 301114 (TRAV8-3, TRAJ48)
CALVPFGNEKLTF

SEQ ID NO: 602228 - protein, 14 aa, Homo sapiens
  CDR3 for beta chain variable domain of TCR clone 301114 (TRBV18, TRBJ2-7)
CASSPRGGAYEQYF

SEQ ID NO: 602229 - protein, 16 aa, Homo sapiens
  CDR3 for alpha chain variable domain of TCR clone 301115 (TRAV3, TRAJ37)
CAVRGKGSGNTGQLIV

SEQ ID NO: 602230 - protein, 13 aa, Homo sapiens
  CDR3 for beta chain variable domain of TCR clone 301115 (TRBV14, TRBJ2-7)
CASSQDRRYEQYF

SEQ ID NO: 602231 - protein, 14 aa, Homo sapiens
  CDR3 for alpha chain variable domain of TCR clone 301116 (TRAV12-3, TRAJ41)
CAMSAGNSGYALNF

SEQ ID NO: 602232 - protein, 13 aa, Homo sapiens
  CDR3 for beta chain variable domain of TCR clone 301116 (TRBV7-9, TRBJ2-5)
CASTPVGQETQYF

SEQ ID NO: 602233 - protein, 11 aa, Homo sapiens
  CDR3 for alpha chain variable domain of TCR clone 301117 (TRAV2, TRAJ13)
CASGGYQKVPF

SEQ ID NO: 602234 - protein, 16 aa, Homo sapiens
  CDR3 for beta chain variable domain of TCR clone 301117 (TRBV19, TRBJ2-1)
CASSKAGPSSYNEQFF

SEQ ID NO: 602235 - protein, 12 aa, Homo sapiens
  CDR3 for alpha chain variable domain of TCR clone 301118 (TRAV13-1, TRAJ49)
CAAPDTGNQFYF

SEQ ID NO: 602236 - protein, 17 aa, Homo sapiens
  CDR3 for beta chain variable domain of TCR clone 301118 (TRBV25-1, TRBJ2-7)
CASSDARVVFSSYEQYF

SEQ ID NO: 602237 - protein, 15 aa, Homo sapiens
  CDR3 for alpha chain variable domain of TCR clone 301119 (TRAV1-2, TRAJ30)
CAVRPHGNRDDKIII

SEQ ID NO: 602238 - protein, 13 aa, Homo sapiens
  CDR3 for beta chain variable domain of TCR clone 301119 (TRBV4-1, TRBJ2-7)
CASSQGQAHEQYF

SEQ ID NO: 602239 - protein, 13 aa, Homo sapiens
  CDR3 for alpha chain variable domain of TCR clone 301120 (TRAV30, TRAJ39)
CGTEKNTDNMLTF

SEQ ID NO: 602240 - protein, 12 aa, Homo sapiens
  CDR3 for beta chain variable domain of TCR clone 301120 (TRBV12-4, TRBJ2-5)
CASSSAQETQYF

SEQ ID NO: 602241 - protein, 11 aa, Homo sapiens
  CDR3 for alpha chain variable domain of TCR clone 301121 (TRAV2, TRAJ33)
CAVDSNYQLIW

SEQ ID NO: 602242 - protein, 17 aa, Homo sapiens
  CDR3 for beta chain variable domain of TCR clone 301121 (TRBV25-1, TRBJ2-7)
CASSDARVVFASYEQYF

SEQ ID NO: 602243 - protein, 14 aa, Homo sapiens
  CDR3 for alpha chain variable domain of TCR clone 301122 (TRAV13-1, TRAJ35)
CAASKGGFGYVLHC

SEQ ID NO: 602244 - protein, 13 aa, Homo sapiens
  CDR3 for beta chain variable domain of TCR clone 301122 (TRBV7-3, TRBJ1-1)
CASSQDWGAEAFV

SEQ ID NO: 602245 - protein, 16 aa, Homo sapiens
  CDR3 for alpha chain variable domain of TCR clone 301123 (TRAV3, TRAJ10)
CAVSDRLTGGGNKLTF

SEQ ID NO: 602246 - protein, 15 aa, Homo sapiens
  CDR3 for beta chain variable domain of TCR clone 301123 (TRBV6-6, TRBJ2-7)
CASSYSYGGSYEQYF

SEQ ID NO: 602247 - protein, 14 aa, Homo sapiens
  CDR3 for alpha chain variable domain of TCR clone 301124 (TRAV26-1, TRAJ45)
CIVRVVGGADGLTF

SEQ ID NO: 602248 - protein, 16 aa, Homo sapiens
  CDR3 for beta chain variable domain of TCR clone 301124 (TRBV7-9, TRBJ1-1)
CASSLTQVRSSTEAFF

SEQ ID NO: 602249 - protein, 19 aa, Homo sapiens
  CDR3 for alpha chain variable domain of TCR clone 301125 (TRAV1-2, TRAJ26)
CLLPLCCERPDNYGQNFVF

SEQ ID NO: 602250 - protein, 15 aa, Homo sapiens
  CDR3 for beta chain variable domain of TCR clone 301125 (TRBV5-1, TRBJ2-1)
CASKGLAGVYNEQFF

SEQ ID NO: 602251 - protein, 13 aa, Homo sapiens
  CDR3 for alpha chain variable domain of TCR clone 301126 (TRAV26-1, TRAJ30)
CIVNMNRDNKIIF

SEQ ID NO: 602252 - protein, 16 aa, Homo sapiens
  CDR3 for beta chain variable domain of TCR clone 301126 (TRBV16, TRBJ2-7)
CASSRPAGGSSYEQYF

SEQ ID NO: 602253 - protein, 17 aa, Homo sapiens
  CDR3 for alpha chain variable domain of TCR clone 301127 (TRAV3, TRAJ37)
CAVRDMRTPGNTGKLIF

SEQ ID NO: 602254 - protein, 15 aa, Homo sapiens
  CDR3 for beta chain variable domain of TCR clone 301127 (TRBV7-8, TRBJ2-7)
CASSLDRAGSYEQYF

SEQ ID NO: 602255 - protein, 13 aa, Homo sapiens
  CDR3 for alpha chain variable domain of TCR clone 301128 (TRAV21, TRAJ24)
GLMTTDSWGKMQF

SEQ ID NO: 602256 - protein, 12 aa, Homo sapiens
  CDR3 for beta chain variable domain of TCR clone 301128 (TRBV11-2, TRBJ2-7)
CASSPPADEQYF

SEQ ID NO: 602257 - protein, 12 aa, Homo sapiens
  CDR3 for alpha chain variable domain of TCR clone 301129 (TRAV12-1, TRAJ6)
CVSSGGSYIPTF

SEQ ID NO: 602258 - protein, 17 aa, Homo sapiens
  CDR3 for beta chain variable domain of TCR clone 301129 (TRBV13, TRBJ2-3)
CASSLSRVAGGRNTQYF

SEQ ID NO: 602259 - protein, 15 aa, Homo sapiens
  CDR3 for alpha chain variable domain of TCR clone 301130 (TRAV17, TRAJ57)
CATGPSQGGSEKLVF

SEQ ID NO: 602260 - protein, 15 aa, Homo sapiens
  CDR3 for beta chain variable domain of TCR clone 301130 (TRBV25-1, TRBJ1-4)
CVSSPGDSTNEKLFF

SEQ ID NO: 602261 - protein, 13 aa, Homo sapiens
  CDR3 for alpha chain variable domain of TCR clone 301131 (TRAV16, TRAJ31)
CALSAHNNATLMF

SEQ ID NO: 602262 - protein, 17 aa, Homo sapiens
  CDR3 for beta chain variable domain of TCR clone 301131 (TRBV12-4, TRBJ2-1)
CASSPGLAGGRINEQFF

SEQ ID NO: 602263 - protein, 13 aa, Homo sapiens
  CDR3 for alpha chain variable domain of TCR clone 301132 (TRAV21, TRAJ27)
CAARPGNAGKSTF

SEQ ID NO: 602264 - protein, 15 aa, Homo sapiens
  CDR3 for beta chain variable domain of TCR clone 301132 (TRBV19, TRBJ2-7)
CASSPAGSGEALRYF

SEQ ID NO: 602265 - protein, 16 aa, Homo sapiens
  CDR3 for alpha chain variable domain of TCR clone 301133 (TRAV13-2, TRAJ45)
CAENRVSGGGADGLTF

SEQ ID NO: 602266 - protein, 14 aa, Homo sapiens
  CDR3 for beta chain variable domain of TCR clone 301133 (TRBV19, TRBJ2-2)
CASKRAPNTGELFF

SEQ ID NO: 602267 - protein, 16 aa, Homo sapiens
  CDR3 for alpha chain variable domain of TCR clone 301134 (TRAV3, TRAJ10)
CAVRDMRAGGGNKLTF

SEQ ID NO: 602268 - protein, 12 aa, Homo sapiens
  CDR3 for beta chain variable domain of TCR clone 301134 (TRBV7-2, TRBJ2-7)
CASSSHSYEQYF

SEQ ID NO: 602269 - protein, 18 aa, Homo sapiens
  CDR3 for alpha chain variable domain of TCR clone 301135 (TRAV13-1, TRAJ52)
CAAKNPNAGGTSYGKLTF

SEQ ID NO: 602270 - protein, 12 aa, Homo sapiens
  CDR3 for beta chain variable domain of TCR clone 301135 (TRBV5-1, TRBJ1-1)
CASSLTGAEAFF

SEQ ID NO: 602271 - protein, 12 aa, Homo sapiens
  CDR3 for alpha chain variable domain of TCR clone 301136 (TRAV12-3, TRAJ3)
CAIDSSASKIIF

SEQ ID NO: 602272 - protein, 17 aa, Homo sapiens
  CDR3 for beta chain variable domain of TCR clone 301136 (TRBV7-9, TRBJ2-3)
CASSLEEAGASPDTQYF

SEQ ID NO: 602273 - protein, 13 aa, Homo sapiens
  CDR3 for alpha chain variable domain of TCR clone 301137 (TRAV10, TRAJ40)
CVVSNSGTYKYIF

SEQ ID NO: 602274 - protein, 15 aa, Homo sapiens
  CDR3 for beta chain variable domain of TCR clone 301137 (TRBV24-1, TRBJ2-3)
CATSDRDRGTDTQYF

SEQ ID NO: 602275 - protein, 16 aa, Homo sapiens
  CDR3 for alpha chain variable domain of TCR clone 301138 (TRAV13-2, TRAJ53)
CAENANSGGSNYKLTF

SEQ ID NO: 602276 - protein, 15 aa, Homo sapiens
  CDR3 for beta chain variable domain of TCR clone 301138 (TRBV11-2, TRBJ2-1)
CASSLAGGPGNEQFF

SEQ ID NO: 602277 - protein, 13 aa, Homo sapiens
  CDR3 for alpha chain variable domain of TCR clone 301139 (TRAV2, TRAJ40)
CAVVTSGTYKYIF

SEQ ID NO: 602278 - protein, 14 aa, Homo sapiens
  CDR3 for beta chain variable domain of TCR clone 301139 (TRBV19, TRBJ2-1)
CASPTFVLSGERLF

SEQ ID NO: 602279 - protein, 13 aa, Homo sapiens
  CDR3 for alpha chain variable domain of TCR clone 301140 (TRAV17, TRAJ8)
CATGPVGFQKLVF

SEQ ID NO: 602280 - protein, 14 aa, Homo sapiens
  CDR3 for beta chain variable domain of TCR clone 301140 (TRBV5-1, TRBJ2-7)
CASSFASGVNEQYF

SEQ ID NO: 602281 - protein, 14 aa, Homo sapiens
  CDR3 for alpha chain variable domain of TCR clone 301141 (TRAV34, TRAJ44)
CGADGTGTDSKLTF

SEQ ID NO: 602282 - protein, 14 aa, Homo sapiens
  CDR3 for beta chain variable domain of TCR clone 301141 (TRBV7-6, TRBJ2-3)
CASSLGTVTDTQYF

SEQ ID NO: 602283 - protein, 14 aa, Homo sapiens
  CDR3 for alpha chain variable domain of TCR clone 301142 (TRAV29/DV5, TRAJ32)
CAAAYGGATNKLIF

SEQ ID NO: 602284 - protein, 16 aa, Homo sapiens
  CDR3 for beta chain variable domain of TCR clone 301142 (TRBV4-1, TRBJ1-5)
CASSQGGHTTNQPQHF

SEQ ID NO: 602285 - protein, 18 aa, Homo sapiens
  CDR3 for alpha chain variable domain of TCR clone 301143 (TRAV4, TRAJ3)
CCVLLPRGPDSSASKIIF

SEQ ID NO: 602286 - protein, 15 aa, Homo sapiens
  CDR3 for beta chain variable domain of TCR clone 301143 (TRBV5-7, TRBJ2-1)
CASSRRLAGDNEQFF

SEQ ID NO: 602287 - protein, 11 aa, Homo sapiens
  CDR3 for alpha chain variable domain of TCR clone 301144 (TRAV12-3, TRAJ49)
CAMITGNQFYF

SEQ ID NO: 602288 - protein, 14 aa, Homo sapiens
  CDR3 for beta chain variable domain of TCR clone 301144 (TRBV25-1, TRBJ1-1)
CASTHLGGNTEAFF

SEQ ID NO: 602289 - protein, 15 aa, Homo sapiens
  CDR3 for alpha chain variable domain of TCR clone 301145 (TRAV12-1, TRAJ44)
CVADLATGTASKLTF

SEQ ID NO: 602290 - protein, 13 aa, Homo sapiens
  CDR3 for beta chain variable domain of TCR clone 301145 (TRBV7-9, TRBJ1-2)
CASSLKQNYGYTF

SEQ ID NO: 602291 - protein, 12 aa, Homo sapiens
  CDR3 for alpha chain variable domain of TCR clone 301146 (TRAV13-1, TRAJ40)
YAASWATYKYIF

SEQ ID NO: 602292 - protein, 15 aa, Homo sapiens
  CDR3 for beta chain variable domain of TCR clone 301146 (TRBV7-8, TRBJ2-1)
CASSSRLAAYNEQFF

SEQ ID NO: 602293 - protein, 17 aa, Homo sapiens
  CDR3 for alpha chain variable domain of TCR clone 301147 (TRAV3, TRAJ42)
CAVRDRDYGGSQGNLIF

SEQ ID NO: 602294 - protein, 14 aa, Homo sapiens
  CDR3 for beta chain variable domain of TCR clone 301147 (TRBV11-2, TRBJ2-5)
CASSRTGGIETQYF

SEQ ID NO: 602295 - protein, 14 aa, Homo sapiens
  CDR3 for alpha chain variable domain of TCR clone 301148 (TRAV12-3, TRAJ7)
CAMSEIGGNNRLAF

SEQ ID NO: 602296 - protein, 12 aa, Homo sapiens
  CDR3 for beta chain variable domain of TCR clone 301148 (TRBV5-4, TRBJ1-1)
CASSVDRREAFF

SEQ ID NO: 602297 - protein, 12 aa, Homo sapiens
  CDR3 for alpha chain variable domain of TCR clone 301149 (TRAV13-1, TRAJ21)
CAAKEGFNKFYF

SEQ ID NO: 602298 - protein, 15 aa, Homo sapiens
  CDR3 for beta chain variable domain of TCR clone 301149 (TRBV7-2, TRBJ2-1)
CASSLASGRVNEQFF

SEQ ID NO: 602299 - protein, 18 aa, Homo sapiens
  CDR3 for alpha chain variable domain of TCR clone 301150 (TRAV12-3, TRAJ28)
CAMSARGYSGAGSYQLTF

SEQ ID NO: 602300 - protein, 16 aa, Homo sapiens
  CDR3 for beta chain variable domain of TCR clone 301150 (TRBV6-1, TRBJ2-1)
CASILRQGSSYNEQFF

SEQ ID NO: 602301 - protein, 11 aa, Homo sapiens
  CDR3 for alpha chain variable domain of TCR clone 301151 (TRAV13-2, TRAJ22)
CAEIPLVLQGN

SEQ ID NO: 602302 - protein, 15 aa, Homo sapiens
  CDR3 for beta chain variable domain of TCR clone 301151 (TRBV11-3, TRBJ2-1)
CASSLAGQTYNEQFF

SEQ ID NO: 602303 - protein, 13 aa, Homo sapiens
  CDR3 for alpha chain variable domain of TCR clone 301152 (TRAV30, TRAJ24)
CGTVTDSWGKLQF

SEQ ID NO: 602304 - protein, 14 aa, Homo sapiens
  CDR3 for beta chain variable domain of TCR clone 301152 (TRBV6-3, TRBJ2-2)
CGSTYTPDTGELFF

SEQ ID NO: 602305 - protein, 14 aa, Homo sapiens
  CDR3 for alpha chain variable domain of TCR clone 301153 (TRAV12-2, TRAJ5)
CAVNRSTGRSTLTF

SEQ ID NO: 602306 - protein, 12 aa, Homo sapiens
  CDR3 for beta chain variable domain of TCR clone 301153 (TRBV19, TRBJ1-5)
CASSIAQQPQHF

SEQ ID NO: 602307 - protein, 15 aa, Homo sapiens
  CDR3 for alpha chain variable domain of TCR clone 301154 (TRAV12-1, TRAJ53)
CVVKSSGGSNYKLTF

SEQ ID NO: 602308 - protein, 14 aa, Homo sapiens
  CDR3 for beta chain variable domain of TCR clone 301154 (TRBV19, TRBJ2-1)
CASPTFVLSGEQFF

SEQ ID NO: 602309 - protein, 13 aa, Homo sapiens
  CDR3 for alpha chain variable domain of TCR clone 301155 (TRAV21, TRAJ20)
CAVGLRVDYKLSF

SEQ ID NO: 602310 - protein, 12 aa, Homo sapiens
  CDR3 for beta chain variable domain of TCR clone 301155 (TRBV19, TRBJ2-1)
CASSRQGAEQFF

SEQ ID NO: 602311 - protein, 14 aa, Homo sapiens
  CDR3 for alpha chain variable domain of TCR clone 301156 (TRAV36/DV7, TRAJ57)
RAVGFPGGSEKLVF

SEQ ID NO: 602312 - protein, 12 aa, Homo sapiens
  CDR3 for beta chain variable domain of TCR clone 301156 (TRBV19, TRBJ2-7)
CASTSGTYEQYF

SEQ ID NO: 602313 - protein, 16 aa, Homo sapiens
  CDR3 for alpha chain variable domain of TCR clone 301157 (TRAV8-3, TRAJ52)
CAVQPSGGTSYGKLTF

SEQ ID NO: 602314 - protein, 15 aa, Homo sapiens
  CDR3 for beta chain variable domain of TCR clone 301157 (TRBV11-2, TRBJ2-7)
CASSLAGGVATEQYF

SEQ ID NO: 602315 - protein, 12 aa, Homo sapiens
  CDR3 for alpha chain variable domain of TCR clone 301158 (TRAV12-2, TRAJ10)
WGVTGGGNKLTF

SEQ ID NO: 602316 - protein, 14 aa, Homo sapiens
  CDR3 for beta chain variable domain of TCR clone 301158 (TRBV12-4, TRBJ1-1)
FASSLGTGGTEAFF

SEQ ID NO: 602317 - protein, 11 aa, Homo sapiens
  CDR3 for alpha chain variable domain of TCR clone 301159 (TRAV1-2, TRAJ40)
CAVPGTYKYIF

SEQ ID NO: 602318 - protein, 15 aa, Homo sapiens
  CDR3 for beta chain variable domain of TCR clone 301159 (TRBV11-3, TRBJ2-3)
CASLKDGREGDTQYF

SEQ ID NO: 602319 - protein, 12 aa, Homo sapiens
  CDR3 for alpha chain variable domain of TCR clone 301160 (TRAV12-3, TRAJ5)
CAMDTGRRALTF

SEQ ID NO: 602320 - protein, 13 aa, Homo sapiens
  CDR3 for beta chain variable domain of TCR clone 301160 (TRBV7-7, TRBJ2-2)
CASSLTSAVELFF

SEQ ID NO: 602321 - protein, 14 aa, Homo sapiens
  CDR3 for alpha chain variable domain of TCR clone 301161 (TRAV30, TRAJ26)
CGTESVSYGQNFVF

SEQ ID NO: 602322 - protein, 13 aa, Homo sapiens
  CDR3 for beta chain variable domain of TCR clone 301161 (TRBV19, TRBJ1-3)
CASRLSLGNTIYF

SEQ ID NO: 602323 - protein, 14 aa, Homo sapiens
  CDR3 for alpha chain variable domain of TCR clone 301162 (TRAV12-2, TRAJ17)
CAALFKAAGNKLTF

SEQ ID NO: 602324 - protein, 16 aa, Homo sapiens
  CDR3 for beta chain variable domain of TCR clone 301162 (TRBV20-1, TRBJ2-2)
CSASASGIPWAGELFF

SEQ ID NO: 602325 - protein, 12 aa, Homo sapiens
  CDR3 for alpha chain variable domain of TCR clone 301163 (TRAV13-1, TRAJ42)
VNYGGSQGNLIF

SEQ ID NO: 602326 - protein, 13 aa, Homo sapiens
  CDR3 for beta chain variable domain of TCR clone 301163 (TRBV12-4, TRBJ1-1)
CASSPGTGFEAFF

SEQ ID NO: 602327 - protein, 12 aa, Homo sapiens
  CDR3 for alpha chain variable domain of TCR clone 301164 (TRAV12-1, TRAJ11)
CGERAGYSTLTF

SEQ ID NO: 602328 - protein, 15 aa, Homo sapiens
  CDR3 for beta chain variable domain of TCR clone 301164 (TRBV7-3, TRBJ2-2)
CASSETGQGTGELFF

SEQ ID NO: 602329 - protein, 16 aa, Homo sapiens
  CDR3 for alpha chain variable domain of TCR clone 301165 (TRAV23/DV6, TRAJ9)
CAARIGGNTGGFKTIF

SEQ ID NO: 602330 - protein, 13 aa, Homo sapiens
  CDR3 for beta chain variable domain of TCR clone 301165 (TRBV10-3, TRBJ2-7)
CASKLAVNYEQYF

SEQ ID NO: 602331 - protein, 14 aa, Homo sapiens
  CDR3 for alpha chain variable domain of TCR clone 301166 (TRAV12-1, TRAJ43)
CVVNGRSNNNDMRF

SEQ ID NO: 602332 - protein, 15 aa, Homo sapiens
  CDR3 for beta chain variable domain of TCR clone 301166 (TRBV7-9, TRBJ2-2)
CASGPLDTFPGELFF

SEQ ID NO: 602333 - protein, 14 aa, Homo sapiens
  CDR3 for alpha chain variable domain of TCR clone 301167 (TRAV13-2, TRAJ6)
CAESTSGGSYIPTF

SEQ ID NO: 602334 - protein, 15 aa, Homo sapiens
  CDR3 for beta chain variable domain of TCR clone 301167 (TRBV20-1, TRBJ2-3)
CSATPGMLGTDTQYF

SEQ ID NO: 602335 - protein, 13 aa, Homo sapiens
  CDR3 for alpha chain variable domain of TCR clone 301168 (TRAV17, TRAJ30)
CATGGNRDDKIIF

SEQ ID NO: 602336 - protein, 13 aa, Homo sapiens
  CDR3 for beta chain variable domain of TCR clone 301168 (TRBV7-7, TRBJ2-2)
CASSLTSAGELFF

SEQ ID NO: 602337 - protein, 14 aa, Homo sapiens
  CDR3 for alpha chain variable domain of TCR clone 301169 (TRAV12-3, TRAJ10)
SHLPLTGGGNKLTF

SEQ ID NO: 602338 - protein, 14 aa, Homo sapiens
  CDR3 for beta chain variable domain of TCR clone 301169 (TRBV19, TRBJ2-1)
CASPTFVLSFEQFF

SEQ ID NO: 602339 - protein, 12 aa, Homo sapiens
  CDR3 for alpha chain variable domain of TCR clone 301170 (TRAV21, TRAJ13)
PGPSGGYQKVTF

SEQ ID NO: 602340 - protein, 15 aa, Homo sapiens
  CDR3 for beta chain variable domain of TCR clone 301170 (TRBV3-1, TRBJ2-5)
CASSANLGGPETQYF

SEQ ID NO: 602341 - protein, 13 aa, Homo sapiens
  CDR3 for alpha chain variable domain of TCR clone 301171 (TRAV26-2, TRAJ43)
CILRAVNNNDMRF

SEQ ID NO: 602342 - protein, 19 aa, Homo sapiens
  CDR3 for beta chain variable domain of TCR clone 301171 (TRBV2, TRBJ2-2)
CASSQPGLAGGGNTGELFF

SEQ ID NO: 602343 - protein, 14 aa, Homo sapiens
  CDR3 for alpha chain variable domain of TCR clone 301172 (TRAV12-2, TRAJ13)
CAVKKTGGYQKVTF

SEQ ID NO: 602344 - protein, 18 aa, Homo sapiens
  CDR3 for beta chain variable domain of TCR clone 301172 (TRBV3-1, TRBJ2-5)
CASSQAGTSGGGRETQYF

SEQ ID NO: 602345 - protein, 19 aa, Homo sapiens
  CDR3 for alpha chain variable domain of TCR clone 301173 (TRAV17, TRAJ40)
TASRAADTASYFCASKYIF

SEQ ID NO: 602346 - protein, 15 aa, Homo sapiens
  CDR3 for beta chain variable domain of TCR clone 301173 (TRBV19, TRBJ1-2)
CASSVGQVLNYGYTF

SEQ ID NO: 602347 - protein, 13 aa, Homo sapiens
  CDR3 for alpha chain variable domain of TCR clone 301174 (TRAV27, TRAJ17)
CAGAATAGNKLTF

SEQ ID NO: 602348 - protein, 15 aa, Homo sapiens
  CDR3 for beta chain variable domain of TCR clone 301174 (TRBV5-1, TRBJ2-3)
CASRNQAGSTGTQYF

SEQ ID NO: 602349 - protein, 13 aa, Homo sapiens
  CDR3 for alpha chain variable domain of TCR clone 301175 (TRAV9-2, TRAJ53)
CALSGGSNSKLTF

SEQ ID NO: 602350 - protein, 17 aa, Homo sapiens
  CDR3 for beta chain variable domain of TCR clone 301175 (TRBV11-2, TRBJ2-1)
CASSLYPPGVEYNEQSF

SEQ ID NO: 602351 - protein, 13 aa, Homo sapiens
  CDR3 for alpha chain variable domain of TCR clone 301176 (TRAV26-1, TRAJ43)
CIVRVGLNNDMRF

SEQ ID NO: 602352 - protein, 14 aa, Homo sapiens
  CDR3 for beta chain variable domain of TCR clone 301176 (TRBV20-1, TRBJ2-3)
CSARGGTSTDTQYF

SEQ ID NO: 602353 - protein, 12 aa, Homo sapiens
  CDR3 for alpha chain variable domain of TCR clone 301177 (TRAV2, TRAJ20)
CAVRRNDYKLSF

SEQ ID NO: 602354 - protein, 14 aa, Homo sapiens
  CDR3 for beta chain variable domain of TCR clone 301177 (TRBV20-1, TRBJ2-2)
CSASEGQGTGELFF

SEQ ID NO: 602355 - protein, 14 aa, Homo sapiens
  CDR3 for alpha chain variable domain of TCR clone 301178 (TRAV35, TRAJ33)
CAGSSQDSNYQLLW

SEQ ID NO: 602356 - protein, 15 aa, Homo sapiens
  CDR3 for beta chain variable domain of TCR clone 301178 (TRBV5-1, TRBJ1-4)
FAPAAWKDGNEKLFF

SEQ ID NO: 602357 - protein, 12 aa, Homo sapiens
  CDR3 for alpha chain variable domain of TCR clone 301179 (TRAV21, TRAJ23)
CAVMLQGGKLIF

SEQ ID NO: 602358 - protein, 14 aa, Homo sapiens
  CDR3 for beta chain variable domain of TCR clone 301179 (TRBV7-9, TRBJ1-4)
CAITEGEAKEKLFF

SEQ ID NO: 602359 - protein, 14 aa, Homo sapiens
  CDR3 for alpha chain variable domain of TCR clone 301180 (TRAV17, TRAJ57)
CATDPQGGSEKLVF

SEQ ID NO: 602360 - protein, 12 aa, Homo sapiens
  CDR3 for beta chain variable domain of TCR clone 301180 (TRBV20-1, TRBJ2-7)
CSAGLKMGEQYF

SEQ ID NO: 602361 - protein, 11 aa, Homo sapiens
  CDR3 for alpha chain variable domain of TCR clone 301181 (TRAV1-2, TRAJ20)
CAVANDYKLSF

SEQ ID NO: 602362 - protein, 14 aa, Homo sapiens
  CDR3 for beta chain variable domain of TCR clone 301181 (TRBV11-2, TRBJ2-7)
CASSLGAGAYEQYF

SEQ ID NO: 602363 - protein, 12 aa, Homo sapiens
  CDR3 for alpha chain variable domain of TCR clone 301182 (TRAV13-1, TRAJ27)
CAAHTNAGNSTF

SEQ ID NO: 602364 - protein, 13 aa, Homo sapiens
  CDR3 for beta chain variable domain of TCR clone 301182 (TRBV20-1, TRBJ1-1)
CSARGGGNTEAFF

SEQ ID NO: 602365 - protein, 13 aa, Homo sapiens
  CDR3 for alpha chain variable domain of TCR clone 301183 (TRAV16, TRAJ22)
SAMLAGSARQLTF

SEQ ID NO: 602366 - protein, 13 aa, Homo sapiens
  CDR3 for beta chain variable domain of TCR clone 301183 (TRBV7-2, TRBJ2-2)
CASSSVRAGELFF

SEQ ID NO: 602367 - protein, 12 aa, Homo sapiens
  CDR3 for alpha chain variable domain of TCR clone 301184 (TRAV12-2, TRAJ8)
CAVNTGFQKLVF

SEQ ID NO: 602368 - protein, 15 aa, Homo sapiens
  CDR3 for beta chain variable domain of TCR clone 301184 (TRBV7-8, TRBJ1-5)
CGSSLERRGLEPQHF

SEQ ID NO: 602369 - protein, 12 aa, Homo sapiens
  CDR3 for alpha chain variable domain of TCR clone 301185 (TRAV8-3, TRAJ20)
CAVGANDYRLSL

SEQ ID NO: 602370 - protein, 16 aa, Homo sapiens
  CDR3 for beta chain variable domain of TCR clone 301185 (TRBV19, TRBJ2-2)
CASRSPGTGATGELFF

SEQ ID NO: 602371 - protein, 15 aa, Homo sapiens
  CDR3 for alpha chain variable domain of TCR clone 301186 (TRAV8-6, TRAJ10)
CAVSDQAGGGNKLTF

SEQ ID NO: 602372 - protein, 15 aa, Homo sapiens
  CDR3 for beta chain variable domain of TCR clone 301186 (TRBV3-1, TRBJ2-5)
CASSANLGGPETQYV

SEQ ID NO: 602373 - protein, 14 aa, Homo sapiens
  CDR3 for alpha chain variable domain of TCR clone 301187 (TRAV1-2, TRAJ16)
CAVNRVSDGQKLLF

SEQ ID NO: 602374 - protein, 15 aa, Homo sapiens
  CDR3 for beta chain variable domain of TCR clone 301187 (TRBV7-9, TRBJ1-6)
CASSSPGRGNPPLHF

SEQ ID NO: 602375 - protein, 15 aa, Homo sapiens
  CDR3 for alpha chain variable domain of TCR clone 301188 (TRAV40, TRAJ45)
CLLGDLGGGADGLTF

SEQ ID NO: 602376 - protein, 13 aa, Homo sapiens
  CDR3 for beta chain variable domain of TCR clone 301188 (TRBV7-9, TRBJ1-2)
CTSSLKQNYGYTF

SEQ ID NO: 602377 - protein, 13 aa, Homo sapiens
  CDR3 for alpha chain variable domain of TCR clone 301189 (TRAV27, TRAJ17)
CAGAATAGNKLTF

SEQ ID NO: 602378 - protein, 11 aa, Homo sapiens
  CDR3 for beta chain variable domain of TCR clone 301189 (TRBV5-1, TRBJ2-3)
KPSGSTDTQYF

SEQ ID NO: 602379 - protein, 12 aa, Homo sapiens
  CDR3 for alpha chain variable domain of TCR clone 301190 (TRAV2, TRAJ9)
CAVGAGGFKTIF

SEQ ID NO: 602380 - protein, 16 aa, Homo sapiens
  CDR3 for beta chain variable domain of TCR clone 301190 (TRBV13, TRBJ2-2)
CASSPRAGEHTGKLFF

SEQ ID NO: 602381 - protein, 18 aa, Homo sapiens
  CDR3 for alpha chain variable domain of TCR clone 301191 (TRAV26-2, TRAJ43)
CILRQGRYTITMTCALEQ

SEQ ID NO: 602382 - protein, 14 aa, Homo sapiens
  CDR3 for beta chain variable domain of TCR clone 301191 (TRBV7-9, TRBJ2-7)
CASSLDRPTDEQYF

SEQ ID NO: 602383 - protein, 13 aa, Homo sapiens
  CDR3 for alpha chain variable domain of TCR clone 301192 (TRAV2, TRAJ40)
CAVVTSGTYKYIF

SEQ ID NO: 602384 - protein, 14 aa, Homo sapiens
  CDR3 for beta chain variable domain of TCR clone 301192 (TRBV28, TRBJ2-5)
CASSLGDRAETQYF

SEQ ID NO: 602385 - protein, 14 aa, Homo sapiens
  CDR3 for alpha chain variable domain of TCR clone 301193 (TRAV12-2, TRAJ13)
CAVKKTGGYQKATF

SEQ ID NO: 602386 - protein, 12 aa, Homo sapiens
  CDR3 for beta chain variable domain of TCR clone 301193 (TRBV29-1, TRBJ1-1)
CSESDRNTEAFF

SEQ ID NO: 602387 - protein, 11 aa, Homo sapiens
  CDR3 for alpha chain variable domain of TCR clone 301194 (TRAV21, TRAJ43)
CASPIGNDMRF

SEQ ID NO: 602388 - protein, 13 aa, Homo sapiens
  CDR3 for beta chain variable domain of TCR clone 301194 (TRBV7-3, TRBJ1-2)
CASSLKRGYGYTF

SEQ ID NO: 602389 - protein, 15 aa, Homo sapiens
  CDR3 for alpha chain variable domain of TCR clone 301195 (TRAV21, TRAJ53)
CATLNSGGSNYKLTF

SEQ ID NO: 602390 - protein, 14 aa, Homo sapiens
  CDR3 for beta chain variable domain of TCR clone 301195 (TRBV7-2, TRBJ2-7)
CASSPKTSSYEQYF

SEQ ID NO: 602391 - protein, 16 aa, Homo sapiens
  CDR3 for alpha chain variable domain of TCR clone 301196 (TRAV25, TRAJ24)
CAQRRGTTDSWGKLQF

SEQ ID NO: 602392 - protein, 16 aa, Homo sapiens
  CDR3 for beta chain variable domain of TCR clone 301196 (TRBV9, TRBJ2-1)
CASSVGGGGNYNEQFF

SEQ ID NO: 602393 - protein, 11 aa, Homo sapiens
  CDR3 for alpha chain variable domain of TCR clone 301197 (TRAV1-1, TRAJ23)
CAVRQGGKLIF

SEQ ID NO: 602394 - protein, 15 aa, Homo sapiens
  CDR3 for beta chain variable domain of TCR clone 301197 (TRBV11-2, TRBJ1-6)
CASTGFGTAVSPLHF

SEQ ID NO: 602395 - protein, 14 aa, Homo sapiens
  CDR3 for alpha chain variable domain of TCR clone 301198 (TRAV12-2, TRAJ13)
CAVKKTGGYQKVTL

SEQ ID NO: 602396 - protein, 15 aa, Homo sapiens
  CDR3 for beta chain variable domain of TCR clone 301198 (TRBV20-1, TRBJ2-7)
CSARDRVSGMDEQYF

SEQ ID NO: 602397 - protein, 12 aa, Homo sapiens
  CDR3 for alpha chain variable domain of TCR clone 301199 (TRAV12-3, TRAJ17)
CAMTLTGNKPTF

SEQ ID NO: 602398 - protein, 15 aa, Homo sapiens
  CDR3 for beta chain variable domain of TCR clone 301199 (TRBV20-1, TRBJ2-7)
CSARDRVSGMDEQYL

SEQ ID NO: 602399 - protein, 15 aa, Homo sapiens
  CDR3 for alpha chain variable domain of TCR clone 301200 (TRAV12-1, TRAJ44)
CVVDTPQGTASKLTF

SEQ ID NO: 602400 - protein, 15 aa, Homo sapiens
  CDR3 for beta chain variable domain of TCR clone 301200 (TRBV12-4, TRBJ2-5)
CASSPPTGLQETQYF

SEQ ID NO: 602401 - protein, 15 aa, Homo sapiens
  CDR3 for alpha chain variable domain of TCR clone 301201 (TRAV21, TRAJ37)
CAVRPTLSNTGKLIF

SEQ ID NO: 602402 - protein, 16 aa, Homo sapiens
  CDR3 for beta chain variable domain of TCR clone 301201 (TRBV7-6, TRBJ2-1)
CASSAPGPSSYNEQFF

SEQ ID NO: 602403 - protein, 14 aa, Homo sapiens
  CDR3 for alpha chain variable domain of TCR clone 301202 (TRAV26-1, TRAJ45)
CIEVTGGGADGLTF

SEQ ID NO: 602404 - protein, 15 aa, Homo sapiens
  CDR3 for beta chain variable domain of TCR clone 301202 (TRBV7-9, TRBJ2-2)
CASSPETGAGGELFF

SEQ ID NO: 602405 - protein, 13 aa, Homo sapiens
  CDR3 for alpha chain variable domain of TCR clone 301203 (TRAV8-3, TRAJ48)
CAVVPFGNEKLTF

SEQ ID NO: 602406 - protein, 15 aa, Homo sapiens
  CDR3 for beta chain variable domain of TCR clone 301203 (TRBV11-2, TRBJ2-1)
CASGSPSTRYNEQFF

SEQ ID NO: 602407 - protein, 13 aa, Homo sapiens
  CDR3 for alpha chain variable domain of TCR clone 301204 (TRAV1-1, TRAJ23)
CAVVANQGGKIIF

SEQ ID NO: 602408 - protein, 16 aa, Homo sapiens
  CDR3 for beta chain variable domain of TCR clone 301204 (TRBV5-5, TRBJ1-2)
CASSPTWGRGLYGYTF

SEQ ID NO: 602409 - protein, 13 aa, Homo sapiens
  CDR3 for alpha chain variable domain of TCR clone 301205 (TRAV12-3, TRAJ40)
CAMSDSGTYKYNF

SEQ ID NO: 602410 - protein, 14 aa, Homo sapiens
  CDR3 for beta chain variable domain of TCR clone 301205 (TRBV7-2, TRBJ1-5)
CASSTQGAGQPQHF

SEQ ID NO: 602411 - protein, 11 aa, Homo sapiens
  CDR3 for alpha chain variable domain of TCR clone 301206 (TRAV1-2, TRAJ40)
CALPGTYKYIF

SEQ ID NO: 602412 - protein, 18 aa, Homo sapiens
  CDR3 for beta chain variable domain of TCR clone 301206 (TRBV29-1, TRBJ2-7)
CSVEVVGLAGATSSTSGR

SEQ ID NO: 602413 - protein, 16 aa, Homo sapiens
  CDR3 for alpha chain variable domain of TCR clone 301207 (TRAV8-4, TRAJ18)
CAVTAHGGSTLGRLYF

SEQ ID NO: 602414 - protein, 14 aa, Homo sapiens
  CDR3 for beta chain variable domain of TCR clone 301207 (TRBV12-4, TRBJ1-2)
CASSSAGHIYGYTF

SEQ ID NO: 602415 - protein, 15 aa, Homo sapiens
  CDR3 for alpha chain variable domain of TCR clone 301208 (TRAV2, TRAJ22)
GAVPSRGGSARQLTF

SEQ ID NO: 602416 - protein, 11 aa, Homo sapiens
  CDR3 for beta chain variable domain of TCR clone 301208 (TRBV27, TRBJ2-3)
CASSLGDTQYF

SEQ ID NO: 602417 - protein, 12 aa, Homo sapiens
  CDR3 for alpha chain variable domain of TCR clone 301209 (TRAV23/DV6, TRAJ17)
CAAKAAGNKLTF

SEQ ID NO: 602418 - protein, 14 aa, Homo sapiens
  CDR3 for beta chain variable domain of TCR clone 301209 (TRBV7-2, TRBJ2-7)
CASRSQGAAYEQYF

SEQ ID NO: 602419 - protein, 12 aa, Homo sapiens
  CDR3 for alpha chain variable domain of TCR clone 301210 (TRAV16, TRAJ10)
CSRTGGGTKLTF

SEQ ID NO: 602420 - protein, 13 aa, Homo sapiens
  CDR3 for beta chain variable domain of TCR clone 301210 (TRBV15, TRBJ2-7)
CATSTTGHYEQYF

SEQ ID NO: 602421 - protein, 14 aa, Homo sapiens
  CDR3 for alpha chain variable domain of TCR clone 301211 (TRAV23/DV6, TRAJ11)
CAASLESGYTTLTF

SEQ ID NO: 602422 - protein, 13 aa, Homo sapiens
  CDR3 for beta chain variable domain of TCR clone 301211 (TRBV4-1, TRBJ2-5)
CASSLTRGETQYF

SEQ ID NO: 602423 - protein, 13 aa, Homo sapiens
  CDR3 for alpha chain variable domain of TCR clone 301212 (TRAV12-2, TRAJ39)
CAVNNNAGNMLTF

SEQ ID NO: 602424 - protein, 13 aa, Homo sapiens
  CDR3 for beta chain variable domain of TCR clone 301212 (TRBV2, TRBJ1-5)
CDTAGPGNQPQHF

SEQ ID NO: 602425 - protein, 16 aa, Homo sapiens
  CDR3 for alpha chain variable domain of TCR clone 301213 (TRAV21, TRAJ37)
CAVRTAGSSDTGKLIF

SEQ ID NO: 602426 - protein, 13 aa, Homo sapiens
  CDR3 for beta chain variable domain of TCR clone 301213 (TRBV7-9, TRBJ2-5)
CASRPSGREAQYF

SEQ ID NO: 602427 - protein, 13 aa, Homo sapiens
  CDR3 for alpha chain variable domain of TCR clone 301214 (TRAV1-2, TRAJ12)
CAVSMDSSYKLIF

SEQ ID NO: 602428 - protein, 15 aa, Homo sapiens
  CDR3 for beta chain variable domain of TCR clone 301214 (TRBV13, TRBJ1-5)
CASSFGQGGVQPQHF

SEQ ID NO: 602429 - protein, 16 aa, Homo sapiens
  CDR3 for alpha chain variable domain of TCR clone 301215 (TRAV3, TRAJ37)
CAVRGKGPGNTGKLIF

SEQ ID NO: 602430 - protein, 13 aa, Homo sapiens
  CDR3 for beta chain variable domain of TCR clone 301215 (TRBV10-3, TRBJ1-2)
CAISERDSYGYTF

SEQ ID NO: 602431 - protein, 22 aa, Homo sapiens
  CDR3 for alpha chain variable domain of TCR clone 301216 (TRAV12-1, TRAJ10)
CVWGRYTHGRRKQTPLWDRHSA

SEQ ID NO: 602432 - protein, 16 aa, Homo sapiens
  CDR3 for beta chain variable domain of TCR clone 301216 (TRBV20-1, TRBJ2-1)
CSARSTSESSYNEQFF

SEQ ID NO: 602433 - protein, 13 aa, Homo sapiens
  CDR3 for alpha chain variable domain of TCR clone 301217 (TRAV8-1, TRAJ30)
CAVNSNRDDKIIF

SEQ ID NO: 602434 - protein, 12 aa, Homo sapiens
  CDR3 for beta chain variable domain of TCR clone 301217 (TRBV20-1, TRBJ1-1)
QCSTWGGTEAFF

SEQ ID NO: 602435 - protein, 14 aa, Homo sapiens
  CDR3 for alpha chain variable domain of TCR clone 301218 (TRAV9-2, TRAJ39)
CALYIYNAGNMLTF

SEQ ID NO: 602436 - protein, 15 aa, Homo sapiens
  CDR3 for beta chain variable domain of TCR clone 301218 (TRBV7-3, TRBJ2-1)
CASSQRGGALIEQVF

SEQ ID NO: 602437 - protein, 14 aa, Homo sapiens
  CDR3 for alpha chain variable domain of TCR clone 301219 (TRAV12-2, TRAJ45)
CAVNIGGGADGLTF

SEQ ID NO: 602438 - protein, 13 aa, Homo sapiens
  CDR3 for beta chain variable domain of TCR clone 301219 (TRBV19, TRBJ2-2)
CARSIWSTGELFF

SEQ ID NO: 602439 - protein, 16 aa, Homo sapiens
  CDR3 for alpha chain variable domain of TCR clone 301220 (TRAV26-2, TRAJ57)
CILRDVGSGGSEKLVF

SEQ ID NO: 602440 - protein, 13 aa, Homo sapiens
  CDR3 for beta chain variable domain of TCR clone 301220 (TRBV18, TRBJ2-3)
CASSPGVTDTPYF

SEQ ID NO: 602441 - protein, 15 aa, Homo sapiens
  CDR3 for alpha chain variable domain of TCR clone 301221 (TRAV17, TRAJ57)
YATGPSQGGSEKLVF

SEQ ID NO: 602442 - protein, 14 aa, Homo sapiens
  CDR3 for beta chain variable domain of TCR clone 301221 (TRBV12-5, TRBJ2-5)
CASGSRTHQETQYF

SEQ ID NO: 602443 - protein, 12 aa, Homo sapiens
  CDR3 for alpha chain variable domain of TCR clone 301222 (TRAV13-1, TRAJ21)
CAAKEGLNKFYF

SEQ ID NO: 602444 - protein, 15 aa, Homo sapiens
  CDR3 for beta chain variable domain of TCR clone 301222 (TRBV7-7, TRBJ2-5)
CASSQLERAEETQYF

SEQ ID NO: 602445 - protein, 14 aa, Homo sapiens
  CDR3 for alpha chain variable domain of TCR clone 301223 (TRAV29/DV5, TRAJ44)
CAAFLVGTASTLTF

SEQ ID NO: 602446 - protein, 15 aa, Homo sapiens
  CDR3 for beta chain variable domain of TCR clone 301223 (TRBV7-3, TRBJ2-2)
CASSETGQGTGELFF

SEQ ID NO: 602447 - protein, 14 aa, Homo sapiens
  CDR3 for alpha chain variable domain of TCR clone 301224 (TRAV2, TRAJ22)
CAVGRGGSARQLTF

SEQ ID NO: 602448 - protein, 15 aa, Homo sapiens
  CDR3 for beta chain variable domain of TCR clone 301224 (TRBV11-2, TRBJ2-1)
CASSLTSGGYNEQFF

SEQ ID NO: 602449 - protein, 14 aa, Homo sapiens
  CDR3 for alpha chain variable domain of TCR clone 301225 (TRAV9-2, TRAJ39)
CALYIYNAGNMLTF

SEQ ID NO: 602450 - protein, 14 aa, Homo sapiens
  CDR3 for beta chain variable domain of TCR clone 301225 (TRBV18, TRBJ2-3)
CASSPRTSTDTQYF

SEQ ID NO: 602451 - protein, 12 aa, Homo sapiens
  CDR3 for alpha chain variable domain of TCR clone 301226 (TRAV30, TRAJ39)
CGRGSAGNMLTF

SEQ ID NO: 602452 - protein, 14 aa, Homo sapiens
  CDR3 for beta chain variable domain of TCR clone 301226 (TRBV10-3, TRBJ2-1)
CAIRTDRGLNEQFF

SEQ ID NO: 602453 - protein, 14 aa, Homo sapiens
  CDR3 for alpha chain variable domain of TCR clone 301227 (TRAV1-2, TRAJ16)
CAVNRMSDGQKLLF

SEQ ID NO: 602454 - protein, 15 aa, Homo sapiens
  CDR3 for beta chain variable domain of TCR clone 301227 (TRBV7-9, TRBJ1-6)
CASSSPGRGNSPLHF

SEQ ID NO: 602455 - protein, 13 aa, Homo sapiens
  CDR3 for alpha chain variable domain of TCR clone 301228 (TRAV4, TRAJ44)
CLEETGTASKLTF

SEQ ID NO: 602456 - protein, 15 aa, Homo sapiens
  CDR3 for beta chain variable domain of TCR clone 301228 (TRBV20-1, TRBJ2-7)
CSARDRVSGMDEQYF

SEQ ID NO: 602457 - protein, 11 aa, Homo sapiens
  CDR3 for alpha chain variable domain of TCR clone 301229 (TRAV1-2, TRAJ20)
CAVSNDYKLSF

SEQ ID NO: 602458 - protein, 18 aa, Homo sapiens
  CDR3 for beta chain variable domain of TCR clone 301229 (TRBV12-4, TRBJ2-2)
CASSLVAGTRGRTGELFF

SEQ ID NO: 602459 - protein, 16 aa, Homo sapiens
  CDR3 for alpha chain variable domain of TCR clone 301230 (TRAV16, TRAJ4)
CITVLPFSGGYNKLIF

SEQ ID NO: 602460 - protein, 18 aa, Homo sapiens
  CDR3 for beta chain variable domain of TCR clone 301230 (TRBV2, TRBJ2-3)
CASSDLDRGRQIRSILAQ

SEQ ID NO: 602461 - protein, 14 aa, Homo sapiens
  CDR3 for alpha chain variable domain of TCR clone 301231 (TRAV13-1, TRAJ9)
CAASALTGGFKTSF

SEQ ID NO: 602462 - protein, 16 aa, Homo sapiens
  CDR3 for beta chain variable domain of TCR clone 301231 (TRBV7-8, TRBJ2-4)
CASSAERTLAKNIQYF

SEQ ID NO: 602463 - protein, 16 aa, Homo sapiens
  CDR3 for alpha chain variable domain of TCR clone 301232 (TRAV30, TRAJ24)
CGTEMVDADSWGKFQF

SEQ ID NO: 602464 - protein, 15 aa, Homo sapiens
  CDR3 for beta chain variable domain of TCR clone 301232 (TRBV19, TRBJ2-1)
CASSIGLAGWDEQFF

SEQ ID NO: 602465 - protein, 17 aa, Homo sapiens
  CDR3 for alpha chain variable domain of TCR clone 301233 (TRAV3, TRAJ42)
CAVRDRDYGGSQGNLIF

SEQ ID NO: 602466 - protein, 13 aa, Homo sapiens
  CDR3 for beta chain variable domain of TCR clone 301233 (TRBV19, TRBJ2-7)
CASSPRQSDEQYF

SEQ ID NO: 602467 - protein, 15 aa, Homo sapiens
  CDR3 for alpha chain variable domain of TCR clone 301234 (TRAV27, TRAJ38)
CAARRNAGNKRKLIW

SEQ ID NO: 602468 - protein, 13 aa, Homo sapiens
  CDR3 for beta chain variable domain of TCR clone 301234 (TRBV20-1, TRBJ1-1)
CSARAGGNTEAFF

SEQ ID NO: 602469 - protein, 12 aa, Homo sapiens
  CDR3 for alpha chain variable domain of TCR clone 301235 (TRAV12-2, TRAJ10)
WGVTGGGNKLTF

SEQ ID NO: 602470 - protein, 18 aa, Homo sapiens
  CDR3 for beta chain variable domain of TCR clone 301235 (TRBV7-9, TRBJ2-7)
CASSLTTSGSRTWYEQYF

SEQ ID NO: 602471 - protein, 14 aa, Homo sapiens
  CDR3 for alpha chain variable domain of TCR clone 301236 (TRAV38-1, TRAJ40)
CALRPTSGTYKYIF

SEQ ID NO: 602472 - protein, 15 aa, Homo sapiens
  CDR3 for beta chain variable domain of TCR clone 301236 (TRBV11-3, TRBJ2-3)
CASLKGGREGDTQYF

SEQ ID NO: 602473 - protein, 13 aa, Homo sapiens
  CDR3 for alpha chain variable domain of TCR clone 301237 (TRAV13-1, TRAJ21)
CAASIYNFTPFYF

SEQ ID NO: 602474 - protein, 13 aa, Homo sapiens
  CDR3 for beta chain variable domain of TCR clone 301237 (TRBV27, TRBJ1-4)
CASSLMGDEKLFF

SEQ ID NO: 602475 - protein, 11 aa, Homo sapiens
  CDR3 for alpha chain variable domain of TCR clone 301238 (TRAV21, TRAJ34)
CAHYNTDKLIF

SEQ ID NO: 602476 - protein, 16 aa, Homo sapiens
  CDR3 for beta chain variable domain of TCR clone 301238 (TRBV5-1, TRBJ2-2)
CASSSRTGGRTGELFF

SEQ ID NO: 602477 - protein, 14 aa, Homo sapiens
  CDR3 for alpha chain variable domain of TCR clone 301239 (TRAV8-1, TRAJ34)
CAVNPSYNTDKLIF

SEQ ID NO: 602478 - protein, 16 aa, Homo sapiens
  CDR3 for beta chain variable domain of TCR clone 301239 (TRBV7-2, TRBJ2-6)
FASSLAGRSGANVLSF

SEQ ID NO: 602479 - protein, 13 aa, Homo sapiens
  CDR3 for alpha chain variable domain of TCR clone 301240 (TRAV8-6, TRAJ49)
CAVITNTGNQFYF

SEQ ID NO: 602480 - protein, 14 aa, Homo sapiens
  CDR3 for beta chain variable domain of TCR clone 301240 (TRBV4-2, TRBJ2-7)
CASGHRTGEYEQYF

SEQ ID NO: 602481 - protein, 12 aa, Homo sapiens
  CDR3 for alpha chain variable domain of TCR clone 301241 (TRAV21, TRAJ23)
CAVGPQGGKHIF

SEQ ID NO: 602482 - protein, 16 aa, Homo sapiens
  CDR3 for beta chain variable domain of TCR clone 301241 (TRBV7-3, TRBJ2-2)
CASSLKRGTLSGELFF

SEQ ID NO: 602483 - protein, 13 aa, Homo sapiens
  CDR3 for alpha chain variable domain of TCR clone 301242 (TRAV12-3, TRAJ13)
CAMSSGGYEKVTF

SEQ ID NO: 602484 - protein, 16 aa, Homo sapiens
  CDR3 for beta chain variable domain of TCR clone 301242 (TRBV4-1, TRBJ2-7)
CASSRGDILNSYEQYF

SEQ ID NO: 602485 - protein, 18 aa, Homo sapiens
  CDR3 for alpha chain variable domain of TCR clone 301243 (TRAV21, TRAJ52)
CVVRHSQAGGASYGKLTF

SEQ ID NO: 602486 - protein, 17 aa, Homo sapiens
  CDR3 for beta chain variable domain of TCR clone 301243 (TRBV13, TRBJ2-3)
CASSLSRVAGGRNTQYF

SEQ ID NO: 602487 - protein, 13 aa, Homo sapiens
  CDR3 for alpha chain variable domain of TCR clone 301244 (TRAV22, TRAJ29)
CAVGGSGNTPLVF

SEQ ID NO: 602488 - protein, 13 aa, Homo sapiens
  CDR3 for beta chain variable domain of TCR clone 301244 (TRBV4-2, TRBJ1-1)
CASSQAGNTEEFF

SEQ ID NO: 602489 - protein, 16 aa, Homo sapiens
  CDR3 for alpha chain variable domain of TCR clone 301245 (TRAV1-2, TRAJ10)
CAVRGVLTGGGNKLTF

SEQ ID NO: 602490 - protein, 18 aa, Homo sapiens
  CDR3 for beta chain variable domain of TCR clone 301245 (TRBV18, TRBJ2-1)
CASCPNWGQGAPKCEQFF

SEQ ID NO: 602491 - protein, 16 aa, Homo sapiens
  CDR3 for alpha chain variable domain of TCR clone 301246 (TRAV3, TRAJ37)
CAVRGKGSGNTGKLIF

SEQ ID NO: 602492 - protein, 12 aa, Homo sapiens
  CDR3 for beta chain variable domain of TCR clone 301246 (TRBV29-1, TRBJ2-7)
CSARDRPYEQYF

SEQ ID NO: 602493 - protein, 14 aa, Homo sapiens
  CDR3 for alpha chain variable domain of TCR clone 301247 (TRAV21, TRAJ58)
CAVRGETSGSRLTF

SEQ ID NO: 602494 - protein, 17 aa, Homo sapiens
  CDR3 for beta chain variable domain of TCR clone 301247 (TRBV28, TRBJ2-3)
CASSPTPAGGRVDTQYF

SEQ ID NO: 602495 - protein, 15 aa, Homo sapiens
  CDR3 for alpha chain variable domain of TCR clone 301248 (TRAV23/DV6, TRAJ18)
CAARYRGSTLGRLYF

SEQ ID NO: 602496 - protein, 12 aa, Homo sapiens
  CDR3 for beta chain variable domain of TCR clone 301248 (TRBV7-9, TRBJ2-7)
CASSIKREEQYF

SEQ ID NO: 602497 - protein, 13 aa, Homo sapiens
  CDR3 for alpha chain variable domain of TCR clone 301249 (TRAV12-3, TRAJ9)
CAMRNTGGFKTIF

SEQ ID NO: 602498 - protein, 14 aa, Homo sapiens
  CDR3 for beta chain variable domain of TCR clone 301249 (TRBV11-2, TRBJ2-7)
CASSSTGAGYEQYF

SEQ ID NO: 602499 - protein, 14 aa, Homo sapiens
  CDR3 for alpha chain variable domain of TCR clone 301250 (TRAV2, TRAJ37)
CAVDFTSNTGKLIF

SEQ ID NO: 602500 - protein, 13 aa, Homo sapiens
  CDR3 for beta chain variable domain of TCR clone 301250 (TRBV12-4, TRBJ2-7)
CASSPTETYEQYF

SEQ ID NO: 602501 - protein, 15 aa, Homo sapiens
  CDR3 for alpha chain variable domain of TCR clone 301251 (TRAV38-1, TRAJ37)
CAFIHGSGITGKLIF

SEQ ID NO: 602502 - protein, 12 aa, Homo sapiens
  CDR3 for beta chain variable domain of TCR clone 301251 (TRBV7-9, TRBJ2-7)
CASSFGSYEQYF

SEQ ID NO: 602503 - protein, 11 aa, Homo sapiens
  CDR3 for alpha chain variable domain of TCR clone 301252 (TRAV4, TRAJ28)
NPGAGSYQLTF

SEQ ID NO: 602504 - protein, 13 aa, Homo sapiens
  CDR3 for beta chain variable domain of TCR clone 301252 (TRBV12-4, TRBJ2-6)
CASSGTGANVLTF

SEQ ID NO: 602505 - protein, 14 aa, Homo sapiens
  CDR3 for alpha chain variable domain of TCR clone 301253 (TRAV12-2, TRAJ29)
CAVRRNSGNTPLVL

SEQ ID NO: 602506 - protein, 13 aa, Homo sapiens
  CDR3 for beta chain variable domain of TCR clone 301253 (TRBV12-4, TRBJ2-1)
CASSHYTDNEQFF

SEQ ID NO: 602507 - protein, 15 aa, Homo sapiens
  CDR3 for alpha chain variable domain of TCR clone 301254 (TRAV8-2, TRAJ40)
CVVCGTTSGTYKYIV

SEQ ID NO: 602508 - protein, 16 aa, Homo sapiens
  CDR3 for beta chain variable domain of TCR clone 301254 (TRBV7-3, TRBJ2-1)
CASSLEGYRSYNEQFF

SEQ ID NO: 602509 - protein, 14 aa, Homo sapiens
  CDR3 for alpha chain variable domain of TCR clone 301255 (TRAV35, TRAJ42)
CAGRYRGSQGNLIF

SEQ ID NO: 602510 - protein, 15 aa, Homo sapiens
  CDR3 for beta chain variable domain of TCR clone 301255 (TRBV7-9, TRBJ2-1)
CASSLGWGRANEQFF

SEQ ID NO: 602511 - protein, 11 aa, Homo sapiens
  CDR3 for alpha chain variable domain of TCR clone 301256 (TRAV12-2, TRAJ33)
CAVTSNYQLIW

SEQ ID NO: 602512 - protein, 14 aa, Homo sapiens
  CDR3 for beta chain variable domain of TCR clone 301256 (TRBV28, TRBJ2-2)
CASRIRSGIGELFF

SEQ ID NO: 602513 - protein, 16 aa, Homo sapiens
  CDR3 for alpha chain variable domain of TCR clone 301257 (TRAV16, TRAJ52)
CALSAAGGTSYGKLTF

SEQ ID NO: 602514 - protein, 16 aa, Homo sapiens
  CDR3 for beta chain variable domain of TCR clone 301257 (TRBV12-4, TRBJ1-5)
CASSRPVGGSNQHQHF

SEQ ID NO: 602515 - protein, 11 aa, Homo sapiens
  CDR3 for alpha chain variable domain of TCR clone 301258 (TRAV2, TRAJ20)
CAVEYDYKLSF

SEQ ID NO: 602516 - protein, 20 aa, Homo sapiens
  CDR3 for beta chain variable domain of TCR clone 301258 (TRBV7-8, TRBJ2-2)
CASSHLFPGPTIHITGELFF

SEQ ID NO: 602517 - protein, 14 aa, Homo sapiens
  CDR3 for alpha chain variable domain of TCR clone 301259 (TRAV8-3, TRAJ4)
CAVGAAGGYNKLIF

SEQ ID NO: 602518 - protein, 15 aa, Homo sapiens
  CDR3 for beta chain variable domain of TCR clone 301259 (TRBV5-1, TRBJ2-1)
CASSPPRAPYNEQFL

SEQ ID NO: 602519 - protein, 14 aa, Homo sapiens
  CDR3 for alpha chain variable domain of TCR clone 301260 (TRAV1-2, TRAJ16)
CAVNRFSDGQKLVF

SEQ ID NO: 602520 - protein, 13 aa, Homo sapiens
  CDR3 for beta chain variable domain of TCR clone 301260 (TRBV12-5, TRBJ2-3)
CASGDRQSDTQYF

SEQ ID NO: 602521 - protein, 15 aa, Homo sapiens
  CDR3 for alpha chain variable domain of TCR clone 301261 (TRAV12-2, TRAJ53)
CAVNGGGGSNYKLTF

SEQ ID NO: 602522 - protein, 15 aa, Homo sapiens
  CDR3 for beta chain variable domain of TCR clone 301261 (TRBV7-3, TRBJ2-1)
CASSLGQGPFGEQFF

SEQ ID NO: 602523 - protein, 13 aa, Homo sapiens
  CDR3 for alpha chain variable domain of TCR clone 301262 (TRAV20, TRAJ37)
CAGCSSNTGKLIF

SEQ ID NO: 602524 - protein, 15 aa, Homo sapiens
  CDR3 for beta chain variable domain of TCR clone 301262 (TRBV7-2, TRBJ2-1)
CANSFQADEYNEQFF

SEQ ID NO: 602525 - protein, 11 aa, Homo sapiens
  CDR3 for alpha chain variable domain of TCR clone 301263 (TRAV27, TRAJ45)
CAGAQEEVLTD

SEQ ID NO: 602526 - protein, 14 aa, Homo sapiens
  CDR3 for beta chain variable domain of TCR clone 301263 (TRBV9, TRBJ2-3)
CASSVGLSTDTQYF

SEQ ID NO: 602527 - protein, 13 aa, Homo sapiens
  CDR3 for alpha chain variable domain of TCR clone 301264 (TRAV13-1, TRAJ39)
CAVSIVMQATCSP

SEQ ID NO: 602528 - protein, 13 aa, Homo sapiens
  CDR3 for beta chain variable domain of TCR clone 301264 (TRBV2, TRBJ2-7)
CASSEGGQFEQYF

SEQ ID NO: 602529 - protein, 13 aa, Homo sapiens
  CDR3 for alpha chain variable domain of TCR clone 301265 (TRAV23/DV6, TRAJ34)
CAAIENNTDKPIF

SEQ ID NO: 602530 - protein, 14 aa, Homo sapiens
  CDR3 for beta chain variable domain of TCR clone 301265 (TRBV2, TRBJ1-5)
CASSENRGGQPQHF

SEQ ID NO: 602531 - protein, 14 aa, Homo sapiens
  CDR3 for alpha chain variable domain of TCR clone 301266 (TRAV12-1, TRAJ9)
CVVNRRTGGFKTIF

SEQ ID NO: 602532 - protein, 14 aa, Homo sapiens
  CDR3 for beta chain variable domain of TCR clone 301266 (TRBV7-8, TRBJ1-1)
CASSIRQGITEAFF

SEQ ID NO: 602533 - protein, 12 aa, Homo sapiens
  CDR3 for alpha chain variable domain of TCR clone 301267 (TRAV12-2, TRAJ10)
WGVTGGGNELTF

SEQ ID NO: 602534 - protein, 14 aa, Homo sapiens
  CDR3 for beta chain variable domain of TCR clone 301267 (TRBV7-3, TRBJ2-3)
CASSPSARTDTQYF

SEQ ID NO: 602535 - protein, 14 aa, Homo sapiens
  CDR3 for alpha chain variable domain of TCR clone 301268 (TRAV3, TRAJ34)
CAVRDINNTDKLIF

SEQ ID NO: 602536 - protein, 15 aa, Homo sapiens
  CDR3 for beta chain variable domain of TCR clone 301268 (TRBV20-1, TRBJ2-7)
CSARDRVSGMDEQFF

SEQ ID NO: 602537 - protein, 14 aa, Homo sapiens
  CDR3 for alpha chain variable domain of TCR clone 301269 (TRAV13-1, TRAJ35)
CAASKGGFGNVLHC

SEQ ID NO: 602538 - protein, 14 aa, Homo sapiens
  CDR3 for beta chain variable domain of TCR clone 301269 (TRBV25-1, TRBJ1-4)
CASSKQGANEKLFF

SEQ ID NO: 602539 - protein, 14 aa, Homo sapiens
  CDR3 for alpha chain variable domain of TCR clone 301270 (TRAV1-2, TRAJ8)
CAVREDTGFQKLVF

SEQ ID NO: 602540 - protein, 13 aa, Homo sapiens
  CDR3 for beta chain variable domain of TCR clone 301270 (TRBV15, TRBJ2-5)
CATSQIGEETQYF

SEQ ID NO: 602541 - protein, 15 aa, Homo sapiens
  CDR3 for alpha chain variable domain of TCR clone 301271 (TRAV23/DV6, TRAJ18)
CAASFRGSTLRRLYF

SEQ ID NO: 602542 - protein, 13 aa, Homo sapiens
  CDR3 for beta chain variable domain of TCR clone 301271 (TRBV28, TRBJ2-7)
CAILDRAGGEQYF

SEQ ID NO: 602543 - protein, 14 aa, Homo sapiens
  CDR3 for alpha chain variable domain of TCR clone 301272 (TRAV8-3, TRAJ44)
CAVGLTGTASNLTF

SEQ ID NO: 602544 - protein, 12 aa, Homo sapiens
  CDR3 for beta chain variable domain of TCR clone 301272 (TRBV7-3, TRBJ2-1)
CASSLGFNEQFF

SEQ ID NO: 602545 - protein, 15 aa, Homo sapiens
  CDR3 for alpha chain variable domain of TCR clone 301273 (TRAV3, TRAJ22)
CAVRDRGGSARQLTF

SEQ ID NO: 602546 - protein, 13 aa, Homo sapiens
  CDR3 for beta chain variable domain of TCR clone 301273 (TRBV20-1, TRBJ1-1)
CSAPLGGGTEAFF

SEQ ID NO: 602547 - protein, 14 aa, Homo sapiens
  CDR3 for alpha chain variable domain of TCR clone 301274 (TRAV8-3, TRAJ9)
CAVVYNTGGFKTIF

SEQ ID NO: 602548 - protein, 13 aa, Homo sapiens
  CDR3 for beta chain variable domain of TCR clone 301274 (TRBV7-3, TRBJ2-1)
CASSLDSYNEQFF

SEQ ID NO: 602549 - protein, 14 aa, Homo sapiens
  CDR3 for alpha chain variable domain of TCR clone 301275 (TRAV12-2, TRAJ13)
CAVKKTGGYQKVTF

SEQ ID NO: 602550 - protein, 13 aa, Homo sapiens
  CDR3 for beta chain variable domain of TCR clone 301275 (TRBV20-1, TRBJ1-1)
CSARLEQGTEAFF

SEQ ID NO: 602551 - protein, 15 aa, Homo sapiens
  CDR3 for alpha chain variable domain of TCR clone 301276 (TRAV3, TRAJ4)
CAVRDGTGGYNKLIF

SEQ ID NO: 602552 - protein, 15 aa, Homo sapiens
  CDR3 for beta chain variable domain of TCR clone 301276 (TRBV27, TRBJ2-7)
CACSPDQGRLYEQYF

SEQ ID NO: 602553 - protein, 14 aa, Homo sapiens
  CDR3 for alpha chain variable domain of TCR clone 301277 (TRAV1-2, TRAJ16)
CSVNRFSDGQKLLF

SEQ ID NO: 602554 - protein, 13 aa, Homo sapiens
  CDR3 for beta chain variable domain of TCR clone 301277 (TRBV27, TRBJ1-1)
CASSLSIGAEAFF

SEQ ID NO: 602555 - protein, 16 aa, Homo sapiens
  CDR3 for alpha chain variable domain of TCR clone 301278 (TRAV8-6, TRAJ58)
CALSDHTETSGSRLTF

SEQ ID NO: 602556 - protein, 14 aa, Homo sapiens
  CDR3 for beta chain variable domain of TCR clone 301278 (TRBV7-2, TRBJ1-5)
CASSPRGGPLPQHF

SEQ ID NO: 602557 - protein, 17 aa, Homo sapiens
  CDR3 for alpha chain variable domain of TCR clone 301279 (TRAV3, TRAJ38)
CAVRDCLNAGNNRKLIW

SEQ ID NO: 602558 - protein, 16 aa, Homo sapiens
  CDR3 for beta chain variable domain of TCR clone 301279 (TRBV2, TRBJ2-1)
CASSVGGSLSYNEQFF

SEQ ID NO: 602559 - protein, 11 aa, Homo sapiens
  CDR3 for alpha chain variable domain of TCR clone 301280 (TRAV8-4, TRAJ20)
CAVTNVLTTTS

SEQ ID NO: 602560 - protein, 17 aa, Homo sapiens
  CDR3 for beta chain variable domain of TCR clone 301280 (TRBV5-1, TRBJ2-2)
CASSPRTGGMNTGELFF

SEQ ID NO: 602561 - protein, 13 aa, Homo sapiens
  CDR3 for alpha chain variable domain of TCR clone 301281 (TRAV13-1, TRAJ12)
CAASPDSSYKLIF

SEQ ID NO: 602562 - protein, 16 aa, Homo sapiens
  CDR3 for beta chain variable domain of TCR clone 301281 (TRBV15, TRBJ2-3)
CATRLSGGRAPDTQYF

SEQ ID NO: 602563 - protein, 13 aa, Homo sapiens
  CDR3 for alpha chain variable domain of TCR clone 301282 (TRAV8-6, TRAJ49)
CAVITNTGNPFYF

SEQ ID NO: 602564 - protein, 13 aa, Homo sapiens
  CDR3 for beta chain variable domain of TCR clone 301282 (TRBV7-9, TRBJ2-7)
CASSFAGAYEQYF

SEQ ID NO: 602565 - protein, 17 aa, Homo sapiens
  CDR3 for alpha chain variable domain of TCR clone 301283 (TRAV14/DV4, TRAJ4)
CAMREASGRGGDNKLIF

SEQ ID NO: 602566 - protein, 13 aa, Homo sapiens
  CDR3 for beta chain variable domain of TCR clone 301283 (TRBV7-2, TRBJ2-5)
CASSQTSVETQYF

SEQ ID NO: 602567 - protein, 14 aa, Homo sapiens
  CDR3 for alpha chain variable domain of TCR clone 301284 (TRAV17, TRAJ33)
CATDARRSNYQLIW

SEQ ID NO: 602568 - protein, 14 aa, Homo sapiens
  CDR3 for beta chain variable domain of TCR clone 301284 (TRBV25-1, TRBJ1-4)
CASSGGGQPKKLFF

SEQ ID NO: 602569 - protein, 16 aa, Homo sapiens
  CDR3 for alpha chain variable domain of TCR clone 301285 (TRAV1-2, TRAJ10)
CAVRGVLTGGGNKLTF

SEQ ID NO: 602570 - protein, 15 aa, Homo sapiens
  CDR3 for beta chain variable domain of TCR clone 301285 (TRBV7-2, TRBJ2-1)
CASSLVLAGGSEQFF

SEQ ID NO: 602571 - protein, 12 aa, Homo sapiens
  CDR3 for alpha chain variable domain of TCR clone 301286 (TRAV12-3, TRAJ17)
CAMTLTGKKLTF

SEQ ID NO: 602572 - protein, 15 aa, Homo sapiens
  CDR3 for beta chain variable domain of TCR clone 301286 (TRBV10-2, TRBJ2-6)
CASSEQGTGANVLTF

SEQ ID NO: 602573 - protein, 12 aa, Homo sapiens
  CDR3 for alpha chain variable domain of TCR clone 301287 (TRAV12-2, TRAJ52)
IGGGTSYGKLTF

SEQ ID NO: 602574 - protein, 13 aa, Homo sapiens
  CDR3 for beta chain variable domain of TCR clone 301287 (TRBV15, TRBJ2-7)
CATSTTGHYEQYF

SEQ ID NO: 602575 - protein, 17 aa, Homo sapiens
  CDR3 for alpha chain variable domain of TCR clone 301288 (TRAV13-1, TRAJ31)
CAPRDRLMFGDGTQLVV

SEQ ID NO: 602576 - protein, 13 aa, Homo sapiens
  CDR3 for beta chain variable domain of TCR clone 301288 (TRBV2, TRBJ2-7)
CASSVGGSGEQYF

SEQ ID NO: 602577 - protein, 23 aa, Homo sapiens
  CDR3 for alpha chain variable domain of TCR clone 301289 (TRAV26-1, )
CIVRPLNAGNNHIQNPDPAVYQL

SEQ ID NO: 602578 - protein, 16 aa, Homo sapiens
  CDR3 for beta chain variable domain of TCR clone 301289 (TRBV19, TRBJ2-1)
CASSKAGPSSYNEQFF

SEQ ID NO: 602579 - protein, 14 aa, Homo sapiens
  CDR3 for alpha chain variable domain of TCR clone 301290 (TRAV12-2, TRAJ13)
CAVKKTGGYQKVTF

SEQ ID NO: 602580 - protein, 17 aa, Homo sapiens
  CDR3 for beta chain variable domain of TCR clone 301290 (TRBV27, TRBJ2-1)
CTSVPSNGGGSSNEQFF

SEQ ID NO: 602581 - protein, 13 aa, Homo sapiens
  CDR3 for alpha chain variable domain of TCR clone 301291 (TRAV29/DV5, TRAJ31)
CAASRNNNARLMF

SEQ ID NO: 602582 - protein, 15 aa, Homo sapiens
  CDR3 for beta chain variable domain of TCR clone 301291 (TRBV6-1, TRBJ2-6)
CASSSRPSGANVLTF

SEQ ID NO: 602583 - protein, 12 aa, Homo sapiens
  CDR3 for alpha chain variable domain of TCR clone 301292 (TRAV13-1, TRAJ20)
CAASMGDYKLSL

SEQ ID NO: 602584 - protein, 15 aa, Homo sapiens
  CDR3 for beta chain variable domain of TCR clone 301292 (TRBV11-3, TRBJ2-3)
CASNGGLDSTDTQYF

SEQ ID NO: 602585 - protein, 10 aa, Homo sapiens
  CDR3 for alpha chain variable domain of TCR clone 301293 (TRAV26-1, TRAJ40)
CIAGTYKYIF

SEQ ID NO: 602586 - protein, 17 aa, Homo sapiens
  CDR3 for beta chain variable domain of TCR clone 301293 (TRBV28, TRBJ2-7)
CASSPLHRASGVYEQYF

SEQ ID NO: 602587 - protein, 11 aa, Homo sapiens
  CDR3 for alpha chain variable domain of TCR clone 301294 (TRAV21, TRAJ31)
CAVRNNARLMF

SEQ ID NO: 602588 - protein, 15 aa, Homo sapiens
  CDR3 for beta chain variable domain of TCR clone 301294 (TRBV7-9, TRBJ1-4)
CASGGQRQGTEKLFF

SEQ ID NO: 602589 - protein, 15 aa, Homo sapiens
  CDR3 for alpha chain variable domain of TCR clone 301295 (TRAV12-2, TRAJ53)
CAVNGGGGSNYKLTF

SEQ ID NO: 602590 - protein, 15 aa, Homo sapiens
  CDR3 for beta chain variable domain of TCR clone 301295 (TRBV3-1, TRBJ2-5)
CASSANLGGPETQYF

SEQ ID NO: 602591 - protein, 13 aa, Homo sapiens
  CDR3 for alpha chain variable domain of TCR clone 301296 (TRAV3, TRAJ21)
CAVREPDFNKFYF

SEQ ID NO: 602592 - protein, 15 aa, Homo sapiens
  CDR3 for beta chain variable domain of TCR clone 301296 (TRBV5-5, TRBJ2-2)
CASSRQASGAGELFF

SEQ ID NO: 602593 - protein, 13 aa, Homo sapiens
  CDR3 for alpha chain variable domain of TCR clone 301297 (TRAV20, TRAJ31)
CAVQAWNNARLMF

SEQ ID NO: 602594 - protein, 16 aa, Homo sapiens
  CDR3 for beta chain variable domain of TCR clone 301297 (TRBV6-6, TRBJ2-1)
CTSSWGGQGPYNEQFF

SEQ ID NO: 602595 - protein, 13 aa, Homo sapiens
  CDR3 for alpha chain variable domain of TCR clone 301298 (TRAV8-2, TRAJ49)
CVVTPNTGNQVYF

SEQ ID NO: 602596 - protein, 15 aa, Homo sapiens
  CDR3 for beta chain variable domain of TCR clone 301298 (TRBV11-2, TRBJ2-1)
CASGLTSGGYNEQFF

SEQ ID NO: 602597 - protein, 10 aa, Homo sapiens
  CDR3 for alpha chain variable domain of TCR clone 301299 (TRAV21, TRAJ31)
CAVDNARLMF

SEQ ID NO: 602598 - protein, 15 aa, Homo sapiens
  CDR3 for beta chain variable domain of TCR clone 301299 (TRBV15, TRBJ1-3)
CATSRDRRRGNTIYF

SEQ ID NO: 602599 - protein, 16 aa, Homo sapiens
  CDR3 for alpha chain variable domain of TCR clone 301300 (TRAV3, TRAJ6)
CAVRDGMGRRKLHTYI

SEQ ID NO: 602600 - protein, 15 aa, Homo sapiens
  CDR3 for beta chain variable domain of TCR clone 301300 (TRBV9, TRBJ2-1)
CASSLAGRSYNEQFF

SEQ ID NO: 602601 - protein, 16 aa, Homo sapiens
  CDR3 for alpha chain variable domain of TCR clone 301301 (TRAV12-3, TRAJ53)
CAMSPGSGGNNYKLTF

SEQ ID NO: 602602 - protein, 16 aa, Homo sapiens
  CDR3 for beta chain variable domain of TCR clone 301301 (TRBV4-2, TRBJ1-1)
CASSQAGFGMNTEAFF

SEQ ID NO: 602603 - protein, 12 aa, Homo sapiens
  CDR3 for alpha chain variable domain of TCR clone 301302 (TRAV13-1, TRAJ21)
CAAKEGFNKFYF

SEQ ID NO: 602604 - protein, 17 aa, Homo sapiens
  CDR3 for beta chain variable domain of TCR clone 301302 (TRBV7-3, TRBJ2-3)
RASSLMKRMRGADTQYF

SEQ ID NO: 602605 - protein, 13 aa, Homo sapiens
  CDR3 for alpha chain variable domain of TCR clone 301303 (TRAV20, TRAJ54)
CAVQAGGAQKLVF

SEQ ID NO: 602606 - protein, 15 aa, Homo sapiens
  CDR3 for beta chain variable domain of TCR clone 301303 (TRBV19, TRBJ1-2)
CASSVGQVLNYGYTF

SEQ ID NO: 602607 - protein, 18 aa, Homo sapiens
  CDR3 for alpha chain variable domain of TCR clone 301304 (TRAV29/DV5, TRAJ52)
CAAGFRGAGGTSYGKLTF

SEQ ID NO: 602608 - protein, 16 aa, Homo sapiens
  CDR3 for beta chain variable domain of TCR clone 301304 (TRBV7-3, TRBJ2-2)
CASSVKRGTVSGELFF

SEQ ID NO: 602609 - protein, 14 aa, Homo sapiens
  CDR3 for alpha chain variable domain of TCR clone 301305 (TRAV12-3, TRAJ29)
CAMILHSGNTPLVF

SEQ ID NO: 602610 - protein, 16 aa, Homo sapiens
  CDR3 for beta chain variable domain of TCR clone 301305 (TRBV28, TRBJ2-7)
CASSSGTSGRGYEQYF

SEQ ID NO: 602611 - protein, 11 aa, Homo sapiens
  CDR3 for alpha chain variable domain of TCR clone 301306 (TRAV12-2, TRAJ23)
CARGRGGKLIF

SEQ ID NO: 602612 - protein, 14 aa, Homo sapiens
  CDR3 for beta chain variable domain of TCR clone 301306 (TRBV28, TRBJ2-5)
CASSLGDRAETQYF

SEQ ID NO: 602613 - protein, 14 aa, Homo sapiens
  CDR3 for alpha chain variable domain of TCR clone 301307 (TRAV29/DV5, TRAJ45)
CAARFRGGADGLTF

SEQ ID NO: 602614 - protein, 16 aa, Homo sapiens
  CDR3 for beta chain variable domain of TCR clone 301307 (TRBV7-9, TRBJ2-7)
CASSYPDREGGYEQYF

SEQ ID NO: 602615 - protein, 12 aa, Homo sapiens
  CDR3 for alpha chain variable domain of TCR clone 301308 (TRAV1-2, TRAJ42)
CVAWGSQGNLIF

SEQ ID NO: 602616 - protein, 17 aa, Homo sapiens
  CDR3 for beta chain variable domain of TCR clone 301308 (TRBV13, TRBJ2-3)
CASSLSRVAGGRNTQYF

SEQ ID NO: 602617 - protein, 18 aa, Homo sapiens
  CDR3 for alpha chain variable domain of TCR clone 301309 (TRAV21, TRAJ52)
CAVRPSPAGGTSYGKLTF

SEQ ID NO: 602618 - protein, 16 aa, Homo sapiens
  CDR3 for beta chain variable domain of TCR clone 301309 (TRBV13, TRBJ2-3)
CQQPLQVVGGRNTQYF

SEQ ID NO: 602619 - protein, 11 aa, Homo sapiens
  CDR3 for alpha chain variable domain of TCR clone 301310 (TRAV17, TRAJ9)
CATTGGFKTIF

SEQ ID NO: 602620 - protein, 13 aa, Homo sapiens
  CDR3 for beta chain variable domain of TCR clone 301310 (TRBV14, TRBJ1-1)
CASSQEAGTEAFF

SEQ ID NO: 602621 - protein, 18 aa, Homo sapiens
  CDR3 for alpha chain variable domain of TCR clone 301311 (TRAV21, TRAJ52)
CAVRPSPAGGISYGKLTF

SEQ ID NO: 602622 - protein, 16 aa, Homo sapiens
  CDR3 for beta chain variable domain of TCR clone 301311 (TRBV7-3, TRBJ2-1)
CASSLEGYRSYNEQFF

SEQ ID NO: 602623 - protein, 16 aa, Homo sapiens
  CDR3 for alpha chain variable domain of TCR clone 301312 (TRAV14/DV4, TRAJ15)
WAMREGSFQAGTALIV

SEQ ID NO: 602624 - protein, 18 aa, Homo sapiens
  CDR3 for beta chain variable domain of TCR clone 301312 (TRBV12-4, TRBJ2-4)
CASSRTGAVDVAKNIQYF

SEQ ID NO: 602625 - protein, 21 aa, Homo sapiens
  CDR3 for alpha chain variable domain of TCR clone 301313 (TRAV36/DV7, TRAJ39)
TATQAGDSAIYLPNAGNMLTF

SEQ ID NO: 602626 - protein, 16 aa, Homo sapiens
  CDR3 for beta chain variable domain of TCR clone 301313 (TRBV19, TRBJ2-1)
CASSKAGPSSYNEQFF

SEQ ID NO: 602627 - protein, 13 aa, Homo sapiens
  CDR3 for alpha chain variable domain of TCR clone 301314 (TRAV3, TRAJ29)
CAVRDIIDTPLVF

SEQ ID NO: 602628 - protein, 14 aa, Homo sapiens
  CDR3 for beta chain variable domain of TCR clone 301314 (TRBV11-1, TRBJ2-1)
CASSATGGYNEQFF

SEQ ID NO: 602629 - protein, 12 aa, Homo sapiens
  CDR3 for alpha chain variable domain of TCR clone 301315 (TRAV36/DV7, TRAJ54)
CAVVRGAQKLVF

SEQ ID NO: 602630 - protein, 14 aa, Homo sapiens
  CDR3 for beta chain variable domain of TCR clone 301315 (TRBV7-8, TRBJ1-1)
CASSLKGGNNEAFF

SEQ ID NO: 602631 - protein, 12 aa, Homo sapiens
  CDR3 for alpha chain variable domain of TCR clone 301316 (TRAV12-3, TRAJ17)
CARTLTGNKLTF

SEQ ID NO: 602632 - protein, 15 aa, Homo sapiens
  CDR3 for beta chain variable domain of TCR clone 301316 (TRBV20-1, TRBJ2-7)
CSARDRVSGVDEQYF

SEQ ID NO: 602633 - protein, 12 aa, Homo sapiens
  CDR3 for alpha chain variable domain of TCR clone 301317 (TRAV12-3, TRAJ17)
CEMTLTGNKLTF

SEQ ID NO: 602634 - protein, 15 aa, Homo sapiens
  CDR3 for beta chain variable domain of TCR clone 301317 (TRBV20-1, TRBJ2-7)
RSARDRVSGMDEQYF

SEQ ID NO: 602635 - protein, 13 aa, Homo sapiens
  CDR3 for alpha chain variable domain of TCR clone 301318 (TRAV1-2, TRAJ9)
CAALNTGGFKTIF

SEQ ID NO: 602636 - protein, 16 aa, Homo sapiens
  CDR3 for beta chain variable domain of TCR clone 301318 (TRBV11-2, TRBJ2-1)
WASSPRLAGVYNEQFF

SEQ ID NO: 602637 - protein, 17 aa, Homo sapiens
  CDR3 for alpha chain variable domain of TCR clone 301319 (TRAV16, TRAJ58)
CITVLSNVETSGSRLTF

SEQ ID NO: 602638 - protein, 17 aa, Homo sapiens
  CDR3 for beta chain variable domain of TCR clone 301319 (TRBV18, TRBJ2-1)
CASSKGLSGGADNERFF

SEQ ID NO: 602639 - protein, 15 aa, Homo sapiens
  CDR3 for alpha chain variable domain of TCR clone 301320 (TRAV8-3, TRAJ45)
CASSYSGGGADGLTF

SEQ ID NO: 602640 - protein, 13 aa, Homo sapiens
  CDR3 for beta chain variable domain of TCR clone 301320 (TRBV10-3, TRBJ2-7)
CTSKRAVNYEQYF

SEQ ID NO: 602641 - protein, 12 aa, Homo sapiens
  CDR3 for alpha chain variable domain of TCR clone 301321 (TRAV13-1, TRAJ21)
CAAFFNFNKFYF

SEQ ID NO: 602642 - protein, 13 aa, Homo sapiens
  CDR3 for beta chain variable domain of TCR clone 301321 (TRBV4-2, TRBJ1-1)
CASSQAGNTEAFF

SEQ ID NO: 602643 - protein, 14 aa, Homo sapiens
  CDR3 for alpha chain variable domain of TCR clone 301322 (TRAV3, TRAJ16)
CAVSLFSDGQKLLF

SEQ ID NO: 602644 - protein, 13 aa, Homo sapiens
  CDR3 for beta chain variable domain of TCR clone 301322 (TRBV12-4, TRBJ1-2)
CASSSGLTVISTF

SEQ ID NO: 602645 - protein, 16 aa, Homo sapiens
  CDR3 for alpha chain variable domain of TCR clone 301323 (TRAV3, TRAJ10)
CAVRDMRAVGGNKLTF

SEQ ID NO: 602646 - protein, 16 aa, Homo sapiens
  CDR3 for beta chain variable domain of TCR clone 301323 (TRBV19, TRBJ2-2)
CASSFPGQGLAGELFF

SEQ ID NO: 602647 - protein, 14 aa, Homo sapiens
  CDR3 for alpha chain variable domain of TCR clone 301324 (TRAV27, TRAJ36)
CAGPPKTGANNLFF

SEQ ID NO: 602648 - protein, 15 aa, Homo sapiens
  CDR3 for beta chain variable domain of TCR clone 301324 (TRBV18, TRBJ2-7)
CASSPASTPNYEQYF

SEQ ID NO: 602649 - protein, 16 aa, Homo sapiens
  CDR3 for alpha chain variable domain of TCR clone 301325 (TRAV12-2, TRAJ32)
CAVNLGQGGATNKLIF

SEQ ID NO: 602650 - protein, 15 aa, Homo sapiens
  CDR3 for beta chain variable domain of TCR clone 301325 (TRBV7-9, TRBJ1-5)
CASSQGHQPNQPQHF

SEQ ID NO: 602651 - protein, 17 aa, Homo sapiens
  CDR3 for alpha chain variable domain of TCR clone 301326 (TRAV3, TRAJ6)
CAVRDGPRAGGSFIPTF

SEQ ID NO: 602652 - protein, 12 aa, Homo sapiens
  CDR3 for beta chain variable domain of TCR clone 301326 (TRBV16, TRBJ2-2)
CASSQSVGELFF

SEQ ID NO: 602653 - protein, 17 aa, Homo sapiens
  CDR3 for alpha chain variable domain of TCR clone 301327 (TRAV26-1, TRAJ22)
CIVRVSFWFCKATALWF

SEQ ID NO: 602654 - protein, 13 aa, Homo sapiens
  CDR3 for beta chain variable domain of TCR clone 301327 (TRBV7-9, TRBJ1-2)
CASSLKQNYGYTF

SEQ ID NO: 602655 - protein, 15 aa, Homo sapiens
  CDR3 for alpha chain variable domain of TCR clone 301328 (TRAV3, TRAJ47)
CAVRDIGEYGNKLVC

SEQ ID NO: 602656 - protein, 14 aa, Homo sapiens
  CDR3 for beta chain variable domain of TCR clone 301328 (TRBV13, TRBJ2-5)
CARSLERVGETQYF

SEQ ID NO: 602657 - protein, 11 aa, Homo sapiens
  CDR3 for alpha chain variable domain of TCR clone 301329 (TRAV1-1, TRAJ5)
CAVRVRRALTF

SEQ ID NO: 602658 - protein, 13 aa, Homo sapiens
  CDR3 for beta chain variable domain of TCR clone 301329 (TRBV7-2, TRBJ1-1)
CASNLKGAKVAFF

SEQ ID NO: 602659 - protein, 16 aa, Homo sapiens
  CDR3 for alpha chain variable domain of TCR clone 301330 (TRAV21, TRAJ33)
CAVSPASMDSNYQLIW

SEQ ID NO: 602660 - protein, 17 aa, Homo sapiens
  CDR3 for beta chain variable domain of TCR clone 301330 (TRBV2, TRBJ1-4)
CASSKMELTQGEEKLFF

SEQ ID NO: 602661 - protein, 13 aa, Homo sapiens
  CDR3 for alpha chain variable domain of TCR clone 301331 (TRAV1-2, TRAJ9)
CAVLNTGGFKTIF

SEQ ID NO: 602662 - protein, 14 aa, Homo sapiens
  CDR3 for beta chain variable domain of TCR clone 301331 (TRBV5-1, TRBJ2-7)
CASSRGESLYEQYF

SEQ ID NO: 602663 - protein, 18 aa, Homo sapiens
  CDR3 for alpha chain variable domain of TCR clone 301332 (TRAV8-6, TRAJ52)
CAVSCANAGGTSYGKLTF

SEQ ID NO: 602664 - protein, 12 aa, Homo sapiens
  CDR3 for beta chain variable domain of TCR clone 301332 (TRBV14, TRBJ2-7)
CASSRLKGEQYF

SEQ ID NO: 602665 - protein, 16 aa, Homo sapiens
  CDR3 for alpha chain variable domain of TCR clone 301333 (TRAV3, TRAJ3)
CAVRDRAKSSASKIIF

SEQ ID NO: 602666 - protein, 13 aa, Homo sapiens
  CDR3 for beta chain variable domain of TCR clone 301333 (TRBV11-2, TRBJ1-6)
CASSLAGVSPLHF

SEQ ID NO: 602667 - protein, 13 aa, Homo sapiens
  CDR3 for alpha chain variable domain of TCR clone 301334 (TRAV12-1, TRAJ16)
CVVNTRNGQKLLF

SEQ ID NO: 602668 - protein, 12 aa, Homo sapiens
  CDR3 for beta chain variable domain of TCR clone 301334 (TRBV11-3, TRBJ2-2)
CASSTRPGAKTT

SEQ ID NO: 602669 - protein, 14 aa, Homo sapiens
  CDR3 for alpha chain variable domain of TCR clone 301335 (TRAV16, TRAJ15)
CALSCPQAGTALIF

SEQ ID NO: 602670 - protein, 12 aa, Homo sapiens
  CDR3 for beta chain variable domain of TCR clone 301335 (TRBV18, TRBJ2-5)
CASSPSKETQYF

SEQ ID NO: 602671 - protein, 21 aa, Homo sapiens
  CDR3 for alpha chain variable domain of TCR clone 301336 (TRAV8-4, TRAJ47)
HLTKPSAHMSDAAERGNKLVF

SEQ ID NO: 602672 - protein, 14 aa, Homo sapiens
  CDR3 for beta chain variable domain of TCR clone 301336 (TRBV7-9, TRBJ2-1)
CASSPRDSLYEQFL

SEQ ID NO: 602673 - protein, 13 aa, Homo sapiens
  CDR3 for alpha chain variable domain of TCR clone 301337 (TRAV26-1, TRAJ29)
CSVRRSGNTPLVF

SEQ ID NO: 602674 - protein, 16 aa, Homo sapiens
  CDR3 for beta chain variable domain of TCR clone 301337 (TRBV11-2, TRBJ2-7)
CASSLAPTGVNYEQYF

SEQ ID NO: 602675 - protein, 18 aa, Homo sapiens
  CDR3 for alpha chain variable domain of TCR clone 301338 (TRAV21, TRAJ52)
CAVRPSPAGGTSYGKLTF

SEQ ID NO: 602676 - protein, 15 aa, Homo sapiens
  CDR3 for beta chain variable domain of TCR clone 301338 (TRBV7-3, TRBJ2-7)
CASSLNAQGAYEQYF

SEQ ID NO: 602677 - protein, 16 aa, Homo sapiens
  CDR3 for alpha chain variable domain of TCR clone 301339 (TRAV20, TRAJ38)
CAVQASNAGNNRKLIW

SEQ ID NO: 602678 - protein, 14 aa, Homo sapiens
  CDR3 for beta chain variable domain of TCR clone 301339 (TRBV7-2, TRBJ1-2)
CASSQTGSTYGYTF

SEQ ID NO: 602679 - protein, 14 aa, Homo sapiens
  CDR3 for alpha chain variable domain of TCR clone 301340 (TRAV25, TRAJ23)
CAGQGDNHGGKLIF

SEQ ID NO: 602680 - protein, 12 aa, Homo sapiens
  CDR3 for beta chain variable domain of TCR clone 301340 (TRBV7-9, TRBJ1-1)
CASSLVRGEAFF

SEQ ID NO: 602681 - protein, 13 aa, Homo sapiens
  CDR3 for alpha chain variable domain of TCR clone 301341 (TRAV3, TRAJ27)
CAVRPLGAGESTF

SEQ ID NO: 602682 - protein, 13 aa, Homo sapiens
  CDR3 for beta chain variable domain of TCR clone 301341 (TRBV7-9, TRBJ2-3)
CASSPGSADTQYF

SEQ ID NO: 602683 - protein, 14 aa, Homo sapiens
  CDR3 for alpha chain variable domain of TCR clone 301342 (TRAV8-4, TRAJ11)
CAVSLNSGYSTLTF

SEQ ID NO: 602684 - protein, 15 aa, Homo sapiens
  CDR3 for beta chain variable domain of TCR clone 301342 (TRBV20-1, TRBJ2-1)
CSAQGIGGTYNEQFF

SEQ ID NO: 602685 - protein, 13 aa, Homo sapiens
  CDR3 for alpha chain variable domain of TCR clone 301343 (TRAV22, TRAJ29)
CAVGGSGNTPLVS

SEQ ID NO: 602686 - protein, 13 aa, Homo sapiens
  CDR3 for beta chain variable domain of TCR clone 301343 (TRBV7-8, TRBJ2-7)
CASSLTGGREQYF

SEQ ID NO: 602687 - protein, 14 aa, Homo sapiens
  CDR3 for alpha chain variable domain of TCR clone 301344 (TRAV1-2, TRAJ16)
CAVNRFSDGQQLLF

SEQ ID NO: 602688 - protein, 15 aa, Homo sapiens
  CDR3 for beta chain variable domain of TCR clone 301344 (TRBV27, TRBJ2-1)
CASSNGGGSSNEQFF

SEQ ID NO: 602689 - protein, 15 aa, Homo sapiens
  CDR3 for alpha chain variable domain of TCR clone 301345 (TRAV29/DV5, TRAJ8)
CAASGRNTGFQKLVF

SEQ ID NO: 602690 - protein, 15 aa, Homo sapiens
  CDR3 for beta chain variable domain of TCR clone 301345 (TRBV20-1, TRBJ2-7)
CSARDRVSGMDEQYF

SEQ ID NO: 602691 - protein, 18 aa, Homo sapiens
  CDR3 for alpha chain variable domain of TCR clone 301346 (TRAV26-1, TRAJ56)
CIVRVASRVTGANSKLTF

SEQ ID NO: 602692 - protein, 15 aa, Homo sapiens
  CDR3 for beta chain variable domain of TCR clone 301346 (TRBV7-9, TRBJ2-5)
WASSDTGWGRETQYF

SEQ ID NO: 602693 - protein, 12 aa, Homo sapiens
  CDR3 for alpha chain variable domain of TCR clone 301347 (TRAV17, TRAJ20)
CATDGDDYKLSF

SEQ ID NO: 602694 - protein, 16 aa, Homo sapiens
  CDR3 for beta chain variable domain of TCR clone 301347 (TRBV7-9, TRBJ1-2)
CASSPGGGAINYGYTF

SEQ ID NO: 602695 - protein, 12 aa, Homo sapiens
  CDR3 for alpha chain variable domain of TCR clone 301348 (TRAV16, TRAJ10)
CSRTVGGNKLTF

SEQ ID NO: 602696 - protein, 12 aa, Homo sapiens
  CDR3 for beta chain variable domain of TCR clone 301348 (TRBV11-3, TRBJ1-1)
CASSHRQGEAFF

SEQ ID NO: 602697 - protein, 11 aa, Homo sapiens
  CDR3 for alpha chain variable domain of TCR clone 301349 (TRAV1-2, TRAJ31)
CAVNNNARLMF

SEQ ID NO: 602698 - protein, 17 aa, Homo sapiens
  CDR3 for beta chain variable domain of TCR clone 301349 (TRBV19, TRBJ1-5)
CASSRDRILSRFQPQHF

SEQ ID NO: 602699 - protein, 15 aa, Homo sapiens
  CDR3 for alpha chain variable domain of TCR clone 301350 (TRAV12-3, TRAJ6)
CAMSATTGGSYIPTF

SEQ ID NO: 602700 - protein, 16 aa, Homo sapiens
  CDR3 for beta chain variable domain of TCR clone 301350 (TRBV10-3, TRBJ2-6)
CAISTSGDLGANVLTF

SEQ ID NO: 602701 - protein, 15 aa, Homo sapiens
  CDR3 for alpha chain variable domain of TCR clone 301351 (TRAV20, TRAJ53)
CAVQASGGSNYKLPF

SEQ ID NO: 602702 - protein, 14 aa, Homo sapiens
  CDR3 for beta chain variable domain of TCR clone 301351 (TRBV7-2, TRBJ1-2)
CASSQTGSTYGYTF

SEQ ID NO: 602703 - protein, 17 aa, Homo sapiens
  CDR3 for alpha chain variable domain of TCR clone 301352 (TRAV27, TRAJ18)
CAGLHRGRGSTLRRLYF

SEQ ID NO: 602704 - protein, 14 aa, Homo sapiens
  CDR3 for beta chain variable domain of TCR clone 301352 (TRBV20-1, TRBJ1-5)
CSARGRGSNQPQHF

SEQ ID NO: 602705 - protein, 14 aa, Homo sapiens
  CDR3 for alpha chain variable domain of TCR clone 301353 (TRAV35, TRAJ38)
CAGSNAGNNRKLIW

SEQ ID NO: 602706 - protein, 12 aa, Homo sapiens
  CDR3 for beta chain variable domain of TCR clone 301353 (TRBV19, TRBJ2-7)
CASTDTGYEQYF

SEQ ID NO: 602707 - protein, 14 aa, Homo sapiens
  CDR3 for alpha chain variable domain of TCR clone 301354 (TRAV3, TRAJ21)
CAVRDTYNFNKFYF

SEQ ID NO: 602708 - protein, 14 aa, Homo sapiens
  CDR3 for beta chain variable domain of TCR clone 301354 (TRBV27, TRBJ2-3)
CASRDSPITDTQYF

SEQ ID NO: 602709 - protein, 18 aa, Homo sapiens
  CDR3 for alpha chain variable domain of TCR clone 301355 (TRAV26-2, TRAJ45)
CILRDRVDQEEVLMDSPL

SEQ ID NO: 602710 - protein, 15 aa, Homo sapiens
  CDR3 for beta chain variable domain of TCR clone 301355 (TRBV7-6, TRBJ2-5)
CASSKPTGPQETQYF

SEQ ID NO: 602711 - protein, 13 aa, Homo sapiens
  CDR3 for alpha chain variable domain of TCR clone 301356 (TRAV8-3, TRAJ6)
CAARRGGSYIPTL

SEQ ID NO: 602712 - protein, 15 aa, Homo sapiens
  CDR3 for beta chain variable domain of TCR clone 301356 (TRBV4-1, TRBJ2-3)
CASSNLAGGRDTQYF

SEQ ID NO: 602713 - protein, 17 aa, Homo sapiens
  CDR3 for alpha chain variable domain of TCR clone 301357 (TRAV3, TRAJ42)
CAVRDRDYGGSKGNLIF

SEQ ID NO: 602714 - protein, 12 aa, Homo sapiens
  CDR3 for beta chain variable domain of TCR clone 301357 (TRBV11-2, TRBJ2-1)
CASSPGNNEQFF

SEQ ID NO: 602715 - protein, 15 aa, Homo sapiens
  CDR3 for alpha chain variable domain of TCR clone 301358 (TRAV3, TRAJ3)
CAVRDRESSASKIIF

SEQ ID NO: 602716 - protein, 13 aa, Homo sapiens
  CDR3 for beta chain variable domain of TCR clone 301358 (TRBV7-6, TRBJ1-2)
CASSLVADYGYTF

SEQ ID NO: 602717 - protein, 13 aa, Homo sapiens
  CDR3 for alpha chain variable domain of TCR clone 301359 (TRAV1-2, TRAJ12)
CAVSMDSSYKLIF

SEQ ID NO: 602718 - protein, 15 aa, Homo sapiens
  CDR3 for beta chain variable domain of TCR clone 301359 (TRBV7-3, TRBJ2-2)
CASSETGQGTGELFF

SEQ ID NO: 602719 - protein, 14 aa, Homo sapiens
  CDR3 for alpha chain variable domain of TCR clone 301360 (TRAV12-2, TRAJ17)
CAVLFKAAGNKLTF

SEQ ID NO: 602720 - protein, 15 aa, Homo sapiens
  CDR3 for beta chain variable domain of TCR clone 301360 (TRBV12-4, TRBJ2-5)
RASSPPTGLQETQYF

SEQ ID NO: 602721 - protein, 14 aa, Homo sapiens
  CDR3 for alpha chain variable domain of TCR clone 301361 (TRAV8-6, TRAJ53)
CSALVLGSNYKLTF

SEQ ID NO: 602722 - protein, 15 aa, Homo sapiens
  CDR3 for beta chain variable domain of TCR clone 301361 (TRBV20-1, TRBJ2-3)
CSAEPLAGHGDTQYF

SEQ ID NO: 602723 - protein, 14 aa, Homo sapiens
  CDR3 for alpha chain variable domain of TCR clone 301362 (TRAV29/DV5, TRAJ47)
CAASSIEYGNKLDF

SEQ ID NO: 602724 - protein, 14 aa, Homo sapiens
  CDR3 for beta chain variable domain of TCR clone 301362 (TRBV25-1, TRBJ1-1)
CASTHLGGNTEAFF

SEQ ID NO: 602725 - protein, 14 aa, Homo sapiens
  CDR3 for alpha chain variable domain of TCR clone 301363 (TRAV1-2, TRAJ16)
CAVNRFSDGQKLLF

SEQ ID NO: 602726 - protein, 15 aa, Homo sapiens
  CDR3 for beta chain variable domain of TCR clone 301363 (TRBV20-1, TRBJ2-2)
SAVTRTPRTPGSCFF

SEQ ID NO: 602727 - protein, 11 aa, Homo sapiens
  CDR3 for alpha chain variable domain of TCR clone 301364 (TRAV23/DV6, TRAJ58)
CAARLLRGETS

SEQ ID NO: 602728 - protein, 12 aa, Homo sapiens
  CDR3 for beta chain variable domain of TCR clone 301364 (TRBV6-6, TRBJ2-3)
CQQSGGRDTQYF

SEQ ID NO: 602729 - protein, 16 aa, Homo sapiens
  CDR3 for alpha chain variable domain of TCR clone 301365 (TRAV1-2, TRAJ10)
CAVRGVLTGGGNNLTF

SEQ ID NO: 602730 - protein, 14 aa, Homo sapiens
  CDR3 for beta chain variable domain of TCR clone 301365 (TRBV4-1, TRBJ2-2)
CASSQAVNTGELFF

SEQ ID NO: 602731 - protein, 23 aa, Homo sapiens
  CDR3 for alpha chain variable domain of TCR clone 301366 (TRAV26-1, TRAJ38)
CIVRPLNAGNNHIQNPDPAVYQL

SEQ ID NO: 602732 - protein, 13 aa, Homo sapiens
  CDR3 for beta chain variable domain of TCR clone 301366 (TRBV18, TRBJ1-1)
CASSPNGDTEDFF

SEQ ID NO: 602733 - protein, 14 aa, Homo sapiens
  CDR3 for alpha chain variable domain of TCR clone 301367 (TRAV35, TRAJ33)
CWLRGRDSNYQLIW

SEQ ID NO: 602734 - protein, 11 aa, Homo sapiens
  CDR3 for beta chain variable domain of TCR clone 301367 (TRBV10-3, TRBJ2-7)
CAISEGLEQYF

SEQ ID NO: 602735 - protein, 13 aa, Homo sapiens
  CDR3 for alpha chain variable domain of TCR clone 301368 (TRAV17, TRAJ9)
CATDYTGGFETIF

SEQ ID NO: 602736 - protein, 16 aa, Homo sapiens
  CDR3 for beta chain variable domain of TCR clone 301368 (TRBV7-7, TRBJ2-1)
CASSLASGTSYNEQFF

SEQ ID NO: 602737 - protein, 14 aa, Homo sapiens
  CDR3 for alpha chain variable domain of TCR clone 301369 (TRAV1-2, TRAJ8)
CAVREDTGFQKLVF

SEQ ID NO: 602738 - protein, 15 aa, Homo sapiens
  CDR3 for beta chain variable domain of TCR clone 301369 (TRBV28, TRBJ2-6)
CASSLAVSGANVLTF

SEQ ID NO: 602739 - protein, 13 aa, Homo sapiens
  CDR3 for alpha chain variable domain of TCR clone 301370 (TRAV21, TRAJ20)
CAVGLRVDYKLRF

SEQ ID NO: 602740 - protein, 15 aa, Homo sapiens
  CDR3 for beta chain variable domain of TCR clone 301370 (TRBV29-1, TRBJ2-1)
CSVPTGLALYNEQFF

SEQ ID NO: 602741 - protein, 14 aa, Homo sapiens
  CDR3 for alpha chain variable domain of TCR clone 301371 (TRAV12-1, TRAJ17)
CVVNYKAAGNKLTF

SEQ ID NO: 602742 - protein, 13 aa, Homo sapiens
  CDR3 for beta chain variable domain of TCR clone 301371 (TRBV18, TRBJ1-1)
CASSGGWNTEAFF

SEQ ID NO: 602743 - protein, 13 aa, Homo sapiens
  CDR3 for alpha chain variable domain of TCR clone 301372 (TRAV12-2, TRAJ13)
CREEDWGYQKVTF

SEQ ID NO: 602744 - protein, 15 aa, Homo sapiens
  CDR3 for beta chain variable domain of TCR clone 301372 (TRBV20-1, TRBJ2-7)
CSARDRVSGMDEQYF

SEQ ID NO: 602745 - protein, 13 aa, Homo sapiens
  CDR3 for alpha chain variable domain of TCR clone 301373 (TRAV12-3, TRAJ33)
CAMSVNSNYQLIW

SEQ ID NO: 602746 - protein, 17 aa, Homo sapiens
  CDR3 for beta chain variable domain of TCR clone 301373 (TRBV11-2, TRBJ2-1)
CASSLYPPGVEYNEQFF

SEQ ID NO: 602747 - protein, 13 aa, Homo sapiens
  CDR3 for alpha chain variable domain of TCR clone 301374 (TRAV17, TRAJ26)
CATVDNYGQNFVF

SEQ ID NO: 602748 - protein, 14 aa, Homo sapiens
  CDR3 for beta chain variable domain of TCR clone 301374 (TRBV12-4, TRBJ1-1)
CASSLGTGGTEAFF

SEQ ID NO: 602749 - protein, 13 aa, Homo sapiens
  CDR3 for alpha chain variable domain of TCR clone 301375 (TRAV8-3, TRAJ20)
CAVDRPNDYKLSF

SEQ ID NO: 602750 - protein, 14 aa, Homo sapiens
  CDR3 for beta chain variable domain of TCR clone 301375 (TRBV12-5, TRBJ2-5)
CASGSRTHQGTQYF

SEQ ID NO: 602751 - protein, 12 aa, Homo sapiens
  CDR3 for alpha chain variable domain of TCR clone 301376 (TRAV12-3, TRAJ17)
CAMTLTGNKLTF

SEQ ID NO: 602752 - protein, 14 aa, Homo sapiens
  CDR3 for beta chain variable domain of TCR clone 301376 (TRBV4-3, TRBJ1-4)
CASGPLQRNEKLFF

SEQ ID NO: 602753 - protein, 14 aa, Homo sapiens
  CDR3 for alpha chain variable domain of TCR clone 301377 (TRAV1-2, TRAJ16)
YAVNRFSDGQKLLF

SEQ ID NO: 602754 - protein, 15 aa, Homo sapiens
  CDR3 for beta chain variable domain of TCR clone 301377 (TRBV20-1, TRBJ2-7)
CSARDRVSGMDEQYF

SEQ ID NO: 602755 - protein, 14 aa, Homo sapiens
  CDR3 for alpha chain variable domain of TCR clone 301378 (TRAV16, TRAJ33)
CALSAMDCNYQLIW

SEQ ID NO: 602756 - protein, 16 aa, Homo sapiens
  CDR3 for beta chain variable domain of TCR clone 301378 (TRBV12-4, TRBJ2-3)
CASSFPSNTNTDTQYF

SEQ ID NO: 602757 - protein, 14 aa, Homo sapiens
  CDR3 for alpha chain variable domain of TCR clone 301379 (TRAV12-2, TRAJ5)
CAVNSSTGRRSLTF

SEQ ID NO: 602758 - protein, 12 aa, Homo sapiens
  CDR3 for beta chain variable domain of TCR clone 301379 (TRBV19, TRBJ1-5)
CASSIAQQPQHF

SEQ ID NO: 602759 - protein, 18 aa, Homo sapiens
  CDR3 for alpha chain variable domain of TCR clone 301380 (TRAV21, TRAJ52)
CAVRPSPAGGTSYGKLTF

SEQ ID NO: 602760 - protein, 15 aa, Homo sapiens
  CDR3 for beta chain variable domain of TCR clone 301380 (TRBV7-9, TRBJ1-4)
CASSLAGAHGEKLFF

SEQ ID NO: 602761 - protein, 10 aa, Homo sapiens
  CDR3 for alpha chain variable domain of TCR clone 301381 (TRAV36/DV7, TRAJ48)
CAVGNEKLTF

SEQ ID NO: 602762 - protein, 16 aa, Homo sapiens
  CDR3 for beta chain variable domain of TCR clone 301381 (TRBV15, TRBJ2-3)
CATRLSGGRSPDTQYF

SEQ ID NO: 602763 - protein, 12 aa, Homo sapiens
  CDR3 for alpha chain variable domain of TCR clone 301382 (TRAV25, TRAJ11)
CAGASGYSTLTF

SEQ ID NO: 602764 - protein, 14 aa, Homo sapiens
  CDR3 for beta chain variable domain of TCR clone 301382 (TRBV11-2, TRBJ2-3)
CASSRLARTDTQYF

SEQ ID NO: 602765 - protein, 17 aa, Homo sapiens
  CDR3 for alpha chain variable domain of TCR clone 301383 (TRAV19, TRAJ53)
CALSEAASGGSNYKLTF

SEQ ID NO: 602766 - protein, 13 aa, Homo sapiens
  CDR3 for beta chain variable domain of TCR clone 301383 (TRBV29-1, TRBJ1-1)
CSVGDSRNTEAFF

SEQ ID NO: 602767 - protein, 13 aa, Homo sapiens
  CDR3 for alpha chain variable domain of TCR clone 301384 (TRAV27, TRAJ29)
CAGAHSGNTPLVF

SEQ ID NO: 602768 - protein, 14 aa, Homo sapiens
  CDR3 for beta chain variable domain of TCR clone 301384 (TRBV25-1, TRBJ1-2)
CASSDTTGVVGYTF

SEQ ID NO: 602769 - protein, 13 aa, Homo sapiens
  CDR3 for alpha chain variable domain of TCR clone 301385 (TRAV2, TRAJ40)
CAVVTSGTYKYIF

SEQ ID NO: 602770 - protein, 15 aa, Homo sapiens
  CDR3 for beta chain variable domain of TCR clone 301385 (TRBV18, TRBJ1-1)
CASAPRQGENTEAFF

SEQ ID NO: 602771 - protein, 13 aa, Homo sapiens
  CDR3 for alpha chain variable domain of TCR clone 301386 (TRAV12-1, TRAJ26)
CVVRRNYGQNFVF

SEQ ID NO: 602772 - protein, 17 aa, Homo sapiens
  CDR3 for beta chain variable domain of TCR clone 301386 (TRBV13, TRBJ2-3)
CASSLSRVAGGRNTQYF

SEQ ID NO: 602773 - protein, 17 aa, Homo sapiens
  CDR3 for alpha chain variable domain of TCR clone 301387 (TRAV3, TRAJ42)
CAVRDRDYGGSQGNLIF

SEQ ID NO: 602774 - protein, 16 aa, Homo sapiens
  CDR3 for beta chain variable domain of TCR clone 301387 (TRBV19, TRBJ2-3)
CASSIVASLGTDTQYF

SEQ ID NO: 602775 - protein, 12 aa, Homo sapiens
  CDR3 for alpha chain variable domain of TCR clone 301388 (TRAV38-1, TRAJ47)
CAFETYGNKLVF

SEQ ID NO: 602776 - protein, 15 aa, Homo sapiens
  CDR3 for beta chain variable domain of TCR clone 301388 (TRBV5-7, TRBJ2-7)
CASSGGRQVPYEQYF

SEQ ID NO: 602777 - protein, 16 aa, Homo sapiens
  CDR3 for alpha chain variable domain of TCR clone 301389 (TRAV3, TRAJ3)
CAVRDRAISSASKIIF

SEQ ID NO: 602778 - protein, 16 aa, Homo sapiens
  CDR3 for beta chain variable domain of TCR clone 301389 (TRBV20-1, TRBJ2-4)
CSATSLAELAKNSQCF

SEQ ID NO: 602779 - protein, 13 aa, Homo sapiens
  CDR3 for alpha chain variable domain of TCR clone 301390 (TRAV27, TRAJ41)
CAGEGNSGYALNV

SEQ ID NO: 602780 - protein, 14 aa, Homo sapiens
  CDR3 for beta chain variable domain of TCR clone 301390 (TRBV7-2, TRBJ1-1)
CASSFLTGTTEAFF

SEQ ID NO: 602781 - protein, 19 aa, Homo sapiens
  CDR3 for alpha chain variable domain of TCR clone 301391 (TRAV26-1, TRAJ38)
CIADNAGNNHIQNPDPAVY

SEQ ID NO: 602782 - protein, 14 aa, Homo sapiens
  CDR3 for beta chain variable domain of TCR clone 301391 (TRBV7-3, TRBJ1-1)
CASSLKGGNTEALF

SEQ ID NO: 602783 - protein, 13 aa, Homo sapiens
  CDR3 for alpha chain variable domain of TCR clone 301392 (TRAV1-2, TRAJ13)
CAVNSGGYQKVTF

SEQ ID NO: 602784 - protein, 14 aa, Homo sapiens
  CDR3 for beta chain variable domain of TCR clone 301392 (TRBV4-1, TRBJ1-5)
CASSPKGDNQTQHF

SEQ ID NO: 602785 - protein, 13 aa, Homo sapiens
  CDR3 for alpha chain variable domain of TCR clone 301393 (TRAV3, TRAJ41)
CAVSSNSGYALNF

SEQ ID NO: 602786 - protein, 12 aa, Homo sapiens
  CDR3 for beta chain variable domain of TCR clone 301393 (TRBV2, TRBJ2-1)
CASRPWPREQFF

SEQ ID NO: 602787 - protein, 14 aa, Homo sapiens
  CDR3 for alpha chain variable domain of TCR clone 301394 (TRAV26-1, TRAJ44)
CIVRPTGTASKLTF

SEQ ID NO: 602788 - protein, 15 aa, Homo sapiens
  CDR3 for beta chain variable domain of TCR clone 301394 (TRBV9, TRBJ1-6)
CASSVAGTGDSPLHF

SEQ ID NO: 602789 - protein, 15 aa, Homo sapiens
  CDR3 for alpha chain variable domain of TCR clone 301395 (TRAV23/DV6, TRAJ32)
CAASKMGGATYKFIF

SEQ ID NO: 602790 - protein, 12 aa, Homo sapiens
  CDR3 for beta chain variable domain of TCR clone 301395 (TRBV3-1, TRBJ1-1)
CASSHQDREAFF

SEQ ID NO: 602791 - protein, 17 aa, Homo sapiens
  CDR3 for alpha chain variable domain of TCR clone 301396 (TRAV3, TRAJ38)
CAVRDCLNAGNNRKLIW

SEQ ID NO: 602792 - protein, 15 aa, Homo sapiens
  CDR3 for beta chain variable domain of TCR clone 301396 (TRBV7-2, TRBJ2-7)
CASSLAVGQVYEQYF

SEQ ID NO: 602793 - protein, 14 aa, Homo sapiens
  CDR3 for alpha chain variable domain of TCR clone 301397 (TRAV8-3, TRAJ4)
CAVGASGGYNKLIF

SEQ ID NO: 602794 - protein, 15 aa, Homo sapiens
  CDR3 for beta chain variable domain of TCR clone 301397 (TRBV7-9, TRBJ1-4)
CASSARTGGNEKPFF

SEQ ID NO: 602795 - protein, 15 aa, Homo sapiens
  CDR3 for alpha chain variable domain of TCR clone 301398 (TRAV27, TRAJ38)
CAARRNAGNNRKLIW

SEQ ID NO: 602796 - protein, 15 aa, Homo sapiens
  CDR3 for beta chain variable domain of TCR clone 301398 (TRBV5-1, TRBJ2-1)
CASSPPRPPTMSSSS

SEQ ID NO: 602797 - protein, 16 aa, Homo sapiens
  CDR3 for alpha chain variable domain of TCR clone 301399 (TRAV30, TRAJ24)
CGTEIVDADSWGKFQF

SEQ ID NO: 602798 - protein, 14 aa, Homo sapiens
  CDR3 for beta chain variable domain of TCR clone 301399 (TRBV12-5, TRBJ2-5)
CASFSRTHQETQYF

SEQ ID NO: 602799 - protein, 14 aa, Homo sapiens
  CDR3 for alpha chain variable domain of TCR clone 301400 (TRAV12-2, TRAJ17)
GAVLFKAAGNKLTL

SEQ ID NO: 602800 - protein, 17 aa, Homo sapiens
  CDR3 for beta chain variable domain of TCR clone 301400 (TRBV20-1, TRBJ2-2)
CSASGSGQGGLTGELFF

SEQ ID NO: 602801 - protein, 16 aa, Homo sapiens
  CDR3 for alpha chain variable domain of TCR clone 301401 (TRAV4, TRAJ18)
CCVLLFGGSTLGRLYF

SEQ ID NO: 602802 - protein, 12 aa, Homo sapiens
  CDR3 for beta chain variable domain of TCR clone 301401 (TRBV6-3, TRBJ2-7)
CASSLTPCEQYF

SEQ ID NO: 602803 - protein, 14 aa, Homo sapiens
  CDR3 for alpha chain variable domain of TCR clone 301402 (TRAV9-2, TRAJ39)
CALYIYNAGNMLTF

SEQ ID NO: 602804 - protein, 15 aa, Homo sapiens
  CDR3 for beta chain variable domain of TCR clone 301402 (TRBV4-3, TRBJ2-1)
CASSQESAIYNEQFF

SEQ ID NO: 602805 - protein, 21 aa, Homo sapiens
  CDR3 for alpha chain variable domain of TCR clone 301403 (TRAV12-1, TRAJ32)
SSVIQPPTSMNYGGATNKLIF

SEQ ID NO: 602806 - protein, 13 aa, Homo sapiens
  CDR3 for beta chain variable domain of TCR clone 301403 (TRBV5-4, TRBJ2-5)
CASSPVSQETQYF

SEQ ID NO: 602807 - protein, 13 aa, Homo sapiens
  CDR3 for alpha chain variable domain of TCR clone 301404 (TRAV21, TRAJ20)
CAVGLRVDYKLSF

SEQ ID NO: 602808 - protein, 15 aa, Homo sapiens
  CDR3 for beta chain variable domain of TCR clone 301404 (TRBV15, TRBJ2-7)
CATSRDRSPRNEQYF

SEQ ID NO: 602809 - protein, 14 aa, Homo sapiens
  CDR3 for alpha chain variable domain of TCR clone 301405 (TRAV12-3, TRAJ48)
CAMSVNFGNEKLTF

SEQ ID NO: 602810 - protein, 13 aa, Homo sapiens
  CDR3 for beta chain variable domain of TCR clone 301405 (TRBV20-1, TRBJ1-3)
CSSAGNSGNTISF

SEQ ID NO: 602811 - protein, 13 aa, Homo sapiens
  CDR3 for alpha chain variable domain of TCR clone 301406 (TRAV23/DV6, TRAJ9)
CAASTTGGSKTIF

SEQ ID NO: 602812 - protein, 14 aa, Homo sapiens
  CDR3 for beta chain variable domain of TCR clone 301406 (TRBV5-1, TRBJ2-3)
CASRVDGVSDTQYF

SEQ ID NO: 602813 - protein, 15 aa, Homo sapiens
  CDR3 for alpha chain variable domain of TCR clone 301407 (TRAV14/DV4, TRAJ10)
CAMRELTGGGNKLTF

SEQ ID NO: 602814 - protein, 18 aa, Homo sapiens
  CDR3 for beta chain variable domain of TCR clone 301407 (TRBV5-4, TRBJ2-3)
CASSPTAGFLPSTDTQYF

SEQ ID NO: 602815 - protein, 14 aa, Homo sapiens
  CDR3 for alpha chain variable domain of TCR clone 301408 (TRAV1-2, TRAJ16)
CAVNRFSDGQKLLF

SEQ ID NO: 602816 - protein, 13 aa, Homo sapiens
  CDR3 for beta chain variable domain of TCR clone 301408 (TRBV12-4, TRBJ2-5)
CASSLGGSRTRYF

SEQ ID NO: 602817 - protein, 13 aa, Homo sapiens
  CDR3 for alpha chain variable domain of TCR clone 301409 (TRAV27, TRAJ17)
CAGAATAGNKLTF

SEQ ID NO: 602818 - protein, 15 aa, Homo sapiens
  CDR3 for beta chain variable domain of TCR clone 301409 (TRBV5-1, TRBJ2-3)
CASRNQAGSTDTQYC

SEQ ID NO: 602819 - protein, 14 aa, Homo sapiens
  CDR3 for alpha chain variable domain of TCR clone 301410 (TRAV17, TRAJ42)
CSTDAPGSQGNLIF

SEQ ID NO: 602820 - protein, 13 aa, Homo sapiens
  CDR3 for beta chain variable domain of TCR clone 301410 (TRBV7-7, TRBJ1-5)
CASSPGKNQPQHF

SEQ ID NO: 602821 - protein, 17 aa, Homo sapiens
  CDR3 for alpha chain variable domain of TCR clone 301411 (TRAV3, TRAJ13)
CAVRDMRRTGGYQTVTF

SEQ ID NO: 602822 - protein, 13 aa, Homo sapiens
  CDR3 for beta chain variable domain of TCR clone 301411 (TRBV7-7, TRBJ2-3)
CASSLSRADTQYF

SEQ ID NO: 602823 - protein, 12 aa, Homo sapiens
  CDR3 for alpha chain variable domain of TCR clone 301412 (TRAV12-2, TRAJ44)
CADTGTASKLTF

SEQ ID NO: 602824 - protein, 17 aa, Homo sapiens
  CDR3 for beta chain variable domain of TCR clone 301412 (TRBV20-1, TRBJ1-1)
CSARGTGGSYGSTGAFF

SEQ ID NO: 602825 - protein, 12 aa, Homo sapiens
  CDR3 for alpha chain variable domain of TCR clone 301413 (TRAV12-3, TRAJ17)
CAMKLTGNKLTF

SEQ ID NO: 602826 - protein, 15 aa, Homo sapiens
  CDR3 for beta chain variable domain of TCR clone 301413 (TRBV20-1, TRBJ2-7)
CSASDRVSGMDEQYF

SEQ ID NO: 602827 - protein, 15 aa, Homo sapiens
  CDR3 for alpha chain variable domain of TCR clone 301414 (TRAV26-1, TRAJ15)
CIVRAANQAGTALIF

SEQ ID NO: 602828 - protein, 18 aa, Homo sapiens
  CDR3 for beta chain variable domain of TCR clone 301414 (TRBV15, TRBJ2-3)
CATSRDGARSWDTDTQYF

SEQ ID NO: 602829 - protein, 12 aa, Homo sapiens
  CDR3 for alpha chain variable domain of TCR clone 301415 (TRAV13-1, TRAJ20)
CAASMGDYKLSF

SEQ ID NO: 602830 - protein, 15 aa, Homo sapiens
  CDR3 for beta chain variable domain of TCR clone 301415 (TRBV11-3, TRBJ2-3)
GASNGGLDSTDTQYF

SEQ ID NO: 602831 - protein, 12 aa, Homo sapiens
  CDR3 for alpha chain variable domain of TCR clone 301416 (TRAV12-3, TRAJ17)
CAMTLTGNKLTS

SEQ ID NO: 602832 - protein, 14 aa, Homo sapiens
  CDR3 for beta chain variable domain of TCR clone 301416 (TRBV9, TRBJ2-1)
CASSVDPRGNEQFF

SEQ ID NO: 602833 - protein, 13 aa, Homo sapiens
  CDR3 for alpha chain variable domain of TCR clone 301417 (TRAV8-2, TRAJ44)
CSRGAGTASKLTF

SEQ ID NO: 602834 - protein, 13 aa, Homo sapiens
  CDR3 for beta chain variable domain of TCR clone 301417 (TRBV12-4, TRBJ2-7)
CASRRQASYEQYF

SEQ ID NO: 602835 - protein, 17 aa, Homo sapiens
  CDR3 for alpha chain variable domain of TCR clone 301418 (TRAV23/DV6, TRAJ57)
CAASSTLPQGGSEKLVF

SEQ ID NO: 602836 - protein, 13 aa, Homo sapiens
  CDR3 for beta chain variable domain of TCR clone 301418 (TRBV15, TRBJ1-6)
CATSGGLNSRLHF

SEQ ID NO: 602837 - protein, 16 aa, Homo sapiens
  CDR3 for alpha chain variable domain of TCR clone 301419 (TRAV12-1, TRAJ22)
CVVNTISSGSARQLTF

SEQ ID NO: 602838 - protein, 13 aa, Homo sapiens
  CDR3 for beta chain variable domain of TCR clone 301419 (TRBV19, TRBJ2-1)
CASNGGVFSEQFL

SEQ ID NO: 602839 - protein, 12 aa, Homo sapiens
  CDR3 for alpha chain variable domain of TCR clone 301420 (TRAV8-2, TRAJ45)
CVQGGGADGLTF

SEQ ID NO: 602840 - protein, 17 aa, Homo sapiens
  CDR3 for beta chain variable domain of TCR clone 301420 (TRBV7-9, TRBJ2-1)
CASSLVASYPSYNEQFF

SEQ ID NO: 602841 - protein, 15 aa, Homo sapiens
  CDR3 for alpha chain variable domain of TCR clone 301421 (TRAV3, TRAJ22)
CAVRDRGGSARQLTF

SEQ ID NO: 602842 - protein, 14 aa, Homo sapiens
  CDR3 for beta chain variable domain of TCR clone 301421 (TRBV7-6, TRBJ2-1)
CASSLGGGADEQFF

SEQ ID NO: 602843 - protein, 12 aa, Homo sapiens
  CDR3 for alpha chain variable domain of TCR clone 301422 (TRAV12-1, TRAJ31)
CVSWSNDARLMF

SEQ ID NO: 602844 - protein, 15 aa, Homo sapiens
  CDR3 for beta chain variable domain of TCR clone 301422 (TRBV7-2, TRBJ1-5)
CASSLDRGQDQPQHF

SEQ ID NO: 602845 - protein, 10 aa, Homo sapiens
  CDR3 for alpha chain variable domain of TCR clone 301423 (TRAV8-3, TRAJ33)
CAVGAIATIS

SEQ ID NO: 602846 - protein, 14 aa, Homo sapiens
  CDR3 for beta chain variable domain of TCR clone 301423 (TRBV10-3, TRBJ1-6)
CAISVDGDESPLHF

SEQ ID NO: 602847 - protein, 16 aa, Homo sapiens
  CDR3 for alpha chain variable domain of TCR clone 301424 (TRAV12-3, TRAJ53)
CAMIPGSGGSNYKLTF

SEQ ID NO: 602848 - protein, 11 aa, Homo sapiens
  CDR3 for beta chain variable domain of TCR clone 301424 (TRBV29-1, TRBJ2-5)
CSEGRTGTQYF

SEQ ID NO: 602849 - protein, 16 aa, Homo sapiens
  CDR3 for alpha chain variable domain of TCR clone 301425 (TRAV4, TRAJ5)
CLVGPDHGHGQESTYF

SEQ ID NO: 602850 - protein, 15 aa, Homo sapiens
  CDR3 for beta chain variable domain of TCR clone 301425 (TRBV27, TRBJ2-5)
CASSLIPAGGETQYF

SEQ ID NO: 602851 - protein, 12 aa, Homo sapiens
  CDR3 for alpha chain variable domain of TCR clone 301426 (TRAV26-1, TRAJ13)
CIVSRGYQQVTF

SEQ ID NO: 602852 - protein, 14 aa, Homo sapiens
  CDR3 for beta chain variable domain of TCR clone 301426 (TRBV7-2, TRBJ2-7)
CASSPKTSFYEQYF

SEQ ID NO: 602853 - protein, 16 aa, Homo sapiens
  CDR3 for alpha chain variable domain of TCR clone 301427 (TRAV3, TRAJ10)
CAVRDIRAGGGNKLTF

SEQ ID NO: 602854 - protein, 17 aa, Homo sapiens
  CDR3 for beta chain variable domain of TCR clone 301427 (TRBV28, TRBJ2-5)
CASSTPEGDALQETQYF

SEQ ID NO: 602855 - protein, 15 aa, Homo sapiens
  CDR3 for alpha chain variable domain of TCR clone 301428 (TRAV20, TRAJ53)
CAVLARGGSNYKLTF

SEQ ID NO: 602856 - protein, 12 aa, Homo sapiens
  CDR3 for beta chain variable domain of TCR clone 301428 (TRBV7-6, TRBJ2-5)
CASSLSQETQYF

SEQ ID NO: 602857 - protein, 11 aa, Homo sapiens
  CDR3 for alpha chain variable domain of TCR clone 301429 (TRAV23/DV6, TRAJ58)
CAARLLRGETS

SEQ ID NO: 602858 - protein, 13 aa, Homo sapiens
  CDR3 for beta chain variable domain of TCR clone 301429 (TRBV7-3, TRBJ2-1)
CRQLSGGTNEQFF

SEQ ID NO: 602859 - protein, 15 aa, Homo sapiens
  CDR3 for alpha chain variable domain of TCR clone 301430 (TRAV8-4, TRAJ11)
CAVSRALSGYSTLTF

SEQ ID NO: 602860 - protein, 16 aa, Homo sapiens
  CDR3 for beta chain variable domain of TCR clone 301430 (TRBV7-3, TRBJ2-2)
CASSLKRGTLSGELFF

SEQ ID NO: 602861 - protein, 15 aa, Homo sapiens
  CDR3 for alpha chain variable domain of TCR clone 301431 (TRAV1-2, TRAJ30)
CAVRPHGNRDDKIIF

SEQ ID NO: 602862 - protein, 14 aa, Homo sapiens
  CDR3 for beta chain variable domain of TCR clone 301431 (TRBV7-8, TRBJ2-3)
CASSLEAGTDTQYF

SEQ ID NO: 602863 - protein, 13 aa, Homo sapiens
  CDR3 for alpha chain variable domain of TCR clone 301432 (TRAV2, TRAJ40)
CSVVSSGTYKYIF

SEQ ID NO: 602864 - protein, 14 aa, Homo sapiens
  CDR3 for beta chain variable domain of TCR clone 301432 (TRBV19, TRBJ2-1)
CASPTFVLSGEQFF

SEQ ID NO: 602865 - protein, 10 aa, Homo sapiens
  CDR3 for alpha chain variable domain of TCR clone 301433 (TRAV8-4, TRAJ39)
CAVSGNMLTF

SEQ ID NO: 602866 - protein, 15 aa, Homo sapiens
  CDR3 for beta chain variable domain of TCR clone 301433 (TRBV7-3, TRBJ2-1)
CASSLGQGPFGEQFF

SEQ ID NO: 602867 - protein, 12 aa, Homo sapiens
  CDR3 for alpha chain variable domain of TCR clone 301434 (TRAV17, TRAJ20)
CSTQSNDYNLSF

SEQ ID NO: 602868 - protein, 13 aa, Homo sapiens
  CDR3 for beta chain variable domain of TCR clone 301434 (TRBV10-3, TRBJ1-1)
CAIIPEGGTEAFF

SEQ ID NO: 602869 - protein, 17 aa, Homo sapiens
  CDR3 for alpha chain variable domain of TCR clone 301435 (TRAV13-1, TRAJ28)
CAASPPYSGAGSYQLTF

SEQ ID NO: 602870 - protein, 14 aa, Homo sapiens
  CDR3 for beta chain variable domain of TCR clone 301435 (TRBV11-2, TRBJ2-5)
CASSRTGGIETQYF

SEQ ID NO: 602871 - protein, 15 aa, Homo sapiens
  CDR3 for alpha chain variable domain of TCR clone 301436 (TRAV29/DV5, TRAJ42)
CAAQTDGGSQGNLIF

SEQ ID NO: 602872 - protein, 15 aa, Homo sapiens
  CDR3 for beta chain variable domain of TCR clone 301436 (TRBV5-1, TRBJ2-2)
CASSSQGGNTGELFF

SEQ ID NO: 602873 - protein, 11 aa, Homo sapiens
  CDR3 for alpha chain variable domain of TCR clone 301437 (TRAV1-2, TRAJ20)
CAVANDYKLSF

SEQ ID NO: 602874 - protein, 15 aa, Homo sapiens
  CDR3 for beta chain variable domain of TCR clone 301437 (TRBV2, TRBJ2-1)
CASCELAGSYNEQFF

SEQ ID NO: 602875 - protein, 13 aa, Homo sapiens
  CDR3 for alpha chain variable domain of TCR clone 301438 (TRAV27, TRAJ29)
CAGDEWGNTPLVF

SEQ ID NO: 602876 - protein, 14 aa, Homo sapiens
  CDR3 for beta chain variable domain of TCR clone 301438 (TRBV19, TRBJ2-1)
CASPTFVLSGEQFF

SEQ ID NO: 602877 - protein, 10 aa, Homo sapiens
  CDR3 for alpha chain variable domain of TCR clone 301439 (TRAV38-2/DV8, TRAJ40)
CASGTNKYIF

SEQ ID NO: 602878 - protein, 14 aa, Homo sapiens
  CDR3 for beta chain variable domain of TCR clone 301439 (TRBV7-9, TRBJ2-1)
RASSPRDSLYEQFF

SEQ ID NO: 602879 - protein, 16 aa, Homo sapiens
  CDR3 for alpha chain variable domain of TCR clone 301440 (TRAV12-2, TRAJ39)
CAVNTGPNNAGNMPTF

SEQ ID NO: 602880 - protein, 10 aa, Homo sapiens
  CDR3 for beta chain variable domain of TCR clone 301440 (TRBV2, TRBJ2-4)
CASRGSIQYF

SEQ ID NO: 602881 - protein, 10 aa, Homo sapiens
  CDR3 for alpha chain variable domain of TCR clone 301441 (TRAV2, TRAJ15)
RGQAGTALIF

SEQ ID NO: 602882 - protein, 17 aa, Homo sapiens
  CDR3 for beta chain variable domain of TCR clone 301441 (TRBV20-1, TRBJ2-1)
CSARDPLAGVWDNEQFF

SEQ ID NO: 602883 - protein, 15 aa, Homo sapiens
  CDR3 for alpha chain variable domain of TCR clone 301442 (TRAV13-1, TRAJ15)
CAASIERQAGTALIF

SEQ ID NO: 602884 - protein, 14 aa, Homo sapiens
  CDR3 for beta chain variable domain of TCR clone 301442 (TRBV11-2, TRBJ2-3)
CASSRLARTDTQYF

SEQ ID NO: 602885 - protein, 13 aa, Homo sapiens
  CDR3 for alpha chain variable domain of TCR clone 301443 (TRAV17, TRAJ31)
CATDENNNARLMF

SEQ ID NO: 602886 - protein, 16 aa, Homo sapiens
  CDR3 for beta chain variable domain of TCR clone 301443 (TRBV20-1, TRBJ1-2)
CSASMGQGVANYGYTF

SEQ ID NO: 602887 - protein, 13 aa, Homo sapiens
  CDR3 for alpha chain variable domain of TCR clone 301444 (TRAV8-6, TRAJ33)
CAVSEGSNYQLIW

SEQ ID NO: 602888 - protein, 13 aa, Homo sapiens
  CDR3 for beta chain variable domain of TCR clone 301444 (TRBV13, TRBJ2-5)
CASSLGGEETQYF

SEQ ID NO: 602889 - protein, 15 aa, Homo sapiens
  CDR3 for alpha chain variable domain of TCR clone 301445 (TRAV2, TRAJ13)
CATPSYSGGYHKVTF

SEQ ID NO: 602890 - protein, 14 aa, Homo sapiens
  CDR3 for beta chain variable domain of TCR clone 301445 (TRBV27, TRBJ2-2)
CASSLGAATGELFF

SEQ ID NO: 602891 - protein, 13 aa, Homo sapiens
  CDR3 for alpha chain variable domain of TCR clone 301446 (TRAV8-6, TRAJ9)
CAVWDTGGFKPIF

SEQ ID NO: 602892 - protein, 14 aa, Homo sapiens
  CDR3 for beta chain variable domain of TCR clone 301446 (TRBV2, TRBJ2-1)
CASSEALIYNEQFF

SEQ ID NO: 602893 - protein, 12 aa, Homo sapiens
  CDR3 for alpha chain variable domain of TCR clone 301447 (TRAV12-1, TRAJ40)
CVFYSGTYKYIF

SEQ ID NO: 602894 - protein, 15 aa, Homo sapiens
  CDR3 for beta chain variable domain of TCR clone 301447 (TRBV28, TRBJ2-1)
CASSIIAGGRSEQFF

SEQ ID NO: 602895 - protein, 13 aa, Homo sapiens
  CDR3 for alpha chain variable domain of TCR clone 301448 (TRAV13-1, TRAJ6)
CAASKGGSYIPTF

SEQ ID NO: 602896 - protein, 15 aa, Homo sapiens
  CDR3 for beta chain variable domain of TCR clone 301448 (TRBV2, TRBJ2-1)
CASSEEREGDNEQFF

SEQ ID NO: 602897 - protein, 19 aa, Homo sapiens
  CDR3 for alpha chain variable domain of TCR clone 301449 (TRAV26-1, TRAJ40)
CCVLCIVRAVPSGTYKYIF

SEQ ID NO: 602898 - protein, 14 aa, Homo sapiens
  CDR3 for beta chain variable domain of TCR clone 301449 (TRBV19, TRBJ2-1)
CASKDPGLANEQFF

SEQ ID NO: 602899 - protein, 13 aa, Homo sapiens
  CDR3 for alpha chain variable domain of TCR clone 301450 (TRAV12-2, TRAJ18)
CAVRGSTLGRLYF

SEQ ID NO: 602900 - protein, 20 aa, Homo sapiens
  CDR3 for beta chain variable domain of TCR clone 301450 (TRBV7-8, TRBJ2-2)
CASSHLFPGPTIHITGELFC

SEQ ID NO: 602901 - protein, 12 aa, Homo sapiens
  CDR3 for alpha chain variable domain of TCR clone 301451 (TRAV27, TRAJ13)
CAGAGVYQKVTF

SEQ ID NO: 602902 - protein, 15 aa, Homo sapiens
  CDR3 for beta chain variable domain of TCR clone 301451 (TRBV20-1, TRBJ2-6)
CSARDRGPGANVLTF

SEQ ID NO: 602903 - protein, 17 aa, Homo sapiens
  CDR3 for alpha chain variable domain of TCR clone 301452 (TRAV21, TRAJ52)
CCEAFPSGCTSDGKLTF

SEQ ID NO: 602904 - protein, 17 aa, Homo sapiens
  CDR3 for beta chain variable domain of TCR clone 301452 (TRBV13, TRBJ2-3)
CASSLSRVAGGRNTQYF

SEQ ID NO: 602905 - protein, 14 aa, Homo sapiens
  CDR3 for alpha chain variable domain of TCR clone 301453 (TRAV14/DV4, TRAJ54)
CALREAPGAQKLVF

SEQ ID NO: 602906 - protein, 15 aa, Homo sapiens
  CDR3 for beta chain variable domain of TCR clone 301453 (TRBV5-1, TRBJ2-7)
CASSLNGGPAREQYF

SEQ ID NO: 602907 - protein, 13 aa, Homo sapiens
  CDR3 for alpha chain variable domain of TCR clone 301454 (TRAV2, TRAJ40)
CAVVTSGTYKYIF

SEQ ID NO: 602908 - protein, 14 aa, Homo sapiens
  CDR3 for beta chain variable domain of TCR clone 301454 (TRBV19, TRBJ2-1)
CASPTFVLSGEQLL

SEQ ID NO: 602909 - protein, 13 aa, Homo sapiens
  CDR3 for alpha chain variable domain of TCR clone 301455 (TRAV20, TRAJ48)
CAVQGVGNEKLTF

SEQ ID NO: 602910 - protein, 19 aa, Homo sapiens
  CDR3 for beta chain variable domain of TCR clone 301455 (TRBV2, TRBJ2-2)
CASSYPGLAGGGNTGELFF

SEQ ID NO: 602911 - protein, 12 aa, Homo sapiens
  CDR3 for alpha chain variable domain of TCR clone 301456 (TRAV17, TRAJ57)
CATDGGSEKLVF

SEQ ID NO: 602912 - protein, 18 aa, Homo sapiens
  CDR3 for beta chain variable domain of TCR clone 301456 (TRBV11-2, TRBJ2-3)
CASSLGGASRGAPNTQYF

SEQ ID NO: 602913 - protein, 14 aa, Homo sapiens
  CDR3 for alpha chain variable domain of TCR clone 301457 (TRAV3, TRAJ43)
CTSVLRDPNNDIRF

SEQ ID NO: 602914 - protein, 15 aa, Homo sapiens
  CDR3 for beta chain variable domain of TCR clone 301457 (TRBV27, TRBJ1-5)
CASSLGTGFDQPQHF

SEQ ID NO: 602915 - protein, 17 aa, Homo sapiens
  CDR3 for alpha chain variable domain of TCR clone 301458 (TRAV8-6, TRAJ58)
CAVSSWVGETSGSRLTC

SEQ ID NO: 602916 - protein, 17 aa, Homo sapiens
  CDR3 for beta chain variable domain of TCR clone 301458 (TRBV4-3, TRBJ1-2)
CASSSRLQAGGSVGYTF

SEQ ID NO: 602917 - protein, 14 aa, Homo sapiens
  CDR3 for alpha chain variable domain of TCR clone 301459 (TRAV1-2, TRAJ16)
CAVNRFSDGQKLLF

SEQ ID NO: 602918 - protein, 14 aa, Homo sapiens
  CDR3 for beta chain variable domain of TCR clone 301459 (TRBV11-2, TRBJ2-3)
CASSRRARTDTQYF

SEQ ID NO: 602919 - protein, 17 aa, Homo sapiens
  CDR3 for alpha chain variable domain of TCR clone 301460 (TRAV13-1, TRAJ52)
CAASSGAGGTRYGKLTF

SEQ ID NO: 602920 - protein, 17 aa, Homo sapiens
  CDR3 for beta chain variable domain of TCR clone 301460 (TRBV11-2, TRBJ2-1)
CASSLYPPGVEYNEQFF

SEQ ID NO: 602921 - protein, 11 aa, Homo sapiens
  CDR3 for alpha chain variable domain of TCR clone 301461 (TRAV8-1, TRAJ8)
CAMTGFQKLVF

SEQ ID NO: 602922 - protein, 14 aa, Homo sapiens
  CDR3 for beta chain variable domain of TCR clone 301461 (TRBV5-4, TRBJ1-2)
CDSTRQTGNYGYTF

SEQ ID NO: 602923 - protein, 13 aa, Homo sapiens
  CDR3 for alpha chain variable domain of TCR clone 301462 (TRAV8-3, TRAJ48)
CAVVPFGNEKLNF

SEQ ID NO: 602924 - protein, 14 aa, Homo sapiens
  CDR3 for beta chain variable domain of TCR clone 301462 (TRBV18, TRBJ2-7)
CASSPRGGAYEQYF

SEQ ID NO: 602925 - protein, 13 aa, Homo sapiens
  CDR3 for alpha chain variable domain of TCR clone 301463 (TRAV21, TRAJ57)
CAVTQGGSEKLGS

SEQ ID NO: 602926 - protein, 16 aa, Homo sapiens
  CDR3 for beta chain variable domain of TCR clone 301463 (TRBV29-1, TRBJ2-7)
CSVEDAEDGTAYEQYF

SEQ ID NO: 602927 - protein, 12 aa, Homo sapiens
  CDR3 for alpha chain variable domain of TCR clone 301464 (TRAV12-3, TRAJ17)
CAMTLTGNKLTF

SEQ ID NO: 602928 - protein, 14 aa, Homo sapiens
  CDR3 for beta chain variable domain of TCR clone 301464 (TRBV18, TRBJ2-7)
CASSPRGEAYEQYF

SEQ ID NO: 602929 - protein, 13 aa, Homo sapiens
  CDR3 for alpha chain variable domain of TCR clone 301465 (TRAV12-2, TRAJ13)
CAVTAGGYQKVTF

SEQ ID NO: 602930 - protein, 13 aa, Homo sapiens
  CDR3 for beta chain variable domain of TCR clone 301465 (TRBV7-6, TRBJ1-2)
CASSLVADYGYTF

SEQ ID NO: 602931 - protein, 14 aa, Homo sapiens
  CDR3 for alpha chain variable domain of TCR clone 301466 (TRAV3, TRAJ21)
CAVASQANFNKFYF

SEQ ID NO: 602932 - protein, 18 aa, Homo sapiens
  CDR3 for beta chain variable domain of TCR clone 301466 (TRBV7-9, TRBJ2-1)
CASSLAVSGTSGRNEQFF

SEQ ID NO: 602933 - protein, 14 aa, Homo sapiens
  CDR3 for alpha chain variable domain of TCR clone 301467 (TRAV17, TRAJ16)
CATADFSDGQKLLF

SEQ ID NO: 602934 - protein, 16 aa, Homo sapiens
  CDR3 for beta chain variable domain of TCR clone 301467 (TRBV7-9, TRBJ1-2)
CASSLGFSSGEDGYTF

SEQ ID NO: 602935 - protein, 15 aa, Homo sapiens
  CDR3 for alpha chain variable domain of TCR clone 301468 (TRAV38-1, TRAJ37)
CAFIFGSGNTGKLIF

SEQ ID NO: 602936 - protein, 17 aa, Homo sapiens
  CDR3 for beta chain variable domain of TCR clone 301468 (TRBV25-1, TRBJ1-1)
CASSTPPAGAMNTEAFF

SEQ ID NO: 602937 - protein, 16 aa, Homo sapiens
  CDR3 for alpha chain variable domain of TCR clone 301469 (TRAV1-2, TRAJ10)
CAVRGVLTGGGNNLTF

SEQ ID NO: 602938 - protein, 15 aa, Homo sapiens
  CDR3 for beta chain variable domain of TCR clone 301469 (TRBV7-9, TRBJ1-6)
CASSSPGRGNSPLHF

SEQ ID NO: 602939 - protein, 13 aa, Homo sapiens
  CDR3 for alpha chain variable domain of TCR clone 301470 (TRAV3, TRAJ21)
CAVREQDFNKFYF

SEQ ID NO: 602940 - protein, 15 aa, Homo sapiens
  CDR3 for beta chain variable domain of TCR clone 301470 (TRBV3-1, TRBJ2-7)
CASSQAPSGSYEQYF

SEQ ID NO: 602941 - protein, 18 aa, Homo sapiens
  CDR3 for alpha chain variable domain of TCR clone 301471 (TRAV13-1, TRAJ52)
CAAKNPNAGGTSYGKLTF

SEQ ID NO: 602942 - protein, 17 aa, Homo sapiens
  CDR3 for beta chain variable domain of TCR clone 301471 (TRBV20-1, TRBJ2-1)
CSASSSGLAGSDNEQFF

SEQ ID NO: 602943 - protein, 15 aa, Homo sapiens
  CDR3 for alpha chain variable domain of TCR clone 301472 (TRAV12-3, TRAJ6)
CAMSATTGGSYIPTF

SEQ ID NO: 602944 - protein, 16 aa, Homo sapiens
  CDR3 for beta chain variable domain of TCR clone 301472 (TRBV28, TRBJ2-6)
CASSNRRGSGANVLTF

SEQ ID NO: 602945 - protein, 14 aa, Homo sapiens
  CDR3 for alpha chain variable domain of TCR clone 301473 (TRAV1-2, TRAJ8)
CTVREDTGFQKLVF

SEQ ID NO: 602946 - protein, 15 aa, Homo sapiens
  CDR3 for beta chain variable domain of TCR clone 301473 (TRBV4-1, TRBJ2-7)
CASSQNTGRLYEQYF

SEQ ID NO: 602947 - protein, 12 aa, Homo sapiens
  CDR3 for alpha chain variable domain of TCR clone 301474 (TRAV12-3, TRAJ29)
CAAREGNTPLVF

SEQ ID NO: 602948 - protein, 16 aa, Homo sapiens
  CDR3 for beta chain variable domain of TCR clone 301474 (TRBV18, TRBJ2-1)
CHSPLAAGAGDNEQFF

SEQ ID NO: 602949 - protein, 13 aa, Homo sapiens
  CDR3 for alpha chain variable domain of TCR clone 301475 (TRAV35, TRAJ42)
CAGFPGSQGNLIF

SEQ ID NO: 602950 - protein, 14 aa, Homo sapiens
  CDR3 for beta chain variable domain of TCR clone 301475 (TRBV29-1, TRBJ2-2)
CSVLAETNTGELFC

SEQ ID NO: 602951 - protein, 13 aa, Homo sapiens
  CDR3 for alpha chain variable domain of TCR clone 301476 (TRAV21, TRAJ27)
CAARPGNAGKSTF

SEQ ID NO: 602952 - protein, 15 aa, Homo sapiens
  CDR3 for beta chain variable domain of TCR clone 301476 (TRBV4-1, TRBJ2-1)
CASSQDPGNYNEQFF

SEQ ID NO: 602953 - protein, 15 aa, Homo sapiens
  CDR3 for alpha chain variable domain of TCR clone 301477 (TRAV17, TRAJ40)
CATVSSTSGTYKYIF

SEQ ID NO: 602954 - protein, 14 aa, Homo sapiens
  CDR3 for beta chain variable domain of TCR clone 301477 (TRBV6-1, TRBJ1-3)
CASVQGGGGNTIYF

SEQ ID NO: 602955 - protein, 12 aa, Homo sapiens
  CDR3 for alpha chain variable domain of TCR clone 301478 (TRAV13-2, TRAJ23)
CAELHRRGKLIF

SEQ ID NO: 602956 - protein, 13 aa, Homo sapiens
  CDR3 for beta chain variable domain of TCR clone 301478 (TRBV7-9, TRBJ1-2)
CASSLKQNYGYTF

SEQ ID NO: 602957 - protein, 13 aa, Homo sapiens
  CDR3 for alpha chain variable domain of TCR clone 301479 (TRAV35, TRAJ42)
CAGFPGSQGNLIF

SEQ ID NO: 602958 - protein, 14 aa, Homo sapiens
  CDR3 for beta chain variable domain of TCR clone 301479 (TRBV29-1, TRBJ2-2)
CSVLAETNTGELFS

SEQ ID NO: 602959 - protein, 12 aa, Homo sapiens
  CDR3 for alpha chain variable domain of TCR clone 301480 (TRAV1-2, TRAJ17)
CAVRAAGNKLTF

SEQ ID NO: 602960 - protein, 12 aa, Homo sapiens
  CDR3 for beta chain variable domain of TCR clone 301480 (TRBV11-2, TRBJ2-2)
CASSLPTGELFF

SEQ ID NO: 602961 - protein, 13 aa, Homo sapiens
  CDR3 for alpha chain variable domain of TCR clone 301481 (TRAV27, TRAJ41)
CAGEGNSGYALNF

SEQ ID NO: 602962 - protein, 15 aa, Homo sapiens
  CDR3 for beta chain variable domain of TCR clone 301481 (TRBV7-6, TRBJ2-7)
CASSLGGAEPYEQYF

SEQ ID NO: 602963 - protein, 14 aa, Homo sapiens
  CDR3 for alpha chain variable domain of TCR clone 301482 (TRAV12-3, TRAJ58)
CAMSTETSGSRLTF

SEQ ID NO: 602964 - protein, 15 aa, Homo sapiens
  CDR3 for beta chain variable domain of TCR clone 301482 (TRBV4-1, TRBJ1-4)
CASSDTGGTNEELFF

SEQ ID NO: 602965 - protein, 14 aa, Homo sapiens
  CDR3 for alpha chain variable domain of TCR clone 301483 (TRAV23/DV6, TRAJ57)
CAASNQGGSEKLVF

SEQ ID NO: 602966 - protein, 13 aa, Homo sapiens
  CDR3 for beta chain variable domain of TCR clone 301483 (TRBV11-2, TRBJ2-7)
YASSSYPAYEQYF

SEQ ID NO: 602967 - protein, 15 aa, Homo sapiens
  CDR3 for alpha chain variable domain of TCR clone 301484 (TRAV26-1, TRAJ23)
CIVRVLNNQGGKLIF

SEQ ID NO: 602968 - protein, 13 aa, Homo sapiens
  CDR3 for beta chain variable domain of TCR clone 301484 (TRBV7-9, TRBJ1-2)
CASSLKQNYGYTF

SEQ ID NO: 602969 - protein, 17 aa, Homo sapiens
  CDR3 for alpha chain variable domain of TCR clone 301485 (TRAV3, TRAJ6)
CAVRDGPRAGGSYIPKF

SEQ ID NO: 602970 - protein, 15 aa, Homo sapiens
  CDR3 for beta chain variable domain of TCR clone 301485 (TRBV7-7, TRBJ2-2)
CATSKLAKNTGGLFF

SEQ ID NO: 602971 - protein, 15 aa, Homo sapiens
  CDR3 for alpha chain variable domain of TCR clone 301486 (TRAV12-1, TRAJ44)
FVVFVNTGTASKLTF

SEQ ID NO: 602972 - protein, 16 aa, Homo sapiens
  CDR3 for beta chain variable domain of TCR clone 301486 (TRBV20-1, TRBJ2-5)
CSPGGTSGGYMETQYF

SEQ ID NO: 602973 - protein, 15 aa, Homo sapiens
  CDR3 for alpha chain variable domain of TCR clone 301487 (TRAV17, TRAJ57)
CATGPSQGGSAKLVF

SEQ ID NO: 602974 - protein, 13 aa, Homo sapiens
  CDR3 for beta chain variable domain of TCR clone 301487 (TRBV27, TRBJ1-4)
CASSLMGDEKLFF

SEQ ID NO: 602975 - protein, 12 aa, Homo sapiens
  CDR3 for alpha chain variable domain of TCR clone 301488 (TRAV13-2, TRAJ23)
CAERHRGGKLIF

SEQ ID NO: 602976 - protein, 14 aa, Homo sapiens
  CDR3 for beta chain variable domain of TCR clone 301488 (TRBV20-1, TRBJ1-1)
CSARAVNGYTEAFF

SEQ ID NO: 602977 - protein, 16 aa, Homo sapiens
  CDR3 for alpha chain variable domain of TCR clone 301489 (TRAV3, TRAJ37)
CAVRGKGSGNTGKLIF

SEQ ID NO: 602978 - protein, 17 aa, Homo sapiens
  CDR3 for beta chain variable domain of TCR clone 301489 (TRBV28, TRBJ2-5)
CASSTPEGDALQETQYF

SEQ ID NO: 602979 - protein, 10 aa, Homo sapiens
  CDR3 for alpha chain variable domain of TCR clone 301490 (TRAV23/DV6, TRAJ57)
CAASSTLSQG

SEQ ID NO: 602980 - protein, 15 aa, Homo sapiens
  CDR3 for beta chain variable domain of TCR clone 301490 (TRBV4-1, TRBJ2-7)
CASSQQGQGFDEQYF

SEQ ID NO: 602981 - protein, 14 aa, Homo sapiens
  CDR3 for alpha chain variable domain of TCR clone 301491 (TRAV1-2, TRAJ16)
CAVNRFSDGQKLLF

SEQ ID NO: 602982 - protein, 15 aa, Homo sapiens
  CDR3 for beta chain variable domain of TCR clone 301491 (TRBV29-1, TRBJ1-2)
CSVVLEAGSNYGYTF

SEQ ID NO: 602983 - protein, 15 aa, Homo sapiens
  CDR3 for alpha chain variable domain of TCR clone 301492 (TRAV17, TRAJ57)
CATGPSQGGSEKLVF

SEQ ID NO: 602984 - protein, 11 aa, Homo sapiens
  CDR3 for beta chain variable domain of TCR clone 301492 (TRBV27, TRBJ2-3)
CASSLGDTQYF

SEQ ID NO: 602985 - protein, 14 aa, Homo sapiens
  CDR3 for alpha chain variable domain of TCR clone 301493 (TRAV38-1, TRAJ54)
CAFMSPSGAQKLVL

SEQ ID NO: 602986 - protein, 16 aa, Homo sapiens
  CDR3 for beta chain variable domain of TCR clone 301493 (TRBV28, TRBJ2-1)
CASSLGGSGSYNEQFF

SEQ ID NO: 602987 - protein, 15 aa, Homo sapiens
  CDR3 for alpha chain variable domain of TCR clone 301494 (TRAV12-3, TRAJ28)
CATKYSGAGSYQLTF

SEQ ID NO: 602988 - protein, 12 aa, Homo sapiens
  CDR3 for beta chain variable domain of TCR clone 301494 (TRBV19, TRBJ1-5)
CASSIENQPQHF

SEQ ID NO: 602989 - protein, 17 aa, Homo sapiens
  CDR3 for alpha chain variable domain of TCR clone 301495 (TRAV38-1, TRAJ28)
CSFMKPTSGAGSYQLTF

SEQ ID NO: 602990 - protein, 15 aa, Homo sapiens
  CDR3 for beta chain variable domain of TCR clone 301495 (TRBV5-1, TRBJ2-4)
CASSLGGGGSYIQYF

SEQ ID NO: 602991 - protein, 15 aa, Homo sapiens
  CDR3 for alpha chain variable domain of TCR clone 301496 (TRAV3, TRAJ32)
CAVSSYGGATNKHIF

SEQ ID NO: 602992 - protein, 13 aa, Homo sapiens
  CDR3 for beta chain variable domain of TCR clone 301496 (TRBV20-1, TRBJ2-7)
CSARPSTNYEQYF

SEQ ID NO: 602993 - protein, 18 aa, Homo sapiens
  CDR3 for alpha chain variable domain of TCR clone 301497 (TRAV21, TRAJ52)
CAVRPSPAGGTSYGKLTF

SEQ ID NO: 602994 - protein, 14 aa, Homo sapiens
  CDR3 for beta chain variable domain of TCR clone 301497 (TRBV4-2, TRBJ2-1)
CASCLDRAYNEQFF

SEQ ID NO: 602995 - protein, 14 aa, Homo sapiens
  CDR3 for alpha chain variable domain of TCR clone 301498 (TRAV25, TRAJ23)
CAGQGDNQGGKLNF

SEQ ID NO: 602996 - protein, 12 aa, Homo sapiens
  CDR3 for beta chain variable domain of TCR clone 301498 (TRBV7-9, TRBJ1-1)
CASSLVRGEAFF

SEQ ID NO: 602997 - protein, 14 aa, Homo sapiens
  CDR3 for alpha chain variable domain of TCR clone 301499 (TRAV17, TRAJ15)
CATDRGQAGTALIF

SEQ ID NO: 602998 - protein, 14 aa, Homo sapiens
  CDR3 for beta chain variable domain of TCR clone 301499 (TRBV18, TRBJ2-5)
CASSPEVSQETQYF

SEQ ID NO: 602999 - protein, 13 aa, Homo sapiens
  CDR3 for alpha chain variable domain of TCR clone 301500 (TRAV8-6, TRAJ8)
CAVSDTGFQKLVF

SEQ ID NO: 603000 - protein, 15 aa, Homo sapiens
  CDR3 for beta chain variable domain of TCR clone 301500 (TRBV28, TRBJ2-5)
CASSSGRTIQETQYF

SEQ ID NO: 603001 - protein, 13 aa, Homo sapiens
  CDR3 for alpha chain variable domain of TCR clone 301501 (TRAV20, TRAJ48)
FAVHLFGNEKLTF

SEQ ID NO: 603002 - protein, 15 aa, Homo sapiens
  CDR3 for beta chain variable domain of TCR clone 301501 (TRBV6-5, TRBJ2-6)
CASSQWEAGANVLTF

SEQ ID NO: 603003 - protein, 13 aa, Homo sapiens
  CDR3 for alpha chain variable domain of TCR clone 301502 (TRAV13-2, TRAJ48)
CAEMDFGNEKLTF

SEQ ID NO: 603004 - protein, 15 aa, Homo sapiens
  CDR3 for beta chain variable domain of TCR clone 301502 (TRBV2, TRBJ2-1)
CASSELAESYNEQFF

SEQ ID NO: 603005 - protein, 14 aa, Homo sapiens
  CDR3 for alpha chain variable domain of TCR clone 301503 (TRAV8-6, TRAJ16)
CAVTSFSDGQKLLF

SEQ ID NO: 603006 - protein, 15 aa, Homo sapiens
  CDR3 for beta chain variable domain of TCR clone 301503 (TRBV7-6, TRBJ1-2)
CASSSGGRGGYGYTF

SEQ ID NO: 603007 - protein, 13 aa, Homo sapiens
  CDR3 for alpha chain variable domain of TCR clone 301504 (TRAV21, TRAJ58)
SAVKESSGSRLTF

SEQ ID NO: 603008 - protein, 17 aa, Homo sapiens
  CDR3 for beta chain variable domain of TCR clone 301504 (TRBV5-1, TRBJ2-3)
CASSLAGWGSVVDTQYF

SEQ ID NO: 603009 - protein, 14 aa, Homo sapiens
  CDR3 for alpha chain variable domain of TCR clone 301505 (TRAV12-2, TRAJ24)
CAVTPADSRGNLQF

SEQ ID NO: 603010 - protein, 12 aa, Homo sapiens
  CDR3 for beta chain variable domain of TCR clone 301505 (TRBV3-1, TRBJ2-1)
CASSQGSSGQFF

SEQ ID NO: 603011 - protein, 14 aa, Homo sapiens
  CDR3 for alpha chain variable domain of TCR clone 301506 (TRAV14/DV4, TRAJ54)
CAMREAPGAQKLVF

SEQ ID NO: 603012 - protein, 14 aa, Homo sapiens
  CDR3 for beta chain variable domain of TCR clone 301506 (TRBV20-1, TRBJ1-1)
CSAQTRTGGTEAFF

SEQ ID NO: 603013 - protein, 15 aa, Homo sapiens
  CDR3 for alpha chain variable domain of TCR clone 301507 (TRAV3, TRAJ5)
CAVRDRQTGRRALTF

SEQ ID NO: 603014 - protein, 15 aa, Homo sapiens
  CDR3 for beta chain variable domain of TCR clone 301507 (TRBV7-8, TRBJ2-1)
RASSLADSLYNEQFF

SEQ ID NO: 603015 - protein, 14 aa, Homo sapiens
  CDR3 for alpha chain variable domain of TCR clone 301508 (TRAV1-2, TRAJ16)
CAVNRFSDGQKLLF

SEQ ID NO: 603016 - protein, 18 aa, Homo sapiens
  CDR3 for beta chain variable domain of TCR clone 301508 (TRBV6-6, TRBJ2-5)
CASSYSWLQGALRETQYF

SEQ ID NO: 603017 - protein, 16 aa, Homo sapiens
  CDR3 for alpha chain variable domain of TCR clone 301509 (TRAV3, TRAJ37)
CAVRVRGSGNTGKLIF

SEQ ID NO: 603018 - protein, 13 aa, Homo sapiens
  CDR3 for beta chain variable domain of TCR clone 301509 (TRBV14, TRBJ2-7)
CASSPRRPYEQYF

SEQ ID NO: 603019 - protein, 19 aa, Homo sapiens
  CDR3 for alpha chain variable domain of TCR clone 301510 (TRAV26-1, TRAJ52)
CIVRAHRNAGGTSYGKLTF

SEQ ID NO: 603020 - protein, 20 aa, Homo sapiens
  CDR3 for beta chain variable domain of TCR clone 301510 (TRBV28, TRBJ2-1)
CASTPIGRSPGLAGGNEQFF

SEQ ID NO: 603021 - protein, 10 aa, Homo sapiens
  CDR3 for alpha chain variable domain of TCR clone 301511 (TRAV17, TRAJ36)
CATVAGNPFF

SEQ ID NO: 603022 - protein, 13 aa, Homo sapiens
  CDR3 for beta chain variable domain of TCR clone 301511 (TRBV7-9, TRBJ1-2)
CASSLKQNYGYTF

SEQ ID NO: 603023 - protein, 11 aa, Homo sapiens
  CDR3 for alpha chain variable domain of TCR clone 301512 (TRAV20, TRAJ34)
CRTKGTDKLIF

SEQ ID NO: 603024 - protein, 13 aa, Homo sapiens
  CDR3 for beta chain variable domain of TCR clone 301512 (TRBV13, TRBJ2-1)
CASILGGRGEQFF

SEQ ID NO: 603025 - protein, 15 aa, Homo sapiens
  CDR3 for alpha chain variable domain of TCR clone 301513 (TRAV2, TRAJ9)
CAVAALITGGFKTIF

SEQ ID NO: 603026 - protein, 14 aa, Homo sapiens
  CDR3 for beta chain variable domain of TCR clone 301513 (TRBV7-8, TRBJ2-5)
CASSATGGQETQYF

SEQ ID NO: 603027 - protein, 13 aa, Homo sapiens
  CDR3 for alpha chain variable domain of TCR clone 301514 (TRAV16, TRAJ31)
CALSAPNNARLMF

SEQ ID NO: 603028 - protein, 18 aa, Homo sapiens
  CDR3 for beta chain variable domain of TCR clone 301514 (TRBV7-9, TRBJ2-7)
CASSLTTSGSRTWYEQYF

SEQ ID NO: 603029 - protein, 12 aa, Homo sapiens
  CDR3 for alpha chain variable domain of TCR clone 301515 (TRAV36/DV7, TRAJ54)
CAVVRGAQKLVF

SEQ ID NO: 603030 - protein, 14 aa, Homo sapiens
  CDR3 for beta chain variable domain of TCR clone 301515 (TRBV7-2, TRBJ1-6)
CASILQGANSPLHF

SEQ ID NO: 603031 - protein, 14 aa, Homo sapiens
  CDR3 for alpha chain variable domain of TCR clone 301516 (TRAV38-1, TRAJ29)
CAFITSSGNTPLVF

SEQ ID NO: 603032 - protein, 14 aa, Homo sapiens
  CDR3 for beta chain variable domain of TCR clone 301516 (TRBV18, TRBJ2-7)
CAGSPRGGAYEQYF

SEQ ID NO: 603033 - protein, 17 aa, Homo sapiens
  CDR3 for alpha chain variable domain of TCR clone 301517 (TRAV12-1, TRAJ6)
CVVKGGIPSGGSYIPTF

SEQ ID NO: 603034 - protein, 12 aa, Homo sapiens
  CDR3 for beta chain variable domain of TCR clone 301517 (TRBV12-4, TRBJ2-7)
CASSLGGYEQYF

SEQ ID NO: 603035 - protein, 11 aa, Homo sapiens
  CDR3 for alpha chain variable domain of TCR clone 301518 (TRAV13-2, TRAJ54)
RAVQRAQKLVF

SEQ ID NO: 603036 - protein, 15 aa, Homo sapiens
  CDR3 for beta chain variable domain of TCR clone 301518 (TRBV20-1, TRBJ2-7)
CSAESGTSGAYEQYF

SEQ ID NO: 603037 - protein, 12 aa, Homo sapiens
  CDR3 for alpha chain variable domain of TCR clone 301519 (TRAV20, TRAJ56)
CAVTGANSKLTF

SEQ ID NO: 603038 - protein, 14 aa, Homo sapiens
  CDR3 for beta chain variable domain of TCR clone 301519 (TRBV20-1, TRBJ2-5)
CSALVPGFQETQYF

SEQ ID NO: 603039 - protein, 17 aa, Homo sapiens
  CDR3 for alpha chain variable domain of TCR clone 301520 (TRAV1-1, TRAJ28)
CAADPAYSGAGSYQLTF

SEQ ID NO: 603040 - protein, 14 aa, Homo sapiens
  CDR3 for beta chain variable domain of TCR clone 301520 (TRBV19, TRBJ2-1)
CASPTFVLSGEQFF

SEQ ID NO: 603041 - protein, 16 aa, Homo sapiens
  CDR3 for alpha chain variable domain of TCR clone 301521 (TRAV30, TRAJ24)
CGTEIVDADSWGKFQF

SEQ ID NO: 603042 - protein, 13 aa, Homo sapiens
  CDR3 for beta chain variable domain of TCR clone 301521 (TRBV12-4, TRBJ1-2)
CATSSGLTVISTF

SEQ ID NO: 603043 - protein, 14 aa, Homo sapiens
  CDR3 for alpha chain variable domain of TCR clone 301522 (TRAV13-1, TRAJ57)
VRPLSQGGSEKLVF

SEQ ID NO: 603044 - protein, 17 aa, Homo sapiens
  CDR3 for beta chain variable domain of TCR clone 301522 (TRBV7-3, TRBJ2-3)
CASSLMKRMRGADTQYF

SEQ ID NO: 603045 - protein, 17 aa, Homo sapiens
  CDR3 for alpha chain variable domain of TCR clone 301523 (TRAV17, TRAJ7)
CATLGRLAFGKGNQVVV

SEQ ID NO: 603046 - protein, 12 aa, Homo sapiens
  CDR3 for beta chain variable domain of TCR clone 301523 (TRBV12-4, TRBJ2-7)
CQQFRKVREQYF

SEQ ID NO: 603047 - protein, 19 aa, Homo sapiens
  CDR3 for alpha chain variable domain of TCR clone 301524 (TRAV26-1, TRAJ52)
CIVRAHRNAGGTSYGKLTF

SEQ ID NO: 603048 - protein, 14 aa, Homo sapiens
  CDR3 for beta chain variable domain of TCR clone 301524 (TRBV7-8, TRBJ2-5)
CASSATGGQETQYF

SEQ ID NO: 603049 - protein, 16 aa, Homo sapiens
  CDR3 for alpha chain variable domain of TCR clone 301525 (TRAV12-1, TRAJ43)
CVVNPHRFGAGTRLAV

SEQ ID NO: 603050 - protein, 13 aa, Homo sapiens
  CDR3 for beta chain variable domain of TCR clone 301525 (TRBV20-1, TRBJ1-1)
CSARGGGKTEAFF

SEQ ID NO: 603051 - protein, 14 aa, Homo sapiens
  CDR3 for alpha chain variable domain of TCR clone 301526 (TRAV1-2, TRAJ8)
CAVREDTGFQKLVF

SEQ ID NO: 603052 - protein, 15 aa, Homo sapiens
  CDR3 for beta chain variable domain of TCR clone 301526 (TRBV5-5, TRBJ1-5)
CASSLGQGGNQPQHF

SEQ ID NO: 603053 - protein, 16 aa, Homo sapiens
  CDR3 for alpha chain variable domain of TCR clone 301527 (TRAV26-1, TRAJ48)
IASSDLSNFGNEKLTF

SEQ ID NO: 603054 - protein, 16 aa, Homo sapiens
  CDR3 for beta chain variable domain of TCR clone 301527 (TRBV6-1, TRBJ2-2)
CASSFGQGANTGELFF

SEQ ID NO: 603055 - protein, 14 aa, Homo sapiens
  CDR3 for alpha chain variable domain of TCR clone 301528 (TRAV17, TRAJ34)
CATDSLEGTDKLIF

SEQ ID NO: 603056 - protein, 22 aa, Homo sapiens
  CDR3 for beta chain variable domain of TCR clone 301528 (TRBV7-2, TRBJ2-7)
RRTRPCISVPAGHRGAAYEQYF

SEQ ID NO: 603057 - protein, 12 aa, Homo sapiens
  CDR3 for alpha chain variable domain of TCR clone 301529 (TRAV8-3, TRAJ20)
CAVGANDYKLSF

SEQ ID NO: 603058 - protein, 14 aa, Homo sapiens
  CDR3 for beta chain variable domain of TCR clone 301529 (TRBV12-4, TRBJ1-1)
CASRQTGLNTEAFF

SEQ ID NO: 603059 - protein, 12 aa, Homo sapiens
  CDR3 for alpha chain variable domain of TCR clone 301530 (TRAV12-3, TRAJ17)
CAMTLTGNKLTF

SEQ ID NO: 603060 - protein, 14 aa, Homo sapiens
  CDR3 for beta chain variable domain of TCR clone 301530 (TRBV7-2, TRBJ2-5)
CASSLVVGQETQYF

SEQ ID NO: 603061 - protein, 13 aa, Homo sapiens
  CDR3 for alpha chain variable domain of TCR clone 301531 (TRAV35, TRAJ13)
FAGPPRGYQKVTF

SEQ ID NO: 603062 - protein, 14 aa, Homo sapiens
  CDR3 for beta chain variable domain of TCR clone 301531 (TRBV7-2, TRBJ2-5)
CASSLSGGGETQYF

SEQ ID NO: 603063 - protein, 13 aa, Homo sapiens
  CDR3 for alpha chain variable domain of TCR clone 301532 (TRAV29/DV5, TRAJ31)
CPASRNNNARLMF

SEQ ID NO: 603064 - protein, 12 aa, Homo sapiens
  CDR3 for beta chain variable domain of TCR clone 301532 (TRBV11-2, TRBJ2-1)
CASSPGNNEQFF

SEQ ID NO: 603065 - protein, 18 aa, Homo sapiens
  CDR3 for alpha chain variable domain of TCR clone 301533 (TRAV12-3, TRAJ52)
CAMSRTNSGGTSYGKLTF

SEQ ID NO: 603066 - protein, 17 aa, Homo sapiens
  CDR3 for beta chain variable domain of TCR clone 301533 (TRBV7-3, TRBJ2-3)
CASSLRKRMRGADTQYF

SEQ ID NO: 603067 - protein, 14 aa, Homo sapiens
  CDR3 for alpha chain variable domain of TCR clone 301534 (TRAV1-2, TRAJ8)
CAVREDTGFQKLVF

SEQ ID NO: 603068 - protein, 15 aa, Homo sapiens
  CDR3 for beta chain variable domain of TCR clone 301534 (TRBV10-2, TRBJ2-6)
GASSEQGTGANALTV

SEQ ID NO: 603069 - protein, 11 aa, Homo sapiens
  CDR3 for alpha chain variable domain of TCR clone 301535 (TRAV8-4, TRAJ26)
WAGGEGQNFGF

SEQ ID NO: 603070 - protein, 17 aa, Homo sapiens
  CDR3 for beta chain variable domain of TCR clone 301535 (TRBV7-9, TRBJ2-3)
CASSLTVAGDLTDTQYF

SEQ ID NO: 603071 - protein, 13 aa, Homo sapiens
  CDR3 for alpha chain variable domain of TCR clone 301536 (TRAV38-2/DV8, TRAJ34)
CAYRTWNTDKLIF

SEQ ID NO: 603072 - protein, 15 aa, Homo sapiens
  CDR3 for beta chain variable domain of TCR clone 301536 (TRBV5-5, TRBJ1-5)
CASSLEGASNQPQHF

SEQ ID NO: 603073 - protein, 18 aa, Homo sapiens
  CDR3 for alpha chain variable domain of TCR clone 301537 (TRAV21, TRAJ52)
CAVRPSPAGGTSYGKLTF

SEQ ID NO: 603074 - protein, 15 aa, Homo sapiens
  CDR3 for beta chain variable domain of TCR clone 301537 (TRBV7-9, TRBJ2-7)
CASSSSGLAVYKQYF

SEQ ID NO: 603075 - protein, 13 aa, Homo sapiens
  CDR3 for alpha chain variable domain of TCR clone 301538 (TRAV8-6, TRAJ20)
CAVSYSNDYKLSF

SEQ ID NO: 603076 - protein, 15 aa, Homo sapiens
  CDR3 for beta chain variable domain of TCR clone 301538 (TRBV2, TRBJ2-5)
CASTRDGVPQETQYF

SEQ ID NO: 603077 - protein, 16 aa, Homo sapiens
  CDR3 for alpha chain variable domain of TCR clone 301539 (TRAV3, TRAJ23)
CAVKIGIYNQGGKLVF

SEQ ID NO: 603078 - protein, 17 aa, Homo sapiens
  CDR3 for beta chain variable domain of TCR clone 301539 (TRBV10-3, TRBJ2-6)
CAISESTAPSGANVLTF

SEQ ID NO: 603079 - protein, 12 aa, Homo sapiens
  CDR3 for alpha chain variable domain of TCR clone 301540 (TRAV12-3, TRAJ17)
CAMTLTGNELTF

SEQ ID NO: 603080 - protein, 16 aa, Homo sapiens
  CDR3 for beta chain variable domain of TCR clone 301540 (TRBV20-1, TRBJ1-1)
CSARDSRLSGDTEAFF

SEQ ID NO: 603081 - protein, 14 aa, Homo sapiens
  CDR3 for alpha chain variable domain of TCR clone 301541 (TRAV13-1, TRAJ35)
CAASKGGFGNGLNC

SEQ ID NO: 603082 - protein, 13 aa, Homo sapiens
  CDR3 for beta chain variable domain of TCR clone 301541 (TRBV7-3, TRBJ1-1)
CASSQDWGAEAFF

SEQ ID NO: 603083 - protein, 13 aa, Homo sapiens
  CDR3 for alpha chain variable domain of TCR clone 301542 (TRAV8-3, TRAJ37)
CAVGSGNTGKLIF

SEQ ID NO: 603084 - protein, 11 aa, Homo sapiens
  CDR3 for beta chain variable domain of TCR clone 301542 (TRBV29-1, TRBJ1-1)
CRLQQNTEAFF

SEQ ID NO: 603085 - protein, 14 aa, Homo sapiens
  CDR3 for alpha chain variable domain of TCR clone 301543 (TRAV17, TRAJ42)
CAQNDGGSQGNLIF

SEQ ID NO: 603086 - protein, 13 aa, Homo sapiens
  CDR3 for beta chain variable domain of TCR clone 301543 (TRBV20-1, TRBJ1-2)
CSAPRSGRYGYTF

SEQ ID NO: 603087 - protein, 16 aa, Homo sapiens
  CDR3 for alpha chain variable domain of TCR clone 301544 (TRAV1-1, TRAJ8)
CLLLLRGGTGFQKLVF

SEQ ID NO: 603088 - protein, 15 aa, Homo sapiens
  CDR3 for beta chain variable domain of TCR clone 301544 (TRBV20-1, TRBJ2-7)
CSARDRVSGMDEQYF

SEQ ID NO: 603089 - protein, 10 aa, Homo sapiens
  CDR3 for alpha chain variable domain of TCR clone 301545 (TRAV27, TRAJ49)
CVVPVTSSIL

SEQ ID NO: 603090 - protein, 20 aa, Homo sapiens
  CDR3 for beta chain variable domain of TCR clone 301545 (TRBV28, TRBJ2-1)
CASTPIGRSPGLAGGNERFF

SEQ ID NO: 603091 - protein, 16 aa, Homo sapiens
  CDR3 for alpha chain variable domain of TCR clone 301546 (TRAV27, TRAJ13)
CAGAKSDSGGDQKVTF

SEQ ID NO: 603092 - protein, 15 aa, Homo sapiens
  CDR3 for beta chain variable domain of TCR clone 301546 (TRBV3-1, TRBJ1-2)
CASSPTRLPEGGYTF

SEQ ID NO: 603093 - protein, 13 aa, Homo sapiens
  CDR3 for alpha chain variable domain of TCR clone 301547 (TRAV3, TRAJ20)
CAVRSLNDYKLSF

SEQ ID NO: 603094 - protein, 17 aa, Homo sapiens
  CDR3 for beta chain variable domain of TCR clone 301547 (TRBV19, TRBJ2-6)
CASSTGQVFSGANVLTF

SEQ ID NO: 603095 - protein, 14 aa, Homo sapiens
  CDR3 for alpha chain variable domain of TCR clone 301548 (TRAV29/DV5, TRAJ36)
CAARRKTGANNLFF

SEQ ID NO: 603096 - protein, 15 aa, Homo sapiens
  CDR3 for beta chain variable domain of TCR clone 301548 (TRBV25-1, TRBJ1-4)
CASSKRIATNEKLFF

SEQ ID NO: 603097 - protein, 12 aa, Homo sapiens
  CDR3 for alpha chain variable domain of TCR clone 301549 (TRAV12-3, TRAJ21)
CAMFNNFNKFYF

SEQ ID NO: 603098 - protein, 16 aa, Homo sapiens
  CDR3 for beta chain variable domain of TCR clone 301549 (TRBV7-9, TRBJ1-2)
GASSLAPLRAAYGYTF

SEQ ID NO: 603099 - protein, 16 aa, Homo sapiens
  CDR3 for alpha chain variable domain of TCR clone 301550 (TRAV30, TRAJ24)
CGTEIVDANSWGKFQF

SEQ ID NO: 603100 - protein, 15 aa, Homo sapiens
  CDR3 for beta chain variable domain of TCR clone 301550 (TRBV6-3, TRBJ2-7)
CASSSPGTVFYEQYF

SEQ ID NO: 603101 - protein, 12 aa, Homo sapiens
  CDR3 for alpha chain variable domain of TCR clone 301551 (TRAV27, TRAJ33)
CAGDGSNYHLIW

SEQ ID NO: 603102 - protein, 15 aa, Homo sapiens
  CDR3 for beta chain variable domain of TCR clone 301551 (TRBV6-5, TRBJ2-7)
CASSYSTSGNYEQYF

SEQ ID NO: 603103 - protein, 13 aa, Homo sapiens
  CDR3 for alpha chain variable domain of TCR clone 301552 (TRAV3, TRAJ21)
CAVREPDFNKFYF

SEQ ID NO: 603104 - protein, 14 aa, Homo sapiens
  CDR3 for beta chain variable domain of TCR clone 301552 (TRBV6-1, TRBJ1-3)
CASVQGGSGNTIYF

SEQ ID NO: 603105 - protein, 11 aa, Homo sapiens
  CDR3 for alpha chain variable domain of TCR clone 301553 (TRAV3, TRAJ21)
CAVGNFNKFYF

SEQ ID NO: 603106 - protein, 17 aa, Homo sapiens
  CDR3 for beta chain variable domain of TCR clone 301553 (TRBV24-1, TRBJ2-1)
CATSDVSTSGTYNEQFI

SEQ ID NO: 603107 - protein, 16 aa, Homo sapiens
  CDR3 for alpha chain variable domain of TCR clone 301554 (TRAV21, TRAJ52)
CAVTNAGGTSYGKLTF

SEQ ID NO: 603108 - protein, 13 aa, Homo sapiens
  CDR3 for beta chain variable domain of TCR clone 301554 (TRBV7-9, TRBJ1-2)
CASSLKQNYGYTF

SEQ ID NO: 603109 - protein, 12 aa, Homo sapiens
  CDR3 for alpha chain variable domain of TCR clone 301555 (TRAV12-1, TRAJ6)
CVVSERSYIPTF

SEQ ID NO: 603110 - protein, 21 aa, Homo sapiens
  CDR3 for beta chain variable domain of TCR clone 301555 (TRBV7-3, TRBJ2-1)
GGTQPCISVPSAYGLAGAQFF

SEQ ID NO: 603111 - protein, 15 aa, Homo sapiens
  CDR3 for alpha chain variable domain of TCR clone 301556 (TRAV2, TRAJ44)
CAVEAYTGTASNLTF

SEQ ID NO: 603112 - protein, 14 aa, Homo sapiens
  CDR3 for beta chain variable domain of TCR clone 301556 (TRBV11-2, TRBJ2-1)
CASSPGSRDNEQFF

SEQ ID NO: 603113 - protein, 14 aa, Homo sapiens
  CDR3 for alpha chain variable domain of TCR clone 301557 (TRAV29/DV5, TRAJ17)
CAASGKAAGNKLTF

SEQ ID NO: 603114 - protein, 14 aa, Homo sapiens
  CDR3 for beta chain variable domain of TCR clone 301557 (TRBV20-1, TRBJ1-1)
CSAQTRIGGTEAFF

SEQ ID NO: 603115 - protein, 12 aa, Homo sapiens
  CDR3 for alpha chain variable domain of TCR clone 301558 (TRAV12-3, TRAJ20)
WAMVRGDYKPSF

SEQ ID NO: 603116 - protein, 14 aa, Homo sapiens
  CDR3 for beta chain variable domain of TCR clone 301558 (TRBV5-5, TRBJ1-5)
CASSGQGVDQPQHF

SEQ ID NO: 603117 - protein, 10 aa, Homo sapiens
  CDR3 for alpha chain variable domain of TCR clone 301559 (TRAV23/DV6, TRAJ31)
CARGGARLMF

SEQ ID NO: 603118 - protein, 12 aa, Homo sapiens
  CDR3 for beta chain variable domain of TCR clone 301559 (TRBV6-1, TRBJ2-7)
CASSDYSYEQYF

SEQ ID NO: 603119 - protein, 15 aa, Homo sapiens
  CDR3 for alpha chain variable domain of TCR clone 301560 (TRAV1-1, TRAJ4)
FAVRAFSGGYNKLIF

SEQ ID NO: 603120 - protein, 16 aa, Homo sapiens
  CDR3 for beta chain variable domain of TCR clone 301560 (TRBV7-2, TRBJ2-6)
CAILSGVSSGANVLTF

SEQ ID NO: 603121 - protein, 11 aa, Homo sapiens
  CDR3 for alpha chain variable domain of TCR clone 301561 (TRAV23/DV6, TRAJ43)
CAASSGKDIRF

SEQ ID NO: 603122 - protein, 14 aa, Homo sapiens
  CDR3 for beta chain variable domain of TCR clone 301561 (TRBV4-1, TRBJ1-2)
CASSQDPLPYGYTF

SEQ ID NO: 603123 - protein, 12 aa, Homo sapiens
  CDR3 for alpha chain variable domain of TCR clone 301562 (TRAV2, TRAJ31)
CAVGDNNARLIF

SEQ ID NO: 603124 - protein, 15 aa, Homo sapiens
  CDR3 for beta chain variable domain of TCR clone 301562 (TRBV11-2, TRBJ1-3)
CASSLDGTVGNTIYF

SEQ ID NO: 603125 - protein, 14 aa, Homo sapiens
  CDR3 for alpha chain variable domain of TCR clone 301563 (TRAV20, TRAJ17)
CAVQARAAGNKLTF

SEQ ID NO: 603126 - protein, 14 aa, Homo sapiens
  CDR3 for beta chain variable domain of TCR clone 301563 (TRBV4-1, TRBJ1-6)
CASSPGSDSSPLHF

SEQ ID NO: 603127 - protein, 12 aa, Homo sapiens
  CDR3 for alpha chain variable domain of TCR clone 301564 (TRAV24, TRAJ17)
CASKAAGNKLTF

SEQ ID NO: 603128 - protein, 20 aa, Homo sapiens
  CDR3 for beta chain variable domain of TCR clone 301564 (TRBV7-8, TRBJ2-2)
CASSHLFAGPTIHITGELFF

SEQ ID NO: 603129 - protein, 15 aa, Homo sapiens
  CDR3 for alpha chain variable domain of TCR clone 301565 (TRAV17, TRAJ56)
CATEPFTGANSKRTF

SEQ ID NO: 603130 - protein, 15 aa, Homo sapiens
  CDR3 for beta chain variable domain of TCR clone 301565 (TRBV28, TRBJ1-5)
CASSRTGGYVQPQHF

SEQ ID NO: 603131 - protein, 14 aa, Homo sapiens
  CDR3 for alpha chain variable domain of TCR clone 301566 (TRAV29/DV5, TRAJ42)
CATHYGGSKGNLIF

SEQ ID NO: 603132 - protein, 13 aa, Homo sapiens
  CDR3 for beta chain variable domain of TCR clone 301566 (TRBV5-1, TRBJ1-2)
CASSLAGFHGDTF

SEQ ID NO: 603133 - protein, 13 aa, Homo sapiens
  CDR3 for alpha chain variable domain of TCR clone 301567 (TRAV13-1, TRAJ5)
CAASDTGRRALTF

SEQ ID NO: 603134 - protein, 15 aa, Homo sapiens
  CDR3 for beta chain variable domain of TCR clone 301567 (TRBV10-3, TRBJ2-3)
CAISLTSGGTDTQYF

SEQ ID NO: 603135 - protein, 16 aa, Homo sapiens
  CDR3 for alpha chain variable domain of TCR clone 301568 (TRAV41, TRAJ53)
CAVRFGSGGSNYKLTF

SEQ ID NO: 603136 - protein, 17 aa, Homo sapiens
  CDR3 for beta chain variable domain of TCR clone 301568 (TRBV20-1, TRBJ2-7)
WSARDPEGDHREYEQYF

SEQ ID NO: 603137 - protein, 16 aa, Homo sapiens
  CDR3 for alpha chain variable domain of TCR clone 301569 (TRAV12-2, TRAJ45)
CAVNMYSGGGADGLTF

SEQ ID NO: 603138 - protein, 18 aa, Homo sapiens
  CDR3 for beta chain variable domain of TCR clone 301569 (TRBV12-4, TRBJ2-2)
CTSSLVAGTRGRTGELFF

SEQ ID NO: 603139 - protein, 16 aa, Homo sapiens
  CDR3 for alpha chain variable domain of TCR clone 301570 (TRAV38-1, TRAJ56)
CAFMKRQTGANSKLTF

SEQ ID NO: 603140 - protein, 13 aa, Homo sapiens
  CDR3 for beta chain variable domain of TCR clone 301570 (TRBV15, TRBJ1-6)
CATSGGLNSPLHF

SEQ ID NO: 603141 - protein, 11 aa, Homo sapiens
  CDR3 for alpha chain variable domain of TCR clone 301571 (TRAV13-2, TRAJ23)
CAESPRGKLIF

SEQ ID NO: 603142 - protein, 12 aa, Homo sapiens
  CDR3 for beta chain variable domain of TCR clone 301571 (TRBV11-2, TRBJ2-2)
CASSLGRGELFF

SEQ ID NO: 603143 - protein, 14 aa, Homo sapiens
  CDR3 for alpha chain variable domain of TCR clone 301572 (TRAV3, TRAJ9)
CAVRLNTGGFKTIF

SEQ ID NO: 603144 - protein, 16 aa, Homo sapiens
  CDR3 for beta chain variable domain of TCR clone 301572 (TRBV4-1, TRBJ2-5)
CASSQTSGGPLETQYF

SEQ ID NO: 603145 - protein, 15 aa, Homo sapiens
  CDR3 for alpha chain variable domain of TCR clone 301573 (TRAV26-1, TRAJ44)
CTVRANTGTASKLTF

SEQ ID NO: 603146 - protein, 12 aa, Homo sapiens
  CDR3 for beta chain variable domain of TCR clone 301573 (TRBV2, TRBJ2-1)
GRGLPSYNEQFF

SEQ ID NO: 603147 - protein, 18 aa, Homo sapiens
  CDR3 for alpha chain variable domain of TCR clone 301574 (TRAV26-1, TRAJ23)
CIVRVGLEVWSQGGKLIF

SEQ ID NO: 603148 - protein, 15 aa, Homo sapiens
  CDR3 for beta chain variable domain of TCR clone 301574 (TRBV10-3, TRBJ2-3)
CAISYWDRDTDTQYF

SEQ ID NO: 603149 - protein, 16 aa, Homo sapiens
  CDR3 for alpha chain variable domain of TCR clone 301575 (TRAV12-3, TRAJ45)
CAMGWGSGGDADGLTF

SEQ ID NO: 603150 - protein, 15 aa, Homo sapiens
  CDR3 for beta chain variable domain of TCR clone 301575 (TRBV3-1, TRBJ1-2)
CASSHPGTPGYGYTF

SEQ ID NO: 603151 - protein, 18 aa, Homo sapiens
  CDR3 for alpha chain variable domain of TCR clone 301576 (TRAV21, TRAJ52)
CAVRPSPAGGTSYGKLTF

SEQ ID NO: 603152 - protein, 13 aa, Homo sapiens
  CDR3 for beta chain variable domain of TCR clone 301576 (TRBV13, TRBJ1-4)
CASSSASGEKLFF

SEQ ID NO: 603153 - protein, 14 aa, Homo sapiens
  CDR3 for alpha chain variable domain of TCR clone 301577 (TRAV35, TRAJ22)
CAGLRPGSARQLTF

SEQ ID NO: 603154 - protein, 16 aa, Homo sapiens
  CDR3 for beta chain variable domain of TCR clone 301577 (TRBV5-1, TRBJ2-7)
CASSLEGLAGLYEQYF

SEQ ID NO: 603155 - protein, 13 aa, Homo sapiens
  CDR3 for alpha chain variable domain of TCR clone 301578 (TRAV29/DV5, TRAJ31)
CAASRNNNARLMF

SEQ ID NO: 603156 - protein, 13 aa, Homo sapiens
  CDR3 for beta chain variable domain of TCR clone 301578 (TRBV7-2, TRBJ2-4)
CASSRGHANIQYF

SEQ ID NO: 603157 - protein, 16 aa, Homo sapiens
  CDR3 for alpha chain variable domain of TCR clone 301579 (TRAV8-3, TRAJ44)
CAAGASNTGTASKLTF

SEQ ID NO: 603158 - protein, 15 aa, Homo sapiens
  CDR3 for beta chain variable domain of TCR clone 301579 (TRBV27, TRBJ1-5)
CASTFNRGSNQPQHF

SEQ ID NO: 603159 - protein, 13 aa, Homo sapiens
  CDR3 for alpha chain variable domain of TCR clone 301580 (TRAV13-1, TRAJ39)
CSKYRNAGNMLTF

SEQ ID NO: 603160 - protein, 13 aa, Homo sapiens
  CDR3 for beta chain variable domain of TCR clone 301580 (TRBV20-1, TRBJ2-7)
CSATHTSGYEQYF

SEQ ID NO: 603161 - protein, 14 aa, Homo sapiens
  CDR3 for alpha chain variable domain of TCR clone 301581 (TRAV8-3, TRAJ9)
CAVVYNTGGFKTIF

SEQ ID NO: 603162 - protein, 13 aa, Homo sapiens
  CDR3 for beta chain variable domain of TCR clone 301581 (TRBV12-4, TRBJ1-2)
CASSLRQGKGYTF

SEQ ID NO: 603163 - protein, 13 aa, Homo sapiens
  CDR3 for alpha chain variable domain of TCR clone 301582 (TRAV13-1, TRAJ5)
CAARDTGRRALTF

SEQ ID NO: 603164 - protein, 12 aa, Homo sapiens
  CDR3 for beta chain variable domain of TCR clone 301582 (TRBV3-1, TRBJ2-5)
CASSQRGETQYF

SEQ ID NO: 603165 - protein, 19 aa, Homo sapiens
  CDR3 for alpha chain variable domain of TCR clone 301583 (TRAV3, TRAJ37)
CAVRDIVGGYPSNPGKLIF

SEQ ID NO: 603166 - protein, 14 aa, Homo sapiens
  CDR3 for beta chain variable domain of TCR clone 301583 (TRBV7-8, TRBJ2-3)
CASSLEAGTDTQYF

SEQ ID NO: 603167 - protein, 14 aa, Homo sapiens
  CDR3 for alpha chain variable domain of TCR clone 301584 (TRAV29/DV5, TRAJ48)
CAAMALFGTEKLTF

SEQ ID NO: 603168 - protein, 15 aa, Homo sapiens
  CDR3 for beta chain variable domain of TCR clone 301584 (TRBV7-2, TRBJ2-1)
CSSTHGTGIHNEQFF

SEQ ID NO: 603169 - protein, 14 aa, Homo sapiens
  CDR3 for alpha chain variable domain of TCR clone 301585 (TRAV12-2, TRAJ13)
CAVNRTGGYQKVTF

SEQ ID NO: 603170 - protein, 15 aa, Homo sapiens
  CDR3 for beta chain variable domain of TCR clone 301585 (TRBV27, TRBJ2-1)
CASSNGGGSSNEQFF

SEQ ID NO: 603171 - protein, 16 aa, Homo sapiens
  CDR3 for alpha chain variable domain of TCR clone 301586 (TRAV16, TRAJ52)
CALSAAGGTSYGKLTF

SEQ ID NO: 603172 - protein, 15 aa, Homo sapiens
  CDR3 for beta chain variable domain of TCR clone 301586 (TRBV9, TRBJ2-1)
CASSLAGSSYNEQFF

SEQ ID NO: 603173 - protein, 14 aa, Homo sapiens
  CDR3 for alpha chain variable domain of TCR clone 301587 (TRAV2, TRAJ37)
CAVDFTNNTGKLIF

SEQ ID NO: 603174 - protein, 14 aa, Homo sapiens
  CDR3 for beta chain variable domain of TCR clone 301587 (TRBV18, TRBJ2-3)
CASSRDRGTDTQYF

SEQ ID NO: 603175 - protein, 17 aa, Homo sapiens
  CDR3 for alpha chain variable domain of TCR clone 301588 (TRAV12-1, TRAJ42)
CVVMRMNYGGSQGNLIF

SEQ ID NO: 603176 - protein, 13 aa, Homo sapiens
  CDR3 for beta chain variable domain of TCR clone 301588 (TRBV7-2, TRBJ1-1)
CASSLARPAGAFF

SEQ ID NO: 603177 - protein, 13 aa, Homo sapiens
  CDR3 for alpha chain variable domain of TCR clone 301589 (TRAV8-3, TRAJ4)
WVFYSGGYNKLIF

SEQ ID NO: 603178 - protein, 14 aa, Homo sapiens
  CDR3 for beta chain variable domain of TCR clone 301589 (TRBV7-9, TRBJ2-3)
CASSLEDGTVTQYF

SEQ ID NO: 603179 - protein, 18 aa, Homo sapiens
  CDR3 for alpha chain variable domain of TCR clone 301590 (TRAV12-3, TRAJ52)
CAMSVGGAGGTSYGKLTF

SEQ ID NO: 603180 - protein, 17 aa, Homo sapiens
  CDR3 for beta chain variable domain of TCR clone 301590 (TRBV7-8, TRBJ2-3)
CASSLMRRMRGADTQYF

SEQ ID NO: 603181 - protein, 16 aa, Homo sapiens
  CDR3 for alpha chain variable domain of TCR clone 301591 (TRAV21, TRAJ22)
CAVKKVSSGSARQLTF

SEQ ID NO: 603182 - protein, 13 aa, Homo sapiens
  CDR3 for beta chain variable domain of TCR clone 301591 (TRBV11-2, TRBJ2-2)
CASSLQNTGELFF

SEQ ID NO: 603183 - protein, 23 aa, Homo sapiens
  CDR3 for alpha chain variable domain of TCR clone 301592 (TRAV13-1, )
CAASTRRAQIPDIQNPDPAVYQL

SEQ ID NO: 603184 - protein, 15 aa, Homo sapiens
  CDR3 for beta chain variable domain of TCR clone 301592 (TRBV7-2, TRBJ2-7)
CASSSGLAGRREQYF

SEQ ID NO: 603185 - protein, 14 aa, Homo sapiens
  CDR3 for alpha chain variable domain of TCR clone 301593 (TRAV2, TRAJ20)
CAVDLRKHDYKLSF

SEQ ID NO: 603186 - protein, 18 aa, Homo sapiens
  CDR3 for beta chain variable domain of TCR clone 301593 (TRBV18, TRBJ1-3)
CASSPRGGAGPSGNTIYF

SEQ ID NO: 603187 - protein, 15 aa, Homo sapiens
  CDR3 for alpha chain variable domain of TCR clone 301594 (TRAV26-1, TRAJ22)
CIVRVSFWFCKATDL

SEQ ID NO: 603188 - protein, 13 aa, Homo sapiens
  CDR3 for beta chain variable domain of TCR clone 301594 (TRBV2, TRBJ1-4)
CASSELGVEKPFF

SEQ ID NO: 603189 - protein, 21 aa, Homo sapiens
  CDR3 for alpha chain variable domain of TCR clone 301595 (TRAV25, TRAJ7)
TATQTTDVGTYFCPGNNRLAF

SEQ ID NO: 603190 - protein, 13 aa, Homo sapiens
  CDR3 for beta chain variable domain of TCR clone 301595 (TRBV7-9, TRBJ1-2)
CASSLKQNYGYTF

SEQ ID NO: 603191 - protein, 16 aa, Homo sapiens
  CDR3 for alpha chain variable domain of TCR clone 301596 (TRAV3, TRAJ37)
CAVRPHGSGNTGKLIF

SEQ ID NO: 603192 - protein, 12 aa, Homo sapiens
  CDR3 for beta chain variable domain of TCR clone 301596 (TRBV2, TRBJ2-7)
CASTYRTDEQYF

SEQ ID NO: 603193 - protein, 13 aa, Homo sapiens
  CDR3 for alpha chain variable domain of TCR clone 301597 (TRAV12-3, TRAJ43)
CAMIRPNNNDMRF

SEQ ID NO: 603194 - protein, 15 aa, Homo sapiens
  CDR3 for beta chain variable domain of TCR clone 301597 (TRBV27, TRBJ2-1)
CASSNGGGSSNEQFF

SEQ ID NO: 603195 - protein, 14 aa, Homo sapiens
  CDR3 for alpha chain variable domain of TCR clone 301598 (TRAV12-2, TRAJ11)
CAVEGGSGYSTLTF

SEQ ID NO: 603196 - protein, 15 aa, Homo sapiens
  CDR3 for beta chain variable domain of TCR clone 301598 (TRBV2, TRBJ2-3)
CASSDFEKATDTQYF

SEQ ID NO: 603197 - protein, 18 aa, Homo sapiens
  CDR3 for alpha chain variable domain of TCR clone 301599 (TRAV13-1, TRAJ52)
CAAKSPNAGGTSYGKLTF

SEQ ID NO: 603198 - protein, 11 aa, Homo sapiens
  CDR3 for beta chain variable domain of TCR clone 301599 (TRBV29-1, TRBJ2-5)
CSEDRTGTQYF

SEQ ID NO: 603199 - protein, 12 aa, Homo sapiens
  CDR3 for alpha chain variable domain of TCR clone 301600 (TRAV1-1, TRAJ8)
CAGGTGFQKLVF

SEQ ID NO: 603200 - protein, 12 aa, Homo sapiens
  CDR3 for beta chain variable domain of TCR clone 301600 (TRBV7-9, TRBJ2-7)
CASRTGFDEQYF

SEQ ID NO: 603201 - protein, 13 aa, Homo sapiens
  CDR3 for alpha chain variable domain of TCR clone 301601 (TRAV3, TRAJ29)
CAVRDIIDTPLVF

SEQ ID NO: 603202 - protein, 14 aa, Homo sapiens
  CDR3 for beta chain variable domain of TCR clone 301601 (TRBV27, TRBJ2-1)
CASSAMGGYNEQFF

SEQ ID NO: 603203 - protein, 15 aa, Homo sapiens
  CDR3 for alpha chain variable domain of TCR clone 301602 (TRAV38-1, TRAJ37)
CACIFGSGNTGKLIF

SEQ ID NO: 603204 - protein, 12 aa, Homo sapiens
  CDR3 for beta chain variable domain of TCR clone 301602 (TRBV7-9, TRBJ2-7)
CASSLEGYEQYF

SEQ ID NO: 603205 - protein, 15 aa, Homo sapiens
  CDR3 for alpha chain variable domain of TCR clone 301603 (TRAV13-1, TRAJ52)
CAASSPSTSYVKLTF

SEQ ID NO: 603206 - protein, 13 aa, Homo sapiens
  CDR3 for beta chain variable domain of TCR clone 301603 (TRBV27, TRBJ2-5)
CASSLSSLETQYF

SEQ ID NO: 603207 - protein, 16 aa, Homo sapiens
  CDR3 for alpha chain variable domain of TCR clone 301604 (TRAV30, TRAJ24)
CGTEIVDADSWGKFQF

SEQ ID NO: 603208 - protein, 18 aa, Homo sapiens
  CDR3 for beta chain variable domain of TCR clone 301604 (TRBV5-4, TRBJ2-3)
CASSPTAGFLPSTDTQYF

SEQ ID NO: 603209 - protein, 13 aa, Homo sapiens
  CDR3 for alpha chain variable domain of TCR clone 301605 (TRAV3, TRAJ43)
CAVKDTRGGDMRF

SEQ ID NO: 603210 - protein, 15 aa, Homo sapiens
  CDR3 for beta chain variable domain of TCR clone 301605 (TRBV6-5, TRBJ1-5)
CASSYSRRSNQPQHF

SEQ ID NO: 603211 - protein, 17 aa, Homo sapiens
  CDR3 for alpha chain variable domain of TCR clone 301606 (TRAV3, TRAJ6)
CAVRDGPRAGGSYILTL

SEQ ID NO: 603212 - protein, 14 aa, Homo sapiens
  CDR3 for beta chain variable domain of TCR clone 301606 (TRBV7-2, TRBJ2-7)
CASSPKTSFYEQYF

SEQ ID NO: 603213 - protein, 15 aa, Homo sapiens
  CDR3 for alpha chain variable domain of TCR clone 301607 (TRAV16, TRAJ12)
CSKWPLKDSSYKLIF

SEQ ID NO: 603214 - protein, 13 aa, Homo sapiens
  CDR3 for beta chain variable domain of TCR clone 301607 (TRBV4-2, TRBJ1-1)
CASSQAGNTEAFF

SEQ ID NO: 603215 - protein, 11 aa, Homo sapiens
  CDR3 for alpha chain variable domain of TCR clone 301608 (TRAV9-2, TRAJ49)
CAPRTGNQFYF

SEQ ID NO: 603216 - protein, 15 aa, Homo sapiens
  CDR3 for beta chain variable domain of TCR clone 301608 (TRBV19, TRBJ2-1)
CASRAGGSSYNEQLF

SEQ ID NO: 603217 - protein, 12 aa, Homo sapiens
  CDR3 for alpha chain variable domain of TCR clone 301609 (TRAV13-1, TRAJ15)
CAANQAGTAMIF

SEQ ID NO: 603218 - protein, 14 aa, Homo sapiens
  CDR3 for beta chain variable domain of TCR clone 301609 (TRBV20-1, TRBJ2-5)
CSARYRGLQETQYF

SEQ ID NO: 603219 - protein, 14 aa, Homo sapiens
  CDR3 for alpha chain variable domain of TCR clone 301610 (TRAV9-2, TRAJ39)
CALYIYNAGNMLTF

SEQ ID NO: 603220 - protein, 13 aa, Homo sapiens
  CDR3 for beta chain variable domain of TCR clone 301610 (TRBV5-5, TRBJ1-2)
CVSSFWRGEDYTF

SEQ ID NO: 603221 - protein, 12 aa, Homo sapiens
  CDR3 for alpha chain variable domain of TCR clone 301611 (TRAV8-6, TRAJ33)
CAVTDSNYQLIW

SEQ ID NO: 603222 - protein, 15 aa, Homo sapiens
  CDR3 for beta chain variable domain of TCR clone 301611 (TRBV11-2, TRBJ2-1)
CASSLGPDSYNEQFF

SEQ ID NO: 603223 - protein, 15 aa, Homo sapiens
  CDR3 for alpha chain variable domain of TCR clone 301612 (TRAV25, TRAJ52)
CAGRPGGTSYGELPF

SEQ ID NO: 603224 - protein, 17 aa, Homo sapiens
  CDR3 for beta chain variable domain of TCR clone 301612 (TRBV7-8, TRBJ2-6)
CASSAGTGGAGANVLTF

SEQ ID NO: 603225 - protein, 14 aa, Homo sapiens
  CDR3 for alpha chain variable domain of TCR clone 301613 (TRAV12-2, TRAJ40)
CAVKIPSGTYKYIF

SEQ ID NO: 603226 - protein, 18 aa, Homo sapiens
  CDR3 for beta chain variable domain of TCR clone 301613 (TRBV25-1, TRBJ1-2)
CASSGLQNGQGLIFGYTF

SEQ ID NO: 603227 - protein, 16 aa, Homo sapiens
  CDR3 for alpha chain variable domain of TCR clone 301614 (TRAV30, TRAJ24)
CGTEIVDADSWGKFQF

SEQ ID NO: 603228 - protein, 13 aa, Homo sapiens
  CDR3 for beta chain variable domain of TCR clone 301614 (TRBV10-3, TRBJ2-7)
CASKLAVTYEQYF

SEQ ID NO: 603229 - protein, 18 aa, Homo sapiens
  CDR3 for alpha chain variable domain of TCR clone 301615 (TRAV21, TRAJ52)
RAVRPSPAGGTSYGKLTF

SEQ ID NO: 603230 - protein, 15 aa, Homo sapiens
  CDR3 for beta chain variable domain of TCR clone 301615 (TRBV19, TRBJ1-1)
CASTSGRIQNTEAFF

SEQ ID NO: 603231 - protein, 16 aa, Homo sapiens
  CDR3 for alpha chain variable domain of TCR clone 301616 (TRAV30, TRAJ24)
CGTEIVYADSWGKFQF

SEQ ID NO: 603232 - protein, 16 aa, Homo sapiens
  CDR3 for beta chain variable domain of TCR clone 301616 (TRBV7-3, TRBJ2-1)
CASSLEGYRSYNEQFF

SEQ ID NO: 603233 - protein, 13 aa, Homo sapiens
  CDR3 for alpha chain variable domain of TCR clone 301617 (TRAV17, TRAJ5)
CATMDTCRRALTF

SEQ ID NO: 603234 - protein, 15 aa, Homo sapiens
  CDR3 for beta chain variable domain of TCR clone 301617 (TRBV20-1, TRBJ2-5)
CSATRTSRSLETQYF

SEQ ID NO: 603235 - protein, 11 aa, Homo sapiens
  CDR3 for alpha chain variable domain of TCR clone 301618 (TRAV12-3, TRAJ43)
CAMSVSNDLRF

SEQ ID NO: 603236 - protein, 16 aa, Homo sapiens
  CDR3 for beta chain variable domain of TCR clone 301618 (TRBV20-1, TRBJ2-1)
CGARDSLGAVYNEQFF

SEQ ID NO: 603237 - protein, 17 aa, Homo sapiens
  CDR3 for alpha chain variable domain of TCR clone 301619 (TRAV3, TRAJ6)
CSVRDGPRAGGSYIPTF

SEQ ID NO: 603238 - protein, 20 aa, Homo sapiens
  CDR3 for beta chain variable domain of TCR clone 301619 (TRBV28, TRBJ2-1)
CASTPIGRSPGLAGGNEQFL

SEQ ID NO: 603239 - protein, 10 aa, Homo sapiens
  CDR3 for alpha chain variable domain of TCR clone 301620 (TRAV16, TRAJ22)
SAMYLRQLTF

SEQ ID NO: 603240 - protein, 11 aa, Homo sapiens
  CDR3 for beta chain variable domain of TCR clone 301620 (TRBV12-4, TRBJ2-3)
CASTATDTQYF

SEQ ID NO: 603241 - protein, 14 aa, Homo sapiens
  CDR3 for alpha chain variable domain of TCR clone 301621 (TRAV1-2, TRAJ16)
CAVNRFSDGQKLLF

SEQ ID NO: 603242 - protein, 13 aa, Homo sapiens
  CDR3 for beta chain variable domain of TCR clone 301621 (TRBV27, TRBJ1-1)
CASSLSIVAEAFF

SEQ ID NO: 603243 - protein, 13 aa, Homo sapiens
  CDR3 for alpha chain variable domain of TCR clone 301622 (TRAV21, TRAJ27)
CAARPGNAGKSTF

SEQ ID NO: 603244 - protein, 15 aa, Homo sapiens
  CDR3 for beta chain variable domain of TCR clone 301622 (TRBV4-1, TRBJ2-5)
CASSQWDLYQETQYF

SEQ ID NO: 603245 - protein, 14 aa, Homo sapiens
  CDR3 for alpha chain variable domain of TCR clone 301623 (TRAV3, TRAJ37)
CAVKESGNTGKLIL

SEQ ID NO: 603246 - protein, 14 aa, Homo sapiens
  CDR3 for beta chain variable domain of TCR clone 301623 (TRBV2, TRBJ1-5)
CASSENRGGQPQHF

SEQ ID NO: 603247 - protein, 16 aa, Homo sapiens
  CDR3 for alpha chain variable domain of TCR clone 301624 (TRAV3, TRAJ37)
CAVRGKGSGNTGKLIF

SEQ ID NO: 603248 - protein, 14 aa, Homo sapiens
  CDR3 for beta chain variable domain of TCR clone 301624 (TRBV10-3, TRBJ1-3)
CAIRGQRAGNTIYF

SEQ ID NO: 603249 - protein, 14 aa, Homo sapiens
  CDR3 for alpha chain variable domain of TCR clone 301625 (TRAV12-3, TRAJ13)
CAMRNSGGYQKVTF

SEQ ID NO: 603250 - protein, 14 aa, Homo sapiens
  CDR3 for beta chain variable domain of TCR clone 301625 (TRBV4-1, TRBJ1-6)
CASGPGSDSSPLHF

SEQ ID NO: 603251 - protein, 14 aa, Homo sapiens
  CDR3 for alpha chain variable domain of TCR clone 301626 (TRAV12-3, TRAJ9)
CAMSPNTGGFKTIF

SEQ ID NO: 603252 - protein, 12 aa, Homo sapiens
  CDR3 for beta chain variable domain of TCR clone 301626 (TRBV19, TRBJ1-5)
CASSIAQQDQHF

SEQ ID NO: 603253 - protein, 17 aa, Homo sapiens
  CDR3 for alpha chain variable domain of TCR clone 301627 (TRAV3, TRAJ6)
CAVRDGPRAGGSYIPKF

SEQ ID NO: 603254 - protein, 14 aa, Homo sapiens
  CDR3 for beta chain variable domain of TCR clone 301627 (TRBV7-2, TRBJ2-7)
CASSPKTSFYEQYC

SEQ ID NO: 603255 - protein, 12 aa, Homo sapiens
  CDR3 for alpha chain variable domain of TCR clone 301628 (TRAV17, TRAJ4)
CATDGGYNKLIF

SEQ ID NO: 603256 - protein, 13 aa, Homo sapiens
  CDR3 for beta chain variable domain of TCR clone 301628 (TRBV7-3, TRBJ1-1)
CASSQDWGAEAFF

SEQ ID NO: 603257 - protein, 12 aa, Homo sapiens
  CDR3 for alpha chain variable domain of TCR clone 301629 (TRAV12-3, TRAJ48)
CSMRIGNEKLTF

SEQ ID NO: 603258 - protein, 12 aa, Homo sapiens
  CDR3 for beta chain variable domain of TCR clone 301629 (TRBV13, TRBJ2-7)
CASSLQAYEQYF

SEQ ID NO: 603259 - protein, 17 aa, Homo sapiens
  CDR3 for alpha chain variable domain of TCR clone 301630 (TRAV3, TRAJ12)
CAVRDGGRMDSGYKLIF

SEQ ID NO: 603260 - protein, 13 aa, Homo sapiens
  CDR3 for beta chain variable domain of TCR clone 301630 (TRBV15, TRBJ1-6)
CATSGGLNSPLHF

SEQ ID NO: 603261 - protein, 12 aa, Homo sapiens
  CDR3 for alpha chain variable domain of TCR clone 301631 (TRAV13-1, TRAJ21)
CAAKEGFNKFYF

SEQ ID NO: 603262 - protein, 16 aa, Homo sapiens
  CDR3 for beta chain variable domain of TCR clone 301631 (TRBV7-2, TRBJ2-7)
CASSLEAGGPWYEQYF

SEQ ID NO: 603263 - protein, 15 aa, Homo sapiens
  CDR3 for alpha chain variable domain of TCR clone 301632 (TRAV13-1, TRAJ43)
CAASGGFGAGTRRTV

SEQ ID NO: 603264 - protein, 18 aa, Homo sapiens
  CDR3 for beta chain variable domain of TCR clone 301632 (TRBV11-2, TRBJ1-6)
CASSLAVQGLSLNSPLHF

SEQ ID NO: 603265 - protein, 12 aa, Homo sapiens
  CDR3 for alpha chain variable domain of TCR clone 301633 (TRAV13-1, TRAJ45)
CAATRGADGLTF

SEQ ID NO: 603266 - protein, 14 aa, Homo sapiens
  CDR3 for beta chain variable domain of TCR clone 301633 (TRBV12-5, TRBJ2-5)
CASGSRTHQETQYF

SEQ ID NO: 603267 - protein, 15 aa, Homo sapiens
  CDR3 for alpha chain variable domain of TCR clone 301634 (TRAV34, TRAJ38)
CGADFTPGNNRKLIW

SEQ ID NO: 603268 - protein, 16 aa, Homo sapiens
  CDR3 for beta chain variable domain of TCR clone 301634 (TRBV12-5, TRBJ2-5)
CASGPRTSVNQETQYF

SEQ ID NO: 603269 - protein, 12 aa, Homo sapiens
  CDR3 for alpha chain variable domain of TCR clone 301635 (TRAV13-1, TRAJ21)
CAAKEGFNKFYF

SEQ ID NO: 603270 - protein, 16 aa, Homo sapiens
  CDR3 for beta chain variable domain of TCR clone 301635 (TRBV7-9, TRBJ2-3)
CASSPWREVGTDTQYF

SEQ ID NO: 603271 - protein, 14 aa, Homo sapiens
  CDR3 for alpha chain variable domain of TCR clone 301636 (TRAV12-3, TRAJ10)
SHLPLMGGGNKLTF

SEQ ID NO: 603272 - protein, 15 aa, Homo sapiens
  CDR3 for beta chain variable domain of TCR clone 301636 (TRBV9, TRBJ1-6)
CASSVAGTGDSPLHF

SEQ ID NO: 603273 - protein, 14 aa, Homo sapiens
  CDR3 for alpha chain variable domain of TCR clone 301637 (TRAV8-1, TRAJ23)
CAVQAYNQGGKLIF

SEQ ID NO: 603274 - protein, 13 aa, Homo sapiens
  CDR3 for beta chain variable domain of TCR clone 301637 (TRBV5-1, TRBJ2-7)
CASSLKDNQEQYF

SEQ ID NO: 603275 - protein, 19 aa, Homo sapiens
  CDR3 for alpha chain variable domain of TCR clone 301638 (TRAV13-1, TRAJ52)
CAASPSQNAGGTSYGKLTF

SEQ ID NO: 603276 - protein, 14 aa, Homo sapiens
  CDR3 for beta chain variable domain of TCR clone 301638 (TRBV19, TRBJ2-7)
CASTVQGRPYEQYF

SEQ ID NO: 603277 - protein, 13 aa, Homo sapiens
  CDR3 for alpha chain variable domain of TCR clone 301639 (TRAV3, TRAJ21)
CAMREPDFNKFYF

SEQ ID NO: 603278 - protein, 18 aa, Homo sapiens
  CDR3 for beta chain variable domain of TCR clone 301639 (TRBV11-2, TRBJ2-3)
CASSLGGASRGAPNTQYF

SEQ ID NO: 603279 - protein, 14 aa, Homo sapiens
  CDR3 for alpha chain variable domain of TCR clone 301640 (TRAV17, TRAJ34)
CGTDSLEGTDKLIF

SEQ ID NO: 603280 - protein, 13 aa, Homo sapiens
  CDR3 for beta chain variable domain of TCR clone 301640 (TRBV11-2, TRBJ2-7)
CASSGTRPYEQYF

SEQ ID NO: 603281 - protein, 14 aa, Homo sapiens
  CDR3 for alpha chain variable domain of TCR clone 301641 (TRAV12-3, TRAJ42)
CAMNYGGSQGNLIF

SEQ ID NO: 603282 - protein, 16 aa, Homo sapiens
  CDR3 for beta chain variable domain of TCR clone 301641 (TRBV12-4, TRBJ2-5)
CASSFFVRGRQETQYF

SEQ ID NO: 603283 - protein, 15 aa, Homo sapiens
  CDR3 for alpha chain variable domain of TCR clone 301642 (TRAV3, TRAJ5)
CAVRDLYTGRRALTF

SEQ ID NO: 603284 - protein, 16 aa, Homo sapiens
  CDR3 for beta chain variable domain of TCR clone 301642 (TRBV20-1, TRBJ1-4)
CSAPGQGLLANEKLFF

SEQ ID NO: 603285 - protein, 16 aa, Homo sapiens
  CDR3 for alpha chain variable domain of TCR clone 301643 (TRAV12-3, TRAJ21)
CAMSHYTTSTNFTLDL

SEQ ID NO: 603286 - protein, 13 aa, Homo sapiens
  CDR3 for beta chain variable domain of TCR clone 301643 (TRBV2, TRBJ2-5)
CASSALRGETQYF

SEQ ID NO: 603287 - protein, 15 aa, Homo sapiens
  CDR3 for alpha chain variable domain of TCR clone 301644 (TRAV3, TRAJ22)
CAVRGFSGSARQLTF

SEQ ID NO: 603288 - protein, 14 aa, Homo sapiens
  CDR3 for beta chain variable domain of TCR clone 301644 (TRBV27, TRBJ1-5)
CASTRDPIRQPQHF

SEQ ID NO: 603289 - protein, 11 aa, Homo sapiens
  CDR3 for alpha chain variable domain of TCR clone 301645 (TRAV2, TRAJ13)
CASGGYQKVTF

SEQ ID NO: 603290 - protein, 19 aa, Homo sapiens
  CDR3 for beta chain variable domain of TCR clone 301645 (TRBV7-8, TRBJ2-2)
CQQPFISRADYPYHRELFF

SEQ ID NO: 603291 - protein, 12 aa, Homo sapiens
  CDR3 for alpha chain variable domain of TCR clone 301646 (TRAV3, TRAJ20)
CTVRDPDYKLSF

SEQ ID NO: 603292 - protein, 13 aa, Homo sapiens
  CDR3 for beta chain variable domain of TCR clone 301646 (TRBV9, TRBJ2-1)
CASSVGQGGEQFF

SEQ ID NO: 603293 - protein, 14 aa, Homo sapiens
  CDR3 for alpha chain variable domain of TCR clone 301647 (TRAV13-2, TRAJ17)
CAENSIAAGNKLTF

SEQ ID NO: 603294 - protein, 11 aa, Homo sapiens
  CDR3 for beta chain variable domain of TCR clone 301647 (TRBV6-3, TRBJ2-3)
CATGQADTQYF

SEQ ID NO: 603295 - protein, 13 aa, Homo sapiens
  CDR3 for alpha chain variable domain of TCR clone 301648 (TRAV12-3, TRAJ7)
CAMTPYGNNRLAF

SEQ ID NO: 603296 - protein, 16 aa, Homo sapiens
  CDR3 for beta chain variable domain of TCR clone 301648 (TRBV20-1, TRBJ1-4)
CSARPYGGVLNEKLFF

SEQ ID NO: 603297 - protein, 13 aa, Homo sapiens
  CDR3 for alpha chain variable domain of TCR clone 301649 (TRAV13-2, TRAJ48)
CAEMDFGNDKLTF

SEQ ID NO: 603298 - protein, 13 aa, Homo sapiens
  CDR3 for beta chain variable domain of TCR clone 301649 (TRBV10-3, TRBJ2-7)
CASKLAVNYEQYF

SEQ ID NO: 603299 - protein, 18 aa, Homo sapiens
  CDR3 for alpha chain variable domain of TCR clone 301650 (TRAV17, TRAJ45)
CATSLDLYSGGGPDGLTF

SEQ ID NO: 603300 - protein, 15 aa, Homo sapiens
  CDR3 for beta chain variable domain of TCR clone 301650 (TRBV11-2, TRBJ2-1)
CASSKNRGLIYEQFF

SEQ ID NO: 603301 - protein, 14 aa, Homo sapiens
  CDR3 for alpha chain variable domain of TCR clone 301651 (TRAV34, TRAJ22)
CGADTSGSARQLTF

SEQ ID NO: 603302 - protein, 14 aa, Homo sapiens
  CDR3 for beta chain variable domain of TCR clone 301651 (TRBV5-1, TRBJ2-2)
CASSLGGGSGELFF

SEQ ID NO: 603303 - protein, 14 aa, Homo sapiens
  CDR3 for alpha chain variable domain of TCR clone 301652 (TRAV12-3, TRAJ10)
SHPPLTGGGNKLTF

SEQ ID NO: 603304 - protein, 17 aa, Homo sapiens
  CDR3 for beta chain variable domain of TCR clone 301652 (TRBV18, TRBJ2-1)
CASSPRVAGGSYNEQFF

SEQ ID NO: 603305 - protein, 15 aa, Homo sapiens
  CDR3 for alpha chain variable domain of TCR clone 301653 (TRAV12-1, TRAJ45)
CVVLSGGGGTDGLTF

SEQ ID NO: 603306 - protein, 16 aa, Homo sapiens
  CDR3 for beta chain variable domain of TCR clone 301653 (TRBV6-5, TRBJ2-1)
CASSETLAGHYNEQLF

SEQ ID NO: 603307 - protein, 10 aa, Homo sapiens
  CDR3 for alpha chain variable domain of TCR clone 301654 (TRAV35, TRAJ30)
LPGGDDKIIF

SEQ ID NO: 603308 - protein, 16 aa, Homo sapiens
  CDR3 for beta chain variable domain of TCR clone 301654 (TRBV28, TRBJ2-7)
CASSSSGTSGSYEQYF

SEQ ID NO: 603309 - protein, 13 aa, Homo sapiens
  CDR3 for alpha chain variable domain of TCR clone 301655 (TRAV20, TRAJ37)
CAGSSSNTGKLIF

SEQ ID NO: 603310 - protein, 11 aa, Homo sapiens
  CDR3 for beta chain variable domain of TCR clone 301655 (TRBV12-4, TRBJ2-3)
CASTATDKQYF

SEQ ID NO: 603311 - protein, 14 aa, Homo sapiens
  CDR3 for alpha chain variable domain of TCR clone 301656 (TRAV27, TRAJ22)
CAGVVPGSARQLTF

SEQ ID NO: 603312 - protein, 13 aa, Homo sapiens
  CDR3 for beta chain variable domain of TCR clone 301656 (TRBV19, TRBJ2-7)
CASRKAGGSEQYF

SEQ ID NO: 603313 - protein, 16 aa, Homo sapiens
  CDR3 for alpha chain variable domain of TCR clone 301657 (TRAV3, TRAJ10)
CAVRDMRAGGGNKHTF

SEQ ID NO: 603314 - protein, 13 aa, Homo sapiens
  CDR3 for beta chain variable domain of TCR clone 301657 (TRBV12-4, TRBJ1-5)
CASSPDRAQPQHF

SEQ ID NO: 603315 - protein, 14 aa, Homo sapiens
  CDR3 for alpha chain variable domain of TCR clone 301658 (TRAV35, TRAJ13)
CAGSPSGGYQKVTF

SEQ ID NO: 603316 - protein, 14 aa, Homo sapiens
  CDR3 for beta chain variable domain of TCR clone 301658 (TRBV12-5, TRBJ2-5)
CASGSRTQQETQYF

SEQ ID NO: 603317 - protein, 14 aa, Homo sapiens
  CDR3 for alpha chain variable domain of TCR clone 301659 (TRAV12-2, TRAJ40)
CAVKIPSGTHKYIF

SEQ ID NO: 603318 - protein, 14 aa, Homo sapiens
  CDR3 for beta chain variable domain of TCR clone 301659 (TRBV20-1, TRBJ1-1)
CSAQTRIGGNEAFF

SEQ ID NO: 603319 - protein, 12 aa, Homo sapiens
  CDR3 for alpha chain variable domain of TCR clone 301660 (TRAV1-2, TRAJ17)
CAVRAAGNKLTF

SEQ ID NO: 603320 - protein, 16 aa, Homo sapiens
  CDR3 for beta chain variable domain of TCR clone 301660 (TRBV20-1, TRBJ2-1)
CCAPGLAGSYSDEQFL

SEQ ID NO: 603321 - protein, 17 aa, Homo sapiens
  CDR3 for alpha chain variable domain of TCR clone 301661 (TRAV13-1, TRAJ5)
CSNPSLSRDTGRRALTF

SEQ ID NO: 603322 - protein, 13 aa, Homo sapiens
  CDR3 for beta chain variable domain of TCR clone 301661 (TRBV2, TRBJ1-4)
CASSERAGEKLFF

SEQ ID NO: 603323 - protein, 11 aa, Homo sapiens
  CDR3 for alpha chain variable domain of TCR clone 301662 (TRAV26-1, TRAJ37)
CIVRVGRKLIF

SEQ ID NO: 603324 - protein, 16 aa, Homo sapiens
  CDR3 for beta chain variable domain of TCR clone 301662 (TRBV7-2, TRBJ2-5)
CASSSKWLSGQETQYF

SEQ ID NO: 603325 - protein, 15 aa, Homo sapiens
  CDR3 for alpha chain variable domain of TCR clone 301663 (TRAV3, TRAJ4)
CSQNMFSGGYNKLIF

SEQ ID NO: 603326 - protein, 16 aa, Homo sapiens
  CDR3 for beta chain variable domain of TCR clone 301663 (TRBV3-1, TRBJ1-6)
CASSQEFQGSYSPLHF

SEQ ID NO: 603327 - protein, 14 aa, Homo sapiens
  CDR3 for alpha chain variable domain of TCR clone 301664 (TRAV12-2, TRAJ24)
CAVTPADSWGKLQF

SEQ ID NO: 603328 - protein, 13 aa, Homo sapiens
  CDR3 for beta chain variable domain of TCR clone 301664 (TRBV7-9, TRBJ1-2)
CASSLKQNYGYAF

SEQ ID NO: 603329 - protein, 13 aa, Homo sapiens
  CDR3 for alpha chain variable domain of TCR clone 301665 (TRAV3, TRAJ21)
CAVREPDFNKFYF

SEQ ID NO: 603330 - protein, 15 aa, Homo sapiens
  CDR3 for beta chain variable domain of TCR clone 301665 (TRBV20-1, TRBJ1-1)
CSASRGVTGNTEAVF

SEQ ID NO: 603331 - protein, 13 aa, Homo sapiens
  CDR3 for alpha chain variable domain of TCR clone 301666 (TRAV29/DV5, TRAJ31)
CAASRNNNARRMF

SEQ ID NO: 603332 - protein, 12 aa, Homo sapiens
  CDR3 for beta chain variable domain of TCR clone 301666 (TRBV14, TRBJ2-7)
CASSLYKDEQYF

SEQ ID NO: 603333 - protein, 15 aa, Homo sapiens
  CDR3 for alpha chain variable domain of TCR clone 301667 (TRAV9-2, TRAJ10)
CALKVLTGGGNKLTF

SEQ ID NO: 603334 - protein, 16 aa, Homo sapiens
  CDR3 for beta chain variable domain of TCR clone 301667 (TRBV20-1, TRBJ2-5)
SAVLVGLAGGGETQYF

SEQ ID NO: 603335 - protein, 13 aa, Homo sapiens
  CDR3 for alpha chain variable domain of TCR clone 301668 (TRAV1-2, TRAJ9)
CAAVNTGGFKTIF

SEQ ID NO: 603336 - protein, 14 aa, Homo sapiens
  CDR3 for beta chain variable domain of TCR clone 301668 (TRBV12-4, TRBJ1-1)
CASSLGTGGTEAFF

SEQ ID NO: 603337 - protein, 19 aa, Homo sapiens
  CDR3 for alpha chain variable domain of TCR clone 301669 (TRAV8-3, TRAJ34)
LSTSVLWVWGLRNTDKLIF

SEQ ID NO: 603338 - protein, 13 aa, Homo sapiens
  CDR3 for beta chain variable domain of TCR clone 301669 (TRBV12-4, TRBJ2-7)
CASSISGVYEQYF

SEQ ID NO: 603339 - protein, 12 aa, Homo sapiens
  CDR3 for alpha chain variable domain of TCR clone 301670 (TRAV13-2, TRAJ23)
CAERHRGGKLIF

SEQ ID NO: 603340 - protein, 16 aa, Homo sapiens
  CDR3 for beta chain variable domain of TCR clone 301670 (TRBV2, TRBJ2-3)
CASSTSVEGVTGTQYF

SEQ ID NO: 603341 - protein, 12 aa, Homo sapiens
  CDR3 for alpha chain variable domain of TCR clone 301671 (TRAV23/DV6, TRAJ30)
CAASKGDDKIIF

SEQ ID NO: 603342 - protein, 13 aa, Homo sapiens
  CDR3 for beta chain variable domain of TCR clone 301671 (TRBV19, TRBJ1-2)
CASSVPGQDGYSF

SEQ ID NO: 603343 - protein, 16 aa, Homo sapiens
  CDR3 for alpha chain variable domain of TCR clone 301672 (TRAV3, TRAJ37)
CAVRGKGYGNTGKLIF

SEQ ID NO: 603344 - protein, 13 aa, Homo sapiens
  CDR3 for beta chain variable domain of TCR clone 301672 (TRBV14, TRBJ2-7)
CASSQARRYEQYF

SEQ ID NO: 603345 - protein, 12 aa, Homo sapiens
  CDR3 for alpha chain variable domain of TCR clone 301673 (TRAV3, TRAJ43)
CAVRDPNNDMRF

SEQ ID NO: 603346 - protein, 12 aa, Homo sapiens
  CDR3 for beta chain variable domain of TCR clone 301673 (TRBV7-9, TRBJ2-7)
CASSIKREEQYF

SEQ ID NO: 603347 - protein, 16 aa, Homo sapiens
  CDR3 for alpha chain variable domain of TCR clone 301674 (TRAV3, TRAJ18)
CAVRDGRGSTLGRLYL

SEQ ID NO: 603348 - protein, 15 aa, Homo sapiens
  CDR3 for beta chain variable domain of TCR clone 301674 (TRBV7-9, TRBJ1-6)
CASSSPGRGHSPLHF

SEQ ID NO: 603349 - protein, 15 aa, Homo sapiens
  CDR3 for alpha chain variable domain of TCR clone 301675 (TRAV12-2, TRAJ53)
CAVNGGGGSNYKLTF

SEQ ID NO: 603350 - protein, 14 aa, Homo sapiens
  CDR3 for beta chain variable domain of TCR clone 301675 (TRBV20-1, TRBJ2-2)
CIAPDTANTGELFF

SEQ ID NO: 603351 - protein, 13 aa, Homo sapiens
  CDR3 for alpha chain variable domain of TCR clone 301676 (TRAV6, TRAJ45)
SPFSGGGADGLTF

SEQ ID NO: 603352 - protein, 12 aa, Homo sapiens
  CDR3 for beta chain variable domain of TCR clone 301676 (TRBV19, TRBJ1-1)
CASSIGTEEAFF

SEQ ID NO: 603353 - protein, 12 aa, Homo sapiens
  CDR3 for alpha chain variable domain of TCR clone 301677 (TRAV13-1, TRAJ53)
AASGGSNYKLTF

SEQ ID NO: 603354 - protein, 15 aa, Homo sapiens
  CDR3 for beta chain variable domain of TCR clone 301677 (TRBV5-1, TRBJ2-1)
CGSSPPRAPYNEQFF

SEQ ID NO: 603355 - protein, 13 aa, Homo sapiens
  CDR3 for alpha chain variable domain of TCR clone 301678 (TRAV17, TRAJ4)
CATKSGGYNKLFF

SEQ ID NO: 603356 - protein, 14 aa, Homo sapiens
  CDR3 for beta chain variable domain of TCR clone 301678 (TRBV20-1, TRBJ1-5)
CSARDDRGNQPQHF

SEQ ID NO: 603357 - protein, 15 aa, Homo sapiens
  CDR3 for alpha chain variable domain of TCR clone 301679 (TRAV27, TRAJ10)
PARGILTGGGNKLTF

SEQ ID NO: 603358 - protein, 15 aa, Homo sapiens
  CDR3 for beta chain variable domain of TCR clone 301679 (TRBV9, TRBJ2-3)
CASSLEGGLTDTQYF

SEQ ID NO: 603359 - protein, 15 aa, Homo sapiens
  CDR3 for alpha chain variable domain of TCR clone 301680 (TRAV3, TRAJ20)
CAVRDIKLSDYKLSF

SEQ ID NO: 603360 - protein, 15 aa, Homo sapiens
  CDR3 for beta chain variable domain of TCR clone 301680 (TRBV7-9, TRBJ1-6)
CASSSPGLGNSPLHF

SEQ ID NO: 603361 - protein, 13 aa, Homo sapiens
  CDR3 for alpha chain variable domain of TCR clone 301681 (TRAV13-1, TRAJ20)
CAARVSNDYKLSF

SEQ ID NO: 603362 - protein, 16 aa, Homo sapiens
  CDR3 for beta chain variable domain of TCR clone 301681 (TRBV11-1, TRBJ1-1)
CAANPRDRAFNTEAFF

SEQ ID NO: 603363 - protein, 15 aa, Homo sapiens
  CDR3 for alpha chain variable domain of TCR clone 301682 (TRAV3, TRAJ21)
CAVRDRRYNFNKFYF

SEQ ID NO: 603364 - protein, 15 aa, Homo sapiens
  CDR3 for beta chain variable domain of TCR clone 301682 (TRBV19, TRBJ2-7)
CASSPTGADTYEQCF

SEQ ID NO: 603365 - protein, 14 aa, Homo sapiens
  CDR3 for alpha chain variable domain of TCR clone 301683 (TRAV29/DV5, TRAJ20)
CAATIRSNDYKLSF

SEQ ID NO: 603366 - protein, 17 aa, Homo sapiens
  CDR3 for beta chain variable domain of TCR clone 301683 (TRBV7-3, TRBJ2-2)
CASSLSGTSGGTGELFF

SEQ ID NO: 603367 - protein, 15 aa, Homo sapiens
  CDR3 for alpha chain variable domain of TCR clone 301684 (TRAV12-3, TRAJ6)
CAMSATSGGSYIPTF

SEQ ID NO: 603368 - protein, 14 aa, Homo sapiens
  CDR3 for beta chain variable domain of TCR clone 301684 (TRBV10-3, TRBJ2-7)
CAISAPRGAYEQYF

SEQ ID NO: 603369 - protein, 14 aa, Homo sapiens
  CDR3 for alpha chain variable domain of TCR clone 301685 (TRAV23/DV6, TRAJ17)
CAARGRAAGNTLTF

SEQ ID NO: 603370 - protein, 13 aa, Homo sapiens
  CDR3 for beta chain variable domain of TCR clone 301685 (TRBV5-5, TRBJ1-2)
CASSFWRGEDYTF

SEQ ID NO: 603371 - protein, 13 aa, Homo sapiens
  CDR3 for alpha chain variable domain of TCR clone 301686 (TRAV27, TRAJ8)
CAGGPTGFQKLVL

SEQ ID NO: 603372 - protein, 15 aa, Homo sapiens
  CDR3 for beta chain variable domain of TCR clone 301686 (TRBV6-1, TRBJ2-7)
CASSESMGDFYEQYF

SEQ ID NO: 603373 - protein, 14 aa, Homo sapiens
  CDR3 for alpha chain variable domain of TCR clone 301687 (TRAV13-1, TRAJ44)
CAAKATGTASKRTF

SEQ ID NO: 603374 - protein, 14 aa, Homo sapiens
  CDR3 for beta chain variable domain of TCR clone 301687 (TRBV19, TRBJ2-2)
CASSTLHRSGELFF

SEQ ID NO: 603375 - protein, 14 aa, Homo sapiens
  CDR3 for alpha chain variable domain of TCR clone 301688 (TRAV8-3, TRAJ24)
CAVGSTDSWGKLQF

SEQ ID NO: 603376 - protein, 15 aa, Homo sapiens
  CDR3 for beta chain variable domain of TCR clone 301688 (TRBV19, TRBJ1-1)
CASTSGQIQNTEAFF

SEQ ID NO: 603377 - protein, 19 aa, Homo sapiens
  CDR3 for alpha chain variable domain of TCR clone 301689 (TRAV3, TRAJ6)
CAVRDRNPSRSGGSYIPTF

SEQ ID NO: 603378 - protein, 15 aa, Homo sapiens
  CDR3 for beta chain variable domain of TCR clone 301689 (TRBV18, TRBJ2-7)
CASSPTFMDSYEQYC

SEQ ID NO: 603379 - protein, 15 aa, Homo sapiens
  CDR3 for alpha chain variable domain of TCR clone 301690 (TRAV21, TRAJ53)
SATLNSGGSNYKLTF

SEQ ID NO: 603380 - protein, 17 aa, Homo sapiens
  CDR3 for beta chain variable domain of TCR clone 301690 (TRBV7-8, TRBJ2-6)
CASSAGTGGAGANVLTF

SEQ ID NO: 603381 - protein, 14 aa, Homo sapiens
  CDR3 for alpha chain variable domain of TCR clone 301691 (TRAV8-3, TRAJ4)
CAVGAAGGYNKLIF

SEQ ID NO: 603382 - protein, 13 aa, Homo sapiens
  CDR3 for beta chain variable domain of TCR clone 301691 (TRBV27, TRBJ1-4)
CASSLMGDEKLFF

SEQ ID NO: 603383 - protein, 14 aa, Homo sapiens
  CDR3 for alpha chain variable domain of TCR clone 301692 (TRAV9-2, TRAJ39)
CALYIYNTGNMLTF

SEQ ID NO: 603384 - protein, 15 aa, Homo sapiens
  CDR3 for beta chain variable domain of TCR clone 301692 (TRBV29-1, TRBJ2-6)
CSVGDRGSGANVLTF

SEQ ID NO: 603385 - protein, 16 aa, Homo sapiens
  CDR3 for alpha chain variable domain of TCR clone 301693 (TRAV30, TRAJ24)
CGTEIVDADSWGKYQF

SEQ ID NO: 603386 - protein, 12 aa, Homo sapiens
  CDR3 for beta chain variable domain of TCR clone 301693 (TRBV11-2, TRBJ2-1)
CASSPGNNEQFF

SEQ ID NO: 603387 - protein, 13 aa, Homo sapiens
  CDR3 for alpha chain variable domain of TCR clone 301694 (TRAV17, TRAJ9)
CATGGTGGFKTIF

SEQ ID NO: 603388 - protein, 17 aa, Homo sapiens
  CDR3 for beta chain variable domain of TCR clone 301694 (TRBV6-5, TRBJ2-7)
CASSYSFWGQGSYEQYF

SEQ ID NO: 603389 - protein, 11 aa, Homo sapiens
  CDR3 for alpha chain variable domain of TCR clone 301695 (TRAV3, TRAJ17)
PRGAAGNKLTF

SEQ ID NO: 603390 - protein, 16 aa, Homo sapiens
  CDR3 for beta chain variable domain of TCR clone 301695 (TRBV7-6, TRBJ2-1)
CASSAPGPRSYNEQFF

SEQ ID NO: 603391 - protein, 16 aa, Homo sapiens
  CDR3 for alpha chain variable domain of TCR clone 301696 (TRAV3, TRAJ37)
CAVRDSGSGNTGKLIF

SEQ ID NO: 603392 - protein, 13 aa, Homo sapiens
  CDR3 for beta chain variable domain of TCR clone 301696 (TRBV7-9, TRBJ2-2)
CASSLDPTGELFF

SEQ ID NO: 603393 - protein, 15 aa, Homo sapiens
  CDR3 for alpha chain variable domain of TCR clone 301697 (TRAV8-3, TRAJ37)
CAVGAPSSNTGKLIF

SEQ ID NO: 603394 - protein, 15 aa, Homo sapiens
  CDR3 for beta chain variable domain of TCR clone 301697 (TRBV7-9, TRBJ2-7)
CASSLALAEAYEQYF

SEQ ID NO: 603395 - protein, 14 aa, Homo sapiens
  CDR3 for alpha chain variable domain of TCR clone 301698 (TRAV12-2, TRAJ13)
CAVKRPGGYQKVTF

SEQ ID NO: 603396 - protein, 15 aa, Homo sapiens
  CDR3 for beta chain variable domain of TCR clone 301698 (TRBV27, TRBJ2-1)
CASSNGGGSSNEQFF

SEQ ID NO: 603397 - protein, 14 aa, Homo sapiens
  CDR3 for alpha chain variable domain of TCR clone 301699 (TRAV12-2, TRAJ17)
CAVLFKAAGNKLTF

SEQ ID NO: 603398 - protein, 12 aa, Homo sapiens
  CDR3 for beta chain variable domain of TCR clone 301699 (TRBV11-2, TRBJ2-2)
CDSSLGGGELFF

SEQ ID NO: 603399 - protein, 11 aa, Homo sapiens
  CDR3 for alpha chain variable domain of TCR clone 301700 (TRAV8-4, TRAJ34)
CAVSWTDKLIF

SEQ ID NO: 603400 - protein, 11 aa, Homo sapiens
  CDR3 for beta chain variable domain of TCR clone 301700 (TRBV12-4, TRBJ2-3)
CASTATDTQYF

SEQ ID NO: 603401 - protein, 16 aa, Homo sapiens
  CDR3 for alpha chain variable domain of TCR clone 301701 (TRAV4, TRAJ18)
CCVLLIGGSTLGRLYF

SEQ ID NO: 603402 - protein, 17 aa, Homo sapiens
  CDR3 for beta chain variable domain of TCR clone 301701 (TRBV5-1, TRBJ2-5)
CASSLLGLAANQETQYF

SEQ ID NO: 603403 - protein, 15 aa, Homo sapiens
  CDR3 for alpha chain variable domain of TCR clone 301702 (TRAV21, TRAJ38)
CAVRQDAGNNRKLIW

SEQ ID NO: 603404 - protein, 16 aa, Homo sapiens
  CDR3 for beta chain variable domain of TCR clone 301702 (TRBV4-2, TRBJ1-1)
CASRQLDEGGDTEAFF

SEQ ID NO: 603405 - protein, 10 aa, Homo sapiens
  CDR3 for alpha chain variable domain of TCR clone 301703 (TRAV13-1, TRAJ15)
INQAGNALIF

SEQ ID NO: 603406 - protein, 14 aa, Homo sapiens
  CDR3 for beta chain variable domain of TCR clone 301703 (TRBV7-9, TRBJ2-1)
CASSDNSGYNEQFF

SEQ ID NO: 603407 - protein, 13 aa, Homo sapiens
  CDR3 for alpha chain variable domain of TCR clone 301704 (TRAV8-3, TRAJ43)
CAVGPDKNNDMRF

SEQ ID NO: 603408 - protein, 12 aa, Homo sapiens
  CDR3 for beta chain variable domain of TCR clone 301704 (TRBV7-2, TRBJ1-6)
CASSLYSSPLHF

SEQ ID NO: 603409 - protein, 10 aa, Homo sapiens
  CDR3 for alpha chain variable domain of TCR clone 301705 (TRAV1-2, TRAJ31)
CAFFDARLMF

SEQ ID NO: 603410 - protein, 16 aa, Homo sapiens
  CDR3 for beta chain variable domain of TCR clone 301705 (TRBV5-1, TRBJ2-2)
CASSSRTGGRTGELFF

SEQ ID NO: 603411 - protein, 14 aa, Homo sapiens
  CDR3 for alpha chain variable domain of TCR clone 301706 (TRAV1-2, TRAJ8)
CAVREDTGFQKLVF

SEQ ID NO: 603412 - protein, 16 aa, Homo sapiens
  CDR3 for beta chain variable domain of TCR clone 301706 (TRBV5-1, TRBJ2-2)
YASSLWDTTNTGELFF

SEQ ID NO: 603413 - protein, 18 aa, Homo sapiens
  CDR3 for alpha chain variable domain of TCR clone 301707 (TRAV21, TRAJ52)
CAVRPSPAGGTSYGKLTF

SEQ ID NO: 603414 - protein, 16 aa, Homo sapiens
  CDR3 for beta chain variable domain of TCR clone 301707 (TRBV20-1, TRBJ1-4)
CSAPGQGLLTNEKRFF

SEQ ID NO: 603415 - protein, 13 aa, Homo sapiens
  CDR3 for alpha chain variable domain of TCR clone 301708 (TRAV26-1, TRAJ29)
CIVRRSGSTPLVF

SEQ ID NO: 603416 - protein, 16 aa, Homo sapiens
  CDR3 for beta chain variable domain of TCR clone 301708 (TRBV11-2, TRBJ2-7)
CASSLAPTGVNYEQYF

SEQ ID NO: 603417 - protein, 14 aa, Homo sapiens
  CDR3 for alpha chain variable domain of TCR clone 301709 (TRAV12-3, TRAJ10)
SHLPLTGGGNKLTF

SEQ ID NO: 603418 - protein, 12 aa, Homo sapiens
  CDR3 for beta chain variable domain of TCR clone 301709 (TRBV24-1, TRBJ2-3)
CATSDSTDTQYF

SEQ ID NO: 603419 - protein, 16 aa, Homo sapiens
  CDR3 for alpha chain variable domain of TCR clone 301710 (TRAV16, TRAJ4)
CITVLPFSGGYNKLIF

SEQ ID NO: 603420 - protein, 14 aa, Homo sapiens
  CDR3 for beta chain variable domain of TCR clone 301710 (TRBV12-5, TRBJ2-5)
CASGSRTHQETQYF

SEQ ID NO: 603421 - protein, 14 aa, Homo sapiens
  CDR3 for alpha chain variable domain of TCR clone 301711 (TRAV8-3, TRAJ15)
CAVGRNQAGTALIF

SEQ ID NO: 603422 - protein, 15 aa, Homo sapiens
  CDR3 for beta chain variable domain of TCR clone 301711 (TRBV27, TRBJ2-1)
CASSNGGGSSNEQFF

SEQ ID NO: 603423 - protein, 17 aa, Homo sapiens
  CDR3 for alpha chain variable domain of TCR clone 301712 (TRAV3, TRAJ6)
CAVRDGPRAGGSHIPTF

SEQ ID NO: 603424 - protein, 14 aa, Homo sapiens
  CDR3 for beta chain variable domain of TCR clone 301712 (TRBV7-8, TRBJ2-1)
CASSLAGSYNEQFF

SEQ ID NO: 603425 - protein, 13 aa, Homo sapiens
  CDR3 for alpha chain variable domain of TCR clone 301713 (TRAV12-2, TRAJ52)
CAVGGTSYGKLKF

SEQ ID NO: 603426 - protein, 16 aa, Homo sapiens
  CDR3 for beta chain variable domain of TCR clone 301713 (TRBV2, TRBJ2-1)
CASSVGGSLSYNEQFF

SEQ ID NO: 603427 - protein, 21 aa, Homo sapiens
  CDR3 for alpha chain variable domain of TCR clone 301714 (TRAV1-1, TRAJ6)
CLLLLRCERLERTGGSYIPTF

SEQ ID NO: 603428 - protein, 16 aa, Homo sapiens
  CDR3 for beta chain variable domain of TCR clone 301714 (TRBV12-4, TRBJ2-5)
CASSFFVRGRQETQYF

SEQ ID NO: 603429 - protein, 11 aa, Homo sapiens
  CDR3 for alpha chain variable domain of TCR clone 301715 (TRAV1-2, TRAJ20)
CAVANDYKLSF

SEQ ID NO: 603430 - protein, 14 aa, Homo sapiens
  CDR3 for beta chain variable domain of TCR clone 301715 (TRBV7-9, TRBJ1-2)
CASSLGPPQWPAAF

SEQ ID NO: 603431 - protein, 14 aa, Homo sapiens
  CDR3 for alpha chain variable domain of TCR clone 301716 (TRAV17, TRAJ16)
CATADFSDGQKLLF

SEQ ID NO: 603432 - protein, 15 aa, Homo sapiens
  CDR3 for beta chain variable domain of TCR clone 301716 (TRBV18, TRBJ2-1)
CASSPPSASYNEEFF

SEQ ID NO: 603433 - protein, 13 aa, Homo sapiens
  CDR3 for alpha chain variable domain of TCR clone 301717 (TRAV13-2, TRAJ40)
CAETLSGTYKYIF

SEQ ID NO: 603434 - protein, 16 aa, Homo sapiens
  CDR3 for beta chain variable domain of TCR clone 301717 (TRBV20-1, TRBJ2-1)
CSARDFSGRIGDEQYF

SEQ ID NO: 603435 - protein, 11 aa, Homo sapiens
  CDR3 for alpha chain variable domain of TCR clone 301718 (TRAV3, TRAJ21)
CAVVNFNKFYF

SEQ ID NO: 603436 - protein, 14 aa, Homo sapiens
  CDR3 for beta chain variable domain of TCR clone 301718 (TRBV29-1, TRBJ2-2)
CSGRGSGNTGELFF

SEQ ID NO: 603437 - protein, 14 aa, Homo sapiens
  CDR3 for alpha chain variable domain of TCR clone 301719 (TRAV16, TRAJ42)
CALLAGGSKGNLIF

SEQ ID NO: 603438 - protein, 13 aa, Homo sapiens
  CDR3 for beta chain variable domain of TCR clone 301719 (TRBV24-1, TRBJ2-2)
CATSDWSTGELFF

SEQ ID NO: 603439 - protein, 15 aa, Homo sapiens
  CDR3 for alpha chain variable domain of TCR clone 301720 (TRAV26-1, TRAJ44)
CIVRANTGTASNLTF

SEQ ID NO: 603440 - protein, 17 aa, Homo sapiens
  CDR3 for beta chain variable domain of TCR clone 301720 (TRBV4-1, TRBJ1-4)
CASSQEGPRGVEEKLFF

SEQ ID NO: 603441 - protein, 15 aa, Homo sapiens
  CDR3 for alpha chain variable domain of TCR clone 301721 (TRAV8-3, TRAJ45)
CASSYSGGCADGLTF

SEQ ID NO: 603442 - protein, 17 aa, Homo sapiens
  CDR3 for beta chain variable domain of TCR clone 301721 (TRBV7-8, TRBJ1-2)
CASSLRPLQGHLYGYTF

SEQ ID NO: 603443 - protein, 12 aa, Homo sapiens
  CDR3 for alpha chain variable domain of TCR clone 301722 (TRAV20, TRAJ20)
CAVRFNDYKLSF

SEQ ID NO: 603444 - protein, 14 aa, Homo sapiens
  CDR3 for beta chain variable domain of TCR clone 301722 (TRBV20-1, TRBJ2-1)
CSAQICGSANEQFF

SEQ ID NO: 603445 - protein, 12 aa, Homo sapiens
  CDR3 for alpha chain variable domain of TCR clone 301723 (TRAV25, TRAJ5)
CAGGGGRRALTF

SEQ ID NO: 603446 - protein, 15 aa, Homo sapiens
  CDR3 for beta chain variable domain of TCR clone 301723 (TRBV20-1, TRBJ2-7)
CSARERVSGMDEQYF

SEQ ID NO: 603447 - protein, 14 aa, Homo sapiens
  CDR3 for alpha chain variable domain of TCR clone 301724 (TRAV26-1, TRAJ39)
FIVRGSRAGNMLTF

SEQ ID NO: 603448 - protein, 14 aa, Homo sapiens
  CDR3 for beta chain variable domain of TCR clone 301724 (TRBV25-1, TRBJ1-1)
CASTHLGGNTEAFF

SEQ ID NO: 603449 - protein, 10 aa, Homo sapiens
  CDR3 for alpha chain variable domain of TCR clone 301725 (TRAV12-2, TRAJ22)
CAVNETQLTF

SEQ ID NO: 603450 - protein, 12 aa, Homo sapiens
  CDR3 for beta chain variable domain of TCR clone 301725 (TRBV19, TRBJ2-7)
CASTERGYEQYF

SEQ ID NO: 603451 - protein, 14 aa, Homo sapiens
  CDR3 for alpha chain variable domain of TCR clone 301726 (TRAV26-1, TRAJ49)
CIVRPSNTGNQFYF

SEQ ID NO: 603452 - protein, 15 aa, Homo sapiens
  CDR3 for beta chain variable domain of TCR clone 301726 (TRBV19, TRBJ1-1)
CASMGLRDVNTEAFF

SEQ ID NO: 603453 - protein, 17 aa, Homo sapiens
  CDR3 for alpha chain variable domain of TCR clone 301727 (TRAV23/DV6, TRAJ57)
CAASSTLSQGGSEKLVF

SEQ ID NO: 603454 - protein, 12 aa, Homo sapiens
  CDR3 for beta chain variable domain of TCR clone 301727 (TRBV7-9, TRBJ1-5)
CASSPQGQPQHF

SEQ ID NO: 603455 - protein, 12 aa, Homo sapiens
  CDR3 for alpha chain variable domain of TCR clone 301728 (TRAV16, TRAJ10)
CSRTGGGNKLTF

SEQ ID NO: 603456 - protein, 14 aa, Homo sapiens
  CDR3 for beta chain variable domain of TCR clone 301728 (TRBV14, TRBJ2-1)
CASSQVQGRGEQFF

SEQ ID NO: 603457 - protein, 14 aa, Homo sapiens
  CDR3 for alpha chain variable domain of TCR clone 301729 (TRAV13-2, TRAJ17)
CAENSKAACNKLTF

SEQ ID NO: 603458 - protein, 11 aa, Homo sapiens
  CDR3 for beta chain variable domain of TCR clone 301729 (TRBV6-3, TRBJ2-3)
CATGQADTQYF

SEQ ID NO: 603459 - protein, 15 aa, Homo sapiens
  CDR3 for alpha chain variable domain of TCR clone 301730 (TRAV13-1, TRAJ52)
SSYNAGGTSYGKLTF

SEQ ID NO: 603460 - protein, 11 aa, Homo sapiens
  CDR3 for beta chain variable domain of TCR clone 301730 (TRBV12-4, TRBJ2-2)
CASSSAGELFF

SEQ ID NO: 603461 - protein, 13 aa, Homo sapiens
  CDR3 for alpha chain variable domain of TCR clone 301731 (TRAV1-2, TRAJ9)
CAALNTGGFKTIF

SEQ ID NO: 603462 - protein, 13 aa, Homo sapiens
  CDR3 for beta chain variable domain of TCR clone 301731 (TRBV19, TRBJ1-2)
CPSSVPGQDGYTF

SEQ ID NO: 603463 - protein, 14 aa, Homo sapiens
  CDR3 for alpha chain variable domain of TCR clone 301732 (TRAV17, TRAJ45)
CATASGGGADGLTF

SEQ ID NO: 603464 - protein, 15 aa, Homo sapiens
  CDR3 for beta chain variable domain of TCR clone 301732 (TRBV12-4, TRBJ1-2)
CASSPITGGGYGYTF

SEQ ID NO: 603465 - protein, 11 aa, Homo sapiens
  CDR3 for alpha chain variable domain of TCR clone 301733 (TRAV1-1, TRAJ23)
CAVRQGGKLIF

SEQ ID NO: 603466 - protein, 15 aa, Homo sapiens
  CDR3 for beta chain variable domain of TCR clone 301733 (TRBV19, TRBJ2-3)
CASRPLGTSRDTQYF

SEQ ID NO: 603467 - protein, 12 aa, Homo sapiens
  CDR3 for alpha chain variable domain of TCR clone 301734 (TRAV21, TRAJ31)
CAVWGNNARLMF

SEQ ID NO: 603468 - protein, 15 aa, Homo sapiens
  CDR3 for beta chain variable domain of TCR clone 301734 (TRBV19, TRBJ1-5)
CASSIVWADNQPQHF

SEQ ID NO: 603469 - protein, 13 aa, Homo sapiens
  CDR3 for alpha chain variable domain of TCR clone 301735 (TRAV8-2, TRAJ44)
CSRGAGTASKLTF

SEQ ID NO: 603470 - protein, 15 aa, Homo sapiens
  CDR3 for beta chain variable domain of TCR clone 301735 (TRBV20-1, TRBJ2-7)
CSARDRVSGMDEQYF

SEQ ID NO: 603471 - protein, 12 aa, Homo sapiens
  CDR3 for alpha chain variable domain of TCR clone 301736 (TRAV20, TRAJ31)
CAVTDNNARLMF

SEQ ID NO: 603472 - protein, 18 aa, Homo sapiens
  CDR3 for beta chain variable domain of TCR clone 301736 (TRBV6-6, TRBJ1-3)
CASSYSKWDSISGNTIYF

SEQ ID NO: 603473 - protein, 21 aa, Homo sapiens
  CDR3 for alpha chain variable domain of TCR clone 301737 (TRAV29/DV5, TRAJ52)
CSVLLCSKREAGGTSYGKLTF

SEQ ID NO: 603474 - protein, 12 aa, Homo sapiens
  CDR3 for beta chain variable domain of TCR clone 301737 (TRBV11-2, TRBJ2-1)
CASSPGNNEQFF

SEQ ID NO: 603475 - protein, 15 aa, Homo sapiens
  CDR3 for alpha chain variable domain of TCR clone 301738 (TRAV21, TRAJ53)
CATLNSGGSNYKLTF

SEQ ID NO: 603476 - protein, 14 aa, Homo sapiens
  CDR3 for beta chain variable domain of TCR clone 301738 (TRBV15, TRBJ1-2)
CATSRASVNYGYAF

SEQ ID NO: 603477 - protein, 11 aa, Homo sapiens
  CDR3 for alpha chain variable domain of TCR clone 301739 (TRAV12-1, TRAJ30)
SVVNGQDKIIF

SEQ ID NO: 603478 - protein, 12 aa, Homo sapiens
  CDR3 for beta chain variable domain of TCR clone 301739 (TRBV27, TRBJ2-2)
CASKLFTGELFF

SEQ ID NO: 603479 - protein, 12 aa, Homo sapiens
  CDR3 for alpha chain variable domain of TCR clone 301740 (TRAV2, TRAJ31)
CAVEEGNARLMF

SEQ ID NO: 603480 - protein, 18 aa, Homo sapiens
  CDR3 for beta chain variable domain of TCR clone 301740 (TRBV7-9, TRBJ2-3)
CDSSLDLAGLATPDTQYF

SEQ ID NO: 603481 - protein, 15 aa, Homo sapiens
  CDR3 for alpha chain variable domain of TCR clone 301741 (TRAV3, TRAJ32)
CAVSSYGVATNKLIF

SEQ ID NO: 603482 - protein, 16 aa, Homo sapiens
  CDR3 for beta chain variable domain of TCR clone 301741 (TRBV5-1, TRBJ2-5)
CASSLSLAGAQETQYF

SEQ ID NO: 603483 - protein, 13 aa, Homo sapiens
  CDR3 for alpha chain variable domain of TCR clone 301742 (TRAV27, TRAJ56)
CAGKPGANSKLTF

SEQ ID NO: 603484 - protein, 15 aa, Homo sapiens
  CDR3 for beta chain variable domain of TCR clone 301742 (TRBV11-2, TRBJ2-3)
CASRGAGLAMVAQYF

SEQ ID NO: 603485 - protein, 17 aa, Homo sapiens
  CDR3 for alpha chain variable domain of TCR clone 301743 (TRAV14/DV4, TRAJ4)
CAMREASGRGGYNKLIF

SEQ ID NO: 603486 - protein, 14 aa, Homo sapiens
  CDR3 for beta chain variable domain of TCR clone 301743 (TRBV19, TRBJ2-7)
CASSMGPGAIEQYF

SEQ ID NO: 603487 - protein, 13 aa, Homo sapiens
  CDR3 for alpha chain variable domain of TCR clone 301744 (TRAV8-3, TRAJ28)
CALGSVGSYQLTF

SEQ ID NO: 603488 - protein, 14 aa, Homo sapiens
  CDR3 for beta chain variable domain of TCR clone 301744 (TRBV7-2, TRBJ2-7)
CASRSQGAAYEQYF

SEQ ID NO: 603489 - protein, 14 aa, Homo sapiens
  CDR3 for alpha chain variable domain of TCR clone 301745 (TRAV13-1, TRAJ52)
CAANGGTSYGKLTF

SEQ ID NO: 603490 - protein, 17 aa, Homo sapiens
  CDR3 for beta chain variable domain of TCR clone 301745 (TRBV5-1, TRBJ2-2)
CASSLAGLSGGTGELFF

SEQ ID NO: 603491 - protein, 17 aa, Homo sapiens
  CDR3 for alpha chain variable domain of TCR clone 301746 (TRAV3, TRAJ6)
CAVRDGPRAGGSYIPTF

SEQ ID NO: 603492 - protein, 14 aa, Homo sapiens
  CDR3 for beta chain variable domain of TCR clone 301746 (TRBV6-1, TRBJ1-3)
CASVLGGGGNTIYF

SEQ ID NO: 603493 - protein, 16 aa, Homo sapiens
  CDR3 for alpha chain variable domain of TCR clone 301747 (TRAV16, TRAJ52)
CALSAAGGTSYGKLTF

SEQ ID NO: 603494 - protein, 13 aa, Homo sapiens
  CDR3 for beta chain variable domain of TCR clone 301747 (TRBV7-9, TRBJ2-1)
RASSLDVGNEQFF

SEQ ID NO: 603495 - protein, 14 aa, Homo sapiens
  CDR3 for alpha chain variable domain of TCR clone 301748 (TRAV23/DV6, TRAJ12)
CAASRMDSSYKLIF

SEQ ID NO: 603496 - protein, 16 aa, Homo sapiens
  CDR3 for beta chain variable domain of TCR clone 301748 (TRBV29-1, TRBJ2-7)
CSVEDAEDGTAYEQYF

SEQ ID NO: 603497 - protein, 13 aa, Homo sapiens
  CDR3 for alpha chain variable domain of TCR clone 301749 (TRAV20, TRAJ37)
CAGCSSNTGKLIF

SEQ ID NO: 603498 - protein, 18 aa, Homo sapiens
  CDR3 for beta chain variable domain of TCR clone 301749 (TRBV7-8, TRBJ2-1)
CASSPAEGLAGGLNEQFF

SEQ ID NO: 603499 - protein, 14 aa, Homo sapiens
  CDR3 for alpha chain variable domain of TCR clone 301750 (TRAV35, TRAJ22)
CAGLTPGSARQLTF

SEQ ID NO: 603500 - protein, 15 aa, Homo sapiens
  CDR3 for beta chain variable domain of TCR clone 301750 (TRBV12-4, TRBJ2-5)
CASSPPTGLQETQYF

SEQ ID NO: 603501 - protein, 12 aa, Homo sapiens
  CDR3 for alpha chain variable domain of TCR clone 301751 (TRAV25, TRAJ53)
CQSGGGNYKLTF

SEQ ID NO: 603502 - protein, 15 aa, Homo sapiens
  CDR3 for beta chain variable domain of TCR clone 301751 (TRBV5-1, TRBJ2-2)
CASSWTSPNTGELFF

SEQ ID NO: 603503 - protein, 17 aa, Homo sapiens
  CDR3 for alpha chain variable domain of TCR clone 301752 (TRAV3, TRAJ22)
CAVNRIPFSGSARQLTL

SEQ ID NO: 603504 - protein, 13 aa, Homo sapiens
  CDR3 for beta chain variable domain of TCR clone 301752 (TRBV11-3, TRBJ1-1)
CASSSNRDTEAFF

SEQ ID NO: 603505 - protein, 17 aa, Homo sapiens
  CDR3 for alpha chain variable domain of TCR clone 301753 (TRAV12-2, TRAJ6)
CAPQGPPRAGGSYIPTF

SEQ ID NO: 603506 - protein, 16 aa, Homo sapiens
  CDR3 for beta chain variable domain of TCR clone 301753 (TRBV15, TRBJ2-5)
CATSRYLEAAQETQYF

SEQ ID NO: 603507 - protein, 12 aa, Homo sapiens
  CDR3 for alpha chain variable domain of TCR clone 301754 (TRAV1-1, TRAJ8)
CAGGTGFQKLVF

SEQ ID NO: 603508 - protein, 12 aa, Homo sapiens
  CDR3 for beta chain variable domain of TCR clone 301754 (TRBV7-2, TRBJ2-7)
CASSLGDREQYF

SEQ ID NO: 603509 - protein, 13 aa, Homo sapiens
  CDR3 for alpha chain variable domain of TCR clone 301755 (TRAV38-1, TRAJ42)
CARWGGSQGNLIF

SEQ ID NO: 603510 - protein, 15 aa, Homo sapiens
  CDR3 for beta chain variable domain of TCR clone 301755 (TRBV10-3, TRBJ2-3)
CAISLTSGGTESQYF

SEQ ID NO: 603511 - protein, 16 aa, Homo sapiens
  CDR3 for alpha chain variable domain of TCR clone 301756 (TRAV30, TRAJ24)
RGTEIVDADSWGKFQF

SEQ ID NO: 603512 - protein, 12 aa, Homo sapiens
  CDR3 for beta chain variable domain of TCR clone 301756 (TRBV11-2, TRBJ2-1)
CASSPGNNEQFF

SEQ ID NO: 603513 - protein, 12 aa, Homo sapiens
  CDR3 for alpha chain variable domain of TCR clone 301757 (TRAV1-1, TRAJ8)
RAGGTGFQKLVF

SEQ ID NO: 603514 - protein, 14 aa, Homo sapiens
  CDR3 for beta chain variable domain of TCR clone 301757 (TRBV12-5, TRBJ2-5)
CASGSRTHQETQYF

SEQ ID NO: 603515 - protein, 21 aa, Homo sapiens
  CDR3 for alpha chain variable domain of TCR clone 301758 (TRAV36/DV7, TRAJ39)
TATQTGDSAIYLPNAGNMLTF

SEQ ID NO: 603516 - protein, 16 aa, Homo sapiens
  CDR3 for beta chain variable domain of TCR clone 301758 (TRBV7-3, TRBJ2-1)
CASSLEGYRSYNEQFF

SEQ ID NO: 603517 - protein, 13 aa, Homo sapiens
  CDR3 for alpha chain variable domain of TCR clone 301759 (TRAV12-2, TRAJ20)
CAVYPSNDYKLSF

SEQ ID NO: 603518 - protein, 12 aa, Homo sapiens
  CDR3 for beta chain variable domain of TCR clone 301759 (TRBV18, TRBJ1-4)
CASSPSREKLFF

SEQ ID NO: 603519 - protein, 17 aa, Homo sapiens
  CDR3 for alpha chain variable domain of TCR clone 301760 (TRAV4, TRAJ18)
CLVGERSVGSTLGRLYF

SEQ ID NO: 603520 - protein, 15 aa, Homo sapiens
  CDR3 for beta chain variable domain of TCR clone 301760 (TRBV12-4, TRBJ2-5)
CASTLNSGRGETQYF

SEQ ID NO: 603521 - protein, 13 aa, Homo sapiens
  CDR3 for alpha chain variable domain of TCR clone 301761 (TRAV17, TRAJ54)
CAVGIQGAQKLVF

SEQ ID NO: 603522 - protein, 14 aa, Homo sapiens
  CDR3 for beta chain variable domain of TCR clone 301761 (TRBV11-2, TRBJ1-2)
CASSLGTANYGYTF

SEQ ID NO: 603523 - protein, 14 aa, Homo sapiens
  CDR3 for alpha chain variable domain of TCR clone 301762 (TRAV29/DV5, TRAJ36)
CAARRKTGANNLFF

SEQ ID NO: 603524 - protein, 18 aa, Homo sapiens
  CDR3 for beta chain variable domain of TCR clone 301762 (TRBV11-2, TRBJ2-6)
CASSLNPFLGTGANVLTF

SEQ ID NO: 603525 - protein, 16 aa, Homo sapiens
  CDR3 for alpha chain variable domain of TCR clone 301763 (TRAV26-1, TRAJ57)
IASSESDQGGSEKLVF

SEQ ID NO: 603526 - protein, 15 aa, Homo sapiens
  CDR3 for beta chain variable domain of TCR clone 301763 (TRBV11-2, TRBJ2-1)
CASSLGTSGLNEQFF

SEQ ID NO: 603527 - protein, 12 aa, Homo sapiens
  CDR3 for alpha chain variable domain of TCR clone 301764 (TRAV14/DV4, TRAJ37)
CNSSGNTGKLIF

SEQ ID NO: 603528 - protein, 14 aa, Homo sapiens
  CDR3 for beta chain variable domain of TCR clone 301764 (TRBV7-2, TRBJ2-7)
CASRSQGAAYEQYF

SEQ ID NO: 603529 - protein, 13 aa, Homo sapiens
  CDR3 for alpha chain variable domain of TCR clone 301765 (TRAV38-2/DV8, TRAJ34)
CAYRTWNTDKLIF

SEQ ID NO: 603530 - protein, 15 aa, Homo sapiens
  CDR3 for beta chain variable domain of TCR clone 301765 (TRBV10-3, TRBJ2-1)
CAISESASGRKEQFF

SEQ ID NO: 603531 - protein, 13 aa, Homo sapiens
  CDR3 for alpha chain variable domain of TCR clone 301766 (TRAV38-1, TRAJ42)
CARWGGSQGNLIF

SEQ ID NO: 603532 - protein, 16 aa, Homo sapiens
  CDR3 for beta chain variable domain of TCR clone 301766 (TRBV12-4, TRBJ1-4)
CASSLKGIGHGEKLFF

SEQ ID NO: 603533 - protein, 14 aa, Homo sapiens
  CDR3 for alpha chain variable domain of TCR clone 301767 (TRAV2, TRAJ9)
CAVEDRSGGFKTIF

SEQ ID NO: 603534 - protein, 14 aa, Homo sapiens
  CDR3 for beta chain variable domain of TCR clone 301767 (TRBV12-4, TRBJ1-5)
CASSPTGPRGGTYF

SEQ ID NO: 603535 - protein, 17 aa, Homo sapiens
  CDR3 for alpha chain variable domain of TCR clone 301768 (TRAV3, TRAJ42)
CAVRDRDYEGSQGNLIF

SEQ ID NO: 603536 - protein, 13 aa, Homo sapiens
  CDR3 for beta chain variable domain of TCR clone 301768 (TRBV20-1, TRBJ2-5)
CSARRGTGATQYF

SEQ ID NO: 603537 - protein, 15 aa, Homo sapiens
  CDR3 for alpha chain variable domain of TCR clone 301769 (TRAV26-1, TRAJ29)
CIVRVEGSGNTPLVF

SEQ ID NO: 603538 - protein, 16 aa, Homo sapiens
  CDR3 for beta chain variable domain of TCR clone 301769 (TRBV27, TRBJ2-2)
CASSFRGLVRTGELFF

SEQ ID NO: 603539 - protein, 11 aa, Homo sapiens
  CDR3 for alpha chain variable domain of TCR clone 301770 (TRAV13-1, TRAJ6)
CATLGSYIPTF

SEQ ID NO: 603540 - protein, 14 aa, Homo sapiens
  CDR3 for beta chain variable domain of TCR clone 301770 (TRBV7-3, TRBJ2-1)
CASSLAGGTNEQFF

SEQ ID NO: 603541 - protein, 14 aa, Homo sapiens
  CDR3 for alpha chain variable domain of TCR clone 301771 (TRAV26-1, TRAJ45)
FIVRVVGGADGLPF

SEQ ID NO: 603542 - protein, 16 aa, Homo sapiens
  CDR3 for beta chain variable domain of TCR clone 301771 (TRBV7-9, TRBJ1-1)
CASSLTQVRSNTEAFF

SEQ ID NO: 603543 - protein, 14 aa, Homo sapiens
  CDR3 for alpha chain variable domain of TCR clone 301772 (TRAV12-2, TRAJ13)
CAVKKTGGYQKVTF

SEQ ID NO: 603544 - protein, 15 aa, Homo sapiens
  CDR3 for beta chain variable domain of TCR clone 301772 (TRBV27, TRBJ2-1)
CASSNGGGSPMSSSS

SEQ ID NO: 603545 - protein, 16 aa, Homo sapiens
  CDR3 for alpha chain variable domain of TCR clone 301773 (TRAV12-3, TRAJ53)
CAMSPGSGGSNYKLTF

SEQ ID NO: 603546 - protein, 17 aa, Homo sapiens
  CDR3 for beta chain variable domain of TCR clone 301773 (TRBV28, TRBJ2-5)
CASSTPEGDALKETQYF

SEQ ID NO: 603547 - protein, 13 aa, Homo sapiens
  CDR3 for alpha chain variable domain of TCR clone 301774 (TRAV27, TRAJ8)
CAGGPTGFQKLVF

SEQ ID NO: 603548 - protein, 16 aa, Homo sapiens
  CDR3 for beta chain variable domain of TCR clone 301774 (TRBV4-1, TRBJ2-6)
CASSQVGDPGANVLTF

SEQ ID NO: 603549 - protein, 15 aa, Homo sapiens
  CDR3 for alpha chain variable domain of TCR clone 301775 (TRAV26-1, TRAJ21)
FIVRVPNYNFNKFYF

SEQ ID NO: 603550 - protein, 16 aa, Homo sapiens
  CDR3 for beta chain variable domain of TCR clone 301775 (TRBV7-9, TRBJ2-3)
CASSLQGNPGTDTQYF

SEQ ID NO: 603551 - protein, 12 aa, Homo sapiens
  CDR3 for alpha chain variable domain of TCR clone 301776 (TRAV26-1, TRAJ36)
CIVRVRADNLFC

SEQ ID NO: 603552 - protein, 13 aa, Homo sapiens
  CDR3 for beta chain variable domain of TCR clone 301776 (TRBV11-2, TRBJ2-5)
CASSRGPSETQYF

SEQ ID NO: 603553 - protein, 15 aa, Homo sapiens
  CDR3 for alpha chain variable domain of TCR clone 301777 (TRAV13-2, TRAJ45)
CAENNSGGGADGLTF

SEQ ID NO: 603554 - protein, 13 aa, Homo sapiens
  CDR3 for beta chain variable domain of TCR clone 301777 (TRBV25-1, TRBJ2-6)
CASRGPGANVLTF

SEQ ID NO: 603555 - protein, 18 aa, Homo sapiens
  CDR3 for alpha chain variable domain of TCR clone 301778 (TRAV13-1, TRAJ52)
CAAKNPNAGGTSYGKLTC

SEQ ID NO: 603556 - protein, 13 aa, Homo sapiens
  CDR3 for beta chain variable domain of TCR clone 301778 (TRBV27, TRBJ1-1)
CASSLSIGAEAFF

SEQ ID NO: 603557 - protein, 14 aa, Homo sapiens
  CDR3 for alpha chain variable domain of TCR clone 301779 (TRAV27, TRAJ13)
CRSSNSGGYLKVTF

SEQ ID NO: 603558 - protein, 15 aa, Homo sapiens
  CDR3 for beta chain variable domain of TCR clone 301779 (TRBV7-8, TRBJ2-3)
CASSPRTGSTDTQYF

SEQ ID NO: 603559 - protein, 13 aa, Homo sapiens
  CDR3 for alpha chain variable domain of TCR clone 301780 (TRAV27, TRAJ3)
ASLRGSSASKIIF

SEQ ID NO: 603560 - protein, 16 aa, Homo sapiens
  CDR3 for beta chain variable domain of TCR clone 301780 (TRBV5-1, TRBJ2-3)
CASSLGLAVYTDTQYF

SEQ ID NO: 603561 - protein, 17 aa, Homo sapiens
  CDR3 for alpha chain variable domain of TCR clone 301781 (TRAV13-1, TRAJ52)
CAAGRNAGGTSYGKLTF

SEQ ID NO: 603562 - protein, 13 aa, Homo sapiens
  CDR3 for beta chain variable domain of TCR clone 301781 (TRBV7-2, TRBJ1-1)
CASNLKRAKVAFF

SEQ ID NO: 603563 - protein, 12 aa, Homo sapiens
  CDR3 for alpha chain variable domain of TCR clone 301782 (TRAV13-1, TRAJ53)
AASGGSNYKPTF

SEQ ID NO: 603564 - protein, 13 aa, Homo sapiens
  CDR3 for beta chain variable domain of TCR clone 301782 (TRBV7-2, TRBJ2-2)
CASSSVRAGELFF

SEQ ID NO: 603565 - protein, 15 aa, Homo sapiens
  CDR3 for alpha chain variable domain of TCR clone 301783 (TRAV3, TRAJ22)
CAVRDRGGSARQLTF

SEQ ID NO: 603566 - protein, 15 aa, Homo sapiens
  CDR3 for beta chain variable domain of TCR clone 301783 (TRBV29-1, TRBJ2-1)
CSVGRHALFYNEQFF

SEQ ID NO: 603567 - protein, 14 aa, Homo sapiens
  CDR3 for alpha chain variable domain of TCR clone 301784 (TRAV1-2, TRAJ8)
CAVREDTGFQKLVF

SEQ ID NO: 603568 - protein, 14 aa, Homo sapiens
  CDR3 for beta chain variable domain of TCR clone 301784 (TRBV19, TRBJ2-3)
CASSAPRGTDTQYF

SEQ ID NO: 603569 - protein, 13 aa, Homo sapiens
  CDR3 for alpha chain variable domain of TCR clone 301785 (TRAV21, TRAJ20)
CAVGLRVDYKLSF

SEQ ID NO: 603570 - protein, 14 aa, Homo sapiens
  CDR3 for beta chain variable domain of TCR clone 301785 (TRBV5-7, TRBJ2-1)
CASSSVANYNEQFF

SEQ ID NO: 603571 - protein, 13 aa, Homo sapiens
  CDR3 for alpha chain variable domain of TCR clone 301786 (TRAV16, TRAJ34)
CALSPYNTDKLIF

SEQ ID NO: 603572 - protein, 17 aa, Homo sapiens
  CDR3 for beta chain variable domain of TCR clone 301786 (TRBV5-1, TRBJ2-1)
CASSTGTSGYAYNEQFF

SEQ ID NO: 603573 - protein, 14 aa, Homo sapiens
  CDR3 for alpha chain variable domain of TCR clone 301787 (TRAV8-4, TRAJ29)
CAVSAVEGNTPLVF

SEQ ID NO: 603574 - protein, 13 aa, Homo sapiens
  CDR3 for beta chain variable domain of TCR clone 301787 (TRBV12-4, TRBJ2-7)
CASSVQGRYEQYF

SEQ ID NO: 603575 - protein, 13 aa, Homo sapiens
  CDR3 for alpha chain variable domain of TCR clone 301788 (TRAV2, TRAJ40)
CAVVISGTYKYIF

SEQ ID NO: 603576 - protein, 14 aa, Homo sapiens
  CDR3 for beta chain variable domain of TCR clone 301788 (TRBV19, TRBJ2-1)
CASMTFVLSGEQFF

SEQ ID NO: 603577 - protein, 14 aa, Homo sapiens
  CDR3 for alpha chain variable domain of TCR clone 301789 (TRAV35, TRAJ13)
CAGRSPGGYQKVTF

SEQ ID NO: 603578 - protein, 14 aa, Homo sapiens
  CDR3 for beta chain variable domain of TCR clone 301789 (TRBV19, TRBJ2-2)
CASSMVGRSGELFF

SEQ ID NO: 603579 - protein, 16 aa, Homo sapiens
  CDR3 for alpha chain variable domain of TCR clone 301790 (TRAV3, TRAJ37)
FAVRPHGSGNTGKLIF

SEQ ID NO: 603580 - protein, 16 aa, Homo sapiens
  CDR3 for beta chain variable domain of TCR clone 301790 (TRBV20-1, TRBJ1-4)
CSAPGQGLLTNEKLFF

SEQ ID NO: 603581 - protein, 17 aa, Homo sapiens
  CDR3 for alpha chain variable domain of TCR clone 301791 (TRAV38-2/DV8, TRAJ57)
CAYRSVLTQGGSAKLVF

SEQ ID NO: 603582 - protein, 16 aa, Homo sapiens
  CDR3 for beta chain variable domain of TCR clone 301791 (TRBV7-3, TRBJ2-2)
CASSLKRGTLSGELFF

SEQ ID NO: 603583 - protein, 14 aa, Homo sapiens
  CDR3 for alpha chain variable domain of TCR clone 301792 (TRAV12-2, TRAJ11)
CGVNRESGYSTLTF

SEQ ID NO: 603584 - protein, 10 aa, Homo sapiens
  CDR3 for beta chain variable domain of TCR clone 301792 (TRBV20-1, TRBJ2-5)
CSARFETQYF

SEQ ID NO: 603585 - protein, 16 aa, Homo sapiens
  CDR3 for alpha chain variable domain of TCR clone 301793 (TRAV3, TRAJ10)
CAVRDMRAGGGNKLTF

SEQ ID NO: 603586 - protein, 13 aa, Homo sapiens
  CDR3 for beta chain variable domain of TCR clone 301793 (TRBV19, TRBJ1-1)
CASSITGESEAFF

SEQ ID NO: 603587 - protein, 16 aa, Homo sapiens
  CDR3 for alpha chain variable domain of TCR clone 301794 (TRAV30, TRAJ24)
CGTEIVDADSWGKFQF

SEQ ID NO: 603588 - protein, 18 aa, Homo sapiens
  CDR3 for beta chain variable domain of TCR clone 301794 (TRBV12-5, TRBJ2-5)
CASGSRTHRDPVLRARHA

SEQ ID NO: 603589 - protein, 16 aa, Homo sapiens
  CDR3 for alpha chain variable domain of TCR clone 301795 (TRAV26-1, TRAJ53)
CIVRVAMGGSNYKLTF

SEQ ID NO: 603590 - protein, 14 aa, Homo sapiens
  CDR3 for beta chain variable domain of TCR clone 301795 (TRBV12-4, TRBJ1-1)
CASSLGTGGTEAFF

SEQ ID NO: 603591 - protein, 16 aa, Homo sapiens
  CDR3 for alpha chain variable domain of TCR clone 301796 (TRAV16, TRAJ52)
CALSAAGGTSYGKLTF

SEQ ID NO: 603592 - protein, 16 aa, Homo sapiens
  CDR3 for beta chain variable domain of TCR clone 301796 (TRBV4-3, TRBJ1-2)
CASSQDLTGALGGYTF

SEQ ID NO: 603593 - protein, 11 aa, Homo sapiens
  CDR3 for alpha chain variable domain of TCR clone 301797 (TRAV35, TRAJ31)
CAESGDARLMF

SEQ ID NO: 603594 - protein, 11 aa, Homo sapiens
  CDR3 for beta chain variable domain of TCR clone 301797 (TRBV24-1, TRBJ2-3)
CATSDLDTQYL

SEQ ID NO: 603595 - protein, 12 aa, Homo sapiens
  CDR3 for alpha chain variable domain of TCR clone 301798 (TRAV1-1, TRAJ24)
CAVRGSWGKFQF

SEQ ID NO: 603596 - protein, 14 aa, Homo sapiens
  CDR3 for beta chain variable domain of TCR clone 301798 (TRBV25-1, TRBJ1-1)
CASTHLGGNTEAFF

SEQ ID NO: 603597 - protein, 12 aa, Homo sapiens
  CDR3 for alpha chain variable domain of TCR clone 301799 (TRAV22, TRAJ22)
CAPGRSARQLTF

SEQ ID NO: 603598 - protein, 13 aa, Homo sapiens
  CDR3 for beta chain variable domain of TCR clone 301799 (TRBV15, TRBJ1-6)
CATSGGLNSPLHF

SEQ ID NO: 603599 - protein, 13 aa, Homo sapiens
  CDR3 for alpha chain variable domain of TCR clone 301800 (TRAV22, TRAJ29)
FAVGGSGNTPLVF

SEQ ID NO: 603600 - protein, 17 aa, Homo sapiens
  CDR3 for beta chain variable domain of TCR clone 301800 (TRBV13, TRBJ2-3)
CASSLSRVAGGRNTQYF

SEQ ID NO: 603601 - protein, 12 aa, Homo sapiens
  CDR3 for alpha chain variable domain of TCR clone 301801 (TRAV16, TRAJ9)
CALSSGGFNTIF

SEQ ID NO: 603602 - protein, 14 aa, Homo sapiens
  CDR3 for beta chain variable domain of TCR clone 301801 (TRBV7-9, TRBJ2-1)
CASSLAGPYNEQFF

SEQ ID NO: 603603 - protein, 10 aa, Homo sapiens
  CDR3 for alpha chain variable domain of TCR clone 301802 (TRAV8-3, TRAJ43)
CAVALADMRF

SEQ ID NO: 603604 - protein, 17 aa, Homo sapiens
  CDR3 for beta chain variable domain of TCR clone 301802 (TRBV10-1, TRBJ2-1)
CASSTQRAGGPFNEQFF

SEQ ID NO: 603605 - protein, 15 aa, Homo sapiens
  CDR3 for alpha chain variable domain of TCR clone 301803 (TRAV3, TRAJ5)
CAVRDRKTCRRALTF

SEQ ID NO: 603606 - protein, 14 aa, Homo sapiens
  CDR3 for beta chain variable domain of TCR clone 301803 (TRBV5-1, TRBJ2-7)
CASSRGESLYEQYF

SEQ ID NO: 603607 - protein, 12 aa, Homo sapiens
  CDR3 for alpha chain variable domain of TCR clone 301804 (TRAV2, TRAJ40)
CCGTSGTYKYIF

SEQ ID NO: 603608 - protein, 14 aa, Homo sapiens
  CDR3 for beta chain variable domain of TCR clone 301804 (TRBV19, TRBJ2-1)
CASPTCVLSGEQFF

SEQ ID NO: 603609 - protein, 15 aa, Homo sapiens
  CDR3 for alpha chain variable domain of TCR clone 301805 (TRAV12-3, TRAJ6)
CAMSATTGGSYIPTV

SEQ ID NO: 603610 - protein, 15 aa, Homo sapiens
  CDR3 for beta chain variable domain of TCR clone 301805 (TRBV12-4, TRBJ2-5)
CASSPPTGLQETQYF

SEQ ID NO: 603611 - protein, 13 aa, Homo sapiens
  CDR3 for alpha chain variable domain of TCR clone 301806 (TRAV13-1, TRAJ5)
SAARVTGRRALTF

SEQ ID NO: 603612 - protein, 15 aa, Homo sapiens
  CDR3 for beta chain variable domain of TCR clone 301806 (TRBV28, TRBJ2-7)
CASSPGGRGFNEQYF

SEQ ID NO: 603613 - protein, 14 aa, Homo sapiens
  CDR3 for alpha chain variable domain of TCR clone 301807 (TRAV8-2, TRAJ4)
CVVSPSGGYNKLIF

SEQ ID NO: 603614 - protein, 15 aa, Homo sapiens
  CDR3 for beta chain variable domain of TCR clone 301807 (TRBV4-1, TRBJ1-4)
CASSDTGGTNATLFF

SEQ ID NO: 603615 - protein, 14 aa, Homo sapiens
  CDR3 for alpha chain variable domain of TCR clone 301808 (TRAV12-2, TRAJ13)
CAVKKTGGYQKVTF

SEQ ID NO: 603616 - protein, 18 aa, Homo sapiens
  CDR3 for beta chain variable domain of TCR clone 301808 (TRBV6-6, TRBJ1-3)
CASSYSKWDSISGDTIYF

SEQ ID NO: 603617 - protein, 11 aa, Homo sapiens
  CDR3 for alpha chain variable domain of TCR clone 301809 (TRAV1-2, TRAJ20)
CAVANDYKLSF

SEQ ID NO: 603618 - protein, 14 aa, Homo sapiens
  CDR3 for beta chain variable domain of TCR clone 301809 (TRBV19, TRBJ1-5)
CASSIVQGIQPQHF

SEQ ID NO: 603619 - protein, 14 aa, Homo sapiens
  CDR3 for alpha chain variable domain of TCR clone 301810 (TRAV8-3, TRAJ9)
CAVVYNTGGFKTIF

SEQ ID NO: 603620 - protein, 13 aa, Homo sapiens
  CDR3 for beta chain variable domain of TCR clone 301810 (TRBV11-3, TRBJ2-7)
CASSLDKLYEQYL

SEQ ID NO: 603621 - protein, 16 aa, Homo sapiens
  CDR3 for alpha chain variable domain of TCR clone 301811 (TRAV12-1, TRAJ53)
FVATSVAGGSNYKLTF

SEQ ID NO: 603622 - protein, 16 aa, Homo sapiens
  CDR3 for beta chain variable domain of TCR clone 301811 (TRBV6-6, TRBJ2-3)
CASSYSHAGSTDTQYF

SEQ ID NO: 603623 - protein, 15 aa, Homo sapiens
  CDR3 for alpha chain variable domain of TCR clone 301812 (TRAV17, TRAJ6)
CATDLPSGGRYIPTF

SEQ ID NO: 603624 - protein, 16 aa, Homo sapiens
  CDR3 for beta chain variable domain of TCR clone 301812 (TRBV4-1, TRBJ2-7)
CASSRDPTGYSYEQYF

SEQ ID NO: 603625 - protein, 14 aa, Homo sapiens
  CDR3 for alpha chain variable domain of TCR clone 301813 (TRAV1-2, TRAJ16)
CAVNRFSDGQKLLF

SEQ ID NO: 603626 - protein, 16 aa, Homo sapiens
  CDR3 for beta chain variable domain of TCR clone 301813 (TRBV5-4, TRBJ2-7)
CASSSKMTSGTYEQYF

SEQ ID NO: 603627 - protein, 14 aa, Homo sapiens
  CDR3 for alpha chain variable domain of TCR clone 301814 (TRAV1-2, TRAJ8)
CAVREDTGFQKLVF

SEQ ID NO: 603628 - protein, 14 aa, Homo sapiens
  CDR3 for beta chain variable domain of TCR clone 301814 (TRBV7-9, TRBJ2-1)
CASSSMVGFGEQFF

SEQ ID NO: 603629 - protein, 14 aa, Homo sapiens
  CDR3 for alpha chain variable domain of TCR clone 301815 (TRAV16, TRAJ42)
CALLAGGSQGNLIF

SEQ ID NO: 603630 - protein, 13 aa, Homo sapiens
  CDR3 for beta chain variable domain of TCR clone 301815 (TRBV7-3, TRBJ2-1)
CQQLSGGTNEQFF

SEQ ID NO: 603631 - protein, 20 aa, Homo sapiens
  CDR3 for alpha chain variable domain of TCR clone 301816 (TRAV4, TRAJ29)
CCVLLPRGCVPFSGNTPLVF

SEQ ID NO: 603632 - protein, 17 aa, Homo sapiens
  CDR3 for beta chain variable domain of TCR clone 301816 (TRBV25-1, TRBJ2-7)
CASSDAKVVFSSYEQYF

SEQ ID NO: 603633 - protein, 11 aa, Homo sapiens
  CDR3 for alpha chain variable domain of TCR clone 301817 (TRAV12-1, TRAJ43)
CVEYDNNDMRF

SEQ ID NO: 603634 - protein, 15 aa, Homo sapiens
  CDR3 for beta chain variable domain of TCR clone 301817 (TRBV18, TRBJ2-5)
CASSPRASEPETQYF

SEQ ID NO: 603635 - protein, 12 aa, Homo sapiens
  CDR3 for alpha chain variable domain of TCR clone 301818 (TRAV13-2, TRAJ23)
GAELPRGGKLIF

SEQ ID NO: 603636 - protein, 16 aa, Homo sapiens
  CDR3 for beta chain variable domain of TCR clone 301818 (TRBV20-1, TRBJ1-4)
CSAPGQGLLTNEKLFF

SEQ ID NO: 603637 - protein, 15 aa, Homo sapiens
  CDR3 for alpha chain variable domain of TCR clone 301819 (TRAV8-3, TRAJ21)
CAVGELPPRGYKFYF

SEQ ID NO: 603638 - protein, 18 aa, Homo sapiens
  CDR3 for beta chain variable domain of TCR clone 301819 (TRBV25-1, TRBJ1-2)
CASSGLQNGQGLIFGYTF

SEQ ID NO: 603639 - protein, 15 aa, Homo sapiens
  CDR3 for alpha chain variable domain of TCR clone 301820 (TRAV8-3, TRAJ45)
CASSYSGGGADGRTF

SEQ ID NO: 603640 - protein, 13 aa, Homo sapiens
  CDR3 for beta chain variable domain of TCR clone 301820 (TRBV10-3, TRBJ2-7)
CASKLAVDYEQYF

SEQ ID NO: 603641 - protein, 12 aa, Homo sapiens
  CDR3 for alpha chain variable domain of TCR clone 301821 (TRAV12-2, TRAJ16)
CAVNLDGQKLLF

SEQ ID NO: 603642 - protein, 14 aa, Homo sapiens
  CDR3 for beta chain variable domain of TCR clone 301821 (TRBV28, TRBJ2-1)
CASSYYTAYNEQFF

SEQ ID NO: 603643 - protein, 15 aa, Homo sapiens
  CDR3 for alpha chain variable domain of TCR clone 301822 (TRAV8-4, TRAJ37)
CAVSKVSGNTGKLIF

SEQ ID NO: 603644 - protein, 15 aa, Homo sapiens
  CDR3 for beta chain variable domain of TCR clone 301822 (TRBV20-1, TRBJ1-1)
CSASRGVTGNTEAFF

SEQ ID NO: 603645 - protein, 16 aa, Homo sapiens
  CDR3 for alpha chain variable domain of TCR clone 301823 (TRAV12-3, TRAJ20)
CARDKLSFGAGTTVTV

SEQ ID NO: 603646 - protein, 14 aa, Homo sapiens
  CDR3 for beta chain variable domain of TCR clone 301823 (TRBV5-4, TRBJ2-2)
CASSLTSRTGELFF

SEQ ID NO: 603647 - protein, 14 aa, Homo sapiens
  CDR3 for alpha chain variable domain of TCR clone 301824 (TRAV13-1, TRAJ35)
CAASKGGLGNVLHC

SEQ ID NO: 603648 - protein, 15 aa, Homo sapiens
  CDR3 for beta chain variable domain of TCR clone 301824 (TRBV10-2, TRBJ2-6)
CASGEQGTGANVLTF

SEQ ID NO: 603649 - protein, 13 aa, Homo sapiens
  CDR3 for alpha chain variable domain of TCR clone 301825 (TRAV17, TRAJ9)
CATAITGGFKTIF

SEQ ID NO: 603650 - protein, 14 aa, Homo sapiens
  CDR3 for beta chain variable domain of TCR clone 301825 (TRBV7-8, TRBJ2-5)
CASSATGGQETQYF

SEQ ID NO: 603651 - protein, 10 aa, Homo sapiens
  CDR3 for alpha chain variable domain of TCR clone 301826 (TRAV12-3, TRAJ49)
CAMNDDQFYF

SEQ ID NO: 603652 - protein, 15 aa, Homo sapiens
  CDR3 for beta chain variable domain of TCR clone 301826 (TRBV4-1, TRBJ1-4)
CASSDTGGTNEKLFF

SEQ ID NO: 603653 - protein, 14 aa, Homo sapiens
  CDR3 for alpha chain variable domain of TCR clone 301827 (TRAV23/DV6, TRAJ39)
CAATREEAGNMLTF

SEQ ID NO: 603654 - protein, 14 aa, Homo sapiens
  CDR3 for beta chain variable domain of TCR clone 301827 (TRBV12-5, TRBJ2-5)
CASGSRTHQETQYF

SEQ ID NO: 603655 - protein, 14 aa, Homo sapiens
  CDR3 for alpha chain variable domain of TCR clone 301828 (TRAV2, TRAJ9)
CAVEDRSGGFKTIF

SEQ ID NO: 603656 - protein, 18 aa, Homo sapiens
  CDR3 for beta chain variable domain of TCR clone 301828 (TRBV11-2, TRBJ2-3)
CASSLGGASRGAPNTLYF

SEQ ID NO: 603657 - protein, 14 aa, Homo sapiens
  CDR3 for alpha chain variable domain of TCR clone 301829 (TRAV13-1, TRAJ35)
CAASKGGFGNVLHC

SEQ ID NO: 603658 - protein, 13 aa, Homo sapiens
  CDR3 for beta chain variable domain of TCR clone 301829 (TRBV7-3, TRBJ1-1)
CASRQDWGDEAFF

SEQ ID NO: 603659 - protein, 16 aa, Homo sapiens
  CDR3 for alpha chain variable domain of TCR clone 301830 (TRAV30, TRAJ24)
CGTEIVDADSWGKFQF

SEQ ID NO: 603660 - protein, 14 aa, Homo sapiens
  CDR3 for beta chain variable domain of TCR clone 301830 (TRBV12-5, TRBJ2-5)
CASGSRTHPENQYF

SEQ ID NO: 603661 - protein, 23 aa, Homo sapiens
  CDR3 for alpha chain variable domain of TCR clone 301831 (TRAV36/DV7, TRAJ50)
CAVEPENLLRQGDIWARDKLIRH

SEQ ID NO: 603662 - protein, 13 aa, Homo sapiens
  CDR3 for beta chain variable domain of TCR clone 301831 (TRBV7-2, TRBJ2-7)
CASSSPSGSEQYF

SEQ ID NO: 603663 - protein, 12 aa, Homo sapiens
  CDR3 for alpha chain variable domain of TCR clone 301832 (TRAV16, TRAJ10)
CSRTGGENKLTF

SEQ ID NO: 603664 - protein, 15 aa, Homo sapiens
  CDR3 for beta chain variable domain of TCR clone 301832 (TRBV6-3, TRBJ2-7)
CASSSPGTVFYEQYF

SEQ ID NO: 603665 - protein, 13 aa, Homo sapiens
  CDR3 for alpha chain variable domain of TCR clone 301833 (TRAV12-1, TRAJ11)
CVVNRAGYSTLTF

SEQ ID NO: 603666 - protein, 13 aa, Homo sapiens
  CDR3 for beta chain variable domain of TCR clone 301833 (TRBV7-3, TRBJ1-2)
CASSLKRGYGYTF

SEQ ID NO: 603667 - protein, 12 aa, Homo sapiens
  CDR3 for alpha chain variable domain of TCR clone 301834 (TRAV26-1, TRAJ43)
CIVRPRGDDMRF

SEQ ID NO: 603668 - protein, 16 aa, Homo sapiens
  CDR3 for beta chain variable domain of TCR clone 301834 (TRBV3-1, TRBJ2-1)
CATSQGGRRSFDEQFF

SEQ ID NO: 603669 - protein, 23 aa, Homo sapiens
  CDR3 for alpha chain variable domain of TCR clone 301835 (TRAV12-2, TRAJ36)
SLLIRDSQPSDSATLERANNLFF

SEQ ID NO: 603670 - protein, 14 aa, Homo sapiens
  CDR3 for beta chain variable domain of TCR clone 301835 (TRBV4-1, TRBJ1-6)
CASSPGSDSSPLHF

SEQ ID NO: 603671 - protein, 13 aa, Homo sapiens
  CDR3 for alpha chain variable domain of TCR clone 301836 (TRAV20, TRAJ34)
CAVRSYNTDKLIF

SEQ ID NO: 603672 - protein, 15 aa, Homo sapiens
  CDR3 for beta chain variable domain of TCR clone 301836 (TRBV27, TRBJ1-3)
CASSPSPGSGDTMYF

SEQ ID NO: 603673 - protein, 17 aa, Homo sapiens
  CDR3 for alpha chain variable domain of TCR clone 301837 (TRAV13-1, TRAJ31)
CAPRDRLMFGDGTQLVV

SEQ ID NO: 603674 - protein, 15 aa, Homo sapiens
  CDR3 for beta chain variable domain of TCR clone 301837 (TRBV10-2, TRBJ2-6)
CASSEQGTGANVLTF

SEQ ID NO: 603675 - protein, 15 aa, Homo sapiens
  CDR3 for alpha chain variable domain of TCR clone 301838 (TRAV35, TRAJ50)
CAGQLRQTSYDKVIF

SEQ ID NO: 603676 - protein, 12 aa, Homo sapiens
  CDR3 for beta chain variable domain of TCR clone 301838 (TRBV5-1, TRBJ2-5)
CASSLGLETQYF

SEQ ID NO: 603677 - protein, 14 aa, Homo sapiens
  CDR3 for alpha chain variable domain of TCR clone 301839 (TRAV1-1, TRAJ27)
CAVIYNNNAGKSTF

SEQ ID NO: 603678 - protein, 13 aa, Homo sapiens
  CDR3 for beta chain variable domain of TCR clone 301839 (TRBV12-5, TRBJ1-2)
CASGVRTRNGYTF

SEQ ID NO: 603679 - protein, 15 aa, Homo sapiens
  CDR3 for alpha chain variable domain of TCR clone 301840 (TRAV12-3, TRAJ47)
CATSALVEYGNKLVF

SEQ ID NO: 603680 - protein, 16 aa, Homo sapiens
  CDR3 for beta chain variable domain of TCR clone 301840 (TRBV7-7, TRBJ2-1)
CASSLASGTSYNEQFF

SEQ ID NO: 603681 - protein, 12 aa, Homo sapiens
  CDR3 for alpha chain variable domain of TCR clone 301841 (TRAV27, TRAJ35)
CAGADFRNVLHC

SEQ ID NO: 603682 - protein, 16 aa, Homo sapiens
  CDR3 for beta chain variable domain of TCR clone 301841 (TRBV6-1, TRBJ2-1)
CASILRQGSSYNEQFF

SEQ ID NO: 603683 - protein, 14 aa, Homo sapiens
  CDR3 for alpha chain variable domain of TCR clone 301842 (TRAV3, TRAJ17)
CAVRDAAAGTKLTF

SEQ ID NO: 603684 - protein, 16 aa, Homo sapiens
  CDR3 for beta chain variable domain of TCR clone 301842 (TRBV20-1, TRBJ1-2)
CSASMGQGVANYGYTF

SEQ ID NO: 603685 - protein, 16 aa, Homo sapiens
  CDR3 for alpha chain variable domain of TCR clone 301843 (TRAV24, TRAJ53)
CAFNMGGGGSNYKLTF

SEQ ID NO: 603686 - protein, 13 aa, Homo sapiens
  CDR3 for beta chain variable domain of TCR clone 301843 (TRBV12-4, TRBJ2-7)
CASSPTETYEQYF

SEQ ID NO: 603687 - protein, 14 aa, Homo sapiens
  CDR3 for alpha chain variable domain of TCR clone 301844 (TRAV12-2, TRAJ13)
CAVKKTGGYQKVNF

SEQ ID NO: 603688 - protein, 15 aa, Homo sapiens
  CDR3 for beta chain variable domain of TCR clone 301844 (TRBV2, TRBJ2-7)
EDSAMYFCASSEQYF

SEQ ID NO: 603689 - protein, 19 aa, Homo sapiens
  CDR3 for alpha chain variable domain of TCR clone 301845 (TRAV3, TRAJ37)
CAVRDIVGGYPSNQGKLIF

SEQ ID NO: 603690 - protein, 14 aa, Homo sapiens
  CDR3 for beta chain variable domain of TCR clone 301845 (TRBV7-8, TRBJ2-3)
CASSLEAGTDTQYF

SEQ ID NO: 603691 - protein, 16 aa, Homo sapiens
  CDR3 for alpha chain variable domain of TCR clone 301846 (TRAV3, TRAJ18)
CAVRDGRGSTLGRLYF

SEQ ID NO: 603692 - protein, 17 aa, Homo sapiens
  CDR3 for beta chain variable domain of TCR clone 301846 (TRBV20-1, TRBJ2-1)
CSASSSGLAGSYNEQFF

SEQ ID NO: 603693 - protein, 14 aa, Homo sapiens
  CDR3 for alpha chain variable domain of TCR clone 301847 (TRAV12-3, TRAJ10)
SHLPLTGGGNKLTF

SEQ ID NO: 603694 - protein, 11 aa, Homo sapiens
  CDR3 for beta chain variable domain of TCR clone 301847 (TRBV11-2, TRBJ2-2)
CASSLTGELFF

SEQ ID NO: 603695 - protein, 12 aa, Homo sapiens
  CDR3 for alpha chain variable domain of TCR clone 301848 (TRAV10, TRAJ43)
CVVVRVGNDMRF

SEQ ID NO: 603696 - protein, 14 aa, Homo sapiens
  CDR3 for beta chain variable domain of TCR clone 301848 (TRBV6-1, TRBJ1-3)
CASVQGGGGNTIYF

SEQ ID NO: 603697 - protein, 17 aa, Homo sapiens
  CDR3 for alpha chain variable domain of TCR clone 301849 (TRAV13-1, TRAJ28)
CAASPPYSGAGSYQLTF

SEQ ID NO: 603698 - protein, 14 aa, Homo sapiens
  CDR3 for beta chain variable domain of TCR clone 301849 (TRBV20-1, TRBJ2-7)
CSAKRGRSSYEQYF

SEQ ID NO: 603699 - protein, 13 aa, Homo sapiens
  CDR3 for alpha chain variable domain of TCR clone 301850 (TRAV35, TRAJ27)
CAGQEGDAGKSTF

SEQ ID NO: 603700 - protein, 16 aa, Homo sapiens
  CDR3 for beta chain variable domain of TCR clone 301850 (TRBV7-2, TRBJ2-5)
CASSYKTGISLETQYS

SEQ ID NO: 603701 - protein, 10 aa, Homo sapiens
  CDR3 for alpha chain variable domain of TCR clone 301851 (TRAV29/DV5, TRAJ54)
LIQGAQKLVF

SEQ ID NO: 603702 - protein, 18 aa, Homo sapiens
  CDR3 for beta chain variable domain of TCR clone 301851 (TRBV3-1, TRBJ1-2)
CASSQDLIGWNGDYGYTF

SEQ ID NO: 603703 - protein, 12 aa, Homo sapiens
  CDR3 for alpha chain variable domain of TCR clone 301852 (TRAV35, TRAJ39)
LAPHNAGNMLTF

SEQ ID NO: 603704 - protein, 16 aa, Homo sapiens
  CDR3 for beta chain variable domain of TCR clone 301852 (TRBV2, TRBJ2-3)
CASSTSVEGVTDTQYF

SEQ ID NO: 603705 - protein, 14 aa, Homo sapiens
  CDR3 for alpha chain variable domain of TCR clone 301853 (TRAV12-3, TRAJ42)
CAMNYGGSQGNPIF

SEQ ID NO: 603706 - protein, 15 aa, Homo sapiens
  CDR3 for beta chain variable domain of TCR clone 301853 (TRBV11-2, TRBJ2-2)
CASSSDRVNAGELFF

SEQ ID NO: 603707 - protein, 13 aa, Homo sapiens
  CDR3 for alpha chain variable domain of TCR clone 301854 (TRAV38-1, TRAJ42)
CARWGGSQGNLIF

SEQ ID NO: 603708 - protein, 17 aa, Homo sapiens
  CDR3 for beta chain variable domain of TCR clone 301854 (TRBV20-1, TRBJ2-1)
CSARDPLAGVWDNEPFF

SEQ ID NO: 603709 - protein, 17 aa, Homo sapiens
  CDR3 for alpha chain variable domain of TCR clone 301855 (TRAV1-2, TRAJ9)
CLLPLCCLKYWRLKTIF

SEQ ID NO: 603710 - protein, 13 aa, Homo sapiens
  CDR3 for beta chain variable domain of TCR clone 301855 (TRBV19, TRBJ1-2)
CASSVPGQDGYTV

SEQ ID NO: 603711 - protein, 16 aa, Homo sapiens
  CDR3 for alpha chain variable domain of TCR clone 301856 (TRAV30, TRAJ24)
CGTEIVDADSWGQFQF

SEQ ID NO: 603712 - protein, 13 aa, Homo sapiens
  CDR3 for beta chain variable domain of TCR clone 301856 (TRBV20-1, TRBJ1-1)
CSAPPGGHTEAFF

SEQ ID NO: 603713 - protein, 15 aa, Homo sapiens
  CDR3 for alpha chain variable domain of TCR clone 301857 (TRAV2, TRAJ9)
CAVAALNTGGFKTIF

SEQ ID NO: 603714 - protein, 13 aa, Homo sapiens
  CDR3 for beta chain variable domain of TCR clone 301857 (TRBV7-3, TRBJ1-1)
CASSQDWGAEAFF

SEQ ID NO: 603715 - protein, 17 aa, Homo sapiens
  CDR3 for alpha chain variable domain of TCR clone 301858 (TRAV8-6, TRAJ58)
CAVSSWVGETSGSRLTF

SEQ ID NO: 603716 - protein, 15 aa, Homo sapiens
  CDR3 for beta chain variable domain of TCR clone 301858 (TRBV5-1, TRBJ2-1)
CASSPPRAPYNEQFL

SEQ ID NO: 603717 - protein, 12 aa, Homo sapiens
  CDR3 for alpha chain variable domain of TCR clone 301859 (TRAV12-3, TRAJ17)
CAMTLTGNKLTF

SEQ ID NO: 603718 - protein, 14 aa, Homo sapiens
  CDR3 for beta chain variable domain of TCR clone 301859 (TRBV7-6, TRBJ1-6)
CASSQAGGGSPLHF

SEQ ID NO: 603719 - protein, 13 aa, Homo sapiens
  CDR3 for alpha chain variable domain of TCR clone 301860 (TRAV21, TRAJ27)
CAARPGNAGKSTF

SEQ ID NO: 603720 - protein, 11 aa, Homo sapiens
  CDR3 for beta chain variable domain of TCR clone 301860 (TRBV19, TRBJ1-1)
CASSIGSEAFF

SEQ ID NO: 603721 - protein, 15 aa, Homo sapiens
  CDR3 for alpha chain variable domain of TCR clone 301861 (TRAV3, TRAJ22)
CAVRDRGGSARQLTF

SEQ ID NO: 603722 - protein, 20 aa, Homo sapiens
  CDR3 for beta chain variable domain of TCR clone 301861 (TRBV11-2, TRBJ1-6)
CASSLVFATGGSARPSTLGT

SEQ ID NO: 603723 - protein, 15 aa, Homo sapiens
  CDR3 for alpha chain variable domain of TCR clone 301862 (TRAV3, TRAJ17)
CAVRNTGAAGNKLTF

SEQ ID NO: 603724 - protein, 14 aa, Homo sapiens
  CDR3 for beta chain variable domain of TCR clone 301862 (TRBV6-3, TRBJ1-1)
CASSNLLPGAEAFF

SEQ ID NO: 603725 - protein, 15 aa, Homo sapiens
  CDR3 for alpha chain variable domain of TCR clone 301863 (TRAV38-1, TRAJ37)
CAFIHGSGNTGKLIF

SEQ ID NO: 603726 - protein, 14 aa, Homo sapiens
  CDR3 for beta chain variable domain of TCR clone 301863 (TRBV29-1, TRBJ2-7)
CSVETSGSGETQYF

SEQ ID NO: 603727 - protein, 13 aa, Homo sapiens
  CDR3 for alpha chain variable domain of TCR clone 301864 (TRAV12-3, TRAJ30)
CAMSAKWDDKIIF

SEQ ID NO: 603728 - protein, 15 aa, Homo sapiens
  CDR3 for beta chain variable domain of TCR clone 301864 (TRBV4-2, TRBJ2-7)
CASSQDVTSGYEQYF

SEQ ID NO: 603729 - protein, 11 aa, Homo sapiens
  CDR3 for alpha chain variable domain of TCR clone 301865 (TRAV21, TRAJ48)
CAVDGNEKLTF

SEQ ID NO: 603730 - protein, 16 aa, Homo sapiens
  CDR3 for beta chain variable domain of TCR clone 301865 (TRBV12-4, TRBJ1-5)
CASSSGPRGSNQPQNF

SEQ ID NO: 603731 - protein, 15 aa, Homo sapiens
  CDR3 for alpha chain variable domain of TCR clone 301866 (TRAV26-1, TRAJ22)
CIVRVSFWFCKATDL

SEQ ID NO: 603732 - protein, 13 aa, Homo sapiens
  CDR3 for beta chain variable domain of TCR clone 301866 (TRBV7-9, TRBJ1-2)
CASNVKQNYGYTF

SEQ ID NO: 603733 - protein, 14 aa, Homo sapiens
  CDR3 for alpha chain variable domain of TCR clone 301867 (TRAV8-3, TRAJ40)
CAVGVISGTYKYIF

SEQ ID NO: 603734 - protein, 13 aa, Homo sapiens
  CDR3 for beta chain variable domain of TCR clone 301867 (TRBV12-4, TRBJ2-5)
CASRLAVQETQYF

SEQ ID NO: 603735 - protein, 13 aa, Homo sapiens
  CDR3 for alpha chain variable domain of TCR clone 301868 (TRAV21, TRAJ27)
CAARPGNAGKSTF

SEQ ID NO: 603736 - protein, 16 aa, Homo sapiens
  CDR3 for beta chain variable domain of TCR clone 301868 (TRBV7-2, TRBJ1-3)
CASSSGRVLSGNTIYF

SEQ ID NO: 603737 - protein, 14 aa, Homo sapiens
  CDR3 for alpha chain variable domain of TCR clone 301869 (TRAV4, TRAJ20)
CLVGRRSNDDKLSF

SEQ ID NO: 603738 - protein, 18 aa, Homo sapiens
  CDR3 for beta chain variable domain of TCR clone 301869 (TRBV2, TRBJ2-5)
CASSGDPQGRGAQETQYF

SEQ ID NO: 603739 - protein, 19 aa, Homo sapiens
  CDR3 for alpha chain variable domain of TCR clone 301870 (TRAV2, TRAJ20)
ILQVREADAAVYRDCKLSF

SEQ ID NO: 603740 - protein, 15 aa, Homo sapiens
  CDR3 for beta chain variable domain of TCR clone 301870 (TRBV7-2, TRBJ1-2)
CASSITWTGNYGYTF

SEQ ID NO: 603741 - protein, 12 aa, Homo sapiens
  CDR3 for alpha chain variable domain of TCR clone 301871 (TRAV12-2, TRAJ31)
CAVNTPDARLSF

SEQ ID NO: 603742 - protein, 15 aa, Homo sapiens
  CDR3 for beta chain variable domain of TCR clone 301871 (TRBV20-1, TRBJ2-7)
CSAESGTSGAYEQYF

SEQ ID NO: 603743 - protein, 14 aa, Homo sapiens
  CDR3 for alpha chain variable domain of TCR clone 301872 (TRAV26-1, TRAJ38)
CIADNAGTNRKLIW

SEQ ID NO: 603744 - protein, 15 aa, Homo sapiens
  CDR3 for beta chain variable domain of TCR clone 301872 (TRBV9, TRBJ2-1)
CASSLAGSSYNEQFF

SEQ ID NO: 603745 - protein, 13 aa, Homo sapiens
  CDR3 for alpha chain variable domain of TCR clone 301873 (TRAV20, TRAJ37)
CAGCSSNTGKLIF

SEQ ID NO: 603746 - protein, 16 aa, Homo sapiens
  CDR3 for beta chain variable domain of TCR clone 301873 (TRBV10-3, TRBJ2-7)
CAISADFADRPYEQYF

SEQ ID NO: 603747 - protein, 12 aa, Homo sapiens
  CDR3 for alpha chain variable domain of TCR clone 301874 (TRAV29/DV5, TRAJ34)
CAARHNTDKLIF

SEQ ID NO: 603748 - protein, 14 aa, Homo sapiens
  CDR3 for beta chain variable domain of TCR clone 301874 (TRBV7-2, TRBJ1-5)
CASSTQGAGQHQHF

SEQ ID NO: 603749 - protein, 14 aa, Homo sapiens
  CDR3 for alpha chain variable domain of TCR clone 301875 (TRAV3, TRAJ9)
CAVRGNTGGFKTIF

SEQ ID NO: 603750 - protein, 14 aa, Homo sapiens
  CDR3 for beta chain variable domain of TCR clone 301875 (TRBV15, TRBJ2-1)
CATSGVEDYTEQFF

SEQ ID NO: 603751 - protein, 14 aa, Homo sapiens
  CDR3 for alpha chain variable domain of TCR clone 301876 (TRAV3, TRAJ9)
CDVRLNTGGFKTIF

SEQ ID NO: 603752 - protein, 15 aa, Homo sapiens
  CDR3 for beta chain variable domain of TCR clone 301876 (TRBV7-2, TRBJ2-1)
CASSLASGRVNEQSF

SEQ ID NO: 603753 - protein, 16 aa, Homo sapiens
  CDR3 for alpha chain variable domain of TCR clone 301877 (TRAV4, TRAJ5)
CLVGPHHGHGQESTYF

SEQ ID NO: 603754 - protein, 15 aa, Homo sapiens
  CDR3 for beta chain variable domain of TCR clone 301877 (TRBV27, TRBJ2-5)
CASSLIPSGGETQYF

SEQ ID NO: 603755 - protein, 13 aa, Homo sapiens
  CDR3 for alpha chain variable domain of TCR clone 301878 (TRAV12-3, TRAJ13)
CAMTSGGFQKVTF

SEQ ID NO: 603756 - protein, 13 aa, Homo sapiens
  CDR3 for beta chain variable domain of TCR clone 301878 (TRBV7-9, TRBJ1-2)
CASSLKQNYGYTF

SEQ ID NO: 603757 - protein, 14 aa, Homo sapiens
  CDR3 for alpha chain variable domain of TCR clone 301879 (TRAV12-1, TRAJ45)
CVLNIGGGADGLTF

SEQ ID NO: 603758 - protein, 15 aa, Homo sapiens
  CDR3 for beta chain variable domain of TCR clone 301879 (TRBV7-2, TRBJ2-7)
CASSLKGALTYEQYF

SEQ ID NO: 603759 - protein, 15 aa, Homo sapiens
  CDR3 for alpha chain variable domain of TCR clone 301880 (TRAV8-4, TRAJ37)
CAVTYGSSSTGKLIF

SEQ ID NO: 603760 - protein, 18 aa, Homo sapiens
  CDR3 for beta chain variable domain of TCR clone 301880 (TRBV11-2, TRBJ2-3)
CASSLGGASRGAPNTQYF

SEQ ID NO: 603761 - protein, 12 aa, Homo sapiens
  CDR3 for alpha chain variable domain of TCR clone 301881 (TRAV12-1, TRAJ40)
CVVYSGTYKYIF

SEQ ID NO: 603762 - protein, 15 aa, Homo sapiens
  CDR3 for beta chain variable domain of TCR clone 301881 (TRBV7-9, TRBJ1-6)
CASSSPGRGNSPVHF

SEQ ID NO: 603763 - protein, 15 aa, Homo sapiens
  CDR3 for alpha chain variable domain of TCR clone 301882 (TRAV26-1, TRAJ17)
CIVRVVKAAGNKLTF

SEQ ID NO: 603764 - protein, 16 aa, Homo sapiens
  CDR3 for beta chain variable domain of TCR clone 301882 (TRBV7-9, TRBJ2-1)
CASSVVSGPSYNEQFF

SEQ ID NO: 603765 - protein, 17 aa, Homo sapiens
  CDR3 for alpha chain variable domain of TCR clone 301883 (TRAV36/DV7, TRAJ52)
CAVAQRAGGTSYGKLTF

SEQ ID NO: 603766 - protein, 13 aa, Homo sapiens
  CDR3 for beta chain variable domain of TCR clone 301883 (TRBV7-2, TRBJ2-7)
CASSSPSWSEQYF

SEQ ID NO: 603767 - protein, 17 aa, Homo sapiens
  CDR3 for alpha chain variable domain of TCR clone 301884 (TRAV3, TRAJ42)
CAVRGRDYGGSQGNLTF

SEQ ID NO: 603768 - protein, 15 aa, Homo sapiens
  CDR3 for beta chain variable domain of TCR clone 301884 (TRBV6-6, TRBJ2-7)
CASSYSYGGSYEQYF

SEQ ID NO: 603769 - protein, 22 aa, Homo sapiens
  CDR3 for alpha chain variable domain of TCR clone 301885 (TRAV2, TRAJ38)
CAVEDFPNAGNNHIQNPDPAVY

SEQ ID NO: 603770 - protein, 14 aa, Homo sapiens
  CDR3 for beta chain variable domain of TCR clone 301885 (TRBV29-1, TRBJ1-4)
CSVSGQQGGEKLFF

SEQ ID NO: 603771 - protein, 13 aa, Homo sapiens
  CDR3 for alpha chain variable domain of TCR clone 301886 (TRAV35, TRAJ42)
CAGFPGSQGNLMF

SEQ ID NO: 603772 - protein, 17 aa, Homo sapiens
  CDR3 for beta chain variable domain of TCR clone 301886 (TRBV7-3, TRBJ2-3)
CASSLMKRMRGADTQYF

SEQ ID NO: 603773 - protein, 14 aa, Homo sapiens
  CDR3 for alpha chain variable domain of TCR clone 301887 (TRAV12-3, TRAJ10)
SHLPLTGGGNKLTF

SEQ ID NO: 603774 - protein, 17 aa, Homo sapiens
  CDR3 for beta chain variable domain of TCR clone 301887 (TRBV2, TRBJ2-1)
CASSEVREGGSYSEQFF

SEQ ID NO: 603775 - protein, 14 aa, Homo sapiens
  CDR3 for alpha chain variable domain of TCR clone 301888 (TRAV12-2, TRAJ9)
CAVNMEGGGFKNIF

SEQ ID NO: 603776 - protein, 14 aa, Homo sapiens
  CDR3 for beta chain variable domain of TCR clone 301888 (TRBV27, TRBJ2-3)
CASRKGGRTDTQYL

SEQ ID NO: 603777 - protein, 15 aa, Homo sapiens
  CDR3 for alpha chain variable domain of TCR clone 301889 (TRAV17, TRAJ17)
CATDASIIRRQQANF

SEQ ID NO: 603778 - protein, 12 aa, Homo sapiens
  CDR3 for beta chain variable domain of TCR clone 301889 (TRBV5-4, TRBJ2-5)
CASSSIRESQYF

SEQ ID NO: 603779 - protein, 14 aa, Homo sapiens
  CDR3 for alpha chain variable domain of TCR clone 301890 (TRAV1-2, TRAJ16)
CAVNRFSDGQKLLF

SEQ ID NO: 603780 - protein, 14 aa, Homo sapiens
  CDR3 for beta chain variable domain of TCR clone 301890 (TRBV7-9, TRBJ1-4)
CAITEVEANEKLFF

SEQ ID NO: 603781 - protein, 13 aa, Homo sapiens
  CDR3 for alpha chain variable domain of TCR clone 301891 (TRAV8-3, TRAJ44)
CAVVPGTASKLTF

SEQ ID NO: 603782 - protein, 14 aa, Homo sapiens
  CDR3 for beta chain variable domain of TCR clone 301891 (TRBV7-6, TRBJ2-3)
CASSLGTVTDTQYF

SEQ ID NO: 603783 - protein, 14 aa, Homo sapiens
  CDR3 for alpha chain variable domain of TCR clone 301892 (TRAV1-2, TRAJ8)
CAVREDTGFQKLVF

SEQ ID NO: 603784 - protein, 15 aa, Homo sapiens
  CDR3 for beta chain variable domain of TCR clone 301892 (TRBV27, TRBJ1-1)
CASSPYADPYTEAFF

SEQ ID NO: 603785 - protein, 15 aa, Homo sapiens
  CDR3 for alpha chain variable domain of TCR clone 301893 (TRAV25, TRAJ52)
CAGTSGGTSYGKLTF

SEQ ID NO: 603786 - protein, 13 aa, Homo sapiens
  CDR3 for beta chain variable domain of TCR clone 301893 (TRBV6-5, TRBJ2-5)
CAISPQGGETQYF

SEQ ID NO: 603787 - protein, 10 aa, Homo sapiens
  CDR3 for alpha chain variable domain of TCR clone 301894 (TRAV26-1, TRAJ40)
CIAGTYKYIF

SEQ ID NO: 603788 - protein, 12 aa, Homo sapiens
  CDR3 for beta chain variable domain of TCR clone 301894 (TRBV29-1, TRBJ2-3)
CSVTGGADTQYF

SEQ ID NO: 603789 - protein, 13 aa, Homo sapiens
  CDR3 for alpha chain variable domain of TCR clone 301895 (TRAV17, TRAJ4)
CATKSGGYNKLIF

SEQ ID NO: 603790 - protein, 20 aa, Homo sapiens
  CDR3 for beta chain variable domain of TCR clone 301895 (TRBV7-8, TRBJ2-2)
CASSHLFPGPTIHITGELFF

SEQ ID NO: 603791 - protein, 14 aa, Homo sapiens
  CDR3 for alpha chain variable domain of TCR clone 301896 (TRAV1-2, TRAJ16)
CAVNRFSDGQKLLF

SEQ ID NO: 603792 - protein, 16 aa, Homo sapiens
  CDR3 for beta chain variable domain of TCR clone 301896 (TRBV19, TRBJ1-5)
CASSIDRGGPRQPQHF

SEQ ID NO: 603793 - protein, 17 aa, Homo sapiens
  CDR3 for alpha chain variable domain of TCR clone 301897 (TRAV1-2, TRAJ8)
CAVRDPDENTGFQKLVF

SEQ ID NO: 603794 - protein, 16 aa, Homo sapiens
  CDR3 for beta chain variable domain of TCR clone 301897 (TRBV7-9, TRBJ2-2)
CASSSFGGANTGELFF

SEQ ID NO: 603795 - protein, 14 aa, Homo sapiens
  CDR3 for alpha chain variable domain of TCR clone 301898 (TRAV12-2, TRAJ24)
CAVTPADSWGKLQF

SEQ ID NO: 603796 - protein, 14 aa, Homo sapiens
  CDR3 for beta chain variable domain of TCR clone 301898 (TRBV4-1, TRBJ1-5)
CASSQGPTNQPQHF

SEQ ID NO: 603797 - protein, 15 aa, Homo sapiens
  CDR3 for alpha chain variable domain of TCR clone 301899 (TRAV26-1, TRAJ44)
CIVRANIATASKLTF

SEQ ID NO: 603798 - protein, 12 aa, Homo sapiens
  CDR3 for beta chain variable domain of TCR clone 301899 (TRBV2, TRBJ2-1)
GRGLPSYNEQFF

SEQ ID NO: 603799 - protein, 15 aa, Homo sapiens
  CDR3 for alpha chain variable domain of TCR clone 301900 (TRAV3, TRAJ13)
CAVRVYSGGYQKVTF

SEQ ID NO: 603800 - protein, 19 aa, Homo sapiens
  CDR3 for beta chain variable domain of TCR clone 301900 (TRBV28, TRBJ2-1)
CARSFSIRGSGRTRYEQFF

SEQ ID NO: 603801 - protein, 20 aa, Homo sapiens
  CDR3 for alpha chain variable domain of TCR clone 301901 (TRAV12-1, TRAJ42)
SSVIQPPTSVKGGSQGNLIF

SEQ ID NO: 603802 - protein, 15 aa, Homo sapiens
  CDR3 for beta chain variable domain of TCR clone 301901 (TRBV3-1, TRBJ2-7)
CASSQVRQGAYEQYF

SEQ ID NO: 603803 - protein, 10 aa, Homo sapiens
  CDR3 for alpha chain variable domain of TCR clone 301902 (TRAV12-3, TRAJ49)
CAMNDDQFYF

SEQ ID NO: 603804 - protein, 16 aa, Homo sapiens
  CDR3 for beta chain variable domain of TCR clone 301902 (TRBV7-9, TRBJ2-5)
CASRLEIGTRKETQYF

SEQ ID NO: 603805 - protein, 14 aa, Homo sapiens
  CDR3 for alpha chain variable domain of TCR clone 301903 (TRAV2, TRAJ37)
CAVDFTSDTAKLIF

SEQ ID NO: 603806 - protein, 15 aa, Homo sapiens
  CDR3 for beta chain variable domain of TCR clone 301903 (TRBV20-1, TRBJ1-1)
CSASRGVTGNTEAFF

SEQ ID NO: 603807 - protein, 15 aa, Homo sapiens
  CDR3 for alpha chain variable domain of TCR clone 301904 (TRAV8-4, TRAJ7)
CAVSGGNYGNNRLGF

SEQ ID NO: 603808 - protein, 11 aa, Homo sapiens
  CDR3 for beta chain variable domain of TCR clone 301904 (TRBV20-1, TRBJ2-1)
CSLSSGSEQFF

SEQ ID NO: 603809 - protein, 19 aa, Homo sapiens
  CDR3 for alpha chain variable domain of TCR clone 301905 (TRAV2, TRAJ20)
ILQVREADAAVYRDCKLSF

SEQ ID NO: 603810 - protein, 14 aa, Homo sapiens
  CDR3 for beta chain variable domain of TCR clone 301905 (TRBV5-1, TRBJ2-5)
CASSFWGAQETQYF

SEQ ID NO: 603811 - protein, 16 aa, Homo sapiens
  CDR3 for alpha chain variable domain of TCR clone 301906 (TRAV3, TRAJ42)
CAVRDIEGGSQGNLIF

SEQ ID NO: 603812 - protein, 14 aa, Homo sapiens
  CDR3 for beta chain variable domain of TCR clone 301906 (TRBV11-2, TRBJ1-2)
CASSLYRGNYGYTF

SEQ ID NO: 603813 - protein, 12 aa, Homo sapiens
  CDR3 for alpha chain variable domain of TCR clone 301907 (TRAV27, TRAJ41)
CAGRNSGYARNF

SEQ ID NO: 603814 - protein, 15 aa, Homo sapiens
  CDR3 for beta chain variable domain of TCR clone 301907 (TRBV20-1, TRBJ1-5)
CSATSDRGLGQPQHF

SEQ ID NO: 603815 - protein, 14 aa, Homo sapiens
  CDR3 for alpha chain variable domain of TCR clone 301908 (TRAV1-1, TRAJ21)
CAVRTSRNFNKFYF

SEQ ID NO: 603816 - protein, 14 aa, Homo sapiens
  CDR3 for beta chain variable domain of TCR clone 301908 (TRBV7-3, TRBJ1-1)
CASSLKGGNTEAFF

SEQ ID NO: 603817 - protein, 16 aa, Homo sapiens
  CDR3 for alpha chain variable domain of TCR clone 301909 (TRAV1-2, TRAJ10)
CAVRGVLTGGGNKLTF

SEQ ID NO: 603818 - protein, 16 aa, Homo sapiens
  CDR3 for beta chain variable domain of TCR clone 301909 (TRBV27, TRBJ2-2)
CASSSSGVSNTGELFF

SEQ ID NO: 603819 - protein, 15 aa, Homo sapiens
  CDR3 for alpha chain variable domain of TCR clone 301910 (TRAV21, TRAJ40)
CAVRRQTSGTYKYIF

SEQ ID NO: 603820 - protein, 13 aa, Homo sapiens
  CDR3 for beta chain variable domain of TCR clone 301910 (TRBV7-2, TRBJ2-2)
CASSSVRAGELFF

SEQ ID NO: 603821 - protein, 14 aa, Homo sapiens
  CDR3 for alpha chain variable domain of TCR clone 301911 (TRAV38-2/DV8, TRAJ57)
CAFMNTGGSEKLVF

SEQ ID NO: 603822 - protein, 12 aa, Homo sapiens
  CDR3 for beta chain variable domain of TCR clone 301911 (TRBV20-1, TRBJ1-5)
CSTSQGNQPQHF

SEQ ID NO: 603823 - protein, 14 aa, Homo sapiens
  CDR3 for alpha chain variable domain of TCR clone 301912 (TRAV26-1, TRAJ39)
CIVRGSRAGNMLTF

SEQ ID NO: 603824 - protein, 14 aa, Homo sapiens
  CDR3 for beta chain variable domain of TCR clone 301912 (TRBV11-2, TRBJ2-3)
CASSLGGGANTQYF

SEQ ID NO: 603825 - protein, 10 aa, Homo sapiens
  CDR3 for alpha chain variable domain of TCR clone 301913 (TRAV30, TRAJ48)
CGIGNEKLTF

SEQ ID NO: 603826 - protein, 15 aa, Homo sapiens
  CDR3 for beta chain variable domain of TCR clone 301913 (TRBV19, TRBJ2-1)
CASSIGPLEGNEQFF

SEQ ID NO: 603827 - protein, 12 aa, Homo sapiens
  CDR3 for alpha chain variable domain of TCR clone 301914 (TRAV2, TRAJ26)
CAGSPGRLWAEF

SEQ ID NO: 603828 - protein, 13 aa, Homo sapiens
  CDR3 for beta chain variable domain of TCR clone 301914 (TRBV7-9, TRBJ1-2)
CASSLKQNYGYTF

SEQ ID NO: 603829 - protein, 14 aa, Homo sapiens
  CDR3 for alpha chain variable domain of TCR clone 301915 (TRAV26-1, TRAJ45)
CIEVTGGGADGLTF

SEQ ID NO: 603830 - protein, 16 aa, Homo sapiens
  CDR3 for beta chain variable domain of TCR clone 301915 (TRBV6-1, TRBJ1-3)
CASVQGGVETPYILER

SEQ ID NO: 603831 - protein, 13 aa, Homo sapiens
  CDR3 for alpha chain variable domain of TCR clone 301916 (TRAV27, TRAJ56)
CAGKPGANSKLTF

SEQ ID NO: 603832 - protein, 14 aa, Homo sapiens
  CDR3 for beta chain variable domain of TCR clone 301916 (TRBV19, TRBJ2-1)
CASPAFVLSGEQFF

SEQ ID NO: 603833 - protein, 15 aa, Homo sapiens
  CDR3 for alpha chain variable domain of TCR clone 301917 (TRAV8-3, TRAJ27)
CAVGPSKTNAGKSTF

SEQ ID NO: 603834 - protein, 12 aa, Homo sapiens
  CDR3 for beta chain variable domain of TCR clone 301917 (TRBV19, TRBJ2-1)
CASSPGTGRQFF

SEQ ID NO: 603835 - protein, 14 aa, Homo sapiens
  CDR3 for alpha chain variable domain of TCR clone 301918 (TRAV12-1, TRAJ15)
CLPPANQAGTALIF

SEQ ID NO: 603836 - protein, 11 aa, Homo sapiens
  CDR3 for beta chain variable domain of TCR clone 301918 (TRBV29-1, TRBJ2-5)
CSEDRTGTQYF

SEQ ID NO: 603837 - protein, 13 aa, Homo sapiens
  CDR3 for alpha chain variable domain of TCR clone 301919 (TRAV21, TRAJ37)
CAVSSGNTGKLIF

SEQ ID NO: 603838 - protein, 13 aa, Homo sapiens
  CDR3 for beta chain variable domain of TCR clone 301919 (TRBV7-3, TRBJ1-1)
CASSQDWGAEAFF

SEQ ID NO: 603839 - protein, 13 aa, Homo sapiens
  CDR3 for alpha chain variable domain of TCR clone 301920 (TRAV12-3, TRAJ7)
CAMSASGNNRLAF

SEQ ID NO: 603840 - protein, 20 aa, Homo sapiens
  CDR3 for beta chain variable domain of TCR clone 301920 (TRBV7-8, TRBJ2-2)
CASSHLFPGPTIHITGELFF

SEQ ID NO: 603841 - protein, 14 aa, Homo sapiens
  CDR3 for alpha chain variable domain of TCR clone 301921 (TRAV3, TRAJ34)
CAVRAPGNTDKLIF

SEQ ID NO: 603842 - protein, 17 aa, Homo sapiens
  CDR3 for beta chain variable domain of TCR clone 301921 (TRBV20-1, TRBJ2-7)
CSAAPGLARGISYERYF

SEQ ID NO: 603843 - protein, 11 aa, Homo sapiens
  CDR3 for alpha chain variable domain of TCR clone 301922 (TRAV26-1, TRAJ37)
CIVRVGRKLIF

SEQ ID NO: 603844 - protein, 19 aa, Homo sapiens
  CDR3 for beta chain variable domain of TCR clone 301922 (TRBV19, TRBJ2-5)
CASSIGQVTDFFLGETQYF

SEQ ID NO: 603845 - protein, 15 aa, Homo sapiens
  CDR3 for alpha chain variable domain of TCR clone 301923 (TRAV1-2, TRAJ28)
CAVQYSGAGSYQLTF

SEQ ID NO: 603846 - protein, 13 aa, Homo sapiens
  CDR3 for beta chain variable domain of TCR clone 301923 (TRBV4-2, TRBJ1-1)
CASSQAGNTEAVF

SEQ ID NO: 603847 - protein, 12 aa, Homo sapiens
  CDR3 for alpha chain variable domain of TCR clone 301924 (TRAV12-3, TRAJ20)
CAMVRGDYKLSF

SEQ ID NO: 603848 - protein, 17 aa, Homo sapiens
  CDR3 for beta chain variable domain of TCR clone 301924 (TRBV11-2, TRBJ2-1)
CASSLYPPGVEYNEQFF

SEQ ID NO: 603849 - protein, 13 aa, Homo sapiens
  CDR3 for alpha chain variable domain of TCR clone 301925 (TRAV38-2/DV8, TRAJ30)
CAYRSARDDKIIF

SEQ ID NO: 603850 - protein, 14 aa, Homo sapiens
  CDR3 for beta chain variable domain of TCR clone 301925 (TRBV7-9, TRBJ2-1)
CASSIRQGWDQQFF

SEQ ID NO: 603851 - protein, 12 aa, Homo sapiens
  CDR3 for alpha chain variable domain of TCR clone 301926 (TRAV1-2, TRAJ24)
CAVGGGWGKFQF

SEQ ID NO: 603852 - protein, 15 aa, Homo sapiens
  CDR3 for beta chain variable domain of TCR clone 301926 (TRBV6-1, TRBJ2-7)
CASSEGVGNPYEQYF

SEQ ID NO: 603853 - protein, 14 aa, Homo sapiens
  CDR3 for alpha chain variable domain of TCR clone 301927 (TRAV8-4, TRAJ11)
CAVSLNSGYSTLTF

SEQ ID NO: 603854 - protein, 14 aa, Homo sapiens
  CDR3 for beta chain variable domain of TCR clone 301927 (TRBV12-5, TRBJ2-5)
CASGSRTHQETQYF

SEQ ID NO: 603855 - protein, 18 aa, Homo sapiens
  CDR3 for alpha chain variable domain of TCR clone 301928 (TRAV13-1, TRAJ52)
CEASKRSAGGTSYGKLTF

SEQ ID NO: 603856 - protein, 13 aa, Homo sapiens
  CDR3 for beta chain variable domain of TCR clone 301928 (TRBV12-4, TRBJ1-2)
CASSLRQGKGYAF

SEQ ID NO: 603857 - protein, 13 aa, Homo sapiens
  CDR3 for alpha chain variable domain of TCR clone 301929 (TRAV8-2, TRAJ49)
CVVTPNPGNQFYF

SEQ ID NO: 603858 - protein, 15 aa, Homo sapiens
  CDR3 for beta chain variable domain of TCR clone 301929 (TRBV11-2, TRBJ2-1)
CASSLTSGGYNEQFF

SEQ ID NO: 603859 - protein, 16 aa, Homo sapiens
  CDR3 for alpha chain variable domain of TCR clone 301930 (TRAV30, TRAJ24)
CGTEIVDADSWGKFQF

SEQ ID NO: 603860 - protein, 14 aa, Homo sapiens
  CDR3 for beta chain variable domain of TCR clone 301930 (TRBV19, TRBJ1-5)
CASGTEVYNQPQHF

SEQ ID NO: 603861 - protein, 17 aa, Homo sapiens
  CDR3 for alpha chain variable domain of TCR clone 301931 (TRAV26-1, TRAJ47)
CIVPSLLYMEYGNKLAC

SEQ ID NO: 603862 - protein, 14 aa, Homo sapiens
  CDR3 for beta chain variable domain of TCR clone 301931 (TRBV7-3, TRBJ1-5)
RASSFSGCNQPQHF

SEQ ID NO: 603863 - protein, 13 aa, Homo sapiens
  CDR3 for alpha chain variable domain of TCR clone 301932 (TRAV12-1, TRAJ16)
CVVNGPDGQKLLV

SEQ ID NO: 603864 - protein, 13 aa, Homo sapiens
  CDR3 for beta chain variable domain of TCR clone 301932 (TRBV2, TRBJ1-1)
CARNPTGGFHAFF

SEQ ID NO: 603865 - protein, 14 aa, Homo sapiens
  CDR3 for alpha chain variable domain of TCR clone 301933 (TRAV9-2, TRAJ39)
CALYIYNAGNIPTF

SEQ ID NO: 603866 - protein, 15 aa, Homo sapiens
  CDR3 for beta chain variable domain of TCR clone 301933 (TRBV27, TRBJ1-6)
CASSFDRGLGSPLHF

SEQ ID NO: 603867 - protein, 16 aa, Homo sapiens
  CDR3 for alpha chain variable domain of TCR clone 301934 (TRAV12-2, TRAJ28)
CAGLTDSGAGSYQLTF

SEQ ID NO: 603868 - protein, 14 aa, Homo sapiens
  CDR3 for beta chain variable domain of TCR clone 301934 (TRBV25-1, TRBJ1-1)
CASTHLGGNTEAFF

SEQ ID NO: 603869 - protein, 14 aa, Homo sapiens
  CDR3 for alpha chain variable domain of TCR clone 301935 (TRAV2, TRAJ9)
CAVEDRSGGFKTIF

SEQ ID NO: 603870 - protein, 13 aa, Homo sapiens
  CDR3 for beta chain variable domain of TCR clone 301935 (TRBV7-3, TRBJ2-5)
CASSLRGGETQYF

SEQ ID NO: 603871 - protein, 13 aa, Homo sapiens
  CDR3 for alpha chain variable domain of TCR clone 301936 (TRAV2, TRAJ40)
CAVVTSGTYKYIF

SEQ ID NO: 603872 - protein, 13 aa, Homo sapiens
  CDR3 for beta chain variable domain of TCR clone 301936 (TRBV19, TRBJ1-3)
CASRLSLGNTIYF

SEQ ID NO: 603873 - protein, 14 aa, Homo sapiens
  CDR3 for alpha chain variable domain of TCR clone 301937 (TRAV26-1, TRAJ39)
CIVRANNAGNMLTF

SEQ ID NO: 603874 - protein, 15 aa, Homo sapiens
  CDR3 for beta chain variable domain of TCR clone 301937 (TRBV28, TRBJ1-2)
CASSLMGGRRDGYSF

SEQ ID NO: 603875 - protein, 14 aa, Homo sapiens
  CDR3 for alpha chain variable domain of TCR clone 301938 (TRAV8-4, TRAJ9)
CAVRINTGGFKTIF

SEQ ID NO: 603876 - protein, 15 aa, Homo sapiens
  CDR3 for beta chain variable domain of TCR clone 301938 (TRBV6-1, TRBJ2-3)
CASSERGGITDTQYF

SEQ ID NO: 603877 - protein, 13 aa, Homo sapiens
  CDR3 for alpha chain variable domain of TCR clone 301939 (TRAV13-1, TRAJ39)
CSKYSNAGNMLTF

SEQ ID NO: 603878 - protein, 17 aa, Homo sapiens
  CDR3 for beta chain variable domain of TCR clone 301939 (TRBV19, TRBJ2-7)
CASSISFYDSYPYEQYF

SEQ ID NO: 603879 - protein, 21 aa, Homo sapiens
  CDR3 for alpha chain variable domain of TCR clone 301940 (TRAV12-1, TRAJ32)
SSVIQPPASMNYGGATNKLIF

SEQ ID NO: 603880 - protein, 15 aa, Homo sapiens
  CDR3 for beta chain variable domain of TCR clone 301940 (TRBV7-9, TRBJ2-2)
CASGPLDTFPGELFF

SEQ ID NO: 603881 - protein, 13 aa, Homo sapiens
  CDR3 for alpha chain variable domain of TCR clone 301941 (TRAV30, TRAJ24)
CGTVTASWGTLQF

SEQ ID NO: 603882 - protein, 15 aa, Homo sapiens
  CDR3 for beta chain variable domain of TCR clone 301941 (TRBV25-1, TRBJ1-4)
CASSPGDSTNEKLFF

SEQ ID NO: 603883 - protein, 15 aa, Homo sapiens
  CDR3 for alpha chain variable domain of TCR clone 301942 (TRAV12-1, TRAJ44)
CVVFVNTGTASKLTF

SEQ ID NO: 603884 - protein, 12 aa, Homo sapiens
  CDR3 for beta chain variable domain of TCR clone 301942 (TRBV7-8, TRBJ2-7)
CASSLRDREQYF

SEQ ID NO: 603885 - protein, 14 aa, Homo sapiens
  CDR3 for alpha chain variable domain of TCR clone 301943 (TRAV12-2, TRAJ17)
CAVLFKAAGNKLTF

SEQ ID NO: 603886 - protein, 13 aa, Homo sapiens
  CDR3 for beta chain variable domain of TCR clone 301943 (TRBV6-6, TRBJ2-7)
CASSPKHLAEQYF

SEQ ID NO: 603887 - protein, 14 aa, Homo sapiens
  CDR3 for alpha chain variable domain of TCR clone 301944 (TRAV3, TRAJ37)
CAVKESGNTGKLIF

SEQ ID NO: 603888 - protein, 14 aa, Homo sapiens
  CDR3 for beta chain variable domain of TCR clone 301944 (TRBV2, TRBJ1-5)
CASSENRGGEPQHF

SEQ ID NO: 603889 - protein, 11 aa, Homo sapiens
  CDR3 for alpha chain variable domain of TCR clone 301945 (TRAV3, TRAJ21)
CAVGNFNKFYF

SEQ ID NO: 603890 - protein, 19 aa, Homo sapiens
  CDR3 for beta chain variable domain of TCR clone 301945 (TRBV29-1, TRBJ2-1)
CSVEGDQPPTMSSSSGQGH

SEQ ID NO: 603891 - protein, 13 aa, Homo sapiens
  CDR3 for alpha chain variable domain of TCR clone 301946 (TRAV3, TRAJ16)
CAVRDRNGPKLLF

SEQ ID NO: 603892 - protein, 15 aa, Homo sapiens
  CDR3 for beta chain variable domain of TCR clone 301946 (TRBV5-1, TRBJ2-1)
CASSPPRAPYNEQFF

SEQ ID NO: 603893 - protein, 13 aa, Homo sapiens
  CDR3 for alpha chain variable domain of TCR clone 301947 (TRAV22, TRAJ29)
CAVGGSGNTPLVF

SEQ ID NO: 603894 - protein, 16 aa, Homo sapiens
  CDR3 for beta chain variable domain of TCR clone 301947 (TRBV6-6, TRBJ1-5)
CASSYSTLVGNQPQHF

SEQ ID NO: 603895 - protein, 16 aa, Homo sapiens
  CDR3 for alpha chain variable domain of TCR clone 301948 (TRAV27, TRAJ13)
CAAAKSDSGGYQKVTF

SEQ ID NO: 603896 - protein, 15 aa, Homo sapiens
  CDR3 for beta chain variable domain of TCR clone 301948 (TRBV29-1, TRBJ2-1)
CSVGRHALFYNEQFF

SEQ ID NO: 603897 - protein, 14 aa, Homo sapiens
  CDR3 for alpha chain variable domain of TCR clone 301949 (TRAV34, TRAJ44)
CGADGTGTASKLTF

SEQ ID NO: 603898 - protein, 12 aa, Homo sapiens
  CDR3 for beta chain variable domain of TCR clone 301949 (TRBV11-2, TRBJ2-2)
CASSLVGGELFF

SEQ ID NO: 603899 - protein, 12 aa, Homo sapiens
  CDR3 for alpha chain variable domain of TCR clone 301950 (TRAV12-3, TRAJ40)
CAMSSGTYKYIF

SEQ ID NO: 603900 - protein, 12 aa, Homo sapiens
  CDR3 for beta chain variable domain of TCR clone 301950 (TRBV28, TRBJ2-7)
CASSFSSYEQYF

SEQ ID NO: 603901 - protein, 12 aa, Homo sapiens
  CDR3 for alpha chain variable domain of TCR clone 301951 (TRAV36/DV7, TRAJ54)
CAVVRGAQKLVF

SEQ ID NO: 603902 - protein, 14 aa, Homo sapiens
  CDR3 for beta chain variable domain of TCR clone 301951 (TRBV7-3, TRBJ1-1)
CASSLKGGNSEAFF

SEQ ID NO: 603903 - protein, 18 aa, Homo sapiens
  CDR3 for alpha chain variable domain of TCR clone 301952 (TRAV26-1, TRAJ52)
FIVRVEGAGGTSYGKLTF

SEQ ID NO: 603904 - protein, 13 aa, Homo sapiens
  CDR3 for beta chain variable domain of TCR clone 301952 (TRBV7-3, TRBJ1-2)
CASSLKRGYGYTL

SEQ ID NO: 603905 - protein, 13 aa, Homo sapiens
  CDR3 for alpha chain variable domain of TCR clone 301953 (TRAV12-3, TRAJ33)
SAMSVNSNYQLIW

SEQ ID NO: 603906 - protein, 13 aa, Homo sapiens
  CDR3 for beta chain variable domain of TCR clone 301953 (TRBV7-2, TRBJ2-2)
CASSLAVTGELFF

SEQ ID NO: 603907 - protein, 15 aa, Homo sapiens
  CDR3 for alpha chain variable domain of TCR clone 301954 (TRAV3, TRAJ23)
CCENRDYNQGGKLIF

SEQ ID NO: 603908 - protein, 17 aa, Homo sapiens
  CDR3 for beta chain variable domain of TCR clone 301954 (TRBV10-3, TRBJ2-6)
CAISESTAPSGANVLTF

SEQ ID NO: 603909 - protein, 14 aa, Homo sapiens
  CDR3 for alpha chain variable domain of TCR clone 301955 (TRAV12-2, TRAJ52)
CRCAGGTSYGKLTF

SEQ ID NO: 603910 - protein, 14 aa, Homo sapiens
  CDR3 for beta chain variable domain of TCR clone 301955 (TRBV25-1, TRBJ1-1)
CASTHLGGNTEAFF

SEQ ID NO: 603911 - protein, 17 aa, Homo sapiens
  CDR3 for alpha chain variable domain of TCR clone 301956 (TRAV3, TRAJ42)
CAVRDRDYGGSQGNLIF

SEQ ID NO: 603912 - protein, 15 aa, Homo sapiens
  CDR3 for beta chain variable domain of TCR clone 301956 (TRBV27, TRBJ1-6)
CASSFDRALGSPLHF

SEQ ID NO: 603913 - protein, 13 aa, Homo sapiens
  CDR3 for alpha chain variable domain of TCR clone 301957 (TRAV13-1, TRAJ6)
CAARRGGSYIPNF

SEQ ID NO: 603914 - protein, 15 aa, Homo sapiens
  CDR3 for beta chain variable domain of TCR clone 301957 (TRBV27, TRBJ2-1)
CASSNGGGSSNEQFF

SEQ ID NO: 603915 - protein, 12 aa, Homo sapiens
  CDR3 for alpha chain variable domain of TCR clone 301958 (TRAV39, TRAJ49)
CAVDKHRYPVLF

SEQ ID NO: 603916 - protein, 17 aa, Homo sapiens
  CDR3 for beta chain variable domain of TCR clone 301958 (TRBV20-1, TRBJ2-1)
CSARDRRRASSYNEQFF

SEQ ID NO: 603917 - protein, 12 aa, Homo sapiens
  CDR3 for alpha chain variable domain of TCR clone 301959 (TRAV2, TRAJ9)
CAVGAGGFKTIF

SEQ ID NO: 603918 - protein, 13 aa, Homo sapiens
  CDR3 for beta chain variable domain of TCR clone 301959 (TRBV28, TRBJ2-7)
CASTPGLAGEQYF

SEQ ID NO: 603919 - protein, 14 aa, Homo sapiens
  CDR3 for alpha chain variable domain of TCR clone 301960 (TRAV13-1, TRAJ29)
CAASSNSGNTPLVF

SEQ ID NO: 603920 - protein, 14 aa, Homo sapiens
  CDR3 for beta chain variable domain of TCR clone 301960 (TRBV7-6, TRBJ2-3)
CASSLGTVTDTQYF

SEQ ID NO: 603921 - protein, 18 aa, Homo sapiens
  CDR3 for alpha chain variable domain of TCR clone 301961 (TRAV26-1, TRAJ52)
CIFRVEGAGGTSYGKLTF

SEQ ID NO: 603922 - protein, 13 aa, Homo sapiens
  CDR3 for beta chain variable domain of TCR clone 301961 (TRBV7-3, TRBJ1-2)
CASSLKRGYGCTF

SEQ ID NO: 603923 - protein, 20 aa, Homo sapiens
  CDR3 for alpha chain variable domain of TCR clone 301962 (TRAV26-1, TRAJ42)
CCVLLHRQTYYGGSQGNIIF

SEQ ID NO: 603924 - protein, 16 aa, Homo sapiens
  CDR3 for beta chain variable domain of TCR clone 301962 (TRBV7-3, TRBJ2-2)
CASSLKRGSLSGELFF

SEQ ID NO: 603925 - protein, 13 aa, Homo sapiens
  CDR3 for alpha chain variable domain of TCR clone 301963 (TRAV3, TRAJ5)
CAVRDTGRRALTF

SEQ ID NO: 603926 - protein, 16 aa, Homo sapiens
  CDR3 for beta chain variable domain of TCR clone 301963 (TRBV19, TRBJ2-1)
CASSKAGPSSYNEQFF

SEQ ID NO: 603927 - protein, 14 aa, Homo sapiens
  CDR3 for alpha chain variable domain of TCR clone 301964 (TRAV9-2, TRAJ39)
CALYINNAGNMLTF

SEQ ID NO: 603928 - protein, 17 aa, Homo sapiens
  CDR3 for beta chain variable domain of TCR clone 301964 (TRBV20-1, TRBJ2-2)
CSASGSGQGGLTGELFF

SEQ ID NO: 603929 - protein, 18 aa, Homo sapiens
  CDR3 for alpha chain variable domain of TCR clone 301965 (TRAV17, TRAJ45)
CATSLDLYSGGGADGLTF

SEQ ID NO: 603930 - protein, 14 aa, Homo sapiens
  CDR3 for beta chain variable domain of TCR clone 301965 (TRBV19, TRBJ2-5)
CASSIEHSQETQYF

SEQ ID NO: 603931 - protein, 20 aa, Homo sapiens
  CDR3 for alpha chain variable domain of TCR clone 301966 (TRAV12-1, TRAJ42)
SSVIQPPTSVKGGSQGNLIF

SEQ ID NO: 603932 - protein, 16 aa, Homo sapiens
  CDR3 for beta chain variable domain of TCR clone 301966 (TRBV7-3, TRBJ2-1)
CASSLSSGGGAKEQFF

SEQ ID NO: 603933 - protein, 15 aa, Homo sapiens
  CDR3 for alpha chain variable domain of TCR clone 301967 (TRAV1-2, TRAJ28)
CAVQYSGAGSYQLTF

SEQ ID NO: 603934 - protein, 13 aa, Homo sapiens
  CDR3 for beta chain variable domain of TCR clone 301967 (TRBV7-2, TRBJ2-7)
CASSSPSGSEQYF

SEQ ID NO: 603935 - protein, 14 aa, Homo sapiens
  CDR3 for alpha chain variable domain of TCR clone 301968 (TRAV12-2, TRAJ17)
CAVLFKAAGNKLTF

SEQ ID NO: 603936 - protein, 13 aa, Homo sapiens
  CDR3 for beta chain variable domain of TCR clone 301968 (TRBV19, TRBJ2-7)
CASSIRSSYEQYF

SEQ ID NO: 603937 - protein, 14 aa, Homo sapiens
  CDR3 for alpha chain variable domain of TCR clone 301969 (TRAV12-3, TRAJ10)
SHLPLTGGGNKITF

SEQ ID NO: 603938 - protein, 13 aa, Homo sapiens
  CDR3 for beta chain variable domain of TCR clone 301969 (TRBV9, TRBJ2-1)
CASSPSGGNEQFF

SEQ ID NO: 603939 - protein, 13 aa, Homo sapiens
  CDR3 for alpha chain variable domain of TCR clone 301970 (TRAV26-1, TRAJ54)
CIVRVKGAQKLVF

SEQ ID NO: 603940 - protein, 15 aa, Homo sapiens
  CDR3 for beta chain variable domain of TCR clone 301970 (TRBV20-1, TRBJ2-1)
CSAQPGGGPYNEQCF

SEQ ID NO: 603941 - protein, 11 aa, Homo sapiens
  CDR3 for alpha chain variable domain of TCR clone 301971 (TRAV13-1, TRAJ52)
PGGTSYGKLTF

SEQ ID NO: 603942 - protein, 16 aa, Homo sapiens
  CDR3 for beta chain variable domain of TCR clone 301971 (TRBV28, TRBJ2-7)
CASSPWVATGDLSQCF

SEQ ID NO: 603943 - protein, 23 aa, Homo sapiens
  CDR3 for alpha chain variable domain of TCR clone 301972 (TRAV26-1, TRAJ38)
CIADNAGNNHIQNPDPAVYQLRD

SEQ ID NO: 603944 - protein, 15 aa, Homo sapiens
  CDR3 for beta chain variable domain of TCR clone 301972 (TRBV12-4, TRBJ2-5)
CASNTLAGYQETQYF

SEQ ID NO: 603945 - protein, 12 aa, Homo sapiens
  CDR3 for alpha chain variable domain of TCR clone 301973 (TRAV13-1, TRAJ48)
CAANFGNEKLTF

SEQ ID NO: 603946 - protein, 16 aa, Homo sapiens
  CDR3 for beta chain variable domain of TCR clone 301973 (TRBV7-7, TRBJ2-1)
CASSLASGTSYNEQFF

SEQ ID NO: 603947 - protein, 14 aa, Homo sapiens
  CDR3 for alpha chain variable domain of TCR clone 301974 (TRAV14/DV4, TRAJ26)
CAMREGTYGQNFVF

SEQ ID NO: 603948 - protein, 16 aa, Homo sapiens
  CDR3 for beta chain variable domain of TCR clone 301974 (TRBV9, TRBJ1-2)
CASSVEEKVPPYGDTF

SEQ ID NO: 603949 - protein, 13 aa, Homo sapiens
  CDR3 for alpha chain variable domain of TCR clone 301975 (TRAV26-2, TRAJ43)
CILRAVNNNDMRF

SEQ ID NO: 603950 - protein, 12 aa, Homo sapiens
  CDR3 for beta chain variable domain of TCR clone 301975 (TRBV7-9, TRBJ1-6)
CASSLMTSPLHF

SEQ ID NO: 603951 - protein, 15 aa, Homo sapiens
  CDR3 for alpha chain variable domain of TCR clone 301976 (TRAV4, TRAJ39)
CLVGPNNNAGNMLNF

SEQ ID NO: 603952 - protein, 14 aa, Homo sapiens
  CDR3 for beta chain variable domain of TCR clone 301976 (TRBV11-2, TRBJ2-5)
CASSRTGGIETQYF

SEQ ID NO: 603953 - protein, 13 aa, Homo sapiens
  CDR3 for alpha chain variable domain of TCR clone 301977 (TRAV12-1, TRAJ29)
CVVNGPGNTPLVF

SEQ ID NO: 603954 - protein, 15 aa, Homo sapiens
  CDR3 for beta chain variable domain of TCR clone 301977 (TRBV20-1, TRBJ2-7)
CSAARSWGRAYEQYF

SEQ ID NO: 603955 - protein, 14 aa, Homo sapiens
  CDR3 for alpha chain variable domain of TCR clone 301978 (TRAV12-1, TRAJ28)
CVAISGAGSYQLTF

SEQ ID NO: 603956 - protein, 13 aa, Homo sapiens
  CDR3 for beta chain variable domain of TCR clone 301978 (TRBV20-1, TRBJ1-6)
CSAPLGVGSPLHF

SEQ ID NO: 603957 - protein, 15 aa, Homo sapiens
  CDR3 for alpha chain variable domain of TCR clone 301979 (TRAV27, TRAJ38)
CAARRNAGNNRKLMR

SEQ ID NO: 603958 - protein, 13 aa, Homo sapiens
  CDR3 for beta chain variable domain of TCR clone 301979 (TRBV12-5, TRBJ2-3)
CASGDRQSDTQYF

SEQ ID NO: 603959 - protein, 14 aa, Homo sapiens
  CDR3 for alpha chain variable domain of TCR clone 301980 (TRAV8-3, TRAJ44)
CAVGNTGTASKLTF

SEQ ID NO: 603960 - protein, 15 aa, Homo sapiens
  CDR3 for beta chain variable domain of TCR clone 301980 (TRBV28, TRBJ2-7)
CASSFRGQGRYEQCF

SEQ ID NO: 603961 - protein, 13 aa, Homo sapiens
  CDR3 for alpha chain variable domain of TCR clone 301981 (TRAV16, TRAJ47)
CALSGEYGNKLVF

SEQ ID NO: 603962 - protein, 16 aa, Homo sapiens
  CDR3 for beta chain variable domain of TCR clone 301981 (TRBV7-8, TRBJ2-1)
CASSLGVVRRINEQFF

SEQ ID NO: 603963 - protein, 14 aa, Homo sapiens
  CDR3 for alpha chain variable domain of TCR clone 301982 (TRAV2, TRAJ9)
CDVEDRSGGFKTIF

SEQ ID NO: 603964 - protein, 12 aa, Homo sapiens
  CDR3 for beta chain variable domain of TCR clone 301982 (TRBV12-4, TRBJ2-4)
CASSSSGNIQYF

SEQ ID NO: 603965 - protein, 23 aa, Homo sapiens
  CDR3 for alpha chain variable domain of TCR clone 301983 (TRAV8-6, TRAJ35)
CAVSEKALGMCCIAGSALKWLVF

SEQ ID NO: 603966 - protein, 13 aa, Homo sapiens
  CDR3 for beta chain variable domain of TCR clone 301983 (TRBV11-2, TRBJ1-3)
CASSLEPVNTIYF

SEQ ID NO: 603967 - protein, 13 aa, Homo sapiens
  CDR3 for alpha chain variable domain of TCR clone 301984 (TRAV27, TRAJ6)
CAGGTRGSYIPTF

SEQ ID NO: 603968 - protein, 16 aa, Homo sapiens
  CDR3 for beta chain variable domain of TCR clone 301984 (TRBV5-4, TRBJ2-3)
CASQQPGAGGADTQYF

SEQ ID NO: 603969 - protein, 14 aa, Homo sapiens
  CDR3 for alpha chain variable domain of TCR clone 301985 (TRAV20, TRAJ42)
CAVQAGGSQGNLIF

SEQ ID NO: 603970 - protein, 16 aa, Homo sapiens
  CDR3 for beta chain variable domain of TCR clone 301985 (TRBV15, TRBJ1-2)
CATSRGPRTGGGGYTF

SEQ ID NO: 603971 - protein, 17 aa, Homo sapiens
  CDR3 for alpha chain variable domain of TCR clone 301986 (TRAV26-1, TRAJ37)
CIVRVITVSSNTGKLIL

SEQ ID NO: 603972 - protein, 12 aa, Homo sapiens
  CDR3 for beta chain variable domain of TCR clone 301986 (TRBV11-2, TRBJ2-1)
CASSPGNNEQFF

SEQ ID NO: 603973 - protein, 13 aa, Homo sapiens
  CDR3 for alpha chain variable domain of TCR clone 301987 (TRAV13-1, TRAJ10)
CAALEGGGNKLTF

SEQ ID NO: 603974 - protein, 16 aa, Homo sapiens
  CDR3 for beta chain variable domain of TCR clone 301987 (TRBV4-3, TRBJ1-5)
CASSQAWGEANQPQHF

SEQ ID NO: 603975 - protein, 14 aa, Homo sapiens
  CDR3 for alpha chain variable domain of TCR clone 301988 (TRAV8-3, TRAJ10)
CAVGNAGGGNKLTF

SEQ ID NO: 603976 - protein, 16 aa, Homo sapiens
  CDR3 for beta chain variable domain of TCR clone 301988 (TRBV11-2, TRBJ1-2)
CASILDTGGADYGYTF

SEQ ID NO: 603977 - protein, 13 aa, Homo sapiens
  CDR3 for alpha chain variable domain of TCR clone 301989 (TRAV12-1, TRAJ21)
CVVTLYNFNKFYF

SEQ ID NO: 603978 - protein, 16 aa, Homo sapiens
  CDR3 for beta chain variable domain of TCR clone 301989 (TRBV20-1, TRBJ2-3)
CSALAFDTGDPDTQYF

SEQ ID NO: 603979 - protein, 14 aa, Homo sapiens
  CDR3 for alpha chain variable domain of TCR clone 301990 (TRAV34, TRAJ44)
CGADGTGTASKLTF

SEQ ID NO: 603980 - protein, 12 aa, Homo sapiens
  CDR3 for beta chain variable domain of TCR clone 301990 (TRBV5-7, TRBJ1-1)
CASSLGRGKAFF

SEQ ID NO: 603981 - protein, 15 aa, Homo sapiens
  CDR3 for alpha chain variable domain of TCR clone 301991 (TRAV8-3, TRAJ4)
CAVGAYSGGYNKLIF

SEQ ID NO: 603982 - protein, 14 aa, Homo sapiens
  CDR3 for beta chain variable domain of TCR clone 301991 (TRBV12-5, TRBJ2-5)
CASGSRTHQETQYF

SEQ ID NO: 603983 - protein, 13 aa, Homo sapiens
  CDR3 for alpha chain variable domain of TCR clone 301992 (TRAV3, TRAJ27)
CAVRPLGAGKSTF

SEQ ID NO: 603984 - protein, 15 aa, Homo sapiens
  CDR3 for beta chain variable domain of TCR clone 301992 (TRBV6-5, TRBJ1-5)
CASSYSRRSNQPQHF

SEQ ID NO: 603985 - protein, 16 aa, Homo sapiens
  CDR3 for alpha chain variable domain of TCR clone 301993 (TRAV3, TRAJ37)
CAVRGKGPGNTGKLIF

SEQ ID NO: 603986 - protein, 11 aa, Homo sapiens
  CDR3 for beta chain variable domain of TCR clone 301993 (TRBV12-4, TRBJ2-3)
CASTATDTQYF

SEQ ID NO: 603987 - protein, 15 aa, Homo sapiens
  CDR3 for alpha chain variable domain of TCR clone 301994 (TRAV3, TRAJ22)
CAVRDRGGSARQLTF

SEQ ID NO: 603988 - protein, 15 aa, Homo sapiens
  CDR3 for beta chain variable domain of TCR clone 301994 (TRBV7-6, TRBJ1-5)
CASSQSSGINQPQHF

SEQ ID NO: 603989 - protein, 13 aa, Homo sapiens
  CDR3 for alpha chain variable domain of TCR clone 301995 (TRAV8-3, TRAJ43)
CAVGADNNNDIRF

SEQ ID NO: 603990 - protein, 13 aa, Homo sapiens
  CDR3 for beta chain variable domain of TCR clone 301995 (TRBV4-2, TRBJ1-1)
CASSQAGNTEAFF

SEQ ID NO: 603991 - protein, 14 aa, Homo sapiens
  CDR3 for alpha chain variable domain of TCR clone 301996 (TRAV1-2, TRAJ16)
CAVNRFSDSQKLLF

SEQ ID NO: 603992 - protein, 14 aa, Homo sapiens
  CDR3 for beta chain variable domain of TCR clone 301996 (TRBV7-2, TRBJ2-7)
CASSLYPGRYEQYF

SEQ ID NO: 603993 - protein, 15 aa, Homo sapiens
  CDR3 for alpha chain variable domain of TCR clone 301997 (TRAV8-3, TRAJ27)
CAVGPSKTNAGKSTF

SEQ ID NO: 603994 - protein, 15 aa, Homo sapiens
  CDR3 for beta chain variable domain of TCR clone 301997 (TRBV4-3, TRBJ2-7)
CASSQDLGSSYEQYF

SEQ ID NO: 603995 - protein, 18 aa, Homo sapiens
  CDR3 for alpha chain variable domain of TCR clone 301998 (TRAV21, TRAJ52)
CAVRPSPAGGTSYGKLTF

SEQ ID NO: 603996 - protein, 14 aa, Homo sapiens
  CDR3 for beta chain variable domain of TCR clone 301998 (TRBV19, TRBJ1-5)
CASSKMTGPQPQHF

SEQ ID NO: 603997 - protein, 14 aa, Homo sapiens
  CDR3 for alpha chain variable domain of TCR clone 301999 (TRAV12-2, TRAJ40)
CAVKIPSGTYKYIF

SEQ ID NO: 603998 - protein, 14 aa, Homo sapiens
  CDR3 for beta chain variable domain of TCR clone 301999 (TRBV11-2, TRBJ2-1)
CASSPSRQGGGQFF

SEQ ID NO: 603999 - protein, 13 aa, Homo sapiens
  CDR3 for alpha chain variable domain of TCR clone 302000 (TRAV27, TRAJ6)
CAGVTRGSYIPTF

SEQ ID NO: 604000 - protein, 14 aa, Homo sapiens
  CDR3 for beta chain variable domain of TCR clone 302000 (TRBV6-3, TRBJ1-1)
CASSYQRRDTEAFF

SEQ ID NO: 604001 - protein, 15 aa, Homo sapiens
  CDR3 for alpha chain variable domain of TCR clone 302001 (TRAV13-1, TRAJ52)
CALRTGGTSYGKLTF

SEQ ID NO: 604002 - protein, 16 aa, Homo sapiens
  CDR3 for beta chain variable domain of TCR clone 302001 (TRBV7-3, TRBJ2-1)
CASSLEGYRSYNEQFF

SEQ ID NO: 604003 - protein, 13 aa, Homo sapiens
  CDR3 for alpha chain variable domain of TCR clone 302002 (TRAV3, TRAJ8)
CAVRFTGFQKLVF

SEQ ID NO: 604004 - protein, 19 aa, Homo sapiens
  CDR3 for beta chain variable domain of TCR clone 302002 (TRBV25-1, TRBJ2-2)
CAILVYRVDRGRKTGELFF

SEQ ID NO: 604005 - protein, 13 aa, Homo sapiens
  CDR3 for alpha chain variable domain of TCR clone 302003 (TRAV13-2, TRAJ13)
CAERPGGYQKVTF

SEQ ID NO: 604006 - protein, 16 aa, Homo sapiens
  CDR3 for beta chain variable domain of TCR clone 302003 (TRBV18, TRBJ2-5)
CASSPLSSGGAKTQYF

SEQ ID NO: 604007 - protein, 12 aa, Homo sapiens
  CDR3 for alpha chain variable domain of TCR clone 302004 (TRAV16, TRAJ10)
CSRTGGGNKLTF

SEQ ID NO: 604008 - protein, 14 aa, Homo sapiens
  CDR3 for beta chain variable domain of TCR clone 302004 (TRBV7-2, TRBJ2-7)
CASRSQWAAYEQYF

SEQ ID NO: 604009 - protein, 15 aa, Homo sapiens
  CDR3 for alpha chain variable domain of TCR clone 302005 (TRAV12-2, TRAJ53)
CAVNGGGGSNYKLTF

SEQ ID NO: 604010 - protein, 15 aa, Homo sapiens
  CDR3 for beta chain variable domain of TCR clone 302005 (TRBV15, TRBJ2-1)
CATSRPGQGLHEQFF

SEQ ID NO: 604011 - protein, 13 aa, Homo sapiens
  CDR3 for alpha chain variable domain of TCR clone 302006 (TRAV12-2, TRAJ47)
CAVTMEYGNKLVF

SEQ ID NO: 604012 - protein, 20 aa, Homo sapiens
  CDR3 for beta chain variable domain of TCR clone 302006 (TRBV7-8, TRBJ2-2)
CASSHLFPGPTIHITGELFF

SEQ ID NO: 604013 - protein, 14 aa, Homo sapiens
  CDR3 for alpha chain variable domain of TCR clone 302007 (TRAV8-4, TRAJ48)
CAVKGNFGNEKLTF

SEQ ID NO: 604014 - protein, 13 aa, Homo sapiens
  CDR3 for beta chain variable domain of TCR clone 302007 (TRBV13, TRBJ2-1)
CASILGGRGEQFF

SEQ ID NO: 604015 - protein, 11 aa, Homo sapiens
  CDR3 for alpha chain variable domain of TCR clone 302008 (TRAV27, TRAJ20)
CAGGGDYKLSF

SEQ ID NO: 604016 - protein, 14 aa, Homo sapiens
  CDR3 for beta chain variable domain of TCR clone 302008 (TRBV12-4, TRBJ2-2)
CASNQGANTGELFF

SEQ ID NO: 604017 - protein, 13 aa, Homo sapiens
  CDR3 for alpha chain variable domain of TCR clone 302009 (TRAV21, TRAJ27)
CAARPGNAGQSTF

SEQ ID NO: 604018 - protein, 14 aa, Homo sapiens
  CDR3 for beta chain variable domain of TCR clone 302009 (TRBV7-6, TRBJ2-3)
CASSLGTVTDTQYY

SEQ ID NO: 604019 - protein, 12 aa, Homo sapiens
  CDR3 for alpha chain variable domain of TCR clone 302010 (TRAV13-1, TRAJ21)
CSTTINFNKFYF

SEQ ID NO: 604020 - protein, 14 aa, Homo sapiens
  CDR3 for beta chain variable domain of TCR clone 302010 (TRBV7-2, TRBJ2-7)
CASSPKTSFYEQYF

SEQ ID NO: 604021 - protein, 14 aa, Homo sapiens
  CDR3 for alpha chain variable domain of TCR clone 302011 (TRAV12-2, TRAJ36)
CAVNPPTGANNLFF

SEQ ID NO: 604022 - protein, 13 aa, Homo sapiens
  CDR3 for beta chain variable domain of TCR clone 302011 (TRBV20-1, TRBJ1-6)
CSAPTGLGSPLHF

SEQ ID NO: 604023 - protein, 18 aa, Homo sapiens
  CDR3 for alpha chain variable domain of TCR clone 302012 (TRAV16, TRAJ4)
CALSRMFSGGYNKLILEQ

SEQ ID NO: 604024 - protein, 16 aa, Homo sapiens
  CDR3 for beta chain variable domain of TCR clone 302012 (TRBV24-1, TRBJ2-3)
CATSDPGAGATDTQYF

SEQ ID NO: 604025 - protein, 14 aa, Homo sapiens
  CDR3 for alpha chain variable domain of TCR clone 302013 (TRAV12-3, TRAJ10)
SQLPLTGGGNKLTF

SEQ ID NO: 604026 - protein, 14 aa, Homo sapiens
  CDR3 for beta chain variable domain of TCR clone 302013 (TRBV12-5, TRBJ2-5)
CASGSRTHQETQYF

SEQ ID NO: 604027 - protein, 17 aa, Homo sapiens
  CDR3 for alpha chain variable domain of TCR clone 302014 (TRAV38-1, TRAJ45)
CAFMRSHSGGGDDGLTF

SEQ ID NO: 604028 - protein, 15 aa, Homo sapiens
  CDR3 for beta chain variable domain of TCR clone 302014 (TRBV7-2, TRBJ2-3)
CASSLVVRGPDTQYF

SEQ ID NO: 604029 - protein, 12 aa, Homo sapiens
  CDR3 for alpha chain variable domain of TCR clone 302015 (TRAV12-3, TRAJ17)
CAMTLIGNKLTF

SEQ ID NO: 604030 - protein, 15 aa, Homo sapiens
  CDR3 for beta chain variable domain of TCR clone 302015 (TRBV19, TRBJ2-1)
CASSILGEGRNEQFF

SEQ ID NO: 604031 - protein, 13 aa, Homo sapiens
  CDR3 for alpha chain variable domain of TCR clone 302016 (TRAV13-1, TRAJ21)
CAASIYNFNKFYF

SEQ ID NO: 604032 - protein, 15 aa, Homo sapiens
  CDR3 for beta chain variable domain of TCR clone 302016 (TRBV19, TRBJ2-7)
CASSPAGSGEALKYF

SEQ ID NO: 604033 - protein, 12 aa, Homo sapiens
  CDR3 for alpha chain variable domain of TCR clone 302017 (TRAV12-2, TRAJ10)
WGVTGGGNKLTF

SEQ ID NO: 604034 - protein, 15 aa, Homo sapiens
  CDR3 for beta chain variable domain of TCR clone 302017 (TRBV11-2, TRBJ1-3)
CASSLSPLVRDTIYF

SEQ ID NO: 604035 - protein, 14 aa, Homo sapiens
  CDR3 for alpha chain variable domain of TCR clone 302018 (TRAV12-3, TRAJ11)
CAMTTNSGYSTLTF

SEQ ID NO: 604036 - protein, 16 aa, Homo sapiens
  CDR3 for beta chain variable domain of TCR clone 302018 (TRBV20-1, TRBJ1-1)
CSARALSQGMNTEAFF

SEQ ID NO: 604037 - protein, 16 aa, Homo sapiens
  CDR3 for alpha chain variable domain of TCR clone 302019 (TRAV16, TRAJ52)
CALSGVGGTSYGKLTF

SEQ ID NO: 604038 - protein, 14 aa, Homo sapiens
  CDR3 for beta chain variable domain of TCR clone 302019 (TRBV12-5, TRBJ2-5)
CASGSRTHQETQYF

SEQ ID NO: 604039 - protein, 16 aa, Homo sapiens
  CDR3 for alpha chain variable domain of TCR clone 302020 (TRAV8-3, TRAJ44)
CAVGTLMTGTASKLTF

SEQ ID NO: 604040 - protein, 13 aa, Homo sapiens
  CDR3 for beta chain variable domain of TCR clone 302020 (TRBV11-2, TRBJ2-1)
CASSLRLPHEQFF

SEQ ID NO: 604041 - protein, 20 aa, Homo sapiens
  CDR3 for alpha chain variable domain of TCR clone 302021 (TRAV4, TRAJ29)
CCVLLPRGCVPFSGHTPLVF

SEQ ID NO: 604042 - protein, 17 aa, Homo sapiens
  CDR3 for beta chain variable domain of TCR clone 302021 (TRBV25-1, TRBJ2-7)
CASSDARVVFSSYEQYF

SEQ ID NO: 604043 - protein, 17 aa, Homo sapiens
  CDR3 for alpha chain variable domain of TCR clone 302022 (TRAV24, TRAJ42)
CAFRVKNYGGSQGNLIF

SEQ ID NO: 604044 - protein, 12 aa, Homo sapiens
  CDR3 for beta chain variable domain of TCR clone 302022 (TRBV12-4, TRBJ1-3)
CASSFSGNTIYF

SEQ ID NO: 604045 - protein, 15 aa, Homo sapiens
  CDR3 for alpha chain variable domain of TCR clone 302023 (TRAV12-3, TRAJ6)
CAMSATTGGSYIPTF

SEQ ID NO: 604046 - protein, 13 aa, Homo sapiens
  CDR3 for beta chain variable domain of TCR clone 302023 (TRBV7-9, TRBJ1-2)
CASSLKQNYGYNF

SEQ ID NO: 604047 - protein, 19 aa, Homo sapiens
  CDR3 for alpha chain variable domain of TCR clone 302024 (TRAV2, TRAJ20)
ILQVREAAAAVYRDCKLSF

SEQ ID NO: 604048 - protein, 14 aa, Homo sapiens
  CDR3 for beta chain variable domain of TCR clone 302024 (TRBV6-1, TRBJ1-3)
CASVQGGGGNTIYF

SEQ ID NO: 604049 - protein, 14 aa, Homo sapiens
  CDR3 for alpha chain variable domain of TCR clone 302025 (TRAV8-4, TRAJ34)
CAVSDPGDTDKLFF

SEQ ID NO: 604050 - protein, 13 aa, Homo sapiens
  CDR3 for beta chain variable domain of TCR clone 302025 (TRBV7-9, TRBJ2-5)
CASLSPGQETQYF

SEQ ID NO: 604051 - protein, 14 aa, Homo sapiens
  CDR3 for alpha chain variable domain of TCR clone 302026 (TRAV12-2, TRAJ44)
CAVNPAGTASKLTF

SEQ ID NO: 604052 - protein, 15 aa, Homo sapiens
  CDR3 for beta chain variable domain of TCR clone 302026 (TRBV19, TRBJ1-6)
CASSTQGAVGSPLHF

SEQ ID NO: 604053 - protein, 14 aa, Homo sapiens
  CDR3 for alpha chain variable domain of TCR clone 302027 (TRAV1-1, TRAJ23)
CAVSIYNQGGKLIF

SEQ ID NO: 604054 - protein, 16 aa, Homo sapiens
  CDR3 for beta chain variable domain of TCR clone 302027 (TRBV9, TRBJ2-1)
CASSVGGGGNYNEQFF

SEQ ID NO: 604055 - protein, 13 aa, Homo sapiens
  CDR3 for alpha chain variable domain of TCR clone 302028 (TRAV3, TRAJ21)
CAVREPDFNKFYF

SEQ ID NO: 604056 - protein, 13 aa, Homo sapiens
  CDR3 for beta chain variable domain of TCR clone 302028 (TRBV9, TRBJ2-1)
CASSTSGGNEQFF

SEQ ID NO: 604057 - protein, 12 aa, Homo sapiens
  CDR3 for alpha chain variable domain of TCR clone 302029 (TRAV12-2, TRAJ10)
WGVTGGGNKLTF

SEQ ID NO: 604058 - protein, 14 aa, Homo sapiens
  CDR3 for beta chain variable domain of TCR clone 302029 (TRBV11-1, TRBJ2-7)
CASSFRQGSYEQYF

SEQ ID NO: 604059 - protein, 12 aa, Homo sapiens
  CDR3 for alpha chain variable domain of TCR clone 302030 (TRAV12-3, TRAJ5)
CAMDTGRRALTF

SEQ ID NO: 604060 - protein, 20 aa, Homo sapiens
  CDR3 for beta chain variable domain of TCR clone 302030 (TRBV7-8, TRBJ2-2)
CASSYLFPGPTIHITGELFF

SEQ ID NO: 604061 - protein, 17 aa, Homo sapiens
  CDR3 for alpha chain variable domain of TCR clone 302031 (TRAV4, TRAJ42)
CLVGVLNYGGSQGNLIF

SEQ ID NO: 604062 - protein, 14 aa, Homo sapiens
  CDR3 for beta chain variable domain of TCR clone 302031 (TRBV4-1, TRBJ2-2)
CASSQAVNTGELFF

SEQ ID NO: 604063 - protein, 11 aa, Homo sapiens
  CDR3 for alpha chain variable domain of TCR clone 302032 (TRAV8-4, TRAJ20)
CAVTNVLTTTS

SEQ ID NO: 604064 - protein, 18 aa, Homo sapiens
  CDR3 for beta chain variable domain of TCR clone 302032 (TRBV7-9, TRBJ2-7)
CASSLTTSGSRTWYEQYF

SEQ ID NO: 604065 - protein, 11 aa, Homo sapiens
  CDR3 for alpha chain variable domain of TCR clone 302033 (TRAV2, TRAJ33)
CAVAGNYQLIW

SEQ ID NO: 604066 - protein, 16 aa, Homo sapiens
  CDR3 for beta chain variable domain of TCR clone 302033 (TRBV20-1, TRBJ1-4)
CSAPGQGLLINEKLFF

SEQ ID NO: 604067 - protein, 15 aa, Homo sapiens
  CDR3 for alpha chain variable domain of TCR clone 302034 (TRAV12-2, TRAJ32)
CAVNHYGGATNKLII

SEQ ID NO: 604068 - protein, 13 aa, Homo sapiens
  CDR3 for beta chain variable domain of TCR clone 302034 (TRBV7-9, TRBJ1-2)
CASSLKQNYGYTF

SEQ ID NO: 604069 - protein, 12 aa, Homo sapiens
  CDR3 for alpha chain variable domain of TCR clone 302035 (TRAV12-1, TRAJ9)
CVVNPTSLKTIF

SEQ ID NO: 604070 - protein, 15 aa, Homo sapiens
  CDR3 for beta chain variable domain of TCR clone 302035 (TRBV4-3, TRBJ2-2)
CASSQGTGGTGELFF

SEQ ID NO: 604071 - protein, 15 aa, Homo sapiens
  CDR3 for alpha chain variable domain of TCR clone 302036 (TRAV26-1, TRAJ52)
CIVSDLGTSYGKLTF

SEQ ID NO: 604072 - protein, 15 aa, Homo sapiens
  CDR3 for beta chain variable domain of TCR clone 302036 (TRBV6-5, TRBJ2-7)
CASSASGRWSHEQYF

SEQ ID NO: 604073 - protein, 14 aa, Homo sapiens
  CDR3 for alpha chain variable domain of TCR clone 302037 (TRAV26-1, TRAJ26)
CIVRVASYGQNFVF

SEQ ID NO: 604074 - protein, 16 aa, Homo sapiens
  CDR3 for beta chain variable domain of TCR clone 302037 (TRBV12-5, TRBJ2-5)
CASGPRTSGNQETQYF

SEQ ID NO: 604075 - protein, 14 aa, Homo sapiens
  CDR3 for alpha chain variable domain of TCR clone 302038 (TRAV13-2, TRAJ9)
CAENLETGGFKNIF

SEQ ID NO: 604076 - protein, 16 aa, Homo sapiens
  CDR3 for beta chain variable domain of TCR clone 302038 (TRBV28, TRBJ2-5)
CASSFSPAGGWETQYF

SEQ ID NO: 604077 - protein, 17 aa, Homo sapiens
  CDR3 for alpha chain variable domain of TCR clone 302039 (TRAV4, TRAJ42)
CLVGVLNYGGSQGNLIF

SEQ ID NO: 604078 - protein, 14 aa, Homo sapiens
  CDR3 for beta chain variable domain of TCR clone 302039 (TRBV15, TRBJ2-7)
CATSRVARGYEQYF

SEQ ID NO: 604079 - protein, 14 aa, Homo sapiens
  CDR3 for alpha chain variable domain of TCR clone 302040 (TRAV1-2, TRAJ8)
CAVREGTGFQKLVF

SEQ ID NO: 604080 - protein, 14 aa, Homo sapiens
  CDR3 for beta chain variable domain of TCR clone 302040 (TRBV19, TRBJ2-2)
CASSTLHRSGELFF

SEQ ID NO: 604081 - protein, 16 aa, Homo sapiens
  CDR3 for alpha chain variable domain of TCR clone 302041 (TRAV14/DV4, TRAJ54)
CAMREGRVQGAQKLVF

SEQ ID NO: 604082 - protein, 15 aa, Homo sapiens
  CDR3 for beta chain variable domain of TCR clone 302041 (TRBV7-2, TRBJ2-1)
CASAHGTGIYNEQFF

SEQ ID NO: 604083 - protein, 14 aa, Homo sapiens
  CDR3 for alpha chain variable domain of TCR clone 302042 (TRAV8-4, TRAJ13)
CAVTLSGGYQKVTF

SEQ ID NO: 604084 - protein, 15 aa, Homo sapiens
  CDR3 for beta chain variable domain of TCR clone 302042 (TRBV5-1, TRBJ1-1)
CASSSRTGRNTEAFF

SEQ ID NO: 604085 - protein, 14 aa, Homo sapiens
  CDR3 for alpha chain variable domain of TCR clone 302043 (TRAV12-1, TRAJ12)
CVVASGDSSYKLIF

SEQ ID NO: 604086 - protein, 15 aa, Homo sapiens
  CDR3 for beta chain variable domain of TCR clone 302043 (TRBV7-2, TRBJ2-1)
CASSSGLAGGNEQFF

SEQ ID NO: 604087 - protein, 10 aa, Homo sapiens
  CDR3 for alpha chain variable domain of TCR clone 302044 (TRAV12-3, TRAJ18)
CAMSAEAQPW

SEQ ID NO: 604088 - protein, 13 aa, Homo sapiens
  CDR3 for beta chain variable domain of TCR clone 302044 (TRBV15, TRBJ1-6)
CATSEGLNSPLHF

SEQ ID NO: 604089 - protein, 13 aa, Homo sapiens
  CDR3 for alpha chain variable domain of TCR clone 302045 (TRAV30, TRAJ34)
CGTVGYNTDKLIF

SEQ ID NO: 604090 - protein, 16 aa, Homo sapiens
  CDR3 for beta chain variable domain of TCR clone 302045 (TRBV7-9, TRBJ1-2)
CARSLGFSSGEDGYTF

SEQ ID NO: 604091 - protein, 15 aa, Homo sapiens
  CDR3 for alpha chain variable domain of TCR clone 302046 (TRAV25, TRAJ53)
CPTSNSGGSNYKLTF

SEQ ID NO: 604092 - protein, 12 aa, Homo sapiens
  CDR3 for beta chain variable domain of TCR clone 302046 (TRBV2, TRBJ2-1)
CAYGPPGNEQFF

SEQ ID NO: 604093 - protein, 13 aa, Homo sapiens
  CDR3 for alpha chain variable domain of TCR clone 302047 (TRAV12-2, TRAJ24)
CAAPPDSWGKFQF

SEQ ID NO: 604094 - protein, 14 aa, Homo sapiens
  CDR3 for beta chain variable domain of TCR clone 302047 (TRBV20-1, TRBJ1-5)
CSAQAGQGNQPQHF

SEQ ID NO: 604095 - protein, 11 aa, Homo sapiens
  CDR3 for alpha chain variable domain of TCR clone 302048 (TRAV2, TRAJ13)
CASGGYQKVTF

SEQ ID NO: 604096 - protein, 16 aa, Homo sapiens
  CDR3 for beta chain variable domain of TCR clone 302048 (TRBV12-4, TRBJ2-5)
CASSFVVRGRQETQYF

SEQ ID NO: 604097 - protein, 15 aa, Homo sapiens
  CDR3 for alpha chain variable domain of TCR clone 302049 (TRAV12-1, TRAJ9)
CVVSFGDTGGCKTTF

SEQ ID NO: 604098 - protein, 13 aa, Homo sapiens
  CDR3 for beta chain variable domain of TCR clone 302049 (TRBV2, TRBJ1-4)
CASSERAGEKLFF

SEQ ID NO: 604099 - protein, 12 aa, Homo sapiens
  CDR3 for alpha chain variable domain of TCR clone 302050 (TRAV13-2, TRAJ23)
CAERHRGGKLIF

SEQ ID NO: 604100 - protein, 16 aa, Homo sapiens
  CDR3 for beta chain variable domain of TCR clone 302050 (TRBV6-1, TRBJ1-2)
CASSGAWQGRSHGYTF

SEQ ID NO: 604101 - protein, 14 aa, Homo sapiens
  CDR3 for alpha chain variable domain of TCR clone 302051 (TRAV8-3, TRAJ4)
CAVGAAGGYNKLIF

SEQ ID NO: 604102 - protein, 15 aa, Homo sapiens
  CDR3 for beta chain variable domain of TCR clone 302051 (TRBV9, TRBJ1-6)
CASSVAGTGESPLHF

SEQ ID NO: 604103 - protein, 11 aa, Homo sapiens
  CDR3 for alpha chain variable domain of TCR clone 302052 (TRAV17, TRAJ49)
CATDAGDQFYF

SEQ ID NO: 604104 - protein, 16 aa, Homo sapiens
  CDR3 for beta chain variable domain of TCR clone 302052 (TRBV7-2, TRBJ1-2)
CASSPTSRTSLGGYTF

SEQ ID NO: 604105 - protein, 16 aa, Homo sapiens
  CDR3 for alpha chain variable domain of TCR clone 302053 (TRAV26-1, TRAJ36)
CIVRVPDQTGANNLFF

SEQ ID NO: 604106 - protein, 23 aa, Homo sapiens
  CDR3 for beta chain variable domain of TCR clone 302053 (TRBV6-1, TRBJ1-1)
CASSGVGNYKEFRELTLKLSLDK

SEQ ID NO: 604107 - protein, 13 aa, Homo sapiens
  CDR3 for alpha chain variable domain of TCR clone 302054 (TRAV8-3, TRAJ6)
CAARRGGSYIPTF

SEQ ID NO: 604108 - protein, 15 aa, Homo sapiens
  CDR3 for beta chain variable domain of TCR clone 302054 (TRBV4-1, TRBJ2-3)
CPSSNLAGGRDTQYF

SEQ ID NO: 604109 - protein, 15 aa, Homo sapiens
  CDR3 for alpha chain variable domain of TCR clone 302055 (TRAV3, TRAJ4)
CAVRDGTGGYNKLIF

SEQ ID NO: 604110 - protein, 13 aa, Homo sapiens
  CDR3 for beta chain variable domain of TCR clone 302055 (TRBV12-5, TRBJ1-2)
CASGVLTGNGYIF

SEQ ID NO: 604111 - protein, 16 aa, Homo sapiens
  CDR3 for alpha chain variable domain of TCR clone 302056 (TRAV30, TRAJ24)
CGTEIVDADSWGKFQF

SEQ ID NO: 604112 - protein, 14 aa, Homo sapiens
  CDR3 for beta chain variable domain of TCR clone 302056 (TRBV7-2, TRBJ1-5)
CASGPRGGPQPQHF

SEQ ID NO: 604113 - protein, 12 aa, Homo sapiens
  CDR3 for alpha chain variable domain of TCR clone 302057 (TRAV30, TRAJ15)
CGTNQAGTALIF

SEQ ID NO: 604114 - protein, 13 aa, Homo sapiens
  CDR3 for beta chain variable domain of TCR clone 302057 (TRBV10-3, TRBJ2-5)
CAMTSGAGETQYF

SEQ ID NO: 604115 - protein, 13 aa, Homo sapiens
  CDR3 for alpha chain variable domain of TCR clone 302058 (TRAV13-2, TRAJ15)
CAERPQAGTALIF

SEQ ID NO: 604116 - protein, 15 aa, Homo sapiens
  CDR3 for beta chain variable domain of TCR clone 302058 (TRBV11-2, TRBJ2-7)
CASRFPGTGCYEQYF

SEQ ID NO: 604117 - protein, 15 aa, Homo sapiens
  CDR3 for alpha chain variable domain of TCR clone 302059 (TRAV23/DV6, TRAJ13)
CAAWPGGGGNQKVTF

SEQ ID NO: 604118 - protein, 17 aa, Homo sapiens
  CDR3 for beta chain variable domain of TCR clone 302059 (TRBV19, TRBJ2-7)
CASSISFYDSYPYEQYV

SEQ ID NO: 604119 - protein, 12 aa, Homo sapiens
  CDR3 for alpha chain variable domain of TCR clone 302060 (TRAV12-3, TRAJ17)
CAMTLTGNKLTF

SEQ ID NO: 604120 - protein, 15 aa, Homo sapiens
  CDR3 for beta chain variable domain of TCR clone 302060 (TRBV20-1, TRBJ2-7)
CSARERGAGRDEQYC

SEQ ID NO: 604121 - protein, 11 aa, Homo sapiens
  CDR3 for alpha chain variable domain of TCR clone 302061 (TRAV17, TRAJ9)
CAMTGGFKTIF

SEQ ID NO: 604122 - protein, 15 aa, Homo sapiens
  CDR3 for beta chain variable domain of TCR clone 302061 (TRBV9, TRBJ1-6)
CASSVAGTGDSPLHF

SEQ ID NO: 604123 - protein, 14 aa, Homo sapiens
  CDR3 for alpha chain variable domain of TCR clone 302062 (TRAV8-1, TRAJ36)
CAVNSPPGANNLFF

SEQ ID NO: 604124 - protein, 15 aa, Homo sapiens
  CDR3 for beta chain variable domain of TCR clone 302062 (TRBV7-2, TRBJ2-3)
CASSLEQGGTDTQYF

SEQ ID NO: 604125 - protein, 13 aa, Homo sapiens
  CDR3 for alpha chain variable domain of TCR clone 302063 (TRAV12-1, TRAJ39)
CGDDNNACNMLTF

SEQ ID NO: 604126 - protein, 16 aa, Homo sapiens
  CDR3 for beta chain variable domain of TCR clone 302063 (TRBV7-2, TRBJ1-2)
CASSSNQDRRGHGYTF

SEQ ID NO: 604127 - protein, 15 aa, Homo sapiens
  CDR3 for alpha chain variable domain of TCR clone 302064 (TRAV13-1, TRAJ57)
QVPPLSQGGSEKLVF

SEQ ID NO: 604128 - protein, 17 aa, Homo sapiens
  CDR3 for beta chain variable domain of TCR clone 302064 (TRBV7-3, TRBJ2-3)
CASSLMKRMRGPDTQYF

SEQ ID NO: 604129 - protein, 14 aa, Homo sapiens
  CDR3 for alpha chain variable domain of TCR clone 302065 (TRAV1-2, TRAJ16)
CAVNRFSDGQKLLF

SEQ ID NO: 604130 - protein, 19 aa, Homo sapiens
  CDR3 for beta chain variable domain of TCR clone 302065 (TRBV4-3, TRBJ2-7)
CISAPAAKQPSGTPYEQYF

SEQ ID NO: 604131 - protein, 11 aa, Homo sapiens
  CDR3 for alpha chain variable domain of TCR clone 302066 (TRAV12-2, TRAJ54)
CAVEVAQKLVF

SEQ ID NO: 604132 - protein, 17 aa, Homo sapiens
  CDR3 for beta chain variable domain of TCR clone 302066 (TRBV18, TRBJ1-3)
CASSPYPTGPSGNTIYF

SEQ ID NO: 604133 - protein, 15 aa, Homo sapiens
  CDR3 for alpha chain variable domain of TCR clone 302067 (TRAV17, TRAJ4)
CATGTWSGGYNKLIF

SEQ ID NO: 604134 - protein, 14 aa, Homo sapiens
  CDR3 for beta chain variable domain of TCR clone 302067 (TRBV20-1, TRBJ2-1)
CSAQIGGSANEQFF

SEQ ID NO: 604135 - protein, 18 aa, Homo sapiens
  CDR3 for alpha chain variable domain of TCR clone 302068 (TRAV13-1, TRAJ52)
CAAKNPNAGGTSYGKLTF

SEQ ID NO: 604136 - protein, 13 aa, Homo sapiens
  CDR3 for beta chain variable domain of TCR clone 302068 (TRBV10-3, TRBJ2-7)
CASKLAVSYEQYF

SEQ ID NO: 604137 - protein, 16 aa, Homo sapiens
  CDR3 for alpha chain variable domain of TCR clone 302069 (TRAV14/DV4, TRAJ54)
CAMREGRIQGAQKLVF

SEQ ID NO: 604138 - protein, 15 aa, Homo sapiens
  CDR3 for beta chain variable domain of TCR clone 302069 (TRBV12-4, TRBJ2-5)
CASSPPTGLQETQYF

SEQ ID NO: 604139 - protein, 14 aa, Homo sapiens
  CDR3 for alpha chain variable domain of TCR clone 302070 (TRAV8-3, TRAJ4)
CAVGAAGGYNKLIF

SEQ ID NO: 604140 - protein, 15 aa, Homo sapiens
  CDR3 for beta chain variable domain of TCR clone 302070 (TRBV6-6, TRBJ1-1)
CASSPRGDVETEAFF

SEQ ID NO: 604141 - protein, 13 aa, Homo sapiens
  CDR3 for alpha chain variable domain of TCR clone 302071 (TRAV8-3, TRAJ40)
CAGVVSGTYKYIF

SEQ ID NO: 604142 - protein, 15 aa, Homo sapiens
  CDR3 for beta chain variable domain of TCR clone 302071 (TRBV7-2, TRBJ2-1)
CASRKTGSSYNEQFF

SEQ ID NO: 604143 - protein, 15 aa, Homo sapiens
  CDR3 for alpha chain variable domain of TCR clone 302072 (TRAV17, TRAJ13)
CATDAGSVGYQKVTF

SEQ ID NO: 604144 - protein, 17 aa, Homo sapiens
  CDR3 for beta chain variable domain of TCR clone 302072 (TRBV11-2, TRBJ2-1)
CASGLYPPGVEYNEQFF

SEQ ID NO: 604145 - protein, 13 aa, Homo sapiens
  CDR3 for alpha chain variable domain of TCR clone 302073 (TRAV35, TRAJ44)
CAGLSGTASKLTF

SEQ ID NO: 604146 - protein, 14 aa, Homo sapiens
  CDR3 for beta chain variable domain of TCR clone 302073 (TRBV2, TRBJ1-2)
CASNEGTGPYGYTF

SEQ ID NO: 604147 - protein, 10 aa, Homo sapiens
  CDR3 for alpha chain variable domain of TCR clone 302074 (TRAV4, TRAJ33)
TLDSNYQLIW

SEQ ID NO: 604148 - protein, 19 aa, Homo sapiens
  CDR3 for beta chain variable domain of TCR clone 302074 (TRBV25-1, TRBJ2-2)
CAILVYRVDRGRKTGELFF

SEQ ID NO: 604149 - protein, 13 aa, Homo sapiens
  CDR3 for alpha chain variable domain of TCR clone 302075 (TRAV12-1, TRAJ9)
CVVLYTGGFKTIF

SEQ ID NO: 604150 - protein, 13 aa, Homo sapiens
  CDR3 for beta chain variable domain of TCR clone 302075 (TRBV10-3, TRBJ2-7)
CASKLAVNYEQYF

SEQ ID NO: 604151 - protein, 15 aa, Homo sapiens
  CDR3 for alpha chain variable domain of TCR clone 302076 (TRAV27, TRAJ50)
CAGVGRGTSYDKVIF

SEQ ID NO: 604152 - protein, 14 aa, Homo sapiens
  CDR3 for beta chain variable domain of TCR clone 302076 (TRBV7-2, TRBJ1-1)
CASSFNDLNTEAFF

SEQ ID NO: 604153 - protein, 17 aa, Homo sapiens
  CDR3 for alpha chain variable domain of TCR clone 302077 (TRAV12-2, TRAJ42)
CAVNILNYGGSQGNLIF

SEQ ID NO: 604154 - protein, 14 aa, Homo sapiens
  CDR3 for beta chain variable domain of TCR clone 302077 (TRBV7-2, TRBJ2-7)
CASRSQGAAYEQYF

SEQ ID NO: 604155 - protein, 10 aa, Homo sapiens
  CDR3 for alpha chain variable domain of TCR clone 302078 (TRAV17, TRAJ36)
CVTVAGNLFF

SEQ ID NO: 604156 - protein, 12 aa, Homo sapiens
  CDR3 for beta chain variable domain of TCR clone 302078 (TRBV11-2, TRBJ2-4)
CASSSASGSEYF

SEQ ID NO: 604157 - protein, 15 aa, Homo sapiens
  CDR3 for alpha chain variable domain of TCR clone 302079 (TRAV8-4, TRAJ37)
CAVTYGSSNTGKLIF

SEQ ID NO: 604158 - protein, 17 aa, Homo sapiens
  CDR3 for beta chain variable domain of TCR clone 302079 (TRBV7-8, TRBJ2-6)
CASSAGTGGAGANVLTF

SEQ ID NO: 604159 - protein, 14 aa, Homo sapiens
  CDR3 for alpha chain variable domain of TCR clone 302080 (TRAV2, TRAJ32)
CAVDEGGATNKLIF

SEQ ID NO: 604160 - protein, 12 aa, Homo sapiens
  CDR3 for beta chain variable domain of TCR clone 302080 (TRBV11-2, TRBJ2-2)
CASSLGGGELFF

SEQ ID NO: 604161 - protein, 14 aa, Homo sapiens
  CDR3 for alpha chain variable domain of TCR clone 302081 (TRAV35, TRAJ13)
CAGSPSGGYQKVTL

SEQ ID NO: 604162 - protein, 17 aa, Homo sapiens
  CDR3 for beta chain variable domain of TCR clone 302081 (TRBV18, TRBJ1-5)
CQLTTCRVRQNNQPQHF

SEQ ID NO: 604163 - protein, 13 aa, Homo sapiens
  CDR3 for alpha chain variable domain of TCR clone 302082 (TRAV35, TRAJ37)
CAGSSGNTGKLIF

SEQ ID NO: 604164 - protein, 16 aa, Homo sapiens
  CDR3 for beta chain variable domain of TCR clone 302082 (TRBV10-3, TRBJ2-1)
CAISLTRGNSYNEQFF

SEQ ID NO: 604165 - protein, 13 aa, Homo sapiens
  CDR3 for alpha chain variable domain of TCR clone 302083 (TRAV21, TRAJ45)
CAVMGGGADGLTF

SEQ ID NO: 604166 - protein, 14 aa, Homo sapiens
  CDR3 for beta chain variable domain of TCR clone 302083 (TRBV4-3, TRBJ1-4)
CASSPLQLNEKLFF

SEQ ID NO: 604167 - protein, 13 aa, Homo sapiens
  CDR3 for alpha chain variable domain of TCR clone 302084 (TRAV38-2/DV8, TRAJ34)
CAYRTWNTDKLIL

SEQ ID NO: 604168 - protein, 18 aa, Homo sapiens
  CDR3 for beta chain variable domain of TCR clone 302084 (TRBV6-6, TRBJ1-3)
CASSYSKWDSISGNTIYF

SEQ ID NO: 604169 - protein, 15 aa, Homo sapiens
  CDR3 for alpha chain variable domain of TCR clone 302085 (TRAV26-2, TRAJ39)
CSLRGNNNAGNMLTF

SEQ ID NO: 604170 - protein, 15 aa, Homo sapiens
  CDR3 for beta chain variable domain of TCR clone 302085 (TRBV5-4, TRBJ1-1)
CASSSLGWANTEAVF

SEQ ID NO: 604171 - protein, 12 aa, Homo sapiens
  CDR3 for alpha chain variable domain of TCR clone 302086 (TRAV21, TRAJ33)
CAKMDSNYQLIW

SEQ ID NO: 604172 - protein, 17 aa, Homo sapiens
  CDR3 for beta chain variable domain of TCR clone 302086 (TRBV7-3, TRBJ2-5)
CASSLGSGRSGSETQYF

SEQ ID NO: 604173 - protein, 11 aa, Homo sapiens
  CDR3 for alpha chain variable domain of TCR clone 302087 (TRAV17, TRAJ36)
CAPTGANNLFF

SEQ ID NO: 604174 - protein, 13 aa, Homo sapiens
  CDR3 for beta chain variable domain of TCR clone 302087 (TRBV4-1, TRBJ2-1)
CASSQAGGDEQFF

SEQ ID NO: 604175 - protein, 14 aa, Homo sapiens
  CDR3 for alpha chain variable domain of TCR clone 302088 (TRAV2, TRAJ9)
CAVDDRSGGFKTIF

SEQ ID NO: 604176 - protein, 17 aa, Homo sapiens
  CDR3 for beta chain variable domain of TCR clone 302088 (TRBV13, TRBJ2-3)
CASSLSRVAGGRNTQYF

SEQ ID NO: 604177 - protein, 18 aa, Homo sapiens
  CDR3 for alpha chain variable domain of TCR clone 302089 (TRAV26-1, TRAJ20)
CCVLLHRQSRSNDYKLSF

SEQ ID NO: 604178 - protein, 13 aa, Homo sapiens
  CDR3 for beta chain variable domain of TCR clone 302089 (TRBV7-3, TRBJ2-5)
CASSFRGGETQYF

SEQ ID NO: 604179 - protein, 15 aa, Homo sapiens
  CDR3 for alpha chain variable domain of TCR clone 302090 (TRAV20, TRAJ53)
CAVQASGGSNYKLTF

SEQ ID NO: 604180 - protein, 16 aa, Homo sapiens
  CDR3 for beta chain variable domain of TCR clone 302090 (TRBV7-8, TRBJ2-4)
CASSAERTLAKNMQYF

SEQ ID NO: 604181 - protein, 16 aa, Homo sapiens
  CDR3 for alpha chain variable domain of TCR clone 302091 (TRAV13-1, TRAJ18)
CAASTSGGSTLGRLYF

SEQ ID NO: 604182 - protein, 14 aa, Homo sapiens
  CDR3 for beta chain variable domain of TCR clone 302091 (TRBV7-9, TRBJ1-2)
CASSLVQINYGYTF

SEQ ID NO: 604183 - protein, 11 aa, Homo sapiens
  CDR3 for alpha chain variable domain of TCR clone 302092 (TRAV2, TRAJ13)
CASGGYQKFTF

SEQ ID NO: 604184 - protein, 13 aa, Homo sapiens
  CDR3 for beta chain variable domain of TCR clone 302092 (TRBV20-1, TRBJ1-1)
CSAPLGGGTEAFF

SEQ ID NO: 604185 - protein, 13 aa, Homo sapiens
  CDR3 for alpha chain variable domain of TCR clone 302093 (TRAV2, TRAJ40)
CAVVTSGAYIYIF

SEQ ID NO: 604186 - protein, 14 aa, Homo sapiens
  CDR3 for beta chain variable domain of TCR clone 302093 (TRBV19, TRBJ2-1)
CASPTFVLSGEQFF

SEQ ID NO: 604187 - protein, 14 aa, Homo sapiens
  CDR3 for alpha chain variable domain of TCR clone 302094 (TRAV12-2, TRAJ40)
CAVKIPSGTYKYIF

SEQ ID NO: 604188 - protein, 16 aa, Homo sapiens
  CDR3 for beta chain variable domain of TCR clone 302094 (TRBV27, TRBJ1-5)
CASSLSGGASNQPQHF

SEQ ID NO: 604189 - protein, 12 aa, Homo sapiens
  CDR3 for alpha chain variable domain of TCR clone 302095 (TRAV8-3, TRAJ20)
CAVGANNYKLSF

SEQ ID NO: 604190 - protein, 16 aa, Homo sapiens
  CDR3 for beta chain variable domain of TCR clone 302095 (TRBV19, TRBJ2-2)
CASRSPGTGATGGLFF

SEQ ID NO: 604191 - protein, 16 aa, Homo sapiens
  CDR3 for alpha chain variable domain of TCR clone 302096 (TRAV20, TRAJ28)
CAVRDPSGAGSYQLTF

SEQ ID NO: 604192 - protein, 15 aa, Homo sapiens
  CDR3 for beta chain variable domain of TCR clone 302096 (TRBV20-1, TRBJ1-1)
CSASRGVTGNTEAFF

SEQ ID NO: 604193 - protein, 16 aa, Homo sapiens
  CDR3 for alpha chain variable domain of TCR clone 302097 (TRAV26-1, TRAJ40)
CIVRVGTTSGTYKYIF

SEQ ID NO: 604194 - protein, 15 aa, Homo sapiens
  CDR3 for beta chain variable domain of TCR clone 302097 (TRBV13, TRBJ1-2)
CASSLGRQPGYGYTF

SEQ ID NO: 604195 - protein, 15 aa, Homo sapiens
  CDR3 for alpha chain variable domain of TCR clone 302098 (TRAV3, TRAJ48)
CAVRDLIFGNEKLTF

SEQ ID NO: 604196 - protein, 12 aa, Homo sapiens
  CDR3 for beta chain variable domain of TCR clone 302098 (TRBV7-8, TRBJ2-7)
CASSLGDREQYF

SEQ ID NO: 604197 - protein, 15 aa, Homo sapiens
  CDR3 for alpha chain variable domain of TCR clone 302099 (TRAV3, TRAJ13)
WAVRVYSGGYQKVTF

SEQ ID NO: 604198 - protein, 15 aa, Homo sapiens
  CDR3 for beta chain variable domain of TCR clone 302099 (TRBV5-7, TRBJ1-2)
CASSLGVAANYGYTF

SEQ ID NO: 604199 - protein, 15 aa, Homo sapiens
  CDR3 for alpha chain variable domain of TCR clone 302100 (TRAV38-2/DV8, TRAJ45)
CAYWDSGGGADGLTF

SEQ ID NO: 604200 - protein, 16 aa, Homo sapiens
  CDR3 for beta chain variable domain of TCR clone 302100 (TRBV19, TRBJ1-1)
CASSPTRVWPGTEAFF

SEQ ID NO: 604201 - protein, 15 aa, Homo sapiens
  CDR3 for alpha chain variable domain of TCR clone 302101 (TRAV26-1, TRAJ48)
CIVRVGGFGNEKLTF

SEQ ID NO: 604202 - protein, 16 aa, Homo sapiens
  CDR3 for beta chain variable domain of TCR clone 302101 (TRBV4-1, TRBJ2-3)
CASSHRAGGLTDTQYF

SEQ ID NO: 604203 - protein, 15 aa, Homo sapiens
  CDR3 for alpha chain variable domain of TCR clone 302102 (TRAV2, TRAJ11)
CAVEDPNSGYSTLTF

SEQ ID NO: 604204 - protein, 14 aa, Homo sapiens
  CDR3 for beta chain variable domain of TCR clone 302102 (TRBV4-1, TRBJ2-7)
CASRLTSGSYEQYF

SEQ ID NO: 604205 - protein, 14 aa, Homo sapiens
  CDR3 for alpha chain variable domain of TCR clone 302103 (TRAV1-2, TRAJ8)
CAVREDTGFQKLVF

SEQ ID NO: 604206 - protein, 15 aa, Homo sapiens
  CDR3 for beta chain variable domain of TCR clone 302103 (TRBV28, TRBJ2-6)
CASSLAGSAANVLTF

SEQ ID NO: 604207 - protein, 19 aa, Homo sapiens
  CDR3 for alpha chain variable domain of TCR clone 302104 (TRAV25, TRAJ43)
TATQTTDVGTYFCAVFMRF

SEQ ID NO: 604208 - protein, 13 aa, Homo sapiens
  CDR3 for beta chain variable domain of TCR clone 302104 (TRBV7-9, TRBJ1-2)
CASSLKQNYGFTF

SEQ ID NO: 604209 - protein, 14 aa, Homo sapiens
  CDR3 for alpha chain variable domain of TCR clone 302105 (TRAV1-2, TRAJ16)
CAVNRFSDGQKLLF

SEQ ID NO: 604210 - protein, 14 aa, Homo sapiens
  CDR3 for beta chain variable domain of TCR clone 302105 (TRBV7-6, TRBJ2-3)
CASSLGTVTDTQYS

SEQ ID NO: 604211 - protein, 14 aa, Homo sapiens
  CDR3 for alpha chain variable domain of TCR clone 302106 (TRAV21, TRAJ36)
CAVPDQTGANNLFF

SEQ ID NO: 604212 - protein, 16 aa, Homo sapiens
  CDR3 for beta chain variable domain of TCR clone 302106 (TRBV2, TRBJ2-5)
CASSETQGVGEEAQYF

SEQ ID NO: 604213 - protein, 11 aa, Homo sapiens
  CDR3 for alpha chain variable domain of TCR clone 302107 (TRAV21, TRAJ9)
CAVPEGFKTIF

SEQ ID NO: 604214 - protein, 12 aa, Homo sapiens
  CDR3 for beta chain variable domain of TCR clone 302107 (TRBV20-1, TRBJ2-3)
CSARVGTDTQYF

SEQ ID NO: 604215 - protein, 11 aa, Homo sapiens
  CDR3 for alpha chain variable domain of TCR clone 302108 (TRAV21, TRAJ34)
CAHYNTDKLIF

SEQ ID NO: 604216 - protein, 15 aa, Homo sapiens
  CDR3 for beta chain variable domain of TCR clone 302108 (TRBV25-1, TRBJ1-4)
CASSGSGTGIEKLFF

SEQ ID NO: 604217 - protein, 15 aa, Homo sapiens
  CDR3 for alpha chain variable domain of TCR clone 302109 (TRAV12-3, TRAJ6)
CAVSATTGGSYIPTF

SEQ ID NO: 604218 - protein, 16 aa, Homo sapiens
  CDR3 for beta chain variable domain of TCR clone 302109 (TRBV9, TRBJ2-1)
CASSPTTGASYNEQFF

SEQ ID NO: 604219 - protein, 13 aa, Homo sapiens
  CDR3 for alpha chain variable domain of TCR clone 302110 (TRAV12-2, TRAJ6)
CAALKGGSYIPTF

SEQ ID NO: 604220 - protein, 12 aa, Homo sapiens
  CDR3 for beta chain variable domain of TCR clone 302110 (TRBV12-4, TRBJ2-7)
CASSLGGYEQYF

SEQ ID NO: 604221 - protein, 13 aa, Homo sapiens
  CDR3 for alpha chain variable domain of TCR clone 302111 (TRAV1-2, TRAJ20)
CAVRDGNDYKLSF

SEQ ID NO: 604222 - protein, 16 aa, Homo sapiens
  CDR3 for beta chain variable domain of TCR clone 302111 (TRBV28, TRBJ2-7)
CASSLFFETGGPEQYF

SEQ ID NO: 604223 - protein, 14 aa, Homo sapiens
  CDR3 for alpha chain variable domain of TCR clone 302112 (TRAV2, TRAJ37)
CVVDFTCNTGKLIF

SEQ ID NO: 604224 - protein, 15 aa, Homo sapiens
  CDR3 for beta chain variable domain of TCR clone 302112 (TRBV20-1, TRBJ1-1)
CSASRGVTGNTEAFF

SEQ ID NO: 604225 - protein, 14 aa, Homo sapiens
  CDR3 for alpha chain variable domain of TCR clone 302113 (TRAV26-1, TRAJ38)
CIADNAGNNRKLIW

SEQ ID NO: 604226 - protein, 16 aa, Homo sapiens
  CDR3 for beta chain variable domain of TCR clone 302113 (TRBV10-3, TRBJ2-1)
CAIRGGGRGDYNEQFF

SEQ ID NO: 604227 - protein, 15 aa, Homo sapiens
  CDR3 for alpha chain variable domain of TCR clone 302114 (TRAV13-2, TRAJ10)
CAENRDTGGGNKLTF

SEQ ID NO: 604228 - protein, 14 aa, Homo sapiens
  CDR3 for beta chain variable domain of TCR clone 302114 (TRBV18, TRBJ2-7)
CASSPRGGAYEQYF

SEQ ID NO: 604229 - protein, 15 aa, Homo sapiens
  CDR3 for alpha chain variable domain of TCR clone 302115 (TRAV1-2, TRAJ20)
CLLPLCCASYYKLSF

SEQ ID NO: 604230 - protein, 18 aa, Homo sapiens
  CDR3 for beta chain variable domain of TCR clone 302115 (TRBV20-1, TRBJ2-6)
CSAETTPTHGSGANVLTF

SEQ ID NO: 604231 - protein, 14 aa, Homo sapiens
  CDR3 for alpha chain variable domain of TCR clone 302116 (TRAV12-1, TRAJ12)
CVVIAMDSSYKLIF

SEQ ID NO: 604232 - protein, 13 aa, Homo sapiens
  CDR3 for beta chain variable domain of TCR clone 302116 (TRBV29-1, TRBJ1-1)
CSVGDSRNTEAFF

SEQ ID NO: 604233 - protein, 17 aa, Homo sapiens
  CDR3 for alpha chain variable domain of TCR clone 302117 (TRAV8-3, TRAJ50)
CAVGAVVTETSYDKVIV

SEQ ID NO: 604234 - protein, 13 aa, Homo sapiens
  CDR3 for beta chain variable domain of TCR clone 302117 (TRBV7-9, TRBJ2-2)
CASSSAGTGELFF

SEQ ID NO: 604235 - protein, 14 aa, Homo sapiens
  CDR3 for alpha chain variable domain of TCR clone 302118 (TRAV12-2, TRAJ5)
CAVNRSTGRRALTF

SEQ ID NO: 604236 - protein, 12 aa, Homo sapiens
  CDR3 for beta chain variable domain of TCR clone 302118 (TRBV19, TRBJ1-5)
CASSIAQQTQYF

SEQ ID NO: 604237 - protein, 14 aa, Homo sapiens
  CDR3 for alpha chain variable domain of TCR clone 302119 (TRAV17, TRAJ31)
CATVLRNNNARLVF

SEQ ID NO: 604238 - protein, 14 aa, Homo sapiens
  CDR3 for beta chain variable domain of TCR clone 302119 (TRBV12-4, TRBJ2-5)
CASSLWQKQETQDF

SEQ ID NO: 604239 - protein, 12 aa, Homo sapiens
  CDR3 for alpha chain variable domain of TCR clone 302120 (TRAV6, TRAJ5)
CSRNTGRRALTF

SEQ ID NO: 604240 - protein, 15 aa, Homo sapiens
  CDR3 for beta chain variable domain of TCR clone 302120 (TRBV7-2, TRBJ1-2)
CASSPRAGWNYGYTF

SEQ ID NO: 604241 - protein, 11 aa, Homo sapiens
  CDR3 for alpha chain variable domain of TCR clone 302121 (TRAV2, TRAJ21)
CAVFNFNKCYF

SEQ ID NO: 604242 - protein, 17 aa, Homo sapiens
  CDR3 for beta chain variable domain of TCR clone 302121 (TRBV5-7, TRBJ2-7)
CASSLWRVLAGSYEQYF

SEQ ID NO: 604243 - protein, 18 aa, Homo sapiens
  CDR3 for alpha chain variable domain of TCR clone 302122 (TRAV26-1, TRAJ52)
CIVRVAGAGGTSCGKLTF

SEQ ID NO: 604244 - protein, 13 aa, Homo sapiens
  CDR3 for beta chain variable domain of TCR clone 302122 (TRBV7-8, TRBJ1-2)
CASSAQSYYGYTF

SEQ ID NO: 604245 - protein, 17 aa, Homo sapiens
  CDR3 for alpha chain variable domain of TCR clone 302123 (TRAV38-2/DV8, TRAJ32)
CAYRKGNYGGATNKLIF

SEQ ID NO: 604246 - protein, 13 aa, Homo sapiens
  CDR3 for beta chain variable domain of TCR clone 302123 (TRBV25-1, TRBJ1-1)
CQHPPGGNTEAFF

SEQ ID NO: 604247 - protein, 15 aa, Homo sapiens
  CDR3 for alpha chain variable domain of TCR clone 302124 (TRAV17, TRAJ54)
CATTRSEQGAQKLVF

SEQ ID NO: 604248 - protein, 16 aa, Homo sapiens
  CDR3 for beta chain variable domain of TCR clone 302124 (TRBV12-4, TRBJ2-5)
CASGPRTSGNQETQYF

SEQ ID NO: 604249 - protein, 15 aa, Homo sapiens
  CDR3 for alpha chain variable domain of TCR clone 302125 (TRAV8-3, TRAJ45)
CSSSYSGGGADGLTF

SEQ ID NO: 604250 - protein, 16 aa, Homo sapiens
  CDR3 for beta chain variable domain of TCR clone 302125 (TRBV20-1, TRBJ2-2)
CSASASGIPGAGELFF

SEQ ID NO: 604251 - protein, 11 aa, Homo sapiens
  CDR3 for alpha chain variable domain of TCR clone 302126 (TRAV3, TRAJ21)
CSLTGFNKFYF

SEQ ID NO: 604252 - protein, 14 aa, Homo sapiens
  CDR3 for beta chain variable domain of TCR clone 302126 (TRBV7-9, TRBJ2-4)
CASSLAMGGNIQYF

SEQ ID NO: 604253 - protein, 11 aa, Homo sapiens
  CDR3 for alpha chain variable domain of TCR clone 302127 (TRAV21, TRAJ34)
CAVTNTDKLIS

SEQ ID NO: 604254 - protein, 13 aa, Homo sapiens
  CDR3 for beta chain variable domain of TCR clone 302127 (TRBV7-9, TRBJ1-2)
CASSLKQNYGYTF

SEQ ID NO: 604255 - protein, 14 aa, Homo sapiens
  CDR3 for alpha chain variable domain of TCR clone 302128 (TRAV12-2, TRAJ17)
CAVLFKAAGNKLTL

SEQ ID NO: 604256 - protein, 12 aa, Homo sapiens
  CDR3 for beta chain variable domain of TCR clone 302128 (TRBV28, TRBJ2-1)
CASSVQINEQFF

SEQ ID NO: 604257 - protein, 17 aa, Homo sapiens
  CDR3 for alpha chain variable domain of TCR clone 302129 (TRAV26-1, TRAJ53)
CIVRVDDSGGSNFKMTF

SEQ ID NO: 604258 - protein, 15 aa, Homo sapiens
  CDR3 for beta chain variable domain of TCR clone 302129 (TRBV20-1, TRBJ2-7)
CSARVPAAYFYEQYF

SEQ ID NO: 604259 - protein, 14 aa, Homo sapiens
  CDR3 for alpha chain variable domain of TCR clone 302130 (TRAV12-2, TRAJ13)
CAVKKTGGYQKVTF

SEQ ID NO: 604260 - protein, 15 aa, Homo sapiens
  CDR3 for beta chain variable domain of TCR clone 302130 (TRBV20-1, TRBJ2-7)
CSARGPLAGGREQYF

SEQ ID NO: 604261 - protein, 13 aa, Homo sapiens
  CDR3 for alpha chain variable domain of TCR clone 302131 (TRAV21, TRAJ37)
CAVSSGNTVKLIF

SEQ ID NO: 604262 - protein, 15 aa, Homo sapiens
  CDR3 for beta chain variable domain of TCR clone 302131 (TRBV12-4, TRBJ1-2)
CASSFVDRGNYGYTF

SEQ ID NO: 604263 - protein, 11 aa, Homo sapiens
  CDR3 for alpha chain variable domain of TCR clone 302132 (TRAV35, TRAJ30)
CAPGGDDKIIF

SEQ ID NO: 604264 - protein, 14 aa, Homo sapiens
  CDR3 for beta chain variable domain of TCR clone 302132 (TRBV20-1, TRBJ2-7)
CSAPELAGVGEQYF

SEQ ID NO: 604265 - protein, 14 aa, Homo sapiens
  CDR3 for alpha chain variable domain of TCR clone 302133 (TRAV9-2, TRAJ39)
CALYIYNAGNMLTF

SEQ ID NO: 604266 - protein, 13 aa, Homo sapiens
  CDR3 for beta chain variable domain of TCR clone 302133 (TRBV4-1, TRBJ2-3)
CASSQPPTDTQYF

SEQ ID NO: 604267 - protein, 15 aa, Homo sapiens
  CDR3 for alpha chain variable domain of TCR clone 302134 (TRAV26-1, TRAJ29)
CIVRVEGSGNTPLVF

SEQ ID NO: 604268 - protein, 15 aa, Homo sapiens
  CDR3 for beta chain variable domain of TCR clone 302134 (TRBV7-9, TRBJ1-5)
CASSKGHQPNQTQHF

SEQ ID NO: 604269 - protein, 12 aa, Homo sapiens
  CDR3 for alpha chain variable domain of TCR clone 302135 (TRAV13-1, TRAJ43)
CAAGRFNNDMRF

SEQ ID NO: 604270 - protein, 12 aa, Homo sapiens
  CDR3 for beta chain variable domain of TCR clone 302135 (TRBV25-1, TRBJ1-1)
CASRHMNTEAFF

SEQ ID NO: 604271 - protein, 13 aa, Homo sapiens
  CDR3 for alpha chain variable domain of TCR clone 302136 (TRAV12-3, TRAJ9)
CAMRNTEGFKTIF

SEQ ID NO: 604272 - protein, 14 aa, Homo sapiens
  CDR3 for beta chain variable domain of TCR clone 302136 (TRBV11-2, TRBJ2-7)
CASSSTGEGYEQYF

SEQ ID NO: 604273 - protein, 14 aa, Homo sapiens
  CDR3 for alpha chain variable domain of TCR clone 302137 (TRAV1-1, TRAJ8)
CAVREDTGFQKLVF

SEQ ID NO: 604274 - protein, 15 aa, Homo sapiens
  CDR3 for beta chain variable domain of TCR clone 302137 (TRBV6-3, TRBJ2-7)
CASSSPGTVFYEQYF

SEQ ID NO: 604275 - protein, 14 aa, Homo sapiens
  CDR3 for alpha chain variable domain of TCR clone 302138 (TRAV12-2, TRAJ49)
CAVNPRTPVTSSIL

SEQ ID NO: 604276 - protein, 19 aa, Homo sapiens
  CDR3 for beta chain variable domain of TCR clone 302138 (TRBV12-5, TRBJ2-2)
CASGLGQGTMFANAGELFF

SEQ ID NO: 604277 - protein, 13 aa, Homo sapiens
  CDR3 for alpha chain variable domain of TCR clone 302139 (TRAV29/DV5, TRAJ31)
CAASRNNNARLMF

SEQ ID NO: 604278 - protein, 14 aa, Homo sapiens
  CDR3 for beta chain variable domain of TCR clone 302139 (TRBV7-9, TRBJ2-2)
CASSLVQDTGELFV

SEQ ID NO: 604279 - protein, 13 aa, Homo sapiens
  CDR3 for alpha chain variable domain of TCR clone 302140 (TRAV13-2, TRAJ48)
CAEMDFGNEKLTF

SEQ ID NO: 604280 - protein, 15 aa, Homo sapiens
  CDR3 for beta chain variable domain of TCR clone 302140 (TRBV7-2, TRBJ1-1)
CASSFAGDRDTEAFF

SEQ ID NO: 604281 - protein, 11 aa, Homo sapiens
  CDR3 for alpha chain variable domain of TCR clone 302141 (TRAV12-2, TRAJ29)
CAVTLRSPLVF

SEQ ID NO: 604282 - protein, 11 aa, Homo sapiens
  CDR3 for beta chain variable domain of TCR clone 302141 (TRBV11-2, TRBJ2-2)
CASSVPGELFF

SEQ ID NO: 604283 - protein, 14 aa, Homo sapiens
  CDR3 for alpha chain variable domain of TCR clone 302142 (TRAV8-3, TRAJ7)
CAAIELYGNNRLAF

SEQ ID NO: 604284 - protein, 15 aa, Homo sapiens
  CDR3 for beta chain variable domain of TCR clone 302142 (TRBV7-9, TRBJ1-4)
CASSRTGGFNEKLFF

SEQ ID NO: 604285 - protein, 10 aa, Homo sapiens
  CDR3 for alpha chain variable domain of TCR clone 302143 (TRAV13-2, TRAJ49)
FAATGNQFYF

SEQ ID NO: 604286 - protein, 13 aa, Homo sapiens
  CDR3 for beta chain variable domain of TCR clone 302143 (TRBV10-3, TRBJ1-2)
CAISERDSYGYTF

SEQ ID NO: 604287 - protein, 10 aa, Homo sapiens
  CDR3 for alpha chain variable domain of TCR clone 302144 (TRAV12-2, TRAJ20)
CAVYLYKLSF

SEQ ID NO: 604288 - protein, 14 aa, Homo sapiens
  CDR3 for beta chain variable domain of TCR clone 302144 (TRBV10-3, TRBJ2-2)
CAISEVSHSGELFL

SEQ ID NO: 604289 - protein, 14 aa, Homo sapiens
  CDR3 for alpha chain variable domain of TCR clone 302145 (TRAV1-2, TRAJ8)
GAVREDTGFQKLVF

SEQ ID NO: 604290 - protein, 21 aa, Homo sapiens
  CDR3 for beta chain variable domain of TCR clone 302145 (TRBV11-2, TRBJ1-1)
LRTRPCISVPIRGDMNTEAFF

SEQ ID NO: 604291 - protein, 14 aa, Homo sapiens
  CDR3 for alpha chain variable domain of TCR clone 302146 (TRAV38-1, TRAJ45)
CAYYSGGGADGLPL

SEQ ID NO: 604292 - protein, 20 aa, Homo sapiens
  CDR3 for beta chain variable domain of TCR clone 302146 (TRBV28, TRBJ2-1)
CASTPIGRSPGLAGGNEQFF

SEQ ID NO: 604293 - protein, 12 aa, Homo sapiens
  CDR3 for alpha chain variable domain of TCR clone 302147 (TRAV1-1, TRAJ8)
CAGCTGFQKLVF

SEQ ID NO: 604294 - protein, 13 aa, Homo sapiens
  CDR3 for beta chain variable domain of TCR clone 302147 (TRBV7-3, TRBJ1-1)
CASSQDWGAEAFF

SEQ ID NO: 604295 - protein, 15 aa, Homo sapiens
  CDR3 for alpha chain variable domain of TCR clone 302148 (TRAV12-3, TRAJ10)
CVSYILTGGGNKLTC

SEQ ID NO: 604296 - protein, 15 aa, Homo sapiens
  CDR3 for beta chain variable domain of TCR clone 302148 (TRBV7-2, TRBJ1-6)
CASSLGPDRGMPLHF

SEQ ID NO: 604297 - protein, 13 aa, Homo sapiens
  CDR3 for alpha chain variable domain of TCR clone 302149 (TRAV23/DV6, TRAJ47)
CAASMTRGNKLVF

SEQ ID NO: 604298 - protein, 14 aa, Homo sapiens
  CDR3 for beta chain variable domain of TCR clone 302149 (TRBV15, TRBJ2-5)
CATSGDRGQETQYF

SEQ ID NO: 604299 - protein, 19 aa, Homo sapiens
  CDR3 for alpha chain variable domain of TCR clone 302150 (TRAV26-1, TRAJ28)
CIVRVAHAYPGAGSYQLTF

SEQ ID NO: 604300 - protein, 17 aa, Homo sapiens
  CDR3 for beta chain variable domain of TCR clone 302150 (TRBV9, TRBJ2-2)
CASSVGGQGTDTGELFF

SEQ ID NO: 604301 - protein, 14 aa, Homo sapiens
  CDR3 for alpha chain variable domain of TCR clone 302151 (TRAV1-2, TRAJ16)
CAVNRFSDGQKLLF

SEQ ID NO: 604302 - protein, 16 aa, Homo sapiens
  CDR3 for beta chain variable domain of TCR clone 302151 (TRBV9, TRBJ2-1)
CASSPTTGASYNEQFF

SEQ ID NO: 604303 - protein, 17 aa, Homo sapiens
  CDR3 for alpha chain variable domain of TCR clone 302152 (TRAV3, TRAJ6)
CAVRDGPRAGGSYIPTF

SEQ ID NO: 604304 - protein, 16 aa, Homo sapiens
  CDR3 for beta chain variable domain of TCR clone 302152 (TRBV19, TRBJ2-3)
CASSFYTTGIGDTQYF

SEQ ID NO: 604305 - protein, 14 aa, Homo sapiens
  CDR3 for alpha chain variable domain of TCR clone 302153 (TRAV1-2, TRAJ37)
CAVRSKSNTGKLIF

SEQ ID NO: 604306 - protein, 14 aa, Homo sapiens
  CDR3 for beta chain variable domain of TCR clone 302153 (TRBV6-3, TRBJ1-2)
CASSEGGGGYGYTF

SEQ ID NO: 604307 - protein, 13 aa, Homo sapiens
  CDR3 for alpha chain variable domain of TCR clone 302154 (TRAV25, TRAJ30)
CAGRVDRDDKIIF

SEQ ID NO: 604308 - protein, 15 aa, Homo sapiens
  CDR3 for beta chain variable domain of TCR clone 302154 (TRBV5-5, TRBJ1-5)
CASSSTPGSNQPQHF

SEQ ID NO: 604309 - protein, 13 aa, Homo sapiens
  CDR3 for alpha chain variable domain of TCR clone 302155 (TRAV1-2, TRAJ31)
CAVRGYNNARLMF

SEQ ID NO: 604310 - protein, 15 aa, Homo sapiens
  CDR3 for beta chain variable domain of TCR clone 302155 (TRBV5-7, TRBJ2-7)
CASSLGPGRGHEQYF

SEQ ID NO: 604311 - protein, 17 aa, Homo sapiens
  CDR3 for alpha chain variable domain of TCR clone 302156 (TRAV3, TRAJ12)
CAVREIGGMDSSYKLIF

SEQ ID NO: 604312 - protein, 14 aa, Homo sapiens
  CDR3 for beta chain variable domain of TCR clone 302156 (TRBV28, TRBJ2-5)
CASSLGDRAETQYF

SEQ ID NO: 604313 - protein, 14 aa, Homo sapiens
  CDR3 for alpha chain variable domain of TCR clone 302157 (TRAV9-2, TRAJ39)
CALYIYNAGNMLTF

SEQ ID NO: 604314 - protein, 15 aa, Homo sapiens
  CDR3 for beta chain variable domain of TCR clone 302157 (TRBV6-5, TRBJ1-2)
CASSYSQAVNYGYTF

SEQ ID NO: 604315 - protein, 16 aa, Homo sapiens
  CDR3 for alpha chain variable domain of TCR clone 302158 (TRAV30, TRAJ24)
CGTEIVDADSWGKYQF

SEQ ID NO: 604316 - protein, 16 aa, Homo sapiens
  CDR3 for beta chain variable domain of TCR clone 302158 (TRBV7-3, TRBJ2-2)
CASSLKRGTLSGELFF

SEQ ID NO: 604317 - protein, 14 aa, Homo sapiens
  CDR3 for alpha chain variable domain of TCR clone 302159 (TRAV16, TRAJ26)
CALSPANYGQNFVF

SEQ ID NO: 604318 - protein, 12 aa, Homo sapiens
  CDR3 for beta chain variable domain of TCR clone 302159 (TRBV6-5, TRBJ2-2)
CASRSGTGELFF

SEQ ID NO: 604319 - protein, 12 aa, Homo sapiens
  CDR3 for alpha chain variable domain of TCR clone 302160 (TRAV13-2, TRAJ23)
CAERHRGGKLIF

SEQ ID NO: 604320 - protein, 13 aa, Homo sapiens
  CDR3 for beta chain variable domain of TCR clone 302160 (TRBV7-9, TRBJ2-3)
CASGPGSIDTEYF

SEQ ID NO: 604321 - protein, 12 aa, Homo sapiens
  CDR3 for alpha chain variable domain of TCR clone 302161 (TRAV12-1, TRAJ16)
CVVFRDGQKLLF

SEQ ID NO: 604322 - protein, 16 aa, Homo sapiens
  CDR3 for beta chain variable domain of TCR clone 302161 (TRBV27, TRBJ2-2)
CASSFRGLVRTGELFF

SEQ ID NO: 604323 - protein, 11 aa, Homo sapiens
  CDR3 for alpha chain variable domain of TCR clone 302162 (TRAV3, TRAJ21)
CAVGNFNKFYF

SEQ ID NO: 604324 - protein, 16 aa, Homo sapiens
  CDR3 for beta chain variable domain of TCR clone 302162 (TRBV19, TRBJ2-1)
CASSNAGPSSYNEQFY

SEQ ID NO: 604325 - protein, 12 aa, Homo sapiens
  CDR3 for alpha chain variable domain of TCR clone 302163 (TRAV4, TRAJ18)
CLVGERSVGSTW

SEQ ID NO: 604326 - protein, 14 aa, Homo sapiens
  CDR3 for beta chain variable domain of TCR clone 302163 (TRBV6-5, TRBJ1-2)
CASSYDGTGGGYTF

SEQ ID NO: 604327 - protein, 11 aa, Homo sapiens
  CDR3 for alpha chain variable domain of TCR clone 302164 (TRAV21, TRAJ34)
CAVTNTDKLIF

SEQ ID NO: 604328 - protein, 16 aa, Homo sapiens
  CDR3 for beta chain variable domain of TCR clone 302164 (TRBV7-3, TRBJ2-2)
CASSLKRGTLSGELFF

SEQ ID NO: 604329 - protein, 15 aa, Homo sapiens
  CDR3 for alpha chain variable domain of TCR clone 302165 (TRAV23/DV6, TRAJ13)
CAAWPGGGGDQEVTF

SEQ ID NO: 604330 - protein, 17 aa, Homo sapiens
  CDR3 for beta chain variable domain of TCR clone 302165 (TRBV19, TRBJ2-7)
CASSISCYDSYPYEQYF

SEQ ID NO: 604331 - protein, 15 aa, Homo sapiens
  CDR3 for alpha chain variable domain of TCR clone 302166 (TRAV12-1, TRAJ10)
CVVNKLTGGGNKLTF

SEQ ID NO: 604332 - protein, 12 aa, Homo sapiens
  CDR3 for beta chain variable domain of TCR clone 302166 (TRBV29-1, TRBJ2-3)
CSVTGGADTQYF

SEQ ID NO: 604333 - protein, 11 aa, Homo sapiens
  CDR3 for alpha chain variable domain of TCR clone 302167 (TRAV1-2, TRAJ20)
CAVANDYKLSF

SEQ ID NO: 604334 - protein, 14 aa, Homo sapiens
  CDR3 for beta chain variable domain of TCR clone 302167 (TRBV20-1, TRBJ2-1)
CSARGGSSYNEQFF

SEQ ID NO: 604335 - protein, 17 aa, Homo sapiens
  CDR3 for alpha chain variable domain of TCR clone 302168 (TRAV1-1, TRAJ32)
CAVRVDELWWCYKQAHL

SEQ ID NO: 604336 - protein, 14 aa, Homo sapiens
  CDR3 for beta chain variable domain of TCR clone 302168 (TRBV11-2, TRBJ2-7)
CASSLGNSLYEQYF

SEQ ID NO: 604337 - protein, 13 aa, Homo sapiens
  CDR3 for alpha chain variable domain of TCR clone 302169 (TRAV17, TRAJ9)
CATDYTGGFKTIF

SEQ ID NO: 604338 - protein, 14 aa, Homo sapiens
  CDR3 for beta chain variable domain of TCR clone 302169 (TRBV19, TRBJ2-5)
CASSMTVQQETQYF

SEQ ID NO: 604339 - protein, 15 aa, Homo sapiens
  CDR3 for alpha chain variable domain of TCR clone 302170 (TRAV35, TRAJ58)
CAGRRQETSGSRLIF

SEQ ID NO: 604340 - protein, 16 aa, Homo sapiens
  CDR3 for beta chain variable domain of TCR clone 302170 (TRBV2, TRBJ2-1)
CASSVGGSLSYNEQFF

SEQ ID NO: 604341 - protein, 15 aa, Homo sapiens
  CDR3 for alpha chain variable domain of TCR clone 302171 (TRAV8-3, TRAJ45)
CASSYSGGGAAGITF

SEQ ID NO: 604342 - protein, 12 aa, Homo sapiens
  CDR3 for beta chain variable domain of TCR clone 302171 (TRBV12-4, TRBJ2-7)
CASSLGGYEQYF

SEQ ID NO: 604343 - protein, 15 aa, Homo sapiens
  CDR3 for alpha chain variable domain of TCR clone 302172 (TRAV12-3, TRAJ6)
CAMSATTGGSYIPTF

SEQ ID NO: 604344 - protein, 17 aa, Homo sapiens
  CDR3 for beta chain variable domain of TCR clone 302172 (TRBV13, TRBJ2-3)
CASSLSRVAVGRNTQYF

SEQ ID NO: 604345 - protein, 13 aa, Homo sapiens
  CDR3 for alpha chain variable domain of TCR clone 302173 (TRAV29/DV5, TRAJ44)
CAASTGTASKLTF

SEQ ID NO: 604346 - protein, 13 aa, Homo sapiens
  CDR3 for beta chain variable domain of TCR clone 302173 (TRBV19, TRBJ1-2)
RASSVPGQDGYTF

SEQ ID NO: 604347 - protein, 17 aa, Homo sapiens
  CDR3 for alpha chain variable domain of TCR clone 302174 (TRAV26-2, TRAJ42)
CILRDESYGGSQGNLIF

SEQ ID NO: 604348 - protein, 15 aa, Homo sapiens
  CDR3 for beta chain variable domain of TCR clone 302174 (TRBV7-9, TRBJ1-5)
CASSQGHQPNQPQHF

SEQ ID NO: 604349 - protein, 22 aa, Homo sapiens
  CDR3 for alpha chain variable domain of TCR clone 302175 (TRAV13-2, TRAJ13)
QLLNLETQLSTFVPEGYQKVTF

SEQ ID NO: 604350 - protein, 16 aa, Homo sapiens
  CDR3 for beta chain variable domain of TCR clone 302175 (TRBV5-1, TRBJ2-3)
CASSSSGAGSTDTQYF

SEQ ID NO: 604351 - protein, 14 aa, Homo sapiens
  CDR3 for alpha chain variable domain of TCR clone 302176 (TRAV1-2, TRAJ8)
CAVREDTGFQKLVF

SEQ ID NO: 604352 - protein, 11 aa, Homo sapiens
  CDR3 for beta chain variable domain of TCR clone 302176 (TRBV11-3, TRBJ2-7)
CASRRTYEQYF

SEQ ID NO: 604353 - protein, 19 aa, Homo sapiens
  CDR3 for alpha chain variable domain of TCR clone 302177 (TRAV1-2, TRAJ26)
CLLPLCCERPDNYGQNFFF

SEQ ID NO: 604354 - protein, 15 aa, Homo sapiens
  CDR3 for beta chain variable domain of TCR clone 302177 (TRBV7-9, TRBJ1-6)
CASSSPGRGNSPLHF

SEQ ID NO: 604355 - protein, 15 aa, Homo sapiens
  CDR3 for alpha chain variable domain of TCR clone 302178 (TRAV3, TRAJ22)
CAVRDRGGSARQLTF

SEQ ID NO: 604356 - protein, 18 aa, Homo sapiens
  CDR3 for beta chain variable domain of TCR clone 302178 (TRBV28, TRBJ2-1)
CASSSTSGSANSYNEQFF

SEQ ID NO: 604357 - protein, 15 aa, Homo sapiens
  CDR3 for alpha chain variable domain of TCR clone 302179 (TRAV3, TRAJ20)
CAVRDIKLSDYKLSF

SEQ ID NO: 604358 - protein, 13 aa, Homo sapiens
  CDR3 for beta chain variable domain of TCR clone 302179 (TRBV7-9, TRBJ1-2)
CASSLKQNYCYTF

SEQ ID NO: 604359 - protein, 18 aa, Homo sapiens
  CDR3 for alpha chain variable domain of TCR clone 302180 (TRAV29/DV5, TRAJ52)
CAAGFRGAGGTSYGKLTF

SEQ ID NO: 604360 - protein, 14 aa, Homo sapiens
  CDR3 for beta chain variable domain of TCR clone 302180 (TRBV7-2, TRBJ1-1)
CASSFLTGTTEAFF

SEQ ID NO: 604361 - protein, 22 aa, Homo sapiens
  CDR3 for alpha chain variable domain of TCR clone 302181 (TRAV4, )
CLGGRVKPNIQNPDPAVYQLRD

SEQ ID NO: 604362 - protein, 16 aa, Homo sapiens
  CDR3 for beta chain variable domain of TCR clone 302181 (TRBV19, TRBJ2-1)
CASSKAGPSSYNEQFF

SEQ ID NO: 604363 - protein, 16 aa, Homo sapiens
  CDR3 for alpha chain variable domain of TCR clone 302182 (TRAV3, TRAJ23)
CAVKIGIYNQGGKLIF

SEQ ID NO: 604364 - protein, 18 aa, Homo sapiens
  CDR3 for beta chain variable domain of TCR clone 302182 (TRBV7-2, TRBJ2-2)
CASSLASRGAGGPGELFF

SEQ ID NO: 604365 - protein, 14 aa, Homo sapiens
  CDR3 for alpha chain variable domain of TCR clone 302183 (TRAV14/DV4, TRAJ9)
CAMRESTGGLKTIF

SEQ ID NO: 604366 - protein, 19 aa, Homo sapiens
  CDR3 for beta chain variable domain of TCR clone 302183 (TRBV19, TRBJ2-2)
CASTRPGLAGGRVTGELFF

SEQ ID NO: 604367 - protein, 14 aa, Homo sapiens
  CDR3 for alpha chain variable domain of TCR clone 302184 (TRAV21, TRAJ35)
CAVMPIGFGNVLHC

SEQ ID NO: 604368 - protein, 14 aa, Homo sapiens
  CDR3 for beta chain variable domain of TCR clone 302184 (TRBV5-1, TRBJ2-7)
CTSSRGESLYEQYF

SEQ ID NO: 604369 - protein, 12 aa, Homo sapiens
  CDR3 for alpha chain variable domain of TCR clone 302185 (TRAV2, TRAJ10)
CASTGGGNKLTF

SEQ ID NO: 604370 - protein, 17 aa, Homo sapiens
  CDR3 for beta chain variable domain of TCR clone 302185 (TRBV7-2, TRBJ2-6)
CASSAGTGGAGANVLTF

SEQ ID NO: 604371 - protein, 14 aa, Homo sapiens
  CDR3 for alpha chain variable domain of TCR clone 302186 (TRAV13-1, TRAJ6)
CAASNGGGSYIPTF

SEQ ID NO: 604372 - protein, 12 aa, Homo sapiens
  CDR3 for beta chain variable domain of TCR clone 302186 (TRBV7-8, TRBJ2-7)
CASSLGDREQYF

SEQ ID NO: 604373 - protein, 11 aa, Homo sapiens
  CDR3 for alpha chain variable domain of TCR clone 302187 (TRAV35, TRAJ30)
CAGPGEDKIIF

SEQ ID NO: 604374 - protein, 14 aa, Homo sapiens
  CDR3 for beta chain variable domain of TCR clone 302187 (TRBV7-6, TRBJ1-6)
CASSQAGGGSPLHF

SEQ ID NO: 604375 - protein, 14 aa, Homo sapiens
  CDR3 for alpha chain variable domain of TCR clone 302188 (TRAV12-2, TRAJ40)
CAVKIPSGTYKSIF

SEQ ID NO: 604376 - protein, 15 aa, Homo sapiens
  CDR3 for beta chain variable domain of TCR clone 302188 (TRBV11-3, TRBJ2-3)
CASLKDGREGDTQYF

SEQ ID NO: 604377 - protein, 14 aa, Homo sapiens
  CDR3 for alpha chain variable domain of TCR clone 302189 (TRAV13-1, TRAJ13)
CAANRVGGYQKVTF

SEQ ID NO: 604378 - protein, 17 aa, Homo sapiens
  CDR3 for beta chain variable domain of TCR clone 302189 (TRBV15, TRBJ1-5)
CATSRAPPGTRNQPQHF

SEQ ID NO: 604379 - protein, 17 aa, Homo sapiens
  CDR3 for alpha chain variable domain of TCR clone 302190 (TRAV17, TRAJ7)
CATLGRLAFGKGNQVVV

SEQ ID NO: 604380 - protein, 18 aa, Homo sapiens
  CDR3 for beta chain variable domain of TCR clone 302190 (TRBV20-1, TRBJ2-6)
CSAETTPTHGSGANVLTF

SEQ ID NO: 604381 - protein, 16 aa, Homo sapiens
  CDR3 for alpha chain variable domain of TCR clone 302191 (TRAV14/DV4, TRAJ15)
CAMREGTAQAGTALIF

SEQ ID NO: 604382 - protein, 12 aa, Homo sapiens
  CDR3 for beta chain variable domain of TCR clone 302191 (TRBV28, TRBJ2-6)
CAIQAGANVLTF

SEQ ID NO: 604383 - protein, 14 aa, Homo sapiens
  CDR3 for alpha chain variable domain of TCR clone 302192 (TRAV14/DV4, TRAJ15)
CAVRRDQAGTALIF

SEQ ID NO: 604384 - protein, 16 aa, Homo sapiens
  CDR3 for beta chain variable domain of TCR clone 302192 (TRBV15, TRBJ2-3)
CATSRDLGIVTDTQYF

SEQ ID NO: 604385 - protein, 14 aa, Homo sapiens
  CDR3 for alpha chain variable domain of TCR clone 302193 (TRAV16, TRAJ17)
CPLSGRAAVNKLTF

SEQ ID NO: 604386 - protein, 15 aa, Homo sapiens
  CDR3 for beta chain variable domain of TCR clone 302193 (TRBV3-1, TRBJ1-2)
CASSPTRLPEGGYTF

SEQ ID NO: 604387 - protein, 11 aa, Homo sapiens
  CDR3 for alpha chain variable domain of TCR clone 302194 (TRAV35, TRAJ34)
CWARNTDKLIF

SEQ ID NO: 604388 - protein, 16 aa, Homo sapiens
  CDR3 for beta chain variable domain of TCR clone 302194 (TRBV20-1, TRBJ2-6)
CSASSQGYDGANVLTF

SEQ ID NO: 604389 - protein, 13 aa, Homo sapiens
  CDR3 for alpha chain variable domain of TCR clone 302195 (TRAV27, TRAJ45)
CRTSGGGADGLTF

SEQ ID NO: 604390 - protein, 17 aa, Homo sapiens
  CDR3 for beta chain variable domain of TCR clone 302195 (TRBV11-2, TRBJ2-1)
CASSLYPPGVEYNEQFF

SEQ ID NO: 604391 - protein, 14 aa, Homo sapiens
  CDR3 for alpha chain variable domain of TCR clone 302196 (TRAV17, TRAJ16)
CATADFSDGQKLLF

SEQ ID NO: 604392 - protein, 13 aa, Homo sapiens
  CDR3 for beta chain variable domain of TCR clone 302196 (TRBV7-2, TRBJ2-5)
CASSRGGLETQYF

SEQ ID NO: 604393 - protein, 15 aa, Homo sapiens
  CDR3 for alpha chain variable domain of TCR clone 302197 (TRAV12-2, TRAJ53)
CAVNGGGGSNYKLTF

SEQ ID NO: 604394 - protein, 20 aa, Homo sapiens
  CDR3 for beta chain variable domain of TCR clone 302197 (TRBV4-3, TRBJ2-4)
CASSQGRWTGGLRSLNIQYF

SEQ ID NO: 604395 - protein, 15 aa, Homo sapiens
  CDR3 for alpha chain variable domain of TCR clone 302198 (TRAV12-1, TRAJ4)
CVVNPFSGCYNKLIF

SEQ ID NO: 604396 - protein, 16 aa, Homo sapiens
  CDR3 for beta chain variable domain of TCR clone 302198 (TRBV5-1, TRBJ1-1)
CASSKTGTEVGTEAFF

SEQ ID NO: 604397 - protein, 14 aa, Homo sapiens
  CDR3 for alpha chain variable domain of TCR clone 302199 (TRAV12-2, TRAJ17)
CAVLFKAAANKLTF

SEQ ID NO: 604398 - protein, 14 aa, Homo sapiens
  CDR3 for beta chain variable domain of TCR clone 302199 (TRBV19, TRBJ2-1)
CASPTFVLSGEQFF

SEQ ID NO: 604399 - protein, 11 aa, Homo sapiens
  CDR3 for alpha chain variable domain of TCR clone 302200 (TRAV12-1, TRAJ21)
CVVYNFNKFYF

SEQ ID NO: 604400 - protein, 14 aa, Homo sapiens
  CDR3 for beta chain variable domain of TCR clone 302200 (TRBV19, TRBJ1-3)
CASNRGNSGNTIYF

SEQ ID NO: 604401 - protein, 15 aa, Homo sapiens
  CDR3 for alpha chain variable domain of TCR clone 302201 (TRAV8-3, TRAJ27)
CAVGPSKTNSGKSTF

SEQ ID NO: 604402 - protein, 14 aa, Homo sapiens
  CDR3 for beta chain variable domain of TCR clone 302201 (TRBV11-2, TRBJ2-3)
CASSRLARTGTQYF

SEQ ID NO: 604403 - protein, 14 aa, Homo sapiens
  CDR3 for alpha chain variable domain of TCR clone 302202 (TRAV13-1, TRAJ44)
CAAKATGTASKLTF

SEQ ID NO: 604404 - protein, 17 aa, Homo sapiens
  CDR3 for beta chain variable domain of TCR clone 302202 (TRBV7-3, TRBJ2-3)
RASSLMKRLRGADTQYF

SEQ ID NO: 604405 - protein, 17 aa, Homo sapiens
  CDR3 for alpha chain variable domain of TCR clone 302203 (TRAV13-1, TRAJ52)
CAAGRNAGGTSCGKLTF

SEQ ID NO: 604406 - protein, 13 aa, Homo sapiens
  CDR3 for beta chain variable domain of TCR clone 302203 (TRBV7-2, TRBJ1-1)
CASNLKGAKVAFF

SEQ ID NO: 604407 - protein, 15 aa, Homo sapiens
  CDR3 for alpha chain variable domain of TCR clone 302204 (TRAV4, TRAJ10)
CLVGDGSGGGNKLTF

SEQ ID NO: 604408 - protein, 16 aa, Homo sapiens
  CDR3 for beta chain variable domain of TCR clone 302204 (TRBV29-1, TRBJ2-6)
CSVEDITYSGANVLTF

SEQ ID NO: 604409 - protein, 11 aa, Homo sapiens
  CDR3 for alpha chain variable domain of TCR clone 302205 (TRAV26-1, TRAJ37)
CIVRVGRKLIF

SEQ ID NO: 604410 - protein, 11 aa, Homo sapiens
  CDR3 for beta chain variable domain of TCR clone 302205 (TRBV6-3, TRBJ2-3)
CATGQADTQYF

SEQ ID NO: 604411 - protein, 16 aa, Homo sapiens
  CDR3 for alpha chain variable domain of TCR clone 302206 (TRAV8-3, TRAJ45)
CAVGDGSGGGADGLTF

SEQ ID NO: 604412 - protein, 15 aa, Homo sapiens
  CDR3 for beta chain variable domain of TCR clone 302206 (TRBV7-9, TRBJ1-6)
CASSSPGRGNSPLHF

SEQ ID NO: 604413 - protein, 14 aa, Homo sapiens
  CDR3 for alpha chain variable domain of TCR clone 302207 (TRAV1-2, TRAJ8)
CAVREDTGSQKLVF

SEQ ID NO: 604414 - protein, 14 aa, Homo sapiens
  CDR3 for beta chain variable domain of TCR clone 302207 (TRBV7-3, TRBJ2-2)
CASSSGGYTGELFF

SEQ ID NO: 604415 - protein, 11 aa, Homo sapiens
  CDR3 for alpha chain variable domain of TCR clone 302208 (TRAV21, TRAJ33)
CAVLINYQLIW

SEQ ID NO: 604416 - protein, 15 aa, Homo sapiens
  CDR3 for beta chain variable domain of TCR clone 302208 (TRBV11-2, TRBJ2-7)
CASSLMVGGSYEQYF

SEQ ID NO: 604417 - protein, 14 aa, Homo sapiens
  CDR3 for alpha chain variable domain of TCR clone 302209 (TRAV35, TRAJ22)
CAGLRPGSARQLTF

SEQ ID NO: 604418 - protein, 18 aa, Homo sapiens
  CDR3 for beta chain variable domain of TCR clone 302209 (TRBV4-1, TRBJ1-5)
CASSQDPRGQGLNQPQHF

SEQ ID NO: 604419 - protein, 15 aa, Homo sapiens
  CDR3 for alpha chain variable domain of TCR clone 302210 (TRAV8-1, TRAJ42)
CAVTNYGGSQGNLIF

SEQ ID NO: 604420 - protein, 14 aa, Homo sapiens
  CDR3 for beta chain variable domain of TCR clone 302210 (TRBV25-1, TRBJ1-1)
CASTHLGGNTEAFF

SEQ ID NO: 604421 - protein, 15 aa, Homo sapiens
  CDR3 for alpha chain variable domain of TCR clone 302211 (TRAV8-6, TRAJ23)
CAVRECYNQGGKIIF

SEQ ID NO: 604422 - protein, 15 aa, Homo sapiens
  CDR3 for beta chain variable domain of TCR clone 302211 (TRBV20-1, TRBJ2-1)
CSAITGTSGSNEQFF

SEQ ID NO: 604423 - protein, 14 aa, Homo sapiens
  CDR3 for alpha chain variable domain of TCR clone 302212 (TRAV12-2, TRAJ13)
CAVKKTGGYQKVTF

SEQ ID NO: 604424 - protein, 13 aa, Homo sapiens
  CDR3 for beta chain variable domain of TCR clone 302212 (TRBV7-9, TRBJ2-1)
CASSWESYNEQFF

SEQ ID NO: 604425 - protein, 13 aa, Homo sapiens
  CDR3 for alpha chain variable domain of TCR clone 302213 (TRAV27, TRAJ45)
CRSSGGGADGLTF

SEQ ID NO: 604426 - protein, 14 aa, Homo sapiens
  CDR3 for beta chain variable domain of TCR clone 302213 (TRBV28, TRBJ2-7)
CASSLLRISYEQYF

SEQ ID NO: 604427 - protein, 14 aa, Homo sapiens
  CDR3 for alpha chain variable domain of TCR clone 302214 (TRAV12-1, TRAJ42)
CVVIYGGSQGNLFF

SEQ ID NO: 604428 - protein, 13 aa, Homo sapiens
  CDR3 for beta chain variable domain of TCR clone 302214 (TRBV18, TRBJ2-5)
CASSPPGKETQYF

SEQ ID NO: 604429 - protein, 13 aa, Homo sapiens
  CDR3 for alpha chain variable domain of TCR clone 302215 (TRAV3, TRAJ30)
CAVRDRGDDKIIF

SEQ ID NO: 604430 - protein, 14 aa, Homo sapiens
  CDR3 for beta chain variable domain of TCR clone 302215 (TRBV5-1, TRBJ1-1)
CASSRTTGDTDAFF

SEQ ID NO: 604431 - protein, 13 aa, Homo sapiens
  CDR3 for alpha chain variable domain of TCR clone 302216 (TRAV35, TRAJ57)
CAGSQGGSEKLVF

SEQ ID NO: 604432 - protein, 18 aa, Homo sapiens
  CDR3 for beta chain variable domain of TCR clone 302216 (TRBV20-1, TRBJ2-3)
CSASGLAGGPGTTDTQYF

SEQ ID NO: 604433 - protein, 14 aa, Homo sapiens
  CDR3 for alpha chain variable domain of TCR clone 302217 (TRAV1-2, TRAJ16)
CAVNRFSDGHKLLF

SEQ ID NO: 604434 - protein, 12 aa, Homo sapiens
  CDR3 for beta chain variable domain of TCR clone 302217 (TRBV11-2, TRBJ2-1)
CASSPGNNEQFF

SEQ ID NO: 604435 - protein, 18 aa, Homo sapiens
  CDR3 for alpha chain variable domain of TCR clone 302218 (TRAV12-3, TRAJ52)
CAMSVGGAGGTSYGKLTF

SEQ ID NO: 604436 - protein, 14 aa, Homo sapiens
  CDR3 for beta chain variable domain of TCR clone 302218 (TRBV7-6, TRBJ2-1)
CASSLGGGADEQFF

SEQ ID NO: 604437 - protein, 12 aa, Homo sapiens
  CDR3 for alpha chain variable domain of TCR clone 302219 (TRAV8-6, TRAJ8)
FAVTPGFQKLVC

SEQ ID NO: 604438 - protein, 16 aa, Homo sapiens
  CDR3 for beta chain variable domain of TCR clone 302219 (TRBV7-3, TRBJ2-2)
CASSLKRWTLPGELFF

SEQ ID NO: 604439 - protein, 13 aa, Homo sapiens
  CDR3 for alpha chain variable domain of TCR clone 302220 (TRAV40, TRAJ20)
CLLGGGAGTTVTV

SEQ ID NO: 604440 - protein, 14 aa, Homo sapiens
  CDR3 for beta chain variable domain of TCR clone 302220 (TRBV5-1, TRBJ1-1)
CASSLTRRSTEAFF

SEQ ID NO: 604441 - protein, 14 aa, Homo sapiens
  CDR3 for alpha chain variable domain of TCR clone 302221 (TRAV12-2, TRAJ13)
CAVKKTGGYQKVTF

SEQ ID NO: 604442 - protein, 15 aa, Homo sapiens
  CDR3 for beta chain variable domain of TCR clone 302221 (TRBV18, TRBJ2-3)
CASSPPMAGRDTQYF

SEQ ID NO: 604443 - protein, 11 aa, Homo sapiens
  CDR3 for alpha chain variable domain of TCR clone 302222 (TRAV12-2, TRAJ49)
CAVDTGNQFYF

SEQ ID NO: 604444 - protein, 14 aa, Homo sapiens
  CDR3 for beta chain variable domain of TCR clone 302222 (TRBV6-1, TRBJ1-3)
CASVQGGGGNTIYF

SEQ ID NO: 604445 - protein, 16 aa, Homo sapiens
  CDR3 for alpha chain variable domain of TCR clone 302223 (TRAV30, TRAJ24)
CGTEVVDADSWVKFQF

SEQ ID NO: 604446 - protein, 14 aa, Homo sapiens
  CDR3 for beta chain variable domain of TCR clone 302223 (TRBV12-5, TRBJ2-5)
CASGSRTHQETQYF

SEQ ID NO: 604447 - protein, 19 aa, Homo sapiens
  CDR3 for alpha chain variable domain of TCR clone 302224 (TRAV26-1, TRAJ52)
CIVRAHRNAGDTSYGKLTF

SEQ ID NO: 604448 - protein, 15 aa, Homo sapiens
  CDR3 for beta chain variable domain of TCR clone 302224 (TRBV12-4, TRBJ2-5)
CASSPPTGLQETQYF

SEQ ID NO: 604449 - protein, 13 aa, Homo sapiens
  CDR3 for alpha chain variable domain of TCR clone 302225 (TRAV3, TRAJ30)
CAVRDREDDKIIF

SEQ ID NO: 604450 - protein, 15 aa, Homo sapiens
  CDR3 for beta chain variable domain of TCR clone 302225 (TRBV6-3, TRBJ2-7)
CASSSPGTVFYEQYF

SEQ ID NO: 604451 - protein, 12 aa, Homo sapiens
  CDR3 for alpha chain variable domain of TCR clone 302226 (TRAV27, TRAJ35)
CAGADFGNVLNC

SEQ ID NO: 604452 - protein, 16 aa, Homo sapiens
  CDR3 for beta chain variable domain of TCR clone 302226 (TRBV6-1, TRBJ2-1)
CASILRQGSAYNEQFF

SEQ ID NO: 604453 - protein, 13 aa, Homo sapiens
  CDR3 for alpha chain variable domain of TCR clone 302227 (TRAV20, TRAJ9)
CAVPDTGGFKTIF

SEQ ID NO: 604454 - protein, 11 aa, Homo sapiens
  CDR3 for beta chain variable domain of TCR clone 302227 (TRBV6-3, TRBJ2-3)
CATGQADTQYF

SEQ ID NO: 604455 - protein, 13 aa, Homo sapiens
  CDR3 for alpha chain variable domain of TCR clone 302228 (TRAV35, TRAJ33)
CAGLMDSNYQLIW

SEQ ID NO: 604456 - protein, 16 aa, Homo sapiens
  CDR3 for beta chain variable domain of TCR clone 302228 (TRBV27, TRBJ2-5)
CASSYGPGGQKETQYF

SEQ ID NO: 604457 - protein, 19 aa, Homo sapiens
  CDR3 for alpha chain variable domain of TCR clone 302229 (TRAV1-1, TRAJ27)
CAGSEMTRSSLEKGHDFIF

SEQ ID NO: 604458 - protein, 14 aa, Homo sapiens
  CDR3 for beta chain variable domain of TCR clone 302229 (TRBV19, TRBJ1-4)
CASSMGRHNEKLFF

SEQ ID NO: 604459 - protein, 12 aa, Homo sapiens
  CDR3 for alpha chain variable domain of TCR clone 302230 (TRAV1-1, TRAJ39)
CAVPGVGNMLTF

SEQ ID NO: 604460 - protein, 13 aa, Homo sapiens
  CDR3 for beta chain variable domain of TCR clone 302230 (TRBV28, TRBJ2-3)
CASSLPQVDTQYF

SEQ ID NO: 604461 - protein, 15 aa, Homo sapiens
  CDR3 for alpha chain variable domain of TCR clone 302231 (TRAV13-2, TRAJ40)
CAENRSRQGTYKYII

SEQ ID NO: 604462 - protein, 15 aa, Homo sapiens
  CDR3 for beta chain variable domain of TCR clone 302231 (TRBV19, TRBJ2-1)
CASSMGWYSNNEQFF

SEQ ID NO: 604463 - protein, 18 aa, Homo sapiens
  CDR3 for alpha chain variable domain of TCR clone 302232 (TRAV26-1, TRAJ23)
CIVRVGLEVWNQGGKLIF

SEQ ID NO: 604464 - protein, 20 aa, Homo sapiens
  CDR3 for beta chain variable domain of TCR clone 302232 (TRBV19, TRBJ2-1)
CASSISRTVTSTRLNNEQFF

SEQ ID NO: 604465 - protein, 14 aa, Homo sapiens
  CDR3 for alpha chain variable domain of TCR clone 302233 (TRAV17, TRAJ57)
CATDPQGGSEKLFF

SEQ ID NO: 604466 - protein, 13 aa, Homo sapiens
  CDR3 for beta chain variable domain of TCR clone 302233 (TRBV19, TRBJ2-7)
CASSPRQSYEQYF

SEQ ID NO: 604467 - protein, 11 aa, Homo sapiens
  CDR3 for alpha chain variable domain of TCR clone 302234 (TRAV1-2, TRAJ31)
CAVNNNARLMF

SEQ ID NO: 604468 - protein, 14 aa, Homo sapiens
  CDR3 for beta chain variable domain of TCR clone 302234 (TRBV28, TRBJ2-1)
CQQYIAGGRSEQFF

SEQ ID NO: 604469 - protein, 15 aa, Homo sapiens
  CDR3 for alpha chain variable domain of TCR clone 302235 (TRAV1-1, TRAJ5)
CAVRHMDTGRRALTF

SEQ ID NO: 604470 - protein, 17 aa, Homo sapiens
  CDR3 for beta chain variable domain of TCR clone 302235 (TRBV28, TRBJ2-7)
CASSPGLEGGDSSEQYF

SEQ ID NO: 604471 - protein, 13 aa, Homo sapiens
  CDR3 for alpha chain variable domain of TCR clone 302236 (TRAV21, TRAJ15)
CAVANQAGTALIF

SEQ ID NO: 604472 - protein, 14 aa, Homo sapiens
  CDR3 for beta chain variable domain of TCR clone 302236 (TRBV24-1, TRBJ2-7)
VTTPWDQLYYEQYF

SEQ ID NO: 604473 - protein, 16 aa, Homo sapiens
  CDR3 for alpha chain variable domain of TCR clone 302237 (TRAV12-3, TRAJ53)
CAISPGSGGSNYKLTF

SEQ ID NO: 604474 - protein, 14 aa, Homo sapiens
  CDR3 for beta chain variable domain of TCR clone 302237 (TRBV7-2, TRBJ1-1)
CASSFLTGTTEAFF

SEQ ID NO: 604475 - protein, 22 aa, Homo sapiens
  CDR3 for alpha chain variable domain of TCR clone 302238 (TRAV26-2, TRAJ45)
CCVLRHPERQGRSGGGADGLTF

SEQ ID NO: 604476 - protein, 15 aa, Homo sapiens
  CDR3 for beta chain variable domain of TCR clone 302238 (TRBV7-6, TRBJ2-5)
CASSKPTGPQETQYF

SEQ ID NO: 604477 - protein, 13 aa, Homo sapiens
  CDR3 for alpha chain variable domain of TCR clone 302239 (TRAV24, TRAJ22)
CAFGSGSARQLTF

SEQ ID NO: 604478 - protein, 12 aa, Homo sapiens
  CDR3 for beta chain variable domain of TCR clone 302239 (TRBV11-2, TRBJ2-2)
CASSLGGGELFF

SEQ ID NO: 604479 - protein, 16 aa, Homo sapiens
  CDR3 for alpha chain variable domain of TCR clone 302240 (TRAV30, TRAJ24)
CGTEIVDADSWGKFQF

SEQ ID NO: 604480 - protein, 13 aa, Homo sapiens
  CDR3 for beta chain variable domain of TCR clone 302240 (TRBV7-3, TRBJ1-1)
CASSQDWGAEAFC

SEQ ID NO: 604481 - protein, 15 aa, Homo sapiens
  CDR3 for alpha chain variable domain of TCR clone 302241 (TRAV14/DV4, TRAJ10)
CAMRELTGGGNKLAF

SEQ ID NO: 604482 - protein, 18 aa, Homo sapiens
  CDR3 for beta chain variable domain of TCR clone 302241 (TRBV7-9, TRBJ2-7)
CASSLTTSGSRTWYEQYF

SEQ ID NO: 604483 - protein, 14 aa, Homo sapiens
  CDR3 for alpha chain variable domain of TCR clone 302242 (TRAV4, TRAJ26)
CLVGPHNYGQNFGF

SEQ ID NO: 604484 - protein, 17 aa, Homo sapiens
  CDR3 for beta chain variable domain of TCR clone 302242 (TRBV20-1, TRBJ2-1)
CSASSSGLAGSYNEQFF

SEQ ID NO: 604485 - protein, 13 aa, Homo sapiens
  CDR3 for alpha chain variable domain of TCR clone 302243 (TRAV1-2, TRAJ20)
FSVPRSNDYKLSF

SEQ ID NO: 604486 - protein, 14 aa, Homo sapiens
  CDR3 for beta chain variable domain of TCR clone 302243 (TRBV20-1, TRBJ2-7)
CSARYGTTYYEQCF

SEQ ID NO: 604487 - protein, 16 aa, Homo sapiens
  CDR3 for alpha chain variable domain of TCR clone 302244 (TRAV30, TRAJ24)
CGTEIVDADSCGKFQF

SEQ ID NO: 604488 - protein, 18 aa, Homo sapiens
  CDR3 for beta chain variable domain of TCR clone 302244 (TRBV7-9, TRBJ2-7)
CASSLTTSGSRTWYEQYF

SEQ ID NO: 604489 - protein, 15 aa, Homo sapiens
  CDR3 for alpha chain variable domain of TCR clone 302245 (TRAV25, TRAJ52)
CAGTSGGTSYGKLTF

SEQ ID NO: 604490 - protein, 15 aa, Homo sapiens
  CDR3 for beta chain variable domain of TCR clone 302245 (TRBV12-5, TRBJ2-2)
CASGFQGSGTGELFF

SEQ ID NO: 604491 - protein, 16 aa, Homo sapiens
  CDR3 for alpha chain variable domain of TCR clone 302246 (TRAV38-1, TRAJ39)
CAFMKHVSNAGNMLTF

SEQ ID NO: 604492 - protein, 14 aa, Homo sapiens
  CDR3 for beta chain variable domain of TCR clone 302246 (TRBV19, TRBJ2-1)
CASSMGSGATEQFF

SEQ ID NO: 604493 - protein, 12 aa, Homo sapiens
  CDR3 for alpha chain variable domain of TCR clone 302247 (TRAV17, TRAJ20)
CATQANDYKLSF

SEQ ID NO: 604494 - protein, 12 aa, Homo sapiens
  CDR3 for beta chain variable domain of TCR clone 302247 (TRBV6-1, TRBJ1-1)
CASSSPTAEAFF

SEQ ID NO: 604495 - protein, 12 aa, Homo sapiens
  CDR3 for alpha chain variable domain of TCR clone 302248 (TRAV16, TRAJ10)
CSRTGGGNKLTF

SEQ ID NO: 604496 - protein, 14 aa, Homo sapiens
  CDR3 for beta chain variable domain of TCR clone 302248 (TRBV13, TRBJ2-5)
CASSLERVGETQYF

SEQ ID NO: 604497 - protein, 12 aa, Homo sapiens
  CDR3 for alpha chain variable domain of TCR clone 302249 (TRAV22, TRAJ22)
CAPGGSARQLTF

SEQ ID NO: 604498 - protein, 15 aa, Homo sapiens
  CDR3 for beta chain variable domain of TCR clone 302249 (TRBV9, TRBJ1-6)
CASSVAGTGDSTLHF

SEQ ID NO: 604499 - protein, 14 aa, Homo sapiens
  CDR3 for alpha chain variable domain of TCR clone 302250 (TRAV26-1, TRAJ39)
CTVRGLRAGNMLTF

SEQ ID NO: 604500 - protein, 15 aa, Homo sapiens
  CDR3 for beta chain variable domain of TCR clone 302250 (TRBV28, TRBJ2-5)
CASSPGQGSIETQYF

SEQ ID NO: 604501 - protein, 14 aa, Homo sapiens
  CDR3 for alpha chain variable domain of TCR clone 302251 (TRAV26-1, TRAJ38)
CIADNAGNNRKLIR

SEQ ID NO: 604502 - protein, 20 aa, Homo sapiens
  CDR3 for beta chain variable domain of TCR clone 302251 (TRBV7-8, TRBJ2-2)
CASSHLFPGPTIHITGELFF

SEQ ID NO: 604503 - protein, 13 aa, Homo sapiens
  CDR3 for alpha chain variable domain of TCR clone 302252 (TRAV29/DV5, TRAJ31)
CAASRHNNARLMF

SEQ ID NO: 604504 - protein, 12 aa, Homo sapiens
  CDR3 for beta chain variable domain of TCR clone 302252 (TRBV14, TRBJ2-5)
CASSQLKETQYF

SEQ ID NO: 604505 - protein, 15 aa, Homo sapiens
  CDR3 for alpha chain variable domain of TCR clone 302253 (TRAV1-2, TRAJ9)
CAVRDDGTGGFKTIF

SEQ ID NO: 604506 - protein, 14 aa, Homo sapiens
  CDR3 for beta chain variable domain of TCR clone 302253 (TRBV6-1, TRBJ1-3)
CASVQGGGGNTIYF

SEQ ID NO: 604507 - protein, 17 aa, Homo sapiens
  CDR3 for alpha chain variable domain of TCR clone 302254 (TRAV22, TRAJ53)
CAVEFSNSGGSNYKLTF

SEQ ID NO: 604508 - protein, 15 aa, Homo sapiens
  CDR3 for beta chain variable domain of TCR clone 302254 (TRBV20-1, TRBJ2-7)
CSARDRVSGMDEQYF

SEQ ID NO: 604509 - protein, 16 aa, Homo sapiens
  CDR3 for alpha chain variable domain of TCR clone 302255 (TRAV22, TRAJ45)
SAVERGKRGGADGLTF

SEQ ID NO: 604510 - protein, 13 aa, Homo sapiens
  CDR3 for beta chain variable domain of TCR clone 302255 (TRBV27, TRBJ1-1)
CASSLSIGAEAFF

SEQ ID NO: 604511 - protein, 14 aa, Homo sapiens
  CDR3 for alpha chain variable domain of TCR clone 302256 (TRAV1-2, TRAJ8)
CAVREDTGFQKLVF

SEQ ID NO: 604512 - protein, 14 aa, Homo sapiens
  CDR3 for beta chain variable domain of TCR clone 302256 (TRBV3-1, TRBJ2-7)
CASSQERVDHEQYF

SEQ ID NO: 604513 - protein, 18 aa, Homo sapiens
  CDR3 for alpha chain variable domain of TCR clone 302257 (TRAV8-4, TRAJ52)
CAVASFNAGGTSYGKLTF

SEQ ID NO: 604514 - protein, 16 aa, Homo sapiens
  CDR3 for beta chain variable domain of TCR clone 302257 (TRBV18, TRBJ1-5)
CASSRQQRNSPSILVM

SEQ ID NO: 604515 - protein, 13 aa, Homo sapiens
  CDR3 for alpha chain variable domain of TCR clone 302258 (TRAV13-2, TRAJ48)
CAEMDFGNEKLTF

SEQ ID NO: 604516 - protein, 15 aa, Homo sapiens
  CDR3 for beta chain variable domain of TCR clone 302258 (TRBV7-9, TRBJ1-6)
CPSSSPGRGNSPLHF

SEQ ID NO: 604517 - protein, 11 aa, Homo sapiens
  CDR3 for alpha chain variable domain of TCR clone 302259 (TRAV21, TRAJ48)
CAVDGNEKLTF

SEQ ID NO: 604518 - protein, 15 aa, Homo sapiens
  CDR3 for beta chain variable domain of TCR clone 302259 (TRBV12-4, TRBJ1-5)
CQQFRPRGSNQPQHF

SEQ ID NO: 604519 - protein, 15 aa, Homo sapiens
  CDR3 for alpha chain variable domain of TCR clone 302260 (TRAV8-4, TRAJ9)
CAVSDRETGGFKTIF

SEQ ID NO: 604520 - protein, 15 aa, Homo sapiens
  CDR3 for beta chain variable domain of TCR clone 302260 (TRBV6-3, TRBJ2-7)
CASSSPGTVFYEQYF

SEQ ID NO: 604521 - protein, 11 aa, Homo sapiens
  CDR3 for alpha chain variable domain of TCR clone 302261 (TRAV21, TRAJ39)
LLVNAGNMLTF

SEQ ID NO: 604522 - protein, 14 aa, Homo sapiens
  CDR3 for beta chain variable domain of TCR clone 302261 (TRBV20-1, TRBJ1-1)
CSAQTRIGGTEAFF

SEQ ID NO: 604523 - protein, 13 aa, Homo sapiens
  CDR3 for alpha chain variable domain of TCR clone 302262 (TRAV17, TRAJ9)
CATDYTGGFKTIF

SEQ ID NO: 604524 - protein, 16 aa, Homo sapiens
  CDR3 for beta chain variable domain of TCR clone 302262 (TRBV7-7, TRBJ2-1)
CASSLASGTSYNEHFF

SEQ ID NO: 604525 - protein, 15 aa, Homo sapiens
  CDR3 for alpha chain variable domain of TCR clone 302263 (TRAV8-3, TRAJ45)
CASSYSGGGADGLTF

SEQ ID NO: 604526 - protein, 12 aa, Homo sapiens
  CDR3 for beta chain variable domain of TCR clone 302263 (TRBV24-1, TRBJ1-1)
CATSDSDRGAFF

SEQ ID NO: 604527 - protein, 12 aa, Homo sapiens
  CDR3 for alpha chain variable domain of TCR clone 302264 (TRAV29/DV5, TRAJ49)
CAATDTGNQFYF

SEQ ID NO: 604528 - protein, 12 aa, Homo sapiens
  CDR3 for beta chain variable domain of TCR clone 302264 (TRBV12-4, TRBJ2-7)
CASSLGGYKQYF

SEQ ID NO: 604529 - protein, 13 aa, Homo sapiens
  CDR3 for alpha chain variable domain of TCR clone 302265 (TRAV27, TRAJ45)
CRSSGGGDDGLTF

SEQ ID NO: 604530 - protein, 15 aa, Homo sapiens
  CDR3 for beta chain variable domain of TCR clone 302265 (TRBV9, TRBJ2-2)
CASSDFAGASGELFF

SEQ ID NO: 604531 - protein, 12 aa, Homo sapiens
  CDR3 for alpha chain variable domain of TCR clone 302266 (TRAV12-1, TRAJ40)
CVVNGETYKYIF

SEQ ID NO: 604532 - protein, 14 aa, Homo sapiens
  CDR3 for beta chain variable domain of TCR clone 302266 (TRBV7-9, TRBJ1-1)
CASSSTKGNTEAFV

SEQ ID NO: 604533 - protein, 16 aa, Homo sapiens
  CDR3 for alpha chain variable domain of TCR clone 302267 (TRAV30, TRAJ24)
CGTEIVDADSWGKFQF

SEQ ID NO: 604534 - protein, 14 aa, Homo sapiens
  CDR3 for beta chain variable domain of TCR clone 302267 (TRBV7-9, TRBJ2-2)
CASSFDRGTGELFF

SEQ ID NO: 604535 - protein, 12 aa, Homo sapiens
  CDR3 for alpha chain variable domain of TCR clone 302268 (TRAV21, TRAJ33)
CAKMDSNYQLIW

SEQ ID NO: 604536 - protein, 15 aa, Homo sapiens
  CDR3 for beta chain variable domain of TCR clone 302268 (TRBV19, TRBJ2-1)
CASSIQATSYNEQFF

SEQ ID NO: 604537 - protein, 12 aa, Homo sapiens
  CDR3 for alpha chain variable domain of TCR clone 302269 (TRAV13-1, TRAJ21)
CAAFFNFNKFYF

SEQ ID NO: 604538 - protein, 14 aa, Homo sapiens
  CDR3 for beta chain variable domain of TCR clone 302269 (TRBV4-1, TRBJ2-7)
CASRLTSGSYEQNF

SEQ ID NO: 604539 - protein, 14 aa, Homo sapiens
  CDR3 for alpha chain variable domain of TCR clone 302270 (TRAV35, TRAJ42)
CAGRYGGSQGNLIF

SEQ ID NO: 604540 - protein, 14 aa, Homo sapiens
  CDR3 for beta chain variable domain of TCR clone 302270 (TRBV11-2, TRBJ2-5)
CASSRTGGIETQYF

SEQ ID NO: 604541 - protein, 14 aa, Homo sapiens
  CDR3 for alpha chain variable domain of TCR clone 302271 (TRAV26-1, TRAJ38)
CIADNAGNNRKVIW

SEQ ID NO: 604542 - protein, 13 aa, Homo sapiens
  CDR3 for beta chain variable domain of TCR clone 302271 (TRBV20-1, TRBJ1-1)
CSARGGGNAEAFF

SEQ ID NO: 604543 - protein, 16 aa, Homo sapiens
  CDR3 for alpha chain variable domain of TCR clone 302272 (TRAV12-3, TRAJ53)
CAMSQGSGGSTYKLTF

SEQ ID NO: 604544 - protein, 17 aa, Homo sapiens
  CDR3 for beta chain variable domain of TCR clone 302272 (TRBV28, TRBJ2-5)
RASSTPEGDALQETQYF

SEQ ID NO: 604545 - protein, 12 aa, Homo sapiens
  CDR3 for alpha chain variable domain of TCR clone 302273 (TRAV12-3, TRAJ5)
CAMDTGRRALTF

SEQ ID NO: 604546 - protein, 13 aa, Homo sapiens
  CDR3 for beta chain variable domain of TCR clone 302273 (TRBV7-7, TRBJ2-2)
CASSLTGAGELFC

SEQ ID NO: 604547 - protein, 16 aa, Homo sapiens
  CDR3 for alpha chain variable domain of TCR clone 302274 (TRAV30, TRAJ24)
CGTEIVDADSWGKFQF

SEQ ID NO: 604548 - protein, 14 aa, Homo sapiens
  CDR3 for beta chain variable domain of TCR clone 302274 (TRBV19, TRBJ1-5)
CASSLGTGGQPQHF

SEQ ID NO: 604549 - protein, 21 aa, Homo sapiens
  CDR3 for alpha chain variable domain of TCR clone 302275 (TRAV12-1, TRAJ37)
CVVNGGLWQHRQTNLWARANF

SEQ ID NO: 604550 - protein, 12 aa, Homo sapiens
  CDR3 for beta chain variable domain of TCR clone 302275 (TRBV20-1, TRBJ1-2)
CSAPGFNYGYTF

SEQ ID NO: 604551 - protein, 13 aa, Homo sapiens
  CDR3 for alpha chain variable domain of TCR clone 302276 (TRAV2, TRAJ3)
CAVEDSSASKIIF

SEQ ID NO: 604552 - protein, 15 aa, Homo sapiens
  CDR3 for beta chain variable domain of TCR clone 302276 (TRBV7-9, TRBJ1-5)
CASSQGHQPNQPQHF

SEQ ID NO: 604553 - protein, 16 aa, Homo sapiens
  CDR3 for alpha chain variable domain of TCR clone 302277 (TRAV12-2, TRAJ39)
CAVNRGPNNAGNMLTF

SEQ ID NO: 604554 - protein, 10 aa, Homo sapiens
  CDR3 for beta chain variable domain of TCR clone 302277 (TRBV2, TRBJ2-4)
CASRGSMQYF

SEQ ID NO: 604555 - protein, 12 aa, Homo sapiens
  CDR3 for alpha chain variable domain of TCR clone 302278 (TRAV12-1, TRAJ20)
CVAHFNDYKLSF

SEQ ID NO: 604556 - protein, 14 aa, Homo sapiens
  CDR3 for beta chain variable domain of TCR clone 302278 (TRBV7-2, TRBJ2-3)
CASSQTGSSYTQYF

SEQ ID NO: 604557 - protein, 13 aa, Homo sapiens
  CDR3 for alpha chain variable domain of TCR clone 302279 (TRAV20, TRAJ37)
CAGCSSNTGKLIF

SEQ ID NO: 604558 - protein, 13 aa, Homo sapiens
  CDR3 for beta chain variable domain of TCR clone 302279 (TRBV12-4, TRBJ2-1)
CASSFHSGSEQFF

SEQ ID NO: 604559 - protein, 14 aa, Homo sapiens
  CDR3 for alpha chain variable domain of TCR clone 302280 (TRAV9-2, TRAJ39)
CALYIYNAGNMLTF

SEQ ID NO: 604560 - protein, 16 aa, Homo sapiens
  CDR3 for beta chain variable domain of TCR clone 302280 (TRBV6-1, TRBJ2-7)
CASSEGRPQLTYEQYF

SEQ ID NO: 604561 - protein, 12 aa, Homo sapiens
  CDR3 for alpha chain variable domain of TCR clone 302281 (TRAV13-1, TRAJ21)
CAAKEGFNRFYF

SEQ ID NO: 604562 - protein, 15 aa, Homo sapiens
  CDR3 for beta chain variable domain of TCR clone 302281 (TRBV25-1, TRBJ1-4)
CASSPGDSTNENLFF

SEQ ID NO: 604563 - protein, 10 aa, Homo sapiens
  CDR3 for alpha chain variable domain of TCR clone 302282 (TRAV23/DV6, TRAJ57)
CAASSTLSQG

SEQ ID NO: 604564 - protein, 16 aa, Homo sapiens
  CDR3 for beta chain variable domain of TCR clone 302282 (TRBV29-1, TRBJ2-7)
CSVEDAEDGTVYEQYF

SEQ ID NO: 604565 - protein, 11 aa, Homo sapiens
  CDR3 for alpha chain variable domain of TCR clone 302283 (TRAV2, TRAJ13)
CASGRYQKATF

SEQ ID NO: 604566 - protein, 16 aa, Homo sapiens
  CDR3 for beta chain variable domain of TCR clone 302283 (TRBV6-1, TRBJ2-5)
CASSETLDRGAETQYF

SEQ ID NO: 604567 - protein, 12 aa, Homo sapiens
  CDR3 for alpha chain variable domain of TCR clone 302284 (TRAV13-1, TRAJ21)
CAAKEGFNKFYF

SEQ ID NO: 604568 - protein, 17 aa, Homo sapiens
  CDR3 for beta chain variable domain of TCR clone 302284 (TRBV20-1, TRBJ2-1)
CSASSSELAGSYNEQFF

SEQ ID NO: 604569 - protein, 12 aa, Homo sapiens
  CDR3 for alpha chain variable domain of TCR clone 302285 (TRAV21, TRAJ8)
CALNTGFQKLVF

SEQ ID NO: 604570 - protein, 12 aa, Homo sapiens
  CDR3 for beta chain variable domain of TCR clone 302285 (TRBV7-2, TRBJ2-3)
CASSLTGETQYF

SEQ ID NO: 604571 - protein, 13 aa, Homo sapiens
  CDR3 for alpha chain variable domain of TCR clone 302286 (TRAV8-6, TRAJ49)
CAVITNTGNQFYF

SEQ ID NO: 604572 - protein, 13 aa, Homo sapiens
  CDR3 for beta chain variable domain of TCR clone 302286 (TRBV10-3, TRBJ2-7)
CAAKLAVNYEQYF

SEQ ID NO: 604573 - protein, 16 aa, Homo sapiens
  CDR3 for alpha chain variable domain of TCR clone 302287 (TRAV21, TRAJ45)
CAVSWGSGGGADGLTF

SEQ ID NO: 604574 - protein, 14 aa, Homo sapiens
  CDR3 for beta chain variable domain of TCR clone 302287 (TRBV4-3, TRBJ1-2)
YASSPGGSNYGYTF

SEQ ID NO: 604575 - protein, 17 aa, Homo sapiens
  CDR3 for alpha chain variable domain of TCR clone 302288 (TRAV3, TRAJ6)
CDVRDGPRAGGSYIPTF

SEQ ID NO: 604576 - protein, 16 aa, Homo sapiens
  CDR3 for beta chain variable domain of TCR clone 302288 (TRBV4-1, TRBJ2-7)
CASSHTAGQATYEQYF

SEQ ID NO: 604577 - protein, 11 aa, Homo sapiens
  CDR3 for alpha chain variable domain of TCR clone 302289 (TRAV17, TRAJ9)
CGFTGGFKTIF

SEQ ID NO: 604578 - protein, 14 aa, Homo sapiens
  CDR3 for beta chain variable domain of TCR clone 302289 (TRBV7-2, TRBJ2-7)
CASRSQGAAYEQYF

SEQ ID NO: 604579 - protein, 15 aa, Homo sapiens
  CDR3 for alpha chain variable domain of TCR clone 302290 (TRAV17, TRAJ57)
CATGPSQGGSEKLVF

SEQ ID NO: 604580 - protein, 14 aa, Homo sapiens
  CDR3 for beta chain variable domain of TCR clone 302290 (TRBV12-5, TRBJ2-5)
CASGSRTHQETEYF

SEQ ID NO: 604581 - protein, 12 aa, Homo sapiens
  CDR3 for alpha chain variable domain of TCR clone 302291 (TRAV12-3, TRAJ17)
CAMTLTGNKLTL

SEQ ID NO: 604582 - protein, 16 aa, Homo sapiens
  CDR3 for beta chain variable domain of TCR clone 302291 (TRBV20-1, TRBJ1-4)
CSAPGQGLLTNEKLFF

SEQ ID NO: 604583 - protein, 12 aa, Homo sapiens
  CDR3 for alpha chain variable domain of TCR clone 302292 (TRAV23/DV6, TRAJ16)
CAATGTGQKMLF

SEQ ID NO: 604584 - protein, 15 aa, Homo sapiens
  CDR3 for beta chain variable domain of TCR clone 302292 (TRBV28, TRBJ1-2)
CASSSYRGLVYGYTF

SEQ ID NO: 604585 - protein, 17 aa, Homo sapiens
  CDR3 for alpha chain variable domain of TCR clone 302293 (TRAV3, TRAJ6)
CAVRDGPRAGGSYIPTF

SEQ ID NO: 604586 - protein, 14 aa, Homo sapiens
  CDR3 for beta chain variable domain of TCR clone 302293 (TRBV7-2, TRBJ2-7)
CASSPKTGVYEQYF

SEQ ID NO: 604587 - protein, 15 aa, Homo sapiens
  CDR3 for alpha chain variable domain of TCR clone 302294 (TRAV23/DV6, TRAJ42)
CAANYYGGSQGNIIF

SEQ ID NO: 604588 - protein, 15 aa, Homo sapiens
  CDR3 for beta chain variable domain of TCR clone 302294 (TRBV7-9, TRBJ1-1)
CASSLLEQGGTEAFF

SEQ ID NO: 604589 - protein, 18 aa, Homo sapiens
  CDR3 for alpha chain variable domain of TCR clone 302295 (TRAV21, TRAJ52)
WAVRPSPAGGTSYGKLTF

SEQ ID NO: 604590 - protein, 17 aa, Homo sapiens
  CDR3 for beta chain variable domain of TCR clone 302295 (TRBV13, TRBJ2-3)
CASSLSRVAGGKNTQYF

SEQ ID NO: 604591 - protein, 13 aa, Homo sapiens
  CDR3 for alpha chain variable domain of TCR clone 302296 (TRAV3, TRAJ27)
CAVRPLGAGKSTF

SEQ ID NO: 604592 - protein, 13 aa, Homo sapiens
  CDR3 for beta chain variable domain of TCR clone 302296 (TRBV7-9, TRBJ1-2)
CASSLKKNYGYTF

SEQ ID NO: 604593 - protein, 14 aa, Homo sapiens
  CDR3 for alpha chain variable domain of TCR clone 302297 (TRAV29/DV5, TRAJ28)
CAATEGAGSYQLTF

SEQ ID NO: 604594 - protein, 14 aa, Homo sapiens
  CDR3 for beta chain variable domain of TCR clone 302297 (TRBV11-2, TRBJ2-3)
CASSRLARTDTQYF

SEQ ID NO: 604595 - protein, 12 aa, Homo sapiens
  CDR3 for alpha chain variable domain of TCR clone 302298 (TRAV2, TRAJ33)
CAVPDSNYQLIW

SEQ ID NO: 604596 - protein, 17 aa, Homo sapiens
  CDR3 for beta chain variable domain of TCR clone 302298 (TRBV6-5, TRBJ2-3)
CASSYGPSLYKSDTQYF

SEQ ID NO: 604597 - protein, 13 aa, Homo sapiens
  CDR3 for alpha chain variable domain of TCR clone 302299 (TRAV12-3, TRAJ33)
CAMSVNSNYPLIW

SEQ ID NO: 604598 - protein, 15 aa, Homo sapiens
  CDR3 for beta chain variable domain of TCR clone 302299 (TRBV20-1, TRBJ2-7)
CSARDRVSGMDEQYF

SEQ ID NO: 604599 - protein, 15 aa, Homo sapiens
  CDR3 for alpha chain variable domain of TCR clone 302300 (TRAV3, TRAJ4)
CAVRDGTGGYNKLIF

SEQ ID NO: 604600 - protein, 13 aa, Homo sapiens
  CDR3 for beta chain variable domain of TCR clone 302300 (TRBV11-2, TRBJ1-1)
CASSLGNGAEAFF

SEQ ID NO: 604601 - protein, 12 aa, Homo sapiens
  CDR3 for alpha chain variable domain of TCR clone 302301 (TRAV2, TRAJ33)
CAFMDSNYQLIL

SEQ ID NO: 604602 - protein, 15 aa, Homo sapiens
  CDR3 for beta chain variable domain of TCR clone 302301 (TRBV5-7, TRBJ1-2)
CASSLGVAANYGYTF

SEQ ID NO: 604603 - protein, 15 aa, Homo sapiens
  CDR3 for alpha chain variable domain of TCR clone 302302 (TRAV35, TRAJ20)
FAGQLVGSNDYKPSF

SEQ ID NO: 604604 - protein, 13 aa, Homo sapiens
  CDR3 for beta chain variable domain of TCR clone 302302 (TRBV19, TRBJ2-7)
CASSKTGTHEQYF

SEQ ID NO: 604605 - protein, 14 aa, Homo sapiens
  CDR3 for alpha chain variable domain of TCR clone 302303 (TRAV25, TRAJ22)
CAVRSSGSARQLTF

SEQ ID NO: 604606 - protein, 16 aa, Homo sapiens
  CDR3 for beta chain variable domain of TCR clone 302303 (TRBV4-2, TRBJ2-3)
CASSQELAGDTDTQYF

SEQ ID NO: 604607 - protein, 10 aa, Homo sapiens
  CDR3 for alpha chain variable domain of TCR clone 302304 (TRAV26-1, TRAJ22)
CIVSLNFFWF

SEQ ID NO: 604608 - protein, 18 aa, Homo sapiens
  CDR3 for beta chain variable domain of TCR clone 302304 (TRBV5-5, TRBJ2-1)
CASSLGPSLGHTYNEQFF

SEQ ID NO: 604609 - protein, 14 aa, Homo sapiens
  CDR3 for alpha chain variable domain of TCR clone 302305 (TRAV1-2, TRAJ8)
CAVREDTGCQKLVF

SEQ ID NO: 604610 - protein, 15 aa, Homo sapiens
  CDR3 for beta chain variable domain of TCR clone 302305 (TRBV7-9, TRBJ1-4)
CASSARTGGNEKLFF

SEQ ID NO: 604611 - protein, 17 aa, Homo sapiens
  CDR3 for alpha chain variable domain of TCR clone 302306 (TRAV3, TRAJ12)
CAVRDGGRMDSSYKLIF

SEQ ID NO: 604612 - protein, 14 aa, Homo sapiens
  CDR3 for beta chain variable domain of TCR clone 302306 (TRBV7-9, TRBJ1-2)
CGSSRQGANYGYTF

SEQ ID NO: 604613 - protein, 16 aa, Homo sapiens
  CDR3 for alpha chain variable domain of TCR clone 302307 (TRAV14/DV4, TRAJ48)
CAMREGGNFGNEKLTF

SEQ ID NO: 604614 - protein, 14 aa, Homo sapiens
  CDR3 for beta chain variable domain of TCR clone 302307 (TRBV7-9, TRBJ2-4)
CASSLAMGGNIQYF

SEQ ID NO: 604615 - protein, 12 aa, Homo sapiens
  CDR3 for alpha chain variable domain of TCR clone 302308 (TRAV12-3, TRAJ17)
CAMTLTGNKLTF

SEQ ID NO: 604616 - protein, 13 aa, Homo sapiens
  CDR3 for beta chain variable domain of TCR clone 302308 (TRBV10-3, TRBJ1-1)
CAMIPEGGTEAFF

SEQ ID NO: 604617 - protein, 12 aa, Homo sapiens
  CDR3 for alpha chain variable domain of TCR clone 302309 (TRAV2, TRAJ31)
CAVEEGNARLMF

SEQ ID NO: 604618 - protein, 18 aa, Homo sapiens
  CDR3 for beta chain variable domain of TCR clone 302309 (TRBV7-9, TRBJ2-3)
CASSLDIAGLATPDTQYF

SEQ ID NO: 604619 - protein, 13 aa, Homo sapiens
  CDR3 for alpha chain variable domain of TCR clone 302310 (TRAV8-3, TRAJ15)
CSVGIQAGTALIF

SEQ ID NO: 604620 - protein, 17 aa, Homo sapiens
  CDR3 for beta chain variable domain of TCR clone 302310 (TRBV20-1, TRBJ2-1)
CSARDPLAGVSYNEQFF

SEQ ID NO: 604621 - protein, 14 aa, Homo sapiens
  CDR3 for alpha chain variable domain of TCR clone 302311 (TRAV16, TRAJ37)
CALDISGNTGKLIF

SEQ ID NO: 604622 - protein, 17 aa, Homo sapiens
  CDR3 for beta chain variable domain of TCR clone 302311 (TRBV7-3, TRBJ2-2)
CASSLSGTSGGTGELFF

SEQ ID NO: 604623 - protein, 14 aa, Homo sapiens
  CDR3 for alpha chain variable domain of TCR clone 302312 (TRAV8-3, TRAJ35)
CAVVPQGFGNVLHC

SEQ ID NO: 604624 - protein, 15 aa, Homo sapiens
  CDR3 for beta chain variable domain of TCR clone 302312 (TRBV6-1, TRBJ2-2)
CASSAGQGYTGELIF

SEQ ID NO: 604625 - protein, 13 aa, Homo sapiens
  CDR3 for alpha chain variable domain of TCR clone 302313 (TRAV17, TRAJ11)
CATRNSGYSTLTF

SEQ ID NO: 604626 - protein, 14 aa, Homo sapiens
  CDR3 for beta chain variable domain of TCR clone 302313 (TRBV25-1, TRBJ1-1)
CASTHLGGNTEAVF

SEQ ID NO: 604627 - protein, 14 aa, Homo sapiens
  CDR3 for alpha chain variable domain of TCR clone 302314 (TRAV20, TRAJ42)
CAVQAGGSEGKLIF

SEQ ID NO: 604628 - protein, 14 aa, Homo sapiens
  CDR3 for beta chain variable domain of TCR clone 302314 (TRBV28, TRBJ1-2)
CASRIQGANYGYTF

SEQ ID NO: 604629 - protein, 13 aa, Homo sapiens
  CDR3 for alpha chain variable domain of TCR clone 302315 (TRAV1-2, TRAJ9)
CAALNTGGVKTIF

SEQ ID NO: 604630 - protein, 13 aa, Homo sapiens
  CDR3 for beta chain variable domain of TCR clone 302315 (TRBV19, TRBJ1-2)
CAISVPGQDGYTF

SEQ ID NO: 604631 - protein, 12 aa, Homo sapiens
  CDR3 for alpha chain variable domain of TCR clone 302316 (TRAV12-3, TRAJ17)
CAMTLTGNKLTF

SEQ ID NO: 604632 - protein, 13 aa, Homo sapiens
  CDR3 for beta chain variable domain of TCR clone 302316 (TRBV7-3, TRBJ1-1)
CAISQDWGAEAFF

SEQ ID NO: 604633 - protein, 17 aa, Homo sapiens
  CDR3 for alpha chain variable domain of TCR clone 302317 (TRAV14/DV4, TRAJ10)
CAMREGRTTGGGNKLTF

SEQ ID NO: 604634 - protein, 14 aa, Homo sapiens
  CDR3 for beta chain variable domain of TCR clone 302317 (TRBV6-1, TRBJ1-3)
CASVQGGGGNTIYF

SEQ ID NO: 604635 - protein, 14 aa, Homo sapiens
  CDR3 for alpha chain variable domain of TCR clone 302318 (TRAV20, TRAJ9)
CAVQASTGGFKTIF

SEQ ID NO: 604636 - protein, 14 aa, Homo sapiens
  CDR3 for beta chain variable domain of TCR clone 302318 (TRBV12-5, TRBJ1-6)
RASRVGQINSPLHF

SEQ ID NO: 604637 - protein, 12 aa, Homo sapiens
  CDR3 for alpha chain variable domain of TCR clone 302319 (TRAV23/DV6, TRAJ30)
CAASKGDDKIIF

SEQ ID NO: 604638 - protein, 14 aa, Homo sapiens
  CDR3 for beta chain variable domain of TCR clone 302319 (TRBV5-1, TRBJ2-7)
CASSRGESLYGQYF

SEQ ID NO: 604639 - protein, 13 aa, Homo sapiens
  CDR3 for alpha chain variable domain of TCR clone 302320 (TRAV3, TRAJ21)
CAVREPDFNKFYS

SEQ ID NO: 604640 - protein, 15 aa, Homo sapiens
  CDR3 for beta chain variable domain of TCR clone 302320 (TRBV20-1, TRBJ1-1)
CSASRGVTGNTEAFF

SEQ ID NO: 604641 - protein, 16 aa, Homo sapiens
  CDR3 for alpha chain variable domain of TCR clone 302321 (TRAV14/DV4, TRAJ53)
CAMREGGGGSNYKLTF

SEQ ID NO: 604642 - protein, 16 aa, Homo sapiens
  CDR3 for beta chain variable domain of TCR clone 302321 (TRBV2, TRBJ2-5)
CASSARGLGGRETQYF

SEQ ID NO: 604643 - protein, 16 aa, Homo sapiens
  CDR3 for alpha chain variable domain of TCR clone 302322 (TRAV4, TRAJ18)
CCVLLIGGSTLGRLYF

SEQ ID NO: 604644 - protein, 15 aa, Homo sapiens
  CDR3 for beta chain variable domain of TCR clone 302322 (TRBV7-2, TRBJ2-3)
CASSSQTSSTDTQYF

SEQ ID NO: 604645 - protein, 16 aa, Homo sapiens
  CDR3 for alpha chain variable domain of TCR clone 302323 (TRAV3, TRAJ22)
CAVRDMGSGSARQLTF

SEQ ID NO: 604646 - protein, 13 aa, Homo sapiens
  CDR3 for beta chain variable domain of TCR clone 302323 (TRBV20-1, TRBJ1-1)
CSARGGGNTEAFF

SEQ ID NO: 604647 - protein, 15 aa, Homo sapiens
  CDR3 for alpha chain variable domain of TCR clone 302324 (TRAV8-3, TRAJ7)
CAVGSISYGNNRLAF

SEQ ID NO: 604648 - protein, 18 aa, Homo sapiens
  CDR3 for beta chain variable domain of TCR clone 302324 (TRBV12-4, TRBJ2-2)
CASSLVAGTRGRTGELFF

SEQ ID NO: 604649 - protein, 14 aa, Homo sapiens
  CDR3 for alpha chain variable domain of TCR clone 302325 (TRAV17, TRAJ6)
CATDASGGSYIPTF

SEQ ID NO: 604650 - protein, 15 aa, Homo sapiens
  CDR3 for beta chain variable domain of TCR clone 302325 (TRBV11-3, TRBJ2-3)
CASLKDGREGDTQYF

SEQ ID NO: 604651 - protein, 14 aa, Homo sapiens
  CDR3 for alpha chain variable domain of TCR clone 302326 (TRAV13-1, TRAJ35)
CAASKGGFGNVLHC

SEQ ID NO: 604652 - protein, 17 aa, Homo sapiens
  CDR3 for beta chain variable domain of TCR clone 302326 (TRBV11-2, TRBJ2-1)
CASSLCPPGVEYNEQFF

SEQ ID NO: 604653 - protein, 13 aa, Homo sapiens
  CDR3 for alpha chain variable domain of TCR clone 302327 (TRAV12-2, TRAJ24)
CAVSTDSWGKLQF

SEQ ID NO: 604654 - protein, 14 aa, Homo sapiens
  CDR3 for beta chain variable domain of TCR clone 302327 (TRBV7-3, TRBJ2-2)
CASSSGGYTGELFF

SEQ ID NO: 604655 - protein, 15 aa, Homo sapiens
  CDR3 for alpha chain variable domain of TCR clone 302328 (TRAV8-4, TRAJ37)
CAVSRGSGNTGKLIS

SEQ ID NO: 604656 - protein, 15 aa, Homo sapiens
  CDR3 for beta chain variable domain of TCR clone 302328 (TRBV5-1, TRBJ2-7)
CASSLDLTSSYEQYF

SEQ ID NO: 604657 - protein, 11 aa, Homo sapiens
  CDR3 for alpha chain variable domain of TCR clone 302329 (TRAV16, TRAJ49)
CALRSGNQFYF

SEQ ID NO: 604658 - protein, 16 aa, Homo sapiens
  CDR3 for beta chain variable domain of TCR clone 302329 (TRBV20-1, TRBJ1-4)
CSAPGQGLLTNEKLFF

SEQ ID NO: 604659 - protein, 11 aa, Homo sapiens
  CDR3 for alpha chain variable domain of TCR clone 302330 (TRAV27, TRAJ47)
CAGAYGNKLVF

SEQ ID NO: 604660 - protein, 16 aa, Homo sapiens
  CDR3 for beta chain variable domain of TCR clone 302330 (TRBV28, TRBJ1-5)
CASSFRGGYSNQPQHF

SEQ ID NO: 604661 - protein, 14 aa, Homo sapiens
  CDR3 for alpha chain variable domain of TCR clone 302331 (TRAV12-2, TRAJ5)
CAVNRSTGRRALTF

SEQ ID NO: 604662 - protein, 12 aa, Homo sapiens
  CDR3 for beta chain variable domain of TCR clone 302331 (TRBV28, TRBJ2-6)
CAIQAGANVLTF

SEQ ID NO: 604663 - protein, 15 aa, Homo sapiens
  CDR3 for alpha chain variable domain of TCR clone 302332 (TRAV27, TRAJ38)
CAARRNAGNNRKRIW

SEQ ID NO: 604664 - protein, 13 aa, Homo sapiens
  CDR3 for beta chain variable domain of TCR clone 302332 (TRBV12-5, TRBJ2-3)
CASGDRQSDTQCF

SEQ ID NO: 604665 - protein, 20 aa, Homo sapiens
  CDR3 for alpha chain variable domain of TCR clone 302333 (TRAV8-4, TRAJ3)
CAVTGENLVQQCFQDNILIR

SEQ ID NO: 604666 - protein, 16 aa, Homo sapiens
  CDR3 for beta chain variable domain of TCR clone 302333 (TRBV4-2, TRBJ1-1)
CASSQAGFGMNTEAFF

SEQ ID NO: 604667 - protein, 14 aa, Homo sapiens
  CDR3 for alpha chain variable domain of TCR clone 302334 (TRAV35, TRAJ38)
CAGSTAGNNRKLIW

SEQ ID NO: 604668 - protein, 12 aa, Homo sapiens
  CDR3 for beta chain variable domain of TCR clone 302334 (TRBV19, TRBJ2-7)
CASTDRGYEQYF

SEQ ID NO: 604669 - protein, 13 aa, Homo sapiens
  CDR3 for alpha chain variable domain of TCR clone 302335 (TRAV12-1, TRAJ6)
CVVYPGGSYIPTF

SEQ ID NO: 604670 - protein, 13 aa, Homo sapiens
  CDR3 for beta chain variable domain of TCR clone 302335 (TRBV4-2, TRBJ1-1)
CASSRAGNTEAFF

SEQ ID NO: 604671 - protein, 18 aa, Homo sapiens
  CDR3 for alpha chain variable domain of TCR clone 302336 (TRAV26-2, TRAJ45)
CILRVDKYSGGGADGLTF

SEQ ID NO: 604672 - protein, 15 aa, Homo sapiens
  CDR3 for beta chain variable domain of TCR clone 302336 (TRBV6-1, TRBJ2-3)
CASSERGGITDTQYF

SEQ ID NO: 604673 - protein, 11 aa, Homo sapiens
  CDR3 for alpha chain variable domain of TCR clone 302337 (TRAV21, TRAJ11)
CAVNGYSTLTF

SEQ ID NO: 604674 - protein, 16 aa, Homo sapiens
  CDR3 for beta chain variable domain of TCR clone 302337 (TRBV7-2, TRBJ2-1)
CASTLDSGGSRNEQFF

SEQ ID NO: 604675 - protein, 17 aa, Homo sapiens
  CDR3 for alpha chain variable domain of TCR clone 302338 (TRAV17, TRAJ28)
CATDPRRGGAGSYQLTF

SEQ ID NO: 604676 - protein, 13 aa, Homo sapiens
  CDR3 for beta chain variable domain of TCR clone 302338 (TRBV19, TRBJ1-5)
CASKVGPWEPQHF

SEQ ID NO: 604677 - protein, 14 aa, Homo sapiens
  CDR3 for alpha chain variable domain of TCR clone 302339 (TRAV12-3, TRAJ54)
CAMSALQGAQKPVF

SEQ ID NO: 604678 - protein, 15 aa, Homo sapiens
  CDR3 for beta chain variable domain of TCR clone 302339 (TRBV19, TRBJ2-4)
CASSTPGIAKNIQYF

SEQ ID NO: 604679 - protein, 14 aa, Homo sapiens
  CDR3 for alpha chain variable domain of TCR clone 302340 (TRAV13-1, TRAJ35)
CAASKGGFGNVLHC

SEQ ID NO: 604680 - protein, 13 aa, Homo sapiens
  CDR3 for beta chain variable domain of TCR clone 302340 (TRBV7-9, TRBJ1-2)
CASSLKQNYGYTF

SEQ ID NO: 604681 - protein, 11 aa, Homo sapiens
  CDR3 for alpha chain variable domain of TCR clone 302341 (TRAV3, TRAJ21)
CAVGNFNKFYF

SEQ ID NO: 604682 - protein, 16 aa, Homo sapiens
  CDR3 for beta chain variable domain of TCR clone 302341 (TRBV19, TRBJ2-1)
CASGKAGPSAYNEQFF

SEQ ID NO: 604683 - protein, 13 aa, Homo sapiens
  CDR3 for alpha chain variable domain of TCR clone 302342 (TRAV17, TRAJ54)
CATVIQGAQKLVF

SEQ ID NO: 604684 - protein, 15 aa, Homo sapiens
  CDR3 for beta chain variable domain of TCR clone 302342 (TRBV13, TRBJ2-1)
CARSLLSGLNNEQFF

SEQ ID NO: 604685 - protein, 16 aa, Homo sapiens
  CDR3 for alpha chain variable domain of TCR clone 302343 (TRAV26-1, TRAJ38)
CIVRPLNAGNNRKLIW

SEQ ID NO: 604686 - protein, 13 aa, Homo sapiens
  CDR3 for beta chain variable domain of TCR clone 302343 (TRBV18, TRBJ1-1)
CASSPIGDTEAFF

SEQ ID NO: 604687 - protein, 16 aa, Homo sapiens
  CDR3 for alpha chain variable domain of TCR clone 302344 (TRAV30, TRAJ24)
CGTEIVDAHSWGKFQF

SEQ ID NO: 604688 - protein, 15 aa, Homo sapiens
  CDR3 for beta chain variable domain of TCR clone 302344 (TRBV7-3, TRBJ2-1)
CASSLGQGPFGEQFF

SEQ ID NO: 604689 - protein, 14 aa, Homo sapiens
  CDR3 for alpha chain variable domain of TCR clone 302345 (TRAV4, TRAJ5)
CLVVPDTGRRALTF

SEQ ID NO: 604690 - protein, 12 aa, Homo sapiens
  CDR3 for beta chain variable domain of TCR clone 302345 (TRBV5-7, TRBJ1-1)
CASSLGRGKAFF

SEQ ID NO: 604691 - protein, 14 aa, Homo sapiens
  CDR3 for alpha chain variable domain of TCR clone 302346 (TRAV3, TRAJ34)
CAVRDINNTDKHIF

SEQ ID NO: 604692 - protein, 15 aa, Homo sapiens
  CDR3 for beta chain variable domain of TCR clone 302346 (TRBV20-1, TRBJ2-7)
CSARDRVSGMDEQYF

SEQ ID NO: 604693 - protein, 16 aa, Homo sapiens
  CDR3 for alpha chain variable domain of TCR clone 302347 (TRAV30, TRAJ49)
SAAQRVGPNTGSQFYF

SEQ ID NO: 604694 - protein, 15 aa, Homo sapiens
  CDR3 for beta chain variable domain of TCR clone 302347 (TRBV2, TRBJ2-1)
CASSELAGSYNEQFF

SEQ ID NO: 604695 - protein, 13 aa, Homo sapiens
  CDR3 for alpha chain variable domain of TCR clone 302348 (TRAV35, TRAJ37)
CAGSSGNTGKLIF

SEQ ID NO: 604696 - protein, 14 aa, Homo sapiens
  CDR3 for beta chain variable domain of TCR clone 302348 (TRBV7-9, TRBJ2-7)
CASSLDRPTDEQYF

SEQ ID NO: 604697 - protein, 14 aa, Homo sapiens
  CDR3 for alpha chain variable domain of TCR clone 302349 (TRAV29/DV5, TRAJ22)
CAASVYGSARQLTF

SEQ ID NO: 604698 - protein, 13 aa, Homo sapiens
  CDR3 for beta chain variable domain of TCR clone 302349 (TRBV4-1, TRBJ2-2)
CASSQENTGELFF

SEQ ID NO: 604699 - protein, 16 aa, Homo sapiens
  CDR3 for alpha chain variable domain of TCR clone 302350 (TRAV26-1, TRAJ37)
CIVRGDGTGNTGKLIF

SEQ ID NO: 604700 - protein, 17 aa, Homo sapiens
  CDR3 for beta chain variable domain of TCR clone 302350 (TRBV4-1, TRBJ2-7)
CASSRDPLGVRGGEQYF

SEQ ID NO: 604701 - protein, 11 aa, Homo sapiens
  CDR3 for alpha chain variable domain of TCR clone 302351 (TRAV12-1, TRAJ30)
CVVNGQDKIIL

SEQ ID NO: 604702 - protein, 16 aa, Homo sapiens
  CDR3 for beta chain variable domain of TCR clone 302351 (TRBV24-1, TRBJ2-3)
CVTSDAISGITDTQYF

SEQ ID NO: 604703 - protein, 14 aa, Homo sapiens
  CDR3 for alpha chain variable domain of TCR clone 302352 (TRAV12-2, TRAJ40)
CAVKIPSGTYKYIF

SEQ ID NO: 604704 - protein, 20 aa, Homo sapiens
  CDR3 for beta chain variable domain of TCR clone 302352 (TRBV19, TRBJ2-1)
CASSISRTVTSTRLNNEQFF

SEQ ID NO: 604705 - protein, 12 aa, Homo sapiens
  CDR3 for alpha chain variable domain of TCR clone 302353 (TRAV29/DV5, TRAJ27)
CAASTNAGKSTL

SEQ ID NO: 604706 - protein, 13 aa, Homo sapiens
  CDR3 for beta chain variable domain of TCR clone 302353 (TRBV6-5, TRBJ2-7)
CASSYSGQYEQYF

SEQ ID NO: 604707 - protein, 15 aa, Homo sapiens
  CDR3 for alpha chain variable domain of TCR clone 302354 (TRAV2, TRAJ9)
CAVEDRGTGGFKTIF

SEQ ID NO: 604708 - protein, 17 aa, Homo sapiens
  CDR3 for beta chain variable domain of TCR clone 302354 (TRBV24-1, TRBJ2-3)
TSVPPVIGTGATDTQYF

SEQ ID NO: 604709 - protein, 12 aa, Homo sapiens
  CDR3 for alpha chain variable domain of TCR clone 302355 (TRAV17, TRAJ57)
CGTDGGSEKLVF

SEQ ID NO: 604710 - protein, 13 aa, Homo sapiens
  CDR3 for beta chain variable domain of TCR clone 302355 (TRBV7-9, TRBJ2-7)
CASSFAGAYEQYF

SEQ ID NO: 604711 - protein, 12 aa, Homo sapiens
  CDR3 for alpha chain variable domain of TCR clone 302356 (TRAV3, TRAJ43)
CAVRDPNNDMRF

SEQ ID NO: 604712 - protein, 15 aa, Homo sapiens
  CDR3 for beta chain variable domain of TCR clone 302356 (TRBV19, TRBJ1-5)
CASSDSGPRNQPQHF

SEQ ID NO: 604713 - protein, 14 aa, Homo sapiens
  CDR3 for alpha chain variable domain of TCR clone 302357 (TRAV8-4, TRAJ49)
CAVKRGLPVTSSIL

SEQ ID NO: 604714 - protein, 18 aa, Homo sapiens
  CDR3 for beta chain variable domain of TCR clone 302357 (TRBV7-9, TRBJ2-7)
CASSLTTSGSRTWYEQYF

SEQ ID NO: 604715 - protein, 13 aa, Homo sapiens
  CDR3 for alpha chain variable domain of TCR clone 302358 (TRAV12-1, TRAJ11)
CVVTRGGYSTLTF

SEQ ID NO: 604716 - protein, 15 aa, Homo sapiens
  CDR3 for beta chain variable domain of TCR clone 302358 (TRBV27, TRBJ2-1)
CASSNGGGSSNEQFF

SEQ ID NO: 604717 - protein, 11 aa, Homo sapiens
  CDR3 for alpha chain variable domain of TCR clone 302359 (TRAV8-6, TRAJ13)
CALGIHQKVTF

SEQ ID NO: 604718 - protein, 15 aa, Homo sapiens
  CDR3 for beta chain variable domain of TCR clone 302359 (TRBV5-1, TRBJ2-7)
CASSLNGGPAREQYF

SEQ ID NO: 604719 - protein, 13 aa, Homo sapiens
  CDR3 for alpha chain variable domain of TCR clone 302360 (TRAV22, TRAJ44)
CALNPGTASKLTF

SEQ ID NO: 604720 - protein, 17 aa, Homo sapiens
  CDR3 for beta chain variable domain of TCR clone 302360 (TRBV13, TRBJ2-3)
CASSLSRVAGGRNTQYF

SEQ ID NO: 604721 - protein, 14 aa, Homo sapiens
  CDR3 for alpha chain variable domain of TCR clone 302361 (TRAV17, TRAJ57)
CATDASGGSEKLVV

SEQ ID NO: 604722 - protein, 14 aa, Homo sapiens
  CDR3 for beta chain variable domain of TCR clone 302361 (TRBV4-2, TRBJ2-1)
CASGLDRAYNEQFF

SEQ ID NO: 604723 - protein, 14 aa, Homo sapiens
  CDR3 for alpha chain variable domain of TCR clone 302362 (TRAV8-4, TRAJ16)
CTVSPVGRWPEAAL

SEQ ID NO: 604724 - protein, 14 aa, Homo sapiens
  CDR3 for beta chain variable domain of TCR clone 302362 (TRBV23-1, TRBJ2-5)
CASSFLRSQETQYF

SEQ ID NO: 604725 - protein, 14 aa, Homo sapiens
  CDR3 for alpha chain variable domain of TCR clone 302363 (TRAV26-1, TRAJ39)
CIVRGSRAGNMLTF

SEQ ID NO: 604726 - protein, 15 aa, Homo sapiens
  CDR3 for beta chain variable domain of TCR clone 302363 (TRBV7-9, TRBJ1-5)
CASSKGHQPNQPQHF

SEQ ID NO: 604727 - protein, 15 aa, Homo sapiens
  CDR3 for alpha chain variable domain of TCR clone 302364 (TRAV12-3, TRAJ6)
CALSATTGGSYIPTF

SEQ ID NO: 604728 - protein, 12 aa, Homo sapiens
  CDR3 for beta chain variable domain of TCR clone 302364 (TRBV11-2, TRBJ2-2)
CASSLGGGELFF

SEQ ID NO: 604729 - protein, 14 aa, Homo sapiens
  CDR3 for alpha chain variable domain of TCR clone 302365 (TRAV35, TRAJ22)
CAGLRPGSARQLTF

SEQ ID NO: 604730 - protein, 14 aa, Homo sapiens
  CDR3 for beta chain variable domain of TCR clone 302365 (TRBV12-4, TRBJ2-3)
CASTIAGWGDTQYF

SEQ ID NO: 604731 - protein, 14 aa, Homo sapiens
  CDR3 for alpha chain variable domain of TCR clone 302366 (TRAV12-2, TRAJ4)
CAVSSSGGYNKLIF

SEQ ID NO: 604732 - protein, 23 aa, Homo sapiens
  CDR3 for beta chain variable domain of TCR clone 302366 (TRBV7-9, TRBJ1-2)
EAQLEKSRLLSDRFSSGEDGYTF

SEQ ID NO: 604733 - protein, 13 aa, Homo sapiens
  CDR3 for alpha chain variable domain of TCR clone 302367 (TRAV35, TRAJ36)
CAGPRIGANNLFF

SEQ ID NO: 604734 - protein, 22 aa, Homo sapiens
  CDR3 for beta chain variable domain of TCR clone 302367 (TRBV11-2, TRBJ1-4)
CASSLDITRRGIPRKDNEKLFF

SEQ ID NO: 604735 - protein, 15 aa, Homo sapiens
  CDR3 for alpha chain variable domain of TCR clone 302368 (TRAV3, TRAJ47)
CAVRDIGECGNKLVF

SEQ ID NO: 604736 - protein, 14 aa, Homo sapiens
  CDR3 for beta chain variable domain of TCR clone 302368 (TRBV13, TRBJ2-5)
CARSLERVGETQYF

SEQ ID NO: 604737 - protein, 17 aa, Homo sapiens
  CDR3 for alpha chain variable domain of TCR clone 302369 (TRAV8-6, TRAJ58)
CAVSSWVGETSGSRLTV

SEQ ID NO: 604738 - protein, 16 aa, Homo sapiens
  CDR3 for beta chain variable domain of TCR clone 302369 (TRBV20-1, TRBJ1-4)
CSAPGQGLLTNEKLFF

SEQ ID NO: 604739 - protein, 12 aa, Homo sapiens
  CDR3 for alpha chain variable domain of TCR clone 302370 (TRAV16, TRAJ27)
CALNTNAGKSTF

SEQ ID NO: 604740 - protein, 16 aa, Homo sapiens
  CDR3 for beta chain variable domain of TCR clone 302370 (TRBV20-1, TRBJ2-3)
CSAVRDRGPIADTQYF

SEQ ID NO: 604741 - protein, 17 aa, Homo sapiens
  CDR3 for alpha chain variable domain of TCR clone 302371 (TRAV17, TRAJ28)
CATDPRRGGAGSYQLTF

SEQ ID NO: 604742 - protein, 18 aa, Homo sapiens
  CDR3 for beta chain variable domain of TCR clone 302371 (TRBV25-1, TRBJ1-1)
CASSGDRTGGALRLSLDK

SEQ ID NO: 604743 - protein, 13 aa, Homo sapiens
  CDR3 for alpha chain variable domain of TCR clone 302372 (TRAV23/DV6, TRAJ10)
GSVLTGGGNKLTF

SEQ ID NO: 604744 - protein, 13 aa, Homo sapiens
  CDR3 for beta chain variable domain of TCR clone 302372 (TRBV11-1, TRBJ1-2)
CASVGSWGYGYTF

SEQ ID NO: 604745 - protein, 14 aa, Homo sapiens
  CDR3 for alpha chain variable domain of TCR clone 302373 (TRAV1-2, TRAJ16)
CAVNRFSDGQKLLF

SEQ ID NO: 604746 - protein, 15 aa, Homo sapiens
  CDR3 for beta chain variable domain of TCR clone 302373 (TRBV7-9, TRBJ1-6)
RASSSPGRGNSPLLF

SEQ ID NO: 604747 - protein, 11 aa, Homo sapiens
  CDR3 for alpha chain variable domain of TCR clone 302374 (TRAV21, TRAJ11)
CAVNGYSTLTF

SEQ ID NO: 604748 - protein, 14 aa, Homo sapiens
  CDR3 for beta chain variable domain of TCR clone 302374 (TRBV28, TRBJ1-2)
CASRIQGANYGYTF

SEQ ID NO: 604749 - protein, 11 aa, Homo sapiens
  CDR3 for alpha chain variable domain of TCR clone 302375 (TRAV8-6, TRAJ13)
CALGIYQKVTF

SEQ ID NO: 604750 - protein, 15 aa, Homo sapiens
  CDR3 for beta chain variable domain of TCR clone 302375 (TRBV5-1, TRBJ2-7)
CASSVNGGPAREQYF

SEQ ID NO: 604751 - protein, 14 aa, Homo sapiens
  CDR3 for alpha chain variable domain of TCR clone 302376 (TRAV21, TRAJ12)
CAVRNGDSSYKLIF

SEQ ID NO: 604752 - protein, 14 aa, Homo sapiens
  CDR3 for beta chain variable domain of TCR clone 302376 (TRBV7-6, TRBJ2-7)
CASSLTGTGNEQYL

SEQ ID NO: 604753 - protein, 14 aa, Homo sapiens
  CDR3 for alpha chain variable domain of TCR clone 302377 (TRAV38-1, TRAJ40)
CALRPTSGTYKYIF

SEQ ID NO: 604754 - protein, 15 aa, Homo sapiens
  CDR3 for beta chain variable domain of TCR clone 302377 (TRBV28, TRBJ2-3)
CAPTFRDWSTDTQYF

SEQ ID NO: 604755 - protein, 13 aa, Homo sapiens
  CDR3 for alpha chain variable domain of TCR clone 302378 (TRAV4, TRAJ22)
CLGGSGSARQLTF

SEQ ID NO: 604756 - protein, 13 aa, Homo sapiens
  CDR3 for beta chain variable domain of TCR clone 302378 (TRBV7-3, TRBJ1-1)
CASSQDWGAEAFF

SEQ ID NO: 604757 - protein, 11 aa, Homo sapiens
  CDR3 for alpha chain variable domain of TCR clone 302379 (TRAV20, TRAJ34)
CAVLDTDNLIF

SEQ ID NO: 604758 - protein, 15 aa, Homo sapiens
  CDR3 for beta chain variable domain of TCR clone 302379 (TRBV6-3, TRBJ2-7)
CASSSPGTVFYEQYF

SEQ ID NO: 604759 - protein, 11 aa, Homo sapiens
  CDR3 for alpha chain variable domain of TCR clone 302380 (TRAV2, TRAJ21)
CAVFNFNKFYF

SEQ ID NO: 604760 - protein, 17 aa, Homo sapiens
  CDR3 for beta chain variable domain of TCR clone 302380 (TRBV7-9, TRBJ2-3)
CASSPTVAGDLTDTQYF

SEQ ID NO: 604761 - protein, 23 aa, Homo sapiens
  CDR3 for alpha chain variable domain of TCR clone 302381 (TRAV12-2, TRAJ43)
SLLIRDSQPSDSATYLGAFGMRF

SEQ ID NO: 604762 - protein, 17 aa, Homo sapiens
  CDR3 for beta chain variable domain of TCR clone 302381 (TRBV13, TRBJ2-3)
CASSLSRVAGGRNTQYF

SEQ ID NO: 604763 - protein, 14 aa, Homo sapiens
  CDR3 for alpha chain variable domain of TCR clone 302382 (TRAV13-2, TRAJ37)
CADKISGNTGKLIF

SEQ ID NO: 604764 - protein, 15 aa, Homo sapiens
  CDR3 for beta chain variable domain of TCR clone 302382 (TRBV11-2, TRBJ1-3)
CASSAHSSSGNTIYF

SEQ ID NO: 604765 - protein, 17 aa, Homo sapiens
  CDR3 for alpha chain variable domain of TCR clone 302383 (TRAV3, TRAJ6)
CALRDDPRAGGSYIPTF

SEQ ID NO: 604766 - protein, 14 aa, Homo sapiens
  CDR3 for beta chain variable domain of TCR clone 302383 (TRBV7-2, TRBJ2-7)
CASSTKTSFYEQYF

SEQ ID NO: 604767 - protein, 15 aa, Homo sapiens
  CDR3 for alpha chain variable domain of TCR clone 302384 (TRAV8-3, TRAJ27)
CAVGPSKTNAGKSNF

SEQ ID NO: 604768 - protein, 15 aa, Homo sapiens
  CDR3 for beta chain variable domain of TCR clone 302384 (TRBV7-2, TRBJ2-1)
CASRSGLAGGNEQFF

SEQ ID NO: 604769 - protein, 14 aa, Homo sapiens
  CDR3 for alpha chain variable domain of TCR clone 302385 (TRAV12-2, TRAJ5)
CAVNRSTGRKALTF

SEQ ID NO: 604770 - protein, 13 aa, Homo sapiens
  CDR3 for beta chain variable domain of TCR clone 302385 (TRBV7-9, TRBJ1-2)
CASSLKQNYGYTF

SEQ ID NO: 604771 - protein, 13 aa, Homo sapiens
  CDR3 for alpha chain variable domain of TCR clone 302386 (TRAV21, TRAJ27)
CAARPGNAGKSTF

SEQ ID NO: 604772 - protein, 14 aa, Homo sapiens
  CDR3 for beta chain variable domain of TCR clone 302386 (TRBV4-2, TRBJ2-7)
AAAKLAGGTYEQYF

SEQ ID NO: 604773 - protein, 11 aa, Homo sapiens
  CDR3 for alpha chain variable domain of TCR clone 302387 (TRAV13-1, TRAJ43)
CAASVANDMRF

SEQ ID NO: 604774 - protein, 14 aa, Homo sapiens
  CDR3 for beta chain variable domain of TCR clone 302387 (TRBV4-1, TRBJ1-1)
CASSPPGVNTEAFF

SEQ ID NO: 604775 - protein, 16 aa, Homo sapiens
  CDR3 for alpha chain variable domain of TCR clone 302388 (TRAV12-2, TRAJ45)
CAVNMYSGGGADGLTF

SEQ ID NO: 604776 - protein, 17 aa, Homo sapiens
  CDR3 for beta chain variable domain of TCR clone 302388 (TRBV6-3, TRBJ2-2)
CASSCRGRDFYTGELFF

SEQ ID NO: 604777 - protein, 18 aa, Homo sapiens
  CDR3 for alpha chain variable domain of TCR clone 302389 (TRAV26-2, TRAJ54)
CILRDVEVGIQGAQKLVF

SEQ ID NO: 604778 - protein, 16 aa, Homo sapiens
  CDR3 for beta chain variable domain of TCR clone 302389 (TRBV6-1, TRBJ2-5)
CASSETLDRGAETQYV

SEQ ID NO: 604779 - protein, 15 aa, Homo sapiens
  CDR3 for alpha chain variable domain of TCR clone 302390 (TRAV12-2, TRAJ43)
CAFDMRFGAGTRLTV

SEQ ID NO: 604780 - protein, 13 aa, Homo sapiens
  CDR3 for beta chain variable domain of TCR clone 302390 (TRBV7-9, TRBJ2-1)
CASSLDVGNEQFF

SEQ ID NO: 604781 - protein, 12 aa, Homo sapiens
  CDR3 for alpha chain variable domain of TCR clone 302391 (TRAV36/DV7, TRAJ54)
CAVVRGAQKLVF

SEQ ID NO: 604782 - protein, 11 aa, Homo sapiens
  CDR3 for beta chain variable domain of TCR clone 302391 (TRBV7-9, TRBJ2-3)
CASSPPDTQYF

SEQ ID NO: 604783 - protein, 15 aa, Homo sapiens
  CDR3 for alpha chain variable domain of TCR clone 302392 (TRAV29/DV5, TRAJ53)
CAASASGGSNYKLTF

SEQ ID NO: 604784 - protein, 14 aa, Homo sapiens
  CDR3 for beta chain variable domain of TCR clone 302392 (TRBV7-8, TRBJ2-5)
CASSATGGQETQYF

SEQ ID NO: 604785 - protein, 13 aa, Homo sapiens
  CDR3 for alpha chain variable domain of TCR clone 302393 (TRAV13-1, TRAJ39)
CSKYSNAGNMLNF

SEQ ID NO: 604786 - protein, 16 aa, Homo sapiens
  CDR3 for beta chain variable domain of TCR clone 302393 (TRBV20-1, TRBJ1-4)
CSAPGQGLLTNEKLFF

SEQ ID NO: 604787 - protein, 15 aa, Homo sapiens
  CDR3 for alpha chain variable domain of TCR clone 302394 (TRAV8-3, TRAJ38)
CAVGASNAGNNRKLI

SEQ ID NO: 604788 - protein, 15 aa, Homo sapiens
  CDR3 for beta chain variable domain of TCR clone 302394 (TRBV11-3, TRBJ1-3)
CASSLFGPSGNTIYF

SEQ ID NO: 604789 - protein, 15 aa, Homo sapiens
  CDR3 for alpha chain variable domain of TCR clone 302395 (TRAV21, TRAJ40)
CAVRPQTTGTYKYIF

SEQ ID NO: 604790 - protein, 15 aa, Homo sapiens
  CDR3 for beta chain variable domain of TCR clone 302395 (TRBV5-7, TRBJ1-5)
CASSYGKLWDQPQHF

SEQ ID NO: 604791 - protein, 13 aa, Homo sapiens
  CDR3 for alpha chain variable domain of TCR clone 302396 (TRAV20, TRAJ48)
CAVHLFGNEKLTF

SEQ ID NO: 604792 - protein, 15 aa, Homo sapiens
  CDR3 for beta chain variable domain of TCR clone 302396 (TRBV6-5, TRBJ2-6)
CAISQWEAGANVLTF

SEQ ID NO: 604793 - protein, 13 aa, Homo sapiens
  CDR3 for alpha chain variable domain of TCR clone 302397 (TRAV3, TRAJ36)
CAVSLGGANNLFF

SEQ ID NO: 604794 - protein, 12 aa, Homo sapiens
  CDR3 for beta chain variable domain of TCR clone 302397 (TRBV11-2, TRBJ2-2)
CASSLPTGELFF

SEQ ID NO: 604795 - protein, 15 aa, Homo sapiens
  CDR3 for alpha chain variable domain of TCR clone 302398 (TRAV12-1, TRAJ44)
CVADLPTGTASKLTF

SEQ ID NO: 604796 - protein, 14 aa, Homo sapiens
  CDR3 for beta chain variable domain of TCR clone 302398 (TRBV7-2, TRBJ2-7)
CASSPKTSFYEQYF

SEQ ID NO: 604797 - protein, 11 aa, Homo sapiens
  CDR3 for alpha chain variable domain of TCR clone 302399 (TRAV21, TRAJ11)
CAVNGYSTLTF

SEQ ID NO: 604798 - protein, 15 aa, Homo sapiens
  CDR3 for beta chain variable domain of TCR clone 302399 (TRBV6-5, TRBJ1-1)
CASSYSAAMETEAFF

SEQ ID NO: 604799 - protein, 11 aa, Homo sapiens
  CDR3 for alpha chain variable domain of TCR clone 302400 (TRAV21, TRAJ41)
CDVRSGYALNF

SEQ ID NO: 604800 - protein, 13 aa, Homo sapiens
  CDR3 for beta chain variable domain of TCR clone 302400 (TRBV7-9, TRBJ1-2)
CASSLKQNYGYTV

SEQ ID NO: 604801 - protein, 13 aa, Homo sapiens
  CDR3 for alpha chain variable domain of TCR clone 302401 (TRAV27, TRAJ49)
CAPRPYTGNQSYF

SEQ ID NO: 604802 - protein, 18 aa, Homo sapiens
  CDR3 for beta chain variable domain of TCR clone 302401 (TRBV7-3, TRBJ2-5)
CASSLGGAAQGRWETQYL

SEQ ID NO: 604803 - protein, 12 aa, Homo sapiens
  CDR3 for alpha chain variable domain of TCR clone 302402 (TRAV3, TRAJ5)
CAVRDARRALTF

SEQ ID NO: 604804 - protein, 13 aa, Homo sapiens
  CDR3 for beta chain variable domain of TCR clone 302402 (TRBV28, TRBJ2-7)
CASSLFRGDEQYF

SEQ ID NO: 604805 - protein, 12 aa, Homo sapiens
  CDR3 for alpha chain variable domain of TCR clone 302403 (TRAV13-2, TRAJ23)
CAERHRGGKPIF

SEQ ID NO: 604806 - protein, 13 aa, Homo sapiens
  CDR3 for beta chain variable domain of TCR clone 302403 (TRBV7-9, TRBJ1-2)
CASSLKQNYGYTF

SEQ ID NO: 604807 - protein, 15 aa, Homo sapiens
  CDR3 for alpha chain variable domain of TCR clone 302404 (TRAV13-2, TRAJ45)
CAENNSGGGADGLTF

SEQ ID NO: 604808 - protein, 13 aa, Homo sapiens
  CDR3 for beta chain variable domain of TCR clone 302404 (TRBV25-1, TRBJ2-6)
CASRGPGADVLTF

SEQ ID NO: 604809 - protein, 15 aa, Homo sapiens
  CDR3 for alpha chain variable domain of TCR clone 302405 (TRAV2, TRAJ15)
CAMEDRNQAGTALIF

SEQ ID NO: 604810 - protein, 13 aa, Homo sapiens
  CDR3 for beta chain variable domain of TCR clone 302405 (TRBV10-2, TRBJ2-1)
CASGASGDAKQFF

SEQ ID NO: 604811 - protein, 14 aa, Homo sapiens
  CDR3 for alpha chain variable domain of TCR clone 302406 (TRAV13-2, TRAJ43)
CAEIPTYNNNDMRF

SEQ ID NO: 604812 - protein, 15 aa, Homo sapiens
  CDR3 for beta chain variable domain of TCR clone 302406 (TRBV7-9, TRBJ2-2)
CASGPLVTFPGELFF

SEQ ID NO: 604813 - protein, 16 aa, Homo sapiens
  CDR3 for alpha chain variable domain of TCR clone 302407 (TRAV30, TRAJ24)
CGTEIVDADSWGKFQF

SEQ ID NO: 604814 - protein, 17 aa, Homo sapiens
  CDR3 for beta chain variable domain of TCR clone 302407 (TRBV11-2, TRBJ2-7)
CASSLPGQRATSSTSGR

SEQ ID NO: 604815 - protein, 13 aa, Homo sapiens
  CDR3 for alpha chain variable domain of TCR clone 302408 (TRAV2, TRAJ40)
CAVVTSGTYKYIF

SEQ ID NO: 604816 - protein, 14 aa, Homo sapiens
  CDR3 for beta chain variable domain of TCR clone 302408 (TRBV19, TRBJ2-1)
CASPAFGLGGEQFF

SEQ ID NO: 604817 - protein, 13 aa, Homo sapiens
  CDR3 for alpha chain variable domain of TCR clone 302409 (TRAV39, TRAJ49)
CAVDRNTGNQFYF

SEQ ID NO: 604818 - protein, 14 aa, Homo sapiens
  CDR3 for beta chain variable domain of TCR clone 302409 (TRBV4-1, TRBJ1-1)
CASSRSGQSFEAVF

SEQ ID NO: 604819 - protein, 12 aa, Homo sapiens
  CDR3 for alpha chain variable domain of TCR clone 302410 (TRAV21, TRAJ33)
CAVQDSNYPLIW

SEQ ID NO: 604820 - protein, 14 aa, Homo sapiens
  CDR3 for beta chain variable domain of TCR clone 302410 (TRBV28, TRBJ2-1)
CASSPGEGGNEQFF

SEQ ID NO: 604821 - protein, 15 aa, Homo sapiens
  CDR3 for alpha chain variable domain of TCR clone 302411 (TRAV23/DV6, TRAJ13)
CAAWPGGGGYQKVTF

SEQ ID NO: 604822 - protein, 12 aa, Homo sapiens
  CDR3 for beta chain variable domain of TCR clone 302411 (TRBV7-9, TRBJ2-7)
CATRTDAYEQYF

SEQ ID NO: 604823 - protein, 13 aa, Homo sapiens
  CDR3 for alpha chain variable domain of TCR clone 302412 (TRAV12-2, TRAJ20)
CAVYPSNDYKLSF

SEQ ID NO: 604824 - protein, 14 aa, Homo sapiens
  CDR3 for beta chain variable domain of TCR clone 302412 (TRBV27, TRBJ2-5)
CQQFIPAGVETQYF

SEQ ID NO: 604825 - protein, 11 aa, Homo sapiens
  CDR3 for alpha chain variable domain of TCR clone 302413 (TRAV17, TRAJ9)
CATTGGFKTIF

SEQ ID NO: 604826 - protein, 15 aa, Homo sapiens
  CDR3 for beta chain variable domain of TCR clone 302413 (TRBV5-7, TRBJ1-5)
CASSYGKLWDQPQHF

SEQ ID NO: 604827 - protein, 16 aa, Homo sapiens
  CDR3 for alpha chain variable domain of TCR clone 302414 (TRAV3, TRAJ10)
CAVRDMRAGGGNNLTF

SEQ ID NO: 604828 - protein, 16 aa, Homo sapiens
  CDR3 for beta chain variable domain of TCR clone 302414 (TRBV19, TRBJ2-2)
CASSFPGQGLAGELFF

SEQ ID NO: 604829 - protein, 16 aa, Homo sapiens
  CDR3 for alpha chain variable domain of TCR clone 302415 (TRAV21, TRAJ37)
CAVRTAGSSNTGKLIF

SEQ ID NO: 604830 - protein, 13 aa, Homo sapiens
  CDR3 for beta chain variable domain of TCR clone 302415 (TRBV7-9, TRBJ2-5)
CASLPSGRGAQYF

SEQ ID NO: 604831 - protein, 13 aa, Homo sapiens
  CDR3 for alpha chain variable domain of TCR clone 302416 (TRAV17, TRAJ54)
CATSWVGAQKLVF

SEQ ID NO: 604832 - protein, 15 aa, Homo sapiens
  CDR3 for beta chain variable domain of TCR clone 302416 (TRBV4-3, TRBJ2-3)
CASSPSLLSTDTQYF

SEQ ID NO: 604833 - protein, 14 aa, Homo sapiens
  CDR3 for alpha chain variable domain of TCR clone 302417 (TRAV6, TRAJ39)
CALPNNNSGNMLTF

SEQ ID NO: 604834 - protein, 17 aa, Homo sapiens
  CDR3 for beta chain variable domain of TCR clone 302417 (TRBV18, TRBJ2-3)
CASSSRGPASSTDTQYF

SEQ ID NO: 604835 - protein, 16 aa, Homo sapiens
  CDR3 for alpha chain variable domain of TCR clone 302418 (TRAV12-1, TRAJ22)
CVVNTISSGSARQLTF

SEQ ID NO: 604836 - protein, 13 aa, Homo sapiens
  CDR3 for beta chain variable domain of TCR clone 302418 (TRBV19, TRBJ2-1)
CASDGGVFSEQFF

SEQ ID NO: 604837 - protein, 17 aa, Homo sapiens
  CDR3 for alpha chain variable domain of TCR clone 302419 (TRAV3, TRAJ42)
CAVRDRDYGGSQGNLIF

SEQ ID NO: 604838 - protein, 14 aa, Homo sapiens
  CDR3 for beta chain variable domain of TCR clone 302419 (TRBV7-2, TRBJ2-5)
CARSPRGSSETQYF

SEQ ID NO: 604839 - protein, 13 aa, Homo sapiens
  CDR3 for alpha chain variable domain of TCR clone 302420 (TRAV12-1, TRAJ16)
CVVNGPAGQRLLF

SEQ ID NO: 604840 - protein, 13 aa, Homo sapiens
  CDR3 for beta chain variable domain of TCR clone 302420 (TRBV2, TRBJ1-1)
CARNPTGGFHAFF

SEQ ID NO: 604841 - protein, 15 aa, Homo sapiens
  CDR3 for alpha chain variable domain of TCR clone 302421 (TRAV13-1, TRAJ17)
CAASIERAAGNKLTF

SEQ ID NO: 604842 - protein, 11 aa, Homo sapiens
  CDR3 for beta chain variable domain of TCR clone 302421 (TRBV6-3, TRBJ2-3)
CATGQADTQYF

SEQ ID NO: 604843 - protein, 16 aa, Homo sapiens
  CDR3 for alpha chain variable domain of TCR clone 302422 (TRAV12-2, TRAJ32)
CAVNMNYGCATNKLIF

SEQ ID NO: 604844 - protein, 16 aa, Homo sapiens
  CDR3 for beta chain variable domain of TCR clone 302422 (TRBV7-8, TRBJ2-3)
CASSTEGQRETDTQYF

SEQ ID NO: 604845 - protein, 12 aa, Homo sapiens
  CDR3 for alpha chain variable domain of TCR clone 302423 (TRAV12-3, TRAJ41)
CAMSYSGYALNF

SEQ ID NO: 604846 - protein, 14 aa, Homo sapiens
  CDR3 for beta chain variable domain of TCR clone 302423 (TRBV7-3, TRBJ2-1)
CASSLSGSYNEQFF

SEQ ID NO: 604847 - protein, 17 aa, Homo sapiens
  CDR3 for alpha chain variable domain of TCR clone 302424 (TRAV23/DV6, TRAJ57)
CAASSTLSQGGSEKLVF

SEQ ID NO: 604848 - protein, 14 aa, Homo sapiens
  CDR3 for beta chain variable domain of TCR clone 302424 (TRBV25-1, TRBJ1-1)
CASTHLGGNPEAFF

SEQ ID NO: 604849 - protein, 13 aa, Homo sapiens
  CDR3 for alpha chain variable domain of TCR clone 302425 (TRAV23/DV6, TRAJ16)
CAASISDGQKLLF

SEQ ID NO: 604850 - protein, 15 aa, Homo sapiens
  CDR3 for beta chain variable domain of TCR clone 302425 (TRBV2, TRBJ2-2)
CASSRETVDTGELFF

SEQ ID NO: 604851 - protein, 18 aa, Homo sapiens
  CDR3 for alpha chain variable domain of TCR clone 302426 (TRAV21, TRAJ52)
CAVRPSPAGGTSYGKLTF

SEQ ID NO: 604852 - protein, 12 aa, Homo sapiens
  CDR3 for beta chain variable domain of TCR clone 302426 (TRBV14, TRBJ2-7)
CASSLYKDEQYF

SEQ ID NO: 604853 - protein, 13 aa, Homo sapiens
  CDR3 for alpha chain variable domain of TCR clone 302427 (TRAV23/DV6, TRAJ15)
CAALPAGRNCSDL

SEQ ID NO: 604854 - protein, 14 aa, Homo sapiens
  CDR3 for beta chain variable domain of TCR clone 302427 (TRBV7-9, TRBJ1-2)
CASSRHGANYGYTF

SEQ ID NO: 604855 - protein, 14 aa, Homo sapiens
  CDR3 for alpha chain variable domain of TCR clone 302428 (TRAV1-2, TRAJ16)
CAVNRFSDGQKPLF

SEQ ID NO: 604856 - protein, 13 aa, Homo sapiens
  CDR3 for beta chain variable domain of TCR clone 302428 (TRBV10-3, TRBJ2-7)
CASKLAVNYEQYF

SEQ ID NO: 604857 - protein, 13 aa, Homo sapiens
  CDR3 for alpha chain variable domain of TCR clone 302429 (TRAV13-1, TRAJ39)
CAASIVMQATCSP

SEQ ID NO: 604858 - protein, 17 aa, Homo sapiens
  CDR3 for beta chain variable domain of TCR clone 302429 (TRBV20-1, TRBJ2-2)
CSASGSGQGGLTGELFF

SEQ ID NO: 604859 - protein, 14 aa, Homo sapiens
  CDR3 for alpha chain variable domain of TCR clone 302430 (TRAV16, TRAJ44)
CALSTTGTASKLTF

SEQ ID NO: 604860 - protein, 12 aa, Homo sapiens
  CDR3 for beta chain variable domain of TCR clone 302430 (TRBV11-2, TRBJ2-2)
CASSLGGGELFF

SEQ ID NO: 604861 - protein, 13 aa, Homo sapiens
  CDR3 for alpha chain variable domain of TCR clone 302431 (TRAV26-2, TRAJ43)
CILRAVNNNAMRF

SEQ ID NO: 604862 - protein, 15 aa, Homo sapiens
  CDR3 for beta chain variable domain of TCR clone 302431 (TRBV7-2, TRBJ2-1)
CASTHGTRIYNEHFF

SEQ ID NO: 604863 - protein, 15 aa, Homo sapiens
  CDR3 for alpha chain variable domain of TCR clone 302432 (TRAV27, TRAJ45)
CAVRYSGGGADGLTF

SEQ ID NO: 604864 - protein, 16 aa, Homo sapiens
  CDR3 for beta chain variable domain of TCR clone 302432 (TRBV27, TRBJ2-2)
CASSFRGLVRTGELFF

SEQ ID NO: 604865 - protein, 14 aa, Homo sapiens
  CDR3 for alpha chain variable domain of TCR clone 302433 (TRAV13-1, TRAJ35)
CEASKAGFGNVLHC

SEQ ID NO: 604866 - protein, 13 aa, Homo sapiens
  CDR3 for beta chain variable domain of TCR clone 302433 (TRBV7-3, TRBJ1-1)
CASSQDWGAEAFF

SEQ ID NO: 604867 - protein, 14 aa, Homo sapiens
  CDR3 for alpha chain variable domain of TCR clone 302434 (TRAV1-2, TRAJ8)
CAVREDTGFQKLVF

SEQ ID NO: 604868 - protein, 14 aa, Homo sapiens
  CDR3 for beta chain variable domain of TCR clone 302434 (TRBV28, TRBJ2-5)
CASTRAGGVETQYF

SEQ ID NO: 604869 - protein, 12 aa, Homo sapiens
  CDR3 for alpha chain variable domain of TCR clone 302435 (TRAV13-1, TRAJ21)
CEAKEGFNKFYF

SEQ ID NO: 604870 - protein, 17 aa, Homo sapiens
  CDR3 for beta chain variable domain of TCR clone 302435 (TRBV19, TRBJ2-7)
CASSISFYDSYPYEQYF

SEQ ID NO: 604871 - protein, 14 aa, Homo sapiens
  CDR3 for alpha chain variable domain of TCR clone 302436 (TRAV16, TRAJ42)
CALLAGGSQGNLIF

SEQ ID NO: 604872 - protein, 15 aa, Homo sapiens
  CDR3 for beta chain variable domain of TCR clone 302436 (TRBV5-1, TRBJ2-1)
CASSFRTPTYNEQFF

SEQ ID NO: 604873 - protein, 14 aa, Homo sapiens
  CDR3 for alpha chain variable domain of TCR clone 302437 (TRAV2, TRAJ9)
CAVEDRSGGFKTIF

SEQ ID NO: 604874 - protein, 18 aa, Homo sapiens
  CDR3 for beta chain variable domain of TCR clone 302437 (TRBV25-1, TRBJ2-1)
CASSESRAGGPGYNEQFF

SEQ ID NO: 604875 - protein, 18 aa, Homo sapiens
  CDR3 for alpha chain variable domain of TCR clone 302438 (TRAV13-1, TRAJ52)
CAASKRSAGGTSYGKLTF

SEQ ID NO: 604876 - protein, 15 aa, Homo sapiens
  CDR3 for beta chain variable domain of TCR clone 302438 (TRBV12-4, TRBJ1-2)
CASSPITGGGYGYTF

SEQ ID NO: 604877 - protein, 16 aa, Homo sapiens
  CDR3 for alpha chain variable domain of TCR clone 302439 (TRAV3, TRAJ10)
CAVRDMRAGGENKLTF

SEQ ID NO: 604878 - protein, 15 aa, Homo sapiens
  CDR3 for beta chain variable domain of TCR clone 302439 (TRBV9, TRBJ1-6)
CASSVAGTGDSPLHF

SEQ ID NO: 604879 - protein, 15 aa, Homo sapiens
  CDR3 for alpha chain variable domain of TCR clone 302440 (TRAV13-1, TRAJ57)
QVPPLSQGGSEKLVF

SEQ ID NO: 604880 - protein, 17 aa, Homo sapiens
  CDR3 for beta chain variable domain of TCR clone 302440 (TRBV7-3, TRBJ2-3)
CASSLMKRMRGADTHYF

SEQ ID NO: 604881 - protein, 18 aa, Homo sapiens
  CDR3 for alpha chain variable domain of TCR clone 302441 (TRAV21, TRAJ52)
CAVRPSPAGGTSYGKLTF

SEQ ID NO: 604882 - protein, 13 aa, Homo sapiens
  CDR3 for beta chain variable domain of TCR clone 302441 (TRBV10-3, TRBJ2-7)
CASKLPVNYEQYF

SEQ ID NO: 604883 - protein, 11 aa, Homo sapiens
  CDR3 for alpha chain variable domain of TCR clone 302442 (TRAV1-2, TRAJ20)
CAVANGYKLSF

SEQ ID NO: 604884 - protein, 13 aa, Homo sapiens
  CDR3 for beta chain variable domain of TCR clone 302442 (TRBV7-3, TRBJ1-1)
CASSQDWGAEAFF

SEQ ID NO: 604885 - protein, 12 aa, Homo sapiens
  CDR3 for alpha chain variable domain of TCR clone 302443 (TRAV22, TRAJ29)
CAPPSGNTPLVF

SEQ ID NO: 604886 - protein, 15 aa, Homo sapiens
  CDR3 for beta chain variable domain of TCR clone 302443 (TRBV20-1, TRBJ2-7)
CSARDRVSGMDEQYF

SEQ ID NO: 604887 - protein, 12 aa, Homo sapiens
  CDR3 for alpha chain variable domain of TCR clone 302444 (TRAV13-1, TRAJ15)
CAASQAGTALIF

SEQ ID NO: 604888 - protein, 18 aa, Homo sapiens
  CDR3 for beta chain variable domain of TCR clone 302444 (TRBV7-9, TRBJ2-3)
CASSFPINGQISTDKQYF

SEQ ID NO: 604889 - protein, 13 aa, Homo sapiens
  CDR3 for alpha chain variable domain of TCR clone 302445 (TRAV12-1, TRAJ21)
CVVTLYNFNKFYF

SEQ ID NO: 604890 - protein, 20 aa, Homo sapiens
  CDR3 for beta chain variable domain of TCR clone 302445 (TRBV7-8, TRBJ2-1)
CASSLAHRLAGVRSYNGQFF

SEQ ID NO: 604891 - protein, 14 aa, Homo sapiens
  CDR3 for alpha chain variable domain of TCR clone 302446 (TRAV13-1, TRAJ45)
CAAIGGGGADGFTF

SEQ ID NO: 604892 - protein, 16 aa, Homo sapiens
  CDR3 for beta chain variable domain of TCR clone 302446 (TRBV7-2, TRBJ1-1)
CASSLGVGWTNTEAFF

SEQ ID NO: 604893 - protein, 14 aa, Homo sapiens
  CDR3 for alpha chain variable domain of TCR clone 302447 (TRAV17, TRAJ34)
CATDSLGGTDKLIF

SEQ ID NO: 604894 - protein, 13 aa, Homo sapiens
  CDR3 for beta chain variable domain of TCR clone 302447 (TRBV11-2, TRBJ2-7)
CASSGTRPYEQCF

SEQ ID NO: 604895 - protein, 16 aa, Homo sapiens
  CDR3 for alpha chain variable domain of TCR clone 302448 (TRAV13-1, TRAJ13)
CTAFFLGVTRKLPLEL

SEQ ID NO: 604896 - protein, 16 aa, Homo sapiens
  CDR3 for beta chain variable domain of TCR clone 302448 (TRBV4-3, TRBJ1-5)
CASSQAWGEANQPQHF

SEQ ID NO: 604897 - protein, 16 aa, Homo sapiens
  CDR3 for alpha chain variable domain of TCR clone 302449 (TRAV3, TRAJ27)
CAVRDPQGTNGGKSTF

SEQ ID NO: 604898 - protein, 15 aa, Homo sapiens
  CDR3 for beta chain variable domain of TCR clone 302449 (TRBV20-1, TRBJ2-7)
CSARDRVSGMDEQYF

SEQ ID NO: 604899 - protein, 14 aa, Homo sapiens
  CDR3 for alpha chain variable domain of TCR clone 302450 (TRAV4, TRAJ32)
CLVGLGGATNKLIF

SEQ ID NO: 604900 - protein, 14 aa, Homo sapiens
  CDR3 for beta chain variable domain of TCR clone 302450 (TRBV11-2, TRBJ1-5)
CASSSRTGNQPQHF

SEQ ID NO: 604901 - protein, 12 aa, Homo sapiens
  CDR3 for alpha chain variable domain of TCR clone 302451 (TRAV36/DV7, TRAJ54)
CAVVRGAQKLVF

SEQ ID NO: 604902 - protein, 12 aa, Homo sapiens
  CDR3 for beta chain variable domain of TCR clone 302451 (TRBV7-3, TRBJ2-7)
CASSLGDREQYF

SEQ ID NO: 604903 - protein, 12 aa, Homo sapiens
  CDR3 for alpha chain variable domain of TCR clone 302452 (TRAV23/DV6, TRAJ30)
CAASKGDDQIIF

SEQ ID NO: 604904 - protein, 18 aa, Homo sapiens
  CDR3 for beta chain variable domain of TCR clone 302452 (TRBV10-3, TRBJ2-3)
CAISESRVGPMRGDTQYF

SEQ ID NO: 604905 - protein, 13 aa, Homo sapiens
  CDR3 for alpha chain variable domain of TCR clone 302453 (TRAV1-2, TRAJ9)
CAALNTGGFKTIF

SEQ ID NO: 604906 - protein, 14 aa, Homo sapiens
  CDR3 for beta chain variable domain of TCR clone 302453 (TRBV13, TRBJ2-3)
CASSSGSATDTQYF

SEQ ID NO: 604907 - protein, 11 aa, Homo sapiens
  CDR3 for alpha chain variable domain of TCR clone 302454 (TRAV29/DV5, TRAJ47)
CAAQRGNKPVF

SEQ ID NO: 604908 - protein, 12 aa, Homo sapiens
  CDR3 for beta chain variable domain of TCR clone 302454 (TRBV11-2, TRBJ2-7)
CASSLPTYEQYF

SEQ ID NO: 604909 - protein, 10 aa, Homo sapiens
  CDR3 for alpha chain variable domain of TCR clone 302455 (TRAV26-1, TRAJ22)
CIVSLNFFWF

SEQ ID NO: 604910 - protein, 13 aa, Homo sapiens
  CDR3 for beta chain variable domain of TCR clone 302455 (TRBV19, TRBJ1-5)
CASSMRGYQPQHF

SEQ ID NO: 604911 - protein, 11 aa, Homo sapiens
  CDR3 for alpha chain variable domain of TCR clone 302456 (TRAV17, TRAJ36)
CAPTGANNLFF

SEQ ID NO: 604912 - protein, 12 aa, Homo sapiens
  CDR3 for beta chain variable domain of TCR clone 302456 (TRBV29-1, TRBJ2-3)
CSVTGGADTHYF

SEQ ID NO: 604913 - protein, 15 aa, Homo sapiens
  CDR3 for alpha chain variable domain of TCR clone 302457 (TRAV13-1, TRAJ32)
CAASNGGWGYKQAHL

SEQ ID NO: 604914 - protein, 15 aa, Homo sapiens
  CDR3 for beta chain variable domain of TCR clone 302457 (TRBV20-1, TRBJ2-7)
CSARDRVSGMDEQYF

SEQ ID NO: 604915 - protein, 13 aa, Homo sapiens
  CDR3 for alpha chain variable domain of TCR clone 302458 (TRAV1-2, TRAJ9)
CPALDTGGFKTIF

SEQ ID NO: 604916 - protein, 13 aa, Homo sapiens
  CDR3 for beta chain variable domain of TCR clone 302458 (TRBV19, TRBJ1-2)
CASSVPGQDGYTF

SEQ ID NO: 604917 - protein, 13 aa, Homo sapiens
  CDR3 for alpha chain variable domain of TCR clone 302459 (TRAV20, TRAJ20)
CAVRWVRDYKLSF

SEQ ID NO: 604918 - protein, 17 aa, Homo sapiens
  CDR3 for beta chain variable domain of TCR clone 302459 (TRBV28, TRBJ2-5)
CASSRQGGLAGAETQYF

SEQ ID NO: 604919 - protein, 20 aa, Homo sapiens
  CDR3 for alpha chain variable domain of TCR clone 302460 (TRAV12-3, TRAJ52)
CAMTQSYQNAGCTSYGKLTF

SEQ ID NO: 604920 - protein, 14 aa, Homo sapiens
  CDR3 for beta chain variable domain of TCR clone 302460 (TRBV4-1, TRBJ1-6)
CASSPGSDSSPLHF

SEQ ID NO: 604921 - protein, 19 aa, Homo sapiens
  CDR3 for alpha chain variable domain of TCR clone 302461 (TRAV8-3, TRAJ8)
LSTSVLWDPRNTGFQKLVF

SEQ ID NO: 604922 - protein, 13 aa, Homo sapiens
  CDR3 for beta chain variable domain of TCR clone 302461 (TRBV10-2, TRBJ2-3)
CASSESGDHTQYF

SEQ ID NO: 604923 - protein, 13 aa, Homo sapiens
  CDR3 for alpha chain variable domain of TCR clone 302462 (TRAV1-2, TRAJ9)
CAALNTGGFKTIF

SEQ ID NO: 604924 - protein, 12 aa, Homo sapiens
  CDR3 for beta chain variable domain of TCR clone 302462 (TRBV7-3, TRBJ2-3)
CASSSLTDTQYF

SEQ ID NO: 604925 - protein, 16 aa, Homo sapiens
  CDR3 for alpha chain variable domain of TCR clone 302463 (TRAV38-1, TRAJ32)
CAFMKGGGGATNNLIL

SEQ ID NO: 604926 - protein, 13 aa, Homo sapiens
  CDR3 for beta chain variable domain of TCR clone 302463 (TRBV20-1, TRBJ2-5)
CSAREAFQETQYF

SEQ ID NO: 604927 - protein, 14 aa, Homo sapiens
  CDR3 for alpha chain variable domain of TCR clone 302464 (TRAV23/DV6, TRAJ22)
CAAFSSGSERQLTF

SEQ ID NO: 604928 - protein, 14 aa, Homo sapiens
  CDR3 for beta chain variable domain of TCR clone 302464 (TRBV19, TRBJ2-5)
CASSPPGVRETQYF

SEQ ID NO: 604929 - protein, 15 aa, Homo sapiens
  CDR3 for alpha chain variable domain of TCR clone 302465 (TRAV21, TRAJ40)
CAVRPQTSGTYKYIF

SEQ ID NO: 604930 - protein, 13 aa, Homo sapiens
  CDR3 for beta chain variable domain of TCR clone 302465 (TRBV7-2, TRBJ2-2)
CASRSVRAGELFF

SEQ ID NO: 604931 - protein, 11 aa, Homo sapiens
  CDR3 for alpha chain variable domain of TCR clone 302466 (TRAV35, TRAJ34)
CWARNTDRLIF

SEQ ID NO: 604932 - protein, 13 aa, Homo sapiens
  CDR3 for beta chain variable domain of TCR clone 302466 (TRBV4-1, TRBJ2-2)
CVSSQENTGELFF

SEQ ID NO: 604933 - protein, 13 aa, Homo sapiens
  CDR3 for alpha chain variable domain of TCR clone 302467 (TRAV21, TRAJ13)
CAVNSGGYQKVTF

SEQ ID NO: 604934 - protein, 17 aa, Homo sapiens
  CDR3 for beta chain variable domain of TCR clone 302467 (TRBV9, TRBJ2-5)
CASSVDGQGPSIETQYF

SEQ ID NO: 604935 - protein, 22 aa, Homo sapiens
  CDR3 for alpha chain variable domain of TCR clone 302468 (TRAV26-1, TRAJ30)
CIVRVRTEMTRSSLEKGHDFIF

SEQ ID NO: 604936 - protein, 13 aa, Homo sapiens
  CDR3 for beta chain variable domain of TCR clone 302468 (TRBV7-9, TRBJ1-2)
CASSVKQNYGYTF

SEQ ID NO: 604937 - protein, 16 aa, Homo sapiens
  CDR3 for alpha chain variable domain of TCR clone 302469 (TRAV3, TRAJ27)
CAVRDPQGTNAGKSTF

SEQ ID NO: 604938 - protein, 17 aa, Homo sapiens
  CDR3 for beta chain variable domain of TCR clone 302469 (TRBV4-1, TRBJ2-7)
CASSQGRGLQTSDEQYF

SEQ ID NO: 604939 - protein, 15 aa, Homo sapiens
  CDR3 for alpha chain variable domain of TCR clone 302470 (TRAV34, TRAJ38)
CVADFTPGNNRKLIW

SEQ ID NO: 604940 - protein, 16 aa, Homo sapiens
  CDR3 for beta chain variable domain of TCR clone 302470 (TRBV12-5, TRBJ2-5)
CASGPRTSGNQETQYF

SEQ ID NO: 604941 - protein, 11 aa, Homo sapiens
  CDR3 for alpha chain variable domain of TCR clone 302471 (TRAV17, TRAJ49)
CETNTGNQFYF

SEQ ID NO: 604942 - protein, 12 aa, Homo sapiens
  CDR3 for beta chain variable domain of TCR clone 302471 (TRBV2, TRBJ2-7)
CASSGGSGIPYF

SEQ ID NO: 604943 - protein, 15 aa, Homo sapiens
  CDR3 for alpha chain variable domain of TCR clone 302472 (TRAV12-3, TRAJ6)
CAMIATTGGSYIPTF

SEQ ID NO: 604944 - protein, 16 aa, Homo sapiens
  CDR3 for beta chain variable domain of TCR clone 302472 (TRBV27, TRBJ2-5)
CASSFGPGGTKETQYF

SEQ ID NO: 604945 - protein, 14 aa, Homo sapiens
  CDR3 for alpha chain variable domain of TCR clone 302473 (TRAV1-2, TRAJ16)
CAVNRFSDGLKLLF

SEQ ID NO: 604946 - protein, 15 aa, Homo sapiens
  CDR3 for beta chain variable domain of TCR clone 302473 (TRBV10-2, TRBJ2-6)
CASSEQGTGANVLTF

SEQ ID NO: 604947 - protein, 13 aa, Homo sapiens
  CDR3 for alpha chain variable domain of TCR clone 302474 (TRAV17, TRAJ15)
CATDARAGSALIF

SEQ ID NO: 604948 - protein, 15 aa, Homo sapiens
  CDR3 for beta chain variable domain of TCR clone 302474 (TRBV20-1, TRBJ2-7)
CSARDRVSGMDEQYF

SEQ ID NO: 604949 - protein, 13 aa, Homo sapiens
  CDR3 for alpha chain variable domain of TCR clone 302475 (TRAV2, TRAJ24)
TTVPLASWGKLQF

SEQ ID NO: 604950 - protein, 17 aa, Homo sapiens
  CDR3 for beta chain variable domain of TCR clone 302475 (TRBV5-1, TRBJ2-1)
CASSTGTSGYSYNEQFF

SEQ ID NO: 604951 - protein, 15 aa, Homo sapiens
  CDR3 for alpha chain variable domain of TCR clone 302476 (TRAV8-2, TRAJ40)
CVVLGTTSGTDKYIF

SEQ ID NO: 604952 - protein, 16 aa, Homo sapiens
  CDR3 for beta chain variable domain of TCR clone 302476 (TRBV7-3, TRBJ2-1)
CASSLEGYRSYNEQFF

SEQ ID NO: 604953 - protein, 14 aa, Homo sapiens
  CDR3 for alpha chain variable domain of TCR clone 302477 (TRAV1-2, TRAJ16)
CAVNRFSDGQKLLF

SEQ ID NO: 604954 - protein, 13 aa, Homo sapiens
  CDR3 for beta chain variable domain of TCR clone 302477 (TRBV7-9, TRBJ1-2)
FASSLKQNYGYTF

SEQ ID NO: 604955 - protein, 13 aa, Homo sapiens
  CDR3 for alpha chain variable domain of TCR clone 302478 (TRAV3, TRAJ26)
CAVSRGYGQNFVF

SEQ ID NO: 604956 - protein, 14 aa, Homo sapiens
  CDR3 for beta chain variable domain of TCR clone 302478 (TRBV27, TRBJ2-1)
CSSLARGAYNEQFF

SEQ ID NO: 604957 - protein, 13 aa, Homo sapiens
  CDR3 for alpha chain variable domain of TCR clone 302479 (TRAV35, TRAJ36)
CAGPRIGAKNLFF

SEQ ID NO: 604958 - protein, 15 aa, Homo sapiens
  CDR3 for beta chain variable domain of TCR clone 302479 (TRBV28, TRBJ2-5)
CASSPPWSYQETQYF

SEQ ID NO: 604959 - protein, 15 aa, Homo sapiens
  CDR3 for alpha chain variable domain of TCR clone 302480 (TRAV3, TRAJ32)
CAVSSYGGATNKLIF

SEQ ID NO: 604960 - protein, 16 aa, Homo sapiens
  CDR3 for beta chain variable domain of TCR clone 302480 (TRBV5-1, TRBJ2-5)
CASSLSLAGAQETQFF

SEQ ID NO: 604961 - protein, 14 aa, Homo sapiens
  CDR3 for alpha chain variable domain of TCR clone 302481 (TRAV13-2, TRAJ10)
CAETFTGGGNKITF

SEQ ID NO: 604962 - protein, 16 aa, Homo sapiens
  CDR3 for beta chain variable domain of TCR clone 302481 (TRBV18, TRBJ2-7)
CASSPRSQGISYEQYF

SEQ ID NO: 604963 - protein, 16 aa, Homo sapiens
  CDR3 for alpha chain variable domain of TCR clone 302482 (TRAV30, TRAJ49)
SAAQRVGPNTGNQFYF

SEQ ID NO: 604964 - protein, 16 aa, Homo sapiens
  CDR3 for beta chain variable domain of TCR clone 302482 (TRBV7-3, TRBJ2-2)
CASSLKRGTLSGELFF

SEQ ID NO: 604965 - protein, 13 aa, Homo sapiens
  CDR3 for alpha chain variable domain of TCR clone 302483 (TRAV12-3, TRAJ54)
CAMTLQGAQKLVF

SEQ ID NO: 604966 - protein, 14 aa, Homo sapiens
  CDR3 for beta chain variable domain of TCR clone 302483 (TRBV4-1, TRBJ2-2)
CASSQAMNTGELFF

SEQ ID NO: 604967 - protein, 14 aa, Homo sapiens
  CDR3 for alpha chain variable domain of TCR clone 302484 (TRAV12-3, TRAJ10)
SLLPLTGGGNKLTF

SEQ ID NO: 604968 - protein, 17 aa, Homo sapiens
  CDR3 for beta chain variable domain of TCR clone 302484 (TRBV11-2, TRBJ2-1)
CASSLYPPGVEYNEQFF

SEQ ID NO: 604969 - protein, 11 aa, Homo sapiens
  CDR3 for alpha chain variable domain of TCR clone 302485 (TRAV1-2, TRAJ39)
SLLYAGNMLTF

SEQ ID NO: 604970 - protein, 16 aa, Homo sapiens
  CDR3 for beta chain variable domain of TCR clone 302485 (TRBV11-2, TRBJ2-1)
CASSLLLLSSYNEQFF

SEQ ID NO: 604971 - protein, 14 aa, Homo sapiens
  CDR3 for alpha chain variable domain of TCR clone 302486 (TRAV29/DV5, TRAJ13)
CAANLSVGYQKVTF

SEQ ID NO: 604972 - protein, 13 aa, Homo sapiens
  CDR3 for beta chain variable domain of TCR clone 302486 (TRBV12-4, TRBJ1-1)
CASSPGTGFEAFF

SEQ ID NO: 604973 - protein, 12 aa, Homo sapiens
  CDR3 for alpha chain variable domain of TCR clone 302487 (TRAV12-3, TRAJ17)
CAMTLTGNKLTF

SEQ ID NO: 604974 - protein, 14 aa, Homo sapiens
  CDR3 for beta chain variable domain of TCR clone 302487 (TRBV11-2, TRBJ2-3)
CPSSRLARTDTQYF

SEQ ID NO: 604975 - protein, 12 aa, Homo sapiens
  CDR3 for alpha chain variable domain of TCR clone 302488 (TRAV1-1, TRAJ8)
CAGGTGFQKLVF

SEQ ID NO: 604976 - protein, 13 aa, Homo sapiens
  CDR3 for beta chain variable domain of TCR clone 302488 (TRBV7-9, TRBJ1-1)
CASSLSGETEAFF

SEQ ID NO: 604977 - protein, 17 aa, Homo sapiens
  CDR3 for alpha chain variable domain of TCR clone 302489 (TRAV3, TRAJ6)
CAVRDGPRAGGSYIPTF

SEQ ID NO: 604978 - protein, 21 aa, Homo sapiens
  CDR3 for beta chain variable domain of TCR clone 302489 (TRBV15, TRBJ2-1)
AWGTQPCTCVPPAEVDTARFF

SEQ ID NO: 604979 - protein, 15 aa, Homo sapiens
  CDR3 for alpha chain variable domain of TCR clone 302490 (TRAV17, TRAJ40)
CATVSSTSGTSKYIF

SEQ ID NO: 604980 - protein, 15 aa, Homo sapiens
  CDR3 for beta chain variable domain of TCR clone 302490 (TRBV5-1, TRBJ2-1)
CASSQAGYWWNEQFF

SEQ ID NO: 604981 - protein, 12 aa, Homo sapiens
  CDR3 for alpha chain variable domain of TCR clone 302491 (TRAV12-2, TRAJ47)
CAVAEYGTKLVF

SEQ ID NO: 604982 - protein, 15 aa, Homo sapiens
  CDR3 for beta chain variable domain of TCR clone 302491 (TRBV28, TRBJ2-1)
CASSIIAGGRSEQFF

SEQ ID NO: 604983 - protein, 15 aa, Homo sapiens
  CDR3 for alpha chain variable domain of TCR clone 302492 (TRAV8-4, TRAJ52)
CAVSDGGTSDGKLTF

SEQ ID NO: 604984 - protein, 12 aa, Homo sapiens
  CDR3 for beta chain variable domain of TCR clone 302492 (TRBV29-1, TRBJ2-3)
CSVTSGGDTQYF

SEQ ID NO: 604985 - protein, 15 aa, Homo sapiens
  CDR3 for alpha chain variable domain of TCR clone 302493 (TRAV13-1, TRAJ42)
CAASIAGGSQGNLNF

SEQ ID NO: 604986 - protein, 15 aa, Homo sapiens
  CDR3 for beta chain variable domain of TCR clone 302493 (TRBV19, TRBJ2-1)
CASSIVRGEGREQFF

SEQ ID NO: 604987 - protein, 15 aa, Homo sapiens
  CDR3 for alpha chain variable domain of TCR clone 302494 (TRAV17, TRAJ57)
CATGPSQGGSDKLVL

SEQ ID NO: 604988 - protein, 16 aa, Homo sapiens
  CDR3 for beta chain variable domain of TCR clone 302494 (TRBV12-4, TRBJ1-5)
CASSRPVGGSNQPQHF

SEQ ID NO: 604989 - protein, 15 aa, Homo sapiens
  CDR3 for alpha chain variable domain of TCR clone 302495 (TRAV23/DV6, TRAJ44)
CAAMKPTGTASKPTF

SEQ ID NO: 604990 - protein, 16 aa, Homo sapiens
  CDR3 for beta chain variable domain of TCR clone 302495 (TRBV28, TRBJ2-5)
CATSGWPSRLKETQYF

SEQ ID NO: 604991 - protein, 12 aa, Homo sapiens
  CDR3 for alpha chain variable domain of TCR clone 302496 (TRAV23/DV6, TRAJ30)
CAASKGDDKIIF

SEQ ID NO: 604992 - protein, 15 aa, Homo sapiens
  CDR3 for beta chain variable domain of TCR clone 302496 (TRBV10-3, TRBJ2-1)
CAISDVQDRAYEQFF

SEQ ID NO: 604993 - protein, 14 aa, Homo sapiens
  CDR3 for alpha chain variable domain of TCR clone 302497 (TRAV1-2, TRAJ16)
CAVNRFSDGQKLPF

SEQ ID NO: 604994 - protein, 14 aa, Homo sapiens
  CDR3 for beta chain variable domain of TCR clone 302497 (TRBV12-5, TRBJ2-5)
CASGSRRHQETQYF

SEQ ID NO: 604995 - protein, 14 aa, Homo sapiens
  CDR3 for alpha chain variable domain of TCR clone 302498 (TRAV21, TRAJ4)
CAAPGVGGYNKLIF

SEQ ID NO: 604996 - protein, 13 aa, Homo sapiens
  CDR3 for beta chain variable domain of TCR clone 302498 (TRBV7-3, TRBJ2-1)
CASSPGSYNELFF

SEQ ID NO: 604997 - protein, 13 aa, Homo sapiens
  CDR3 for alpha chain variable domain of TCR clone 302499 (TRAV4, TRAJ33)
CLVGDMNNYQLIL

SEQ ID NO: 604998 - protein, 14 aa, Homo sapiens
  CDR3 for beta chain variable domain of TCR clone 302499 (TRBV7-9, TRBJ1-1)
CASSLGGANTEAFF

SEQ ID NO: 604999 - protein, 15 aa, Homo sapiens
  CDR3 for alpha chain variable domain of TCR clone 302500 (TRAV12-1, TRAJ45)
CVVLSGGGGADGLTF

SEQ ID NO: 605000 - protein, 15 aa, Homo sapiens
  CDR3 for beta chain variable domain of TCR clone 302500 (TRBV12-4, TRBJ2-5)
CASSPPTGLQETQYF

SEQ ID NO: 605001 - protein, 15 aa, Homo sapiens
  CDR3 for alpha chain variable domain of TCR clone 302501 (TRAV26-1, TRAJ22)
CIVRVPSWFCKATDL

SEQ ID NO: 605002 - protein, 13 aa, Homo sapiens
  CDR3 for beta chain variable domain of TCR clone 302501 (TRBV7-9, TRBJ1-2)
CASSLKQNYGYTF

SEQ ID NO: 605003 - protein, 16 aa, Homo sapiens
  CDR3 for alpha chain variable domain of TCR clone 302502 (TRAV21, TRAJ58)
CAVRGDRETSGSRLTF

SEQ ID NO: 605004 - protein, 12 aa, Homo sapiens
  CDR3 for beta chain variable domain of TCR clone 302502 (TRBV19, TRBJ2-3)
YASAGGADTQYF

SEQ ID NO: 605005 - protein, 14 aa, Homo sapiens
  CDR3 for alpha chain variable domain of TCR clone 302503 (TRAV26-1, TRAJ38)
CIADNAGNNRKLIW

SEQ ID NO: 605006 - protein, 14 aa, Homo sapiens
  CDR3 for beta chain variable domain of TCR clone 302503 (TRBV13, TRBJ2-5)
CASSLGTAKETQYF

SEQ ID NO: 605007 - protein, 14 aa, Homo sapiens
  CDR3 for alpha chain variable domain of TCR clone 302504 (TRAV8-3, TRAJ27)
CAGGRNTNAGKSTF

SEQ ID NO: 605008 - protein, 15 aa, Homo sapiens
  CDR3 for beta chain variable domain of TCR clone 302504 (TRBV11-3, TRBJ2-5)
CAGSLRGRVQETQYF

SEQ ID NO: 605009 - protein, 11 aa, Homo sapiens
  CDR3 for alpha chain variable domain of TCR clone 302505 (TRAV13-1, TRAJ52)
CAASPYQNAVV

SEQ ID NO: 605010 - protein, 14 aa, Homo sapiens
  CDR3 for beta chain variable domain of TCR clone 302505 (TRBV19, TRBJ2-7)
CASTVQGRPYEQYF

SEQ ID NO: 605011 - protein, 14 aa, Homo sapiens
  CDR3 for alpha chain variable domain of TCR clone 302506 (TRAV12-3, TRAJ10)
SHLPLTGGGNKLTF

SEQ ID NO: 605012 - protein, 16 aa, Homo sapiens
  CDR3 for beta chain variable domain of TCR clone 302506 (TRBV11-2, TRBJ2-2)
CASSLRTGNLIGELFF

SEQ ID NO: 605013 - protein, 12 aa, Homo sapiens
  CDR3 for alpha chain variable domain of TCR clone 302507 (TRAV30, TRAJ43)
CGTEERGNDMRF

SEQ ID NO: 605014 - protein, 13 aa, Homo sapiens
  CDR3 for beta chain variable domain of TCR clone 302507 (TRBV2, TRBJ1-4)
CASSERAGEKLFF

SEQ ID NO: 605015 - protein, 18 aa, Homo sapiens
  CDR3 for alpha chain variable domain of TCR clone 302508 (TRAV13-1, TRAJ52)
CAASKRSAGGTRYGKQTF

SEQ ID NO: 605016 - protein, 13 aa, Homo sapiens
  CDR3 for beta chain variable domain of TCR clone 302508 (TRBV12-4, TRBJ1-2)
CASSLRQGKGYTF

SEQ ID NO: 605017 - protein, 13 aa, Homo sapiens
  CDR3 for alpha chain variable domain of TCR clone 302509 (TRAV12-1, TRAJ31)
CVVNMNNNARLMF

SEQ ID NO: 605018 - protein, 15 aa, Homo sapiens
  CDR3 for beta chain variable domain of TCR clone 302509 (TRBV9, TRBJ1-6)
CASSVAGTGDSPLHF

SEQ ID NO: 605019 - protein, 16 aa, Homo sapiens
  CDR3 for alpha chain variable domain of TCR clone 302510 (TRAV12-3, TRAJ53)
CAMSPGSGGSKYKLTF

SEQ ID NO: 605020 - protein, 20 aa, Homo sapiens
  CDR3 for beta chain variable domain of TCR clone 302510 (TRBV7-8, TRBJ2-2)
CASSHLFPGPTIHITGELFF

SEQ ID NO: 605021 - protein, 15 aa, Homo sapiens
  CDR3 for alpha chain variable domain of TCR clone 302511 (TRAV3, TRAJ29)
CGVRAPLSGNTPLVF

SEQ ID NO: 605022 - protein, 15 aa, Homo sapiens
  CDR3 for beta chain variable domain of TCR clone 302511 (TRBV28, TRBJ1-1)
CASRIKGGLNTEAFF

SEQ ID NO: 605023 - protein, 12 aa, Homo sapiens
  CDR3 for alpha chain variable domain of TCR clone 302512 (TRAV16, TRAJ56)
CAPTGANSKLKF

SEQ ID NO: 605024 - protein, 17 aa, Homo sapiens
  CDR3 for beta chain variable domain of TCR clone 302512 (TRBV27, TRBJ2-6)
CASSLTGFASGANVLTF

SEQ ID NO: 605025 - protein, 14 aa, Homo sapiens
  CDR3 for alpha chain variable domain of TCR clone 302513 (TRAV21, TRAJ35)
CAVMPIGFGNVLHC

SEQ ID NO: 605026 - protein, 17 aa, Homo sapiens
  CDR3 for beta chain variable domain of TCR clone 302513 (TRBV20-1, TRBJ2-2)
CSASGSGQGGLTGELFF

SEQ ID NO: 605027 - protein, 16 aa, Homo sapiens
  CDR3 for alpha chain variable domain of TCR clone 302514 (TRAV29/DV5, TRAJ39)
CAASLLFNNAVNMLTF

SEQ ID NO: 605028 - protein, 16 aa, Homo sapiens
  CDR3 for beta chain variable domain of TCR clone 302514 (TRBV19, TRBJ2-6)
CASSMSGLSGANVLTF

SEQ ID NO: 605029 - protein, 11 aa, Homo sapiens
  CDR3 for alpha chain variable domain of TCR clone 302515 (TRAV12-3, TRAJ16)
LTGGDGQKLHF

SEQ ID NO: 605030 - protein, 13 aa, Homo sapiens
  CDR3 for beta chain variable domain of TCR clone 302515 (TRBV12-4, TRBJ1-4)
CASAMGHNEKLFF

SEQ ID NO: 605031 - protein, 12 aa, Homo sapiens
  CDR3 for alpha chain variable domain of TCR clone 302516 (TRAV2, TRAJ31)
CAVEDNNARLMF

SEQ ID NO: 605032 - protein, 16 aa, Homo sapiens
  CDR3 for beta chain variable domain of TCR clone 302516 (TRBV10-3, TRBJ2-1)
CAISGVGDGGRGEQFF

SEQ ID NO: 605033 - protein, 14 aa, Homo sapiens
  CDR3 for alpha chain variable domain of TCR clone 302517 (TRAV1-2, TRAJ16)
CAVNRFSDGQKMLF

SEQ ID NO: 605034 - protein, 16 aa, Homo sapiens
  CDR3 for beta chain variable domain of TCR clone 302517 (TRBV12-5, TRBJ2-5)
CASGPRTSGNQETQYF

SEQ ID NO: 605035 - protein, 16 aa, Homo sapiens
  CDR3 for alpha chain variable domain of TCR clone 302518 (TRAV27, TRAJ13)
CAGAKSDSGGYQKVTF

SEQ ID NO: 605036 - protein, 13 aa, Homo sapiens
  CDR3 for beta chain variable domain of TCR clone 302518 (TRBV27, TRBJ1-1)
CASSLSIGAEAFF

SEQ ID NO: 605037 - protein, 13 aa, Homo sapiens
  CDR3 for alpha chain variable domain of TCR clone 302519 (TRAV8-2, TRAJ49)
CVVTPNTGNQFYF

SEQ ID NO: 605038 - protein, 15 aa, Homo sapiens
  CDR3 for beta chain variable domain of TCR clone 302519 (TRBV11-2, TRBJ2-1)
CASSLTSWGYNEQFF

SEQ ID NO: 605039 - protein, 12 aa, Homo sapiens
  CDR3 for alpha chain variable domain of TCR clone 302520 (TRAV2, TRAJ33)
CAFMDSNYQLIW

SEQ ID NO: 605040 - protein, 20 aa, Homo sapiens
  CDR3 for beta chain variable domain of TCR clone 302520 (TRBV2, TRBJ2-7)
CASSEPWRTLLRAVLRAGHQ

SEQ ID NO: 605041 - protein, 14 aa, Homo sapiens
  CDR3 for alpha chain variable domain of TCR clone 302521 (TRAV8-4, TRAJ13)
CAVTLSGGYQKVTF

SEQ ID NO: 605042 - protein, 15 aa, Homo sapiens
  CDR3 for beta chain variable domain of TCR clone 302521 (TRBV7-2, TRBJ2-1)
CASSLVGSSYNEQFF

SEQ ID NO: 605043 - protein, 13 aa, Homo sapiens
  CDR3 for alpha chain variable domain of TCR clone 302522 (TRAV12-3, TRAJ5)
CAMRPTGRRALTF

SEQ ID NO: 605044 - protein, 16 aa, Homo sapiens
  CDR3 for beta chain variable domain of TCR clone 302522 (TRBV20-1, TRBJ1-2)
CSASMGQGVANYGYTF

SEQ ID NO: 605045 - protein, 15 aa, Homo sapiens
  CDR3 for alpha chain variable domain of TCR clone 302523 (TRAV8-6, TRAJ48)
CAVSKANFGNEKLTF

SEQ ID NO: 605046 - protein, 12 aa, Homo sapiens
  CDR3 for beta chain variable domain of TCR clone 302523 (TRBV7-8, TRBJ2-7)
CASSLGDREQYF

SEQ ID NO: 605047 - protein, 12 aa, Homo sapiens
  CDR3 for alpha chain variable domain of TCR clone 302524 (TRAV3, TRAJ4)
CAVSGGYNKLIF

SEQ ID NO: 605048 - protein, 17 aa, Homo sapiens
  CDR3 for beta chain variable domain of TCR clone 302524 (TRBV6-5, TRBJ2-6)
CASGSATSGPGANVLTF

SEQ ID NO: 605049 - protein, 13 aa, Homo sapiens
  CDR3 for alpha chain variable domain of TCR clone 302525 (TRAV1-1, TRAJ9)
CAAKNTGGFKTIF

SEQ ID NO: 605050 - protein, 14 aa, Homo sapiens
  CDR3 for beta chain variable domain of TCR clone 302525 (TRBV20-1, TRBJ2-1)
SAAQIGGSANEQFF

SEQ ID NO: 605051 - protein, 14 aa, Homo sapiens
  CDR3 for alpha chain variable domain of TCR clone 302526 (TRAV12-1, TRAJ3)
CVVNPGSSASKIIF

SEQ ID NO: 605052 - protein, 15 aa, Homo sapiens
  CDR3 for beta chain variable domain of TCR clone 302526 (TRBV5-7, TRBJ1-2)
CAGSSPGQGSYGYTF

SEQ ID NO: 605053 - protein, 13 aa, Homo sapiens
  CDR3 for alpha chain variable domain of TCR clone 302527 (TRAV3, TRAJ21)
CAVREPDFNKFYF

SEQ ID NO: 605054 - protein, 13 aa, Homo sapiens
  CDR3 for beta chain variable domain of TCR clone 302527 (TRBV7-6, TRBJ1-2)
CASSLVADYGYTF

SEQ ID NO: 605055 - protein, 12 aa, Homo sapiens
  CDR3 for alpha chain variable domain of TCR clone 302528 (TRAV16, TRAJ49)
CALNEGGNQFYF

SEQ ID NO: 605056 - protein, 14 aa, Homo sapiens
  CDR3 for beta chain variable domain of TCR clone 302528 (TRBV7-9, TRBJ2-1)
CASRPTGLRNEQVS

SEQ ID NO: 605057 - protein, 13 aa, Homo sapiens
  CDR3 for alpha chain variable domain of TCR clone 302529 (TRAV36/DV7, TRAJ50)
CAVTKTSYDKVIF

SEQ ID NO: 605058 - protein, 16 aa, Homo sapiens
  CDR3 for beta chain variable domain of TCR clone 302529 (TRBV3-1, TRBJ2-5)
CASSQDWASGQETQYF

SEQ ID NO: 605059 - protein, 13 aa, Homo sapiens
  CDR3 for alpha chain variable domain of TCR clone 302530 (TRAV21, TRAJ27)
CAARPGNAGKSTF

SEQ ID NO: 605060 - protein, 12 aa, Homo sapiens
  CDR3 for beta chain variable domain of TCR clone 302530 (TRBV5-1, TRBJ2-7)
CASSLDSYEQYF

SEQ ID NO: 605061 - protein, 13 aa, Homo sapiens
  CDR3 for alpha chain variable domain of TCR clone 302531 (TRAV17, TRAJ26)
CATVDNYGQNFVF

SEQ ID NO: 605062 - protein, 16 aa, Homo sapiens
  CDR3 for beta chain variable domain of TCR clone 302531 (TRBV2, TRBJ2-1)
CASSVGGSLWYNEQFF

SEQ ID NO: 605063 - protein, 13 aa, Homo sapiens
  CDR3 for alpha chain variable domain of TCR clone 302532 (TRAV8-6, TRAJ16)
CAVSSPDGQKLLF

SEQ ID NO: 605064 - protein, 16 aa, Homo sapiens
  CDR3 for beta chain variable domain of TCR clone 302532 (TRBV5-7, TRBJ2-3)
CASSSLGVAITDTQYF

SEQ ID NO: 605065 - protein, 15 aa, Homo sapiens
  CDR3 for alpha chain variable domain of TCR clone 302533 (TRAV17, TRAJ23)
CATDAEDNQGGKLIF

SEQ ID NO: 605066 - protein, 15 aa, Homo sapiens
  CDR3 for beta chain variable domain of TCR clone 302533 (TRBV13, TRBJ1-3)
CASSSQGTSGNSIYF

SEQ ID NO: 605067 - protein, 13 aa, Homo sapiens
  CDR3 for alpha chain variable domain of TCR clone 302534 (TRAV2, TRAJ15)
CAVASQAGTALIF

SEQ ID NO: 605068 - protein, 12 aa, Homo sapiens
  CDR3 for beta chain variable domain of TCR clone 302534 (TRBV28, TRBJ2-3)
CASSLYRDTQYF

SEQ ID NO: 605069 - protein, 13 aa, Homo sapiens
  CDR3 for alpha chain variable domain of TCR clone 302535 (TRAV36/DV7, TRAJ37)
CAVFSSNTGKLIF

SEQ ID NO: 605070 - protein, 16 aa, Homo sapiens
  CDR3 for beta chain variable domain of TCR clone 302535 (TRBV3-1, TRBJ2-5)
CASSPGQFNGFGTQYV

SEQ ID NO: 605071 - protein, 12 aa, Homo sapiens
  CDR3 for alpha chain variable domain of TCR clone 302536 (TRAV13-1, TRAJ11)
CAGPSGYSTLTF

SEQ ID NO: 605072 - protein, 13 aa, Homo sapiens
  CDR3 for beta chain variable domain of TCR clone 302536 (TRBV12-4, TRBJ1-5)
CASSPDRAQPEHF

SEQ ID NO: 605073 - protein, 13 aa, Homo sapiens
  CDR3 for alpha chain variable domain of TCR clone 302537 (TRAV29/DV5, TRAJ44)
CSASTGTASKLTV

SEQ ID NO: 605074 - protein, 13 aa, Homo sapiens
  CDR3 for beta chain variable domain of TCR clone 302537 (TRBV19, TRBJ2-7)
CASRKAGGSEQYF

SEQ ID NO: 605075 - protein, 16 aa, Homo sapiens
  CDR3 for alpha chain variable domain of TCR clone 302538 (TRAV12-3, TRAJ28)
CAMRANSGAGSYQLTF

SEQ ID NO: 605076 - protein, 16 aa, Homo sapiens
  CDR3 for beta chain variable domain of TCR clone 302538 (TRBV7-2, TRBJ1-3)
CTSSRLEASSGNTIYF

SEQ ID NO: 605077 - protein, 10 aa, Homo sapiens
  CDR3 for alpha chain variable domain of TCR clone 302539 (TRAV8-4, TRAJ43)
CAVSADDMRF

SEQ ID NO: 605078 - protein, 16 aa, Homo sapiens
  CDR3 for beta chain variable domain of TCR clone 302539 (TRBV7-9, TRBJ2-1)
CASSDVAGGSYNEQFF

SEQ ID NO: 605079 - protein, 15 aa, Homo sapiens
  CDR3 for alpha chain variable domain of TCR clone 302540 (TRAV4, TRAJ39)
CLVVPNNSAGNMLTF

SEQ ID NO: 605080 - protein, 16 aa, Homo sapiens
  CDR3 for beta chain variable domain of TCR clone 302540 (TRBV13, TRBJ2-2)
CASSPRTGEHTGELFF

SEQ ID NO: 605081 - protein, 14 aa, Homo sapiens
  CDR3 for alpha chain variable domain of TCR clone 302541 (TRAV26-2, TRAJ27)
CILRDISDAGKSTF

SEQ ID NO: 605082 - protein, 11 aa, Homo sapiens
  CDR3 for beta chain variable domain of TCR clone 302541 (TRBV29-1, TRBJ2-5)
CSEDRTGTQYF

SEQ ID NO: 605083 - protein, 16 aa, Homo sapiens
  CDR3 for alpha chain variable domain of TCR clone 302542 (TRAV12-2, TRAJ10)
CAVNRVLTGGGNKLTF

SEQ ID NO: 605084 - protein, 16 aa, Homo sapiens
  CDR3 for beta chain variable domain of TCR clone 302542 (TRBV12-5, TRBJ2-5)
CASGPRTRGNQETQYF

SEQ ID NO: 605085 - protein, 14 aa, Homo sapiens
  CDR3 for alpha chain variable domain of TCR clone 302543 (TRAV17, TRAJ57)
CAMDPQGGSEKLVF

SEQ ID NO: 605086 - protein, 16 aa, Homo sapiens
  CDR3 for beta chain variable domain of TCR clone 302543 (TRBV20-1, TRBJ1-4)
CSAPGQGLLTNEKLFF

SEQ ID NO: 605087 - protein, 14 aa, Homo sapiens
  CDR3 for alpha chain variable domain of TCR clone 302544 (TRAV8-6, TRAJ8)
CAVNENTGFQKLVF

SEQ ID NO: 605088 - protein, 15 aa, Homo sapiens
  CDR3 for beta chain variable domain of TCR clone 302544 (TRBV5-1, TRBJ1-4)
CASSSWTGREEKLFF

SEQ ID NO: 605089 - protein, 20 aa, Homo sapiens
  CDR3 for alpha chain variable domain of TCR clone 302545 (TRAV4, TRAJ29)
CCVLLPRGRHPYSGNTPLVF

SEQ ID NO: 605090 - protein, 14 aa, Homo sapiens
  CDR3 for beta chain variable domain of TCR clone 302545 (TRBV25-1, TRBJ1-1)
CASTHLGGNTEAFF

SEQ ID NO: 605091 - protein, 12 aa, Homo sapiens
  CDR3 for alpha chain variable domain of TCR clone 302546 (TRAV13-1, TRAJ21)
CAAKEGFNKFYF

SEQ ID NO: 605092 - protein, 14 aa, Homo sapiens
  CDR3 for beta chain variable domain of TCR clone 302546 (TRBV5-4, TRBJ1-1)
CASSLGSRRDAAFF

SEQ ID NO: 605093 - protein, 16 aa, Homo sapiens
  CDR3 for alpha chain variable domain of TCR clone 302547 (TRAV12-1, TRAJ22)
CVVNTIYSGSARQLTF

SEQ ID NO: 605094 - protein, 13 aa, Homo sapiens
  CDR3 for beta chain variable domain of TCR clone 302547 (TRBV19, TRBJ2-1)
CASNGGVFSEQFF

SEQ ID NO: 605095 - protein, 12 aa, Homo sapiens
  CDR3 for alpha chain variable domain of TCR clone 302548 (TRAV1-2, TRAJ9)
CAGYTGGFKTIF

SEQ ID NO: 605096 - protein, 16 aa, Homo sapiens
  CDR3 for beta chain variable domain of TCR clone 302548 (TRBV11-2, TRBJ2-1)
CASSLVSGSSNNEQFF

SEQ ID NO: 605097 - protein, 11 aa, Homo sapiens
  CDR3 for alpha chain variable domain of TCR clone 302549 (TRAV17, TRAJ43)
CATDNNNDMRF

SEQ ID NO: 605098 - protein, 15 aa, Homo sapiens
  CDR3 for beta chain variable domain of TCR clone 302549 (TRBV7-3, TRBJ2-2)
CASSETGQGTGELFF

SEQ ID NO: 605099 - protein, 18 aa, Homo sapiens
  CDR3 for alpha chain variable domain of TCR clone 302550 (TRAV26-1, TRAJ52)
CIVRVEGAGGTSYGKLTF

SEQ ID NO: 605100 - protein, 15 aa, Homo sapiens
  CDR3 for beta chain variable domain of TCR clone 302550 (TRBV7-3, TRBJ2-2)
CASSETGQGTGELFF

SEQ ID NO: 605101 - protein, 11 aa, Homo sapiens
  CDR3 for alpha chain variable domain of TCR clone 302551 (TRAV27, TRAJ20)
CAGADDYKLSF

SEQ ID NO: 605102 - protein, 13 aa, Homo sapiens
  CDR3 for beta chain variable domain of TCR clone 302551 (TRBV11-3, TRBJ1-2)
CASSQRTSRGYAF

SEQ ID NO: 605103 - protein, 14 aa, Homo sapiens
  CDR3 for alpha chain variable domain of TCR clone 302552 (TRAV23/DV6, TRAJ39)
CAASTGNAGNMLTF

SEQ ID NO: 605104 - protein, 12 aa, Homo sapiens
  CDR3 for beta chain variable domain of TCR clone 302552 (TRBV20-1, TRBJ2-5)
CSVGTGSETQYF

SEQ ID NO: 605105 - protein, 16 aa, Homo sapiens
  CDR3 for alpha chain variable domain of TCR clone 302553 (TRAV21, TRAJ37)
CAVRTACSSNTGKLIF

SEQ ID NO: 605106 - protein, 16 aa, Homo sapiens
  CDR3 for beta chain variable domain of TCR clone 302553 (TRBV19, TRBJ2-1)
CASSKAGPSSYNEQFF

SEQ ID NO: 605107 - protein, 15 aa, Homo sapiens
  CDR3 for alpha chain variable domain of TCR clone 302554 (TRAV29/DV5, TRAJ53)
RAASASGGSNYKLTF

SEQ ID NO: 605108 - protein, 19 aa, Homo sapiens
  CDR3 for beta chain variable domain of TCR clone 302554 (TRBV5-1, TRBJ2-3)
CASSLWLAGGITTTDTQYF

SEQ ID NO: 605109 - protein, 14 aa, Homo sapiens
  CDR3 for alpha chain variable domain of TCR clone 302555 (TRAV26-1, TRAJ45)
CIVRVVGGADGLTF

SEQ ID NO: 605110 - protein, 14 aa, Homo sapiens
  CDR3 for beta chain variable domain of TCR clone 302555 (TRBV7-9, TRBJ2-1)
CASSIRQGWDEQFF

SEQ ID NO: 605111 - protein, 13 aa, Homo sapiens
  CDR3 for alpha chain variable domain of TCR clone 302556 (TRAV16, TRAJ11)
CALTQSGHSTLTF

SEQ ID NO: 605112 - protein, 14 aa, Homo sapiens
  CDR3 for beta chain variable domain of TCR clone 302556 (TRBV19, TRBJ2-7)
CASSTTRSSYEQYF

SEQ ID NO: 605113 - protein, 13 aa, Homo sapiens
  CDR3 for alpha chain variable domain of TCR clone 302557 (TRAV13-1, TRAJ39)
CSKYSNAGNMLTF

SEQ ID NO: 605114 - protein, 16 aa, Homo sapiens
  CDR3 for beta chain variable domain of TCR clone 302557 (TRBV7-2, TRBJ1-4)
CASSLAPGRRDEKLFF

SEQ ID NO: 605115 - protein, 13 aa, Homo sapiens
  CDR3 for alpha chain variable domain of TCR clone 302558 (TRAV12-3, TRAJ54)
CALVPQGAEKLVF

SEQ ID NO: 605116 - protein, 15 aa, Homo sapiens
  CDR3 for beta chain variable domain of TCR clone 302558 (TRBV4-1, TRBJ2-2)
CASSQDSRGTGELFF

SEQ ID NO: 605117 - protein, 11 aa, Homo sapiens
  CDR3 for alpha chain variable domain of TCR clone 302559 (TRAV23/DV6, TRAJ9)
CAASLSPQNTG

SEQ ID NO: 605118 - protein, 14 aa, Homo sapiens
  CDR3 for beta chain variable domain of TCR clone 302559 (TRBV11-2, TRBJ2-5)
CASSRTGGIETQYF

SEQ ID NO: 605119 - protein, 10 aa, Homo sapiens
  CDR3 for alpha chain variable domain of TCR clone 302560 (TRAV1-2, TRAJ23)
CAGQGGKLIF

SEQ ID NO: 605120 - protein, 16 aa, Homo sapiens
  CDR3 for beta chain variable domain of TCR clone 302560 (TRBV11-2, TRBJ1-1)
CASSLRQGREHSKAFF

SEQ ID NO: 605121 - protein, 16 aa, Homo sapiens
  CDR3 for alpha chain variable domain of TCR clone 302561 (TRAV1-1, TRAJ45)
CAVRAYSGGGADGLTF

SEQ ID NO: 605122 - protein, 13 aa, Homo sapiens
  CDR3 for beta chain variable domain of TCR clone 302561 (TRBV20-1, TRBJ1-2)
FSARGTADYGYTF

SEQ ID NO: 605123 - protein, 13 aa, Homo sapiens
  CDR3 for alpha chain variable domain of TCR clone 302562 (TRAV13-1, TRAJ39)
CAARIWAGNMLTF

SEQ ID NO: 605124 - protein, 15 aa, Homo sapiens
  CDR3 for beta chain variable domain of TCR clone 302562 (TRBV7-9, TRBJ1-1)
CASSLLEQGGTEDFF

SEQ ID NO: 605125 - protein, 11 aa, Homo sapiens
  CDR3 for alpha chain variable domain of TCR clone 302563 (TRAV21, TRAJ41)
CAVRSGYALNF

SEQ ID NO: 605126 - protein, 13 aa, Homo sapiens
  CDR3 for beta chain variable domain of TCR clone 302563 (TRBV7-2, TRBJ2-5)
CASIQTSVETQYF

SEQ ID NO: 605127 - protein, 16 aa, Homo sapiens
  CDR3 for alpha chain variable domain of TCR clone 302564 (TRAV30, TRAJ24)
CGTEIVDADSWGKFKF

SEQ ID NO: 605128 - protein, 14 aa, Homo sapiens
  CDR3 for beta chain variable domain of TCR clone 302564 (TRBV12-5, TRBJ2-5)
CASCSRTHQETQFF

SEQ ID NO: 605129 - protein, 15 aa, Homo sapiens
  CDR3 for alpha chain variable domain of TCR clone 302565 (TRAV13-1, TRAJ50)
CAAKGSETSYDKVIF

SEQ ID NO: 605130 - protein, 14 aa, Homo sapiens
  CDR3 for beta chain variable domain of TCR clone 302565 (TRBV29-1, TRBJ2-5)
CSVETSGSGETQYF

SEQ ID NO: 605131 - protein, 13 aa, Homo sapiens
  CDR3 for alpha chain variable domain of TCR clone 302566 (TRAV29/DV5, TRAJ31)
CAASRNNNARLMF

SEQ ID NO: 605132 - protein, 15 aa, Homo sapiens
  CDR3 for beta chain variable domain of TCR clone 302566 (TRBV7-8, TRBJ2-1)
CASSLHGGPYNEQFF

SEQ ID NO: 605133 - protein, 13 aa, Homo sapiens
  CDR3 for alpha chain variable domain of TCR clone 302567 (TRAV35, TRAJ37)
CAGSSGNPGKLIF

SEQ ID NO: 605134 - protein, 16 aa, Homo sapiens
  CDR3 for beta chain variable domain of TCR clone 302567 (TRBV10-3, TRBJ2-1)
CAISLTSGNSYNEQFF

SEQ ID NO: 605135 - protein, 21 aa, Homo sapiens
  CDR3 for alpha chain variable domain of TCR clone 302568 (TRAV30, TRAJ43)
GLPAQLLRNLLPIIELNDMRF

SEQ ID NO: 605136 - protein, 14 aa, Homo sapiens
  CDR3 for beta chain variable domain of TCR clone 302568 (TRBV27, TRBJ2-1)
CASRHLGGGKEQFY

SEQ ID NO: 605137 - protein, 14 aa, Homo sapiens
  CDR3 for alpha chain variable domain of TCR clone 302569 (TRAV8-6, TRAJ54)
CAVSDFQGAQKLVF

SEQ ID NO: 605138 - protein, 13 aa, Homo sapiens
  CDR3 for beta chain variable domain of TCR clone 302569 (TRBV18, TRBJ2-7)
CQLTERGAYEQYF

SEQ ID NO: 605139 - protein, 11 aa, Homo sapiens
  CDR3 for alpha chain variable domain of TCR clone 302570 (TRAV1-2, TRAJ31)
CAVNNDARLMF

SEQ ID NO: 605140 - protein, 18 aa, Homo sapiens
  CDR3 for beta chain variable domain of TCR clone 302570 (TRBV11-2, TRBJ2-3)
CASSLGGASRGAPNTQYF

SEQ ID NO: 605141 - protein, 14 aa, Homo sapiens
  CDR3 for alpha chain variable domain of TCR clone 302571 (TRAV1-2, TRAJ8)
CAVREDTGFQKLVF

SEQ ID NO: 605142 - protein, 15 aa, Homo sapiens
  CDR3 for beta chain variable domain of TCR clone 302571 (TRBV5-5, TRBJ1-5)
CASSSTPGSNQPQNF

SEQ ID NO: 605143 - protein, 16 aa, Homo sapiens
  CDR3 for alpha chain variable domain of TCR clone 302572 (TRAV3, TRAJ10)
CAVRDMRAGGGNKLTF

SEQ ID NO: 605144 - protein, 13 aa, Homo sapiens
  CDR3 for beta chain variable domain of TCR clone 302572 (TRBV19, TRBJ2-7)
CASRKAGGSEQYF

SEQ ID NO: 605145 - protein, 15 aa, Homo sapiens
  CDR3 for alpha chain variable domain of TCR clone 302573 (TRAV14/DV4, TRAJ47)
CAMREAMEYGNKLVF

SEQ ID NO: 605146 - protein, 13 aa, Homo sapiens
  CDR3 for beta chain variable domain of TCR clone 302573 (TRBV10-3, TRBJ2-2)
CAINREGTGELFF

SEQ ID NO: 605147 - protein, 12 aa, Homo sapiens
  CDR3 for alpha chain variable domain of TCR clone 302574 (TRAV8-3, TRAJ26)
CAGDNYGQNFVF

SEQ ID NO: 605148 - protein, 13 aa, Homo sapiens
  CDR3 for beta chain variable domain of TCR clone 302574 (TRBV20-1, TRBJ1-1)
CSAPLGGGNEAFF

SEQ ID NO: 605149 - protein, 15 aa, Homo sapiens
  CDR3 for alpha chain variable domain of TCR clone 302575 (TRAV2, TRAJ15)
CAVEDRGQAGTALIF

SEQ ID NO: 605150 - protein, 15 aa, Homo sapiens
  CDR3 for beta chain variable domain of TCR clone 302575 (TRBV28, TRBJ2-7)
CASRPWDRFSYEQYF

SEQ ID NO: 605151 - protein, 16 aa, Homo sapiens
  CDR3 for alpha chain variable domain of TCR clone 302576 (TRAV30, TRAJ24)
CGTEIVDSDSWGKFQV

SEQ ID NO: 605152 - protein, 14 aa, Homo sapiens
  CDR3 for beta chain variable domain of TCR clone 302576 (TRBV12-5, TRBJ2-5)
CASGSRTHQETQYF

SEQ ID NO: 605153 - protein, 13 aa, Homo sapiens
  CDR3 for alpha chain variable domain of TCR clone 302577 (TRAV13-1, TRAJ33)
CAASRAGYYQLIW

SEQ ID NO: 605154 - protein, 15 aa, Homo sapiens
  CDR3 for beta chain variable domain of TCR clone 302577 (TRBV2, TRBJ2-7)
EDSAMYFCASSEQYF

SEQ ID NO: 605155 - protein, 14 aa, Homo sapiens
  CDR3 for alpha chain variable domain of TCR clone 302578 (TRAV13-1, TRAJ35)
CAASKGGFGNVRHC

SEQ ID NO: 605156 - protein, 15 aa, Homo sapiens
  CDR3 for beta chain variable domain of TCR clone 302578 (TRBV10-3, TRBJ2-3)
CAISLTSGGTDTQYF

SEQ ID NO: 605157 - protein, 11 aa, Homo sapiens
  CDR3 for alpha chain variable domain of TCR clone 302579 (TRAV21, TRAJ20)
CAVDGDYKLSF

SEQ ID NO: 605158 - protein, 14 aa, Homo sapiens
  CDR3 for beta chain variable domain of TCR clone 302579 (TRBV12-5, TRBJ2-5)
CASGSRTHQETQYF

SEQ ID NO: 605159 - protein, 14 aa, Homo sapiens
  CDR3 for alpha chain variable domain of TCR clone 302580 (TRAV1-2, TRAJ27)
CAPAEYTNAGKSTF

SEQ ID NO: 605160 - protein, 17 aa, Homo sapiens
  CDR3 for beta chain variable domain of TCR clone 302580 (TRBV13, TRBJ2-3)
WASSLSRVAGGRNTQYF

SEQ ID NO: 605161 - protein, 16 aa, Homo sapiens
  CDR3 for alpha chain variable domain of TCR clone 302581 (TRAV12-3, TRAJ53)
CAMSPGSGGSNYKLTF

SEQ ID NO: 605162 - protein, 15 aa, Homo sapiens
  CDR3 for beta chain variable domain of TCR clone 302581 (TRBV7-2, TRBJ2-2)
CASSPTGANTGELFF

SEQ ID NO: 605163 - protein, 15 aa, Homo sapiens
  CDR3 for alpha chain variable domain of TCR clone 302582 (TRAV23/DV6, TRAJ18)
CAARYRGSTLGRLYF

SEQ ID NO: 605164 - protein, 13 aa, Homo sapiens
  CDR3 for beta chain variable domain of TCR clone 302582 (TRBV7-2, TRBJ2-7)
CASSCPSGSEQYF

SEQ ID NO: 605165 - protein, 19 aa, Homo sapiens
  CDR3 for alpha chain variable domain of TCR clone 302583 (TRAV25, TRAJ20)
TATQTTDVGILPHDYKLSL

SEQ ID NO: 605166 - protein, 15 aa, Homo sapiens
  CDR3 for beta chain variable domain of TCR clone 302583 (TRBV6-6, TRBJ1-5)
CASSSIQGTNQPQHF

SEQ ID NO: 605167 - protein, 18 aa, Homo sapiens
  CDR3 for alpha chain variable domain of TCR clone 302584 (TRAV21, TRAJ52)
CAVRPSPAGGTSYVKLTF

SEQ ID NO: 605168 - protein, 12 aa, Homo sapiens
  CDR3 for beta chain variable domain of TCR clone 302584 (TRBV11-2, TRBJ2-2)
CASSLGGGELFF

SEQ ID NO: 605169 - protein, 11 aa, Homo sapiens
  CDR3 for alpha chain variable domain of TCR clone 302585 (TRAV2, TRAJ26)
CAVEDGPWSEF

SEQ ID NO: 605170 - protein, 12 aa, Homo sapiens
  CDR3 for beta chain variable domain of TCR clone 302585 (TRBV19, TRBJ2-7)
CASTDRGYEQYF

SEQ ID NO: 605171 - protein, 14 aa, Homo sapiens
  CDR3 for alpha chain variable domain of TCR clone 302586 (TRAV9-2, TRAJ39)
CALYIYNAGNMRTF

SEQ ID NO: 605172 - protein, 15 aa, Homo sapiens
  CDR3 for beta chain variable domain of TCR clone 302586 (TRBV28, TRBJ1-3)
CASSMGWASGNTIYF

SEQ ID NO: 605173 - protein, 15 aa, Homo sapiens
  CDR3 for alpha chain variable domain of TCR clone 302587 (TRAV23/DV6, TRAJ18)
CAARYRGSTLGRLYF

SEQ ID NO: 605174 - protein, 16 aa, Homo sapiens
  CDR3 for beta chain variable domain of TCR clone 302587 (TRBV7-8, TRBJ2-3)
CASSTEGQRETDTQYF

SEQ ID NO: 605175 - protein, 16 aa, Homo sapiens
  CDR3 for alpha chain variable domain of TCR clone 302588 (TRAV12-3, TRAJ53)
CAMSPGSGGSNYKLTF

SEQ ID NO: 605176 - protein, 13 aa, Homo sapiens
  CDR3 for beta chain variable domain of TCR clone 302588 (TRBV7-3, TRBJ1-1)
CASSHDWGAEAFF

SEQ ID NO: 605177 - protein, 14 aa, Homo sapiens
  CDR3 for alpha chain variable domain of TCR clone 302589 (TRAV13-1, TRAJ44)
CAAKATGTASKLTF

SEQ ID NO: 605178 - protein, 16 aa, Homo sapiens
  CDR3 for beta chain variable domain of TCR clone 302589 (TRBV7-9, TRBJ2-6)
CASSVKGPLRANVLTF

SEQ ID NO: 605179 - protein, 12 aa, Homo sapiens
  CDR3 for alpha chain variable domain of TCR clone 302590 (TRAV27, TRAJ34)
CAGAKNTDKLIF

SEQ ID NO: 605180 - protein, 13 aa, Homo sapiens
  CDR3 for beta chain variable domain of TCR clone 302590 (TRBV4-1, TRBJ2-1)
CASSQEGQYEQFF

SEQ ID NO: 605181 - protein, 12 aa, Homo sapiens
  CDR3 for alpha chain variable domain of TCR clone 302591 (TRAV12-1, TRAJ40)
CVVYSGTYKYIF

SEQ ID NO: 605182 - protein, 15 aa, Homo sapiens
  CDR3 for beta chain variable domain of TCR clone 302591 (TRBV27, TRBJ1-6)
CASSFDMGLGSPLHF

SEQ ID NO: 605183 - protein, 16 aa, Homo sapiens
  CDR3 for alpha chain variable domain of TCR clone 302592 (TRAV3, TRAJ5)
CAVRNLVDTGRRALTF

SEQ ID NO: 605184 - protein, 14 aa, Homo sapiens
  CDR3 for beta chain variable domain of TCR clone 302592 (TRBV5-1, TRBJ2-5)
CASSLEASQETQYF

SEQ ID NO: 605185 - protein, 11 aa, Homo sapiens
  CDR3 for alpha chain variable domain of TCR clone 302593 (TRAV12-3, TRAJ27)
CAMANAAKSTF

SEQ ID NO: 605186 - protein, 12 aa, Homo sapiens
  CDR3 for beta chain variable domain of TCR clone 302593 (TRBV11-2, TRBJ2-2)
CASSLGGGELFF

SEQ ID NO: 605187 - protein, 13 aa, Homo sapiens
  CDR3 for alpha chain variable domain of TCR clone 302594 (TRAV27, TRAJ49)
CAPRPYTGNQFYF

SEQ ID NO: 605188 - protein, 13 aa, Homo sapiens
  CDR3 for beta chain variable domain of TCR clone 302594 (TRBV4-1, TRBJ1-2)
CASSQDAGQVLYA

SEQ ID NO: 605189 - protein, 11 aa, Homo sapiens
  CDR3 for alpha chain variable domain of TCR clone 302595 (TRAV3, TRAJ17)
SRGAAGNKLTF

SEQ ID NO: 605190 - protein, 16 aa, Homo sapiens
  CDR3 for beta chain variable domain of TCR clone 302595 (TRBV7-6, TRBJ2-1)
CASSAPGPSSYNEQFF

SEQ ID NO: 605191 - protein, 16 aa, Homo sapiens
  CDR3 for alpha chain variable domain of TCR clone 302596 (TRAV12-1, TRAJ43)
CVVNPHRFGAGTRLTV

SEQ ID NO: 605192 - protein, 13 aa, Homo sapiens
  CDR3 for beta chain variable domain of TCR clone 302596 (TRBV4-2, TRBJ1-1)
CASSQAGNTEAFF

SEQ ID NO: 605193 - protein, 13 aa, Homo sapiens
  CDR3 for alpha chain variable domain of TCR clone 302597 (TRAV12-1, TRAJ34)
CVVTGYNTDKLIF

SEQ ID NO: 605194 - protein, 13 aa, Homo sapiens
  CDR3 for beta chain variable domain of TCR clone 302597 (TRBV28, TRBJ2-7)
CASTAGGVYEQYF

SEQ ID NO: 605195 - protein, 12 aa, Homo sapiens
  CDR3 for alpha chain variable domain of TCR clone 302598 (TRAV16, TRAJ13)
CITLRGYQKVTF

SEQ ID NO: 605196 - protein, 17 aa, Homo sapiens
  CDR3 for beta chain variable domain of TCR clone 302598 (TRBV28, TRBJ2-5)
CASSRQGGIAGAETQYF

SEQ ID NO: 605197 - protein, 17 aa, Homo sapiens
  CDR3 for alpha chain variable domain of TCR clone 302599 (TRAV9-2, TRAJ10)
CALSDQGLTGGVNKLTF

SEQ ID NO: 605198 - protein, 14 aa, Homo sapiens
  CDR3 for beta chain variable domain of TCR clone 302599 (TRBV19, TRBJ1-2)
CASSIERITYGYTL

SEQ ID NO: 605199 - protein, 12 aa, Homo sapiens
  CDR3 for alpha chain variable domain of TCR clone 302600 (TRAV12-3, TRAJ17)
CAMTLTGNKLTI

SEQ ID NO: 605200 - protein, 15 aa, Homo sapiens
  CDR3 for beta chain variable domain of TCR clone 302600 (TRBV20-1, TRBJ2-7)
CSARDWVSGMDEQYF

SEQ ID NO: 605201 - protein, 18 aa, Homo sapiens
  CDR3 for alpha chain variable domain of TCR clone 302601 (TRAV13-1, TRAJ52)
CAASKRSAGGTSYGKLTF

SEQ ID NO: 605202 - protein, 13 aa, Homo sapiens
  CDR3 for beta chain variable domain of TCR clone 302601 (TRBV9, TRBJ2-1)
CASSPSGGSEQFF

SEQ ID NO: 605203 - protein, 16 aa, Homo sapiens
  CDR3 for alpha chain variable domain of TCR clone 302602 (TRAV30, TRAJ24)
CGAEIVDADSWGKFQF

SEQ ID NO: 605204 - protein, 17 aa, Homo sapiens
  CDR3 for beta chain variable domain of TCR clone 302602 (TRBV20-1, TRBJ2-1)
CSAPPRLAGTRYNEQFF

SEQ ID NO: 605205 - protein, 15 aa, Homo sapiens
  CDR3 for alpha chain variable domain of TCR clone 302603 (TRAV8-3, TRAJ45)
CALSYSGGGAYGLTF

SEQ ID NO: 605206 - protein, 13 aa, Homo sapiens
  CDR3 for beta chain variable domain of TCR clone 302603 (TRBV10-3, TRBJ2-7)
CASKLAVNYEQYF

SEQ ID NO: 605207 - protein, 15 aa, Homo sapiens
  CDR3 for alpha chain variable domain of TCR clone 302604 (TRAV12-3, TRAJ6)
CAMSATTGGSYIPTV

SEQ ID NO: 605208 - protein, 15 aa, Homo sapiens
  CDR3 for beta chain variable domain of TCR clone 302604 (TRBV5-1, TRBJ2-7)
CASSLNGGPAREQYF

SEQ ID NO: 605209 - protein, 15 aa, Homo sapiens
  CDR3 for alpha chain variable domain of TCR clone 302605 (TRAV12-1, TRAJ9)
CVVSFGDTGGFKTIF

SEQ ID NO: 605210 - protein, 13 aa, Homo sapiens
  CDR3 for beta chain variable domain of TCR clone 302605 (TRBV14, TRBJ1-2)
CASSDDRRYGYTF

SEQ ID NO: 605211 - protein, 14 aa, Homo sapiens
  CDR3 for alpha chain variable domain of TCR clone 302606 (TRAV12-2, TRAJ29)
CAVRRNSGNTPLVF

SEQ ID NO: 605212 - protein, 13 aa, Homo sapiens
  CDR3 for beta chain variable domain of TCR clone 302606 (TRBV12-4, TRBJ2-1)
CASSHYTDNERFF

SEQ ID NO: 605213 - protein, 17 aa, Homo sapiens
  CDR3 for alpha chain variable domain of TCR clone 302607 (TRAV2, TRAJ36)
CAVEDRGNWGKQPPLWD

SEQ ID NO: 605214 - protein, 14 aa, Homo sapiens
  CDR3 for beta chain variable domain of TCR clone 302607 (TRBV7-9, TRBJ2-5)
CASSLDTAQETQYF

SEQ ID NO: 605215 - protein, 12 aa, Homo sapiens
  CDR3 for alpha chain variable domain of TCR clone 302608 (TRAV13-1, TRAJ49)
CAASPIGNQFYF

SEQ ID NO: 605216 - protein, 17 aa, Homo sapiens
  CDR3 for beta chain variable domain of TCR clone 302608 (TRBV11-2, TRBJ2-1)
FASSLYPPGVEYNEQFF

SEQ ID NO: 605217 - protein, 13 aa, Homo sapiens
  CDR3 for alpha chain variable domain of TCR clone 302609 (TRAV1-2, TRAJ9)
CAALNTGGFKTIF

SEQ ID NO: 605218 - protein, 20 aa, Homo sapiens
  CDR3 for beta chain variable domain of TCR clone 302609 (TRBV28, TRBJ2-1)
CASTPIGRSPGLAGGNEQYF

SEQ ID NO: 605219 - protein, 12 aa, Homo sapiens
  CDR3 for alpha chain variable domain of TCR clone 302610 (TRAV16, TRAJ12)
CALEDSSYKLIF

SEQ ID NO: 605220 - protein, 12 aa, Homo sapiens
  CDR3 for beta chain variable domain of TCR clone 302610 (TRBV7-8, TRBJ2-7)
CASSLGDREQYF

SEQ ID NO: 605221 - protein, 16 aa, Homo sapiens
  CDR3 for alpha chain variable domain of TCR clone 302611 (TRAV30, TRAJ24)
CGTEIVDADSWGKFQF

SEQ ID NO: 605222 - protein, 16 aa, Homo sapiens
  CDR3 for beta chain variable domain of TCR clone 302611 (TRBV4-1, TRBJ2-3)
CASIQSTSGAEDTQYF

SEQ ID NO: 605223 - protein, 15 aa, Homo sapiens
  CDR3 for alpha chain variable domain of TCR clone 302612 (TRAV4, TRAJ26)
CLVGDMINYGKNFVF

SEQ ID NO: 605224 - protein, 16 aa, Homo sapiens
  CDR3 for beta chain variable domain of TCR clone 302612 (TRBV28, TRBJ1-4)
CASSSRTGAANEKLFF

SEQ ID NO: 605225 - protein, 14 aa, Homo sapiens
  CDR3 for alpha chain variable domain of TCR clone 302613 (TRAV17, TRAJ22)
CATSPSGSARQLTF

SEQ ID NO: 605226 - protein, 15 aa, Homo sapiens
  CDR3 for beta chain variable domain of TCR clone 302613 (TRBV4-1, TRBJ2-5)
CASSQWDLYQEIQYF

SEQ ID NO: 605227 - protein, 15 aa, Homo sapiens
  CDR3 for alpha chain variable domain of TCR clone 302614 (TRAV25, TRAJ43)
CAVFIRFGAGTRLTV

SEQ ID NO: 605228 - protein, 13 aa, Homo sapiens
  CDR3 for beta chain variable domain of TCR clone 302614 (TRBV7-9, TRBJ1-2)
CASSLKQNYGYTF

SEQ ID NO: 605229 - protein, 14 aa, Homo sapiens
  CDR3 for alpha chain variable domain of TCR clone 302615 (TRAV12-2, TRAJ17)
CAVLFKAAGNKLTF

SEQ ID NO: 605230 - protein, 17 aa, Homo sapiens
  CDR3 for beta chain variable domain of TCR clone 302615 (TRBV18, TRBJ2-6)
CASSPDRGVGGANVLTF

SEQ ID NO: 605231 - protein, 12 aa, Homo sapiens
  CDR3 for alpha chain variable domain of TCR clone 302616 (TRAV1-1, TRAJ8)
CAGGTGFQKLVV

SEQ ID NO: 605232 - protein, 13 aa, Homo sapiens
  CDR3 for beta chain variable domain of TCR clone 302616 (TRBV7-3, TRBJ1-1)
CASSQDWGAEAFF

SEQ ID NO: 605233 - protein, 12 aa, Homo sapiens
  CDR3 for alpha chain variable domain of TCR clone 302617 (TRAV8-3, TRAJ41)
CAVALSGYALNF

SEQ ID NO: 605234 - protein, 17 aa, Homo sapiens
  CDR3 for beta chain variable domain of TCR clone 302617 (TRBV7-3, TRBJ2-2)
CASSLSGISGGTGELFF

SEQ ID NO: 605235 - protein, 14 aa, Homo sapiens
  CDR3 for alpha chain variable domain of TCR clone 302618 (TRAV23/DV6, TRAJ22)
CAASVSGSASQLTF

SEQ ID NO: 605236 - protein, 13 aa, Homo sapiens
  CDR3 for beta chain variable domain of TCR clone 302618 (TRBV11-2, TRBJ2-5)
CASSRGPSETQYF

SEQ ID NO: 605237 - protein, 12 aa, Homo sapiens
  CDR3 for alpha chain variable domain of TCR clone 302619 (TRAV13-1, TRAJ21)
CAANEGCNKFYF

SEQ ID NO: 605238 - protein, 15 aa, Homo sapiens
  CDR3 for beta chain variable domain of TCR clone 302619 (TRBV9, TRBJ1-6)
CASSVAGTGDSTLHF

SEQ ID NO: 605239 - protein, 15 aa, Homo sapiens
  CDR3 for alpha chain variable domain of TCR clone 302620 (TRAV17, TRAJ16)
CVTALRFSDGQKLLF

SEQ ID NO: 605240 - protein, 12 aa, Homo sapiens
  CDR3 for beta chain variable domain of TCR clone 302620 (TRBV2, TRBJ2-7)
CASSDPDYEQYF

SEQ ID NO: 605241 - protein, 12 aa, Homo sapiens
  CDR3 for alpha chain variable domain of TCR clone 302621 (TRAV12-3, TRAJ17)
RVMTLTGNKLTF

SEQ ID NO: 605242 - protein, 15 aa, Homo sapiens
  CDR3 for beta chain variable domain of TCR clone 302621 (TRBV11-2, TRBJ2-2)
CASSSDRVNAGELFF

SEQ ID NO: 605243 - protein, 12 aa, Homo sapiens
  CDR3 for alpha chain variable domain of TCR clone 302622 (TRAV12-3, TRAJ20)
CAMVRGDYELSF

SEQ ID NO: 605244 - protein, 13 aa, Homo sapiens
  CDR3 for beta chain variable domain of TCR clone 302622 (TRBV23-1, TRBJ1-4)
CASRGKFNEKLFF

SEQ ID NO: 605245 - protein, 14 aa, Homo sapiens
  CDR3 for alpha chain variable domain of TCR clone 302623 (TRAV2, TRAJ20)
CAVDLRKHDYKLSF

SEQ ID NO: 605246 - protein, 13 aa, Homo sapiens
  CDR3 for beta chain variable domain of TCR clone 302623 (TRBV10-3, TRBJ2-7)
CASKLAVNYEQYF

SEQ ID NO: 605247 - protein, 15 aa, Homo sapiens
  CDR3 for alpha chain variable domain of TCR clone 302624 (TRAV4, TRAJ26)
CLVGDMNNCGQNFVF

SEQ ID NO: 605248 - protein, 16 aa, Homo sapiens
  CDR3 for beta chain variable domain of TCR clone 302624 (TRBV28, TRBJ1-4)
CASSSRTGAANEKLFF

SEQ ID NO: 605249 - protein, 11 aa, Homo sapiens
  CDR3 for alpha chain variable domain of TCR clone 302625 (TRAV16, TRAJ20)
CALSEGFKAAL

SEQ ID NO: 605250 - protein, 12 aa, Homo sapiens
  CDR3 for beta chain variable domain of TCR clone 302625 (TRBV7-3, TRBJ2-1)
CQQLRQYNEQFF

SEQ ID NO: 605251 - protein, 16 aa, Homo sapiens
  CDR3 for alpha chain variable domain of TCR clone 302626 (TRAV8-4, TRAJ16)
CAVSPVGRWPEAALVK

SEQ ID NO: 605252 - protein, 14 aa, Homo sapiens
  CDR3 for beta chain variable domain of TCR clone 302626 (TRBV23-1, TRBJ2-5)
CASSFLRSQETQYF

SEQ ID NO: 605253 - protein, 11 aa, Homo sapiens
  CDR3 for alpha chain variable domain of TCR clone 302627 (TRAV12-2, TRAJ36)
CAVDGSNNLFF

SEQ ID NO: 605254 - protein, 13 aa, Homo sapiens
  CDR3 for beta chain variable domain of TCR clone 302627 (TRBV7-2, TRBJ2-7)
CASSSPSGSEQYF

SEQ ID NO: 605255 - protein, 16 aa, Homo sapiens
  CDR3 for alpha chain variable domain of TCR clone 302628 (TRAV12-2, TRAJ45)
CAVKRNPGGGADGLTF

SEQ ID NO: 605256 - protein, 13 aa, Homo sapiens
  CDR3 for beta chain variable domain of TCR clone 302628 (TRBV7-3, TRBJ1-1)
CASSQDWGAEAFF

SEQ ID NO: 605257 - protein, 18 aa, Homo sapiens
  CDR3 for alpha chain variable domain of TCR clone 302629 (TRAV12-3, TRAJ52)
CAMSVGGAGGTSYGKLTF

SEQ ID NO: 605258 - protein, 15 aa, Homo sapiens
  CDR3 for beta chain variable domain of TCR clone 302629 (TRBV7-2, TRBJ1-2)
WASSPRAGWNYGYTF

SEQ ID NO: 605259 - protein, 18 aa, Homo sapiens
  CDR3 for alpha chain variable domain of TCR clone 302630 (TRAV12-3, TRAJ52)
CAMSVGGAGGTSYGKLTF

SEQ ID NO: 605260 - protein, 13 aa, Homo sapiens
  CDR3 for beta chain variable domain of TCR clone 302630 (TRBV11-3, TRBJ2-7)
CASSLDKLYEQYF

SEQ ID NO: 605261 - protein, 15 aa, Homo sapiens
  CDR3 for alpha chain variable domain of TCR clone 302631 (TRAV13-2, TRAJ16)
CAENDRFTDGQKLLF

SEQ ID NO: 605262 - protein, 14 aa, Homo sapiens
  CDR3 for beta chain variable domain of TCR clone 302631 (TRBV4-2, TRBJ1-5)
CASSRDRGNQPQHF

SEQ ID NO: 605263 - protein, 10 aa, Homo sapiens
  CDR3 for alpha chain variable domain of TCR clone 302632 (TRAV23/DV6, TRAJ57)
CAASSTLSQG

SEQ ID NO: 605264 - protein, 16 aa, Homo sapiens
  CDR3 for beta chain variable domain of TCR clone 302632 (TRBV2, TRBJ2-3)
CASSTSVEGVTDTQYF

SEQ ID NO: 605265 - protein, 11 aa, Homo sapiens
  CDR3 for alpha chain variable domain of TCR clone 302633 (TRAV12-2, TRAJ31)
CAVTRWARPMF

SEQ ID NO: 605266 - protein, 15 aa, Homo sapiens
  CDR3 for beta chain variable domain of TCR clone 302633 (TRBV9, TRBJ1-6)
CASSVAGTGDSPLHF

SEQ ID NO: 605267 - protein, 15 aa, Homo sapiens
  CDR3 for alpha chain variable domain of TCR clone 302634 (TRAV8-6, TRAJ38)
CAVSSNAGNNRKMIW

SEQ ID NO: 605268 - protein, 14 aa, Homo sapiens
  CDR3 for beta chain variable domain of TCR clone 302634 (TRBV14, TRBJ2-1)
CASSQVQGRGEQFF

SEQ ID NO: 605269 - protein, 16 aa, Homo sapiens
  CDR3 for alpha chain variable domain of TCR clone 302635 (TRAV30, TRAJ24)
CSTEIVDADSWGKFQF

SEQ ID NO: 605270 - protein, 13 aa, Homo sapiens
  CDR3 for beta chain variable domain of TCR clone 302635 (TRBV11-2, TRBJ2-5)
CASSSTGEETQYF

SEQ ID NO: 605271 - protein, 16 aa, Homo sapiens
  CDR3 for alpha chain variable domain of TCR clone 302636 (TRAV12-3, TRAJ28)
CAMRANSGAGRYQLTF

SEQ ID NO: 605272 - protein, 16 aa, Homo sapiens
  CDR3 for beta chain variable domain of TCR clone 302636 (TRBV7-2, TRBJ1-3)
CASSRLEASSGNTIYF

SEQ ID NO: 605273 - protein, 13 aa, Homo sapiens
  CDR3 for alpha chain variable domain of TCR clone 302637 (TRAV21, TRAJ27)
CAARPGNAGKSPF

SEQ ID NO: 605274 - protein, 14 aa, Homo sapiens
  CDR3 for beta chain variable domain of TCR clone 302637 (TRBV27, TRBJ2-5)
CASSSLKGWETQYF

SEQ ID NO: 605275 - protein, 17 aa, Homo sapiens
  CDR3 for alpha chain variable domain of TCR clone 302638 (TRAV3, TRAJ42)
FAVRDRDYGGSQGNLIF

SEQ ID NO: 605276 - protein, 18 aa, Homo sapiens
  CDR3 for beta chain variable domain of TCR clone 302638 (TRBV20-1, TRBJ2-3)
CSASGLAGGPGTTDTQYF

SEQ ID NO: 605277 - protein, 17 aa, Homo sapiens
  CDR3 for alpha chain variable domain of TCR clone 302639 (TRAV13-1, TRAJ31)
CAPRDRLMLGDGTQLVV

SEQ ID NO: 605278 - protein, 12 aa, Homo sapiens
  CDR3 for beta chain variable domain of TCR clone 302639 (TRBV7-9, TRBJ2-7)
CASSLEGYEQYV

SEQ ID NO: 605279 - protein, 13 aa, Homo sapiens
  CDR3 for alpha chain variable domain of TCR clone 302640 (TRAV13-1, TRAJ20)
CAARVSNDYKLSF

SEQ ID NO: 605280 - protein, 14 aa, Homo sapiens
  CDR3 for beta chain variable domain of TCR clone 302640 (TRBV7-9, TRBJ2-1)
CASSPRDSLYEQFF

SEQ ID NO: 605281 - protein, 13 aa, Homo sapiens
  CDR3 for alpha chain variable domain of TCR clone 302641 (TRAV19, TRAJ57)
CALLQGGSEKLVF

SEQ ID NO: 605282 - protein, 15 aa, Homo sapiens
  CDR3 for beta chain variable domain of TCR clone 302641 (TRBV9, TRBJ2-1)
CASSLAGSSYNEQFF

SEQ ID NO: 605283 - protein, 17 aa, Homo sapiens
  CDR3 for alpha chain variable domain of TCR clone 302642 (TRAV4, TRAJ13)
CLVGVQGSSGGYQKVTF

SEQ ID NO: 605284 - protein, 16 aa, Homo sapiens
  CDR3 for beta chain variable domain of TCR clone 302642 (TRBV28, TRBJ2-7)
RASSLFFETGGPEQYF

SEQ ID NO: 605285 - protein, 13 aa, Homo sapiens
  CDR3 for alpha chain variable domain of TCR clone 302643 (TRAV12-2, TRAJ37)
CAGGSGNTGKLLF

SEQ ID NO: 605286 - protein, 17 aa, Homo sapiens
  CDR3 for beta chain variable domain of TCR clone 302643 (TRBV11-2, TRBJ2-1)
CASSLYPPGVEYNGQFF

SEQ ID NO: 605287 - protein, 14 aa, Homo sapiens
  CDR3 for alpha chain variable domain of TCR clone 302644 (TRAV21, TRAJ58)
CAVRRGRSGSRLTF

SEQ ID NO: 605288 - protein, 14 aa, Homo sapiens
  CDR3 for beta chain variable domain of TCR clone 302644 (TRBV7-3, TRBJ2-2)
CASSPDPSGRELFF

SEQ ID NO: 605289 - protein, 13 aa, Homo sapiens
  CDR3 for alpha chain variable domain of TCR clone 302645 (TRAV25, TRAJ30)
CAGRVDRDDKIIF

SEQ ID NO: 605290 - protein, 16 aa, Homo sapiens
  CDR3 for beta chain variable domain of TCR clone 302645 (TRBV20-1, TRBJ2-1)
CSALTWTSGSYNEQFF

SEQ ID NO: 605291 - protein, 12 aa, Homo sapiens
  CDR3 for alpha chain variable domain of TCR clone 302646 (TRAV12-3, TRAJ17)
CAMTLTGNRLTF

SEQ ID NO: 605292 - protein, 12 aa, Homo sapiens
  CDR3 for beta chain variable domain of TCR clone 302646 (TRBV7-3, TRBJ1-1)
CQQPGLGAEAFF

SEQ ID NO: 605293 - protein, 14 aa, Homo sapiens
  CDR3 for alpha chain variable domain of TCR clone 302647 (TRAV2, TRAJ37)
CAVDFTSNKGKLIF

SEQ ID NO: 605294 - protein, 15 aa, Homo sapiens
  CDR3 for beta chain variable domain of TCR clone 302647 (TRBV20-1, TRBJ1-1)
CRASRGVTGNTEAFF

SEQ ID NO: 605295 - protein, 11 aa, Homo sapiens
  CDR3 for alpha chain variable domain of TCR clone 302648 (TRAV13-1, TRAJ15)
CAATPGTALIF

SEQ ID NO: 605296 - protein, 15 aa, Homo sapiens
  CDR3 for beta chain variable domain of TCR clone 302648 (TRBV28, TRBJ2-5)
CPSSPPWSYQETQYF

SEQ ID NO: 605297 - protein, 15 aa, Homo sapiens
  CDR3 for alpha chain variable domain of TCR clone 302649 (TRAV1-2, TRAJ9)
CAVRDDGTGGFKTIF

SEQ ID NO: 605298 - protein, 16 aa, Homo sapiens
  CDR3 for beta chain variable domain of TCR clone 302649 (TRBV7-2, TRBJ1-6)
CASSSFGSSYNSPLYF

SEQ ID NO: 605299 - protein, 22 aa, Homo sapiens
  CDR3 for alpha chain variable domain of TCR clone 302650 (TRAV8-3, TRAJ32)
CAVEVVLQTSSSLELALCFLSS

SEQ ID NO: 605300 - protein, 12 aa, Homo sapiens
  CDR3 for beta chain variable domain of TCR clone 302650 (TRBV7-8, TRBJ2-7)
CASSLGDREQYF

SEQ ID NO: 605301 - protein, 15 aa, Homo sapiens
  CDR3 for alpha chain variable domain of TCR clone 302651 (TRAV12-3, TRAJ6)
CAMSPASGGSYIPTF

SEQ ID NO: 605302 - protein, 15 aa, Homo sapiens
  CDR3 for beta chain variable domain of TCR clone 302651 (TRBV4-1, TRBJ1-4)
CASSDTRGTNEKLFF

SEQ ID NO: 605303 - protein, 14 aa, Homo sapiens
  CDR3 for alpha chain variable domain of TCR clone 302652 (TRAV9-2, TRAJ38)
CALSNAGNNRKLIW

SEQ ID NO: 605304 - protein, 16 aa, Homo sapiens
  CDR3 for beta chain variable domain of TCR clone 302652 (TRBV7-7, TRBJ2-1)
CASSLASGTSYNEQFF

SEQ ID NO: 605305 - protein, 14 aa, Homo sapiens
  CDR3 for alpha chain variable domain of TCR clone 302653 (TRAV29/DV5, TRAJ37)
CAASGSGNTGKLTF

SEQ ID NO: 605306 - protein, 17 aa, Homo sapiens
  CDR3 for beta chain variable domain of TCR clone 302653 (TRBV4-1, TRBJ2-7)
CASSPFLTSGGVVEQYF

SEQ ID NO: 605307 - protein, 13 aa, Homo sapiens
  CDR3 for alpha chain variable domain of TCR clone 302654 (TRAV13-2, TRAJ13)
CAERPGGYQKVTF

SEQ ID NO: 605308 - protein, 15 aa, Homo sapiens
  CDR3 for beta chain variable domain of TCR clone 302654 (TRBV11-3, TRBJ2-7)
CASSPGPAGSYEQYF

SEQ ID NO: 605309 - protein, 15 aa, Homo sapiens
  CDR3 for alpha chain variable domain of TCR clone 302655 (TRAV35, TRAJ53)
CAGLTQAGGNYKLTF

SEQ ID NO: 605310 - protein, 13 aa, Homo sapiens
  CDR3 for beta chain variable domain of TCR clone 302655 (TRBV20-1, TRBJ1-1)
CSAVDGTLNEAFF

SEQ ID NO: 605311 - protein, 13 aa, Homo sapiens
  CDR3 for alpha chain variable domain of TCR clone 302656 (TRAV23/DV6, TRAJ12)
CAPGGDSSHKLIF

SEQ ID NO: 605312 - protein, 16 aa, Homo sapiens
  CDR3 for beta chain variable domain of TCR clone 302656 (TRBV12-5, TRBJ2-5)
CASGPRTSGNQETQYF

SEQ ID NO: 605313 - protein, 14 aa, Homo sapiens
  CDR3 for alpha chain variable domain of TCR clone 302657 (TRAV26-1, TRAJ38)
CIADNAGNNRKLIW

SEQ ID NO: 605314 - protein, 14 aa, Homo sapiens
  CDR3 for beta chain variable domain of TCR clone 302657 (TRBV20-1, TRBJ1-1)
CSAKTRIGGTEAFF

SEQ ID NO: 605315 - protein, 13 aa, Homo sapiens
  CDR3 for alpha chain variable domain of TCR clone 302658 (TRAV6, TRAJ8)
CARSNTGFQKLVF

SEQ ID NO: 605316 - protein, 16 aa, Homo sapiens
  CDR3 for beta chain variable domain of TCR clone 302658 (TRBV4-3, TRBJ2-2)
CASSHLQGSGTGELFF

SEQ ID NO: 605317 - protein, 15 aa, Homo sapiens
  CDR3 for alpha chain variable domain of TCR clone 302659 (TRAV26-1, TRAJ29)
CIVRVEGSGYTPLVF

SEQ ID NO: 605318 - protein, 14 aa, Homo sapiens
  CDR3 for beta chain variable domain of TCR clone 302659 (TRBV18, TRBJ2-5)
YASSPGVSQETQYF

SEQ ID NO: 605319 - protein, 13 aa, Homo sapiens
  CDR3 for alpha chain variable domain of TCR clone 302660 (TRAV12-3, TRAJ49)
CAMIPTVWAQFYF

SEQ ID NO: 605320 - protein, 14 aa, Homo sapiens
  CDR3 for beta chain variable domain of TCR clone 302660 (TRBV5-1, TRBJ1-5)
CASSLAGGHQPQHF

SEQ ID NO: 605321 - protein, 15 aa, Homo sapiens
  CDR3 for alpha chain variable domain of TCR clone 302661 (TRAV3, TRAJ22)
CAVRDRSGSARQLTF

SEQ ID NO: 605322 - protein, 13 aa, Homo sapiens
  CDR3 for beta chain variable domain of TCR clone 302661 (TRBV2, TRBJ1-5)
CATAGPGNQPQHF

SEQ ID NO: 605323 - protein, 14 aa, Homo sapiens
  CDR3 for alpha chain variable domain of TCR clone 302662 (TRAV8-1, TRAJ23)
CAVGTYNQGGKLIF

SEQ ID NO: 605324 - protein, 16 aa, Homo sapiens
  CDR3 for beta chain variable domain of TCR clone 302662 (TRBV18, TRBJ1-5)
CASSPSTGNSNQHQHF

SEQ ID NO: 605325 - protein, 14 aa, Homo sapiens
  CDR3 for alpha chain variable domain of TCR clone 302663 (TRAV12-1, TRAJ30)
CVVNIGGRDDKIIF

SEQ ID NO: 605326 - protein, 14 aa, Homo sapiens
  CDR3 for beta chain variable domain of TCR clone 302663 (TRBV7-2, TRBJ1-2)
CASSQTGSTYGYTF

SEQ ID NO: 605327 - protein, 11 aa, Homo sapiens
  CDR3 for alpha chain variable domain of TCR clone 302664 (TRAV1-1, TRAJ16)
CAAGDGQKLLF

SEQ ID NO: 605328 - protein, 16 aa, Homo sapiens
  CDR3 for beta chain variable domain of TCR clone 302664 (TRBV2, TRBJ2-1)
CASSVGGSLSYNEQFF

SEQ ID NO: 605329 - protein, 11 aa, Homo sapiens
  CDR3 for alpha chain variable domain of TCR clone 302665 (TRAV2, TRAJ20)
CAVSDHYKLSF

SEQ ID NO: 605330 - protein, 20 aa, Homo sapiens
  CDR3 for beta chain variable domain of TCR clone 302665 (TRBV19, TRBJ2-1)
CASSISRTVTSTRLNNEQFF

SEQ ID NO: 605331 - protein, 14 aa, Homo sapiens
  CDR3 for alpha chain variable domain of TCR clone 302666 (TRAV12-1, TRAJ39)
CVVSLNNAGNMLTF

SEQ ID NO: 605332 - protein, 15 aa, Homo sapiens
  CDR3 for beta chain variable domain of TCR clone 302666 (TRBV28, TRBJ2-1)
CASSIIAGGRSEQFF

SEQ ID NO: 605333 - protein, 15 aa, Homo sapiens
  CDR3 for alpha chain variable domain of TCR clone 302667 (TRAV12-1, TRAJ37)
CVVNIMGANTGKLIF

SEQ ID NO: 605334 - protein, 12 aa, Homo sapiens
  CDR3 for beta chain variable domain of TCR clone 302667 (TRBV2, TRBJ2-7)
CASSRVGYEQYF

SEQ ID NO: 605335 - protein, 12 aa, Homo sapiens
  CDR3 for alpha chain variable domain of TCR clone 302668 (TRAV23/DV6, TRAJ16)
CVARGRGQKLLF

SEQ ID NO: 605336 - protein, 15 aa, Homo sapiens
  CDR3 for beta chain variable domain of TCR clone 302668 (TRBV15, TRBJ2-1)
CATSRPGQGLHEQFF

SEQ ID NO: 605337 - protein, 14 aa, Homo sapiens
  CDR3 for alpha chain variable domain of TCR clone 302669 (TRAV34, TRAJ44)
CGADGTGPASKLTF

SEQ ID NO: 605338 - protein, 12 aa, Homo sapiens
  CDR3 for beta chain variable domain of TCR clone 302669 (TRBV11-2, TRBJ2-2)
CASSLGGGELFF

SEQ ID NO: 605339 - protein, 22 aa, Homo sapiens
  CDR3 for alpha chain variable domain of TCR clone 302670 (TRAV8-3, TRAJ32)
CAVEVVLQTSSSLELALCLLSR

SEQ ID NO: 605340 - protein, 12 aa, Homo sapiens
  CDR3 for beta chain variable domain of TCR clone 302670 (TRBV7-8, TRBJ2-7)
CASSLGDREQYF

SEQ ID NO: 605341 - protein, 15 aa, Homo sapiens
  CDR3 for alpha chain variable domain of TCR clone 302671 (TRAV4, TRAJ36)
CLVGDRQTGANTLFF

SEQ ID NO: 605342 - protein, 15 aa, Homo sapiens
  CDR3 for beta chain variable domain of TCR clone 302671 (TRBV12-4, TRBJ2-1)
CASSFWGEGTREQFF

SEQ ID NO: 605343 - protein, 12 aa, Homo sapiens
  CDR3 for alpha chain variable domain of TCR clone 302672 (TRAV20, TRAJ54)
CAVQEGAQKLVF

SEQ ID NO: 605344 - protein, 14 aa, Homo sapiens
  CDR3 for beta chain variable domain of TCR clone 302672 (TRBV20-1, TRBJ2-5)
CSARDGRAGETQYF

SEQ ID NO: 605345 - protein, 13 aa, Homo sapiens
  CDR3 for alpha chain variable domain of TCR clone 302673 (TRAV17, TRAJ9)
CATDYTGGFKTIF

SEQ ID NO: 605346 - protein, 16 aa, Homo sapiens
  CDR3 for beta chain variable domain of TCR clone 302673 (TRBV19, TRBJ2-2)
CASSFPGQGLAGELFF

SEQ ID NO: 605347 - protein, 13 aa, Homo sapiens
  CDR3 for alpha chain variable domain of TCR clone 302674 (TRAV21, TRAJ27)
CAARPGNAGKLPF

SEQ ID NO: 605348 - protein, 15 aa, Homo sapiens
  CDR3 for beta chain variable domain of TCR clone 302674 (TRBV6-3, TRBJ2-7)
CASSSPGTVFYEQYF

SEQ ID NO: 605349 - protein, 15 aa, Homo sapiens
  CDR3 for alpha chain variable domain of TCR clone 302675 (TRAV21, TRAJ40)
CAVRPQTSGTYKYSF

SEQ ID NO: 605350 - protein, 13 aa, Homo sapiens
  CDR3 for beta chain variable domain of TCR clone 302675 (TRBV7-2, TRBJ2-2)
CASSSVRAGELFF

SEQ ID NO: 605351 - protein, 18 aa, Homo sapiens
  CDR3 for alpha chain variable domain of TCR clone 302676 (TRAV2, TRAJ32)
CCLLLCLHYGGATTKLIF

SEQ ID NO: 605352 - protein, 16 aa, Homo sapiens
  CDR3 for beta chain variable domain of TCR clone 302676 (TRBV7-9, TRBJ2-7)
CASSYPDREGGYEQYF

SEQ ID NO: 605353 - protein, 14 aa, Homo sapiens
  CDR3 for alpha chain variable domain of TCR clone 302677 (TRAV1-2, TRAJ16)
CAVNRFSYGQKLLF

SEQ ID NO: 605354 - protein, 15 aa, Homo sapiens
  CDR3 for beta chain variable domain of TCR clone 302677 (TRBV6-3, TRBJ2-7)
CASSSPGTVFYEQYF

SEQ ID NO: 605355 - protein, 15 aa, Homo sapiens
  CDR3 for alpha chain variable domain of TCR clone 302678 (TRAV17, TRAJ57)
CATGSSQGGSEKLVF

SEQ ID NO: 605356 - protein, 16 aa, Homo sapiens
  CDR3 for beta chain variable domain of TCR clone 302678 (TRBV12-4, TRBJ1-5)
CASSRPVGESNHPQHF

SEQ ID NO: 605357 - protein, 13 aa, Homo sapiens
  CDR3 for alpha chain variable domain of TCR clone 302679 (TRAV8-3, TRAJ44)
CAVVPGTASKPTF

SEQ ID NO: 605358 - protein, 14 aa, Homo sapiens
  CDR3 for beta chain variable domain of TCR clone 302679 (TRBV11-2, TRBJ2-3)
CASRRLARTDTQYF

SEQ ID NO: 605359 - protein, 18 aa, Homo sapiens
  CDR3 for alpha chain variable domain of TCR clone 302680 (TRAV12-3, TRAJ52)
CAMSVGGAGGTSYGKLTF

SEQ ID NO: 605360 - protein, 13 aa, Homo sapiens
  CDR3 for beta chain variable domain of TCR clone 302680 (TRBV28, TRBJ2-1)
CASSPLPSSEQFF

SEQ ID NO: 605361 - protein, 11 aa, Homo sapiens
  CDR3 for alpha chain variable domain of TCR clone 302681 (TRAV17, TRAJ9)
CATTGGFKTIF

SEQ ID NO: 605362 - protein, 14 aa, Homo sapiens
  CDR3 for beta chain variable domain of TCR clone 302681 (TRBV13, TRBJ1-1)
CASTVITVNTEAFF

SEQ ID NO: 605363 - protein, 18 aa, Homo sapiens
  CDR3 for alpha chain variable domain of TCR clone 302682 (TRAV21, TRAJ52)
CAVRPSPAGGTSYGKLTF

SEQ ID NO: 605364 - protein, 17 aa, Homo sapiens
  CDR3 for beta chain variable domain of TCR clone 302682 (TRBV13, TRBJ2-3)
CASSLSRVAGGGNMQYF

SEQ ID NO: 605365 - protein, 14 aa, Homo sapiens
  CDR3 for alpha chain variable domain of TCR clone 302683 (TRAV8-4, TRAJ54)
CAVSEVLGAQKLVC

SEQ ID NO: 605366 - protein, 13 aa, Homo sapiens
  CDR3 for beta chain variable domain of TCR clone 302683 (TRBV27, TRBJ2-7)
CASSFVSSYEQYF

SEQ ID NO: 605367 - protein, 16 aa, Homo sapiens
  CDR3 for alpha chain variable domain of TCR clone 302684 (TRAV8-6, TRAJ39)
CAVMLMNNNAGNMLTS

SEQ ID NO: 605368 - protein, 16 aa, Homo sapiens
  CDR3 for beta chain variable domain of TCR clone 302684 (TRBV15, TRBJ2-5)
CATSRYLEAAQETQYF

SEQ ID NO: 605369 - protein, 16 aa, Homo sapiens
  CDR3 for alpha chain variable domain of TCR clone 302685 (TRAV3, TRAJ37)
CAVRPHGSGNTGKLIF

SEQ ID NO: 605370 - protein, 13 aa, Homo sapiens
  CDR3 for beta chain variable domain of TCR clone 302685 (TRBV12-4, TRBJ2-7)
CASSFVPTAEQYF

SEQ ID NO: 605371 - protein, 14 aa, Homo sapiens
  CDR3 for alpha chain variable domain of TCR clone 302686 (TRAV16, TRAJ39)
CALGKNNAGNMLTF

SEQ ID NO: 605372 - protein, 17 aa, Homo sapiens
  CDR3 for beta chain variable domain of TCR clone 302686 (TRBV23-1, TRBJ1-2)
CASSNTGGGLLWLHLRF

SEQ ID NO: 605373 - protein, 12 aa, Homo sapiens
  CDR3 for alpha chain variable domain of TCR clone 302687 (TRAV12-1, TRAJ31)
FVSWNNNARLMF

SEQ ID NO: 605374 - protein, 15 aa, Homo sapiens
  CDR3 for beta chain variable domain of TCR clone 302687 (TRBV7-2, TRBJ1-5)
CASSLDRGQDQPQHF

SEQ ID NO: 605375 - protein, 15 aa, Homo sapiens
  CDR3 for alpha chain variable domain of TCR clone 302688 (TRAV3, TRAJ13)
FAVRVYSGGYQKVTF

SEQ ID NO: 605376 - protein, 15 aa, Homo sapiens
  CDR3 for beta chain variable domain of TCR clone 302688 (TRBV5-7, TRBJ1-2)
CASSLGVAANYGYTF

SEQ ID NO: 605377 - protein, 13 aa, Homo sapiens
  CDR3 for alpha chain variable domain of TCR clone 302689 (TRAV3, TRAJ27)
CAVRPLGAGKSTF

SEQ ID NO: 605378 - protein, 12 aa, Homo sapiens
  CDR3 for beta chain variable domain of TCR clone 302689 (TRBV14, TRBJ2-7)
CASSLYKDEQYF

SEQ ID NO: 605379 - protein, 14 aa, Homo sapiens
  CDR3 for alpha chain variable domain of TCR clone 302690 (TRAV12-2, TRAJ17)
CAVLFKAAGNKLTF

SEQ ID NO: 605380 - protein, 14 aa, Homo sapiens
  CDR3 for beta chain variable domain of TCR clone 302690 (TRBV4-1, TRBJ2-2)
CASSQGVNTGELFF

SEQ ID NO: 605381 - protein, 15 aa, Homo sapiens
  CDR3 for alpha chain variable domain of TCR clone 302691 (TRAV26-1, TRAJ22)
CIVRVSFWFCKATDL

SEQ ID NO: 605382 - protein, 15 aa, Homo sapiens
  CDR3 for beta chain variable domain of TCR clone 302691 (TRBV7-9, TRBJ1-4)
CASSRTGGFNEKLFF

SEQ ID NO: 605383 - protein, 15 aa, Homo sapiens
  CDR3 for alpha chain variable domain of TCR clone 302692 (TRAV26-1, TRAJ40)
CIVRAVPSGTYQYIF

SEQ ID NO: 605384 - protein, 16 aa, Homo sapiens
  CDR3 for beta chain variable domain of TCR clone 302692 (TRBV7-2, TRBJ2-2)
CASSLRGQANTGELFF

SEQ ID NO: 605385 - protein, 17 aa, Homo sapiens
  CDR3 for alpha chain variable domain of TCR clone 302693 (TRAV8-3, TRAJ34)
CAIPGKLIFGIGTRLQV

SEQ ID NO: 605386 - protein, 15 aa, Homo sapiens
  CDR3 for beta chain variable domain of TCR clone 302693 (TRBV5-7, TRBJ2-1)
CASSRRLAGDNEQFF

SEQ ID NO: 605387 - protein, 14 aa, Homo sapiens
  CDR3 for alpha chain variable domain of TCR clone 302694 (TRAV30, TRAJ33)
CGTVAPRSNYQLIW

SEQ ID NO: 605388 - protein, 14 aa, Homo sapiens
  CDR3 for beta chain variable domain of TCR clone 302694 (TRBV7-2, TRBJ2-7)
CASRSQGAAYEPYF

SEQ ID NO: 605389 - protein, 16 aa, Homo sapiens
  CDR3 for alpha chain variable domain of TCR clone 302695 (TRAV14/DV4, TRAJ15)
CAMREGPAQAGTALNF

SEQ ID NO: 605390 - protein, 12 aa, Homo sapiens
  CDR3 for beta chain variable domain of TCR clone 302695 (TRBV28, TRBJ2-6)
CAIQAGANVLTF

SEQ ID NO: 605391 - protein, 14 aa, Homo sapiens
  CDR3 for alpha chain variable domain of TCR clone 302696 (TRAV12-2, TRAJ44)
CAVNPAGTASKLTF

SEQ ID NO: 605392 - protein, 15 aa, Homo sapiens
  CDR3 for beta chain variable domain of TCR clone 302696 (TRBV7-8, TRBJ2-7)
CASSLRHFEAYEQYF

SEQ ID NO: 605393 - protein, 13 aa, Homo sapiens
  CDR3 for alpha chain variable domain of TCR clone 302697 (TRAV8-6, TRAJ49)
CAVITNTGNQFYF

SEQ ID NO: 605394 - protein, 11 aa, Homo sapiens
  CDR3 for beta chain variable domain of TCR clone 302697 (TRBV7-8, TRBJ2-7)
CASSLSLEQYF

SEQ ID NO: 605395 - protein, 14 aa, Homo sapiens
  CDR3 for alpha chain variable domain of TCR clone 302698 (TRAV12-2, TRAJ13)
CAVKKTGVYQKVTF

SEQ ID NO: 605396 - protein, 17 aa, Homo sapiens
  CDR3 for beta chain variable domain of TCR clone 302698 (TRBV4-1, TRBJ1-4)
CASSQEGPRGVEEKLFF

SEQ ID NO: 605397 - protein, 14 aa, Homo sapiens
  CDR3 for alpha chain variable domain of TCR clone 302699 (TRAV38-1, TRAJ45)
CASHSGGGADGLTF

SEQ ID NO: 605398 - protein, 15 aa, Homo sapiens
  CDR3 for beta chain variable domain of TCR clone 302699 (TRBV7-9, TRBJ1-4)
CASSATGGNNEKLFF

SEQ ID NO: 605399 - protein, 14 aa, Homo sapiens
  CDR3 for alpha chain variable domain of TCR clone 302700 (TRAV3, TRAJ9)
CAVRLNTGGSKTIF

SEQ ID NO: 605400 - protein, 15 aa, Homo sapiens
  CDR3 for beta chain variable domain of TCR clone 302700 (TRBV7-2, TRBJ2-1)
CASSLASGRVNERFF

SEQ ID NO: 605401 - protein, 13 aa, Homo sapiens
  CDR3 for alpha chain variable domain of TCR clone 302701 (TRAV20, TRAJ37)
FAGCSSNTGELIF

SEQ ID NO: 605402 - protein, 11 aa, Homo sapiens
  CDR3 for beta chain variable domain of TCR clone 302701 (TRBV12-4, TRBJ2-3)
CASTATDTQYF

SEQ ID NO: 605403 - protein, 15 aa, Homo sapiens
  CDR3 for alpha chain variable domain of TCR clone 302702 (TRAV12-2, TRAJ43)
CAFDMRFGAGTRLTV

SEQ ID NO: 605404 - protein, 13 aa, Homo sapiens
  CDR3 for beta chain variable domain of TCR clone 302702 (TRBV7-3, TRBJ2-1)
CASSLDSYNEQFF

SEQ ID NO: 605405 - protein, 14 aa, Homo sapiens
  CDR3 for alpha chain variable domain of TCR clone 302703 (TRAV26-1, TRAJ38)
CIADNAGKNRKLIW

SEQ ID NO: 605406 - protein, 14 aa, Homo sapiens
  CDR3 for beta chain variable domain of TCR clone 302703 (TRBV7-3, TRBJ1-1)
CASSLGTGYTEAFF

SEQ ID NO: 605407 - protein, 15 aa, Homo sapiens
  CDR3 for alpha chain variable domain of TCR clone 302704 (TRAV26-1, TRAJ29)
CIVRVEGSGNAPLVF

SEQ ID NO: 605408 - protein, 15 aa, Homo sapiens
  CDR3 for beta chain variable domain of TCR clone 302704 (TRBV7-9, TRBJ1-5)
CASSQGHQPNQAQHF

SEQ ID NO: 605409 - protein, 18 aa, Homo sapiens
  CDR3 for alpha chain variable domain of TCR clone 302705 (TRAV21, TRAJ52)
CAVRPSPAGGTSYGKLTF

SEQ ID NO: 605410 - protein, 14 aa, Homo sapiens
  CDR3 for beta chain variable domain of TCR clone 302705 (TRBV13, TRBJ2-1)
CASGLDRAYNEQFF

SEQ ID NO: 605411 - protein, 13 aa, Homo sapiens
  CDR3 for alpha chain variable domain of TCR clone 302706 (TRAV13-1, TRAJ39)
CAASIWAGDMLTF

SEQ ID NO: 605412 - protein, 15 aa, Homo sapiens
  CDR3 for beta chain variable domain of TCR clone 302706 (TRBV7-9, TRBJ1-1)
CASSLLEQGGTVAFF

SEQ ID NO: 605413 - protein, 14 aa, Homo sapiens
  CDR3 for alpha chain variable domain of TCR clone 302707 (TRAV6, TRAJ6)
CALPTSGGSFIPTF

SEQ ID NO: 605414 - protein, 17 aa, Homo sapiens
  CDR3 for beta chain variable domain of TCR clone 302707 (TRBV5-1, TRBJ2-5)
CASSPVALGQNQETQYF

SEQ ID NO: 605415 - protein, 20 aa, Homo sapiens
  CDR3 for alpha chain variable domain of TCR clone 302708 (TRAV12-1, TRAJ42)
SSVIQPPTSVKGGSQGNLIF

SEQ ID NO: 605416 - protein, 13 aa, Homo sapiens
  CDR3 for beta chain variable domain of TCR clone 302708 (TRBV7-2, TRBJ2-2)
CASSSVRAGELFF

SEQ ID NO: 605417 - protein, 14 aa, Homo sapiens
  CDR3 for alpha chain variable domain of TCR clone 302709 (TRAV2, TRAJ37)
CAVDFTSNTGKLIF

SEQ ID NO: 605418 - protein, 12 aa, Homo sapiens
  CDR3 for beta chain variable domain of TCR clone 302709 (TRBV7-2, TRBJ2-1)
CASSPQDIEQFF

SEQ ID NO: 605419 - protein, 12 aa, Homo sapiens
  CDR3 for alpha chain variable domain of TCR clone 302710 (TRAV12-1, TRAJ40)
CVFYSGTYKYIF

SEQ ID NO: 605420 - protein, 13 aa, Homo sapiens
  CDR3 for beta chain variable domain of TCR clone 302710 (TRBV27, TRBJ1-4)
CASSLMGDEKLFF

SEQ ID NO: 605421 - protein, 16 aa, Homo sapiens
  CDR3 for alpha chain variable domain of TCR clone 302711 (TRAV3, TRAJ32)
CAVRENCGGATNKLIF

SEQ ID NO: 605422 - protein, 12 aa, Homo sapiens
  CDR3 for beta chain variable domain of TCR clone 302711 (TRBV20-1, TRBJ1-2)
CSVTPEGYGYTF

SEQ ID NO: 605423 - protein, 12 aa, Homo sapiens
  CDR3 for alpha chain variable domain of TCR clone 302712 (TRAV8-6, TRAJ43)
CAVSNNNNYMRF

SEQ ID NO: 605424 - protein, 15 aa, Homo sapiens
  CDR3 for beta chain variable domain of TCR clone 302712 (TRBV7-3, TRBJ2-6)
CASSLGGSGANVLTF

SEQ ID NO: 605425 - protein, 18 aa, Homo sapiens
  CDR3 for alpha chain variable domain of TCR clone 302713 (TRAV21, TRAJ52)
CAVRPSPAGGTSYGKMTF

SEQ ID NO: 605426 - protein, 17 aa, Homo sapiens
  CDR3 for beta chain variable domain of TCR clone 302713 (TRBV13, TRBJ2-3)
CASSRSRVAGGRNTQYF

SEQ ID NO: 605427 - protein, 17 aa, Homo sapiens
  CDR3 for alpha chain variable domain of TCR clone 302714 (TRAV2, TRAJ36)
CAVEDRGNWGKQPLLWD

SEQ ID NO: 605428 - protein, 14 aa, Homo sapiens
  CDR3 for beta chain variable domain of TCR clone 302714 (TRBV7-9, TRBJ2-5)
CVSSLDTAQETQYF

SEQ ID NO: 605429 - protein, 15 aa, Homo sapiens
  CDR3 for alpha chain variable domain of TCR clone 302715 (TRAV12-3, TRAJ6)
CAMSATTVGSYIPTF

SEQ ID NO: 605430 - protein, 15 aa, Homo sapiens
  CDR3 for beta chain variable domain of TCR clone 302715 (TRBV5-1, TRBJ2-7)
CASSLNGGPAREQYF

SEQ ID NO: 605431 - protein, 14 aa, Homo sapiens
  CDR3 for alpha chain variable domain of TCR clone 302716 (TRAV2, TRAJ37)
CAVDFTSNTGKLIF

SEQ ID NO: 605432 - protein, 13 aa, Homo sapiens
  CDR3 for beta chain variable domain of TCR clone 302716 (TRBV7-9, TRBJ2-7)
CASSFAGAYEQYF

SEQ ID NO: 605433 - protein, 15 aa, Homo sapiens
  CDR3 for alpha chain variable domain of TCR clone 302717 (TRAV26-1, TRAJ39)
CIVRVARNAGNMLTF

SEQ ID NO: 605434 - protein, 15 aa, Homo sapiens
  CDR3 for beta chain variable domain of TCR clone 302717 (TRBV29-1, TRBJ2-7)
CSVESFDRGSYEQYF

SEQ ID NO: 605435 - protein, 11 aa, Homo sapiens
  CDR3 for alpha chain variable domain of TCR clone 302718 (TRAV12-2, TRAJ33)
CAVTSNYQLIW

SEQ ID NO: 605436 - protein, 12 aa, Homo sapiens
  CDR3 for beta chain variable domain of TCR clone 302718 (TRBV11-2, TRBJ2-2)
CASSLPTGELFF

SEQ ID NO: 605437 - protein, 11 aa, Homo sapiens
  CDR3 for alpha chain variable domain of TCR clone 302719 (TRAV21, TRAJ34)
CADYNTDKLIF

SEQ ID NO: 605438 - protein, 13 aa, Homo sapiens
  CDR3 for beta chain variable domain of TCR clone 302719 (TRBV7-6, TRBJ1-2)
CASSLVADYGYTF

SEQ ID NO: 605439 - protein, 12 aa, Homo sapiens
  CDR3 for alpha chain variable domain of TCR clone 302720 (TRAV8-3, TRAJ20)
CAVGANGYKLSF

SEQ ID NO: 605440 - protein, 15 aa, Homo sapiens
  CDR3 for beta chain variable domain of TCR clone 302720 (TRBV11-2, TRBJ2-1)
CASSLGTSGLNEQFF

SEQ ID NO: 605441 - protein, 14 aa, Homo sapiens
  CDR3 for alpha chain variable domain of TCR clone 302721 (TRAV1-2, TRAJ16)
CAVNRFSDGQKLLF

SEQ ID NO: 605442 - protein, 21 aa, Homo sapiens
  CDR3 for beta chain variable domain of TCR clone 302721 (TRBV7-9, TRBJ1-6)
CASSSPGRKFTPPLWERDQAH

SEQ ID NO: 605443 - protein, 12 aa, Homo sapiens
  CDR3 for alpha chain variable domain of TCR clone 302722 (TRAV23/DV6, TRAJ30)
CAASKGDDKLIF

SEQ ID NO: 605444 - protein, 17 aa, Homo sapiens
  CDR3 for beta chain variable domain of TCR clone 302722 (TRBV13, TRBJ2-3)
CASSLSRVAGGRNTQYF

SEQ ID NO: 605445 - protein, 11 aa, Homo sapiens
  CDR3 for alpha chain variable domain of TCR clone 302723 (TRAV1-2, TRAJ34)
CAVQKTDKLIF

SEQ ID NO: 605446 - protein, 16 aa, Homo sapiens
  CDR3 for beta chain variable domain of TCR clone 302723 (TRBV4-1, TRBJ2-7)
CASSQVGGRGNYEQYF

SEQ ID NO: 605447 - protein, 15 aa, Homo sapiens
  CDR3 for alpha chain variable domain of TCR clone 302724 (TRAV2, TRAJ9)
CAVQDRGTGGFKTIF

SEQ ID NO: 605448 - protein, 16 aa, Homo sapiens
  CDR3 for beta chain variable domain of TCR clone 302724 (TRBV24-1, TRBJ2-3)
CATSDPGTGATDTQYF

SEQ ID NO: 605449 - protein, 12 aa, Homo sapiens
  CDR3 for alpha chain variable domain of TCR clone 302725 (TRAV3, TRAJ20)
CAVRDPDYKLSF

SEQ ID NO: 605450 - protein, 15 aa, Homo sapiens
  CDR3 for beta chain variable domain of TCR clone 302725 (TRBV2, TRBJ2-2)
CASSRETVGTGELSF

SEQ ID NO: 605451 - protein, 12 aa, Homo sapiens
  CDR3 for alpha chain variable domain of TCR clone 302726 (TRAV3, TRAJ43)
CAVRDPNNDMRF

SEQ ID NO: 605452 - protein, 15 aa, Homo sapiens
  CDR3 for beta chain variable domain of TCR clone 302726 (TRBV6-5, TRBJ2-1)
CASSYHAGAGNEQFF

SEQ ID NO: 605453 - protein, 14 aa, Homo sapiens
  CDR3 for alpha chain variable domain of TCR clone 302727 (TRAV1-2, TRAJ8)
CAVREDTGFQKLVF

SEQ ID NO: 605454 - protein, 12 aa, Homo sapiens
  CDR3 for beta chain variable domain of TCR clone 302727 (TRBV20-1, TRBJ2-5)
CSAGGAGETQYF

SEQ ID NO: 605455 - protein, 13 aa, Homo sapiens
  CDR3 for alpha chain variable domain of TCR clone 302728 (TRAV3, TRAJ8)
CAVRFTGFQKLVF

SEQ ID NO: 605456 - protein, 11 aa, Homo sapiens
  CDR3 for beta chain variable domain of TCR clone 302728 (TRBV2, TRBJ1-2)
CQQWQTYGYTF

SEQ ID NO: 605457 - protein, 13 aa, Homo sapiens
  CDR3 for alpha chain variable domain of TCR clone 302729 (TRAV36/DV7, TRAJ57)
CAVVLGGSEKLVF

SEQ ID NO: 605458 - protein, 14 aa, Homo sapiens
  CDR3 for beta chain variable domain of TCR clone 302729 (TRBV4-1, TRBJ1-2)
CASSQDGQVRGDTF

SEQ ID NO: 605459 - protein, 13 aa, Homo sapiens
  CDR3 for alpha chain variable domain of TCR clone 302730 (TRAV21, TRAJ20)
CAVGLRVDYKLSF

SEQ ID NO: 605460 - protein, 17 aa, Homo sapiens
  CDR3 for beta chain variable domain of TCR clone 302730 (TRBV7-8, TRBJ1-5)
CASSREGGADQPSILVM

SEQ ID NO: 605461 - protein, 11 aa, Homo sapiens
  CDR3 for alpha chain variable domain of TCR clone 302731 (TRAV13-1, TRAJ15)
CAATPGTALIF

SEQ ID NO: 605462 - protein, 13 aa, Homo sapiens
  CDR3 for beta chain variable domain of TCR clone 302731 (TRBV7-2, TRBJ2-1)
CASSLGVYNEQIF

SEQ ID NO: 605463 - protein, 11 aa, Homo sapiens
  CDR3 for alpha chain variable domain of TCR clone 302732 (TRAV12-2, TRAJ49)
CAVSGGNQFYF

SEQ ID NO: 605464 - protein, 16 aa, Homo sapiens
  CDR3 for beta chain variable domain of TCR clone 302732 (TRBV19, TRBJ1-2)
CASSIGSNRDGYGYTF

SEQ ID NO: 605465 - protein, 14 aa, Homo sapiens
  CDR3 for alpha chain variable domain of TCR clone 302733 (TRAV17, TRAJ35)
CATDRPGFGNVLHC

SEQ ID NO: 605466 - protein, 13 aa, Homo sapiens
  CDR3 for beta chain variable domain of TCR clone 302733 (TRBV7-9, TRBJ1-2)
CASSLKQNYGYTF

SEQ ID NO: 605467 - protein, 14 aa, Homo sapiens
  CDR3 for alpha chain variable domain of TCR clone 302734 (TRAV13-1, TRAJ44)
CASKATGTASKLTF

SEQ ID NO: 605468 - protein, 16 aa, Homo sapiens
  CDR3 for beta chain variable domain of TCR clone 302734 (TRBV7-9, TRBJ2-6)
CASSLKGPLRANVLYF

SEQ ID NO: 605469 - protein, 13 aa, Homo sapiens
  CDR3 for alpha chain variable domain of TCR clone 302735 (TRAV12-1, TRAJ26)
CVVRRNYGQNFVF

SEQ ID NO: 605470 - protein, 13 aa, Homo sapiens
  CDR3 for beta chain variable domain of TCR clone 302735 (TRBV12-4, TRBJ1-1)
CASSPGTGFEAFF

SEQ ID NO: 605471 - protein, 11 aa, Homo sapiens
  CDR3 for alpha chain variable domain of TCR clone 302736 (TRAV12-1, TRAJ37)
CVVNTPGKLIF

SEQ ID NO: 605472 - protein, 13 aa, Homo sapiens
  CDR3 for beta chain variable domain of TCR clone 302736 (TRBV7-6, TRBJ1-2)
CASSLVADYGYTF

SEQ ID NO: 605473 - protein, 16 aa, Homo sapiens
  CDR3 for alpha chain variable domain of TCR clone 302737 (TRAV14/DV4, TRAJ21)
CAMREGPENNFNKFYF

SEQ ID NO: 605474 - protein, 13 aa, Homo sapiens
  CDR3 for beta chain variable domain of TCR clone 302737 (TRBV7-9, TRBJ1-1)
CASSLSGETEAFF

SEQ ID NO: 605475 - protein, 12 aa, Homo sapiens
  CDR3 for alpha chain variable domain of TCR clone 302738 (TRAV8-3, TRAJ26)
CAGANYGQNFVF

SEQ ID NO: 605476 - protein, 12 aa, Homo sapiens
  CDR3 for beta chain variable domain of TCR clone 302738 (TRBV11-2, TRBJ2-1)
CASSPGNNEQFF

SEQ ID NO: 605477 - protein, 13 aa, Homo sapiens
  CDR3 for alpha chain variable domain of TCR clone 302739 (TRAV35, TRAJ27)
CAGQEGDAGKSTF

SEQ ID NO: 605478 - protein, 16 aa, Homo sapiens
  CDR3 for beta chain variable domain of TCR clone 302739 (TRBV7-2, TRBJ2-5)
CAGSYKTGISLETQYF

SEQ ID NO: 605479 - protein, 12 aa, Homo sapiens
  CDR3 for alpha chain variable domain of TCR clone 302740 (TRAV12-2, TRAJ10)
WGVTGGGNKLTF

SEQ ID NO: 605480 - protein, 16 aa, Homo sapiens
  CDR3 for beta chain variable domain of TCR clone 302740 (TRBV6-4, TRBJ1-2)
CDSSEAVGDPNYGYTF

SEQ ID NO: 605481 - protein, 14 aa, Homo sapiens
  CDR3 for alpha chain variable domain of TCR clone 302741 (TRAV34, TRAJ44)
CGADGTGTASKLTF

SEQ ID NO: 605482 - protein, 14 aa, Homo sapiens
  CDR3 for beta chain variable domain of TCR clone 302741 (TRBV11-3, TRBJ2-7)
CASSPDRNTYEQYF

SEQ ID NO: 605483 - protein, 13 aa, Homo sapiens
  CDR3 for alpha chain variable domain of TCR clone 302742 (TRAV12-2, TRAJ49)
CAVNLNTGNQVYF

SEQ ID NO: 605484 - protein, 11 aa, Homo sapiens
  CDR3 for beta chain variable domain of TCR clone 302742 (TRBV11-2, TRBJ2-2)
CASSLPGELFF

SEQ ID NO: 605485 - protein, 14 aa, Homo sapiens
  CDR3 for alpha chain variable domain of TCR clone 302743 (TRAV30, TRAJ33)
CGTVTPRSNYQLIW

SEQ ID NO: 605486 - protein, 16 aa, Homo sapiens
  CDR3 for beta chain variable domain of TCR clone 302743 (TRBV3-1, TRBJ2-5)
CASSPGQLNGFGTQYF

SEQ ID NO: 605487 - protein, 16 aa, Homo sapiens
  CDR3 for alpha chain variable domain of TCR clone 302744 (TRAV3, TRAJ21)
CAVRDIERGNFNKFYF

SEQ ID NO: 605488 - protein, 16 aa, Homo sapiens
  CDR3 for beta chain variable domain of TCR clone 302744 (TRBV12-4, TRBJ1-5)
CASSRPVGGSNQPQQF

SEQ ID NO: 605489 - protein, 11 aa, Homo sapiens
  CDR3 for alpha chain variable domain of TCR clone 302745 (TRAV2, TRAJ33)
CAVDSNYQLIW

SEQ ID NO: 605490 - protein, 14 aa, Homo sapiens
  CDR3 for beta chain variable domain of TCR clone 302745 (TRBV7-8, TRBJ2-3)
CASSLEAETDTQYF

SEQ ID NO: 605491 - protein, 23 aa, Homo sapiens
  CDR3 for alpha chain variable domain of TCR clone 302746 (TRAV3, TRAJ17)
CSVRARRGGRSCRQQANFWRMNQ

SEQ ID NO: 605492 - protein, 14 aa, Homo sapiens
  CDR3 for beta chain variable domain of TCR clone 302746 (TRBV4-1, TRBJ2-2)
CASSQAVNTGELFF

SEQ ID NO: 605493 - protein, 13 aa, Homo sapiens
  CDR3 for alpha chain variable domain of TCR clone 302747 (TRAV9-2, TRAJ23)
CALSGDQGGKLSF

SEQ ID NO: 605494 - protein, 13 aa, Homo sapiens
  CDR3 for beta chain variable domain of TCR clone 302747 (TRBV20-1, TRBJ2-5)
CSARRGTGATQYF

SEQ ID NO: 605495 - protein, 12 aa, Homo sapiens
  CDR3 for alpha chain variable domain of TCR clone 302748 (TRAV12-3, TRAJ17)
CAMTLTGKKLTF

SEQ ID NO: 605496 - protein, 15 aa, Homo sapiens
  CDR3 for beta chain variable domain of TCR clone 302748 (TRBV5-7, TRBJ2-7)
CASSPYFEGSYEQYF

SEQ ID NO: 605497 - protein, 14 aa, Homo sapiens
  CDR3 for alpha chain variable domain of TCR clone 302749 (TRAV29/DV5, TRAJ44)
CAAFLVGTASKLTF

SEQ ID NO: 605498 - protein, 14 aa, Homo sapiens
  CDR3 for beta chain variable domain of TCR clone 302749 (TRBV7-2, TRBJ2-7)
CASSPKTSFYEQYF

SEQ ID NO: 605499 - protein, 10 aa, Homo sapiens
  CDR3 for alpha chain variable domain of TCR clone 302750 (TRAV16, TRAJ22)
SAMDLRQLTF

SEQ ID NO: 605500 - protein, 15 aa, Homo sapiens
  CDR3 for beta chain variable domain of TCR clone 302750 (TRBV7-9, TRBJ1-6)
CASSSPGRGNSPLHF

SEQ ID NO: 605501 - protein, 12 aa, Homo sapiens
  CDR3 for alpha chain variable domain of TCR clone 302751 (TRAV13-2, TRAJ23)
CAERHRGGKLIF

SEQ ID NO: 605502 - protein, 13 aa, Homo sapiens
  CDR3 for beta chain variable domain of TCR clone 302751 (TRBV20-1, TRBJ1-2)
CSASTERIYGYTF

SEQ ID NO: 605503 - protein, 14 aa, Homo sapiens
  CDR3 for alpha chain variable domain of TCR clone 302752 (TRAV20, TRAJ10)
CAVRVEGGGNKLTF

SEQ ID NO: 605504 - protein, 18 aa, Homo sapiens
  CDR3 for beta chain variable domain of TCR clone 302752 (TRBV24-1, TRBJ2-1)
CATSDLMFLGREVHEQFF

SEQ ID NO: 605505 - protein, 16 aa, Homo sapiens
  CDR3 for alpha chain variable domain of TCR clone 302753 (TRAV8-3, TRAJ42)
CAVGEGNGGSQGNLIF

SEQ ID NO: 605506 - protein, 14 aa, Homo sapiens
  CDR3 for beta chain variable domain of TCR clone 302753 (TRBV4-1, TRBJ2-5)
CASSRSGSGETQYF

SEQ ID NO: 605507 - protein, 12 aa, Homo sapiens
  CDR3 for alpha chain variable domain of TCR clone 302754 (TRAV13-1, TRAJ21)
CAAKEGFNKFYF

SEQ ID NO: 605508 - protein, 15 aa, Homo sapiens
  CDR3 for beta chain variable domain of TCR clone 302754 (TRBV12-4, TRBJ2-5)
CASSPPTGVQETQYF

SEQ ID NO: 605509 - protein, 11 aa, Homo sapiens
  CDR3 for alpha chain variable domain of TCR clone 302755 (TRAV35, TRAJ52)
CAGTPKGKLTF

SEQ ID NO: 605510 - protein, 11 aa, Homo sapiens
  CDR3 for beta chain variable domain of TCR clone 302755 (TRBV12-4, TRBJ2-3)
CASTATDTQYF

SEQ ID NO: 605511 - protein, 12 aa, Homo sapiens
  CDR3 for alpha chain variable domain of TCR clone 302756 (TRAV16, TRAJ10)
CSCTGGGNKLTF

SEQ ID NO: 605512 - protein, 14 aa, Homo sapiens
  CDR3 for beta chain variable domain of TCR clone 302756 (TRBV19, TRBJ2-1)
CASPTFVLSGEQFF

SEQ ID NO: 605513 - protein, 15 aa, Homo sapiens
  CDR3 for alpha chain variable domain of TCR clone 302757 (TRAV21, TRAJ53)
CATLNSGGSNYKLTC

SEQ ID NO: 605514 - protein, 16 aa, Homo sapiens
  CDR3 for beta chain variable domain of TCR clone 302757 (TRBV9, TRBJ2-1)
CASSVGGGGNYNEQFF

SEQ ID NO: 605515 - protein, 15 aa, Homo sapiens
  CDR3 for alpha chain variable domain of TCR clone 302758 (TRAV12-1, TRAJ44)
CVADLPTGTASKLTF

SEQ ID NO: 605516 - protein, 13 aa, Homo sapiens
  CDR3 for beta chain variable domain of TCR clone 302758 (TRBV20-1, TRBJ2-5)
CSARGDDQETQYF

SEQ ID NO: 605517 - protein, 12 aa, Homo sapiens
  CDR3 for alpha chain variable domain of TCR clone 302759 (TRAV12-2, TRAJ49)
CAVFNTGNQFYF

SEQ ID NO: 605518 - protein, 14 aa, Homo sapiens
  CDR3 for beta chain variable domain of TCR clone 302759 (TRBV5-4, TRBJ2-3)
CASSLGQGADTQYF

SEQ ID NO: 605519 - protein, 13 aa, Homo sapiens
  CDR3 for alpha chain variable domain of TCR clone 302760 (TRAV27, TRAJ27)
CAGKDTNAGKSTF

SEQ ID NO: 605520 - protein, 16 aa, Homo sapiens
  CDR3 for beta chain variable domain of TCR clone 302760 (TRBV10-3, TRBJ2-1)
CAISGVGDGGGGEQFF

SEQ ID NO: 605521 - protein, 14 aa, Homo sapiens
  CDR3 for alpha chain variable domain of TCR clone 302761 (TRAV12-2, TRAJ13)
CGVKKTGGYQKVTF

SEQ ID NO: 605522 - protein, 16 aa, Homo sapiens
  CDR3 for beta chain variable domain of TCR clone 302761 (TRBV2, TRBJ2-1)
CASRSPAGGKYNEQFF

SEQ ID NO: 605523 - protein, 14 aa, Homo sapiens
  CDR3 for alpha chain variable domain of TCR clone 302762 (TRAV8-6, TRAJ54)
CAVSDFQGAQKLVF

SEQ ID NO: 605524 - protein, 12 aa, Homo sapiens
  CDR3 for beta chain variable domain of TCR clone 302762 (TRBV7-9, TRBJ2-7)
CASSIKREEQYF

SEQ ID NO: 605525 - protein, 14 aa, Homo sapiens
  CDR3 for alpha chain variable domain of TCR clone 302763 (TRAV2, TRAJ41)
CAVGTSISGYALNF

SEQ ID NO: 605526 - protein, 13 aa, Homo sapiens
  CDR3 for beta chain variable domain of TCR clone 302763 (TRBV4-1, TRBJ2-1)
CASSQEVQYEQFF

SEQ ID NO: 605527 - protein, 12 aa, Homo sapiens
  CDR3 for alpha chain variable domain of TCR clone 302764 (TRAV12-3, TRAJ17)
CAMTLTGNKLTF

SEQ ID NO: 605528 - protein, 14 aa, Homo sapiens
  CDR3 for beta chain variable domain of TCR clone 302764 (TRBV7-2, TRBJ2-2)
CASSLNSNTGELFF

SEQ ID NO: 605529 - protein, 15 aa, Homo sapiens
  CDR3 for alpha chain variable domain of TCR clone 302765 (TRAV17, TRAJ52)
CATEAGCTSYGKLTF

SEQ ID NO: 605530 - protein, 14 aa, Homo sapiens
  CDR3 for beta chain variable domain of TCR clone 302765 (TRBV28, TRBJ1-5)
CASSLGVLVKPQHF

SEQ ID NO: 605531 - protein, 15 aa, Homo sapiens
  CDR3 for alpha chain variable domain of TCR clone 302766 (TRAV20, TRAJ23)
CAVQAVRNQGGKLIF

SEQ ID NO: 605532 - protein, 14 aa, Homo sapiens
  CDR3 for beta chain variable domain of TCR clone 302766 (TRBV19, TRBJ2-1)
CASPTFVLSGEQFF

SEQ ID NO: 605533 - protein, 13 aa, Homo sapiens
  CDR3 for alpha chain variable domain of TCR clone 302767 (TRAV35, TRAJ37)
CAGSSGNTGKLIF

SEQ ID NO: 605534 - protein, 16 aa, Homo sapiens
  CDR3 for beta chain variable domain of TCR clone 302767 (TRBV10-3, TRBJ2-1)
CAISLTSGNSYNAQFF

SEQ ID NO: 605535 - protein, 15 aa, Homo sapiens
  CDR3 for alpha chain variable domain of TCR clone 302768 (TRAV3, TRAJ3)
CAVIDGHSSASKIIF

SEQ ID NO: 605536 - protein, 17 aa, Homo sapiens
  CDR3 for beta chain variable domain of TCR clone 302768 (TRBV25-1, TRBJ2-7)
CASSDARVVFSSYEQYF

SEQ ID NO: 605537 - protein, 13 aa, Homo sapiens
  CDR3 for alpha chain variable domain of TCR clone 302769 (TRAV12-1, TRAJ10)
CVVSTGGGNKLTF

SEQ ID NO: 605538 - protein, 16 aa, Homo sapiens
  CDR3 for beta chain variable domain of TCR clone 302769 (TRBV12-4, TRBJ1-5)
CASSRPVGGSNQPQHY

SEQ ID NO: 605539 - protein, 12 aa, Homo sapiens
  CDR3 for alpha chain variable domain of TCR clone 302770 (TRAV1-2, TRAJ7)
CAVAYGNNRLAF

SEQ ID NO: 605540 - protein, 16 aa, Homo sapiens
  CDR3 for beta chain variable domain of TCR clone 302770 (TRBV5-1, TRBJ2-7)
CASSPMTGARSYEQYF

SEQ ID NO: 605541 - protein, 17 aa, Homo sapiens
  CDR3 for alpha chain variable domain of TCR clone 302771 (TRAV26-1, TRAJ53)
CIVRVDDSGGSDYKLTF

SEQ ID NO: 605542 - protein, 13 aa, Homo sapiens
  CDR3 for beta chain variable domain of TCR clone 302771 (TRBV19, TRBJ2-7)
CASSTSGSYEQYF

SEQ ID NO: 605543 - protein, 12 aa, Homo sapiens
  CDR3 for alpha chain variable domain of TCR clone 302772 (TRAV13-1, TRAJ9)
CASHTGGSKTIF

SEQ ID NO: 605544 - protein, 18 aa, Homo sapiens
  CDR3 for beta chain variable domain of TCR clone 302772 (TRBV11-2, TRBJ2-3)
CASSLGGASRGAPNTQYF

SEQ ID NO: 605545 - protein, 11 aa, Homo sapiens
  CDR3 for alpha chain variable domain of TCR clone 302773 (TRAV26-1, TRAJ37)
CIVRVGRKLIF

SEQ ID NO: 605546 - protein, 14 aa, Homo sapiens
  CDR3 for beta chain variable domain of TCR clone 302773 (TRBV5-4, TRBJ1-1)
CASSLDSRRDEAFF

SEQ ID NO: 605547 - protein, 23 aa, Homo sapiens
  CDR3 for alpha chain variable domain of TCR clone 302774 (TRAV12-3, TRAJ32)
PVIQPPTFVQRRVYGGATNKLIF

SEQ ID NO: 605548 - protein, 15 aa, Homo sapiens
  CDR3 for beta chain variable domain of TCR clone 302774 (TRBV27, TRBJ1-6)
CASSFDRGLGSPLHF

SEQ ID NO: 605549 - protein, 14 aa, Homo sapiens
  CDR3 for alpha chain variable domain of TCR clone 302775 (TRAV38-1, TRAJ40)
CALRPTPGTYKYIF

SEQ ID NO: 605550 - protein, 14 aa, Homo sapiens
  CDR3 for beta chain variable domain of TCR clone 302775 (TRBV25-1, TRBJ1-1)
CASTQLGGNTEAFF

SEQ ID NO: 605551 - protein, 14 aa, Homo sapiens
  CDR3 for alpha chain variable domain of TCR clone 302776 (TRAV3, TRAJ20)
CAVPPPPNDYKLSF

SEQ ID NO: 605552 - protein, 13 aa, Homo sapiens
  CDR3 for beta chain variable domain of TCR clone 302776 (TRBV15, TRBJ1-2)
CATSRVDARSPVF

SEQ ID NO: 605553 - protein, 15 aa, Homo sapiens
  CDR3 for alpha chain variable domain of TCR clone 302777 (TRAV14/DV4, TRAJ33)
CAMREGRDSNYQLIW

SEQ ID NO: 605554 - protein, 15 aa, Homo sapiens
  CDR3 for beta chain variable domain of TCR clone 302777 (TRBV5-5, TRBJ1-5)
CASSSTPGSIQPQHF

SEQ ID NO: 605555 - protein, 13 aa, Homo sapiens
  CDR3 for alpha chain variable domain of TCR clone 302778 (TRAV3, TRAJ30)
CAVRDRGEDKIIL

SEQ ID NO: 605556 - protein, 16 aa, Homo sapiens
  CDR3 for beta chain variable domain of TCR clone 302778 (TRBV7-3, TRBJ2-2)
CASSLKRGTLSGELFC

SEQ ID NO: 605557 - protein, 14 aa, Homo sapiens
  CDR3 for alpha chain variable domain of TCR clone 302779 (TRAV8-3, TRAJ4)
CAVGAAGGYNKLIF

SEQ ID NO: 605558 - protein, 15 aa, Homo sapiens
  CDR3 for beta chain variable domain of TCR clone 302779 (TRBV7-3, TRBJ2-7)
CASSLTPTGYDEQYF

SEQ ID NO: 605559 - protein, 14 aa, Homo sapiens
  CDR3 for alpha chain variable domain of TCR clone 302780 (TRAV8-3, TRAJ10)
CAVGNAGGGNKLTF

SEQ ID NO: 605560 - protein, 19 aa, Homo sapiens
  CDR3 for beta chain variable domain of TCR clone 302780 (TRBV19, TRBJ2-5)
CASSIGQVTDFFLGETQYF

SEQ ID NO: 605561 - protein, 13 aa, Homo sapiens
  CDR3 for alpha chain variable domain of TCR clone 302781 (TRAV12-2, TRAJ26)
CAVNENYGQNFVL

SEQ ID NO: 605562 - protein, 13 aa, Homo sapiens
  CDR3 for beta chain variable domain of TCR clone 302781 (TRBV18, TRBJ2-2)
CASSPTRGGELFF

SEQ ID NO: 605563 - protein, 14 aa, Homo sapiens
  CDR3 for alpha chain variable domain of TCR clone 302782 (TRAV1-2, TRAJ8)
CAVREDTGFQKLLF

SEQ ID NO: 605564 - protein, 15 aa, Homo sapiens
  CDR3 for beta chain variable domain of TCR clone 302782 (TRBV28, TRBJ2-6)
CASSLAGSGANVLTF

SEQ ID NO: 605565 - protein, 13 aa, Homo sapiens
  CDR3 for alpha chain variable domain of TCR clone 302783 (TRAV12-1, TRAJ15)
CVAQNQAGTALIF

SEQ ID NO: 605566 - protein, 16 aa, Homo sapiens
  CDR3 for beta chain variable domain of TCR clone 302783 (TRBV7-3, TRBJ2-3)
CASSPTGYQSTDTQYF

SEQ ID NO: 605567 - protein, 14 aa, Homo sapiens
  CDR3 for alpha chain variable domain of TCR clone 302784 (TRAV20, TRAJ37)
CAVQSSSNTGKLIF

SEQ ID NO: 605568 - protein, 14 aa, Homo sapiens
  CDR3 for beta chain variable domain of TCR clone 302784 (TRBV9, TRBJ1-2)
CASSVSTRSYGYTF

SEQ ID NO: 605569 - protein, 14 aa, Homo sapiens
  CDR3 for alpha chain variable domain of TCR clone 302785 (TRAV17, TRAJ57)
CATDPQGGSEKLVF

SEQ ID NO: 605570 - protein, 12 aa, Homo sapiens
  CDR3 for beta chain variable domain of TCR clone 302785 (TRBV7-9, TRBJ2-7)
CASSIKREEQYF

SEQ ID NO: 605571 - protein, 13 aa, Homo sapiens
  CDR3 for alpha chain variable domain of TCR clone 302786 (TRAV21, TRAJ27)
CAARPGNACKSTF

SEQ ID NO: 605572 - protein, 16 aa, Homo sapiens
  CDR3 for beta chain variable domain of TCR clone 302786 (TRBV20-1, TRBJ1-2)
CSASMGQGVANYGYTF

SEQ ID NO: 605573 - protein, 12 aa, Homo sapiens
  CDR3 for alpha chain variable domain of TCR clone 302787 (TRAV26-1, TRAJ26)
CIVFIYGQNFVF

SEQ ID NO: 605574 - protein, 12 aa, Homo sapiens
  CDR3 for beta chain variable domain of TCR clone 302787 (TRBV28, TRBJ2-7)
CASSVSSYEQYF

SEQ ID NO: 605575 - protein, 13 aa, Homo sapiens
  CDR3 for alpha chain variable domain of TCR clone 302788 (TRAV8-3, TRAJ43)
CAVVPYYNNDMRF

SEQ ID NO: 605576 - protein, 16 aa, Homo sapiens
  CDR3 for beta chain variable domain of TCR clone 302788 (TRBV7-2, TRBJ2-5)
CASSPFPTGGEETQYV

SEQ ID NO: 605577 - protein, 16 aa, Homo sapiens
  CDR3 for alpha chain variable domain of TCR clone 302789 (TRAV30, TRAJ24)
CGTEIVDADSWGKFQF

SEQ ID NO: 605578 - protein, 14 aa, Homo sapiens
  CDR3 for beta chain variable domain of TCR clone 302789 (TRBV5-5, TRBJ1-2)
CASSLDPYNYGYAF

SEQ ID NO: 605579 - protein, 13 aa, Homo sapiens
  CDR3 for alpha chain variable domain of TCR clone 302790 (TRAV3, TRAJ3)
CAVRDGEKQYFQD

SEQ ID NO: 605580 - protein, 13 aa, Homo sapiens
  CDR3 for beta chain variable domain of TCR clone 302790 (TRBV10-3, TRBJ2-7)
CASKLAVNYEQYF

SEQ ID NO: 605581 - protein, 13 aa, Homo sapiens
  CDR3 for alpha chain variable domain of TCR clone 302791 (TRAV35, TRAJ37)
CAGSSGNTGKLIL

SEQ ID NO: 605582 - protein, 16 aa, Homo sapiens
  CDR3 for beta chain variable domain of TCR clone 302791 (TRBV10-3, TRBJ2-1)
CAISLTSGNSYNEQFF

SEQ ID NO: 605583 - protein, 16 aa, Homo sapiens
  CDR3 for alpha chain variable domain of TCR clone 302792 (TRAV26-1, TRAJ38)
CIVRVELGGNNRKLIW

SEQ ID NO: 605584 - protein, 13 aa, Homo sapiens
  CDR3 for beta chain variable domain of TCR clone 302792 (TRBV5-1, TRBJ2-3)
RSSPGLAADTQYF

SEQ ID NO: 605585 - protein, 16 aa, Homo sapiens
  CDR3 for alpha chain variable domain of TCR clone 302793 (TRAV40, TRAJ53)
CLLGDYSGGSNYKLTF

SEQ ID NO: 605586 - protein, 15 aa, Homo sapiens
  CDR3 for beta chain variable domain of TCR clone 302793 (TRBV19, TRBJ2-4)
CASRGPRRGENIQYF

SEQ ID NO: 605587 - protein, 15 aa, Homo sapiens
  CDR3 for alpha chain variable domain of TCR clone 302794 (TRAV23/DV6, TRAJ38)
CAASGGAGNHRKLSW

SEQ ID NO: 605588 - protein, 13 aa, Homo sapiens
  CDR3 for beta chain variable domain of TCR clone 302794 (TRBV7-2, TRBJ1-2)
CASSLPGLYGYTF

SEQ ID NO: 605589 - protein, 13 aa, Homo sapiens
  CDR3 for alpha chain variable domain of TCR clone 302795 (TRAV17, TRAJ9)
CATDGTGGFKTIF

SEQ ID NO: 605590 - protein, 11 aa, Homo sapiens
  CDR3 for beta chain variable domain of TCR clone 302795 (TRBV7-9, TRBJ2-3)
CASSPTDTQYF

SEQ ID NO: 605591 - protein, 12 aa, Homo sapiens
  CDR3 for alpha chain variable domain of TCR clone 302796 (TRAV36/DV7, TRAJ54)
CAVVRGAQKLVF

SEQ ID NO: 605592 - protein, 14 aa, Homo sapiens
  CDR3 for beta chain variable domain of TCR clone 302796 (TRBV7-3, TRBJ1-1)
CASSLKGGNTEAFV

SEQ ID NO: 605593 - protein, 14 aa, Homo sapiens
  CDR3 for alpha chain variable domain of TCR clone 302797 (TRAV16, TRAJ16)
CALSVLSDGQKLLF

SEQ ID NO: 605594 - protein, 12 aa, Homo sapiens
  CDR3 for beta chain variable domain of TCR clone 302797 (TRBV5-5, TRBJ1-2)
CASSALNYGYSF

SEQ ID NO: 605595 - protein, 15 aa, Homo sapiens
  CDR3 for alpha chain variable domain of TCR clone 302798 (TRAV25, TRAJ23)
CALAPNYNQVGKLIF

SEQ ID NO: 605596 - protein, 13 aa, Homo sapiens
  CDR3 for beta chain variable domain of TCR clone 302798 (TRBV11-3, TRBJ1-1)
CASSWDGNTEAFF

SEQ ID NO: 605597 - protein, 12 aa, Homo sapiens
  CDR3 for alpha chain variable domain of TCR clone 302799 (TRAV8-3, TRAJ43)
CAVGAGNNDMPF

SEQ ID NO: 605598 - protein, 14 aa, Homo sapiens
  CDR3 for beta chain variable domain of TCR clone 302799 (TRBV4-2, TRBJ1-5)
CASSRDRGNQPQHF

SEQ ID NO: 605599 - protein, 16 aa, Homo sapiens
  CDR3 for alpha chain variable domain of TCR clone 302800 (TRAV30, TRAJ24)
CGTEIVDADGWGKFQF

SEQ ID NO: 605600 - protein, 14 aa, Homo sapiens
  CDR3 for beta chain variable domain of TCR clone 302800 (TRBV12-5, TRBJ2-5)
CASGSRTHQEDQYF

SEQ ID NO: 605601 - protein, 13 aa, Homo sapiens
  CDR3 for alpha chain variable domain of TCR clone 302801 (TRAV8-3, TRAJ28)
CAVGAVGSYQLTF

SEQ ID NO: 605602 - protein, 12 aa, Homo sapiens
  CDR3 for beta chain variable domain of TCR clone 302801 (TRBV3-1, TRBJ2-7)
CASSQDRDEQYF

SEQ ID NO: 605603 - protein, 15 aa, Homo sapiens
  CDR3 for alpha chain variable domain of TCR clone 302802 (TRAV3, TRAJ5)
CAVRDRKTGRRALTG

SEQ ID NO: 605604 - protein, 15 aa, Homo sapiens
  CDR3 for beta chain variable domain of TCR clone 302802 (TRBV7-8, TRBJ2-1)
CASSLADSLYNEQFF

SEQ ID NO: 605605 - protein, 15 aa, Homo sapiens
  CDR3 for alpha chain variable domain of TCR clone 302803 (TRAV3, TRAJ36)
CAVRPSQTGANNLFF

SEQ ID NO: 605606 - protein, 15 aa, Homo sapiens
  CDR3 for beta chain variable domain of TCR clone 302803 (TRBV3-1, TRBJ2-1)
CASSQDYTPRGEQFF

SEQ ID NO: 605607 - protein, 16 aa, Homo sapiens
  CDR3 for alpha chain variable domain of TCR clone 302804 (TRAV12-3, TRAJ53)
CAMSPGSGASNYKLTF

SEQ ID NO: 605608 - protein, 11 aa, Homo sapiens
  CDR3 for beta chain variable domain of TCR clone 302804 (TRBV29-1, TRBJ2-5)
CSENRTGTHYF

SEQ ID NO: 605609 - protein, 12 aa, Homo sapiens
  CDR3 for alpha chain variable domain of TCR clone 302805 (TRAV12-3, TRAJ17)
CAMTLTGNKLTF

SEQ ID NO: 605610 - protein, 15 aa, Homo sapiens
  CDR3 for beta chain variable domain of TCR clone 302805 (TRBV7-3, TRBJ2-1)
CQQLEGYRPYNEQFF

SEQ ID NO: 605611 - protein, 15 aa, Homo sapiens
  CDR3 for alpha chain variable domain of TCR clone 302806 (TRAV3, TRAJ20)
CAVRDIKLSDYKLSF

SEQ ID NO: 605612 - protein, 15 aa, Homo sapiens
  CDR3 for beta chain variable domain of TCR clone 302806 (TRBV7-2, TRBJ2-1)
CASSSGLAGGNEQFF

SEQ ID NO: 605613 - protein, 22 aa, Homo sapiens
  CDR3 for alpha chain variable domain of TCR clone 302807 (TRAV13-1, TRAJ32)
CAASNGWWCYKQAHLWNWHSAC

SEQ ID NO: 605614 - protein, 17 aa, Homo sapiens
  CDR3 for beta chain variable domain of TCR clone 302807 (TRBV15, TRBJ1-2)
CATSGREIDVVNYGYTF

SEQ ID NO: 605615 - protein, 13 aa, Homo sapiens
  CDR3 for alpha chain variable domain of TCR clone 302808 (TRAV12-2, TRAJ20)
CAVNRFDDYKLSF

SEQ ID NO: 605616 - protein, 12 aa, Homo sapiens
  CDR3 for beta chain variable domain of TCR clone 302808 (TRBV28, TRBJ2-3)
CVSSLYRDTQYF

SEQ ID NO: 605617 - protein, 17 aa, Homo sapiens
  CDR3 for alpha chain variable domain of TCR clone 302809 (TRAV3, TRAJ6)
CAVRAGPRAGGSYIPTF

SEQ ID NO: 605618 - protein, 14 aa, Homo sapiens
  CDR3 for beta chain variable domain of TCR clone 302809 (TRBV27, TRBJ2-5)
CASSRTFLVDTQYF

SEQ ID NO: 605619 - protein, 13 aa, Homo sapiens
  CDR3 for alpha chain variable domain of TCR clone 302810 (TRAV21, TRAJ24)
VLMTTDSWGKLQF

SEQ ID NO: 605620 - protein, 12 aa, Homo sapiens
  CDR3 for beta chain variable domain of TCR clone 302810 (TRBV11-2, TRBJ2-7)
CASSPPADEQYF

SEQ ID NO: 605621 - protein, 15 aa, Homo sapiens
  CDR3 for alpha chain variable domain of TCR clone 302811 (TRAV21, TRAJ53)
CATLNSGGSNYKLQF

SEQ ID NO: 605622 - protein, 16 aa, Homo sapiens
  CDR3 for beta chain variable domain of TCR clone 302811 (TRBV20-1, TRBJ1-4)
CSAPGQGLLTNEKLFF

SEQ ID NO: 605623 - protein, 12 aa, Homo sapiens
  CDR3 for alpha chain variable domain of TCR clone 302812 (TRAV29/DV5, TRAJ49)
CAASAIGNQFSF

SEQ ID NO: 605624 - protein, 17 aa, Homo sapiens
  CDR3 for beta chain variable domain of TCR clone 302812 (TRBV5-1, TRBJ2-2)
CASSRTSGRFSTGELFF

SEQ ID NO: 605625 - protein, 13 aa, Homo sapiens
  CDR3 for alpha chain variable domain of TCR clone 302813 (TRAV21, TRAJ57)
CAVIEGGSEKLVF

SEQ ID NO: 605626 - protein, 15 aa, Homo sapiens
  CDR3 for beta chain variable domain of TCR clone 302813 (TRBV10-3, TRBJ2-5)
CAISEFGRGQDTQYF

SEQ ID NO: 605627 - protein, 15 aa, Homo sapiens
  CDR3 for alpha chain variable domain of TCR clone 302814 (TRAV12-2, TRAJ53)
CAVNTGEGSNYKLTF

SEQ ID NO: 605628 - protein, 15 aa, Homo sapiens
  CDR3 for beta chain variable domain of TCR clone 302814 (TRBV5-1, TRBJ2-5)
CASSLGLGEIKTQYF

SEQ ID NO: 605629 - protein, 12 aa, Homo sapiens
  CDR3 for alpha chain variable domain of TCR clone 302815 (TRAV25, TRAJ35)
CAGIGFGNVLHC

SEQ ID NO: 605630 - protein, 13 aa, Homo sapiens
  CDR3 for beta chain variable domain of TCR clone 302815 (TRBV11-2, TRBJ1-6)
CASSLAGTSPLHF

SEQ ID NO: 605631 - protein, 18 aa, Homo sapiens
  CDR3 for alpha chain variable domain of TCR clone 302816 (TRAV13-1, TRAJ52)
CAAKNPNAGGTSYGKLTF

SEQ ID NO: 605632 - protein, 15 aa, Homo sapiens
  CDR3 for beta chain variable domain of TCR clone 302816 (TRBV11-2, TRBJ2-1)
CASSLGPDSYNEQFF

SEQ ID NO: 605633 - protein, 17 aa, Homo sapiens
  CDR3 for alpha chain variable domain of TCR clone 302817 (TRAV26-1, TRAJ21)
CIAKGKFYFGSVSKLNV

SEQ ID NO: 605634 - protein, 15 aa, Homo sapiens
  CDR3 for beta chain variable domain of TCR clone 302817 (TRBV7-2, TRBJ2-1)
CASSSGLAGGNEQFF

SEQ ID NO: 605635 - protein, 15 aa, Homo sapiens
  CDR3 for alpha chain variable domain of TCR clone 302818 (TRAV12-3, TRAJ6)
FAMSATSGGSYIPTF

SEQ ID NO: 605636 - protein, 11 aa, Homo sapiens
  CDR3 for beta chain variable domain of TCR clone 302818 (TRBV20-1, TRBJ1-5)
CSAQGDQPQHF

SEQ ID NO: 605637 - protein, 14 aa, Homo sapiens
  CDR3 for alpha chain variable domain of TCR clone 302819 (TRAV20, TRAJ18)
CAVWGGSTLGRLYF

SEQ ID NO: 605638 - protein, 14 aa, Homo sapiens
  CDR3 for beta chain variable domain of TCR clone 302819 (TRBV28, TRBJ2-4)
CASTQVTGVNIQYF

SEQ ID NO: 605639 - protein, 16 aa, Homo sapiens
  CDR3 for alpha chain variable domain of TCR clone 302820 (TRAV8-3, TRAJ13)
CAVGAYPSGGYQKVTF

SEQ ID NO: 605640 - protein, 20 aa, Homo sapiens
  CDR3 for beta chain variable domain of TCR clone 302820 (TRBV7-8, TRBJ2-2)
CASSHLFPGPTIHITGELFF

SEQ ID NO: 605641 - protein, 14 aa, Homo sapiens
  CDR3 for alpha chain variable domain of TCR clone 302821 (TRAV12-2, TRAJ45)
CAVYSGGGADGLTF

SEQ ID NO: 605642 - protein, 12 aa, Homo sapiens
  CDR3 for beta chain variable domain of TCR clone 302821 (TRBV6-3, TRBJ2-3)
CASRAGGRTQYF

SEQ ID NO: 605643 - protein, 14 aa, Homo sapiens
  CDR3 for alpha chain variable domain of TCR clone 302822 (TRAV20, TRAJ22)
CAVALGGSARQLTF

SEQ ID NO: 605644 - protein, 15 aa, Homo sapiens
  CDR3 for beta chain variable domain of TCR clone 302822 (TRBV7-2, TRBJ1-1)
RASSFAGDRDNEAFF

SEQ ID NO: 605645 - protein, 16 aa, Homo sapiens
  CDR3 for alpha chain variable domain of TCR clone 302823 (TRAV3, TRAJ37)
CAVRGKGSGNTGKLIF

SEQ ID NO: 605646 - protein, 19 aa, Homo sapiens
  CDR3 for beta chain variable domain of TCR clone 302823 (TRBV25-1, TRBJ2-2)
CAILVYRVDRGRKTGELLF

SEQ ID NO: 605647 - protein, 15 aa, Homo sapiens
  CDR3 for alpha chain variable domain of TCR clone 302824 (TRAV4, TRAJ39)
CLVGPNNNAGSMLTF

SEQ ID NO: 605648 - protein, 10 aa, Homo sapiens
  CDR3 for beta chain variable domain of TCR clone 302824 (TRBV28, TRBJ2-5)
CQQSSWTQYF

SEQ ID NO: 605649 - protein, 16 aa, Homo sapiens
  CDR3 for alpha chain variable domain of TCR clone 302825 (TRAV3, TRAJ10)
CAVSDMRAGGGNKLTF

SEQ ID NO: 605650 - protein, 15 aa, Homo sapiens
  CDR3 for beta chain variable domain of TCR clone 302825 (TRBV11-2, TRBJ1-6)
CASTGFGTAVSPLHF

SEQ ID NO: 605651 - protein, 13 aa, Homo sapiens
  CDR3 for alpha chain variable domain of TCR clone 302826 (TRAV23/DV6, TRAJ58)
CAASEIGGSRLTF

SEQ ID NO: 605652 - protein, 15 aa, Homo sapiens
  CDR3 for beta chain variable domain of TCR clone 302826 (TRBV4-1, TRBJ1-4)
CASSDTGGTNEKLFF

SEQ ID NO: 605653 - protein, 15 aa, Homo sapiens
  CDR3 for alpha chain variable domain of TCR clone 302827 (TRAV17, TRAJ57)
CATGPSQGGSETLVF

SEQ ID NO: 605654 - protein, 18 aa, Homo sapiens
  CDR3 for beta chain variable domain of TCR clone 302827 (TRBV11-2, TRBJ2-3)
CASSLGGASRGAPNTQYF

SEQ ID NO: 605655 - protein, 13 aa, Homo sapiens
  CDR3 for alpha chain variable domain of TCR clone 302828 (TRAV13-1, TRAJ21)
CAASIYNFNKFYF

SEQ ID NO: 605656 - protein, 13 aa, Homo sapiens
  CDR3 for beta chain variable domain of TCR clone 302828 (TRBV27, TRBJ1-4)
CASRLMGDETLFF

SEQ ID NO: 605657 - protein, 14 aa, Homo sapiens
  CDR3 for alpha chain variable domain of TCR clone 302829 (TRAV1-2, TRAJ8)
CAVREDTGFQKLVF

SEQ ID NO: 605658 - protein, 13 aa, Homo sapiens
  CDR3 for beta chain variable domain of TCR clone 302829 (TRBV5-4, TRBJ1-2)
CASSNRGTYGYTF

SEQ ID NO: 605659 - protein, 18 aa, Homo sapiens
  CDR3 for alpha chain variable domain of TCR clone 302830 (TRAV26-1, TRAJ23)
CIVRVGLEVWNQGGKLIF

SEQ ID NO: 605660 - protein, 16 aa, Homo sapiens
  CDR3 for beta chain variable domain of TCR clone 302830 (TRBV12-4, TRBJ2-7)
CASSFFVRGRQETQYF

SEQ ID NO: 605661 - protein, 17 aa, Homo sapiens
  CDR3 for alpha chain variable domain of TCR clone 302831 (TRAV3, TRAJ12)
CAVRDGGRMDGSYKLIF

SEQ ID NO: 605662 - protein, 13 aa, Homo sapiens
  CDR3 for beta chain variable domain of TCR clone 302831 (TRBV20-1, TRBJ1-1)
CSAPLGGGTEAFF

SEQ ID NO: 605663 - protein, 13 aa, Homo sapiens
  CDR3 for alpha chain variable domain of TCR clone 302832 (TRAV23/DV6, TRAJ58)
CAATGTSGSRLTF

SEQ ID NO: 605664 - protein, 13 aa, Homo sapiens
  CDR3 for beta chain variable domain of TCR clone 302832 (TRBV5-5, TRBJ1-2)
CASSFRRGEDYTF

SEQ ID NO: 605665 - protein, 15 aa, Homo sapiens
  CDR3 for alpha chain variable domain of TCR clone 302833 (TRAV12-3, TRAJ6)
CAMSAASGGSYIHTF

SEQ ID NO: 605666 - protein, 13 aa, Homo sapiens
  CDR3 for beta chain variable domain of TCR clone 302833 (TRBV20-1, TRBJ1-2)
CSASPEFNYGYTF

SEQ ID NO: 605667 - protein, 15 aa, Homo sapiens
  CDR3 for alpha chain variable domain of TCR clone 302834 (TRAV12-2, TRAJ43)
CAFDMRFGAGTRLIV

SEQ ID NO: 605668 - protein, 15 aa, Homo sapiens
  CDR3 for beta chain variable domain of TCR clone 302834 (TRBV28, TRBJ2-1)
CASSGLAEVDNEQFF

SEQ ID NO: 605669 - protein, 14 aa, Homo sapiens
  CDR3 for alpha chain variable domain of TCR clone 302835 (TRAV8-6, TRAJ54)
CAVTEGRGAPKLVF

SEQ ID NO: 605670 - protein, 14 aa, Homo sapiens
  CDR3 for beta chain variable domain of TCR clone 302835 (TRBV27, TRBJ2-7)
CASSIGQGAQKQYF

SEQ ID NO: 605671 - protein, 14 aa, Homo sapiens
  CDR3 for alpha chain variable domain of TCR clone 302836 (TRAV14/DV4, TRAJ58)
CAMMKETSGSRLTF

SEQ ID NO: 605672 - protein, 12 aa, Homo sapiens
  CDR3 for beta chain variable domain of TCR clone 302836 (TRBV12-4, TRBJ2-1)
CPSTYVLNEQFF

SEQ ID NO: 605673 - protein, 13 aa, Homo sapiens
  CDR3 for alpha chain variable domain of TCR clone 302837 (TRAV27, TRAJ41)
CAGEGNSVYALNF

SEQ ID NO: 605674 - protein, 14 aa, Homo sapiens
  CDR3 for beta chain variable domain of TCR clone 302837 (TRBV7-2, TRBJ1-1)
CASSFLTGTAEAFF

SEQ ID NO: 605675 - protein, 13 aa, Homo sapiens
  CDR3 for alpha chain variable domain of TCR clone 302838 (TRAV23/DV6, TRAJ22)
CAPYSGSARQLTF

SEQ ID NO: 605676 - protein, 15 aa, Homo sapiens
  CDR3 for beta chain variable domain of TCR clone 302838 (TRBV19, TRBJ2-3)
CAAGDTNAPNDTQYF

SEQ ID NO: 605677 - protein, 19 aa, Homo sapiens
  CDR3 for alpha chain variable domain of TCR clone 302839 (TRAV8-4, TRAJ3)
CAVTGESLVQQCFPDNLWI

SEQ ID NO: 605678 - protein, 16 aa, Homo sapiens
  CDR3 for beta chain variable domain of TCR clone 302839 (TRBV4-2, TRBJ1-1)
CASSQAGFGMNTEAFF

SEQ ID NO: 605679 - protein, 12 aa, Homo sapiens
  CDR3 for alpha chain variable domain of TCR clone 302840 (TRAV12-3, TRAJ17)
CAMTLTGNKLTF

SEQ ID NO: 605680 - protein, 15 aa, Homo sapiens
  CDR3 for beta chain variable domain of TCR clone 302840 (TRBV20-1, TRBJ2-7)
CSARDRVSKMDEQYF

SEQ ID NO: 605681 - protein, 11 aa, Homo sapiens
  CDR3 for alpha chain variable domain of TCR clone 302841 (TRAV1-1, TRAJ23)
CALRQGGKLIF

SEQ ID NO: 605682 - protein, 20 aa, Homo sapiens
  CDR3 for beta chain variable domain of TCR clone 302841 (TRBV7-8, TRBJ2-2)
CASSHLFPGPTIHISGELFF

SEQ ID NO: 605683 - protein, 12 aa, Homo sapiens
  CDR3 for alpha chain variable domain of TCR clone 302842 (TRAV2, TRAJ31)
CAVEANNARLMF

SEQ ID NO: 605684 - protein, 15 aa, Homo sapiens
  CDR3 for beta chain variable domain of TCR clone 302842 (TRBV10-3, TRBJ2-1)
CAISGVGDGGGEQFF

SEQ ID NO: 605685 - protein, 16 aa, Homo sapiens
  CDR3 for alpha chain variable domain of TCR clone 302843 (TRAV3, TRAJ3)
CAVRDRAKSSASKIIF

SEQ ID NO: 605686 - protein, 16 aa, Homo sapiens
  CDR3 for beta chain variable domain of TCR clone 302843 (TRBV20-1, TRBJ2-4)
CSATSLAEVAKNIQYF

SEQ ID NO: 605687 - protein, 12 aa, Homo sapiens
  CDR3 for alpha chain variable domain of TCR clone 302844 (TRAV3, TRAJ20)
CAVRDPDYKLSF

SEQ ID NO: 605688 - protein, 14 aa, Homo sapiens
  CDR3 for beta chain variable domain of TCR clone 302844 (TRBV4-2, TRBJ2-1)
CASGLDRAYNEQFY

SEQ ID NO: 605689 - protein, 13 aa, Homo sapiens
  CDR3 for alpha chain variable domain of TCR clone 302845 (TRAV20, TRAJ49)
CAVQARTGNQFYF

SEQ ID NO: 605690 - protein, 14 aa, Homo sapiens
  CDR3 for beta chain variable domain of TCR clone 302845 (TRBV5-1, TRBJ1-1)
CASSLQGASNEAFF

SEQ ID NO: 605691 - protein, 18 aa, Homo sapiens
  CDR3 for alpha chain variable domain of TCR clone 302846 (TRAV21, TRAJ53)
CAVKGGARSGGSNYKLTF

SEQ ID NO: 605692 - protein, 14 aa, Homo sapiens
  CDR3 for beta chain variable domain of TCR clone 302846 (TRBV6-1, TRBJ1-5)
CASSAGAGSQPQHF

SEQ ID NO: 605693 - protein, 17 aa, Homo sapiens
  CDR3 for alpha chain variable domain of TCR clone 302847 (TRAV26-2, TRAJ28)
CILRPLLIVAGSYQLTF

SEQ ID NO: 605694 - protein, 16 aa, Homo sapiens
  CDR3 for beta chain variable domain of TCR clone 302847 (TRBV5-1, TRBJ2-3)
CASSLAGDRGTDTQYF

SEQ ID NO: 605695 - protein, 16 aa, Homo sapiens
  CDR3 for alpha chain variable domain of TCR clone 302848 (TRAV35, TRAJ28)
CAGQKYSGAGSYQLTF

SEQ ID NO: 605696 - protein, 16 aa, Homo sapiens
  CDR3 for beta chain variable domain of TCR clone 302848 (TRBV7-3, TRBJ2-2)
CASRLKRGTLSGELFF

SEQ ID NO: 605697 - protein, 14 aa, Homo sapiens
  CDR3 for alpha chain variable domain of TCR clone 302849 (TRAV12-1, TRAJ17)
CVVNYKAAGNKLTF

SEQ ID NO: 605698 - protein, 16 aa, Homo sapiens
  CDR3 for beta chain variable domain of TCR clone 302849 (TRBV11-2, TRBJ2-7)
CASSPTTGGVSYEQYF

SEQ ID NO: 605699 - protein, 17 aa, Homo sapiens
  CDR3 for alpha chain variable domain of TCR clone 302850 (TRAV17, TRAJ28)
CATDPRRGGAGRYQLTF

SEQ ID NO: 605700 - protein, 16 aa, Homo sapiens
  CDR3 for beta chain variable domain of TCR clone 302850 (TRBV25-1, TRBJ1-1)
CASSGDKDRGRIEAFF

SEQ ID NO: 605701 - protein, 12 aa, Homo sapiens
  CDR3 for alpha chain variable domain of TCR clone 302851 (TRAV13-1, TRAJ53)
AASGGSNYKLTF

SEQ ID NO: 605702 - protein, 15 aa, Homo sapiens
  CDR3 for beta chain variable domain of TCR clone 302851 (TRBV27, TRBJ2-5)
CASSLIPSGGETQYF

SEQ ID NO: 605703 - protein, 14 aa, Homo sapiens
  CDR3 for alpha chain variable domain of TCR clone 302852 (TRAV9-2, TRAJ28)
CALTLGAGGYQLTF

SEQ ID NO: 605704 - protein, 15 aa, Homo sapiens
  CDR3 for beta chain variable domain of TCR clone 302852 (TRBV7-8, TRBJ2-3)
CASRKLRDHTDTQYF

SEQ ID NO: 605705 - protein, 15 aa, Homo sapiens
  CDR3 for alpha chain variable domain of TCR clone 302853 (TRAV1-2, TRAJ28)
CAVQYSGARSYQLTF

SEQ ID NO: 605706 - protein, 13 aa, Homo sapiens
  CDR3 for beta chain variable domain of TCR clone 302853 (TRBV4-2, TRBJ1-1)
CASSQAGNTEAFF

SEQ ID NO: 605707 - protein, 13 aa, Homo sapiens
  CDR3 for alpha chain variable domain of TCR clone 302854 (TRAV1-1, TRAJ9)
GAAKNTGGFKTIF

SEQ ID NO: 605708 - protein, 14 aa, Homo sapiens
  CDR3 for beta chain variable domain of TCR clone 302854 (TRBV20-1, TRBJ2-1)
CSAQIGGSANEQFF

SEQ ID NO: 605709 - protein, 17 aa, Homo sapiens
  CDR3 for alpha chain variable domain of TCR clone 302855 (TRAV3, TRAJ12)
CAVRDGGRMDSSYKLIF

SEQ ID NO: 605710 - protein, 16 aa, Homo sapiens
  CDR3 for beta chain variable domain of TCR clone 302855 (TRBV9, TRBJ2-2)
CASSAMGKGNTGELFV

SEQ ID NO: 605711 - protein, 15 aa, Homo sapiens
  CDR3 for alpha chain variable domain of TCR clone 302856 (TRAV12-1, TRAJ36)
CVVNEHQTGANNLFF

SEQ ID NO: 605712 - protein, 12 aa, Homo sapiens
  CDR3 for beta chain variable domain of TCR clone 302856 (TRBV29-1, TRBJ2-3)
CSVTGGANTQYF

SEQ ID NO: 605713 - protein, 14 aa, Homo sapiens
  CDR3 for alpha chain variable domain of TCR clone 302857 (TRAV30, TRAJ33)
CGTERRFSNYQLIW

SEQ ID NO: 605714 - protein, 16 aa, Homo sapiens
  CDR3 for beta chain variable domain of TCR clone 302857 (TRBV7-3, TRBJ2-2)
CASSLKRGTLFGELFF

SEQ ID NO: 605715 - protein, 19 aa, Homo sapiens
  CDR3 for alpha chain variable domain of TCR clone 302858 (TRAV8-3, TRAJ8)
LSTSVLWDPMNAGFQILVF

SEQ ID NO: 605716 - protein, 13 aa, Homo sapiens
  CDR3 for beta chain variable domain of TCR clone 302858 (TRBV10-2, TRBJ2-3)
CASSESGDHTQYF

SEQ ID NO: 605717 - protein, 14 aa, Homo sapiens
  CDR3 for alpha chain variable domain of TCR clone 302859 (TRAV12-2, TRAJ13)
CAVKKTGGYQKVTF

SEQ ID NO: 605718 - protein, 15 aa, Homo sapiens
  CDR3 for beta chain variable domain of TCR clone 302859 (TRBV20-1, TRBJ2-7)
CSARDRFSGMDEQYF

SEQ ID NO: 605719 - protein, 14 aa, Homo sapiens
  CDR3 for alpha chain variable domain of TCR clone 302860 (TRAV12-2, TRAJ17)
SPVLFKAAGNKLTF

SEQ ID NO: 605720 - protein, 17 aa, Homo sapiens
  CDR3 for beta chain variable domain of TCR clone 302860 (TRBV20-1, TRBJ2-2)
CSASGSGQGGLTGELFF

SEQ ID NO: 605721 - protein, 15 aa, Homo sapiens
  CDR3 for alpha chain variable domain of TCR clone 302861 (TRAV13-1, TRAJ16)
CAARYQMARSCSLQG

SEQ ID NO: 605722 - protein, 13 aa, Homo sapiens
  CDR3 for beta chain variable domain of TCR clone 302861 (TRBV4-1, TRBJ2-1)
CASSKAGGDEQFF

SEQ ID NO: 605723 - protein, 11 aa, Homo sapiens
  CDR3 for alpha chain variable domain of TCR clone 302862 (TRAV12-1, TRAJ43)
CVVVRNNDLRF

SEQ ID NO: 605724 - protein, 16 aa, Homo sapiens
  CDR3 for beta chain variable domain of TCR clone 302862 (TRBV14, TRBJ2-1)
CASSPRLAGEGNEQFF

SEQ ID NO: 605725 - protein, 15 aa, Homo sapiens
  CDR3 for alpha chain variable domain of TCR clone 302863 (TRAV27, TRAJ38)
CAARRNAGNNRQLIW

SEQ ID NO: 605726 - protein, 15 aa, Homo sapiens
  CDR3 for beta chain variable domain of TCR clone 302863 (TRBV27, TRBJ2-3)
CASSLGLAATDTQYF

SEQ ID NO: 605727 - protein, 12 aa, Homo sapiens
  CDR3 for alpha chain variable domain of TCR clone 302864 (TRAV12-3, TRAJ17)
CAMTLTVNKLTF

SEQ ID NO: 605728 - protein, 15 aa, Homo sapiens
  CDR3 for beta chain variable domain of TCR clone 302864 (TRBV20-1, TRBJ2-7)
CSARDRVSGMDEQYS

SEQ ID NO: 605729 - protein, 14 aa, Homo sapiens
  CDR3 for alpha chain variable domain of TCR clone 302865 (TRAV16, TRAJ15)
CALSFNQAGTALIF

SEQ ID NO: 605730 - protein, 16 aa, Homo sapiens
  CDR3 for beta chain variable domain of TCR clone 302865 (TRBV9, TRBJ2-7)
CASSTGPDRSPYEQYF

SEQ ID NO: 605731 - protein, 11 aa, Homo sapiens
  CDR3 for alpha chain variable domain of TCR clone 302866 (TRAV3, TRAJ21)
CAVSNFNKFYF

SEQ ID NO: 605732 - protein, 13 aa, Homo sapiens
  CDR3 for beta chain variable domain of TCR clone 302866 (TRBV19, TRBJ1-2)
CASSQGQVYGYTF

SEQ ID NO: 605733 - protein, 15 aa, Homo sapiens
  CDR3 for alpha chain variable domain of TCR clone 302867 (TRAV13-1, TRAJ32)
CAARIYGGATNKLIF

SEQ ID NO: 605734 - protein, 12 aa, Homo sapiens
  CDR3 for beta chain variable domain of TCR clone 302867 (TRBV7-6, TRBJ2-3)
CASSTGTDTQYL

SEQ ID NO: 605735 - protein, 14 aa, Homo sapiens
  CDR3 for alpha chain variable domain of TCR clone 302868 (TRAV17, TRAJ35)
CATDRPGFGNVLHC

SEQ ID NO: 605736 - protein, 14 aa, Homo sapiens
  CDR3 for beta chain variable domain of TCR clone 302868 (TRBV7-6, TRBJ2-3)
CASSVAGGTDTQYF

SEQ ID NO: 605737 - protein, 14 aa, Homo sapiens
  CDR3 for alpha chain variable domain of TCR clone 302869 (TRAV8-6, TRAJ17)
CAVRKKAAGNKLTF

SEQ ID NO: 605738 - protein, 13 aa, Homo sapiens
  CDR3 for beta chain variable domain of TCR clone 302869 (TRBV7-2, TRBJ2-2)
CASSLAVTRELFF

SEQ ID NO: 605739 - protein, 14 aa, Homo sapiens
  CDR3 for alpha chain variable domain of TCR clone 302870 (TRAV1-2, TRAJ16)
CAVNRFSDGQKLLF

SEQ ID NO: 605740 - protein, 14 aa, Homo sapiens
  CDR3 for beta chain variable domain of TCR clone 302870 (TRBV19, TRBJ2-2)
CASSTLHRAGELFF

SEQ ID NO: 605741 - protein, 12 aa, Homo sapiens
  CDR3 for alpha chain variable domain of TCR clone 302871 (TRAV2, TRAJ9)
CAVGAGGFNTIF

SEQ ID NO: 605742 - protein, 14 aa, Homo sapiens
  CDR3 for beta chain variable domain of TCR clone 302871 (TRBV6-1, TRBJ1-3)
CASVQGGGGNTIYF

SEQ ID NO: 605743 - protein, 13 aa, Homo sapiens
  CDR3 for alpha chain variable domain of TCR clone 302872 (TRAV20, TRAJ37)
CAGCSSNTGKLIL

SEQ ID NO: 605744 - protein, 21 aa, Homo sapiens
  CDR3 for beta chain variable domain of TCR clone 302872 (TRBV4-2, TRBJ2-3)
PCSQKTRPCISVPAAPDTQYF

SEQ ID NO: 605745 - protein, 13 aa, Homo sapiens
  CDR3 for alpha chain variable domain of TCR clone 302873 (TRAV3, TRAJ21)
CAVREPDFNKFYF

SEQ ID NO: 605746 - protein, 15 aa, Homo sapiens
  CDR3 for beta chain variable domain of TCR clone 302873 (TRBV5-1, TRBJ2-4)
CASSFLTSGRVDQKH

SEQ ID NO: 605747 - protein, 16 aa, Homo sapiens
  CDR3 for alpha chain variable domain of TCR clone 302874 (TRAV26-1, TRAJ28)
CIVRVGLWGWELPTHF

SEQ ID NO: 605748 - protein, 15 aa, Homo sapiens
  CDR3 for beta chain variable domain of TCR clone 302874 (TRBV18, TRBJ2-1)
CASSPPSASYNEQFF

SEQ ID NO: 605749 - protein, 17 aa, Homo sapiens
  CDR3 for alpha chain variable domain of TCR clone 302875 (TRAV8-4, TRAJ11)
CAVSDRGENSGYSTLTF

SEQ ID NO: 605750 - protein, 14 aa, Homo sapiens
  CDR3 for beta chain variable domain of TCR clone 302875 (TRBV20-1, TRBJ2-1)
CSPNDEASYNEQLF

SEQ ID NO: 605751 - protein, 13 aa, Homo sapiens
  CDR3 for alpha chain variable domain of TCR clone 302876 (TRAV3, TRAJ41)
CAVSSNSGYALNF

SEQ ID NO: 605752 - protein, 14 aa, Homo sapiens
  CDR3 for beta chain variable domain of TCR clone 302876 (TRBV28, TRBJ1-5)
CASSRTGLNQPQHF

SEQ ID NO: 605753 - protein, 16 aa, Homo sapiens
  CDR3 for alpha chain variable domain of TCR clone 302877 (TRAV3, TRAJ37)
CAMRPHGSGNTGKLIF

SEQ ID NO: 605754 - protein, 16 aa, Homo sapiens
  CDR3 for beta chain variable domain of TCR clone 302877 (TRBV9, TRBJ1-2)
CASSVEEKVSPYGYTF

SEQ ID NO: 605755 - protein, 20 aa, Homo sapiens
  CDR3 for alpha chain variable domain of TCR clone 302878 (TRAV4, TRAJ28)
CLVGDNRAETLGLGVTNSLS

SEQ ID NO: 605756 - protein, 13 aa, Homo sapiens
  CDR3 for beta chain variable domain of TCR clone 302878 (TRBV20-1, TRBJ2-7)
CSATHTSGYEQYF

SEQ ID NO: 605757 - protein, 11 aa, Homo sapiens
  CDR3 for alpha chain variable domain of TCR clone 302879 (TRAV2, TRAJ33)
CAVDSNYQLIW

SEQ ID NO: 605758 - protein, 14 aa, Homo sapiens
  CDR3 for beta chain variable domain of TCR clone 302879 (TRBV19, TRBJ2-7)
CASTVQGRPYEQYF

SEQ ID NO: 605759 - protein, 11 aa, Homo sapiens
  CDR3 for alpha chain variable domain of TCR clone 302880 (TRAV35, TRAJ30)
CAGPGDDKIIF

SEQ ID NO: 605760 - protein, 19 aa, Homo sapiens
  CDR3 for beta chain variable domain of TCR clone 302880 (TRBV28, TRBJ2-5)
CASSLYLRLAGELQETQYF

SEQ ID NO: 605761 - protein, 15 aa, Homo sapiens
  CDR3 for alpha chain variable domain of TCR clone 302881 (TRAV8-3, TRAJ45)
CASSYSGGGADGLTF

SEQ ID NO: 605762 - protein, 16 aa, Homo sapiens
  CDR3 for beta chain variable domain of TCR clone 302881 (TRBV28, TRBJ1-2)
CASSLYGQEANYGYTF

SEQ ID NO: 605763 - protein, 12 aa, Homo sapiens
  CDR3 for alpha chain variable domain of TCR clone 302882 (TRAV8-3, TRAJ26)
CAGDNYGQNFVF

SEQ ID NO: 605764 - protein, 18 aa, Homo sapiens
  CDR3 for beta chain variable domain of TCR clone 302882 (TRBV12-4, TRBJ2-2)
FASSLVAGTRGRTGELFF

SEQ ID NO: 605765 - protein, 13 aa, Homo sapiens
  CDR3 for alpha chain variable domain of TCR clone 302883 (TRAV12-1, TRAJ33)
CGDAPDSNYQLIW

SEQ ID NO: 605766 - protein, 14 aa, Homo sapiens
  CDR3 for beta chain variable domain of TCR clone 302883 (TRBV7-8, TRBJ2-3)
CASSLEAGTDTQYF

SEQ ID NO: 605767 - protein, 14 aa, Homo sapiens
  CDR3 for alpha chain variable domain of TCR clone 302884 (TRAV23/DV6, TRAJ22)
CAASVPGSASQLTF

SEQ ID NO: 605768 - protein, 16 aa, Homo sapiens
  CDR3 for beta chain variable domain of TCR clone 302884 (TRBV19, TRBJ2-2)
CASSFPGQGLAGELFF

SEQ ID NO: 605769 - protein, 11 aa, Homo sapiens
  CDR3 for alpha chain variable domain of TCR clone 302885 (TRAV2, TRAJ13)
CATGGYQKVTF

SEQ ID NO: 605770 - protein, 14 aa, Homo sapiens
  CDR3 for beta chain variable domain of TCR clone 302885 (TRBV6-1, TRBJ1-3)
CASVQGGGGNTIYF

SEQ ID NO: 605771 - protein, 12 aa, Homo sapiens
  CDR3 for alpha chain variable domain of TCR clone 302886 (TRAV21, TRAJ33)
CAKMASNYRLIW

SEQ ID NO: 605772 - protein, 14 aa, Homo sapiens
  CDR3 for beta chain variable domain of TCR clone 302886 (TRBV2, TRBJ2-7)
CASSLTSGGYEQYF

SEQ ID NO: 605773 - protein, 11 aa, Homo sapiens
  CDR3 for alpha chain variable domain of TCR clone 302887 (TRAV2, TRAJ37)
CSVDNTGKLIF

SEQ ID NO: 605774 - protein, 16 aa, Homo sapiens
  CDR3 for beta chain variable domain of TCR clone 302887 (TRBV9, TRBJ2-1)
CASSVGGGGNYNEQFF

SEQ ID NO: 605775 - protein, 14 aa, Homo sapiens
  CDR3 for alpha chain variable domain of TCR clone 302888 (TRAV1-1, TRAJ40)
CAVPNTSGTYKYIF

SEQ ID NO: 605776 - protein, 16 aa, Homo sapiens
  CDR3 for beta chain variable domain of TCR clone 302888 (TRBV3-1, TRBJ1-4)
CASGQDLGGAGEKLFF

SEQ ID NO: 605777 - protein, 14 aa, Homo sapiens
  CDR3 for alpha chain variable domain of TCR clone 302889 (TRAV1-2, TRAJ24)
CAVLTTDSWGKFQF

SEQ ID NO: 605778 - protein, 13 aa, Homo sapiens
  CDR3 for beta chain variable domain of TCR clone 302889 (TRBV19, TRBJ1-2)
CASSVPGQDGYTF

SEQ ID NO: 605779 - protein, 12 aa, Homo sapiens
  CDR3 for alpha chain variable domain of TCR clone 302890 (TRAV9-2, TRAJ26)
CALRGYGQNFVF

SEQ ID NO: 605780 - protein, 12 aa, Homo sapiens
  CDR3 for beta chain variable domain of TCR clone 302890 (TRBV29-1, TRBJ2-3)
CSVTGGEDTQYF

SEQ ID NO: 605781 - protein, 14 aa, Homo sapiens
  CDR3 for alpha chain variable domain of TCR clone 302891 (TRAV35, TRAJ41)
CAGQPSVRRNALNF

SEQ ID NO: 605782 - protein, 14 aa, Homo sapiens
  CDR3 for beta chain variable domain of TCR clone 302891 (TRBV20-1, TRBJ1-2)
CSASEQGAVYGYTF

SEQ ID NO: 605783 - protein, 14 aa, Homo sapiens
  CDR3 for alpha chain variable domain of TCR clone 302892 (TRAV20, TRAJ20)
CAVRRGYNDYKLSF

SEQ ID NO: 605784 - protein, 13 aa, Homo sapiens
  CDR3 for beta chain variable domain of TCR clone 302892 (TRBV19, TRBJ2-5)
CASSETAPETQYC

SEQ ID NO: 605785 - protein, 14 aa, Homo sapiens
  CDR3 for alpha chain variable domain of TCR clone 302893 (TRAV12-2, TRAJ17)
CAVNIKATGNKLTF

SEQ ID NO: 605786 - protein, 13 aa, Homo sapiens
  CDR3 for beta chain variable domain of TCR clone 302893 (TRBV7-8, TRBJ2-7)
CASSLTGGREQYF

SEQ ID NO: 605787 - protein, 13 aa, Homo sapiens
  CDR3 for alpha chain variable domain of TCR clone 302894 (TRAV26-1, )
CIVSHRVEGFWNQ

SEQ ID NO: 605788 - protein, 17 aa, Homo sapiens
  CDR3 for beta chain variable domain of TCR clone 302894 (TRBV11-2, TRBJ2-1)
CASSLYPPGVEYNEQFF

SEQ ID NO: 605789 - protein, 11 aa, Homo sapiens
  CDR3 for alpha chain variable domain of TCR clone 302895 (TRAV12-2, TRAJ31)
CAILNNARLMF

SEQ ID NO: 605790 - protein, 16 aa, Homo sapiens
  CDR3 for beta chain variable domain of TCR clone 302895 (TRBV13, TRBJ2-2)
CASRPRTGEHTGELFF

SEQ ID NO: 605791 - protein, 15 aa, Homo sapiens
  CDR3 for alpha chain variable domain of TCR clone 302896 (TRAV13-1, TRAJ32)
CAASIYGGATNKLIF

SEQ ID NO: 605792 - protein, 13 aa, Homo sapiens
  CDR3 for beta chain variable domain of TCR clone 302896 (TRBV12-4, TRBJ1-2)
CASSLRQGKGDAF

SEQ ID NO: 605793 - protein, 13 aa, Homo sapiens
  CDR3 for alpha chain variable domain of TCR clone 302897 (TRAV3, TRAJ27)
CAVGPLGAGKSTF

SEQ ID NO: 605794 - protein, 15 aa, Homo sapiens
  CDR3 for beta chain variable domain of TCR clone 302897 (TRBV9, TRBJ1-6)
CASSVAGTGDSPLDF

SEQ ID NO: 605795 - protein, 12 aa, Homo sapiens
  CDR3 for alpha chain variable domain of TCR clone 302898 (TRAV16, TRAJ10)
CSRTGGGNKLTF

SEQ ID NO: 605796 - protein, 15 aa, Homo sapiens
  CDR3 for beta chain variable domain of TCR clone 302898 (TRBV10-2, TRBJ2-6)
CASSEQGTGANVLTF

SEQ ID NO: 605797 - protein, 12 aa, Homo sapiens
  CDR3 for alpha chain variable domain of TCR clone 302899 (TRAV12-3, TRAJ5)
CAMDTGRRALTF

SEQ ID NO: 605798 - protein, 12 aa, Homo sapiens
  CDR3 for beta chain variable domain of TCR clone 302899 (TRBV11-2, TRBJ2-2)
CASSLPTGELFF

SEQ ID NO: 605799 - protein, 13 aa, Homo sapiens
  CDR3 for alpha chain variable domain of TCR clone 302900 (TRAV35, TRAJ44)
SAGLSGTASKLTF

SEQ ID NO: 605800 - protein, 13 aa, Homo sapiens
  CDR3 for beta chain variable domain of TCR clone 302900 (TRBV7-8, TRBJ1-2)
CASSLKQNYGYTF

SEQ ID NO: 605801 - protein, 13 aa, Homo sapiens
  CDR3 for alpha chain variable domain of TCR clone 302901 (TRAV12-1, TRAJ40)
CVVPTSGTYKYIF

SEQ ID NO: 605802 - protein, 16 aa, Homo sapiens
  CDR3 for beta chain variable domain of TCR clone 302901 (TRBV7-9, TRBJ1-2)
CASSLGFSSGEDGYTC

SEQ ID NO: 605803 - protein, 14 aa, Homo sapiens
  CDR3 for alpha chain variable domain of TCR clone 302902 (TRAV12-2, TRAJ44)
CAVNKAGTASKLTF

SEQ ID NO: 605804 - protein, 14 aa, Homo sapiens
  CDR3 for beta chain variable domain of TCR clone 302902 (TRBV11-2, TRBJ1-2)
CASSLGTANYGYTF

SEQ ID NO: 605805 - protein, 11 aa, Homo sapiens
  CDR3 for alpha chain variable domain of TCR clone 302903 (TRAV21, TRAJ31)
CAVRNNARLMF

SEQ ID NO: 605806 - protein, 16 aa, Homo sapiens
  CDR3 for beta chain variable domain of TCR clone 302903 (TRBV12-5, TRBJ2-5)
CASGPRTSGNQETQYF

SEQ ID NO: 605807 - protein, 19 aa, Homo sapiens
  CDR3 for alpha chain variable domain of TCR clone 302904 (TRAV29/DV5, TRAJ49)
CSVLLCSKLTVDTGNQFYF

SEQ ID NO: 605808 - protein, 17 aa, Homo sapiens
  CDR3 for beta chain variable domain of TCR clone 302904 (TRBV24-1, TRBJ2-1)
CATSDVSTSGTYNEQFF

SEQ ID NO: 605809 - protein, 13 aa, Homo sapiens
  CDR3 for alpha chain variable domain of TCR clone 302905 (TRAV16, TRAJ54)
CALMVQGAQKLVL

SEQ ID NO: 605810 - protein, 12 aa, Homo sapiens
  CDR3 for beta chain variable domain of TCR clone 302905 (TRBV18, TRBJ2-7)
CASSTAMGEQYF

SEQ ID NO: 605811 - protein, 14 aa, Homo sapiens
  CDR3 for alpha chain variable domain of TCR clone 302906 (TRAV12-2, TRAJ6)
CVPLRPGGSYIPTF

SEQ ID NO: 605812 - protein, 14 aa, Homo sapiens
  CDR3 for beta chain variable domain of TCR clone 302906 (TRBV2, TRBJ2-7)
CASSLTSGGYEQYF

SEQ ID NO: 605813 - protein, 13 aa, Homo sapiens
  CDR3 for alpha chain variable domain of TCR clone 302907 (TRAV17, TRAJ54)
CATVIQGAQKRVF

SEQ ID NO: 605814 - protein, 15 aa, Homo sapiens
  CDR3 for beta chain variable domain of TCR clone 302907 (TRBV13, TRBJ2-1)
CASSLLSGLNNEQFF

SEQ ID NO: 605815 - protein, 15 aa, Homo sapiens
  CDR3 for alpha chain variable domain of TCR clone 302908 (TRAV19, TRAJ8)
CALSGPNTGFQKLVF

SEQ ID NO: 605816 - protein, 17 aa, Homo sapiens
  CDR3 for beta chain variable domain of TCR clone 302908 (TRBV11-2, TRBJ2-1)
CASSLYPPGVEYNEQFF

SEQ ID NO: 605817 - protein, 17 aa, Homo sapiens
  CDR3 for alpha chain variable domain of TCR clone 302909 (TRAV3, TRAJ42)
CAVRDRDYGGRQGNLIF

SEQ ID NO: 605818 - protein, 15 aa, Homo sapiens
  CDR3 for beta chain variable domain of TCR clone 302909 (TRBV7-9, TRBJ1-6)
CASSSPGRGNSPLHF

SEQ ID NO: 605819 - protein, 13 aa, Homo sapiens
  CDR3 for alpha chain variable domain of TCR clone 302910 (TRAV1-2, TRAJ9)
CAVLNTGGFKTIF

SEQ ID NO: 605820 - protein, 14 aa, Homo sapiens
  CDR3 for beta chain variable domain of TCR clone 302910 (TRBV20-1, TRBJ2-3)
CSARGGTSRDTQYF

SEQ ID NO: 605821 - protein, 13 aa, Homo sapiens
  CDR3 for alpha chain variable domain of TCR clone 302911 (TRAV1-2, TRAJ9)
CAALNTGGFKTIF

SEQ ID NO: 605822 - protein, 15 aa, Homo sapiens
  CDR3 for beta chain variable domain of TCR clone 302911 (TRBV6-1, TRBJ2-3)
CASSERGGITDTQCF

SEQ ID NO: 605823 - protein, 14 aa, Homo sapiens
  CDR3 for alpha chain variable domain of TCR clone 302912 (TRAV26-1, TRAJ38)
FIADNAVNNRKLTW

SEQ ID NO: 605824 - protein, 13 aa, Homo sapiens
  CDR3 for beta chain variable domain of TCR clone 302912 (TRBV20-1, TRBJ1-1)
CSARGGGNTEAFF

SEQ ID NO: 605825 - protein, 16 aa, Homo sapiens
  CDR3 for alpha chain variable domain of TCR clone 302913 (TRAV3, TRAJ37)
CAVRGKGSGNTGKLIF

SEQ ID NO: 605826 - protein, 14 aa, Homo sapiens
  CDR3 for beta chain variable domain of TCR clone 302913 (TRBV5-1, TRBJ2-7)
CASSRGESLYEQYF

SEQ ID NO: 605827 - protein, 15 aa, Homo sapiens
  CDR3 for alpha chain variable domain of TCR clone 302914 (TRAV8-3, TRAJ15)
CAVAAPNQAGTALIF

SEQ ID NO: 605828 - protein, 14 aa, Homo sapiens
  CDR3 for beta chain variable domain of TCR clone 302914 (TRBV20-1, TRBJ2-1)
CSPNDEASYNEQFF

SEQ ID NO: 605829 - protein, 15 aa, Homo sapiens
  CDR3 for alpha chain variable domain of TCR clone 302915 (TRAV13-1, TRAJ5)
CSVSPIDTGRRALTF

SEQ ID NO: 605830 - protein, 18 aa, Homo sapiens
  CDR3 for beta chain variable domain of TCR clone 302915 (TRBV4-1, TRBJ2-2)
CASSFRTSGGEGPGELFF

SEQ ID NO: 605831 - protein, 12 aa, Homo sapiens
  CDR3 for alpha chain variable domain of TCR clone 302916 (TRAV13-2, TRAJ23)
CAERHRGGKLIF

SEQ ID NO: 605832 - protein, 15 aa, Homo sapiens
  CDR3 for beta chain variable domain of TCR clone 302916 (TRBV11-3, TRBJ2-3)
CASSAGTVVTNTQYF

SEQ ID NO: 605833 - protein, 15 aa, Homo sapiens
  CDR3 for alpha chain variable domain of TCR clone 302917 (TRAV13-1, TRAJ26)
SVQQVQDNYGQNFVF

SEQ ID NO: 605834 - protein, 13 aa, Homo sapiens
  CDR3 for beta chain variable domain of TCR clone 302917 (TRBV7-9, TRBJ2-7)
CASSAGLQYEQYF

SEQ ID NO: 605835 - protein, 14 aa, Homo sapiens
  CDR3 for alpha chain variable domain of TCR clone 302918 (TRAV1-2, TRAJ29)
CAVRTDSGNTPLVF

SEQ ID NO: 605836 - protein, 12 aa, Homo sapiens
  CDR3 for beta chain variable domain of TCR clone 302918 (TRBV11-2, TRBJ2-1)
CASSPGNNEQFF

SEQ ID NO: 605837 - protein, 14 aa, Homo sapiens
  CDR3 for alpha chain variable domain of TCR clone 302919 (TRAV1-2, TRAJ16)
CAVNLFSDGQKLLF

SEQ ID NO: 605838 - protein, 13 aa, Homo sapiens
  CDR3 for beta chain variable domain of TCR clone 302919 (TRBV4-1, TRBJ2-1)
CASSQAGGDEQFF

SEQ ID NO: 605839 - protein, 14 aa, Homo sapiens
  CDR3 for alpha chain variable domain of TCR clone 302920 (TRAV8-3, TRAJ39)
CAVGANNAGNMLPF

SEQ ID NO: 605840 - protein, 12 aa, Homo sapiens
  CDR3 for beta chain variable domain of TCR clone 302920 (TRBV28, TRBJ1-2)
CASLTLAEGYTF

SEQ ID NO: 605841 - protein, 13 aa, Homo sapiens
  CDR3 for alpha chain variable domain of TCR clone 302921 (TRAV13-1, TRAJ21)
CAASIYNFNKFYF

SEQ ID NO: 605842 - protein, 15 aa, Homo sapiens
  CDR3 for beta chain variable domain of TCR clone 302921 (TRBV6-6, TRBJ1-5)
CASSSIQGTNQPQHF

SEQ ID NO: 605843 - protein, 15 aa, Homo sapiens
  CDR3 for alpha chain variable domain of TCR clone 302922 (TRAV12-3, TRAJ6)
WAMSATTGGSYIPTF

SEQ ID NO: 605844 - protein, 16 aa, Homo sapiens
  CDR3 for beta chain variable domain of TCR clone 302922 (TRBV20-1, TRBJ1-2)
CSASMGQGVANYGYTF

SEQ ID NO: 605845 - protein, 16 aa, Homo sapiens
  CDR3 for alpha chain variable domain of TCR clone 302923 (TRAV3, TRAJ10)
CAVRDRLTGGGNKLTF

SEQ ID NO: 605846 - protein, 12 aa, Homo sapiens
  CDR3 for beta chain variable domain of TCR clone 302923 (TRBV6-3, TRBJ2-7)
CASSLTPYEQYF

SEQ ID NO: 605847 - protein, 14 aa, Homo sapiens
  CDR3 for alpha chain variable domain of TCR clone 302924 (TRAV16, TRAJ15)
CALSFNQAGTALIF

SEQ ID NO: 605848 - protein, 13 aa, Homo sapiens
  CDR3 for beta chain variable domain of TCR clone 302924 (TRBV2, TRBJ1-1)
CASNLLRNTEAFF

SEQ ID NO: 605849 - protein, 15 aa, Homo sapiens
  CDR3 for alpha chain variable domain of TCR clone 302925 (TRAV21, TRAJ53)
CATLNSGGSNYKLTL

SEQ ID NO: 605850 - protein, 15 aa, Homo sapiens
  CDR3 for beta chain variable domain of TCR clone 302925 (TRBV27, TRBJ2-1)
CASSNGGESSNEQFF

SEQ ID NO: 605851 - protein, 14 aa, Homo sapiens
  CDR3 for alpha chain variable domain of TCR clone 302926 (TRAV16, TRAJ57)
CALSGQGGSENLVF

SEQ ID NO: 605852 - protein, 13 aa, Homo sapiens
  CDR3 for beta chain variable domain of TCR clone 302926 (TRBV5-4, TRBJ2-1)
CASSLQGPREQFF

SEQ ID NO: 605853 - protein, 16 aa, Homo sapiens
  CDR3 for alpha chain variable domain of TCR clone 302927 (TRAV23/DV6, TRAJ21)
CAASSGGGTTSTNFTL

SEQ ID NO: 605854 - protein, 17 aa, Homo sapiens
  CDR3 for beta chain variable domain of TCR clone 302927 (TRBV7-8, TRBJ2-6)
CASSAGTGGAGANVLTF

SEQ ID NO: 605855 - protein, 13 aa, Homo sapiens
  CDR3 for alpha chain variable domain of TCR clone 302928 (TRAV36/DV7, TRAJ49)
CAGESNTGNQFYF

SEQ ID NO: 605856 - protein, 16 aa, Homo sapiens
  CDR3 for beta chain variable domain of TCR clone 302928 (TRBV5-1, TRBJ1-1)
CASSKTGTEVGTEAFF

SEQ ID NO: 605857 - protein, 15 aa, Homo sapiens
  CDR3 for alpha chain variable domain of TCR clone 302929 (TRAV8-3, TRAJ11)
CAVVLLNSGYSTLTF

SEQ ID NO: 605858 - protein, 14 aa, Homo sapiens
  CDR3 for beta chain variable domain of TCR clone 302929 (TRBV4-1, TRBJ2-5)
CASSRSGSGETQYF

SEQ ID NO: 605859 - protein, 12 aa, Homo sapiens
  CDR3 for alpha chain variable domain of TCR clone 302930 (TRAV29/DV5, TRAJ49)
CAATDTGNQFYF

SEQ ID NO: 605860 - protein, 13 aa, Homo sapiens
  CDR3 for beta chain variable domain of TCR clone 302930 (TRBV3-1, TRBJ1-2)
CASSQRAPGGYTF

SEQ ID NO: 605861 - protein, 16 aa, Homo sapiens
  CDR3 for alpha chain variable domain of TCR clone 302931 (TRAV30, TRAJ24)
CGTEIVDADSWGRFQV

SEQ ID NO: 605862 - protein, 19 aa, Homo sapiens
  CDR3 for beta chain variable domain of TCR clone 302931 (TRBV25-1, TRBJ2-2)
CSILVYRVDRGRKTGELFF

SEQ ID NO: 605863 - protein, 14 aa, Homo sapiens
  CDR3 for alpha chain variable domain of TCR clone 302932 (TRAV26-2, TRAJ27)
CILRDISDAGKSTF

SEQ ID NO: 605864 - protein, 14 aa, Homo sapiens
  CDR3 for beta chain variable domain of TCR clone 302932 (TRBV2, TRBJ2-1)
CASRAYGIYNEQFF

SEQ ID NO: 605865 - protein, 18 aa, Homo sapiens
  CDR3 for alpha chain variable domain of TCR clone 302933 (TRAV26-1, TRAJ23)
CIVRVGLEVWNQGGKLIF

SEQ ID NO: 605866 - protein, 16 aa, Homo sapiens
  CDR3 for beta chain variable domain of TCR clone 302933 (TRBV12-4, TRBJ2-5)
CASSFFVRGRQETLYF

SEQ ID NO: 605867 - protein, 18 aa, Homo sapiens
  CDR3 for alpha chain variable domain of TCR clone 302934 (TRAV3, TRAJ42)
CAVRDPENYGGSQGNLIF

SEQ ID NO: 605868 - protein, 15 aa, Homo sapiens
  CDR3 for beta chain variable domain of TCR clone 302934 (TRBV5-1, TRBJ2-2)
CASSLVQLRSGELFF

SEQ ID NO: 605869 - protein, 13 aa, Homo sapiens
  CDR3 for alpha chain variable domain of TCR clone 302935 (TRAV13-1, TRAJ35)
CAASRGFGNVLHC

SEQ ID NO: 605870 - protein, 11 aa, Homo sapiens
  CDR3 for beta chain variable domain of TCR clone 302935 (TRBV18, TRBJ2-6)
CASSHARILTF

SEQ ID NO: 605871 - protein, 14 aa, Homo sapiens
  CDR3 for alpha chain variable domain of TCR clone 302936 (TRAV23/DV6, TRAJ22)
CAASVSGSARQLTF

SEQ ID NO: 605872 - protein, 16 aa, Homo sapiens
  CDR3 for beta chain variable domain of TCR clone 302936 (TRBV19, TRBJ2-2)
CASSFPGQGLAGELFF

SEQ ID NO: 605873 - protein, 17 aa, Homo sapiens
  CDR3 for alpha chain variable domain of TCR clone 302937 (TRAV3, TRAJ6)
CAVRDGPRAGGSYIPTV

SEQ ID NO: 605874 - protein, 15 aa, Homo sapiens
  CDR3 for beta chain variable domain of TCR clone 302937 (TRBV20-1, TRBJ1-1)
CSASWDRFLNTEAFF

SEQ ID NO: 605875 - protein, 21 aa, Homo sapiens
  CDR3 for alpha chain variable domain of TCR clone 302938 (TRAV8-3, TRAJ6)
CAVGGEEATYLHLEDEPALLF

SEQ ID NO: 605876 - protein, 14 aa, Homo sapiens
  CDR3 for beta chain variable domain of TCR clone 302938 (TRBV5-1, TRBJ2-7)
CASSRGESLYEQYF

SEQ ID NO: 605877 - protein, 14 aa, Homo sapiens
  CDR3 for alpha chain variable domain of TCR clone 302939 (TRAV1-2, TRAJ8)
CAVREDTGFQKLVF

SEQ ID NO: 605878 - protein, 11 aa, Homo sapiens
  CDR3 for beta chain variable domain of TCR clone 302939 (TRBV29-1, TRBJ2-5)
CSEERTGTQYF

SEQ ID NO: 605879 - protein, 16 aa, Homo sapiens
  CDR3 for alpha chain variable domain of TCR clone 302940 (TRAV4, TRAJ9)
CLVGDRNRPGGFKTIF

SEQ ID NO: 605880 - protein, 16 aa, Homo sapiens
  CDR3 for beta chain variable domain of TCR clone 302940 (TRBV28, TRBJ1-4)
CASSPPYRGRSDKLFF

SEQ ID NO: 605881 - protein, 17 aa, Homo sapiens
  CDR3 for alpha chain variable domain of TCR clone 302941 (TRAV35, TRAJ47)
GLLDCRTHTEYGNKQVF

SEQ ID NO: 605882 - protein, 11 aa, Homo sapiens
  CDR3 for beta chain variable domain of TCR clone 302941 (TRBV29-1, TRBJ1-1)
CSVEVGTRTFF

SEQ ID NO: 605883 - protein, 14 aa, Homo sapiens
  CDR3 for alpha chain variable domain of TCR clone 302942 (TRAV29/DV5, TRAJ44)
CAAFLVGTASKLTF

SEQ ID NO: 605884 - protein, 15 aa, Homo sapiens
  CDR3 for beta chain variable domain of TCR clone 302942 (TRBV7-3, TRBJ2-2)
CASSETGEGTGELFF

SEQ ID NO: 605885 - protein, 16 aa, Homo sapiens
  CDR3 for alpha chain variable domain of TCR clone 302943 (TRAV27, TRAJ13)
CAGAKSDSGGYQKVTF

SEQ ID NO: 605886 - protein, 15 aa, Homo sapiens
  CDR3 for beta chain variable domain of TCR clone 302943 (TRBV7-9, TRBJ2-2)
CASSPETGAGGELFF

SEQ ID NO: 605887 - protein, 13 aa, Homo sapiens
  CDR3 for alpha chain variable domain of TCR clone 302944 (TRAV8-4, TRAJ30)
CAVSVNRDDKSIF

SEQ ID NO: 605888 - protein, 13 aa, Homo sapiens
  CDR3 for beta chain variable domain of TCR clone 302944 (TRBV3-1, TRBJ2-2)
SASLARGSGELFF

SEQ ID NO: 605889 - protein, 13 aa, Homo sapiens
  CDR3 for alpha chain variable domain of TCR clone 302945 (TRAV3, TRAJ26)
CAVSRGYGQNFVF

SEQ ID NO: 605890 - protein, 14 aa, Homo sapiens
  CDR3 for beta chain variable domain of TCR clone 302945 (TRBV12-4, TRBJ1-1)
CASSLGTGGTEAFF

SEQ ID NO: 605891 - protein, 13 aa, Homo sapiens
  CDR3 for alpha chain variable domain of TCR clone 302946 (TRAV12-3, TRAJ9)
CAMRNTGGFKTIF

SEQ ID NO: 605892 - protein, 20 aa, Homo sapiens
  CDR3 for beta chain variable domain of TCR clone 302946 (TRBV12-4, TRBJ2-7)
CASSFSWGAPPRDNQYEQYF

SEQ ID NO: 605893 - protein, 14 aa, Homo sapiens
  CDR3 for alpha chain variable domain of TCR clone 302947 (TRAV17, TRAJ11)
CATVGNSGYSTLTF

SEQ ID NO: 605894 - protein, 15 aa, Homo sapiens
  CDR3 for beta chain variable domain of TCR clone 302947 (TRBV5-8, TRBJ2-3)
CASSPNFGGRDTQYF

SEQ ID NO: 605895 - protein, 13 aa, Homo sapiens
  CDR3 for alpha chain variable domain of TCR clone 302948 (TRAV20, TRAJ45)
CGYSGGGADGLTF

SEQ ID NO: 605896 - protein, 14 aa, Homo sapiens
  CDR3 for beta chain variable domain of TCR clone 302948 (TRBV19, TRBJ2-2)
CASSTLHGSGELFF

SEQ ID NO: 605897 - protein, 14 aa, Homo sapiens
  CDR3 for alpha chain variable domain of TCR clone 302949 (TRAV3, TRAJ28)
CAVRRGAGSYQLTF

SEQ ID NO: 605898 - protein, 16 aa, Homo sapiens
  CDR3 for beta chain variable domain of TCR clone 302949 (TRBV4-1, TRBJ2-7)
CASSQEWTSVPLEQYF

SEQ ID NO: 605899 - protein, 17 aa, Homo sapiens
  CDR3 for alpha chain variable domain of TCR clone 302950 (TRAV4, TRAJ13)
CIVVVQWSSGGYQKVTF

SEQ ID NO: 605900 - protein, 18 aa, Homo sapiens
  CDR3 for beta chain variable domain of TCR clone 302950 (TRBV15, TRBJ2-3)
CATSRDGARSWDTDTQYF

SEQ ID NO: 605901 - protein, 14 aa, Homo sapiens
  CDR3 for alpha chain variable domain of TCR clone 302951 (TRAV1-2, TRAJ8)
FAVREDTGFQKLVF

SEQ ID NO: 605902 - protein, 14 aa, Homo sapiens
  CDR3 for beta chain variable domain of TCR clone 302951 (TRBV7-3, TRBJ2-2)
CASSSGGYTGELFF

SEQ ID NO: 605903 - protein, 15 aa, Homo sapiens
  CDR3 for alpha chain variable domain of TCR clone 302952 (TRAV8-4, TRAJ37)
CAVTYGSSNTGKLIF

SEQ ID NO: 605904 - protein, 13 aa, Homo sapiens
  CDR3 for beta chain variable domain of TCR clone 302952 (TRBV12-4, TRBJ2-5)
FASSLGGSRTQYF

SEQ ID NO: 605905 - protein, 17 aa, Homo sapiens
  CDR3 for alpha chain variable domain of TCR clone 302953 (TRAV3, TRAJ42)
CAVRDRDYGGSQGTLIF

SEQ ID NO: 605906 - protein, 14 aa, Homo sapiens
  CDR3 for beta chain variable domain of TCR clone 302953 (TRBV7-6, TRBJ2-3)
CASSLGTVTDTQYF

SEQ ID NO: 605907 - protein, 12 aa, Homo sapiens
  CDR3 for alpha chain variable domain of TCR clone 302954 (TRAV27, TRAJ35)
CAGADFGNVLHC

SEQ ID NO: 605908 - protein, 14 aa, Homo sapiens
  CDR3 for beta chain variable domain of TCR clone 302954 (TRBV19, TRBJ2-1)
CASEVTGARNEQFF

SEQ ID NO: 605909 - protein, 12 aa, Homo sapiens
  CDR3 for alpha chain variable domain of TCR clone 302955 (TRAV8-4, TRAJ31)
CAVSDSNARLMF

SEQ ID NO: 605910 - protein, 17 aa, Homo sapiens
  CDR3 for beta chain variable domain of TCR clone 302955 (TRBV5-5, TRBJ1-2)
CASSLGSLDGQSEGYTF

SEQ ID NO: 605911 - protein, 14 aa, Homo sapiens
  CDR3 for alpha chain variable domain of TCR clone 302956 (TRAV29/DV5, TRAJ40)
CAAAVASGTYKYIF

SEQ ID NO: 605912 - protein, 14 aa, Homo sapiens
  CDR3 for beta chain variable domain of TCR clone 302956 (TRBV2, TRBJ1-1)
CASSEGLLNTEAFF

SEQ ID NO: 605913 - protein, 12 aa, Homo sapiens
  CDR3 for alpha chain variable domain of TCR clone 302957 (TRAV16, TRAJ56)
CASTGANSKLTF

SEQ ID NO: 605914 - protein, 17 aa, Homo sapiens
  CDR3 for beta chain variable domain of TCR clone 302957 (TRBV27, TRBJ2-6)
CASSLTGFASGANVLTF

SEQ ID NO: 605915 - protein, 16 aa, Homo sapiens
  CDR3 for alpha chain variable domain of TCR clone 302958 (TRAV14/DV4, TRAJ54)
CAMREGRIQGAQKLVF

SEQ ID NO: 605916 - protein, 16 aa, Homo sapiens
  CDR3 for beta chain variable domain of TCR clone 302958 (TRBV5-1, TRBJ2-3)
CASSLGLAVYTDTQYF

SEQ ID NO: 605917 - protein, 16 aa, Homo sapiens
  CDR3 for alpha chain variable domain of TCR clone 302959 (TRAV22, TRAJ45)
CAVERGKRGGADGLTF

SEQ ID NO: 605918 - protein, 13 aa, Homo sapiens
  CDR3 for beta chain variable domain of TCR clone 302959 (TRBV27, TRBJ1-1)
CASSLSIGGEAFF

SEQ ID NO: 605919 - protein, 19 aa, Homo sapiens
  CDR3 for alpha chain variable domain of TCR clone 302960 (TRAV1-2, TRAJ26)
CLLPLCCGRPDNYGQNFVF

SEQ ID NO: 605920 - protein, 15 aa, Homo sapiens
  CDR3 for beta chain variable domain of TCR clone 302960 (TRBV9, TRBJ1-6)
CASSVAGTGDSPLHF

SEQ ID NO: 605921 - protein, 14 aa, Homo sapiens
  CDR3 for alpha chain variable domain of TCR clone 302961 (TRAV1-2, TRAJ16)
CAVNRLSDGQKLLF

SEQ ID NO: 605922 - protein, 15 aa, Homo sapiens
  CDR3 for beta chain variable domain of TCR clone 302961 (TRBV9, TRBJ1-6)
CASIVAGTGDSPLHF

SEQ ID NO: 605923 - protein, 15 aa, Homo sapiens
  CDR3 for alpha chain variable domain of TCR clone 302962 (TRAV12-2, TRAJ53)
CAVNGGGGSNYKLTF

SEQ ID NO: 605924 - protein, 15 aa, Homo sapiens
  CDR3 for beta chain variable domain of TCR clone 302962 (TRBV20-1, TRBJ2-2)
CSARGGQGNTGELFF

SEQ ID NO: 605925 - protein, 14 aa, Homo sapiens
  CDR3 for alpha chain variable domain of TCR clone 302963 (TRAV1-2, TRAJ8)
CAVREDTGFQKLVF

SEQ ID NO: 605926 - protein, 15 aa, Homo sapiens
  CDR3 for beta chain variable domain of TCR clone 302963 (TRBV5-4, TRBJ2-7)
CASSLEWGPSYEQYF

SEQ ID NO: 605927 - protein, 15 aa, Homo sapiens
  CDR3 for alpha chain variable domain of TCR clone 302964 (TRAV12-2, TRAJ43)
CAFDMRFGAGTRLTV

SEQ ID NO: 605928 - protein, 14 aa, Homo sapiens
  CDR3 for beta chain variable domain of TCR clone 302964 (TRBV7-2, TRBJ2-2)
CASSLGQNTGELFF

SEQ ID NO: 605929 - protein, 15 aa, Homo sapiens
  CDR3 for alpha chain variable domain of TCR clone 302965 (TRAV21, TRAJ18)
CAVRDRGSNLGRLYF

SEQ ID NO: 605930 - protein, 17 aa, Homo sapiens
  CDR3 for beta chain variable domain of TCR clone 302965 (TRBV7-2, TRBJ2-3)
CASSSYSGTRRADTQYF

SEQ ID NO: 605931 - protein, 14 aa, Homo sapiens
  CDR3 for alpha chain variable domain of TCR clone 302966 (TRAV1-1, TRAJ35)
CAVRSIGFGNVLHC

SEQ ID NO: 605932 - protein, 15 aa, Homo sapiens
  CDR3 for beta chain variable domain of TCR clone 302966 (TRBV7-2, TRBJ2-7)
CASSWGQGAIYEQYF

SEQ ID NO: 605933 - protein, 10 aa, Homo sapiens
  CDR3 for alpha chain variable domain of TCR clone 302967 (TRAV12-3, TRAJ30)
CALPEDKIIF

SEQ ID NO: 605934 - protein, 13 aa, Homo sapiens
  CDR3 for beta chain variable domain of TCR clone 302967 (TRBV10-3, TRBJ2-7)
CASKLAVNYEQYF

SEQ ID NO: 605935 - protein, 12 aa, Homo sapiens
  CDR3 for alpha chain variable domain of TCR clone 302968 (TRAV13-1, TRAJ17)
CAARTAGNKLTF

SEQ ID NO: 605936 - protein, 15 aa, Homo sapiens
  CDR3 for beta chain variable domain of TCR clone 302968 (TRBV7-6, TRBJ1-1)
CASSPQGGADTEAFF

SEQ ID NO: 605937 - protein, 13 aa, Homo sapiens
  CDR3 for alpha chain variable domain of TCR clone 302969 (TRAV8-1, TRAJ28)
CAVPGAGSYQLTL

SEQ ID NO: 605938 - protein, 14 aa, Homo sapiens
  CDR3 for beta chain variable domain of TCR clone 302969 (TRBV19, TRBJ2-5)
CASSMTGQQETQYF

SEQ ID NO: 605939 - protein, 14 aa, Homo sapiens
  CDR3 for alpha chain variable domain of TCR clone 302970 (TRAV12-1, TRAJ39)
CVVSLNNAGNTLTF

SEQ ID NO: 605940 - protein, 13 aa, Homo sapiens
  CDR3 for beta chain variable domain of TCR clone 302970 (TRBV9, TRBJ2-7)
CASSVLQAGEQYF

SEQ ID NO: 605941 - protein, 15 aa, Homo sapiens
  CDR3 for alpha chain variable domain of TCR clone 302971 (TRAV4, TRAJ39)
CLVGAFVNAGNMLTF

SEQ ID NO: 605942 - protein, 15 aa, Homo sapiens
  CDR3 for beta chain variable domain of TCR clone 302971 (TRBV20-1, TRBJ2-7)
CSARDRVSGMDEQYF

SEQ ID NO: 605943 - protein, 13 aa, Homo sapiens
  CDR3 for alpha chain variable domain of TCR clone 302972 (TRAV21, TRAJ57)
CAVTQGGSEKLVF

SEQ ID NO: 605944 - protein, 17 aa, Homo sapiens
  CDR3 for beta chain variable domain of TCR clone 302972 (TRBV13, TRBJ2-3)
CASSLSRVAGGGNTQYF

SEQ ID NO: 605945 - protein, 13 aa, Homo sapiens
  CDR3 for alpha chain variable domain of TCR clone 302973 (TRAV35, TRAJ36)
CAGPRIGANNLFF

SEQ ID NO: 605946 - protein, 14 aa, Homo sapiens
  CDR3 for beta chain variable domain of TCR clone 302973 (TRBV7-8, TRBJ2-5)
CASSATGGQETQYF

SEQ ID NO: 605947 - protein, 12 aa, Homo sapiens
  CDR3 for alpha chain variable domain of TCR clone 302974 (TRAV1-2, TRAJ33)
CAALDSNYQLIW

SEQ ID NO: 605948 - protein, 13 aa, Homo sapiens
  CDR3 for beta chain variable domain of TCR clone 302974 (TRBV3-1, TRBJ1-1)
CASSPGVITEAFF

SEQ ID NO: 605949 - protein, 16 aa, Homo sapiens
  CDR3 for alpha chain variable domain of TCR clone 302975 (TRAV17, TRAJ53)
CATDALSGGSNYKLTV

SEQ ID NO: 605950 - protein, 12 aa, Homo sapiens
  CDR3 for beta chain variable domain of TCR clone 302975 (TRBV5-1, TRBJ2-7)
CASSFRGYEQYF

SEQ ID NO: 605951 - protein, 13 aa, Homo sapiens
  CDR3 for alpha chain variable domain of TCR clone 302976 (TRAV12-2, TRAJ22)
CAVKWGSARQLTF

SEQ ID NO: 605952 - protein, 15 aa, Homo sapiens
  CDR3 for beta chain variable domain of TCR clone 302976 (TRBV18, TRBJ2-7)
CASSPSSTGNYEQYF

SEQ ID NO: 605953 - protein, 14 aa, Homo sapiens
  CDR3 for alpha chain variable domain of TCR clone 302977 (TRAV13-1, TRAJ44)
CAAKATGTASKLTF

SEQ ID NO: 605954 - protein, 15 aa, Homo sapiens
  CDR3 for beta chain variable domain of TCR clone 302977 (TRBV7-8, TRBJ2-1)
CASSLADSLYNEQFF

SEQ ID NO: 605955 - protein, 12 aa, Homo sapiens
  CDR3 for alpha chain variable domain of TCR clone 302978 (TRAV21, TRAJ4)
SHLAGGYNKLVF

SEQ ID NO: 605956 - protein, 19 aa, Homo sapiens
  CDR3 for beta chain variable domain of TCR clone 302978 (TRBV18, TRBJ1-3)
CASSPLSRTGMSSGNTIYF

SEQ ID NO: 605957 - protein, 10 aa, Homo sapiens
  CDR3 for alpha chain variable domain of TCR clone 302979 (TRAV27, TRAJ58)
SETSGSRLTF

SEQ ID NO: 605958 - protein, 16 aa, Homo sapiens
  CDR3 for beta chain variable domain of TCR clone 302979 (TRBV6-1, TRBJ2-5)
CASSETLDRGAETQYF

SEQ ID NO: 605959 - protein, 14 aa, Homo sapiens
  CDR3 for alpha chain variable domain of TCR clone 302980 (TRAV27, TRAJ13)
CRSANSGGYQKVTF

SEQ ID NO: 605960 - protein, 13 aa, Homo sapiens
  CDR3 for beta chain variable domain of TCR clone 302980 (TRBV7-6, TRBJ2-1)
CRQLGGGADEQFF

SEQ ID NO: 605961 - protein, 10 aa, Homo sapiens
  CDR3 for alpha chain variable domain of TCR clone 302981 (TRAV22, TRAJ21)
CAVGAGKFYF

SEQ ID NO: 605962 - protein, 15 aa, Homo sapiens
  CDR3 for beta chain variable domain of TCR clone 302981 (TRBV6-3, TRBJ1-5)
CASRVELDSNQPQHF

SEQ ID NO: 605963 - protein, 18 aa, Homo sapiens
  CDR3 for alpha chain variable domain of TCR clone 302982 (TRAV26-2, TRAJ45)
CILRVDKYSGGGADGLTF

SEQ ID NO: 605964 - protein, 17 aa, Homo sapiens
  CDR3 for beta chain variable domain of TCR clone 302982 (TRBV4-1, TRBJ1-4)
CASSQEGPRGVEEKLFF

SEQ ID NO: 605965 - protein, 13 aa, Homo sapiens
  CDR3 for alpha chain variable domain of TCR clone 302983 (TRAV12-2, TRAJ20)
CAVYPSNDYKLSF

SEQ ID NO: 605966 - protein, 17 aa, Homo sapiens
  CDR3 for beta chain variable domain of TCR clone 302983 (TRBV4-1, TRBJ1-4)
CASSQEGPRGVEEKLFF

SEQ ID NO: 605967 - protein, 16 aa, Homo sapiens
  CDR3 for alpha chain variable domain of TCR clone 302984 (TRAV20, TRAJ22)
CAVQASSSGSARQLTF

SEQ ID NO: 605968 - protein, 15 aa, Homo sapiens
  CDR3 for beta chain variable domain of TCR clone 302984 (TRBV27, TRBJ2-1)
CASSLARGAYNEQFF

SEQ ID NO: 605969 - protein, 13 aa, Homo sapiens
  CDR3 for alpha chain variable domain of TCR clone 302985 (TRAV17, TRAJ9)
CATDYTGGFKTIF

SEQ ID NO: 605970 - protein, 14 aa, Homo sapiens
  CDR3 for beta chain variable domain of TCR clone 302985 (TRBV19, TRBJ2-5)
CASSMTGQEETQYF

SEQ ID NO: 605971 - protein, 18 aa, Homo sapiens
  CDR3 for alpha chain variable domain of TCR clone 302986 (TRAV26-1, TRAJ23)
CIVRVGLEVWNQGGKLIF

SEQ ID NO: 605972 - protein, 15 aa, Homo sapiens
  CDR3 for beta chain variable domain of TCR clone 302986 (TRBV7-2, TRBJ2-7)
CASSLALGSAYEQYF

SEQ ID NO: 605973 - protein, 14 aa, Homo sapiens
  CDR3 for alpha chain variable domain of TCR clone 302987 (TRAV38-1, TRAJ40)
CALRPTSGAYKYIF

SEQ ID NO: 605974 - protein, 13 aa, Homo sapiens
  CDR3 for beta chain variable domain of TCR clone 302987 (TRBV19, TRBJ1-2)
CASSVPGQDGYTF

SEQ ID NO: 605975 - protein, 15 aa, Homo sapiens
  CDR3 for alpha chain variable domain of TCR clone 302988 (TRAV13-1, TRAJ52)
CAATSPRTSYGKLTF

SEQ ID NO: 605976 - protein, 15 aa, Homo sapiens
  CDR3 for beta chain variable domain of TCR clone 302988 (TRBV28, TRBJ2-5)
CASSSGRTIQETQYF

SEQ ID NO: 605977 - protein, 14 aa, Homo sapiens
  CDR3 for alpha chain variable domain of TCR clone 302989 (TRAV12-2, TRAJ45)
CAVNKGGGTDGVTF

SEQ ID NO: 605978 - protein, 14 aa, Homo sapiens
  CDR3 for beta chain variable domain of TCR clone 302989 (TRBV20-1, TRBJ1-1)
CSAMGGTANTEAFF

SEQ ID NO: 605979 - protein, 14 aa, Homo sapiens
  CDR3 for alpha chain variable domain of TCR clone 302990 (TRAV12-2, TRAJ13)
CAVKKTGSYQKVTF

SEQ ID NO: 605980 - protein, 17 aa, Homo sapiens
  CDR3 for beta chain variable domain of TCR clone 302990 (TRBV13, TRBJ2-3)
CASSLSRVAGGRNTQYF

SEQ ID NO: 605981 - protein, 12 aa, Homo sapiens
  CDR3 for alpha chain variable domain of TCR clone 302991 (TRAV36/DV7, TRAJ54)
CAVVRGAHKLVF

SEQ ID NO: 605982 - protein, 13 aa, Homo sapiens
  CDR3 for beta chain variable domain of TCR clone 302991 (TRBV20-1, TRBJ1-1)
CSARGGGNTEAFF

SEQ ID NO: 605983 - protein, 13 aa, Homo sapiens
  CDR3 for alpha chain variable domain of TCR clone 302992 (TRAV8-4, TRAJ27)
CAVSPRNAGKSTC

SEQ ID NO: 605984 - protein, 17 aa, Homo sapiens
  CDR3 for beta chain variable domain of TCR clone 302992 (TRBV19, TRBJ2-3)
CASSIDPAGGGTDTQYF

SEQ ID NO: 605985 - protein, 18 aa, Homo sapiens
  CDR3 for alpha chain variable domain of TCR clone 302993 (TRAV16, TRAJ16)
CALSGLVTGMARSCPLQG

SEQ ID NO: 605986 - protein, 14 aa, Homo sapiens
  CDR3 for beta chain variable domain of TCR clone 302993 (TRBV7-9, TRBJ2-4)
CASTTGGAKNIQYF

SEQ ID NO: 605987 - protein, 11 aa, Homo sapiens
  CDR3 for alpha chain variable domain of TCR clone 302994 (TRAV35, TRAJ22)
CAGPGVGQLTF

SEQ ID NO: 605988 - protein, 13 aa, Homo sapiens
  CDR3 for beta chain variable domain of TCR clone 302994 (TRBV18, TRBJ2-7)
CQLTRGGAYEQYF

SEQ ID NO: 605989 - protein, 14 aa, Homo sapiens
  CDR3 for alpha chain variable domain of TCR clone 302995 (TRAV12-2, TRAJ40)
CAVKIPSGTYNYIF

SEQ ID NO: 605990 - protein, 12 aa, Homo sapiens
  CDR3 for beta chain variable domain of TCR clone 302995 (TRBV11-2, TRBJ2-2)
CASSLGGGELLF

SEQ ID NO: 605991 - protein, 11 aa, Homo sapiens
  CDR3 for alpha chain variable domain of TCR clone 302996 (TRAV2, TRAJ13)
FASGGYQKVTF

SEQ ID NO: 605992 - protein, 17 aa, Homo sapiens
  CDR3 for beta chain variable domain of TCR clone 302996 (TRBV13, TRBJ2-3)
CASSLSRVAGGRNTQYF

SEQ ID NO: 605993 - protein, 11 aa, Homo sapiens
  CDR3 for alpha chain variable domain of TCR clone 302997 (TRAV13-1, TRAJ4)
CAASRYNKLIF

SEQ ID NO: 605994 - protein, 14 aa, Homo sapiens
  CDR3 for beta chain variable domain of TCR clone 302997 (TRBV13, TRBJ1-1)
CASTVITVNTEAFF

SEQ ID NO: 605995 - protein, 11 aa, Homo sapiens
  CDR3 for alpha chain variable domain of TCR clone 302998 (TRAV12-1, TRAJ26)
CVVAYGQNFIF

SEQ ID NO: 605996 - protein, 15 aa, Homo sapiens
  CDR3 for beta chain variable domain of TCR clone 302998 (TRBV12-4, TRBJ2-5)
CASSGTGQAQETQYF

SEQ ID NO: 605997 - protein, 11 aa, Homo sapiens
  CDR3 for alpha chain variable domain of TCR clone 302999 (TRAV13-1, TRAJ52)
PGGTSYGKLTF

SEQ ID NO: 605998 - protein, 15 aa, Homo sapiens
  CDR3 for beta chain variable domain of TCR clone 302999 (TRBV7-9, TRBJ2-2)
CASGPLDTFPGELFF

SEQ ID NO: 605999 - protein, 10 aa, Homo sapiens
  CDR3 for alpha chain variable domain of TCR clone 303000 (TRAV12-3, TRAJ49)
CAMNDDQFYF

SEQ ID NO: 606000 - protein, 13 aa, Homo sapiens
  CDR3 for beta chain variable domain of TCR clone 303000 (TRBV12-4, TRBJ1-1)
CAGSPGSGFEAFF

SEQ ID NO: 606001 - protein, 15 aa, Homo sapiens
  CDR3 for alpha chain variable domain of TCR clone 303001 (TRAV25, TRAJ53)
GPTSNSGGSNYKLTF

SEQ ID NO: 606002 - protein, 14 aa, Homo sapiens
  CDR3 for beta chain variable domain of TCR clone 303001 (TRBV11-2, TRBJ2-3)
CASSRLARTDTQYF

SEQ ID NO: 606003 - protein, 13 aa, Homo sapiens
  CDR3 for alpha chain variable domain of TCR clone 303002 (TRAV21, TRAJ27)
CAARPGNAGKTTF

SEQ ID NO: 606004 - protein, 15 aa, Homo sapiens
  CDR3 for beta chain variable domain of TCR clone 303002 (TRBV2, TRBJ2-3)
CASSDAGGPPDTQYF

SEQ ID NO: 606005 - protein, 13 aa, Homo sapiens
  CDR3 for alpha chain variable domain of TCR clone 303003 (TRAV13-1, TRAJ13)
CAASKGGYQKVTF

SEQ ID NO: 606006 - protein, 16 aa, Homo sapiens
  CDR3 for beta chain variable domain of TCR clone 303003 (TRBV18, TRBJ1-2)
CASSPPERVTIYGNTL

SEQ ID NO: 606007 - protein, 12 aa, Homo sapiens
  CDR3 for alpha chain variable domain of TCR clone 303004 (TRAV21, TRAJ29)
CALTSGNTPLVF

SEQ ID NO: 606008 - protein, 15 aa, Homo sapiens
  CDR3 for beta chain variable domain of TCR clone 303004 (TRBV12-4, TRBJ1-2)
CASRLGVAGNYGYTF

SEQ ID NO: 606009 - protein, 15 aa, Homo sapiens
  CDR3 for alpha chain variable domain of TCR clone 303005 (TRAV2, TRAJ9)
CTVEDRGTGGFKTIF

SEQ ID NO: 606010 - protein, 13 aa, Homo sapiens
  CDR3 for beta chain variable domain of TCR clone 303005 (TRBV6-5, TRBJ1-1)
CASRPVTGSRTFF

SEQ ID NO: 606011 - protein, 15 aa, Homo sapiens
  CDR3 for alpha chain variable domain of TCR clone 303006 (TRAV12-3, TRAJ6)
CAMSPASGGSYIPTF

SEQ ID NO: 606012 - protein, 15 aa, Homo sapiens
  CDR3 for beta chain variable domain of TCR clone 303006 (TRBV2, TRBJ1-2)
CAISESRTVNYGYTF

SEQ ID NO: 606013 - protein, 14 aa, Homo sapiens
  CDR3 for alpha chain variable domain of TCR clone 303007 (TRAV9-2, TRAJ39)
CALYIYNAGNMLTF

SEQ ID NO: 606014 - protein, 13 aa, Homo sapiens
  CDR3 for beta chain variable domain of TCR clone 303007 (TRBV27, TRBJ2-1)
CASRTLGVGEQFF

SEQ ID NO: 606015 - protein, 17 aa, Homo sapiens
  CDR3 for alpha chain variable domain of TCR clone 303008 (TRAV13-1, TRAJ52)
CAASPGAGGTSYGKLTF

SEQ ID NO: 606016 - protein, 17 aa, Homo sapiens
  CDR3 for beta chain variable domain of TCR clone 303008 (TRBV7-8, TRBJ2-6)
CASSAGTGGAGANVLTF

SEQ ID NO: 606017 - protein, 13 aa, Homo sapiens
  CDR3 for alpha chain variable domain of TCR clone 303009 (TRAV12-2, TRAJ9)
CAVLETGGFKTIF

SEQ ID NO: 606018 - protein, 16 aa, Homo sapiens
  CDR3 for beta chain variable domain of TCR clone 303009 (TRBV12-5, TRBJ2-5)
CASGPRTSGNQETQYF

SEQ ID NO: 606019 - protein, 12 aa, Homo sapiens
  CDR3 for alpha chain variable domain of TCR clone 303010 (TRAV21, TRAJ49)
CAVNDGGNQFYF

SEQ ID NO: 606020 - protein, 17 aa, Homo sapiens
  CDR3 for beta chain variable domain of TCR clone 303010 (TRBV7-3, TRBJ2-3)
CASSLMKRMRGADTQYF

SEQ ID NO: 606021 - protein, 12 aa, Homo sapiens
  CDR3 for alpha chain variable domain of TCR clone 303011 (TRAV5, TRAJ37)
CAETPHTGKLIF

SEQ ID NO: 606022 - protein, 17 aa, Homo sapiens
  CDR3 for beta chain variable domain of TCR clone 303011 (TRBV29-1, TRBJ2-3)
CSVNAFRASGGVDTQYF

SEQ ID NO: 606023 - protein, 13 aa, Homo sapiens
  CDR3 for alpha chain variable domain of TCR clone 303012 (TRAV12-3, TRAJ43)
CAMIRPYNNDMRF

SEQ ID NO: 606024 - protein, 12 aa, Homo sapiens
  CDR3 for beta chain variable domain of TCR clone 303012 (TRBV11-2, TRBJ2-5)
CASSLGQETQYF

SEQ ID NO: 606025 - protein, 11 aa, Homo sapiens
  CDR3 for alpha chain variable domain of TCR clone 303013 (TRAV27, TRAJ47)
SIVEYGNKLFF

SEQ ID NO: 606026 - protein, 18 aa, Homo sapiens
  CDR3 for beta chain variable domain of TCR clone 303013 (TRBV2, TRBJ2-1)
CASRGLAGGPRTYNEQFF

SEQ ID NO: 606027 - protein, 14 aa, Homo sapiens
  CDR3 for alpha chain variable domain of TCR clone 303014 (TRAV26-1, TRAJ34)
CIVRVAYNTDTLIF

SEQ ID NO: 606028 - protein, 15 aa, Homo sapiens
  CDR3 for beta chain variable domain of TCR clone 303014 (TRBV20-1, TRBJ2-7)
GSARVPAAYFYEQYF

SEQ ID NO: 606029 - protein, 14 aa, Homo sapiens
  CDR3 for alpha chain variable domain of TCR clone 303015 (TRAV2, TRAJ9)
CAVEDRSGGFKTIF

SEQ ID NO: 606030 - protein, 15 aa, Homo sapiens
  CDR3 for beta chain variable domain of TCR clone 303015 (TRBV19, TRBJ1-1)
CASTSGQIQNTEAVF

SEQ ID NO: 606031 - protein, 14 aa, Homo sapiens
  CDR3 for alpha chain variable domain of TCR clone 303016 (TRAV1-2, TRAJ16)
CAVNRFSDAQKLLF

SEQ ID NO: 606032 - protein, 20 aa, Homo sapiens
  CDR3 for beta chain variable domain of TCR clone 303016 (TRBV28, TRBJ2-1)
CASTPIGRSPGLAGGYEQFF

SEQ ID NO: 606033 - protein, 12 aa, Homo sapiens
  CDR3 for alpha chain variable domain of TCR clone 303017 (TRAV12-3, TRAJ17)
CAMPLTGSKLTF

SEQ ID NO: 606034 - protein, 15 aa, Homo sapiens
  CDR3 for beta chain variable domain of TCR clone 303017 (TRBV20-1, TRBJ2-7)
CSARDRVSGMDEQYF

SEQ ID NO: 606035 - protein, 14 aa, Homo sapiens
  CDR3 for alpha chain variable domain of TCR clone 303018 (TRAV12-3, TRAJ10)
CHLPLTGGGNKLTF

SEQ ID NO: 606036 - protein, 14 aa, Homo sapiens
  CDR3 for beta chain variable domain of TCR clone 303018 (TRBV7-7, TRBJ2-7)
CASSLGRGVGEQYF

SEQ ID NO: 606037 - protein, 14 aa, Homo sapiens
  CDR3 for alpha chain variable domain of TCR clone 303019 (TRAV23/DV6, TRAJ39)
CTASMRGAGNMLTF

SEQ ID NO: 606038 - protein, 14 aa, Homo sapiens
  CDR3 for beta chain variable domain of TCR clone 303019 (TRBV10-3, TRBJ2-3)
CAISVTRSRDTQYF

SEQ ID NO: 606039 - protein, 13 aa, Homo sapiens
  CDR3 for alpha chain variable domain of TCR clone 303020 (TRAV25, TRAJ48)
CAGPKGGNEKSTF

SEQ ID NO: 606040 - protein, 15 aa, Homo sapiens
  CDR3 for beta chain variable domain of TCR clone 303020 (TRBV9, TRBJ2-6)
CASSLLWNGANVLTS

SEQ ID NO: 606041 - protein, 12 aa, Homo sapiens
  CDR3 for alpha chain variable domain of TCR clone 303021 (TRAV8-4, TRAJ37)
CAKSSNTGKLIF

SEQ ID NO: 606042 - protein, 13 aa, Homo sapiens
  CDR3 for beta chain variable domain of TCR clone 303021 (TRBV12-5, TRBJ2-3)
CASGDRQSDTQYF

SEQ ID NO: 606043 - protein, 17 aa, Homo sapiens
  CDR3 for alpha chain variable domain of TCR clone 303022 (TRAV26-1, TRAJ53)
CIVRVDDSGGSNYKLTF

SEQ ID NO: 606044 - protein, 14 aa, Homo sapiens
  CDR3 for beta chain variable domain of TCR clone 303022 (TRBV28, TRBJ2-7)
CASSLPSRGGEQYF

SEQ ID NO: 606045 - protein, 14 aa, Homo sapiens
  CDR3 for alpha chain variable domain of TCR clone 303023 (TRAV1-2, TRAJ16)
CAVNRFSDGQKLLF

SEQ ID NO: 606046 - protein, 16 aa, Homo sapiens
  CDR3 for beta chain variable domain of TCR clone 303023 (TRBV2, TRBJ2-3)
CASSTSVEGGNRYAVF

SEQ ID NO: 606047 - protein, 14 aa, Homo sapiens
  CDR3 for alpha chain variable domain of TCR clone 303024 (TRAV12-2, TRAJ17)
FAVNIKAAGNKLTF

SEQ ID NO: 606048 - protein, 15 aa, Homo sapiens
  CDR3 for beta chain variable domain of TCR clone 303024 (TRBV7-2, TRBJ2-1)
CASSSRTSREDEQFF

SEQ ID NO: 606049 - protein, 18 aa, Homo sapiens
  CDR3 for alpha chain variable domain of TCR clone 303025 (TRAV21, TRAJ52)
CAVRPSPAGGTSYGKLTF

SEQ ID NO: 606050 - protein, 12 aa, Homo sapiens
  CDR3 for beta chain variable domain of TCR clone 303025 (TRBV5-4, TRBJ2-5)
CASSSTRETQYF

SEQ ID NO: 606051 - protein, 17 aa, Homo sapiens
  CDR3 for alpha chain variable domain of TCR clone 303026 (TRAV36/DV7, TRAJ52)
CAVAQRARGTSYGKLTF

SEQ ID NO: 606052 - protein, 14 aa, Homo sapiens
  CDR3 for beta chain variable domain of TCR clone 303026 (TRBV19, TRBJ2-1)
CASPTFVLSGEQFF

SEQ ID NO: 606053 - protein, 13 aa, Homo sapiens
  CDR3 for alpha chain variable domain of TCR clone 303027 (TRAV12-2, TRAJ53)
CAGVGGSDYKLTF

SEQ ID NO: 606054 - protein, 13 aa, Homo sapiens
  CDR3 for beta chain variable domain of TCR clone 303027 (TRBV7-9, TRBJ1-2)
CASSLKQNYGYTF

SEQ ID NO: 606055 - protein, 15 aa, Homo sapiens
  CDR3 for alpha chain variable domain of TCR clone 303028 (TRAV9-2, TRAJ18)
CALSGRGSTPGRLYF

SEQ ID NO: 606056 - protein, 14 aa, Homo sapiens
  CDR3 for beta chain variable domain of TCR clone 303028 (TRBV27, TRBJ2-2)
CASRPGVNTGELFF

SEQ ID NO: 606057 - protein, 17 aa, Homo sapiens
  CDR3 for alpha chain variable domain of TCR clone 303029 (TRAV23/DV6, TRAJ57)
CAASSTLSQGGSEKLVF

SEQ ID NO: 606058 - protein, 13 aa, Homo sapiens
  CDR3 for beta chain variable domain of TCR clone 303029 (TRBV7-9, TRBJ1-2)
CASSLKQNYGNTF

SEQ ID NO: 606059 - protein, 17 aa, Homo sapiens
  CDR3 for alpha chain variable domain of TCR clone 303030 (TRAV2, TRAJ22)
ILQVREADAAEQRQLTF

SEQ ID NO: 606060 - protein, 14 aa, Homo sapiens
  CDR3 for beta chain variable domain of TCR clone 303030 (TRBV4-1, TRBJ2-2)
CASSQAVNTGELFF

SEQ ID NO: 606061 - protein, 15 aa, Homo sapiens
  CDR3 for alpha chain variable domain of TCR clone 303031 (TRAV4, TRAJ39)
CLVGPHNNAGNMLTF

SEQ ID NO: 606062 - protein, 15 aa, Homo sapiens
  CDR3 for beta chain variable domain of TCR clone 303031 (TRBV7-9, TRBJ1-6)
CASSSPGRGNSPLHF

SEQ ID NO: 606063 - protein, 16 aa, Homo sapiens
  CDR3 for alpha chain variable domain of TCR clone 303032 (TRAV30, TRAJ24)
CGTEIVDADSWGKFQF

SEQ ID NO: 606064 - protein, 15 aa, Homo sapiens
  CDR3 for beta chain variable domain of TCR clone 303032 (TRBV27, TRBJ1-1)
CASSPYADPYTEAFF

SEQ ID NO: 606065 - protein, 17 aa, Homo sapiens
  CDR3 for alpha chain variable domain of TCR clone 303033 (TRAV1-1, TRAJ4)
CALYNKLIFGAGTRLAV

SEQ ID NO: 606066 - protein, 16 aa, Homo sapiens
  CDR3 for beta chain variable domain of TCR clone 303033 (TRBV7-3, TRBJ2-2)
CASGLKRGTLSGELFF

SEQ ID NO: 606067 - protein, 12 aa, Homo sapiens
  CDR3 for alpha chain variable domain of TCR clone 303034 (TRAV12-3, TRAJ17)
CAMTLTGKKLTF

SEQ ID NO: 606068 - protein, 15 aa, Homo sapiens
  CDR3 for beta chain variable domain of TCR clone 303034 (TRBV20-1, TRBJ2-7)
CNARDRVSGMDEQYF

SEQ ID NO: 606069 - protein, 16 aa, Homo sapiens
  CDR3 for alpha chain variable domain of TCR clone 303035 (TRAV12-2, TRAJ28)
CAVNEYSGAGSYQLTF

SEQ ID NO: 606070 - protein, 14 aa, Homo sapiens
  CDR3 for beta chain variable domain of TCR clone 303035 (TRBV18, TRBJ2-3)
CACSLGGGLDTQYF

SEQ ID NO: 606071 - protein, 14 aa, Homo sapiens
  CDR3 for alpha chain variable domain of TCR clone 303036 (TRAV23/DV6, TRAJ8)
CAASKAIGFQKLVF

SEQ ID NO: 606072 - protein, 15 aa, Homo sapiens
  CDR3 for beta chain variable domain of TCR clone 303036 (TRBV28, TRBJ2-3)
CASSPDRQGANTQYF

SEQ ID NO: 606073 - protein, 13 aa, Homo sapiens
  CDR3 for alpha chain variable domain of TCR clone 303037 (TRAV21, TRAJ27)
CAARPGNAGKSTF

SEQ ID NO: 606074 - protein, 13 aa, Homo sapiens
  CDR3 for beta chain variable domain of TCR clone 303037 (TRBV7-6, TRBJ2-3)
CASSLGSHRYAVF

SEQ ID NO: 606075 - protein, 14 aa, Homo sapiens
  CDR3 for alpha chain variable domain of TCR clone 303038 (TRAV2, TRAJ9)
CAVEDRSGGFKTIF

SEQ ID NO: 606076 - protein, 14 aa, Homo sapiens
  CDR3 for beta chain variable domain of TCR clone 303038 (TRBV12-4, TRBJ1-1)
CASSFSQMNTEAFF

SEQ ID NO: 606077 - protein, 14 aa, Homo sapiens
  CDR3 for alpha chain variable domain of TCR clone 303039 (TRAV1-2, TRAJ8)
CAVREDTGFQELVI

SEQ ID NO: 606078 - protein, 16 aa, Homo sapiens
  CDR3 for beta chain variable domain of TCR clone 303039 (TRBV7-3, TRBJ2-2)
CASSLKRGTLSGELFF

SEQ ID NO: 606079 - protein, 16 aa, Homo sapiens
  CDR3 for alpha chain variable domain of TCR clone 303040 (TRAV30, TRAJ24)
CGIEIVDADSWGKFQF

SEQ ID NO: 606080 - protein, 14 aa, Homo sapiens
  CDR3 for beta chain variable domain of TCR clone 303040 (TRBV9, TRBJ2-7)
CASSVGVGSYEQYF

SEQ ID NO: 606081 - protein, 16 aa, Homo sapiens
  CDR3 for alpha chain variable domain of TCR clone 303041 (TRAV26-1, TRAJ32)
CIVRTNYGGATNKLIF

SEQ ID NO: 606082 - protein, 20 aa, Homo sapiens
  CDR3 for beta chain variable domain of TCR clone 303041 (TRBV7-8, TRBJ2-2)
CASSRLFPGPTIHITGELFF

SEQ ID NO: 606083 - protein, 12 aa, Homo sapiens
  CDR3 for alpha chain variable domain of TCR clone 303042 (TRAV12-3, TRAJ17)
CSMTLTGNKLTF

SEQ ID NO: 606084 - protein, 13 aa, Homo sapiens
  CDR3 for beta chain variable domain of TCR clone 303042 (TRBV12-4, TRBJ2-2)
CASSITGSGELFF

SEQ ID NO: 606085 - protein, 13 aa, Homo sapiens
  CDR3 for alpha chain variable domain of TCR clone 303043 (TRAV20, TRAJ15)
CATINQAGTALIF

SEQ ID NO: 606086 - protein, 13 aa, Homo sapiens
  CDR3 for beta chain variable domain of TCR clone 303043 (TRBV12-4, TRBJ2-1)
CASRQPSNNEQFV

SEQ ID NO: 606087 - protein, 14 aa, Homo sapiens
  CDR3 for alpha chain variable domain of TCR clone 303044 (TRAV12-2, TRAJ13)
CAVKKTGGYQKVTF

SEQ ID NO: 606088 - protein, 14 aa, Homo sapiens
  CDR3 for beta chain variable domain of TCR clone 303044 (TRBV4-2, TRBJ2-5)
CASSQDRGRETQYF

SEQ ID NO: 606089 - protein, 19 aa, Homo sapiens
  CDR3 for alpha chain variable domain of TCR clone 303045 (TRAV26-1, TRAJ38)
CIADNAGNNHIQNPDPAVY

SEQ ID NO: 606090 - protein, 15 aa, Homo sapiens
  CDR3 for beta chain variable domain of TCR clone 303045 (TRBV5-1, TRBJ2-1)
CASSPPRAPYNEQFF

SEQ ID NO: 606091 - protein, 17 aa, Homo sapiens
  CDR3 for alpha chain variable domain of TCR clone 303046 (TRAV3, TRAJ38)
CAVRDCLNAGNNHILNP

SEQ ID NO: 606092 - protein, 13 aa, Homo sapiens
  CDR3 for beta chain variable domain of TCR clone 303046 (TRBV23-1, TRBJ1-4)
CASRGKFNDKLFF

SEQ ID NO: 606093 - protein, 12 aa, Homo sapiens
  CDR3 for alpha chain variable domain of TCR clone 303047 (TRAV16, TRAJ10)
CSRTGGGNKLTF

SEQ ID NO: 606094 - protein, 16 aa, Homo sapiens
  CDR3 for beta chain variable domain of TCR clone 303047 (TRBV20-1, TRBJ2-1)
CSARDRLKSLYNEQFF

SEQ ID NO: 606095 - protein, 12 aa, Homo sapiens
  CDR3 for alpha chain variable domain of TCR clone 303048 (TRAV1-2, TRAJ33)
CAALDSNYQLIW

SEQ ID NO: 606096 - protein, 16 aa, Homo sapiens
  CDR3 for beta chain variable domain of TCR clone 303048 (TRBV6-4, TRBJ1-2)
CASSEAVGDPNYGYTV

SEQ ID NO: 606097 - protein, 12 aa, Homo sapiens
  CDR3 for alpha chain variable domain of TCR clone 303049 (TRAV13-1, TRAJ11)
CAASNGYSTLTF

SEQ ID NO: 606098 - protein, 14 aa, Homo sapiens
  CDR3 for beta chain variable domain of TCR clone 303049 (TRBV12-4, TRBJ2-7)
CASSPRQDLYEQYF

SEQ ID NO: 606099 - protein, 12 aa, Homo sapiens
  CDR3 for alpha chain variable domain of TCR clone 303050 (TRAV12-1, TRAJ40)
CVVFSGTYKYIF

SEQ ID NO: 606100 - protein, 18 aa, Homo sapiens
  CDR3 for beta chain variable domain of TCR clone 303050 (TRBV11-2, TRBJ2-3)
CASSLGGASRGAPNTQYF

SEQ ID NO: 606101 - protein, 15 aa, Homo sapiens
  CDR3 for alpha chain variable domain of TCR clone 303051 (TRAV3, TRAJ22)
CAVRDRGGSARQLTF

SEQ ID NO: 606102 - protein, 15 aa, Homo sapiens
  CDR3 for beta chain variable domain of TCR clone 303051 (TRBV7-3, TRBJ2-1)
CTSSPTGGGEVEQFF

SEQ ID NO: 606103 - protein, 13 aa, Homo sapiens
  CDR3 for alpha chain variable domain of TCR clone 303052 (TRAV21, TRAJ52)
CAVRPSPAGGTSY

SEQ ID NO: 606104 - protein, 15 aa, Homo sapiens
  CDR3 for beta chain variable domain of TCR clone 303052 (TRBV19, TRBJ1-1)
CASTSGQFQNTEAFF

SEQ ID NO: 606105 - protein, 14 aa, Homo sapiens
  CDR3 for alpha chain variable domain of TCR clone 303053 (TRAV8-4, TRAJ54)
CAVSEVLGAQKLVF

SEQ ID NO: 606106 - protein, 13 aa, Homo sapiens
  CDR3 for beta chain variable domain of TCR clone 303053 (TRBV7-9, TRBJ1-2)
CASSLKQNYGYTF

SEQ ID NO: 606107 - protein, 15 aa, Homo sapiens
  CDR3 for alpha chain variable domain of TCR clone 303054 (TRAV3, TRAJ5)
CAVRDLDTGRRALTF

SEQ ID NO: 606108 - protein, 13 aa, Homo sapiens
  CDR3 for beta chain variable domain of TCR clone 303054 (TRBV12-4, TRBJ2-7)
CASSQTETHEQYF

SEQ ID NO: 606109 - protein, 11 aa, Homo sapiens
  CDR3 for alpha chain variable domain of TCR clone 303055 (TRAV12-2, TRAJ39)
CAVNNMLTFGG

SEQ ID NO: 606110 - protein, 16 aa, Homo sapiens
  CDR3 for beta chain variable domain of TCR clone 303055 (TRBV9, TRBJ1-2)
CASSVEEKVSPYGYTL

SEQ ID NO: 606111 - protein, 15 aa, Homo sapiens
  CDR3 for alpha chain variable domain of TCR clone 303056 (TRAV16, TRAJ48)
CALFIFNFGNEKLTF

SEQ ID NO: 606112 - protein, 15 aa, Homo sapiens
  CDR3 for beta chain variable domain of TCR clone 303056 (TRBV5-4, TRBJ2-7)
CASSRFGTGSYEQYF

SEQ ID NO: 606113 - protein, 10 aa, Homo sapiens
  CDR3 for alpha chain variable domain of TCR clone 303057 (TRAV12-3, TRAJ49)
CAMNDDQFYF

SEQ ID NO: 606114 - protein, 16 aa, Homo sapiens
  CDR3 for beta chain variable domain of TCR clone 303057 (TRBV4-1, TRBJ1-1)
CASSYRQGTGDTEAFF

SEQ ID NO: 606115 - protein, 14 aa, Homo sapiens
  CDR3 for alpha chain variable domain of TCR clone 303058 (TRAV26-1, TRAJ38)
CIAANAGNNRKLIW

SEQ ID NO: 606116 - protein, 17 aa, Homo sapiens
  CDR3 for beta chain variable domain of TCR clone 303058 (TRBV5-1, TRBJ2-7)
CASSNPEGREASYEQYF

SEQ ID NO: 606117 - protein, 14 aa, Homo sapiens
  CDR3 for alpha chain variable domain of TCR clone 303059 (TRAV12-3, TRAJ9)
CAMSPNTGGFKTIF

SEQ ID NO: 606118 - protein, 15 aa, Homo sapiens
  CDR3 for beta chain variable domain of TCR clone 303059 (TRBV6-5, TRBJ2-1)
CASSYDAGAGIEQFF

SEQ ID NO: 606119 - protein, 20 aa, Homo sapiens
  CDR3 for alpha chain variable domain of TCR clone 303060 (TRAV26-1, TRAJ42)
CCVLLHRQTYYGGSQGNLIF

SEQ ID NO: 606120 - protein, 15 aa, Homo sapiens
  CDR3 for beta chain variable domain of TCR clone 303060 (TRBV7-3, TRBJ2-2)
CRQLKAGDLVRELFF

SEQ ID NO: 606121 - protein, 11 aa, Homo sapiens
  CDR3 for alpha chain variable domain of TCR clone 303061 (TRAV12-3, TRAJ43)
CAMSVSNDMRF

SEQ ID NO: 606122 - protein, 16 aa, Homo sapiens
  CDR3 for beta chain variable domain of TCR clone 303061 (TRBV7-7, TRBJ2-1)
CASSLASGTSYNEQFF

SEQ ID NO: 606123 - protein, 14 aa, Homo sapiens
  CDR3 for alpha chain variable domain of TCR clone 303062 (TRAV3, TRAJ37)
CAVKESGNTGKLIF

SEQ ID NO: 606124 - protein, 16 aa, Homo sapiens
  CDR3 for beta chain variable domain of TCR clone 303062 (TRBV10-3, TRBJ2-1)
CAIRGGGSGDYNEQFF

SEQ ID NO: 606125 - protein, 13 aa, Homo sapiens
  CDR3 for alpha chain variable domain of TCR clone 303063 (TRAV13-2, TRAJ16)
RADARTDGQKLLF

SEQ ID NO: 606126 - protein, 19 aa, Homo sapiens
  CDR3 for beta chain variable domain of TCR clone 303063 (TRBV5-5, TRBJ2-5)
CASSIGGGWGDPVLRARHA

SEQ ID NO: 606127 - protein, 14 aa, Homo sapiens
  CDR3 for alpha chain variable domain of TCR clone 303064 (TRAV3, TRAJ34)
CAVRAPGNTDKLIF

SEQ ID NO: 606128 - protein, 17 aa, Homo sapiens
  CDR3 for beta chain variable domain of TCR clone 303064 (TRBV20-1, TRBJ2-7)
CSAAPGLARGVSYEQYF

SEQ ID NO: 606129 - protein, 17 aa, Homo sapiens
  CDR3 for alpha chain variable domain of TCR clone 303065 (TRAV3, TRAJ38)
CAVRDCLNAGNNRKLIW

SEQ ID NO: 606130 - protein, 15 aa, Homo sapiens
  CDR3 for beta chain variable domain of TCR clone 303065 (TRBV7-2, TRBJ2-1)
CASTSASGDYNEQFF

SEQ ID NO: 606131 - protein, 15 aa, Homo sapiens
  CDR3 for alpha chain variable domain of TCR clone 303066 (TRAV26-2, TRAJ54)
CILRDVGLGAQKLVF

SEQ ID NO: 606132 - protein, 13 aa, Homo sapiens
  CDR3 for beta chain variable domain of TCR clone 303066 (TRBV7-9, TRBJ1-1)
CASSLAGVTEAFF

SEQ ID NO: 606133 - protein, 14 aa, Homo sapiens
  CDR3 for alpha chain variable domain of TCR clone 303067 (TRAV1-2, TRAJ8)
CSVREDTGFQKLVF

SEQ ID NO: 606134 - protein, 13 aa, Homo sapiens
  CDR3 for beta chain variable domain of TCR clone 303067 (TRBV12-4, TRBJ1-4)
CASAMGHNEKLFF

SEQ ID NO: 606135 - protein, 11 aa, Homo sapiens
  CDR3 for alpha chain variable domain of TCR clone 303068 (TRAV1-2, TRAJ20)
CAVSNDYKLSF

SEQ ID NO: 606136 - protein, 16 aa, Homo sapiens
  CDR3 for beta chain variable domain of TCR clone 303068 (TRBV7-9, TRBJ1-2)
CASSLGFSSGEDGYTF

SEQ ID NO: 606137 - protein, 14 aa, Homo sapiens
  CDR3 for alpha chain variable domain of TCR clone 303069 (TRAV26-1, TRAJ38)
CIADNAGNNRKMIW

SEQ ID NO: 606138 - protein, 12 aa, Homo sapiens
  CDR3 for beta chain variable domain of TCR clone 303069 (TRBV18, TRBJ1-1)
CASSPGGTEAFF

SEQ ID NO: 606139 - protein, 13 aa, Homo sapiens
  CDR3 for alpha chain variable domain of TCR clone 303070 (TRAV30, TRAJ49)
CGTEPNTGHQFYF

SEQ ID NO: 606140 - protein, 14 aa, Homo sapiens
  CDR3 for beta chain variable domain of TCR clone 303070 (TRBV29-1, TRBJ2-1)
CSVEFRGIPFEQFF

SEQ ID NO: 606141 - protein, 15 aa, Homo sapiens
  CDR3 for alpha chain variable domain of TCR clone 303071 (TRAV3, TRAJ20)
CAVRDSRSNDYKLSF

SEQ ID NO: 606142 - protein, 14 aa, Homo sapiens
  CDR3 for beta chain variable domain of TCR clone 303071 (TRBV19, TRBJ2-1)
CASPTFVLSGEQFF

SEQ ID NO: 606143 - protein, 12 aa, Homo sapiens
  CDR3 for alpha chain variable domain of TCR clone 303072 (TRAV27, TRAJ35)
CAGADFGNVLHC

SEQ ID NO: 606144 - protein, 12 aa, Homo sapiens
  CDR3 for beta chain variable domain of TCR clone 303072 (TRBV11-2, TRBJ2-1)
CASSPGNNEQFF

SEQ ID NO: 606145 - protein, 14 aa, Homo sapiens
  CDR3 for alpha chain variable domain of TCR clone 303073 (TRAV29/DV5, TRAJ20)
CAATIRSNDYKLSF

SEQ ID NO: 606146 - protein, 15 aa, Homo sapiens
  CDR3 for beta chain variable domain of TCR clone 303073 (TRBV20-1, TRBJ2-1)
CSVSSAGSSYNEQFF

SEQ ID NO: 606147 - protein, 12 aa, Homo sapiens
  CDR3 for alpha chain variable domain of TCR clone 303074 (TRAV12-2, TRAJ3)
CAVWSSASKIIF

SEQ ID NO: 606148 - protein, 13 aa, Homo sapiens
  CDR3 for beta chain variable domain of TCR clone 303074 (TRBV6-1, TRBJ1-1)
CAGSRQGNTEAFF

SEQ ID NO: 606149 - protein, 17 aa, Homo sapiens
  CDR3 for alpha chain variable domain of TCR clone 303075 (TRAV3, TRAJ38)
CAVRDCLNAGNNRKLIW

SEQ ID NO: 606150 - protein, 13 aa, Homo sapiens
  CDR3 for beta chain variable domain of TCR clone 303075 (TRBV4-1, TRBJ1-1)
CASSQLGTGEAFF

SEQ ID NO: 606151 - protein, 15 aa, Homo sapiens
  CDR3 for alpha chain variable domain of TCR clone 303076 (TRAV13-1, TRAJ10)
CAATILTGGGNKLTF

SEQ ID NO: 606152 - protein, 15 aa, Homo sapiens
  CDR3 for beta chain variable domain of TCR clone 303076 (TRBV2, TRBJ2-7)
CPSTLLGSGATEQYF

SEQ ID NO: 606153 - protein, 14 aa, Homo sapiens
  CDR3 for alpha chain variable domain of TCR clone 303077 (TRAV29/DV5, TRAJ36)
CAARRKTGANNLFF

SEQ ID NO: 606154 - protein, 14 aa, Homo sapiens
  CDR3 for beta chain variable domain of TCR clone 303077 (TRBV7-2, TRBJ2-7)
CDSRSQGAAYEQYF

SEQ ID NO: 606155 - protein, 13 aa, Homo sapiens
  CDR3 for alpha chain variable domain of TCR clone 303078 (TRAV13-1, TRAJ20)
CAARVSNDYKLSF

SEQ ID NO: 606156 - protein, 13 aa, Homo sapiens
  CDR3 for beta chain variable domain of TCR clone 303078 (TRBV19, TRBJ1-2)
CASSVPGQDGYTF

SEQ ID NO: 606157 - protein, 14 aa, Homo sapiens
  CDR3 for alpha chain variable domain of TCR clone 303079 (TRAV26-1, TRAJ21)
CIVRPPYNFNKFYF

SEQ ID NO: 606158 - protein, 14 aa, Homo sapiens
  CDR3 for beta chain variable domain of TCR clone 303079 (TRBV19, TRBJ2-1)
CASPTFVLSGEQLF

SEQ ID NO: 606159 - protein, 16 aa, Homo sapiens
  CDR3 for alpha chain variable domain of TCR clone 303080 (TRAV8-3, TRAJ42)
CAVGEGNGGSQGNLIF

SEQ ID NO: 606160 - protein, 15 aa, Homo sapiens
  CDR3 for beta chain variable domain of TCR clone 303080 (TRBV7-2, TRBJ1-1)
CASSFAGDRDTEAFF

SEQ ID NO: 606161 - protein, 13 aa, Homo sapiens
  CDR3 for alpha chain variable domain of TCR clone 303081 (TRAV3, TRAJ27)
CAVRPLGAGKSTF

SEQ ID NO: 606162 - protein, 20 aa, Homo sapiens
  CDR3 for beta chain variable domain of TCR clone 303081 (TRBV4-1, TRBJ2-2)
CASSQASPPGLASNTGELFF

SEQ ID NO: 606163 - protein, 15 aa, Homo sapiens
  CDR3 for alpha chain variable domain of TCR clone 303082 (TRAV8-3, TRAJ27)
CAVGPSKTNAGKSTF

SEQ ID NO: 606164 - protein, 15 aa, Homo sapiens
  CDR3 for beta chain variable domain of TCR clone 303082 (TRBV7-2, TRBJ2-1)
CASSAGLAGGNERFF

SEQ ID NO: 606165 - protein, 14 aa, Homo sapiens
  CDR3 for alpha chain variable domain of TCR clone 303083 (TRAV12-3, TRAJ10)
SATYLTGGGNKLTF

SEQ ID NO: 606166 - protein, 15 aa, Homo sapiens
  CDR3 for beta chain variable domain of TCR clone 303083 (TRBV20-1, TRBJ2-7)
CSARDRVSGMDEQYF

SEQ ID NO: 606167 - protein, 15 aa, Homo sapiens
  CDR3 for alpha chain variable domain of TCR clone 303084 (TRAV21, TRAJ24)
CAARYSTDSWGKLQF

SEQ ID NO: 606168 - protein, 19 aa, Homo sapiens
  CDR3 for beta chain variable domain of TCR clone 303084 (TRBV14, TRBJ2-1)
CASSQDQLWEAPEYNEQFF

SEQ ID NO: 606169 - protein, 16 aa, Homo sapiens
  CDR3 for alpha chain variable domain of TCR clone 303085 (TRAV3, TRAJ37)
CAVRAHGSGNTGKLIF

SEQ ID NO: 606170 - protein, 16 aa, Homo sapiens
  CDR3 for beta chain variable domain of TCR clone 303085 (TRBV9, TRBJ1-2)
CASSVEEKVSPYGYTF

SEQ ID NO: 606171 - protein, 15 aa, Homo sapiens
  CDR3 for alpha chain variable domain of TCR clone 303086 (TRAV17, TRAJ56)
CATDANTGANRKLTF

SEQ ID NO: 606172 - protein, 14 aa, Homo sapiens
  CDR3 for beta chain variable domain of TCR clone 303086 (TRBV19, TRBJ1-5)
CASSLGTGGQPQHF

SEQ ID NO: 606173 - protein, 13 aa, Homo sapiens
  CDR3 for alpha chain variable domain of TCR clone 303087 (TRAV14/DV4, TRAJ22)
CAMRDLSARQLTF

SEQ ID NO: 606174 - protein, 18 aa, Homo sapiens
  CDR3 for beta chain variable domain of TCR clone 303087 (TRBV19, TRBJ1-5)
CASSKGQVSIHSNQPQHC

SEQ ID NO: 606175 - protein, 15 aa, Homo sapiens
  CDR3 for alpha chain variable domain of TCR clone 303088 (TRAV12-3, TRAJ6)
CAMSATTGGSYRPTF

SEQ ID NO: 606176 - protein, 16 aa, Homo sapiens
  CDR3 for beta chain variable domain of TCR clone 303088 (TRBV7-3, TRBJ2-2)
CASSLKRGTLSGELFF

SEQ ID NO: 606177 - protein, 14 aa, Homo sapiens
  CDR3 for alpha chain variable domain of TCR clone 303089 (TRAV12-3, TRAJ58)
CAMSTETSGSRLTF

SEQ ID NO: 606178 - protein, 12 aa, Homo sapiens
  CDR3 for beta chain variable domain of TCR clone 303089 (TRBV27, TRBJ2-3)
CQQLGRTDTQYF

SEQ ID NO: 606179 - protein, 12 aa, Homo sapiens
  CDR3 for alpha chain variable domain of TCR clone 303090 (TRAV12-3, TRAJ17)
CAMTPTGNKLTF

SEQ ID NO: 606180 - protein, 15 aa, Homo sapiens
  CDR3 for beta chain variable domain of TCR clone 303090 (TRBV20-1, TRBJ2-7)
CSARDRVSGMDEQYF

SEQ ID NO: 606181 - protein, 14 aa, Homo sapiens
  CDR3 for alpha chain variable domain of TCR clone 303091 (TRAV26-1, TRAJ38)
CIADNAGHNRKLSW

SEQ ID NO: 606182 - protein, 17 aa, Homo sapiens
  CDR3 for beta chain variable domain of TCR clone 303091 (TRBV7-9, TRBJ2-3)
CASSPTVAGDLTDTQYF

SEQ ID NO: 606183 - protein, 12 aa, Homo sapiens
  CDR3 for alpha chain variable domain of TCR clone 303092 (TRAV13-2, TRAJ8)
CAPWLGFQKLVF

SEQ ID NO: 606184 - protein, 13 aa, Homo sapiens
  CDR3 for beta chain variable domain of TCR clone 303092 (TRBV12-4, TRBJ1-5)
CAISPDRAQAQHF

SEQ ID NO: 606185 - protein, 12 aa, Homo sapiens
  CDR3 for alpha chain variable domain of TCR clone 303093 (TRAV13-1, TRAJ21)
CAAKEGFNKFYF

SEQ ID NO: 606186 - protein, 13 aa, Homo sapiens
  CDR3 for beta chain variable domain of TCR clone 303093 (TRBV20-1, TRBJ1-6)
CSAPLGVGSPLHF

SEQ ID NO: 606187 - protein, 12 aa, Homo sapiens
  CDR3 for alpha chain variable domain of TCR clone 303094 (TRAV1-1, TRAJ8)
FAGGTGFQKLVF

SEQ ID NO: 606188 - protein, 13 aa, Homo sapiens
  CDR3 for beta chain variable domain of TCR clone 303094 (TRBV7-3, TRBJ1-1)
CASSQDWGAEAFF

SEQ ID NO: 606189 - protein, 15 aa, Homo sapiens
  CDR3 for alpha chain variable domain of TCR clone 303095 (TRAV3, TRAJ5)
CAVRDLDTGRRALTL

SEQ ID NO: 606190 - protein, 13 aa, Homo sapiens
  CDR3 for beta chain variable domain of TCR clone 303095 (TRBV12-4, TRBJ2-7)
CAGSPTETYEQYF

SEQ ID NO: 606191 - protein, 14 aa, Homo sapiens
  CDR3 for alpha chain variable domain of TCR clone 303096 (TRAV12-2, TRAJ53)
CRERGGGGNYKLTF

SEQ ID NO: 606192 - protein, 17 aa, Homo sapiens
  CDR3 for beta chain variable domain of TCR clone 303096 (TRBV7-3, TRBJ2-3)
RASSLMKRMRGADTQYF

SEQ ID NO: 606193 - protein, 15 aa, Homo sapiens
  CDR3 for alpha chain variable domain of TCR clone 303097 (TRAV26-2, TRAJ13)
CILRDLSGGYQKVTF

SEQ ID NO: 606194 - protein, 14 aa, Homo sapiens
  CDR3 for beta chain variable domain of TCR clone 303097 (TRBV4-1, TRBJ2-3)
CASSQEGITDTQYF

SEQ ID NO: 606195 - protein, 14 aa, Homo sapiens
  CDR3 for alpha chain variable domain of TCR clone 303098 (TRAV1-2, TRAJ8)
CAVREDTGFQKLVF

SEQ ID NO: 606196 - protein, 15 aa, Homo sapiens
  CDR3 for beta chain variable domain of TCR clone 303098 (TRBV7-3, TRBJ2-2)
CASSETGQGTGELVF

SEQ ID NO: 606197 - protein, 11 aa, Homo sapiens
  CDR3 for alpha chain variable domain of TCR clone 303099 (TRAV1-1, TRAJ5)
CAVRVRRALTF

SEQ ID NO: 606198 - protein, 14 aa, Homo sapiens
  CDR3 for beta chain variable domain of TCR clone 303099 (TRBV7-3, TRBJ1-1)
WASSIRGGNTEAFF

SEQ ID NO: 606199 - protein, 16 aa, Homo sapiens
  CDR3 for alpha chain variable domain of TCR clone 303100 (TRAV12-3, TRAJ52)
CAVSNAGGTSYGKLTF

SEQ ID NO: 606200 - protein, 16 aa, Homo sapiens
  CDR3 for beta chain variable domain of TCR clone 303100 (TRBV6-6, TRBJ2-1)
CASSYSFSGSYNEHFF

SEQ ID NO: 606201 - protein, 17 aa, Homo sapiens
  CDR3 for alpha chain variable domain of TCR clone 303101 (TRAV3, TRAJ42)
CAVRDRDYGGSHGNLIF

SEQ ID NO: 606202 - protein, 14 aa, Homo sapiens
  CDR3 for beta chain variable domain of TCR clone 303101 (TRBV19, TRBJ2-5)
CASSMTGQQETQYF

SEQ ID NO: 606203 - protein, 14 aa, Homo sapiens
  CDR3 for alpha chain variable domain of TCR clone 303102 (TRAV1-2, TRAJ16)
CAVNRFSDGQKLLF

SEQ ID NO: 606204 - protein, 13 aa, Homo sapiens
  CDR3 for beta chain variable domain of TCR clone 303102 (TRBV10-3, TRBJ2-7)
CASKLTVNYEQYF

SEQ ID NO: 606205 - protein, 15 aa, Homo sapiens
  CDR3 for alpha chain variable domain of TCR clone 303103 (TRAV2, TRAJ22)
CAVPSRGGSARQLTF

SEQ ID NO: 606206 - protein, 11 aa, Homo sapiens
  CDR3 for beta chain variable domain of TCR clone 303103 (TRBV27, TRBJ2-3)
CASILGDTQYF

SEQ ID NO: 606207 - protein, 12 aa, Homo sapiens
  CDR3 for alpha chain variable domain of TCR clone 303104 (TRAV13-1, TRAJ21)
CAAKQGFNKFYF

SEQ ID NO: 606208 - protein, 15 aa, Homo sapiens
  CDR3 for beta chain variable domain of TCR clone 303104 (TRBV15, TRBJ1-5)
CATSRDPVSNQPQHF

SEQ ID NO: 606209 - protein, 14 aa, Homo sapiens
  CDR3 for alpha chain variable domain of TCR clone 303105 (TRAV1-2, TRAJ8)
CAVREDTGFQKLVF

SEQ ID NO: 606210 - protein, 15 aa, Homo sapiens
  CDR3 for beta chain variable domain of TCR clone 303105 (TRBV7-3, TRBJ2-2)
CASSETGQGTGEVFF

SEQ ID NO: 606211 - protein, 14 aa, Homo sapiens
  CDR3 for alpha chain variable domain of TCR clone 303106 (TRAV12-1, TRAJ38)
CVVNDAGNNRKLIW

SEQ ID NO: 606212 - protein, 17 aa, Homo sapiens
  CDR3 for beta chain variable domain of TCR clone 303106 (TRBV20-1, TRBJ2-2)
CSASGSGQGGLTGELFF

SEQ ID NO: 606213 - protein, 13 aa, Homo sapiens
  CDR3 for alpha chain variable domain of TCR clone 303107 (TRAV8-6, TRAJ9)
CAVWDTGGFKTIF

SEQ ID NO: 606214 - protein, 13 aa, Homo sapiens
  CDR3 for beta chain variable domain of TCR clone 303107 (TRBV27, TRBJ1-1)
CARSLSIGAEAFF

SEQ ID NO: 606215 - protein, 14 aa, Homo sapiens
  CDR3 for alpha chain variable domain of TCR clone 303108 (TRAV26-1, TRAJ38)
CIADNAGNNRKLIW

SEQ ID NO: 606216 - protein, 15 aa, Homo sapiens
  CDR3 for beta chain variable domain of TCR clone 303108 (TRBV5-1, TRBJ2-5)
CASSLGLAEQETQYF

SEQ ID NO: 606217 - protein, 15 aa, Homo sapiens
  CDR3 for alpha chain variable domain of TCR clone 303109 (TRAV17, TRAJ6)
CATDLPSGGSYIPTF

SEQ ID NO: 606218 - protein, 16 aa, Homo sapiens
  CDR3 for beta chain variable domain of TCR clone 303109 (TRBV4-1, TRBJ2-7)
CASSQDPTGHSYEQYF

SEQ ID NO: 606219 - protein, 11 aa, Homo sapiens
  CDR3 for alpha chain variable domain of TCR clone 303110 (TRAV12-1, TRAJ34)
CVVYKGRELIF

SEQ ID NO: 606220 - protein, 12 aa, Homo sapiens
  CDR3 for beta chain variable domain of TCR clone 303110 (TRBV11-2, TRBJ2-2)
CASSLGGGELFF

SEQ ID NO: 606221 - protein, 11 aa, Homo sapiens
  CDR3 for alpha chain variable domain of TCR clone 303111 (TRAV8-1, TRAJ8)
CAMTGFQKLVF

SEQ ID NO: 606222 - protein, 15 aa, Homo sapiens
  CDR3 for beta chain variable domain of TCR clone 303111 (TRBV11-3, TRBJ2-7)
CASSPGPASSYEQYF

SEQ ID NO: 606223 - protein, 13 aa, Homo sapiens
  CDR3 for alpha chain variable domain of TCR clone 303112 (TRAV27, TRAJ41)
CAGEGNTGYALNF

SEQ ID NO: 606224 - protein, 14 aa, Homo sapiens
  CDR3 for beta chain variable domain of TCR clone 303112 (TRBV7-2, TRBJ1-1)
CASSVLTGTTEAFF

SEQ ID NO: 606225 - protein, 16 aa, Homo sapiens
  CDR3 for alpha chain variable domain of TCR clone 303113 (TRAV3, TRAJ32)
CAVRENYGGATTKLIF

SEQ ID NO: 606226 - protein, 12 aa, Homo sapiens
  CDR3 for beta chain variable domain of TCR clone 303113 (TRBV20-1, TRBJ1-2)
CSVTPEGYGYTF

SEQ ID NO: 606227 - protein, 15 aa, Homo sapiens
  CDR3 for alpha chain variable domain of TCR clone 303114 (TRAV27, TRAJ38)
CAARRNAGNNRKLIW

SEQ ID NO: 606228 - protein, 15 aa, Homo sapiens
  CDR3 for beta chain variable domain of TCR clone 303114 (TRBV19, TRBJ1-2)
CSSSVGQVLNYGYTF

SEQ ID NO: 606229 - protein, 13 aa, Homo sapiens
  CDR3 for alpha chain variable domain of TCR clone 303115 (TRAV12-2, TRAJ37)
CVGGSGNTGKLIF

SEQ ID NO: 606230 - protein, 14 aa, Homo sapiens
  CDR3 for beta chain variable domain of TCR clone 303115 (TRBV6-1, TRBJ2-6)
CASQQGAGANVLTF

SEQ ID NO: 606231 - protein, 15 aa, Homo sapiens
  CDR3 for alpha chain variable domain of TCR clone 303116 (TRAV12-3, TRAJ49)
CAMAVTPNTGNQFYF

SEQ ID NO: 606232 - protein, 14 aa, Homo sapiens
  CDR3 for beta chain variable domain of TCR clone 303116 (TRBV7-8, TRBJ2-3)
CGSSLEAGTDTQYF

SEQ ID NO: 606233 - protein, 13 aa, Homo sapiens
  CDR3 for alpha chain variable domain of TCR clone 303117 (TRAV8-3, TRAJ20)
CAVGRPNDYKLSF

SEQ ID NO: 606234 - protein, 13 aa, Homo sapiens
  CDR3 for beta chain variable domain of TCR clone 303117 (TRBV10-2, TRBJ2-7)
CASGASGGYEQYF

SEQ ID NO: 606235 - protein, 12 aa, Homo sapiens
  CDR3 for alpha chain variable domain of TCR clone 303118 (TRAV21, TRAJ33)
CATMDSNYQLIW

SEQ ID NO: 606236 - protein, 12 aa, Homo sapiens
  CDR3 for beta chain variable domain of TCR clone 303118 (TRBV11-2, TRBJ2-2)
CASSLGGGELFF

SEQ ID NO: 606237 - protein, 15 aa, Homo sapiens
  CDR3 for alpha chain variable domain of TCR clone 303119 (TRAV2, TRAJ9)
CAVEDRGTGGFKTIF

SEQ ID NO: 606238 - protein, 14 aa, Homo sapiens
  CDR3 for beta chain variable domain of TCR clone 303119 (TRBV15, TRBJ2-7)
CATSRVARGYEQYF

SEQ ID NO: 606239 - protein, 15 aa, Homo sapiens
  CDR3 for alpha chain variable domain of TCR clone 303120 (TRAV14/DV4, TRAJ12)
CAMREGWDSSYKLIF

SEQ ID NO: 606240 - protein, 16 aa, Homo sapiens
  CDR3 for beta chain variable domain of TCR clone 303120 (TRBV2, TRBJ2-5)
CASSKTQGVGEETKYF

SEQ ID NO: 606241 - protein, 13 aa, Homo sapiens
  CDR3 for alpha chain variable domain of TCR clone 303121 (TRAV29/DV5, TRAJ31)
CASSRNNNARLMF

SEQ ID NO: 606242 - protein, 12 aa, Homo sapiens
  CDR3 for beta chain variable domain of TCR clone 303121 (TRBV14, TRBJ2-7)
CASSSLKGEQYF

SEQ ID NO: 606243 - protein, 14 aa, Homo sapiens
  CDR3 for alpha chain variable domain of TCR clone 303122 (TRAV12-2, TRAJ45)
CAVNIGGGADGLTF

SEQ ID NO: 606244 - protein, 13 aa, Homo sapiens
  CDR3 for beta chain variable domain of TCR clone 303122 (TRBV19, TRBJ2-2)
CASSISSTGELFF

SEQ ID NO: 606245 - protein, 19 aa, Homo sapiens
  CDR3 for alpha chain variable domain of TCR clone 303123 (TRAV1-2, TRAJ26)
CLLPRCCERPDNYGQNFVF

SEQ ID NO: 606246 - protein, 15 aa, Homo sapiens
  CDR3 for beta chain variable domain of TCR clone 303123 (TRBV9, TRBJ1-6)
CASSVAGTGDSPLHF

SEQ ID NO: 606247 - protein, 17 aa, Homo sapiens
  CDR3 for alpha chain variable domain of TCR clone 303124 (TRAV27, TRAJ52)
CAGAGGAGGTSYGKLTF

SEQ ID NO: 606248 - protein, 16 aa, Homo sapiens
  CDR3 for beta chain variable domain of TCR clone 303124 (TRBV19, TRBJ2-1)
CASSKAGPSSCNEQFF

SEQ ID NO: 606249 - protein, 16 aa, Homo sapiens
  CDR3 for alpha chain variable domain of TCR clone 303125 (TRAV12-1, TRAJ12)
CVVNSLLMDSSYKLIF

SEQ ID NO: 606250 - protein, 13 aa, Homo sapiens
  CDR3 for beta chain variable domain of TCR clone 303125 (TRBV11-2, TRBJ2-1)
CASSSEAYNEQIF

SEQ ID NO: 606251 - protein, 16 aa, Homo sapiens
  CDR3 for alpha chain variable domain of TCR clone 303126 (TRAV3, TRAJ42)
CAVRDIEGGSQGNLIF

SEQ ID NO: 606252 - protein, 14 aa, Homo sapiens
  CDR3 for beta chain variable domain of TCR clone 303126 (TRBV18, TRBJ1-1)
CASSPPTGRTEAFY

SEQ ID NO: 606253 - protein, 12 aa, Homo sapiens
  CDR3 for alpha chain variable domain of TCR clone 303127 (TRAV17, TRAJ20)
CATDGDDYKLSF

SEQ ID NO: 606254 - protein, 16 aa, Homo sapiens
  CDR3 for beta chain variable domain of TCR clone 303127 (TRBV5-4, TRBJ2-1)
CASSLVGSGQDNEQFF

SEQ ID NO: 606255 - protein, 15 aa, Homo sapiens
  CDR3 for alpha chain variable domain of TCR clone 303128 (TRAV38-1, TRAJ28)
CAFIRSGAGSYQLTF

SEQ ID NO: 606256 - protein, 17 aa, Homo sapiens
  CDR3 for beta chain variable domain of TCR clone 303128 (TRBV7-2, TRBJ1-6)
CASSRVTGQGAGSPLHF

SEQ ID NO: 606257 - protein, 18 aa, Homo sapiens
  CDR3 for alpha chain variable domain of TCR clone 303129 (TRAV20, TRAJ4)
CAVQPYYMFSGGYNKLIF

SEQ ID NO: 606258 - protein, 13 aa, Homo sapiens
  CDR3 for beta chain variable domain of TCR clone 303129 (TRBV19, TRBJ2-3)
CAAWGKITDTQYF

SEQ ID NO: 606259 - protein, 16 aa, Homo sapiens
  CDR3 for alpha chain variable domain of TCR clone 303130 (TRAV3, TRAJ37)
CAVRGKGSGHTGKLIF

SEQ ID NO: 606260 - protein, 14 aa, Homo sapiens
  CDR3 for beta chain variable domain of TCR clone 303130 (TRBV19, TRBJ2-7)
CAGNFRDTFTGMYF

SEQ ID NO: 606261 - protein, 12 aa, Homo sapiens
  CDR3 for alpha chain variable domain of TCR clone 303131 (TRAV13-2, TRAJ23)
CAERHRGGKLIF

SEQ ID NO: 606262 - protein, 15 aa, Homo sapiens
  CDR3 for beta chain variable domain of TCR clone 303131 (TRBV14, TRBJ1-1)
CASSQDEMGRREAFF

SEQ ID NO: 606263 - protein, 14 aa, Homo sapiens
  CDR3 for alpha chain variable domain of TCR clone 303132 (TRAV8-1, TRAJ24)
CAVNAADSWGKLQF

SEQ ID NO: 606264 - protein, 13 aa, Homo sapiens
  CDR3 for beta chain variable domain of TCR clone 303132 (TRBV20-1, TRBJ1-1)
CSARGGGNTEAFF

SEQ ID NO: 606265 - protein, 22 aa, Homo sapiens
  CDR3 for alpha chain variable domain of TCR clone 303133 (TRAV27, TRAJ41)
CAVRTQIPDIQNPDPAVYQLRD

SEQ ID NO: 606266 - protein, 16 aa, Homo sapiens
  CDR3 for beta chain variable domain of TCR clone 303133 (TRBV5-1, TRBJ2-3)
CASSLGLAVCTDTQYF

SEQ ID NO: 606267 - protein, 14 aa, Homo sapiens
  CDR3 for alpha chain variable domain of TCR clone 303134 (TRAV1-2, TRAJ16)
CAVNRFSDGQRLLF

SEQ ID NO: 606268 - protein, 12 aa, Homo sapiens
  CDR3 for beta chain variable domain of TCR clone 303134 (TRBV7-9, TRBJ2-7)
CASSLEGYEQYF

SEQ ID NO: 606269 - protein, 14 aa, Homo sapiens
  CDR3 for alpha chain variable domain of TCR clone 303135 (TRAV1-2, TRAJ8)
CAVREDTGFQKLVF

SEQ ID NO: 606270 - protein, 14 aa, Homo sapiens
  CDR3 for beta chain variable domain of TCR clone 303135 (TRBV15, TRBJ2-3)
CATRIGTSTDTQYF

SEQ ID NO: 606271 - protein, 18 aa, Homo sapiens
  CDR3 for alpha chain variable domain of TCR clone 303136 (TRAV1-1, TRAJ42)
CAVSPSAFYGGSQGNLIF

SEQ ID NO: 606272 - protein, 12 aa, Homo sapiens
  CDR3 for beta chain variable domain of TCR clone 303136 (TRBV12-4, TRBJ1-2)
CASSFIWLHLRF

SEQ ID NO: 606273 - protein, 13 aa, Homo sapiens
  CDR3 for alpha chain variable domain of TCR clone 303137 (TRAV13-1, TRAJ27)
CAASTHQCRQINH

SEQ ID NO: 606274 - protein, 16 aa, Homo sapiens
  CDR3 for beta chain variable domain of TCR clone 303137 (TRBV27, TRBJ2-2)
CASSFRGLVRTGELFF

SEQ ID NO: 606275 - protein, 14 aa, Homo sapiens
  CDR3 for alpha chain variable domain of TCR clone 303138 (TRAV21, TRAJ24)
CAVEATDSWGKLQF

SEQ ID NO: 606276 - protein, 17 aa, Homo sapiens
  CDR3 for beta chain variable domain of TCR clone 303138 (TRBV4-1, TRBJ2-3)
CASSQSGTGVFADTQYF

SEQ ID NO: 606277 - protein, 13 aa, Homo sapiens
  CDR3 for alpha chain variable domain of TCR clone 303139 (TRAV2, TRAJ40)
CAVVTSGTYKYIF

SEQ ID NO: 606278 - protein, 16 aa, Homo sapiens
  CDR3 for beta chain variable domain of TCR clone 303139 (TRBV5-7, TRBJ2-3)
CASSPWTSGGTDTQYF

SEQ ID NO: 606279 - protein, 14 aa, Homo sapiens
  CDR3 for alpha chain variable domain of TCR clone 303140 (TRAV8-3, TRAJ15)
CAVGRHQAGTALIF

SEQ ID NO: 606280 - protein, 15 aa, Homo sapiens
  CDR3 for beta chain variable domain of TCR clone 303140 (TRBV12-4, TRBJ2-5)
CASSPPTGLQETQYF

SEQ ID NO: 606281 - protein, 15 aa, Homo sapiens
  CDR3 for alpha chain variable domain of TCR clone 303141 (TRAV38-2/DV8, TRAJ48)
CAYRSGGFGNEKLTF

SEQ ID NO: 606282 - protein, 16 aa, Homo sapiens
  CDR3 for beta chain variable domain of TCR clone 303141 (TRBV28, TRBJ2-7)
CASSPWVATGDHTQYF

SEQ ID NO: 606283 - protein, 13 aa, Homo sapiens
  CDR3 for alpha chain variable domain of TCR clone 303142 (TRAV5, TRAJ30)
CAEIANRDDKIIF

SEQ ID NO: 606284 - protein, 15 aa, Homo sapiens
  CDR3 for beta chain variable domain of TCR clone 303142 (TRBV7-2, TRBJ1-2)
CASSPRAGWNYGYTF

SEQ ID NO: 606285 - protein, 12 aa, Homo sapiens
  CDR3 for alpha chain variable domain of TCR clone 303143 (TRAV1-1, TRAJ30)
CAVRGRDDKIIF

SEQ ID NO: 606286 - protein, 14 aa, Homo sapiens
  CDR3 for beta chain variable domain of TCR clone 303143 (TRBV7-2, TRBJ1-1)
CASSFMTGTTEAFF

SEQ ID NO: 606287 - protein, 16 aa, Homo sapiens
  CDR3 for alpha chain variable domain of TCR clone 303144 (TRAV27, TRAJ13)
CAGAKSDSGGYQKVTF

SEQ ID NO: 606288 - protein, 14 aa, Homo sapiens
  CDR3 for beta chain variable domain of TCR clone 303144 (TRBV4-1, TRBJ2-2)
CASSQAVNTGELFL

SEQ ID NO: 606289 - protein, 16 aa, Homo sapiens
  CDR3 for alpha chain variable domain of TCR clone 303145 (TRAV3, TRAJ37)
CAVRPHGSGNTGKLIF

SEQ ID NO: 606290 - protein, 15 aa, Homo sapiens
  CDR3 for beta chain variable domain of TCR clone 303145 (TRBV20-1, TRBJ2-7)
CSARDRISGMDEQYF

SEQ ID NO: 606291 - protein, 16 aa, Homo sapiens
  CDR3 for alpha chain variable domain of TCR clone 303146 (TRAV3, TRAJ37)
CAVRGKGSGNTGKLIF

SEQ ID NO: 606292 - protein, 16 aa, Homo sapiens
  CDR3 for beta chain variable domain of TCR clone 303146 (TRBV5-1, TRBJ2-7)
CASSITVGTGGYEQYF

SEQ ID NO: 606293 - protein, 13 aa, Homo sapiens
  CDR3 for alpha chain variable domain of TCR clone 303147 (TRAV3, TRAJ21)
CAVREPDVNKFYF

SEQ ID NO: 606294 - protein, 18 aa, Homo sapiens
  CDR3 for beta chain variable domain of TCR clone 303147 (TRBV11-2, TRBJ2-3)
CASSLGGASRGAPNTQYF

SEQ ID NO: 606295 - protein, 17 aa, Homo sapiens
  CDR3 for alpha chain variable domain of TCR clone 303148 (TRAV38-1, TRAJ45)
CAFMKHYMGGGADGLPF

SEQ ID NO: 606296 - protein, 13 aa, Homo sapiens
  CDR3 for beta chain variable domain of TCR clone 303148 (TRBV2, TRBJ1-4)
CASSERAGEKLFF

SEQ ID NO: 606297 - protein, 13 aa, Homo sapiens
  CDR3 for alpha chain variable domain of TCR clone 303149 (TRAV8-6, TRAJ49)
CAVITNTGNQFYF

SEQ ID NO: 606298 - protein, 14 aa, Homo sapiens
  CDR3 for beta chain variable domain of TCR clone 303149 (TRBV5-1, TRBJ2-7)
CSSSRGESLYEQYF

SEQ ID NO: 606299 - protein, 14 aa, Homo sapiens
  CDR3 for alpha chain variable domain of TCR clone 303150 (TRAV27, TRAJ22)
CVGVVPGFARQLTF

SEQ ID NO: 606300 - protein, 16 aa, Homo sapiens
  CDR3 for beta chain variable domain of TCR clone 303150 (TRBV9, TRBJ2-1)
CASSVGGGGNYNEQFF

SEQ ID NO: 606301 - protein, 15 aa, Homo sapiens
  CDR3 for alpha chain variable domain of TCR clone 303151 (TRAV35, TRAJ38)
CADFSNAGNNRKLIW

SEQ ID NO: 606302 - protein, 18 aa, Homo sapiens
  CDR3 for beta chain variable domain of TCR clone 303151 (TRBV3-1, TRBJ1-2)
CASSQDVIGWNGDYGYTF

SEQ ID NO: 606303 - protein, 14 aa, Homo sapiens
  CDR3 for alpha chain variable domain of TCR clone 303152 (TRAV8-4, TRAJ38)
CARLNAGNNRKLIW

SEQ ID NO: 606304 - protein, 12 aa, Homo sapiens
  CDR3 for beta chain variable domain of TCR clone 303152 (TRBV6-1, TRBJ2-7)
CASSEPLYEKYF

SEQ ID NO: 606305 - protein, 17 aa, Homo sapiens
  CDR3 for alpha chain variable domain of TCR clone 303153 (TRAV3, TRAJ6)
CSVRDCPRAGGSYIPAF

SEQ ID NO: 606306 - protein, 14 aa, Homo sapiens
  CDR3 for beta chain variable domain of TCR clone 303153 (TRBV7-2, TRBJ2-7)
CASSPKTSFYEQYF

SEQ ID NO: 606307 - protein, 18 aa, Homo sapiens
  CDR3 for alpha chain variable domain of TCR clone 303154 (TRAV21, TRAJ52)
CAVRPSPAGGTSYGTLTF

SEQ ID NO: 606308 - protein, 15 aa, Homo sapiens
  CDR3 for beta chain variable domain of TCR clone 303154 (TRBV7-9, TRBJ2-7)
CASSSSGLAVYEQYF

SEQ ID NO: 606309 - protein, 14 aa, Homo sapiens
  CDR3 for alpha chain variable domain of TCR clone 303155 (TRAV13-1, TRAJ28)
CAASPGAGSYQLTF

SEQ ID NO: 606310 - protein, 14 aa, Homo sapiens
  CDR3 for beta chain variable domain of TCR clone 303155 (TRBV25-1, TRBJ1-1)
CASTHLGGNTEAFF

SEQ ID NO: 606311 - protein, 13 aa, Homo sapiens
  CDR3 for alpha chain variable domain of TCR clone 303156 (TRAV3, TRAJ20)
CAVRPLNDYKLSF

SEQ ID NO: 606312 - protein, 12 aa, Homo sapiens
  CDR3 for beta chain variable domain of TCR clone 303156 (TRBV6-1, TRBJ2-1)
CATYGLNNEQFF

SEQ ID NO: 606313 - protein, 16 aa, Homo sapiens
  CDR3 for alpha chain variable domain of TCR clone 303157 (TRAV1-2, TRAJ10)
CAVRGVLTGGANKLTF

SEQ ID NO: 606314 - protein, 16 aa, Homo sapiens
  CDR3 for beta chain variable domain of TCR clone 303157 (TRBV29-1, TRBJ2-7)
CSVEVVGTSGSYEQYF

SEQ ID NO: 606315 - protein, 16 aa, Homo sapiens
  CDR3 for alpha chain variable domain of TCR clone 303158 (TRAV3, TRAJ37)
CAVRGKGSGNTGKRIF

SEQ ID NO: 606316 - protein, 16 aa, Homo sapiens
  CDR3 for beta chain variable domain of TCR clone 303158 (TRBV12-5, TRBJ2-5)
CASGPRTSGNQETQYF

SEQ ID NO: 606317 - protein, 10 aa, Homo sapiens
  CDR3 for alpha chain variable domain of TCR clone 303159 (TRAV2, TRAJ34)
CAVVNDKLIF

SEQ ID NO: 606318 - protein, 15 aa, Homo sapiens
  CDR3 for beta chain variable domain of TCR clone 303159 (TRBV13, TRBJ1-3)
CASSSQGTSGNTIYF

SEQ ID NO: 606319 - protein, 12 aa, Homo sapiens
  CDR3 for alpha chain variable domain of TCR clone 303160 (TRAV2, TRAJ9)
CAVGEGGFKTIF

SEQ ID NO: 606320 - protein, 16 aa, Homo sapiens
  CDR3 for beta chain variable domain of TCR clone 303160 (TRBV13, TRBJ2-2)
CASSPRTGEHTGELFF

SEQ ID NO: 606321 - protein, 12 aa, Homo sapiens
  CDR3 for alpha chain variable domain of TCR clone 303161 (TRAV21, TRAJ11)
CAATSGYSTLTF

SEQ ID NO: 606322 - protein, 15 aa, Homo sapiens
  CDR3 for beta chain variable domain of TCR clone 303161 (TRBV7-9, TRBJ2-7)
CASSPGGGLTYEQYF

SEQ ID NO: 606323 - protein, 13 aa, Homo sapiens
  CDR3 for alpha chain variable domain of TCR clone 303162 (TRAV20, TRAJ48)
CAVQWVGNEKLTF

SEQ ID NO: 606324 - protein, 14 aa, Homo sapiens
  CDR3 for beta chain variable domain of TCR clone 303162 (TRBV27, TRBJ2-7)
CASSFRDGPYEQYF

SEQ ID NO: 606325 - protein, 16 aa, Homo sapiens
  CDR3 for alpha chain variable domain of TCR clone 303163 (TRAV4, TRAJ22)
CLVGDLYSGSARQLTF

SEQ ID NO: 606326 - protein, 16 aa, Homo sapiens
  CDR3 for beta chain variable domain of TCR clone 303163 (TRBV7-9, TRBJ2-1)
CASSEVAGGSYNEQFF

SEQ ID NO: 606327 - protein, 15 aa, Homo sapiens
  CDR3 for alpha chain variable domain of TCR clone 303164 (TRAV2, TRAJ37)
CAVGDGSSNTGKLIL

SEQ ID NO: 606328 - protein, 13 aa, Homo sapiens
  CDR3 for beta chain variable domain of TCR clone 303164 (TRBV20-1, TRBJ2-7)
CSAQTGLSYEQYF

SEQ ID NO: 606329 - protein, 15 aa, Homo sapiens
  CDR3 for alpha chain variable domain of TCR clone 303165 (TRAV12-3, TRAJ11)
CAMSEENSGYSTLTF

SEQ ID NO: 606330 - protein, 13 aa, Homo sapiens
  CDR3 for beta chain variable domain of TCR clone 303165 (TRBV7-9, TRBJ2-5)
CASLPSGRETQYF

SEQ ID NO: 606331 - protein, 13 aa, Homo sapiens
  CDR3 for alpha chain variable domain of TCR clone 303166 (TRAV14/DV4, TRAJ26)
CAMREAYGQNFVF

SEQ ID NO: 606332 - protein, 17 aa, Homo sapiens
  CDR3 for beta chain variable domain of TCR clone 303166 (TRBV4-1, TRBJ2-7)
CASSRDPLGVRGGEQYF

SEQ ID NO: 606333 - protein, 18 aa, Homo sapiens
  CDR3 for alpha chain variable domain of TCR clone 303167 (TRAV35, TRAJ28)
CAGHNYPLSGAVSYQLTF

SEQ ID NO: 606334 - protein, 12 aa, Homo sapiens
  CDR3 for beta chain variable domain of TCR clone 303167 (TRBV7-9, TRBJ1-1)
CASSLEGTEAFF

SEQ ID NO: 606335 - protein, 15 aa, Homo sapiens
  CDR3 for alpha chain variable domain of TCR clone 303168 (TRAV29/DV5, TRAJ24)
CAASGATDSWGKFQF

SEQ ID NO: 606336 - protein, 15 aa, Homo sapiens
  CDR3 for beta chain variable domain of TCR clone 303168 (TRBV6-4, TRBJ2-1)
CASSDSTGGYNEQFF

SEQ ID NO: 606337 - protein, 14 aa, Homo sapiens
  CDR3 for alpha chain variable domain of TCR clone 303169 (TRAV1-2, TRAJ16)
CAVNRFSDGPKLLF

SEQ ID NO: 606338 - protein, 13 aa, Homo sapiens
  CDR3 for beta chain variable domain of TCR clone 303169 (TRBV6-5, TRBJ1-1)
QTSVYFFALRAFF

SEQ ID NO: 606339 - protein, 15 aa, Homo sapiens
  CDR3 for alpha chain variable domain of TCR clone 303170 (TRAV8-3, TRAJ11)
CAVGLLNSVYSTLTF

SEQ ID NO: 606340 - protein, 16 aa, Homo sapiens
  CDR3 for beta chain variable domain of TCR clone 303170 (TRBV7-9, TRBJ1-2)
CASSLGFSPGEDGYTF

SEQ ID NO: 606341 - protein, 11 aa, Homo sapiens
  CDR3 for alpha chain variable domain of TCR clone 303171 (TRAV1-2, TRAJ40)
CAVPGTYKYLF

SEQ ID NO: 606342 - protein, 15 aa, Homo sapiens
  CDR3 for beta chain variable domain of TCR clone 303171 (TRBV7-9, TRBJ2-7)
CASSLALAEAYEQYF

SEQ ID NO: 606343 - protein, 14 aa, Homo sapiens
  CDR3 for alpha chain variable domain of TCR clone 303172 (TRAV12-2, TRAJ13)
CAVKKTGGYQKVTF

SEQ ID NO: 606344 - protein, 10 aa, Homo sapiens
  CDR3 for beta chain variable domain of TCR clone 303172 (TRBV28, TRBJ1-2)
CASSQCGYTF

SEQ ID NO: 606345 - protein, 14 aa, Homo sapiens
  CDR3 for alpha chain variable domain of TCR clone 303173 (TRAV1-2, TRAJ16)
CAVSRFSDGQKLLF

SEQ ID NO: 606346 - protein, 13 aa, Homo sapiens
  CDR3 for beta chain variable domain of TCR clone 303173 (TRBV7-9, TRBJ1-2)
CASSLKQNYGYTV

SEQ ID NO: 606347 - protein, 16 aa, Homo sapiens
  CDR3 for alpha chain variable domain of TCR clone 303174 (TRAV16, TRAJ57)
CAPYLITQGGSEKLVF

SEQ ID NO: 606348 - protein, 11 aa, Homo sapiens
  CDR3 for beta chain variable domain of TCR clone 303174 (TRBV6-3, TRBJ2-3)
CATGQADTQYF

SEQ ID NO: 606349 - protein, 12 aa, Homo sapiens
  CDR3 for alpha chain variable domain of TCR clone 303175 (TRAV13-1, TRAJ17)
CAARTSGNKLTF

SEQ ID NO: 606350 - protein, 15 aa, Homo sapiens
  CDR3 for beta chain variable domain of TCR clone 303175 (TRBV7-6, TRBJ1-1)
CASSPQGGANTEAFF

SEQ ID NO: 606351 - protein, 12 aa, Homo sapiens
  CDR3 for alpha chain variable domain of TCR clone 303176 (TRAV3, TRAJ7)
CADLLWEQQTRF

SEQ ID NO: 606352 - protein, 12 aa, Homo sapiens
  CDR3 for beta chain variable domain of TCR clone 303176 (TRBV19, TRBJ2-1)
CASSMQDTEQFF

SEQ ID NO: 606353 - protein, 10 aa, Homo sapiens
  CDR3 for alpha chain variable domain of TCR clone 303177 (TRAV1-2, TRAJ31)
CAFFDSRLMF

SEQ ID NO: 606354 - protein, 13 aa, Homo sapiens
  CDR3 for beta chain variable domain of TCR clone 303177 (TRBV7-9, TRBJ1-2)
CASSLKQNYVYTF

SEQ ID NO: 606355 - protein, 14 aa, Homo sapiens
  CDR3 for alpha chain variable domain of TCR clone 303178 (TRAV2, TRAJ9)
CAVEDRSGGFKTIF

SEQ ID NO: 606356 - protein, 14 aa, Homo sapiens
  CDR3 for beta chain variable domain of TCR clone 303178 (TRBV4-1, TRBJ1-2)
CASSQSTQAYGYTF

SEQ ID NO: 606357 - protein, 15 aa, Homo sapiens
  CDR3 for alpha chain variable domain of TCR clone 303179 (TRAV20, TRAJ32)
CAVQAKSGATNNLIF

SEQ ID NO: 606358 - protein, 14 aa, Homo sapiens
  CDR3 for beta chain variable domain of TCR clone 303179 (TRBV25-1, TRBJ1-1)
CASTHLGGNTEAFF

SEQ ID NO: 606359 - protein, 16 aa, Homo sapiens
  CDR3 for alpha chain variable domain of TCR clone 303180 (TRAV12-1, TRAJ48)
CVVYGGSNFGNAKLTF

SEQ ID NO: 606360 - protein, 15 aa, Homo sapiens
  CDR3 for beta chain variable domain of TCR clone 303180 (TRBV28, TRBJ1-2)
CASIPQGSDDYGYTF

SEQ ID NO: 606361 - protein, 16 aa, Homo sapiens
  CDR3 for alpha chain variable domain of TCR clone 303181 (TRAV3, TRAJ10)
CAVRDMRAGGGNKLPF

SEQ ID NO: 606362 - protein, 14 aa, Homo sapiens
  CDR3 for beta chain variable domain of TCR clone 303181 (TRBV7-2, TRBJ1-4)
CASSVVEGGEKLFF

SEQ ID NO: 606363 - protein, 15 aa, Homo sapiens
  CDR3 for alpha chain variable domain of TCR clone 303182 (TRAV26-2, TRAJ50)
CILRDEETSYDKVIF

SEQ ID NO: 606364 - protein, 17 aa, Homo sapiens
  CDR3 for beta chain variable domain of TCR clone 303182 (TRBV5-7, TRBJ1-6)
CASSLAPGDTYNSPLHV

SEQ ID NO: 606365 - protein, 19 aa, Homo sapiens
  CDR3 for alpha chain variable domain of TCR clone 303183 (TRAV1-1, TRAJ37)
CLLLLRCERSGSNTGKLIF

SEQ ID NO: 606366 - protein, 14 aa, Homo sapiens
  CDR3 for beta chain variable domain of TCR clone 303183 (TRBV29-1, TRBJ2-2)
WSALGGVGAGELFF

SEQ ID NO: 606367 - protein, 16 aa, Homo sapiens
  CDR3 for alpha chain variable domain of TCR clone 303184 (TRAV3, TRAJ10)
CAVRDMRAGGGNKLTF

SEQ ID NO: 606368 - protein, 16 aa, Homo sapiens
  CDR3 for beta chain variable domain of TCR clone 303184 (TRBV19, TRBJ2-2)
CASSFPGQGLAGELSF

SEQ ID NO: 606369 - protein, 13 aa, Homo sapiens
  CDR3 for alpha chain variable domain of TCR clone 303185 (TRAV8-6, TRAJ13)
CAVRDGGYQKVTF

SEQ ID NO: 606370 - protein, 14 aa, Homo sapiens
  CDR3 for beta chain variable domain of TCR clone 303185 (TRBV7-9, TRBJ1-1)
CASSLKGGNTEAFF

SEQ ID NO: 606371 - protein, 11 aa, Homo sapiens
  CDR3 for alpha chain variable domain of TCR clone 303186 (TRAV26-1, TRAJ37)
CIVRVGRKLIF

SEQ ID NO: 606372 - protein, 17 aa, Homo sapiens
  CDR3 for beta chain variable domain of TCR clone 303186 (TRBV13, TRBJ2-3)
CASSLSRVAGGRNTQYF

SEQ ID NO: 606373 - protein, 11 aa, Homo sapiens
  CDR3 for alpha chain variable domain of TCR clone 303187 (TRAV27, TRAJ47)
CRSNQGKKLVF

SEQ ID NO: 606374 - protein, 16 aa, Homo sapiens
  CDR3 for beta chain variable domain of TCR clone 303187 (TRBV7-9, TRBJ2-1)
CASSDVAGGPYNEQFF

SEQ ID NO: 606375 - protein, 14 aa, Homo sapiens
  CDR3 for alpha chain variable domain of TCR clone 303188 (TRAV23/DV6, TRAJ27)
CAASRDTSAGKSTF

SEQ ID NO: 606376 - protein, 13 aa, Homo sapiens
  CDR3 for beta chain variable domain of TCR clone 303188 (TRBV20-1, TRBJ1-5)
CSASGRGNQTQHF

SEQ ID NO: 606377 - protein, 18 aa, Homo sapiens
  CDR3 for alpha chain variable domain of TCR clone 303189 (TRAV26-1, TRAJ56)
CIVRVASRVTGANSKLTF

SEQ ID NO: 606378 - protein, 15 aa, Homo sapiens
  CDR3 for beta chain variable domain of TCR clone 303189 (TRBV7-9, TRBJ2-5)
CASSDTGRGRETQNF

SEQ ID NO: 606379 - protein, 16 aa, Homo sapiens
  CDR3 for alpha chain variable domain of TCR clone 303190 (TRAV14/DV4, TRAJ20)
CAMREGRSRDDYKLSF

SEQ ID NO: 606380 - protein, 12 aa, Homo sapiens
  CDR3 for beta chain variable domain of TCR clone 303190 (TRBV7-8, TRBJ2-7)
CASSLGDREQYF

SEQ ID NO: 606381 - protein, 15 aa, Homo sapiens
  CDR3 for alpha chain variable domain of TCR clone 303191 (TRAV27, TRAJ38)
CAARRNAGNNRKLIW

SEQ ID NO: 606382 - protein, 15 aa, Homo sapiens
  CDR3 for beta chain variable domain of TCR clone 303191 (TRBV5-1, TRBJ2-2)
CASSSQGGNTGELFF

SEQ ID NO: 606383 - protein, 12 aa, Homo sapiens
  CDR3 for alpha chain variable domain of TCR clone 303192 (TRAV17, TRAJ39)
CATGAAGNMLTF

SEQ ID NO: 606384 - protein, 16 aa, Homo sapiens
  CDR3 for beta chain variable domain of TCR clone 303192 (TRBV7-6, TRBJ2-7)
CASSPWLDIREDEQYF

SEQ ID NO: 606385 - protein, 12 aa, Homo sapiens
  CDR3 for alpha chain variable domain of TCR clone 303193 (TRAV12-3, TRAJ17)
CAMTLTANKLTF

SEQ ID NO: 606386 - protein, 14 aa, Homo sapiens
  CDR3 for beta chain variable domain of TCR clone 303193 (TRBV4-1, TRBJ2-7)
CASSQDREHVEQYF

SEQ ID NO: 606387 - protein, 11 aa, Homo sapiens
  CDR3 for alpha chain variable domain of TCR clone 303194 (TRAV2, TRAJ33)
WAVDSNYQLIW

SEQ ID NO: 606388 - protein, 15 aa, Homo sapiens
  CDR3 for beta chain variable domain of TCR clone 303194 (TRBV19, TRBJ1-2)
CASSVGQVLNYGCTF

SEQ ID NO: 606389 - protein, 14 aa, Homo sapiens
  CDR3 for alpha chain variable domain of TCR clone 303195 (TRAV12-3, TRAJ10)
SHLPLMGGGNKLTF

SEQ ID NO: 606390 - protein, 12 aa, Homo sapiens
  CDR3 for beta chain variable domain of TCR clone 303195 (TRBV7-9, TRBJ2-7)
CASSIKREEQYF

SEQ ID NO: 606391 - protein, 14 aa, Homo sapiens
  CDR3 for alpha chain variable domain of TCR clone 303196 (TRAV12-2, TRAJ23)
WAVGGYNQGGKLIF

SEQ ID NO: 606392 - protein, 13 aa, Homo sapiens
  CDR3 for beta chain variable domain of TCR clone 303196 (TRBV19, TRBJ2-7)
CASSPRQSYEQYF

SEQ ID NO: 606393 - protein, 12 aa, Homo sapiens
  CDR3 for alpha chain variable domain of TCR clone 303197 (TRAV12-3, TRAJ17)
CAMTLTGNKLTF

SEQ ID NO: 606394 - protein, 20 aa, Homo sapiens
  CDR3 for beta chain variable domain of TCR clone 303197 (TRBV6-6, TRBJ2-5)
CASSPGGGLRGDTVLRARHA

SEQ ID NO: 606395 - protein, 16 aa, Homo sapiens
  CDR3 for alpha chain variable domain of TCR clone 303198 (TRAV12-1, TRAJ42)
CVVTPYYGGSQGNLIF

SEQ ID NO: 606396 - protein, 12 aa, Homo sapiens
  CDR3 for beta chain variable domain of TCR clone 303198 (TRBV12-4, TRBJ2-1)
CASSPGRNEQFF

SEQ ID NO: 606397 - protein, 14 aa, Homo sapiens
  CDR3 for alpha chain variable domain of TCR clone 303199 (TRAV23/DV6, TRAJ4)
CAAPSSGGYNKLIF

SEQ ID NO: 606398 - protein, 14 aa, Homo sapiens
  CDR3 for beta chain variable domain of TCR clone 303199 (TRBV4-2, TRBJ1-5)
CASSRDRGNQPQHF

SEQ ID NO: 606399 - protein, 14 aa, Homo sapiens
  CDR3 for alpha chain variable domain of TCR clone 303200 (TRAV12-2, TRAJ40)
CAVKIPSGTHKYIF

SEQ ID NO: 606400 - protein, 14 aa, Homo sapiens
  CDR3 for beta chain variable domain of TCR clone 303200 (TRBV20-1, TRBJ1-1)
CSAQTRIGVTEAFF

SEQ ID NO: 606401 - protein, 13 aa, Homo sapiens
  CDR3 for alpha chain variable domain of TCR clone 303201 (TRAV27, TRAJ6)
CAGGTRGSYIPTF

SEQ ID NO: 606402 - protein, 15 aa, Homo sapiens
  CDR3 for beta chain variable domain of TCR clone 303201 (TRBV7-2, TRBJ2-7)
CASSLVSSGSYEQYF

SEQ ID NO: 606403 - protein, 13 aa, Homo sapiens
  CDR3 for alpha chain variable domain of TCR clone 303202 (TRAV27, TRAJ8)
CAGGPTGFQKLVF

SEQ ID NO: 606404 - protein, 15 aa, Homo sapiens
  CDR3 for beta chain variable domain of TCR clone 303202 (TRBV6-1, TRBJ2-7)
CASSESMGDFYEQYS

SEQ ID NO: 606405 - protein, 14 aa, Homo sapiens
  CDR3 for alpha chain variable domain of TCR clone 303203 (TRAV29/DV5, TRAJ6)
CAASAQNTGNQFYF

SEQ ID NO: 606406 - protein, 13 aa, Homo sapiens
  CDR3 for beta chain variable domain of TCR clone 303203 (TRBV5-4, TRBJ2-5)
CASSPVSQETQYF

SEQ ID NO: 606407 - protein, 15 aa, Homo sapiens
  CDR3 for alpha chain variable domain of TCR clone 303204 (TRAV17, TRAJ4)
CATGTWSGGYNKLIF

SEQ ID NO: 606408 - protein, 14 aa, Homo sapiens
  CDR3 for beta chain variable domain of TCR clone 303204 (TRBV13, TRBJ2-5)
CASSLGPRGETQYL

SEQ ID NO: 606409 - protein, 15 aa, Homo sapiens
  CDR3 for alpha chain variable domain of TCR clone 303205 (TRAV26-1, TRAJ29)
CFVRAEGSGNTPLVF

SEQ ID NO: 606410 - protein, 14 aa, Homo sapiens
  CDR3 for beta chain variable domain of TCR clone 303205 (TRBV18, TRBJ2-5)
CASSPGVSQETQYF

SEQ ID NO: 606411 - protein, 13 aa, Homo sapiens
  CDR3 for alpha chain variable domain of TCR clone 303206 (TRAV35, TRAJ35)
CAGTNALGMCCIA

SEQ ID NO: 606412 - protein, 15 aa, Homo sapiens
  CDR3 for beta chain variable domain of TCR clone 303206 (TRBV4-3, TRBJ1-1)
CASSQDSLGNTEAFF

SEQ ID NO: 606413 - protein, 13 aa, Homo sapiens
  CDR3 for alpha chain variable domain of TCR clone 303207 (TRAV21, TRAJ27)
CAARPGNAGKSTF

SEQ ID NO: 606414 - protein, 14 aa, Homo sapiens
  CDR3 for beta chain variable domain of TCR clone 303207 (TRBV19, TRBJ2-7)
CASSIRLGDHEQYF

SEQ ID NO: 606415 - protein, 10 aa, Homo sapiens
  CDR3 for alpha chain variable domain of TCR clone 303208 (TRAV38-2/DV8, TRAJ40)
CAAGTYKYIF

SEQ ID NO: 606416 - protein, 14 aa, Homo sapiens
  CDR3 for beta chain variable domain of TCR clone 303208 (TRBV7-9, TRBJ2-1)
CASSPRDSLYEQFF

SEQ ID NO: 606417 - protein, 14 aa, Homo sapiens
  CDR3 for alpha chain variable domain of TCR clone 303209 (TRAV9-2, TRAJ39)
CALYIYNAGNMLTF

SEQ ID NO: 606418 - protein, 15 aa, Homo sapiens
  CDR3 for beta chain variable domain of TCR clone 303209 (TRBV10-3, TRBJ2-6)
CATPAAASGANVLTF

SEQ ID NO: 606419 - protein, 12 aa, Homo sapiens
  CDR3 for alpha chain variable domain of TCR clone 303210 (TRAV17, TRAJ53)
CATEGSNYKLTF

SEQ ID NO: 606420 - protein, 19 aa, Homo sapiens
  CDR3 for beta chain variable domain of TCR clone 303210 (TRBV5-1, TRBJ2-3)
CASSLWTSGEITTPDTQYF

SEQ ID NO: 606421 - protein, 15 aa, Homo sapiens
  CDR3 for alpha chain variable domain of TCR clone 303211 (TRAV13-1, TRAJ48)
CAASGANFGNEKLTF

SEQ ID NO: 606422 - protein, 14 aa, Homo sapiens
  CDR3 for beta chain variable domain of TCR clone 303211 (TRBV18, TRBJ2-7)
CASSSRTLAYEQYF

SEQ ID NO: 606423 - protein, 15 aa, Homo sapiens
  CDR3 for alpha chain variable domain of TCR clone 303212 (TRAV17, TRAJ37)
CATDGGSSNTGKLIC

SEQ ID NO: 606424 - protein, 15 aa, Homo sapiens
  CDR3 for beta chain variable domain of TCR clone 303212 (TRBV28, TRBJ2-5)
CASSSGRTIQETQYF

SEQ ID NO: 606425 - protein, 11 aa, Homo sapiens
  CDR3 for alpha chain variable domain of TCR clone 303213 (TRAV17, TRAJ9)
CATTGGFKTIF

SEQ ID NO: 606426 - protein, 13 aa, Homo sapiens
  CDR3 for beta chain variable domain of TCR clone 303213 (TRBV7-9, TRBJ2-2)
CRQRTSGHRELFF

SEQ ID NO: 606427 - protein, 10 aa, Homo sapiens
  CDR3 for alpha chain variable domain of TCR clone 303214 (TRAV8-3, TRAJ43)
CAVAIADMRF

SEQ ID NO: 606428 - protein, 14 aa, Homo sapiens
  CDR3 for beta chain variable domain of TCR clone 303214 (TRBV4-2, TRBJ2-1)
CASGLDRAYNEQFF

SEQ ID NO: 606429 - protein, 14 aa, Homo sapiens
  CDR3 for alpha chain variable domain of TCR clone 303215 (TRAV1-2, TRAJ16)
CAVNRFSDGQKLLF

SEQ ID NO: 606430 - protein, 18 aa, Homo sapiens
  CDR3 for beta chain variable domain of TCR clone 303215 (TRBV20-1, TRBJ2-6)
CGAETTSTHGSGANVLTF

SEQ ID NO: 606431 - protein, 14 aa, Homo sapiens
  CDR3 for alpha chain variable domain of TCR clone 303216 (TRAV14/DV4, TRAJ20)
CAMREGGNDYKLSF

SEQ ID NO: 606432 - protein, 12 aa, Homo sapiens
  CDR3 for beta chain variable domain of TCR clone 303216 (TRBV11-2, TRBJ2-2)
CASSLGGGELFF

SEQ ID NO: 606433 - protein, 11 aa, Homo sapiens
  CDR3 for alpha chain variable domain of TCR clone 303217 (TRAV13-1, TRAJ52)
PGGTSYGRLTF

SEQ ID NO: 606434 - protein, 16 aa, Homo sapiens
  CDR3 for beta chain variable domain of TCR clone 303217 (TRBV28, TRBJ2-7)
CASSPWVATGDLSQYF

SEQ ID NO: 606435 - protein, 18 aa, Homo sapiens
  CDR3 for alpha chain variable domain of TCR clone 303218 (TRAV29/DV5, TRAJ52)
CAAGFRGAGGTSYVKLTF

SEQ ID NO: 606436 - protein, 14 aa, Homo sapiens
  CDR3 for beta chain variable domain of TCR clone 303218 (TRBV27, TRBJ2-2)
CASRPGVNTGELFF

SEQ ID NO: 606437 - protein, 13 aa, Homo sapiens
  CDR3 for alpha chain variable domain of TCR clone 303219 (TRAV16, TRAJ34)
CALSPYNTDKLIF

SEQ ID NO: 606438 - protein, 13 aa, Homo sapiens
  CDR3 for beta chain variable domain of TCR clone 303219 (TRBV27, TRBJ2-7)
CASSFSQGYEQYF

SEQ ID NO: 606439 - protein, 14 aa, Homo sapiens
  CDR3 for alpha chain variable domain of TCR clone 303220 (TRAV16, TRAJ22)
CALRGQGSARQLTF

SEQ ID NO: 606440 - protein, 14 aa, Homo sapiens
  CDR3 for beta chain variable domain of TCR clone 303220 (TRBV10-3, TRBJ2-5)
CATSRDRDRETQYF

SEQ ID NO: 606441 - protein, 13 aa, Homo sapiens
  CDR3 for alpha chain variable domain of TCR clone 303221 (TRAV8-6, TRAJ8)
CAVSNTGFLKLVF

SEQ ID NO: 606442 - protein, 15 aa, Homo sapiens
  CDR3 for beta chain variable domain of TCR clone 303221 (TRBV28, TRBJ2-5)
CASSSGRTIQETQYF

SEQ ID NO: 606443 - protein, 14 aa, Homo sapiens
  CDR3 for alpha chain variable domain of TCR clone 303222 (TRAV8-2, TRAJ4)
CVVSPSGGYNKLIF

SEQ ID NO: 606444 - protein, 13 aa, Homo sapiens
  CDR3 for beta chain variable domain of TCR clone 303222 (TRBV7-2, TRBJ2-2)
CASSSVRAGELFF

SEQ ID NO: 606445 - protein, 15 aa, Homo sapiens
  CDR3 for alpha chain variable domain of TCR clone 303223 (TRAV21, TRAJ45)
CAVSYSGGGADGLTF

SEQ ID NO: 606446 - protein, 13 aa, Homo sapiens
  CDR3 for beta chain variable domain of TCR clone 303223 (TRBV4-1, TRBJ2-1)
CASSQAGGDEQFF

SEQ ID NO: 606447 - protein, 16 aa, Homo sapiens
  CDR3 for alpha chain variable domain of TCR clone 303224 (TRAV30, TRAJ24)
CGKEIVDADSWGKFQF

SEQ ID NO: 606448 - protein, 13 aa, Homo sapiens
  CDR3 for beta chain variable domain of TCR clone 303224 (TRBV11-2, TRBJ2-5)
CASSSTGEETQYF

SEQ ID NO: 606449 - protein, 15 aa, Homo sapiens
  CDR3 for alpha chain variable domain of TCR clone 303225 (TRAV8-3, TRAJ20)
RAVEAKGSNDYKPSF

SEQ ID NO: 606450 - protein, 12 aa, Homo sapiens
  CDR3 for beta chain variable domain of TCR clone 303225 (TRBV7-2, TRBJ1-2)
CASRDSIYGYTF

SEQ ID NO: 606451 - protein, 13 aa, Homo sapiens
  CDR3 for alpha chain variable domain of TCR clone 303226 (TRAV26-1, TRAJ12)
CIVRPDSSYKLIF

SEQ ID NO: 606452 - protein, 13 aa, Homo sapiens
  CDR3 for beta chain variable domain of TCR clone 303226 (TRBV12-5, TRBJ2-3)
CASGDRQSDTQYF

SEQ ID NO: 606453 - protein, 13 aa, Homo sapiens
  CDR3 for alpha chain variable domain of TCR clone 303227 (TRAV21, TRAJ20)
CAVGLRVDYKLSF

SEQ ID NO: 606454 - protein, 14 aa, Homo sapiens
  CDR3 for beta chain variable domain of TCR clone 303227 (TRBV14, TRBJ2-1)
CASSQVQGRGEQFF

SEQ ID NO: 606455 - protein, 17 aa, Homo sapiens
  CDR3 for alpha chain variable domain of TCR clone 303228 (TRAV26-2, TRAJ42)
CILRDVGYGGSQGNLIF

SEQ ID NO: 606456 - protein, 20 aa, Homo sapiens
  CDR3 for beta chain variable domain of TCR clone 303228 (TRBV12-4, TRBJ2-7)
CASSLIGGRDLRAVLRAGHQ

SEQ ID NO: 606457 - protein, 14 aa, Homo sapiens
  CDR3 for alpha chain variable domain of TCR clone 303229 (TRAV26-1, TRAJ39)
CIVRGSRAGNMLTF

SEQ ID NO: 606458 - protein, 14 aa, Homo sapiens
  CDR3 for beta chain variable domain of TCR clone 303229 (TRBV12-5, TRBJ2-5)
CASGSRTHQETQYF

SEQ ID NO: 606459 - protein, 14 aa, Homo sapiens
  CDR3 for alpha chain variable domain of TCR clone 303230 (TRAV23/DV6, TRAJ23)
CAAGPYNQRGKLIF

SEQ ID NO: 606460 - protein, 17 aa, Homo sapiens
  CDR3 for beta chain variable domain of TCR clone 303230 (TRBV4-2, TRBJ1-1)
CASSQVATGGMNTEAFF

SEQ ID NO: 606461 - protein, 13 aa, Homo sapiens
  CDR3 for alpha chain variable domain of TCR clone 303231 (TRAV2, TRAJ35)
CAPRVGFGNVLHC

SEQ ID NO: 606462 - protein, 15 aa, Homo sapiens
  CDR3 for beta chain variable domain of TCR clone 303231 (TRBV6-3, TRBJ2-7)
CASSSPGTVFCEQYF

SEQ ID NO: 606463 - protein, 16 aa, Homo sapiens
  CDR3 for alpha chain variable domain of TCR clone 303232 (TRAV12-2, TRAJ52)
CRLANAGGTSYGKLTF

SEQ ID NO: 606464 - protein, 14 aa, Homo sapiens
  CDR3 for beta chain variable domain of TCR clone 303232 (TRBV25-1, TRBJ1-1)
CASTHLGGNTEAFF

SEQ ID NO: 606465 - protein, 15 aa, Homo sapiens
  CDR3 for alpha chain variable domain of TCR clone 303233 (TRAV8-3, TRAJ45)
CASSNSGGGADGLTF

SEQ ID NO: 606466 - protein, 13 aa, Homo sapiens
  CDR3 for beta chain variable domain of TCR clone 303233 (TRBV20-1, TRBJ2-2)
CSASAAGTGELFF

SEQ ID NO: 606467 - protein, 16 aa, Homo sapiens
  CDR3 for alpha chain variable domain of TCR clone 303234 (TRAV10, TRAJ13)
CVVSARNSGGYQKVTF

SEQ ID NO: 606468 - protein, 13 aa, Homo sapiens
  CDR3 for beta chain variable domain of TCR clone 303234 (TRBV19, TRBJ2-7)
CASSPRQSYEQYF

SEQ ID NO: 606469 - protein, 13 aa, Homo sapiens
  CDR3 for alpha chain variable domain of TCR clone 303235 (TRAV13-2, TRAJ13)
CAERPGGYQKVTF

SEQ ID NO: 606470 - protein, 14 aa, Homo sapiens
  CDR3 for beta chain variable domain of TCR clone 303235 (TRBV23-1, TRBJ2-5)
CASSFLLSQETQYF

SEQ ID NO: 606471 - protein, 17 aa, Homo sapiens
  CDR3 for alpha chain variable domain of TCR clone 303236 (TRAV3, TRAJ6)
CAVRDGPRAGGSDIPTF

SEQ ID NO: 606472 - protein, 14 aa, Homo sapiens
  CDR3 for beta chain variable domain of TCR clone 303236 (TRBV7-3, TRBJ2-1)
CASSLAGGTNEQFF

SEQ ID NO: 606473 - protein, 15 aa, Homo sapiens
  CDR3 for alpha chain variable domain of TCR clone 303237 (TRAV8-3, TRAJ41)
CAVGSNSNSGYALNF

SEQ ID NO: 606474 - protein, 17 aa, Homo sapiens
  CDR3 for beta chain variable domain of TCR clone 303237 (TRBV25-1, TRBJ2-1)
CASSAYGQGRGVDEQFF

SEQ ID NO: 606475 - protein, 12 aa, Homo sapiens
  CDR3 for alpha chain variable domain of TCR clone 303238 (TRAV16, TRAJ10)
CSRTGGGNKLTF

SEQ ID NO: 606476 - protein, 16 aa, Homo sapiens
  CDR3 for beta chain variable domain of TCR clone 303238 (TRBV7-3, TRBJ2-2)
CASSVKRGTLSGELFF

SEQ ID NO: 606477 - protein, 16 aa, Homo sapiens
  CDR3 for alpha chain variable domain of TCR clone 303239 (TRAV27, TRAJ52)
CAGAGAGGTSHGKLTF

SEQ ID NO: 606478 - protein, 17 aa, Homo sapiens
  CDR3 for beta chain variable domain of TCR clone 303239 (TRBV24-1, TRBJ2-3)
CATSDLPSGEDTDTQYL

SEQ ID NO: 606479 - protein, 12 aa, Homo sapiens
  CDR3 for alpha chain variable domain of TCR clone 303240 (TRAV17, TRAJ20)
CATDGDDYKLSF

SEQ ID NO: 606480 - protein, 17 aa, Homo sapiens
  CDR3 for beta chain variable domain of TCR clone 303240 (TRBV13, TRBJ2-3)
CASSLSRVAGGRNTQYF

SEQ ID NO: 606481 - protein, 13 aa, Homo sapiens
  CDR3 for alpha chain variable domain of TCR clone 303241 (TRAV30, TRAJ16)
CGTFGGDGQKLLF

SEQ ID NO: 606482 - protein, 16 aa, Homo sapiens
  CDR3 for beta chain variable domain of TCR clone 303241 (TRBV7-6, TRBJ2-1)
CASSLAYSGRAGEQFV

SEQ ID NO: 606483 - protein, 12 aa, Homo sapiens
  CDR3 for alpha chain variable domain of TCR clone 303242 (TRAV20, TRAJ31)
CAVTDNNARLMF

SEQ ID NO: 606484 - protein, 13 aa, Homo sapiens
  CDR3 for beta chain variable domain of TCR clone 303242 (TRBV7-3, TRBJ1-1)
CASSQDWGAEAFF

SEQ ID NO: 606485 - protein, 10 aa, Homo sapiens
  CDR3 for alpha chain variable domain of TCR clone 303243 (TRAV13-2, TRAJ49)
CADTGNQFYF

SEQ ID NO: 606486 - protein, 20 aa, Homo sapiens
  CDR3 for beta chain variable domain of TCR clone 303243 (TRBV4-2, TRBJ2-7)
CASSQASGGNLRAVLRAGHQ

SEQ ID NO: 606487 - protein, 12 aa, Homo sapiens
  CDR3 for alpha chain variable domain of TCR clone 303244 (TRAV12-3, TRAJ32)
CAGGGATNKLIF

SEQ ID NO: 606488 - protein, 14 aa, Homo sapiens
  CDR3 for beta chain variable domain of TCR clone 303244 (TRBV7-2, TRBJ2-7)
CASSPKTSFYEQYF

SEQ ID NO: 606489 - protein, 16 aa, Homo sapiens
  CDR3 for alpha chain variable domain of TCR clone 303245 (TRAV3, TRAJ21)
CAVRAIERGNFNKFYF

SEQ ID NO: 606490 - protein, 20 aa, Homo sapiens
  CDR3 for beta chain variable domain of TCR clone 303245 (TRBV4-1, TRBJ2-2)
CASSQASPPGLASNTGELFF

SEQ ID NO: 606491 - protein, 17 aa, Homo sapiens
  CDR3 for alpha chain variable domain of TCR clone 303246 (TRAV3, TRAJ6)
CAVRDGPRAGGSYIPTF

SEQ ID NO: 606492 - protein, 15 aa, Homo sapiens
  CDR3 for beta chain variable domain of TCR clone 303246 (TRBV5-8, TRBJ2-2)
CASSLDRGATEELFF

SEQ ID NO: 606493 - protein, 15 aa, Homo sapiens
  CDR3 for alpha chain variable domain of TCR clone 303247 (TRAV17, TRAJ17)
CATDASIIRRQQANF

SEQ ID NO: 606494 - protein, 12 aa, Homo sapiens
  CDR3 for beta chain variable domain of TCR clone 303247 (TRBV5-4, TRBJ2-5)
CATSSIRETQYF

SEQ ID NO: 606495 - protein, 12 aa, Homo sapiens
  CDR3 for alpha chain variable domain of TCR clone 303248 (TRAV13-1, TRAJ11)
CAGPSGYSTLTF

SEQ ID NO: 606496 - protein, 14 aa, Homo sapiens
  CDR3 for beta chain variable domain of TCR clone 303248 (TRBV19, TRBJ2-1)
CASPTFVLSGEQFF

SEQ ID NO: 606497 - protein, 11 aa, Homo sapiens
  CDR3 for alpha chain variable domain of TCR clone 303249 (TRAV8-6, TRAJ42)
CAVRGRKPTKS

SEQ ID NO: 606498 - protein, 13 aa, Homo sapiens
  CDR3 for beta chain variable domain of TCR clone 303249 (TRBV7-3, TRBJ1-1)
CASSQDWGAEAFF

SEQ ID NO: 606499 - protein, 11 aa, Homo sapiens
  CDR3 for alpha chain variable domain of TCR clone 303250 (TRAV2, TRAJ13)
CASGGYQKVTF

SEQ ID NO: 606500 - protein, 14 aa, Homo sapiens
  CDR3 for beta chain variable domain of TCR clone 303250 (TRBV5-1, TRBJ2-7)
CASSLFTGTHEQYF

SEQ ID NO: 606501 - protein, 11 aa, Homo sapiens
  CDR3 for alpha chain variable domain of TCR clone 303251 (TRAV12-3, TRAJ11)
CAMKGYSTLTF

SEQ ID NO: 606502 - protein, 16 aa, Homo sapiens
  CDR3 for beta chain variable domain of TCR clone 303251 (TRBV11-2, TRBJ2-3)
CASSLCVSGGQDTQYF

SEQ ID NO: 606503 - protein, 13 aa, Homo sapiens
  CDR3 for alpha chain variable domain of TCR clone 303252 (TRAV8-3, TRAJ43)
CAVVPYNNNDMRF

SEQ ID NO: 606504 - protein, 11 aa, Homo sapiens
  CDR3 for beta chain variable domain of TCR clone 303252 (TRBV29-1, TRBJ2-5)
CSEDRTGTQYF

SEQ ID NO: 606505 - protein, 14 aa, Homo sapiens
  CDR3 for alpha chain variable domain of TCR clone 303253 (TRAV1-2, TRAJ16)
CAVNRFSDGQKLLF

SEQ ID NO: 606506 - protein, 15 aa, Homo sapiens
  CDR3 for beta chain variable domain of TCR clone 303253 (TRBV18, TRBJ1-5)
CASSETGGNNQPQHF

SEQ ID NO: 606507 - protein, 15 aa, Homo sapiens
  CDR3 for alpha chain variable domain of TCR clone 303254 (TRAV26-1, TRAJ29)
CIVRVEGSGNTPLVF

SEQ ID NO: 606508 - protein, 14 aa, Homo sapiens
  CDR3 for beta chain variable domain of TCR clone 303254 (TRBV7-8, TRBJ2-7)
CASSPRDRVYEQYF

SEQ ID NO: 606509 - protein, 16 aa, Homo sapiens
  CDR3 for alpha chain variable domain of TCR clone 303255 (TRAV16, TRAJ42)
CARTMNYGGSKGNLIF

SEQ ID NO: 606510 - protein, 14 aa, Homo sapiens
  CDR3 for beta chain variable domain of TCR clone 303255 (TRBV14, TRBJ2-3)
CQQPDDRDTDTQYF

SEQ ID NO: 606511 - protein, 12 aa, Homo sapiens
  CDR3 for alpha chain variable domain of TCR clone 303256 (TRAV17, TRAJ57)
CATNGGSEKLVF

SEQ ID NO: 606512 - protein, 13 aa, Homo sapiens
  CDR3 for beta chain variable domain of TCR clone 303256 (TRBV7-9, TRBJ2-7)
CASSFAGAYEQYF

SEQ ID NO: 606513 - protein, 15 aa, Homo sapiens
  CDR3 for alpha chain variable domain of TCR clone 303257 (TRAV8-3, TRAJ37)
CAVGARASNTVKLIF

SEQ ID NO: 606514 - protein, 15 aa, Homo sapiens
  CDR3 for beta chain variable domain of TCR clone 303257 (TRBV5-4, TRBJ2-3)
CASSVAGRVTETQYF

SEQ ID NO: 606515 - protein, 14 aa, Homo sapiens
  CDR3 for alpha chain variable domain of TCR clone 303258 (TRAV12-3, TRAJ10)
SHLPLTGGGNKLTF

SEQ ID NO: 606516 - protein, 13 aa, Homo sapiens
  CDR3 for beta chain variable domain of TCR clone 303258 (TRBV9, TRBJ2-7)
CASSVDPTGEQYF

SEQ ID NO: 606517 - protein, 13 aa, Homo sapiens
  CDR3 for alpha chain variable domain of TCR clone 303259 (TRAV23/DV6, TRAJ27)
CAASKPMQANQPL

SEQ ID NO: 606518 - protein, 12 aa, Homo sapiens
  CDR3 for beta chain variable domain of TCR clone 303259 (TRBV7-3, TRBJ2-1)
CASSFQSGPQFF

SEQ ID NO: 606519 - protein, 15 aa, Homo sapiens
  CDR3 for alpha chain variable domain of TCR clone 303260 (TRAV1-2, TRAJ28)
CAVEYSGAGSYQLTF

SEQ ID NO: 606520 - protein, 13 aa, Homo sapiens
  CDR3 for beta chain variable domain of TCR clone 303260 (TRBV20-1, TRBJ2-7)
CSATHTSGYEQYF

SEQ ID NO: 606521 - protein, 12 aa, Homo sapiens
  CDR3 for alpha chain variable domain of TCR clone 303261 (TRAV1-2, TRAJ26)
CAVRYYGQNFVF

SEQ ID NO: 606522 - protein, 14 aa, Homo sapiens
  CDR3 for beta chain variable domain of TCR clone 303261 (TRBV11-1, TRBJ2-7)
CASRFRQGSYEQYF

SEQ ID NO: 606523 - protein, 12 aa, Homo sapiens
  CDR3 for alpha chain variable domain of TCR clone 303262 (TRAV13-1, TRAJ21)
CAAKEGFNKFYF

SEQ ID NO: 606524 - protein, 17 aa, Homo sapiens
  CDR3 for beta chain variable domain of TCR clone 303262 (TRBV28, TRBJ2-3)
CASSPTPAGGRVDTQYF

SEQ ID NO: 606525 - protein, 16 aa, Homo sapiens
  CDR3 for alpha chain variable domain of TCR clone 303263 (TRAV3, TRAJ38)
CAVRDCLNAGNNHIQN

SEQ ID NO: 606526 - protein, 19 aa, Homo sapiens
  CDR3 for beta chain variable domain of TCR clone 303263 (TRBV7-2, TRBJ2-3)
CASSFLSRNWGGGTDTQYF

SEQ ID NO: 606527 - protein, 14 aa, Homo sapiens
  CDR3 for alpha chain variable domain of TCR clone 303264 (TRAV8-3, TRAJ15)
CAVGRHQAGTALIF

SEQ ID NO: 606528 - protein, 12 aa, Homo sapiens
  CDR3 for beta chain variable domain of TCR clone 303264 (TRBV19, TRBJ2-1)
CASSMQDTEQFF

SEQ ID NO: 606529 - protein, 13 aa, Homo sapiens
  CDR3 for alpha chain variable domain of TCR clone 303265 (TRAV13-2, TRAJ22)
CLGWISSARQLTF

SEQ ID NO: 606530 - protein, 15 aa, Homo sapiens
  CDR3 for beta chain variable domain of TCR clone 303265 (TRBV7-2, TRBJ2-3)
CASSSTGLETDRQYF

SEQ ID NO: 606531 - protein, 16 aa, Homo sapiens
  CDR3 for alpha chain variable domain of TCR clone 303266 (TRAV2, TRAJ4)
CAVEDPFSGGYNKLIF

SEQ ID NO: 606532 - protein, 13 aa, Homo sapiens
  CDR3 for beta chain variable domain of TCR clone 303266 (TRBV7-7, TRBJ2-5)
CASSRSGQETQYF

SEQ ID NO: 606533 - protein, 14 aa, Homo sapiens
  CDR3 for alpha chain variable domain of TCR clone 303267 (TRAV17, TRAJ57)
CATDPQGGSEKLVF

SEQ ID NO: 606534 - protein, 14 aa, Homo sapiens
  CDR3 for beta chain variable domain of TCR clone 303267 (TRBV13, TRBJ2-7)
CASSLKAASYEQYF

SEQ ID NO: 606535 - protein, 14 aa, Homo sapiens
  CDR3 for alpha chain variable domain of TCR clone 303268 (TRAV1-2, TRAJ16)
CAVNRFSDGRKLLF

SEQ ID NO: 606536 - protein, 18 aa, Homo sapiens
  CDR3 for beta chain variable domain of TCR clone 303268 (TRBV20-1, TRBJ2-6)
CSAETTPTHGSGANDLTF

SEQ ID NO: 606537 - protein, 20 aa, Homo sapiens
  CDR3 for alpha chain variable domain of TCR clone 303269 (TRAV21, TRAJ4)
EASQPGDSATLAGGYNKLIF

SEQ ID NO: 606538 - protein, 19 aa, Homo sapiens
  CDR3 for beta chain variable domain of TCR clone 303269 (TRBV18, TRBJ1-3)
CASSPLSRTGMSSGNTIYF

SEQ ID NO: 606539 - protein, 23 aa, Homo sapiens
  CDR3 for alpha chain variable domain of TCR clone 303270 (TRAV8-6, TRAJ38)
CAVRNAGNNHIQKPDPAVNQLRD

SEQ ID NO: 606540 - protein, 15 aa, Homo sapiens
  CDR3 for beta chain variable domain of TCR clone 303270 (TRBV4-1, TRBJ2-2)
CASSEGQGITGELFF

SEQ ID NO: 606541 - protein, 15 aa, Homo sapiens
  CDR3 for alpha chain variable domain of TCR clone 303271 (TRAV4, TRAJ36)
CLVGDRQTGANNLFF

SEQ ID NO: 606542 - protein, 15 aa, Homo sapiens
  CDR3 for beta chain variable domain of TCR clone 303271 (TRBV20-1, TRBJ2-7)
CSARDRVSGMDEQYF

SEQ ID NO: 606543 - protein, 14 aa, Homo sapiens
  CDR3 for alpha chain variable domain of TCR clone 303272 (TRAV35, TRAJ22)
CAGLRPGSARQLTF

SEQ ID NO: 606544 - protein, 13 aa, Homo sapiens
  CDR3 for beta chain variable domain of TCR clone 303272 (TRBV20-1, TRBJ2-7)
CSATYTSGYEQYF

SEQ ID NO: 606545 - protein, 15 aa, Homo sapiens
  CDR3 for alpha chain variable domain of TCR clone 303273 (TRAV1-2, TRAJ30)
CAVRPHGNRDDKIIF

SEQ ID NO: 606546 - protein, 19 aa, Homo sapiens
  CDR3 for beta chain variable domain of TCR clone 303273 (TRBV19, TRBJ2-5)
CASSIGQVTDFFLGETQYF

SEQ ID NO: 606547 - protein, 15 aa, Homo sapiens
  CDR3 for alpha chain variable domain of TCR clone 303274 (TRAV26-1, TRAJ29)
CIVRVEGSGNTPLVF

SEQ ID NO: 606548 - protein, 14 aa, Homo sapiens
  CDR3 for beta chain variable domain of TCR clone 303274 (TRBV2, TRBJ1-2)
CASSELQVNYGYTF

SEQ ID NO: 606549 - protein, 13 aa, Homo sapiens
  CDR3 for alpha chain variable domain of TCR clone 303275 (TRAV1-2, TRAJ9)
CAALNTGGFKTIF

SEQ ID NO: 606550 - protein, 13 aa, Homo sapiens
  CDR3 for beta chain variable domain of TCR clone 303275 (TRBV12-4, TRBJ1-5)
CASSPDRAQPQHF

SEQ ID NO: 606551 - protein, 17 aa, Homo sapiens
  CDR3 for alpha chain variable domain of TCR clone 303276 (TRAV8-6, TRAJ58)
CAVSSWGGATSGSRLTF

SEQ ID NO: 606552 - protein, 14 aa, Homo sapiens
  CDR3 for beta chain variable domain of TCR clone 303276 (TRBV4-2, TRBJ2-1)
CASGLDRAYNEQFF

SEQ ID NO: 606553 - protein, 14 aa, Homo sapiens
  CDR3 for alpha chain variable domain of TCR clone 303277 (TRAV12-3, TRAJ10)
SHLPLTGGGNKLTF

SEQ ID NO: 606554 - protein, 15 aa, Homo sapiens
  CDR3 for beta chain variable domain of TCR clone 303277 (TRBV4-1, TRBJ1-4)
CASSDTGITNEKLFF

SEQ ID NO: 606555 - protein, 14 aa, Homo sapiens
  CDR3 for alpha chain variable domain of TCR clone 303278 (TRAV27, TRAJ23)
CAGAFDNQGGKLIF

SEQ ID NO: 606556 - protein, 15 aa, Homo sapiens
  CDR3 for beta chain variable domain of TCR clone 303278 (TRBV7-3, TRBJ2-7)
CASSLTGEGKYEQYF

SEQ ID NO: 606557 - protein, 14 aa, Homo sapiens
  CDR3 for alpha chain variable domain of TCR clone 303279 (TRAV17, TRAJ35)
CATDRPGFGNVLHC

SEQ ID NO: 606558 - protein, 14 aa, Homo sapiens
  CDR3 for beta chain variable domain of TCR clone 303279 (TRBV28, TRBJ2-5)
CASSLAFGQETQYF

SEQ ID NO: 606559 - protein, 16 aa, Homo sapiens
  CDR3 for alpha chain variable domain of TCR clone 303280 (TRAV8-6, TRAJ39)
CAVMPMNNNAGNMLTF

SEQ ID NO: 606560 - protein, 16 aa, Homo sapiens
  CDR3 for beta chain variable domain of TCR clone 303280 (TRBV15, TRBJ2-5)
CATSRYLQAAQETQYF

SEQ ID NO: 606561 - protein, 13 aa, Homo sapiens
  CDR3 for alpha chain variable domain of TCR clone 303281 (TRAV8-1, TRAJ28)
CAVAGAGSYQLTF

SEQ ID NO: 606562 - protein, 13 aa, Homo sapiens
  CDR3 for beta chain variable domain of TCR clone 303281 (TRBV24-1, TRBJ1-2)
CATSGTALDGYTF

SEQ ID NO: 606563 - protein, 14 aa, Homo sapiens
  CDR3 for alpha chain variable domain of TCR clone 303282 (TRAV12-3, TRAJ9)
CAMSPNTGGFKTIF

SEQ ID NO: 606564 - protein, 14 aa, Homo sapiens
  CDR3 for beta chain variable domain of TCR clone 303282 (TRBV11-2, TRBJ1-5)
CASSSRTGNQPQHF

SEQ ID NO: 606565 - protein, 16 aa, Homo sapiens
  CDR3 for alpha chain variable domain of TCR clone 303283 (TRAV22, TRAJ45)
CAVERGKRGGADGLTF

SEQ ID NO: 606566 - protein, 16 aa, Homo sapiens
  CDR3 for beta chain variable domain of TCR clone 303283 (TRBV5-1, TRBJ2-5)
CASGLRRTSGQETQYF

SEQ ID NO: 606567 - protein, 13 aa, Homo sapiens
  CDR3 for alpha chain variable domain of TCR clone 303284 (TRAV12-2, TRAJ52)
CAVSGTSYGKLTF

SEQ ID NO: 606568 - protein, 17 aa, Homo sapiens
  CDR3 for beta chain variable domain of TCR clone 303284 (TRBV11-2, TRBJ2-1)
CDSSLYPPGVEYNEQFF

SEQ ID NO: 606569 - protein, 12 aa, Homo sapiens
  CDR3 for alpha chain variable domain of TCR clone 303285 (TRAV26-1, TRAJ48)
CIVSGGNEKLTY

SEQ ID NO: 606570 - protein, 13 aa, Homo sapiens
  CDR3 for beta chain variable domain of TCR clone 303285 (TRBV18, TRBJ2-7)
CASFRDSAYEQYF

SEQ ID NO: 606571 - protein, 15 aa, Homo sapiens
  CDR3 for alpha chain variable domain of TCR clone 303286 (TRAV13-1, TRAJ9)
CAASTLNTGGFTTIF

SEQ ID NO: 606572 - protein, 16 aa, Homo sapiens
  CDR3 for beta chain variable domain of TCR clone 303286 (TRBV12-4, TRBJ2-2)
CASSFWIVGNTGELFF

SEQ ID NO: 606573 - protein, 12 aa, Homo sapiens
  CDR3 for alpha chain variable domain of TCR clone 303287 (TRAV12-1, TRAJ31)
CVSWNNNARLMF

SEQ ID NO: 606574 - protein, 15 aa, Homo sapiens
  CDR3 for beta chain variable domain of TCR clone 303287 (TRBV7-2, TRBJ1-5)
CASSLDRGQDQPQHL

SEQ ID NO: 606575 - protein, 14 aa, Homo sapiens
  CDR3 for alpha chain variable domain of TCR clone 303288 (TRAV12-3, TRAJ10)
SHLPLTGGGNKLTF

SEQ ID NO: 606576 - protein, 12 aa, Homo sapiens
  CDR3 for beta chain variable domain of TCR clone 303288 (TRBV19, TRBJ1-5)
CASSIAQQAQHF

SEQ ID NO: 606577 - protein, 13 aa, Homo sapiens
  CDR3 for alpha chain variable domain of TCR clone 303289 (TRAV13-1, TRAJ21)
CAASIYNFNKFYF

SEQ ID NO: 606578 - protein, 13 aa, Homo sapiens
  CDR3 for beta chain variable domain of TCR clone 303289 (TRBV27, TRBJ1-4)
CASSLMGDDKLFF

SEQ ID NO: 606579 - protein, 11 aa, Homo sapiens
  CDR3 for alpha chain variable domain of TCR clone 303290 (TRAV12-3, TRAJ43)
CSMSVSNDMPF

SEQ ID NO: 606580 - protein, 16 aa, Homo sapiens
  CDR3 for beta chain variable domain of TCR clone 303290 (TRBV20-1, TRBJ2-1)
CSARDSLGAVYNEQFF

SEQ ID NO: 606581 - protein, 11 aa, Homo sapiens
  CDR3 for alpha chain variable domain of TCR clone 303291 (TRAV1-2, TRAJ20)
FAVANDYKLSF

SEQ ID NO: 606582 - protein, 14 aa, Homo sapiens
  CDR3 for beta chain variable domain of TCR clone 303291 (TRBV7-9, TRBJ1-1)
CASTPLQSYTEAFF

SEQ ID NO: 606583 - protein, 23 aa, Homo sapiens
  CDR3 for alpha chain variable domain of TCR clone 303292 (TRAV39, TRAJ33)
PCMTSLPPTSVPWTSSKNYQLIW

SEQ ID NO: 606584 - protein, 12 aa, Homo sapiens
  CDR3 for beta chain variable domain of TCR clone 303292 (TRBV2, TRBJ2-1)
CASSERFREQFF

SEQ ID NO: 606585 - protein, 16 aa, Homo sapiens
  CDR3 for alpha chain variable domain of TCR clone 303293 (TRAV12-3, TRAJ53)
CAMSPGRGGSNYKLTF

SEQ ID NO: 606586 - protein, 15 aa, Homo sapiens
  CDR3 for beta chain variable domain of TCR clone 303293 (TRBV7-9, TRBJ2-3)
CASSQDRGITDTQYF

SEQ ID NO: 606587 - protein, 15 aa, Homo sapiens
  CDR3 for alpha chain variable domain of TCR clone 303294 (TRAV8-4, TRAJ37)
CAVSRGSGNTGKLIF

SEQ ID NO: 606588 - protein, 15 aa, Homo sapiens
  CDR3 for beta chain variable domain of TCR clone 303294 (TRBV5-1, TRBJ2-7)
CASSLDLTSSYEQYV

SEQ ID NO: 606589 - protein, 15 aa, Homo sapiens
  CDR3 for alpha chain variable domain of TCR clone 303295 (TRAV3, TRAJ3)
CAVRDMSSSASKIIF

SEQ ID NO: 606590 - protein, 13 aa, Homo sapiens
  CDR3 for beta chain variable domain of TCR clone 303295 (TRBV11-2, TRBJ2-5)
CASSSAGEETQYF

SEQ ID NO: 606591 - protein, 14 aa, Homo sapiens
  CDR3 for alpha chain variable domain of TCR clone 303296 (TRAV8-3, TRAJ10)
CAVGKAGGGNKLTI

SEQ ID NO: 606592 - protein, 16 aa, Homo sapiens
  CDR3 for beta chain variable domain of TCR clone 303296 (TRBV11-2, TRBJ1-2)
CASSLDTGGADYGYTF

SEQ ID NO: 606593 - protein, 14 aa, Homo sapiens
  CDR3 for alpha chain variable domain of TCR clone 303297 (TRAV1-2, TRAJ27)
CAPAEYTNAGKSTF

SEQ ID NO: 606594 - protein, 18 aa, Homo sapiens
  CDR3 for beta chain variable domain of TCR clone 303297 (TRBV28, TRBJ1-2)
CASRQQQGKRGSNFGYTF

SEQ ID NO: 606595 - protein, 13 aa, Homo sapiens
  CDR3 for alpha chain variable domain of TCR clone 303298 (TRAV23/DV6, TRAJ15)
CAALPAGRNCSNL

SEQ ID NO: 606596 - protein, 14 aa, Homo sapiens
  CDR3 for beta chain variable domain of TCR clone 303298 (TRBV7-9, TRBJ1-2)
CASSRQGANYGYTF

SEQ ID NO: 606597 - protein, 13 aa, Homo sapiens
  CDR3 for alpha chain variable domain of TCR clone 303299 (TRAV14/DV4, TRAJ22)
CAMRDLSARQLTF

SEQ ID NO: 606598 - protein, 18 aa, Homo sapiens
  CDR3 for beta chain variable domain of TCR clone 303299 (TRBV19, TRBJ1-5)
CASSKRQVSIHSNQPQHF

SEQ ID NO: 606599 - protein, 17 aa, Homo sapiens
  CDR3 for alpha chain variable domain of TCR clone 303300 (TRAV13-1, TRAJ52)
CAASSGAGGTSYGKLTF

SEQ ID NO: 606600 - protein, 12 aa, Homo sapiens
  CDR3 for beta chain variable domain of TCR clone 303300 (TRBV28, TRBJ2-6)
CAIQAGANVLTF

SEQ ID NO: 606601 - protein, 16 aa, Homo sapiens
  CDR3 for alpha chain variable domain of TCR clone 303301 (TRAV23/DV6, TRAJ9)
CAASIGGNTGGLQPIF

SEQ ID NO: 606602 - protein, 15 aa, Homo sapiens
  CDR3 for beta chain variable domain of TCR clone 303301 (TRBV6-3, TRBJ2-7)
CASSSPGTVLYEQYF

SEQ ID NO: 606603 - protein, 19 aa, Homo sapiens
  CDR3 for alpha chain variable domain of TCR clone 303302 (TRAV1-2, TRAJ26)
CLLPLCCERPDNYGQNFVF

SEQ ID NO: 606604 - protein, 15 aa, Homo sapiens
  CDR3 for beta chain variable domain of TCR clone 303302 (TRBV27, TRBJ1-4)
CASSAQQDLNEKLFF

SEQ ID NO: 606605 - protein, 20 aa, Homo sapiens
  CDR3 for alpha chain variable domain of TCR clone 303303 (TRAV12-1, TRAJ42)
SSVIQPPTSVKGGSQGNLIF

SEQ ID NO: 606606 - protein, 12 aa, Homo sapiens
  CDR3 for beta chain variable domain of TCR clone 303303 (TRBV11-2, TRBJ2-5)
CASSPPAETQYF

SEQ ID NO: 606607 - protein, 10 aa, Homo sapiens
  CDR3 for alpha chain variable domain of TCR clone 303304 (TRAV12-1, TRAJ37)
CVGWAGKLIF

SEQ ID NO: 606608 - protein, 14 aa, Homo sapiens
  CDR3 for beta chain variable domain of TCR clone 303304 (TRBV4-1, TRBJ2-2)
CASSQAVNTGELFF

SEQ ID NO: 606609 - protein, 17 aa, Homo sapiens
  CDR3 for alpha chain variable domain of TCR clone 303305 (TRAV3, TRAJ38)
RAVRDCLNAGNNRKLIW

SEQ ID NO: 606610 - protein, 16 aa, Homo sapiens
  CDR3 for beta chain variable domain of TCR clone 303305 (TRBV20-1, TRBJ1-4)
CSAPGQGLLTNEKLFF

SEQ ID NO: 606611 - protein, 11 aa, Homo sapiens
  CDR3 for alpha chain variable domain of TCR clone 303306 (TRAV12-3, TRAJ27)
CAMANAGKSTF

SEQ ID NO: 606612 - protein, 14 aa, Homo sapiens
  CDR3 for beta chain variable domain of TCR clone 303306 (TRBV4-1, TRBJ2-2)
GASSQAVNTGELFF

SEQ ID NO: 606613 - protein, 17 aa, Homo sapiens
  CDR3 for alpha chain variable domain of TCR clone 303307 (TRAV17, TRAJ28)
CATDPRRGGDGSYQLHF

SEQ ID NO: 606614 - protein, 16 aa, Homo sapiens
  CDR3 for beta chain variable domain of TCR clone 303307 (TRBV25-1, TRBJ1-1)
CASSGDRDRGRIEAFF

SEQ ID NO: 606615 - protein, 14 aa, Homo sapiens
  CDR3 for alpha chain variable domain of TCR clone 303308 (TRAV12-2, TRAJ11)
CAVNRESGYSPLTF

SEQ ID NO: 606616 - protein, 10 aa, Homo sapiens
  CDR3 for beta chain variable domain of TCR clone 303308 (TRBV20-1, TRBJ2-5)
CSARFGTQYF

SEQ ID NO: 606617 - protein, 14 aa, Homo sapiens
  CDR3 for alpha chain variable domain of TCR clone 303309 (TRAV12-1, TRAJ17)
CVVNYKSAGNKLTF

SEQ ID NO: 606618 - protein, 14 aa, Homo sapiens
  CDR3 for beta chain variable domain of TCR clone 303309 (TRBV7-2, TRBJ2-7)
CASRSQGAAYEQYF

SEQ ID NO: 606619 - protein, 13 aa, Homo sapiens
  CDR3 for alpha chain variable domain of TCR clone 303310 (TRAV38-2/DV8, TRAJ34)
CAYRTWNTDKLIF

SEQ ID NO: 606620 - protein, 13 aa, Homo sapiens
  CDR3 for beta chain variable domain of TCR clone 303310 (TRBV11-2, TRBJ2-5)
CASSSTGEETQYF

SEQ ID NO: 606621 - protein, 14 aa, Homo sapiens
  CDR3 for alpha chain variable domain of TCR clone 303311 (TRAV1-2, TRAJ8)
CAVSEDTGFQKLVF

SEQ ID NO: 606622 - protein, 14 aa, Homo sapiens
  CDR3 for beta chain variable domain of TCR clone 303311 (TRBV12-5, TRBJ2-7)
CASGQTGNSYEQYF

SEQ ID NO: 606623 - protein, 17 aa, Homo sapiens
  CDR3 for alpha chain variable domain of TCR clone 303312 (TRAV3, TRAJ6)
CAVRDGPRAGGSYIPTF

SEQ ID NO: 606624 - protein, 17 aa, Homo sapiens
  CDR3 for beta chain variable domain of TCR clone 303312 (TRBV7-3, TRBJ2-3)
RASSLMKRMRGAATQYF

SEQ ID NO: 606625 - protein, 13 aa, Homo sapiens
  CDR3 for alpha chain variable domain of TCR clone 303313 (TRAV27, TRAJ6)
CAGGTRGSYIPTF

SEQ ID NO: 606626 - protein, 16 aa, Homo sapiens
  CDR3 for beta chain variable domain of TCR clone 303313 (TRBV7-8, TRBJ2-4)
CASSAERTLAKNIQYF

SEQ ID NO: 606627 - protein, 13 aa, Homo sapiens
  CDR3 for alpha chain variable domain of TCR clone 303314 (TRAV12-3, TRAJ4)
CAMTERGYNKLIF

SEQ ID NO: 606628 - protein, 17 aa, Homo sapiens
  CDR3 for beta chain variable domain of TCR clone 303314 (TRBV28, TRBJ2-3)
CASSIQVGPSSTDTQYF

SEQ ID NO: 606629 - protein, 14 aa, Homo sapiens
  CDR3 for alpha chain variable domain of TCR clone 303315 (TRAV13-1, TRAJ3)
CAASKSSSSSKIIF

SEQ ID NO: 606630 - protein, 13 aa, Homo sapiens
  CDR3 for beta chain variable domain of TCR clone 303315 (TRBV25-1, TRBJ2-5)
CASSESGRETQYF

SEQ ID NO: 606631 - protein, 14 aa, Homo sapiens
  CDR3 for alpha chain variable domain of TCR clone 303316 (TRAV12-2, TRAJ13)
CAVKKTGGYQKATF

SEQ ID NO: 606632 - protein, 12 aa, Homo sapiens
  CDR3 for beta chain variable domain of TCR clone 303316 (TRBV12-4, TRBJ1-2)
CASSFIWLHLRF

SEQ ID NO: 606633 - protein, 18 aa, Homo sapiens
  CDR3 for alpha chain variable domain of TCR clone 303317 (TRAV21, TRAJ52)
CAVRPSPAGGASYGKLTF

SEQ ID NO: 606634 - protein, 17 aa, Homo sapiens
  CDR3 for beta chain variable domain of TCR clone 303317 (TRBV13, TRBJ2-3)
CASSLSRVGGGRNTQYF

SEQ ID NO: 606635 - protein, 12 aa, Homo sapiens
  CDR3 for alpha chain variable domain of TCR clone 303318 (TRAV13-1, TRAJ27)
CAAHTNAGKSTF

SEQ ID NO: 606636 - protein, 15 aa, Homo sapiens
  CDR3 for beta chain variable domain of TCR clone 303318 (TRBV7-9, TRBJ1-6)
CASSSPGRGNSHLHF

SEQ ID NO: 606637 - protein, 16 aa, Homo sapiens
  CDR3 for alpha chain variable domain of TCR clone 303319 (TRAV21, TRAJ17)
CAVRPGEEAAGNKLTF

SEQ ID NO: 606638 - protein, 15 aa, Homo sapiens
  CDR3 for beta chain variable domain of TCR clone 303319 (TRBV9, TRBJ1-6)
CASSVAGTGDSPLHC

SEQ ID NO: 606639 - protein, 14 aa, Homo sapiens
  CDR3 for alpha chain variable domain of TCR clone 303320 (TRAV12-2, TRAJ13)
CAVTKTAGYQKVTF

SEQ ID NO: 606640 - protein, 15 aa, Homo sapiens
  CDR3 for beta chain variable domain of TCR clone 303320 (TRBV27, TRBJ2-1)
CASSNGGGSSNEQFF

SEQ ID NO: 606641 - protein, 15 aa, Homo sapiens
  CDR3 for alpha chain variable domain of TCR clone 303321 (TRAV26-1, TRAJ15)
CIVRAANQAGTALIF

SEQ ID NO: 606642 - protein, 15 aa, Homo sapiens
  CDR3 for beta chain variable domain of TCR clone 303321 (TRBV20-1, TRBJ1-1)
CSTRSAATSNTEAFF

SEQ ID NO: 606643 - protein, 14 aa, Homo sapiens
  CDR3 for alpha chain variable domain of TCR clone 303322 (TRAV17, TRAJ31)
CATVLRNNNARLMF

SEQ ID NO: 606644 - protein, 12 aa, Homo sapiens
  CDR3 for beta chain variable domain of TCR clone 303322 (TRBV12-5, TRBJ2-5)
CASGQGVETQYF

SEQ ID NO: 606645 - protein, 11 aa, Homo sapiens
  CDR3 for alpha chain variable domain of TCR clone 303323 (TRAV21, TRAJ34)
CAVTNSDKLIF

SEQ ID NO: 606646 - protein, 17 aa, Homo sapiens
  CDR3 for beta chain variable domain of TCR clone 303323 (TRBV20-1, TRBJ2-1)
CSARSPSGGPPTMSSSS

SEQ ID NO: 606647 - protein, 18 aa, Homo sapiens
  CDR3 for alpha chain variable domain of TCR clone 303324 (TRAV13-1, TRAJ52)
CAASKRSAGGTSYGKLTF

SEQ ID NO: 606648 - protein, 11 aa, Homo sapiens
  CDR3 for beta chain variable domain of TCR clone 303324 (TRBV11-2, TRBJ2-2)
CASSLPVELFF

SEQ ID NO: 606649 - protein, 12 aa, Homo sapiens
  CDR3 for alpha chain variable domain of TCR clone 303325 (TRAV21, TRAJ36)
CCDQDWANNLFF

SEQ ID NO: 606650 - protein, 13 aa, Homo sapiens
  CDR3 for beta chain variable domain of TCR clone 303325 (TRBV29-1, TRBJ2-3)
CSATRGGRDTQYF

SEQ ID NO: 606651 - protein, 14 aa, Homo sapiens
  CDR3 for alpha chain variable domain of TCR clone 303326 (TRAV12-3, TRAJ29)
CAMSPYSGNTPLVF

SEQ ID NO: 606652 - protein, 15 aa, Homo sapiens
  CDR3 for beta chain variable domain of TCR clone 303326 (TRBV7-3, TRBJ2-1)
CQQLQTSGRYNEQFF

SEQ ID NO: 606653 - protein, 15 aa, Homo sapiens
  CDR3 for alpha chain variable domain of TCR clone 303327 (TRAV13-1, TRAJ44)
CAASRGGGTASKLTF

SEQ ID NO: 606654 - protein, 14 aa, Homo sapiens
  CDR3 for beta chain variable domain of TCR clone 303327 (TRBV7-2, TRBJ2-5)
CASSRRGSSETQYF

SEQ ID NO: 606655 - protein, 13 aa, Homo sapiens
  CDR3 for alpha chain variable domain of TCR clone 303328 (TRAV8-2, TRAJ21)
CVVSQYNFNKFYF

SEQ ID NO: 606656 - protein, 15 aa, Homo sapiens
  CDR3 for beta chain variable domain of TCR clone 303328 (TRBV7-9, TRBJ1-6)
CASSSPGRGNSPLHF

SEQ ID NO: 606657 - protein, 14 aa, Homo sapiens
  CDR3 for alpha chain variable domain of TCR clone 303329 (TRAV1-1, TRAJ28)
CAAPSGAGSYQLTY

SEQ ID NO: 606658 - protein, 15 aa, Homo sapiens
  CDR3 for beta chain variable domain of TCR clone 303329 (TRBV7-2, TRBJ1-2)
CASSLVSGGDYGYTF

SEQ ID NO: 606659 - protein, 14 aa, Homo sapiens
  CDR3 for alpha chain variable domain of TCR clone 303330 (TRAV17, TRAJ35)
CATDRPGVGNVLHC

SEQ ID NO: 606660 - protein, 19 aa, Homo sapiens
  CDR3 for beta chain variable domain of TCR clone 303330 (TRBV11-3, TRBJ2-2)
CASSTRPGAKTTNTGELFF

SEQ ID NO: 606661 - protein, 14 aa, Homo sapiens
  CDR3 for alpha chain variable domain of TCR clone 303331 (TRAV3, TRAJ21)
CAVRDKYNFNKFYF

SEQ ID NO: 606662 - protein, 15 aa, Homo sapiens
  CDR3 for beta chain variable domain of TCR clone 303331 (TRBV9, TRBJ1-6)
CASSVAGTGDSPLHF

SEQ ID NO: 606663 - protein, 14 aa, Homo sapiens
  CDR3 for alpha chain variable domain of TCR clone 303332 (TRAV1-2, TRAJ16)
CAVNRFSDGKKLLF

SEQ ID NO: 606664 - protein, 14 aa, Homo sapiens
  CDR3 for beta chain variable domain of TCR clone 303332 (TRBV11-1, TRBJ2-7)
CASSFRQGSYEQYF

SEQ ID NO: 606665 - protein, 13 aa, Homo sapiens
  CDR3 for alpha chain variable domain of TCR clone 303333 (TRAV17, TRAJ29)
CAADAFRKHTSCL

SEQ ID NO: 606666 - protein, 13 aa, Homo sapiens
  CDR3 for beta chain variable domain of TCR clone 303333 (TRBV5-7, TRBJ2-6)
CASTSSGANVLTF

SEQ ID NO: 606667 - protein, 17 aa, Homo sapiens
  CDR3 for alpha chain variable domain of TCR clone 303334 (TRAV4, TRAJ18)
CLVGERSVGSTLGRLDF

SEQ ID NO: 606668 - protein, 18 aa, Homo sapiens
  CDR3 for beta chain variable domain of TCR clone 303334 (TRBV11-2, TRBJ2-3)
CASSLGGASRGAPNTQYF

SEQ ID NO: 606669 - protein, 14 aa, Homo sapiens
  CDR3 for alpha chain variable domain of TCR clone 303335 (TRAV3, TRAJ9)
CAVRDDTGGFKTIF

SEQ ID NO: 606670 - protein, 18 aa, Homo sapiens
  CDR3 for beta chain variable domain of TCR clone 303335 (TRBV20-1, TRBJ2-6)
CSAETTPTHGPGANVLTF

SEQ ID NO: 606671 - protein, 14 aa, Homo sapiens
  CDR3 for alpha chain variable domain of TCR clone 303336 (TRAV17, TRAJ30)
CATVTMNRDDKIIF

SEQ ID NO: 606672 - protein, 14 aa, Homo sapiens
  CDR3 for beta chain variable domain of TCR clone 303336 (TRBV19, TRBJ2-1)
CASKDPSSYNEQFF

SEQ ID NO: 606673 - protein, 15 aa, Homo sapiens
  CDR3 for alpha chain variable domain of TCR clone 303337 (TRAV35, TRAJ40)
CAGQLGTSGTYKYIF

SEQ ID NO: 606674 - protein, 11 aa, Homo sapiens
  CDR3 for beta chain variable domain of TCR clone 303337 (TRBV23-1, TRBJ2-7)
SSSGSGREQYF

SEQ ID NO: 606675 - protein, 13 aa, Homo sapiens
  CDR3 for alpha chain variable domain of TCR clone 303338 (TRAV8-2, TRAJ4)
CCSPSGGYNKLIF

SEQ ID NO: 606676 - protein, 15 aa, Homo sapiens
  CDR3 for beta chain variable domain of TCR clone 303338 (TRBV4-1, TRBJ1-4)
CASSDTGGTNEKLFF

SEQ ID NO: 606677 - protein, 14 aa, Homo sapiens
  CDR3 for alpha chain variable domain of TCR clone 303339 (TRAV1-2, TRAJ16)
CAVNRFSDAQKLLF

SEQ ID NO: 606678 - protein, 16 aa, Homo sapiens
  CDR3 for beta chain variable domain of TCR clone 303339 (TRBV20-1, TRBJ1-2)
CSASMGQGVANYGYAF

SEQ ID NO: 606679 - protein, 12 aa, Homo sapiens
  CDR3 for alpha chain variable domain of TCR clone 303340 (TRAV17, TRAJ20)
CATDGDDYNLSF

SEQ ID NO: 606680 - protein, 18 aa, Homo sapiens
  CDR3 for beta chain variable domain of TCR clone 303340 (TRBV6-5, TRBJ2-5)
CASSYSQAGGSYQETQYF

SEQ ID NO: 606681 - protein, 14 aa, Homo sapiens
  CDR3 for alpha chain variable domain of TCR clone 303341 (TRAV12-3, TRAJ5)
CAMTWDTGRRALTF

SEQ ID NO: 606682 - protein, 16 aa, Homo sapiens
  CDR3 for beta chain variable domain of TCR clone 303341 (TRBV7-3, TRBJ2-2)
CASSLKRGTLSGELFF

SEQ ID NO: 606683 - protein, 15 aa, Homo sapiens
  CDR3 for alpha chain variable domain of TCR clone 303342 (TRAV26-1, TRAJ21)
CIATPTTSTNFTLDL

SEQ ID NO: 606684 - protein, 14 aa, Homo sapiens
  CDR3 for beta chain variable domain of TCR clone 303342 (TRBV19, TRBJ2-7)
CASNFRDTFTGMYF

SEQ ID NO: 606685 - protein, 14 aa, Homo sapiens
  CDR3 for alpha chain variable domain of TCR clone 303343 (TRAV12-2, TRAJ12)
CAVINRDSSYKLIF

SEQ ID NO: 606686 - protein, 15 aa, Homo sapiens
  CDR3 for beta chain variable domain of TCR clone 303343 (TRBV10-2, TRBJ2-6)
CASSEQGTGANVLTF

SEQ ID NO: 606687 - protein, 14 aa, Homo sapiens
  CDR3 for alpha chain variable domain of TCR clone 303344 (TRAV2, TRAJ9)
CAVEDRSGGFKTIF

SEQ ID NO: 606688 - protein, 14 aa, Homo sapiens
  CDR3 for beta chain variable domain of TCR clone 303344 (TRBV20-1, TRBJ1-1)
CSAMGGTANTEAFF

SEQ ID NO: 606689 - protein, 11 aa, Homo sapiens
  CDR3 for alpha chain variable domain of TCR clone 303345 (TRAV27, TRAJ20)
CAGADDYKLSF

SEQ ID NO: 606690 - protein, 14 aa, Homo sapiens
  CDR3 for beta chain variable domain of TCR clone 303345 (TRBV7-9, TRBJ2-1)
CASSPRDSLYEQFF

SEQ ID NO: 606691 - protein, 16 aa, Homo sapiens
  CDR3 for alpha chain variable domain of TCR clone 303346 (TRAV14/DV4, TRAJ21)
CAMREGPENNFNKFYF

SEQ ID NO: 606692 - protein, 14 aa, Homo sapiens
  CDR3 for beta chain variable domain of TCR clone 303346 (TRBV2, TRBJ2-7)
CASSLTSGGYEQYF

SEQ ID NO: 606693 - protein, 16 aa, Homo sapiens
  CDR3 for alpha chain variable domain of TCR clone 303347 (TRAV16, TRAJ4)
CDLSRMISGGYNKLIF

SEQ ID NO: 606694 - protein, 16 aa, Homo sapiens
  CDR3 for beta chain variable domain of TCR clone 303347 (TRBV24-1, TRBJ2-3)
CATSDPGTGATDTQYF

SEQ ID NO: 606695 - protein, 16 aa, Homo sapiens
  CDR3 for alpha chain variable domain of TCR clone 303348 (TRAV12-3, TRAJ53)
CAMSPGSGGGNYKLTF

SEQ ID NO: 606696 - protein, 15 aa, Homo sapiens
  CDR3 for beta chain variable domain of TCR clone 303348 (TRBV7-6, TRBJ1-5)
CASSQSSGINQPQHF

SEQ ID NO: 606697 - protein, 12 aa, Homo sapiens
  CDR3 for alpha chain variable domain of TCR clone 303349 (TRAV29/DV5, TRAJ49)
CAATTPVTSSIL

SEQ ID NO: 606698 - protein, 16 aa, Homo sapiens
  CDR3 for beta chain variable domain of TCR clone 303349 (TRBV5-1, TRBJ1-1)
CASSSGGNSLNTEAFF

SEQ ID NO: 606699 - protein, 15 aa, Homo sapiens
  CDR3 for alpha chain variable domain of TCR clone 303350 (TRAV2, TRAJ9)
CAVEDRGTGGFKTIF

SEQ ID NO: 606700 - protein, 14 aa, Homo sapiens
  CDR3 for beta chain variable domain of TCR clone 303350 (TRBV5-1, TRBJ2-7)
CASSLTGSGYEQYF

SEQ ID NO: 606701 - protein, 14 aa, Homo sapiens
  CDR3 for alpha chain variable domain of TCR clone 303351 (TRAV12-3, TRAJ12)
CAMSRMASSYKLIF

SEQ ID NO: 606702 - protein, 14 aa, Homo sapiens
  CDR3 for beta chain variable domain of TCR clone 303351 (TRBV20-1, TRBJ1-4)
CSARSGQSNEKLFF

SEQ ID NO: 606703 - protein, 11 aa, Homo sapiens
  CDR3 for alpha chain variable domain of TCR clone 303352 (TRAV23/DV6, TRAJ58)
CAARLLRGETS

SEQ ID NO: 606704 - protein, 14 aa, Homo sapiens
  CDR3 for beta chain variable domain of TCR clone 303352 (TRBV2, TRBJ2-7)
CASSLTAGGYEQYF

SEQ ID NO: 606705 - protein, 16 aa, Homo sapiens
  CDR3 for alpha chain variable domain of TCR clone 303353 (TRAV2, TRAJ4)
CAVEDRFSGGYNKLIF

SEQ ID NO: 606706 - protein, 15 aa, Homo sapiens
  CDR3 for beta chain variable domain of TCR clone 303353 (TRBV5-1, TRBJ1-4)
FAPAAWKDGNEKLFF

SEQ ID NO: 606707 - protein, 13 aa, Homo sapiens
  CDR3 for alpha chain variable domain of TCR clone 303354 (TRAV13-2, TRAJ13)
CAERPGGYQKVTF

SEQ ID NO: 606708 - protein, 12 aa, Homo sapiens
  CDR3 for beta chain variable domain of TCR clone 303354 (TRBV12-4, TRBJ1-1)
CASSFEGTEAFF

SEQ ID NO: 606709 - protein, 15 aa, Homo sapiens
  CDR3 for alpha chain variable domain of TCR clone 303355 (TRAV10, TRAJ6)
CLVSGGSGGSYIPTF

SEQ ID NO: 606710 - protein, 15 aa, Homo sapiens
  CDR3 for beta chain variable domain of TCR clone 303355 (TRBV6-5, TRBJ2-1)
CASRGDFDSYNEQFF

SEQ ID NO: 606711 - protein, 11 aa, Homo sapiens
  CDR3 for alpha chain variable domain of TCR clone 303356 (TRAV1-1, TRAJ23)
CAVRQGGKLIF

SEQ ID NO: 606712 - protein, 14 aa, Homo sapiens
  CDR3 for beta chain variable domain of TCR clone 303356 (TRBV6-3, TRBJ2-2)
CASTYTPDTGELFF

SEQ ID NO: 606713 - protein, 16 aa, Homo sapiens
  CDR3 for alpha chain variable domain of TCR clone 303357 (TRAV23/DV6, TRAJ48)
CAASGVVNFGNEKLTF

SEQ ID NO: 606714 - protein, 14 aa, Homo sapiens
  CDR3 for beta chain variable domain of TCR clone 303357 (TRBV7-9, TRBJ2-1)
CQQLRLGEGNEQFF

SEQ ID NO: 606715 - protein, 15 aa, Homo sapiens
  CDR3 for alpha chain variable domain of TCR clone 303358 (TRAV21, TRAJ22)
CAVRLFFWFCKATDL

SEQ ID NO: 606716 - protein, 14 aa, Homo sapiens
  CDR3 for beta chain variable domain of TCR clone 303358 (TRBV19, TRBJ1-5)
CDSRAPDSFLSQHF

SEQ ID NO: 606717 - protein, 13 aa, Homo sapiens
  CDR3 for alpha chain variable domain of TCR clone 303359 (TRAV6, TRAJ20)
CALDVSNDYKLSF

SEQ ID NO: 606718 - protein, 16 aa, Homo sapiens
  CDR3 for beta chain variable domain of TCR clone 303359 (TRBV7-9, TRBJ2-1)
CASSDVAGGSYNEQFF

SEQ ID NO: 606719 - protein, 13 aa, Homo sapiens
  CDR3 for alpha chain variable domain of TCR clone 303360 (TRAV21, TRAJ36)
CAVIKTGANNLFF

SEQ ID NO: 606720 - protein, 12 aa, Homo sapiens
  CDR3 for beta chain variable domain of TCR clone 303360 (TRBV11-2, TRBJ2-5)
CASSLVGETQYF

SEQ ID NO: 606721 - protein, 13 aa, Homo sapiens
  CDR3 for alpha chain variable domain of TCR clone 303361 (TRAV9-2, TRAJ6)
CALRAGGSYIPTF

SEQ ID NO: 606722 - protein, 13 aa, Homo sapiens
  CDR3 for beta chain variable domain of TCR clone 303361 (TRBV12-4, TRBJ2-7)
CASSPTETYEQYF

SEQ ID NO: 606723 - protein, 14 aa, Homo sapiens
  CDR3 for alpha chain variable domain of TCR clone 303362 (TRAV1-2, TRAJ16)
CAVNRFSDGQKLLF

SEQ ID NO: 606724 - protein, 17 aa, Homo sapiens
  CDR3 for beta chain variable domain of TCR clone 303362 (TRBV13, TRBJ2-3)
CASSLSRVAGGRNTQYS

SEQ ID NO: 606725 - protein, 15 aa, Homo sapiens
  CDR3 for alpha chain variable domain of TCR clone 303363 (TRAV12-3, TRAJ54)
CAMSARIQGAQKLVF

SEQ ID NO: 606726 - protein, 14 aa, Homo sapiens
  CDR3 for beta chain variable domain of TCR clone 303363 (TRBV7-2, TRBJ2-7)
CASSPKTSFYEQYF

SEQ ID NO: 606727 - protein, 16 aa, Homo sapiens
  CDR3 for alpha chain variable domain of TCR clone 303364 (TRAV23/DV6, TRAJ9)
CAASIGGNTGGFKTIF

SEQ ID NO: 606728 - protein, 12 aa, Homo sapiens
  CDR3 for beta chain variable domain of TCR clone 303364 (TRBV6-3, TRBJ2-7)
CDSSEPGFEQYF

SEQ ID NO: 606729 - protein, 13 aa, Homo sapiens
  CDR3 for alpha chain variable domain of TCR clone 303365 (TRAV2, TRAJ40)
CAVVTSGTYKYIF

SEQ ID NO: 606730 - protein, 14 aa, Homo sapiens
  CDR3 for beta chain variable domain of TCR clone 303365 (TRBV7-9, TRBJ2-1)
CASSAMVGFGEQFF

SEQ ID NO: 606731 - protein, 17 aa, Homo sapiens
  CDR3 for alpha chain variable domain of TCR clone 303366 (TRAV3, TRAJ6)
CAVRDVPRAGGSYIPTF

SEQ ID NO: 606732 - protein, 16 aa, Homo sapiens
  CDR3 for beta chain variable domain of TCR clone 303366 (TRBV7-2, TRBJ2-5)
CASSSKWLSGQETQYF

SEQ ID NO: 606733 - protein, 19 aa, Homo sapiens
  CDR3 for alpha chain variable domain of TCR clone 303367 (TRAV3, TRAJ6)
CAVRDRNPSRSGGSYIPTF

SEQ ID NO: 606734 - protein, 15 aa, Homo sapiens
  CDR3 for beta chain variable domain of TCR clone 303367 (TRBV7-9, TRBJ2-1)
CASSLGWGRANEQFF

SEQ ID NO: 606735 - protein, 12 aa, Homo sapiens
  CDR3 for alpha chain variable domain of TCR clone 303368 (TRAV22, TRAJ22)
CAPGGSARQLTF

SEQ ID NO: 606736 - protein, 16 aa, Homo sapiens
  CDR3 for beta chain variable domain of TCR clone 303368 (TRBV20-1, TRBJ1-4)
CSAPGQGLLTNDKLFF

SEQ ID NO: 606737 - protein, 13 aa, Homo sapiens
  CDR3 for alpha chain variable domain of TCR clone 303369 (TRAV12-1, TRAJ29)
CVVVVSGNTPLVF

SEQ ID NO: 606738 - protein, 13 aa, Homo sapiens
  CDR3 for beta chain variable domain of TCR clone 303369 (TRBV7-2, TRBJ1-1)
CASSRNTNTEAFF

SEQ ID NO: 606739 - protein, 15 aa, Homo sapiens
  CDR3 for alpha chain variable domain of TCR clone 303370 (TRAV26-1, TRAJ29)
CIVRVEGSGNTPLVF

SEQ ID NO: 606740 - protein, 17 aa, Homo sapiens
  CDR3 for beta chain variable domain of TCR clone 303370 (TRBV20-1, TRBJ2-1)
CSASSSGLAGSYNEQFF

SEQ ID NO: 606741 - protein, 15 aa, Homo sapiens
  CDR3 for alpha chain variable domain of TCR clone 303371 (TRAV3, TRAJ5)
CAVRDLDTGRRALTF

SEQ ID NO: 606742 - protein, 14 aa, Homo sapiens
  CDR3 for beta chain variable domain of TCR clone 303371 (TRBV29-1, TRBJ2-2)
CSVNSRPNTGELFF

SEQ ID NO: 606743 - protein, 14 aa, Homo sapiens
  CDR3 for alpha chain variable domain of TCR clone 303372 (TRAV12-3, TRAJ10)
SHLPLTGGGNKLTF

SEQ ID NO: 606744 - protein, 15 aa, Homo sapiens
  CDR3 for beta chain variable domain of TCR clone 303372 (TRBV20-1, TRBJ2-7)
CSARDRVSGRDEQYF

SEQ ID NO: 606745 - protein, 14 aa, Homo sapiens
  CDR3 for alpha chain variable domain of TCR clone 303373 (TRAV27, TRAJ22)
CAGVVPGSAGQLTF

SEQ ID NO: 606746 - protein, 16 aa, Homo sapiens
  CDR3 for beta chain variable domain of TCR clone 303373 (TRBV9, TRBJ2-7)
CASSVGLGGGTYEQYF

SEQ ID NO: 606747 - protein, 17 aa, Homo sapiens
  CDR3 for alpha chain variable domain of TCR clone 303374 (TRAV3, TRAJ6)
CAVRDGPRAGGRYIPTF

SEQ ID NO: 606748 - protein, 13 aa, Homo sapiens
  CDR3 for beta chain variable domain of TCR clone 303374 (TRBV20-1, TRBJ1-1)
CSARGGGNTEAFF

SEQ ID NO: 606749 - protein, 15 aa, Homo sapiens
  CDR3 for alpha chain variable domain of TCR clone 303375 (TRAV25, TRAJ10)
CAGPLLTGGGNKLTF

SEQ ID NO: 606750 - protein, 15 aa, Homo sapiens
  CDR3 for beta chain variable domain of TCR clone 303375 (TRBV12-5, TRBJ2-2)
CASGRLGGKTGELFF

SEQ ID NO: 606751 - protein, 11 aa, Homo sapiens
  CDR3 for alpha chain variable domain of TCR clone 303376 (TRAV3, TRAJ21)
CAVGNVNKFYF

SEQ ID NO: 606752 - protein, 13 aa, Homo sapiens
  CDR3 for beta chain variable domain of TCR clone 303376 (TRBV20-1, TRBJ2-5)
CSAREAFQETQYF

SEQ ID NO: 606753 - protein, 13 aa, Homo sapiens
  CDR3 for alpha chain variable domain of TCR clone 303377 (TRAV10, TRAJ45)
CVGSGGGADGLTF

SEQ ID NO: 606754 - protein, 14 aa, Homo sapiens
  CDR3 for beta chain variable domain of TCR clone 303377 (TRBV7-6, TRBJ2-3)
CASSLGTVTDTQYF

SEQ ID NO: 606755 - protein, 14 aa, Homo sapiens
  CDR3 for alpha chain variable domain of TCR clone 303378 (TRAV2, TRAJ9)
CAVEDRSGGFKTIF

SEQ ID NO: 606756 - protein, 14 aa, Homo sapiens
  CDR3 for beta chain variable domain of TCR clone 303378 (TRBV28, TRBJ2-7)
CACTFYGRAHEQYF

SEQ ID NO: 606757 - protein, 15 aa, Homo sapiens
  CDR3 for alpha chain variable domain of TCR clone 303379 (TRAV26-1, TRAJ29)
CIVRVEGSGNTPLVF

SEQ ID NO: 606758 - protein, 13 aa, Homo sapiens
  CDR3 for beta chain variable domain of TCR clone 303379 (TRBV11-3, TRBJ2-3)
CASSHDTKDTQYF

SEQ ID NO: 606759 - protein, 14 aa, Homo sapiens
  CDR3 for alpha chain variable domain of TCR clone 303380 (TRAV1-2, TRAJ8)
FAVREDTGFQKLVF

SEQ ID NO: 606760 - protein, 16 aa, Homo sapiens
  CDR3 for beta chain variable domain of TCR clone 303380 (TRBV12-5, TRBJ2-5)
CASGPRTSGNQETQYF

SEQ ID NO: 606761 - protein, 12 aa, Homo sapiens
  CDR3 for alpha chain variable domain of TCR clone 303381 (TRAV21, TRAJ33)
CAKMDNNYQLIW

SEQ ID NO: 606762 - protein, 14 aa, Homo sapiens
  CDR3 for beta chain variable domain of TCR clone 303381 (TRBV2, TRBJ2-7)
CASSLTAGGYEQYF

SEQ ID NO: 606763 - protein, 13 aa, Homo sapiens
  CDR3 for alpha chain variable domain of TCR clone 303382 (TRAV3, TRAJ20)
CAVRSLNDYKLSF

SEQ ID NO: 606764 - protein, 13 aa, Homo sapiens
  CDR3 for beta chain variable domain of TCR clone 303382 (TRBV7-3, TRBJ1-1)
CASSQEWGAEAFF

SEQ ID NO: 606765 - protein, 15 aa, Homo sapiens
  CDR3 for alpha chain variable domain of TCR clone 303383 (TRAV39, TRAJ32)
CAVDMEGGATNNLIF

SEQ ID NO: 606766 - protein, 17 aa, Homo sapiens
  CDR3 for beta chain variable domain of TCR clone 303383 (TRBV7-2, TRBJ1-4)
CASSFKAGPTTNEKLFF

SEQ ID NO: 606767 - protein, 14 aa, Homo sapiens
  CDR3 for alpha chain variable domain of TCR clone 303384 (TRAV1-2, TRAJ8)
CSVREDTGFQKLVF

SEQ ID NO: 606768 - protein, 15 aa, Homo sapiens
  CDR3 for beta chain variable domain of TCR clone 303384 (TRBV12-4, TRBJ1-2)
CASSLAHRDGQAYTF

SEQ ID NO: 606769 - protein, 13 aa, Homo sapiens
  CDR3 for alpha chain variable domain of TCR clone 303385 (TRAV8-6, TRAJ49)
CAFITNTGNQFYF

SEQ ID NO: 606770 - protein, 12 aa, Homo sapiens
  CDR3 for beta chain variable domain of TCR clone 303385 (TRBV11-2, TRBJ2-2)
CASSLGGGELFF

SEQ ID NO: 606771 - protein, 14 aa, Homo sapiens
  CDR3 for alpha chain variable domain of TCR clone 303386 (TRAV1-2, TRAJ16)
CAVNRFSDGQKLLF

SEQ ID NO: 606772 - protein, 17 aa, Homo sapiens
  CDR3 for beta chain variable domain of TCR clone 303386 (TRBV13, TRBJ2-3)
CASSLSMVAGGRNTQYF

SEQ ID NO: 606773 - protein, 15 aa, Homo sapiens
  CDR3 for alpha chain variable domain of TCR clone 303387 (TRAV25, TRAJ52)
CAGRPGGTSYGKLTF

SEQ ID NO: 606774 - protein, 17 aa, Homo sapiens
  CDR3 for beta chain variable domain of TCR clone 303387 (TRBV7-8, TRBJ2-6)
RASSAGTGGAGANDLTF

SEQ ID NO: 606775 - protein, 13 aa, Homo sapiens
  CDR3 for alpha chain variable domain of TCR clone 303388 (TRAV9-2, TRAJ52)
CALSRHNAGGTSY

SEQ ID NO: 606776 - protein, 13 aa, Homo sapiens
  CDR3 for beta chain variable domain of TCR clone 303388 (TRBV7-9, TRBJ1-2)
CASSLKQNYGYTL

SEQ ID NO: 606777 - protein, 15 aa, Homo sapiens
  CDR3 for alpha chain variable domain of TCR clone 303389 (TRAV23/DV6, TRAJ30)
CAASSQESRADKIIF

SEQ ID NO: 606778 - protein, 17 aa, Homo sapiens
  CDR3 for beta chain variable domain of TCR clone 303389 (TRBV4-3, TRBJ2-1)
CASSQFSSGRASGEQFF

SEQ ID NO: 606779 - protein, 16 aa, Homo sapiens
  CDR3 for alpha chain variable domain of TCR clone 303390 (TRAV30, TRAJ24)
CGTEIVDADSWGKFQF

SEQ ID NO: 606780 - protein, 14 aa, Homo sapiens
  CDR3 for beta chain variable domain of TCR clone 303390 (TRBV19, TRBJ2-1)
CASSRLASINEQFF

SEQ ID NO: 606781 - protein, 10 aa, Homo sapiens
  CDR3 for alpha chain variable domain of TCR clone 303391 (TRAV16, TRAJ22)
SAMYLRQLTF

SEQ ID NO: 606782 - protein, 15 aa, Homo sapiens
  CDR3 for beta chain variable domain of TCR clone 303391 (TRBV7-9, TRBJ1-6)
CASSYPGRGNSPLLF

SEQ ID NO: 606783 - protein, 11 aa, Homo sapiens
  CDR3 for alpha chain variable domain of TCR clone 303392 (TRAV2, TRAJ13)
CASGGYQKVTF

SEQ ID NO: 606784 - protein, 16 aa, Homo sapiens
  CDR3 for beta chain variable domain of TCR clone 303392 (TRBV19, TRBJ2-1)
CASSKAGPSSYNEQSF

SEQ ID NO: 606785 - protein, 15 aa, Homo sapiens
  CDR3 for alpha chain variable domain of TCR clone 303393 (TRAV21, TRAJ32)
CAVNSYGGATNKLIF

SEQ ID NO: 606786 - protein, 13 aa, Homo sapiens
  CDR3 for beta chain variable domain of TCR clone 303393 (TRBV12-4, TRBJ1-5)
CASSPDRAQPQHF

SEQ ID NO: 606787 - protein, 16 aa, Homo sapiens
  CDR3 for alpha chain variable domain of TCR clone 303394 (TRAV3, TRAJ37)
CAVRVSGSGNTGNLIF

SEQ ID NO: 606788 - protein, 16 aa, Homo sapiens
  CDR3 for beta chain variable domain of TCR clone 303394 (TRBV7-9, TRBJ2-1)
CASSDVAGGSYNEQFF

SEQ ID NO: 606789 - protein, 15 aa, Homo sapiens
  CDR3 for alpha chain variable domain of TCR clone 303395 (TRAV26-1, TRAJ22)
CIVRVSFWFCKATDL

SEQ ID NO: 606790 - protein, 14 aa, Homo sapiens
  CDR3 for beta chain variable domain of TCR clone 303395 (TRBV7-8, TRBJ2-3)
CASSLEAGTDTQYF

SEQ ID NO: 606791 - protein, 11 aa, Homo sapiens
  CDR3 for alpha chain variable domain of TCR clone 303396 (TRAV35, TRAJ30)
CAGERDDKIIF

SEQ ID NO: 606792 - protein, 14 aa, Homo sapiens
  CDR3 for beta chain variable domain of TCR clone 303396 (TRBV15, TRBJ2-5)
CATSGDRGEETQYF

SEQ ID NO: 606793 - protein, 23 aa, Homo sapiens
  CDR3 for alpha chain variable domain of TCR clone 303397 (TRAV26-1, TRAJ38)
CIAANAGNNHIQNPDPAVYQLRD

SEQ ID NO: 606794 - protein, 11 aa, Homo sapiens
  CDR3 for beta chain variable domain of TCR clone 303397 (TRBV11-2, TRBJ2-2)
CQQPGGGELFF

SEQ ID NO: 606795 - protein, 14 aa, Homo sapiens
  CDR3 for alpha chain variable domain of TCR clone 303398 (TRAV26-1, TRAJ34)
CIVRVADNTDKLIF

SEQ ID NO: 606796 - protein, 15 aa, Homo sapiens
  CDR3 for beta chain variable domain of TCR clone 303398 (TRBV5-1, TRBJ2-7)
CASSPQGRPLDEQYF

SEQ ID NO: 606797 - protein, 10 aa, Homo sapiens
  CDR3 for alpha chain variable domain of TCR clone 303399 (TRAV1-2, TRAJ20)
CVPNDCKLSF

SEQ ID NO: 606798 - protein, 14 aa, Homo sapiens
  CDR3 for beta chain variable domain of TCR clone 303399 (TRBV12-5, TRBJ2-5)
CASGSRTHQETQYF

SEQ ID NO: 606799 - protein, 13 aa, Homo sapiens
  CDR3 for alpha chain variable domain of TCR clone 303400 (TRAV12-1, TRAJ40)
CVVTTSGTYKYIF

SEQ ID NO: 606800 - protein, 16 aa, Homo sapiens
  CDR3 for beta chain variable domain of TCR clone 303400 (TRBV7-9, TRBJ1-2)
CASSLGFSSGEDGYTF

SEQ ID NO: 606801 - protein, 15 aa, Homo sapiens
  CDR3 for alpha chain variable domain of TCR clone 303401 (TRAV3, TRAJ5)
CAVRDLDTGRRAFPF

SEQ ID NO: 606802 - protein, 13 aa, Homo sapiens
  CDR3 for beta chain variable domain of TCR clone 303401 (TRBV12-4, TRBJ2-7)
CASSPTETYEQYV

SEQ ID NO: 606803 - protein, 12 aa, Homo sapiens
  CDR3 for alpha chain variable domain of TCR clone 303402 (TRAV23/DV6, TRAJ53)
CAASKLGSGGSN

SEQ ID NO: 606804 - protein, 14 aa, Homo sapiens
  CDR3 for beta chain variable domain of TCR clone 303402 (TRBV7-9, TRBJ2-3)
CASSLEQGTNTQYS

SEQ ID NO: 606805 - protein, 14 aa, Homo sapiens
  CDR3 for alpha chain variable domain of TCR clone 303403 (TRAV1-2, TRAJ16)
CAVNRFSDVQKLLF

SEQ ID NO: 606806 - protein, 15 aa, Homo sapiens
  CDR3 for beta chain variable domain of TCR clone 303403 (TRBV11-3, TRBJ1-1)
CASSLGGPGDTEAFF

SEQ ID NO: 606807 - protein, 13 aa, Homo sapiens
  CDR3 for alpha chain variable domain of TCR clone 303404 (TRAV13-1, TRAJ6)
CARGSGGSYIPTF

SEQ ID NO: 606808 - protein, 16 aa, Homo sapiens
  CDR3 for beta chain variable domain of TCR clone 303404 (TRBV2, TRBJ2-1)
CASSANPRDWQAEQFF

SEQ ID NO: 606809 - protein, 16 aa, Homo sapiens
  CDR3 for alpha chain variable domain of TCR clone 303405 (TRAV20, TRAJ10)
CAVLRGLTGGGNKLTF

SEQ ID NO: 606810 - protein, 16 aa, Homo sapiens
  CDR3 for beta chain variable domain of TCR clone 303405 (TRBV4-3, TRBJ2-1)
CASSPALDRGVNEQFF

SEQ ID NO: 606811 - protein, 13 aa, Homo sapiens
  CDR3 for alpha chain variable domain of TCR clone 303406 (TRAV29/DV5, TRAJ31)
CAASRNNNDRLMF

SEQ ID NO: 606812 - protein, 12 aa, Homo sapiens
  CDR3 for beta chain variable domain of TCR clone 303406 (TRBV14, TRBJ2-5)
CASSHLKETQYF

SEQ ID NO: 606813 - protein, 13 aa, Homo sapiens
  CDR3 for alpha chain variable domain of TCR clone 303407 (TRAV13-1, TRAJ52)
CAASKRSAGGTSY

SEQ ID NO: 606814 - protein, 16 aa, Homo sapiens
  CDR3 for beta chain variable domain of TCR clone 303407 (TRBV11-3, TRBJ2-5)
CASSSVVAGSTETQYF

SEQ ID NO: 606815 - protein, 15 aa, Homo sapiens
  CDR3 for alpha chain variable domain of TCR clone 303408 (TRAV29/DV5, TRAJ30)
CSVLLCSKREDKIIF

SEQ ID NO: 606816 - protein, 17 aa, Homo sapiens
  CDR3 for beta chain variable domain of TCR clone 303408 (TRBV13, TRBJ2-3)
CASSLSRVAGGRNTQYF

SEQ ID NO: 606817 - protein, 13 aa, Homo sapiens
  CDR3 for alpha chain variable domain of TCR clone 303409 (TRAV12-3, TRAJ33)
CAMSVNSNYQLIW

SEQ ID NO: 606818 - protein, 15 aa, Homo sapiens
  CDR3 for beta chain variable domain of TCR clone 303409 (TRBV5-7, TRBJ2-7)
CASSPYFEGSYEQYF

SEQ ID NO: 606819 - protein, 20 aa, Homo sapiens
  CDR3 for alpha chain variable domain of TCR clone 303410 (TRAV26-1, TRAJ12)
DMLCTIASSELMDSSYRLIF

SEQ ID NO: 606820 - protein, 11 aa, Homo sapiens
  CDR3 for beta chain variable domain of TCR clone 303410 (TRBV7-9, TRBJ2-3)
CASSPPDTQYF

SEQ ID NO: 606821 - protein, 16 aa, Homo sapiens
  CDR3 for alpha chain variable domain of TCR clone 303411 (TRAV23/DV6, TRAJ52)
CAARPSGGTSYGKLTF

SEQ ID NO: 606822 - protein, 14 aa, Homo sapiens
  CDR3 for beta chain variable domain of TCR clone 303411 (TRBV20-1, TRBJ2-3)
CSARDASSTDTRYF

SEQ ID NO: 606823 - protein, 14 aa, Homo sapiens
  CDR3 for alpha chain variable domain of TCR clone 303412 (TRAV16, TRAJ42)
CDLLAGGSQGNLIF

SEQ ID NO: 606824 - protein, 13 aa, Homo sapiens
  CDR3 for beta chain variable domain of TCR clone 303412 (TRBV7-9, TRBJ1-2)
CASSLKQNYGYTF

SEQ ID NO: 606825 - protein, 15 aa, Homo sapiens
  CDR3 for alpha chain variable domain of TCR clone 303413 (TRAV23/DV6, TRAJ28)
CAALLAYSGAGIYQL

SEQ ID NO: 606826 - protein, 15 aa, Homo sapiens
  CDR3 for beta chain variable domain of TCR clone 303413 (TRBV7-2, TRBJ2-1)
CASSLVAGRYNEQFF

SEQ ID NO: 606827 - protein, 18 aa, Homo sapiens
  CDR3 for alpha chain variable domain of TCR clone 303414 (TRAV21, TRAJ52)
CAVRPSPAGGTSYGKLTF

SEQ ID NO: 606828 - protein, 15 aa, Homo sapiens
  CDR3 for beta chain variable domain of TCR clone 303414 (TRBV9, TRBJ1-6)
CASSVAGTGDSPLHV

SEQ ID NO: 606829 - protein, 15 aa, Homo sapiens
  CDR3 for alpha chain variable domain of TCR clone 303415 (TRAV8-3, TRAJ45)
CASSYSGGGADGLTF

SEQ ID NO: 606830 - protein, 16 aa, Homo sapiens
  CDR3 for beta chain variable domain of TCR clone 303415 (TRBV7-3, TRBJ2-1)
CDSSLTVESSYNEQFF

SEQ ID NO: 606831 - protein, 13 aa, Homo sapiens
  CDR3 for alpha chain variable domain of TCR clone 303416 (TRAV13-1, TRAJ39)
CSKYSNAGNMLTF

SEQ ID NO: 606832 - protein, 13 aa, Homo sapiens
  CDR3 for beta chain variable domain of TCR clone 303416 (TRBV12-4, TRBJ2-7)
CASSWTGSYEQYF

SEQ ID NO: 606833 - protein, 13 aa, Homo sapiens
  CDR3 for alpha chain variable domain of TCR clone 303417 (TRAV13-2, TRAJ48)
CAEMDFGNEKLTF

SEQ ID NO: 606834 - protein, 14 aa, Homo sapiens
  CDR3 for beta chain variable domain of TCR clone 303417 (TRBV19, TRBJ2-7)
CASSMGQGAIEEYF

SEQ ID NO: 606835 - protein, 14 aa, Homo sapiens
  CDR3 for alpha chain variable domain of TCR clone 303418 (TRAV13-1, TRAJ8)
CAASMSTGFQKLVF

SEQ ID NO: 606836 - protein, 13 aa, Homo sapiens
  CDR3 for beta chain variable domain of TCR clone 303418 (TRBV13, TRBJ2-1)
YASTPCSYNEQFF

SEQ ID NO: 606837 - protein, 16 aa, Homo sapiens
  CDR3 for alpha chain variable domain of TCR clone 303419 (TRAV30, TRAJ24)
CGTEIVDADSGGKFQF

SEQ ID NO: 606838 - protein, 15 aa, Homo sapiens
  CDR3 for beta chain variable domain of TCR clone 303419 (TRBV15, TRBJ1-5)
CATSRDPVSNQPQHF

SEQ ID NO: 606839 - protein, 15 aa, Homo sapiens
  CDR3 for alpha chain variable domain of TCR clone 303420 (TRAV13-2, TRAJ5)
CAENPHWTGRRALTF

SEQ ID NO: 606840 - protein, 14 aa, Homo sapiens
  CDR3 for beta chain variable domain of TCR clone 303420 (TRBV5-7, TRBJ2-7)
CASSVKGATGEQYF

SEQ ID NO: 606841 - protein, 17 aa, Homo sapiens
  CDR3 for alpha chain variable domain of TCR clone 303421 (TRAV3, TRAJ6)
CAVRDGPRAGGSNIPTF

SEQ ID NO: 606842 - protein, 13 aa, Homo sapiens
  CDR3 for beta chain variable domain of TCR clone 303421 (TRBV4-1, TRBJ2-2)
CASSQENTGELFS

SEQ ID NO: 606843 - protein, 13 aa, Homo sapiens
  CDR3 for alpha chain variable domain of TCR clone 303422 (TRAV21, TRAJ27)
CAARPGNAGKSNF

SEQ ID NO: 606844 - protein, 14 aa, Homo sapiens
  CDR3 for beta chain variable domain of TCR clone 303422 (TRBV7-6, TRBJ2-3)
CASSLWTVTDTQYF

SEQ ID NO: 606845 - protein, 15 aa, Homo sapiens
  CDR3 for alpha chain variable domain of TCR clone 303423 (TRAV26-1, TRAJ38)
CIIRAEGGNNRKLIW

SEQ ID NO: 606846 - protein, 14 aa, Homo sapiens
  CDR3 for beta chain variable domain of TCR clone 303423 (TRBV7-6, TRBJ2-5)
CASSSPAGSETQYF

SEQ ID NO: 606847 - protein, 12 aa, Homo sapiens
  CDR3 for alpha chain variable domain of TCR clone 303424 (TRAV36/DV7, TRAJ37)
CACYGNTGKLIF

SEQ ID NO: 606848 - protein, 13 aa, Homo sapiens
  CDR3 for beta chain variable domain of TCR clone 303424 (TRBV10-3, TRBJ2-7)
CASKLAGNYEQYF

SEQ ID NO: 606849 - protein, 16 aa, Homo sapiens
  CDR3 for alpha chain variable domain of TCR clone 303425 (TRAV3, TRAJ6)
CAVRDGMGRRKRHTYS

SEQ ID NO: 606850 - protein, 15 aa, Homo sapiens
  CDR3 for beta chain variable domain of TCR clone 303425 (TRBV9, TRBJ2-1)
CASSLAGSSYNEQFF

SEQ ID NO: 606851 - protein, 13 aa, Homo sapiens
  CDR3 for alpha chain variable domain of TCR clone 303426 (TRAV27, TRAJ49)
CAPRPYTGNQFYF

SEQ ID NO: 606852 - protein, 16 aa, Homo sapiens
  CDR3 for beta chain variable domain of TCR clone 303426 (TRBV4-1, TRBJ1-2)
CASSQDAGQVLNGYTF

SEQ ID NO: 606853 - protein, 15 aa, Homo sapiens
  CDR3 for alpha chain variable domain of TCR clone 303427 (TRAV4, TRAJ8)
CLVGEQHTGFQKLVF

SEQ ID NO: 606854 - protein, 15 aa, Homo sapiens
  CDR3 for beta chain variable domain of TCR clone 303427 (TRBV7-9, TRBJ2-7)
CASSNRDYLQETQYF

SEQ ID NO: 606855 - protein, 13 aa, Homo sapiens
  CDR3 for alpha chain variable domain of TCR clone 303428 (TRAV34, TRAJ22)
CGAGAGSARQLTF

SEQ ID NO: 606856 - protein, 14 aa, Homo sapiens
  CDR3 for beta chain variable domain of TCR clone 303428 (TRBV7-3, TRBJ2-1)
CASSLAGGTNEQFF

SEQ ID NO: 606857 - protein, 14 aa, Homo sapiens
  CDR3 for alpha chain variable domain of TCR clone 303429 (TRAV17, TRAJ4)
CATAPLGGYNKLIF

SEQ ID NO: 606858 - protein, 14 aa, Homo sapiens
  CDR3 for beta chain variable domain of TCR clone 303429 (TRBV19, TRBJ2-1)
CASPTFVLSGEQFF

SEQ ID NO: 606859 - protein, 13 aa, Homo sapiens
  CDR3 for alpha chain variable domain of TCR clone 303430 (TRAV23/DV6, TRAJ47)
CAASSQYGNKLVF

SEQ ID NO: 606860 - protein, 15 aa, Homo sapiens
  CDR3 for beta chain variable domain of TCR clone 303430 (TRBV7-3, TRBJ2-1)
CASSVDGNAYNEQFF

SEQ ID NO: 606861 - protein, 12 aa, Homo sapiens
  CDR3 for alpha chain variable domain of TCR clone 303431 (TRAV20, TRAJ45)
CAVRGGADGLTF

SEQ ID NO: 606862 - protein, 13 aa, Homo sapiens
  CDR3 for beta chain variable domain of TCR clone 303431 (TRBV2, TRBJ1-1)
CASRWTVNTEAFF

SEQ ID NO: 606863 - protein, 11 aa, Homo sapiens
  CDR3 for alpha chain variable domain of TCR clone 303432 (TRAV21, TRAJ34)
CAPLDPDKLIF

SEQ ID NO: 606864 - protein, 16 aa, Homo sapiens
  CDR3 for beta chain variable domain of TCR clone 303432 (TRBV5-1, TRBJ2-3)
CASSLAGDRGTDTQYF

SEQ ID NO: 606865 - protein, 14 aa, Homo sapiens
  CDR3 for alpha chain variable domain of TCR clone 303433 (TRAV12-2, TRAJ53)
CAVKGGGSNYKLTF

SEQ ID NO: 606866 - protein, 13 aa, Homo sapiens
  CDR3 for beta chain variable domain of TCR clone 303433 (TRBV20-1, TRBJ1-1)
CSARGGGNTEAFF

SEQ ID NO: 606867 - protein, 12 aa, Homo sapiens
  CDR3 for alpha chain variable domain of TCR clone 303434 (TRAV3, TRAJ43)
CAVRDPNHDMRF

SEQ ID NO: 606868 - protein, 13 aa, Homo sapiens
  CDR3 for beta chain variable domain of TCR clone 303434 (TRBV19, TRBJ1-2)
CASSVPGQDGCTF

SEQ ID NO: 606869 - protein, 12 aa, Homo sapiens
  CDR3 for alpha chain variable domain of TCR clone 303435 (TRAV25, TRAJ17)
CAGEAAGNKLTF

SEQ ID NO: 606870 - protein, 14 aa, Homo sapiens
  CDR3 for beta chain variable domain of TCR clone 303435 (TRBV5-1, TRBJ2-1)
CASSAMWAGNEQFF

SEQ ID NO: 606871 - protein, 15 aa, Homo sapiens
  CDR3 for alpha chain variable domain of TCR clone 303436 (TRAV3, TRAJ4)
CAVRDGTGGYNKLIF

SEQ ID NO: 606872 - protein, 14 aa, Homo sapiens
  CDR3 for beta chain variable domain of TCR clone 303436 (TRBV5-1, TRBJ2-3)
CASSDRGSTDTQYF

SEQ ID NO: 606873 - protein, 13 aa, Homo sapiens
  CDR3 for alpha chain variable domain of TCR clone 303437 (TRAV21, TRAJ57)
CAVTQGGSEKLVF

SEQ ID NO: 606874 - protein, 14 aa, Homo sapiens
  CDR3 for beta chain variable domain of TCR clone 303437 (TRBV4-2, TRBJ2-3)
CASSQERGTDTQYF

SEQ ID NO: 606875 - protein, 14 aa, Homo sapiens
  CDR3 for alpha chain variable domain of TCR clone 303438 (TRAV1-2, TRAJ16)
CAANRFSDGQKLLF

SEQ ID NO: 606876 - protein, 18 aa, Homo sapiens
  CDR3 for beta chain variable domain of TCR clone 303438 (TRBV20-1, TRBJ2-3)
CSASGLAGGPGTTDTQYF

SEQ ID NO: 606877 - protein, 14 aa, Homo sapiens
  CDR3 for alpha chain variable domain of TCR clone 303439 (TRAV1-2, TRAJ16)
CAVNRFSDSQKLLF

SEQ ID NO: 606878 - protein, 16 aa, Homo sapiens
  CDR3 for beta chain variable domain of TCR clone 303439 (TRBV7-2, TRBJ2-7)
CDSSLDLSGGAYEQYF

SEQ ID NO: 606879 - protein, 13 aa, Homo sapiens
  CDR3 for alpha chain variable domain of TCR clone 303440 (TRAV13-1, TRAJ52)
CASLGASYGKLTF

SEQ ID NO: 606880 - protein, 15 aa, Homo sapiens
  CDR3 for beta chain variable domain of TCR clone 303440 (TRBV6-3, TRBJ2-7)
CASSSPGTVFYEQYF

SEQ ID NO: 606881 - protein, 14 aa, Homo sapiens
  CDR3 for alpha chain variable domain of TCR clone 303441 (TRAV12-2, TRAJ17)
CAVLFKAAGNKLTV

SEQ ID NO: 606882 - protein, 14 aa, Homo sapiens
  CDR3 for beta chain variable domain of TCR clone 303441 (TRBV7-7, TRBJ2-2)
CATRQDSDTGELFF

SEQ ID NO: 606883 - protein, 10 aa, Homo sapiens
  CDR3 for alpha chain variable domain of TCR clone 303442 (TRAV12-3, TRAJ49)
CAMNDDQFYF

SEQ ID NO: 606884 - protein, 13 aa, Homo sapiens
  CDR3 for beta chain variable domain of TCR clone 303442 (TRBV12-4, TRBJ1-1)
SASSPGAGFEAFF

SEQ ID NO: 606885 - protein, 13 aa, Homo sapiens
  CDR3 for alpha chain variable domain of TCR clone 303443 (TRAV2, TRAJ40)
CAVVTSGTYKYIF

SEQ ID NO: 606886 - protein, 16 aa, Homo sapiens
  CDR3 for beta chain variable domain of TCR clone 303443 (TRBV19, TRBJ2-2)
CASRSPRTGATGELFF

SEQ ID NO: 606887 - protein, 14 aa, Homo sapiens
  CDR3 for alpha chain variable domain of TCR clone 303444 (TRAV1-2, TRAJ8)
CAVREDTGFQKLVF

SEQ ID NO: 606888 - protein, 17 aa, Homo sapiens
  CDR3 for beta chain variable domain of TCR clone 303444 (TRBV7-9, TRBJ1-4)
CASSARTGATKNCFLAV

SEQ ID NO: 606889 - protein, 14 aa, Homo sapiens
  CDR3 for alpha chain variable domain of TCR clone 303445 (TRAV30, TRAJ33)
CGTVAPRSNYQLIW

SEQ ID NO: 606890 - protein, 13 aa, Homo sapiens
  CDR3 for beta chain variable domain of TCR clone 303445 (TRBV12-4, TRBJ2-5)
CASSPGTEETQYF

SEQ ID NO: 606891 - protein, 16 aa, Homo sapiens
  CDR3 for alpha chain variable domain of TCR clone 303446 (TRAV3, TRAJ10)
CAVRDMRAGGGNKLTF

SEQ ID NO: 606892 - protein, 15 aa, Homo sapiens
  CDR3 for beta chain variable domain of TCR clone 303446 (TRBV28, TRBJ1-4)
CASSVSGSGLEKLFF

SEQ ID NO: 606893 - protein, 12 aa, Homo sapiens
  CDR3 for alpha chain variable domain of TCR clone 303447 (TRAV1-1, TRAJ39)
CAVPVVGNMLTF

SEQ ID NO: 606894 - protein, 17 aa, Homo sapiens
  CDR3 for beta chain variable domain of TCR clone 303447 (TRBV7-9, TRBJ2-7)
CQSLTTSGSRTWYEQYS

SEQ ID NO: 606895 - protein, 17 aa, Homo sapiens
  CDR3 for alpha chain variable domain of TCR clone 303448 (TRAV27, TRAJ26)
CAGARAPLDNYGQNFCF

SEQ ID NO: 606896 - protein, 15 aa, Homo sapiens
  CDR3 for beta chain variable domain of TCR clone 303448 (TRBV11-2, TRBJ2-5)
CASSPRSGGLETQYF

SEQ ID NO: 606897 - protein, 14 aa, Homo sapiens
  CDR3 for alpha chain variable domain of TCR clone 303449 (TRAV12-2, TRAJ13)
CAVKKTGGYQKVTF

SEQ ID NO: 606898 - protein, 11 aa, Homo sapiens
  CDR3 for beta chain variable domain of TCR clone 303449 (TRBV7-9, TRBJ2-5)
CASSWGETQYF

SEQ ID NO: 606899 - protein, 17 aa, Homo sapiens
  CDR3 for alpha chain variable domain of TCR clone 303450 (TRAV3, TRAJ6)
CAVRDGPRAGGSYIPTF

SEQ ID NO: 606900 - protein, 15 aa, Homo sapiens
  CDR3 for beta chain variable domain of TCR clone 303450 (TRBV5-1, TRBJ2-1)
CASSLVANSYNEQFF

SEQ ID NO: 606901 - protein, 12 aa, Homo sapiens
  CDR3 for alpha chain variable domain of TCR clone 303451 (TRAV8-4, TRAJ43)
CAVSVNNNDMRF

SEQ ID NO: 606902 - protein, 13 aa, Homo sapiens
  CDR3 for beta chain variable domain of TCR clone 303451 (TRBV7-9, TRBJ2-7)
CASSFAGAYEQYF

SEQ ID NO: 606903 - protein, 14 aa, Homo sapiens
  CDR3 for alpha chain variable domain of TCR clone 303452 (TRAV8-1, TRAJ5)
CAVSMDTGRRALTF

SEQ ID NO: 606904 - protein, 16 aa, Homo sapiens
  CDR3 for beta chain variable domain of TCR clone 303452 (TRBV3-1, TRBJ2-6)
CASSLTWVSGANVLTF

SEQ ID NO: 606905 - protein, 14 aa, Homo sapiens
  CDR3 for alpha chain variable domain of TCR clone 303453 (TRAV16, TRAJ39)
CALSKINAGNMLTF

SEQ ID NO: 606906 - protein, 16 aa, Homo sapiens
  CDR3 for beta chain variable domain of TCR clone 303453 (TRBV6-6, TRBJ2-1)
CASSYSFSGSYNEQFF

SEQ ID NO: 606907 - protein, 13 aa, Homo sapiens
  CDR3 for alpha chain variable domain of TCR clone 303454 (TRAV12-1, TRAJ34)
CVVTGYNTDKLIF

SEQ ID NO: 606908 - protein, 13 aa, Homo sapiens
  CDR3 for beta chain variable domain of TCR clone 303454 (TRBV28, TRBJ2-7)
CVSKAGGVYEQYF

SEQ ID NO: 606909 - protein, 13 aa, Homo sapiens
  CDR3 for alpha chain variable domain of TCR clone 303455 (TRAV13-1, TRAJ41)
CADAPNSGYALNC

SEQ ID NO: 606910 - protein, 13 aa, Homo sapiens
  CDR3 for beta chain variable domain of TCR clone 303455 (TRBV19, TRBJ2-7)
CASEGTTTYEQYF

SEQ ID NO: 606911 - protein, 13 aa, Homo sapiens
  CDR3 for alpha chain variable domain of TCR clone 303456 (TRAV2, TRAJ15)
CAVASQAGTALIF

SEQ ID NO: 606912 - protein, 16 aa, Homo sapiens
  CDR3 for beta chain variable domain of TCR clone 303456 (TRBV20-1, TRBJ1-4)
CSAPGHGLLTNEKLFF

SEQ ID NO: 606913 - protein, 12 aa, Homo sapiens
  CDR3 for alpha chain variable domain of TCR clone 303457 (TRAV12-1, TRAJ40)
CVVTSGTYKYIF

SEQ ID NO: 606914 - protein, 13 aa, Homo sapiens
  CDR3 for beta chain variable domain of TCR clone 303457 (TRBV7-9, TRBJ1-2)
CASSLKQNYGYTF

SEQ ID NO: 606915 - protein, 13 aa, Homo sapiens
  CDR3 for alpha chain variable domain of TCR clone 303458 (TRAV12-3, TRAJ9)
CAMRNTGGFKTIF

SEQ ID NO: 606916 - protein, 17 aa, Homo sapiens
  CDR3 for beta chain variable domain of TCR clone 303458 (TRBV15, TRBJ1-5)
CATSRAPPGTRNQPQHF

SEQ ID NO: 606917 - protein, 14 aa, Homo sapiens
  CDR3 for alpha chain variable domain of TCR clone 303459 (TRAV12-3, TRAJ42)
CAMNYGGSQGNLIF

SEQ ID NO: 606918 - protein, 15 aa, Homo sapiens
  CDR3 for beta chain variable domain of TCR clone 303459 (TRBV5-7, TRBJ1-5)
WASSYGKLWDQPQHF

SEQ ID NO: 606919 - protein, 13 aa, Homo sapiens
  CDR3 for alpha chain variable domain of TCR clone 303460 (TRAV36/DV7, TRAJ49)
CAGDSNTGNKFYF

SEQ ID NO: 606920 - protein, 16 aa, Homo sapiens
  CDR3 for beta chain variable domain of TCR clone 303460 (TRBV5-1, TRBJ1-1)
CASSKTGTEVGTEAFF

SEQ ID NO: 606921 - protein, 13 aa, Homo sapiens
  CDR3 for alpha chain variable domain of TCR clone 303461 (TRAV8-6, TRAJ49)
CAVITNTGNQFYF

SEQ ID NO: 606922 - protein, 14 aa, Homo sapiens
  CDR3 for beta chain variable domain of TCR clone 303461 (TRBV13, TRBJ2-5)
CASYRRLAEETQYF

SEQ ID NO: 606923 - protein, 14 aa, Homo sapiens
  CDR3 for alpha chain variable domain of TCR clone 303462 (TRAV1-2, TRAJ8)
CAVREDTGFKKLVF

SEQ ID NO: 606924 - protein, 12 aa, Homo sapiens
  CDR3 for beta chain variable domain of TCR clone 303462 (TRBV14, TRBJ2-7)
CASSSLKGEQYF

SEQ ID NO: 606925 - protein, 16 aa, Homo sapiens
  CDR3 for alpha chain variable domain of TCR clone 303463 (TRAV26-1, TRAJ37)
CIVRGDCSGNTGKLSL

SEQ ID NO: 606926 - protein, 17 aa, Homo sapiens
  CDR3 for beta chain variable domain of TCR clone 303463 (TRBV4-1, TRBJ2-7)
CASSRDPLGVRGGEQYF

SEQ ID NO: 606927 - protein, 13 aa, Homo sapiens
  CDR3 for alpha chain variable domain of TCR clone 303464 (TRAV2, TRAJ29)
CAAGNSGNKPLVF

SEQ ID NO: 606928 - protein, 16 aa, Homo sapiens
  CDR3 for beta chain variable domain of TCR clone 303464 (TRBV7-9, TRBJ1-2)
CASSPGGGAINYGYTF

SEQ ID NO: 606929 - protein, 12 aa, Homo sapiens
  CDR3 for alpha chain variable domain of TCR clone 303465 (TRAV12-3, TRAJ40)
CAMSSGTYKYIF

SEQ ID NO: 606930 - protein, 14 aa, Homo sapiens
  CDR3 for beta chain variable domain of TCR clone 303465 (TRBV7-3, TRBJ1-1)
CASSLKGGNTEAFF

SEQ ID NO: 606931 - protein, 13 aa, Homo sapiens
  CDR3 for alpha chain variable domain of TCR clone 303466 (TRAV21, TRAJ27)
CAALNTNAGKSTF

SEQ ID NO: 606932 - protein, 15 aa, Homo sapiens
  CDR3 for beta chain variable domain of TCR clone 303466 (TRBV20-1, TRBJ2-7)
CSARKGLAESYEQYV

SEQ ID NO: 606933 - protein, 13 aa, Homo sapiens
  CDR3 for alpha chain variable domain of TCR clone 303467 (TRAV17, TRAJ4)
CATKSGGYNKLIF

SEQ ID NO: 606934 - protein, 16 aa, Homo sapiens
  CDR3 for beta chain variable domain of TCR clone 303467 (TRBV20-1, TRBJ2-3)
CSAVRDRGPIADTQYF

SEQ ID NO: 606935 - protein, 10 aa, Homo sapiens
  CDR3 for alpha chain variable domain of TCR clone 303468 (TRAV1-2, TRAJ23)
CAGPGGKLIF

SEQ ID NO: 606936 - protein, 12 aa, Homo sapiens
  CDR3 for beta chain variable domain of TCR clone 303468 (TRBV14, TRBJ2-5)
CASSQLKETQYF

SEQ ID NO: 606937 - protein, 16 aa, Homo sapiens
  CDR3 for alpha chain variable domain of TCR clone 303469 (TRAV3, TRAJ37)
CAVRGKGSGNTGKLIF

SEQ ID NO: 606938 - protein, 14 aa, Homo sapiens
  CDR3 for beta chain variable domain of TCR clone 303469 (TRBV5-1, TRBJ1-1)
CASSRTTGDTEAFF

SEQ ID NO: 606939 - protein, 14 aa, Homo sapiens
  CDR3 for alpha chain variable domain of TCR clone 303470 (TRAV1-2, TRAJ16)
CAVNRFSDGQKLLF

SEQ ID NO: 606940 - protein, 12 aa, Homo sapiens
  CDR3 for beta chain variable domain of TCR clone 303470 (TRBV28, TRBJ2-6)
CAIQAGANVLSF

SEQ ID NO: 606941 - protein, 15 aa, Homo sapiens
  CDR3 for alpha chain variable domain of TCR clone 303471 (TRAV1-1, TRAJ23)
CAVRVCYNQGGKLIF

SEQ ID NO: 606942 - protein, 13 aa, Homo sapiens
  CDR3 for beta chain variable domain of TCR clone 303471 (TRBV10-3, TRBJ2-7)
CASKLAVNYEQYF

SEQ ID NO: 606943 - protein, 14 aa, Homo sapiens
  CDR3 for alpha chain variable domain of TCR clone 303472 (TRAV23/DV6, TRAJ4)
CAAPSSGGYNKLIF

SEQ ID NO: 606944 - protein, 13 aa, Homo sapiens
  CDR3 for beta chain variable domain of TCR clone 303472 (TRBV19, TRBJ1-2)
CASSVPGQDGYTF

SEQ ID NO: 606945 - protein, 12 aa, Homo sapiens
  CDR3 for alpha chain variable domain of TCR clone 303473 (TRAV13-1, TRAJ21)
CAAKEGFNKFYF

SEQ ID NO: 606946 - protein, 11 aa, Homo sapiens
  CDR3 for beta chain variable domain of TCR clone 303473 (TRBV19, TRBJ1-1)
CASSIGSVAFF

SEQ ID NO: 606947 - protein, 14 aa, Homo sapiens
  CDR3 for alpha chain variable domain of TCR clone 303474 (TRAV8-6, TRAJ52)
CAVIGGTSYGKLTF

SEQ ID NO: 606948 - protein, 16 aa, Homo sapiens
  CDR3 for beta chain variable domain of TCR clone 303474 (TRBV13, TRBJ2-2)
CASSPWTGEHTGELFF

SEQ ID NO: 606949 - protein, 14 aa, Homo sapiens
  CDR3 for alpha chain variable domain of TCR clone 303475 (TRAV1-2, TRAJ16)
CAVNRFSDGQKLLF

SEQ ID NO: 606950 - protein, 13 aa, Homo sapiens
  CDR3 for beta chain variable domain of TCR clone 303475 (TRBV19, TRBJ2-7)
CARSTSGSYEQYF

SEQ ID NO: 606951 - protein, 14 aa, Homo sapiens
  CDR3 for alpha chain variable domain of TCR clone 303476 (TRAV12-1, TRAJ12)
CVVNGSDSSYKLIF

SEQ ID NO: 606952 - protein, 13 aa, Homo sapiens
  CDR3 for beta chain variable domain of TCR clone 303476 (TRBV28, TRBJ2-2)
CASIRESTGELFF

SEQ ID NO: 606953 - protein, 16 aa, Homo sapiens
  CDR3 for alpha chain variable domain of TCR clone 303477 (TRAV8-3, TRAJ10)
CAVGPGVTGGGNKLTF

SEQ ID NO: 606954 - protein, 13 aa, Homo sapiens
  CDR3 for beta chain variable domain of TCR clone 303477 (TRBV18, TRBJ1-1)
CASSPGLSGEAFF

SEQ ID NO: 606955 - protein, 13 aa, Homo sapiens
  CDR3 for alpha chain variable domain of TCR clone 303478 (TRAV12-2, TRAJ43)
CAVSGDNNNDMRF

SEQ ID NO: 606956 - protein, 15 aa, Homo sapiens
  CDR3 for beta chain variable domain of TCR clone 303478 (TRBV9, TRBJ1-6)
CASSVAGTGDSPLHF

SEQ ID NO: 606957 - protein, 14 aa, Homo sapiens
  CDR3 for alpha chain variable domain of TCR clone 303479 (TRAV12-3, TRAJ50)
CAMSPKTSYDEVIF

SEQ ID NO: 606958 - protein, 14 aa, Homo sapiens
  CDR3 for beta chain variable domain of TCR clone 303479 (TRBV19, TRBJ1-1)
CASSMGRNAFEAFF

SEQ ID NO: 606959 - protein, 15 aa, Homo sapiens
  CDR3 for alpha chain variable domain of TCR clone 303480 (TRAV16, TRAJ10)
FSLRELTGGGNKLTF

SEQ ID NO: 606960 - protein, 14 aa, Homo sapiens
  CDR3 for beta chain variable domain of TCR clone 303480 (TRBV5-5, TRBJ2-7)
CASSLGQGTYEQYF

SEQ ID NO: 606961 - protein, 16 aa, Homo sapiens
  CDR3 for alpha chain variable domain of TCR clone 303481 (TRAV23/DV6, )
CADIQNPDPAVYQLRD

SEQ ID NO: 606962 - protein, 14 aa, Homo sapiens
  CDR3 for beta chain variable domain of TCR clone 303481 (TRBV7-8, TRBJ1-2)
CASSPDSLSYGYTF

SEQ ID NO: 606963 - protein, 14 aa, Homo sapiens
  CDR3 for alpha chain variable domain of TCR clone 303482 (TRAV1-2, TRAJ8)
CAVREDTGFQKLVF

SEQ ID NO: 606964 - protein, 16 aa, Homo sapiens
  CDR3 for beta chain variable domain of TCR clone 303482 (TRBV20-1, TRBJ2-4)
CGARAILAGQGDIQYF

SEQ ID NO: 606965 - protein, 16 aa, Homo sapiens
  CDR3 for alpha chain variable domain of TCR clone 303483 (TRAV30, TRAJ24)
CGIEIVDADSWGKFKF

SEQ ID NO: 606966 - protein, 15 aa, Homo sapiens
  CDR3 for beta chain variable domain of TCR clone 303483 (TRBV9, TRBJ1-6)
CASSVAGTGDSPLHF

SEQ ID NO: 606967 - protein, 18 aa, Homo sapiens
  CDR3 for alpha chain variable domain of TCR clone 303484 (TRAV26-2, TRAJ54)
CILRDVEVGIQGAQKLVF

SEQ ID NO: 606968 - protein, 17 aa, Homo sapiens
  CDR3 for beta chain variable domain of TCR clone 303484 (TRBV20-1, TRBJ1-5)
CSASLSPGQGGNQPQHY

SEQ ID NO: 606969 - protein, 15 aa, Homo sapiens
  CDR3 for alpha chain variable domain of TCR clone 303485 (TRAV35, TRAJ42)
CAGQGYGGSQGNLIF

SEQ ID NO: 606970 - protein, 13 aa, Homo sapiens
  CDR3 for beta chain variable domain of TCR clone 303485 (TRBV4-1, TRBJ2-2)
CASSQENTGELFF

SEQ ID NO: 606971 - protein, 19 aa, Homo sapiens
  CDR3 for alpha chain variable domain of TCR clone 303486 (TRAV3, TRAJ6)
CAVRDRNPSRSGGSYIPTF

SEQ ID NO: 606972 - protein, 15 aa, Homo sapiens
  CDR3 for beta chain variable domain of TCR clone 303486 (TRBV18, TRBJ2-7)
CASSPTFMDSYQQYF

SEQ ID NO: 606973 - protein, 12 aa, Homo sapiens
  CDR3 for alpha chain variable domain of TCR clone 303487 (TRAV26-1, TRAJ35)
CIGLSFGNVLHC

SEQ ID NO: 606974 - protein, 15 aa, Homo sapiens
  CDR3 for beta chain variable domain of TCR clone 303487 (TRBV6-3, TRBJ2-1)
CASSYASDSYNEQFF

SEQ ID NO: 606975 - protein, 13 aa, Homo sapiens
  CDR3 for alpha chain variable domain of TCR clone 303488 (TRAV16, TRAJ52)
CALRGTSSGKLTF

SEQ ID NO: 606976 - protein, 18 aa, Homo sapiens
  CDR3 for beta chain variable domain of TCR clone 303488 (TRBV13, TRBJ2-6)
CASSPMTSGGSGANVLTF

SEQ ID NO: 606977 - protein, 14 aa, Homo sapiens
  CDR3 for alpha chain variable domain of TCR clone 303489 (TRAV35, TRAJ22)
FAGLRPGSARQLTF

SEQ ID NO: 606978 - protein, 15 aa, Homo sapiens
  CDR3 for beta chain variable domain of TCR clone 303489 (TRBV12-4, TRBJ2-5)
CASSPPTGLQETQHF

SEQ ID NO: 606979 - protein, 14 aa, Homo sapiens
  CDR3 for alpha chain variable domain of TCR clone 303490 (TRAV12-3, TRAJ6)
CAMSATGGSYIPTF

SEQ ID NO: 606980 - protein, 16 aa, Homo sapiens
  CDR3 for beta chain variable domain of TCR clone 303490 (TRBV7-3, TRBJ2-1)
CASSLEGYRSYNEQFF

SEQ ID NO: 606981 - protein, 16 aa, Homo sapiens
  CDR3 for alpha chain variable domain of TCR clone 303491 (TRAV12-3, TRAJ53)
CAMSPGSGGSNHKLTF

SEQ ID NO: 606982 - protein, 11 aa, Homo sapiens
  CDR3 for beta chain variable domain of TCR clone 303491 (TRBV29-1, TRBJ2-5)
CNEDRTGTQYF

SEQ ID NO: 606983 - protein, 15 aa, Homo sapiens
  CDR3 for alpha chain variable domain of TCR clone 303492 (TRAV21, TRAJ52)
CAERGGGTSYGKLTF

SEQ ID NO: 606984 - protein, 13 aa, Homo sapiens
  CDR3 for beta chain variable domain of TCR clone 303492 (TRBV6-5, TRBJ2-5)
CATAPSPQETQYF

SEQ ID NO: 606985 - protein, 13 aa, Homo sapiens
  CDR3 for alpha chain variable domain of TCR clone 303493 (TRAV27, TRAJ53)
CAGQVGSNCKLTF

SEQ ID NO: 606986 - protein, 13 aa, Homo sapiens
  CDR3 for beta chain variable domain of TCR clone 303493 (TRBV29-1, TRBJ1-1)
CSVESGFGTEAFF

SEQ ID NO: 606987 - protein, 12 aa, Homo sapiens
  CDR3 for alpha chain variable domain of TCR clone 303494 (TRAV12-3, TRAJ17)
CAMTLTGNKLTF

SEQ ID NO: 606988 - protein, 15 aa, Homo sapiens
  CDR3 for beta chain variable domain of TCR clone 303494 (TRBV3-1, TRBJ2-5)
CASSRGQASWKTQYF

SEQ ID NO: 606989 - protein, 14 aa, Homo sapiens
  CDR3 for alpha chain variable domain of TCR clone 303495 (TRAV1-2, TRAJ8)
CAVREDTGFQKLVF

SEQ ID NO: 606990 - protein, 14 aa, Homo sapiens
  CDR3 for beta chain variable domain of TCR clone 303495 (TRBV28, TRBJ2-5)
CASSLGDRAETQYF

SEQ ID NO: 606991 - protein, 16 aa, Homo sapiens
  CDR3 for alpha chain variable domain of TCR clone 303496 (TRAV30, TRAJ24)
CGTEIVDADSWGKFQF

SEQ ID NO: 606992 - protein, 16 aa, Homo sapiens
  CDR3 for beta chain variable domain of TCR clone 303496 (TRBV9, TRBJ2-1)
CASSVEGDGSYNEQFF

SEQ ID NO: 606993 - protein, 10 aa, Homo sapiens
  CDR3 for alpha chain variable domain of TCR clone 303497 (TRAV23/DV6, TRAJ57)
CAASSTLSQG

SEQ ID NO: 606994 - protein, 18 aa, Homo sapiens
  CDR3 for beta chain variable domain of TCR clone 303497 (TRBV10-2, TRBJ2-2)
CISAPAVHRQADAGELFF

SEQ ID NO: 606995 - protein, 14 aa, Homo sapiens
  CDR3 for alpha chain variable domain of TCR clone 303498 (TRAV27, TRAJ23)
CAGAFDNQGGKLIF

SEQ ID NO: 606996 - protein, 15 aa, Homo sapiens
  CDR3 for beta chain variable domain of TCR clone 303498 (TRBV7-3, TRBJ2-7)
CASSLTWQGKYEQYF

SEQ ID NO: 606997 - protein, 14 aa, Homo sapiens
  CDR3 for alpha chain variable domain of TCR clone 303499 (TRAV27, TRAJ13)
CRSSNSGGYQKVTF

SEQ ID NO: 606998 - protein, 13 aa, Homo sapiens
  CDR3 for beta chain variable domain of TCR clone 303499 (TRBV4-2, TRBJ1-1)
CASSQAGNTEAFF

SEQ ID NO: 606999 - protein, 11 aa, Homo sapiens
  CDR3 for alpha chain variable domain of TCR clone 303500 (TRAV21, TRAJ34)
CAVTNTDKLIF

SEQ ID NO: 607000 - protein, 18 aa, Homo sapiens
  CDR3 for beta chain variable domain of TCR clone 303500 (TRBV7-2, TRBJ2-3)
CASSLKREGSGITDTQYF

SEQ ID NO: 607001 - protein, 10 aa, Homo sapiens
  CDR3 for alpha chain variable domain of TCR clone 303501 (TRAV30, TRAJ16)
CGTGGQKLLF

SEQ ID NO: 607002 - protein, 14 aa, Homo sapiens
  CDR3 for beta chain variable domain of TCR clone 303501 (TRBV6-1, TRBJ1-2)
CASSTGWPPTGYSF

SEQ ID NO: 607003 - protein, 14 aa, Homo sapiens
  CDR3 for alpha chain variable domain of TCR clone 303502 (TRAV4, TRAJ17)
CLVGDMAAGNKLTF

SEQ ID NO: 607004 - protein, 14 aa, Homo sapiens
  CDR3 for beta chain variable domain of TCR clone 303502 (TRBV4-1, TRBJ2-7)
CARSPVAGGDEQYF

SEQ ID NO: 607005 - protein, 14 aa, Homo sapiens
  CDR3 for alpha chain variable domain of TCR clone 303503 (TRAV12-2, TRAJ13)
CAVKKTGGYQTVTF

SEQ ID NO: 607006 - protein, 15 aa, Homo sapiens
  CDR3 for beta chain variable domain of TCR clone 303503 (TRBV6-3, TRBJ2-7)
CASSSPGTVFYEQYF

SEQ ID NO: 607007 - protein, 15 aa, Homo sapiens
  CDR3 for alpha chain variable domain of TCR clone 303504 (TRAV2, TRAJ6)
CAVEDRGQAGTALVF

SEQ ID NO: 607008 - protein, 13 aa, Homo sapiens
  CDR3 for beta chain variable domain of TCR clone 303504 (TRBV10-2, TRBJ2-7)
CASGASGGYEQYF

SEQ ID NO: 607009 - protein, 13 aa, Homo sapiens
  CDR3 for alpha chain variable domain of TCR clone 303505 (TRAV3, TRAJ27)
CAVRPLGAGKSTF

SEQ ID NO: 607010 - protein, 14 aa, Homo sapiens
  CDR3 for beta chain variable domain of TCR clone 303505 (TRBV4-2, TRBJ2-3)
CASRETRAPGMQNF

SEQ ID NO: 607011 - protein, 14 aa, Homo sapiens
  CDR3 for alpha chain variable domain of TCR clone 303506 (TRAV27, TRAJ50)
CAGGRKTSYDKVLF

SEQ ID NO: 607012 - protein, 11 aa, Homo sapiens
  CDR3 for beta chain variable domain of TCR clone 303506 (TRBV12-4, TRBJ2-3)
CASSSVRGRYF

SEQ ID NO: 607013 - protein, 15 aa, Homo sapiens
  CDR3 for alpha chain variable domain of TCR clone 303507 (TRAV8-3, TRAJ15)
CAVGAANQAGTALIF

SEQ ID NO: 607014 - protein, 14 aa, Homo sapiens
  CDR3 for beta chain variable domain of TCR clone 303507 (TRBV20-1, TRBJ2-1)
CSPNDEASYNERFF

SEQ ID NO: 607015 - protein, 11 aa, Homo sapiens
  CDR3 for alpha chain variable domain of TCR clone 303508 (TRAV17, TRAJ31)
CATDRTARLMF

SEQ ID NO: 607016 - protein, 14 aa, Homo sapiens
  CDR3 for beta chain variable domain of TCR clone 303508 (TRBV7-6, TRBJ2-3)
CASSLGTVTDTQYF

SEQ ID NO: 607017 - protein, 12 aa, Homo sapiens
  CDR3 for alpha chain variable domain of TCR clone 303509 (TRAV1-1, TRAJ8)
CAGGTGFQKLVF

SEQ ID NO: 607018 - protein, 14 aa, Homo sapiens
  CDR3 for beta chain variable domain of TCR clone 303509 (TRBV7-9, TRBJ1-4)
CQQPDRGLNEKLFF

SEQ ID NO: 607019 - protein, 12 aa, Homo sapiens
  CDR3 for alpha chain variable domain of TCR clone 303510 (TRAV16, TRAJ9)
CALRAGGFKTIF

SEQ ID NO: 607020 - protein, 13 aa, Homo sapiens
  CDR3 for beta chain variable domain of TCR clone 303510 (TRBV4-3, TRBJ1-1)
CASSQVEWSMAFF

SEQ ID NO: 607021 - protein, 17 aa, Homo sapiens
  CDR3 for alpha chain variable domain of TCR clone 303511 (TRAV9-2, TRAJ45)
CALSEYYSGGGADGLTF

SEQ ID NO: 607022 - protein, 13 aa, Homo sapiens
  CDR3 for beta chain variable domain of TCR clone 303511 (TRBV12-4, TRBJ1-2)
CASSLRQGKGYTF

SEQ ID NO: 607023 - protein, 14 aa, Homo sapiens
  CDR3 for alpha chain variable domain of TCR clone 303512 (TRAV12-1, TRAJ42)
CVVIDGGSQGNLIF

SEQ ID NO: 607024 - protein, 13 aa, Homo sapiens
  CDR3 for beta chain variable domain of TCR clone 303512 (TRBV18, TRBJ2-5)
CASSPPGKETQYF

SEQ ID NO: 607025 - protein, 14 aa, Homo sapiens
  CDR3 for alpha chain variable domain of TCR clone 303513 (TRAV12-2, TRAJ17)
CAALFKAAGNKLTF

SEQ ID NO: 607026 - protein, 15 aa, Homo sapiens
  CDR3 for beta chain variable domain of TCR clone 303513 (TRBV11-3, TRBJ2-3)
CASLKDGREGDTQYF

SEQ ID NO: 607027 - protein, 12 aa, Homo sapiens
  CDR3 for alpha chain variable domain of TCR clone 303514 (TRAV38-2/DV8, TRAJ48)
CALLSGNEKLNF

SEQ ID NO: 607028 - protein, 14 aa, Homo sapiens
  CDR3 for beta chain variable domain of TCR clone 303514 (TRBV11-2, TRBJ2-3)
CASSRLARTDTQYF

SEQ ID NO: 607029 - protein, 13 aa, Homo sapiens
  CDR3 for alpha chain variable domain of TCR clone 303515 (TRAV17, TRAJ21)
CATDGGNFNKFYF

SEQ ID NO: 607030 - protein, 11 aa, Homo sapiens
  CDR3 for beta chain variable domain of TCR clone 303515 (TRBV19, TRBJ1-1)
CVSSIGSEAFF

SEQ ID NO: 607031 - protein, 13 aa, Homo sapiens
  CDR3 for alpha chain variable domain of TCR clone 303516 (TRAV27, TRAJ49)
CAPRPYTGNEVYF

SEQ ID NO: 607032 - protein, 16 aa, Homo sapiens
  CDR3 for beta chain variable domain of TCR clone 303516 (TRBV4-1, TRBJ1-2)
CASSQDAGQVLYGYTF

SEQ ID NO: 607033 - protein, 13 aa, Homo sapiens
  CDR3 for alpha chain variable domain of TCR clone 303517 (TRAV12-2, TRAJ47)
CAVFMEYGNELVF

SEQ ID NO: 607034 - protein, 14 aa, Homo sapiens
  CDR3 for beta chain variable domain of TCR clone 303517 (TRBV4-1, TRBJ1-5)
CASSQGPTNQPQHF

SEQ ID NO: 607035 - protein, 14 aa, Homo sapiens
  CDR3 for alpha chain variable domain of TCR clone 303518 (TRAV17, TRAJ49)
CATDARDTGIQFYF

SEQ ID NO: 607036 - protein, 14 aa, Homo sapiens
  CDR3 for beta chain variable domain of TCR clone 303518 (TRBV5-5, TRBJ1-2)
CASSFGQINYGYTF

SEQ ID NO: 607037 - protein, 12 aa, Homo sapiens
  CDR3 for alpha chain variable domain of TCR clone 303519 (TRAV3, TRAJ43)
CAVRNPNNDMRF

SEQ ID NO: 607038 - protein, 15 aa, Homo sapiens
  CDR3 for beta chain variable domain of TCR clone 303519 (TRBV27, TRBJ1-5)
CASSLGTGFDQPQHF

SEQ ID NO: 607039 - protein, 11 aa, Homo sapiens
  CDR3 for alpha chain variable domain of TCR clone 303520 (TRAV12-1, TRAJ30)
CVVNGQDKIIF

SEQ ID NO: 607040 - protein, 16 aa, Homo sapiens
  CDR3 for beta chain variable domain of TCR clone 303520 (TRBV19, TRBJ2-3)
CASSPGAASRTDTQYF

SEQ ID NO: 607041 - protein, 11 aa, Homo sapiens
  CDR3 for alpha chain variable domain of TCR clone 303521 (TRAV20, TRAJ40)
CAVGGTYKYIF

SEQ ID NO: 607042 - protein, 21 aa, Homo sapiens
  CDR3 for beta chain variable domain of TCR clone 303521 (TRBV9, TRBJ2-5)
CASRGRLAGGPEDPVLRARHA

SEQ ID NO: 607043 - protein, 18 aa, Homo sapiens
  CDR3 for alpha chain variable domain of TCR clone 303522 (TRAV26-1, TRAJ22)
CIVRVALISSGSARQLTF

SEQ ID NO: 607044 - protein, 13 aa, Homo sapiens
  CDR3 for beta chain variable domain of TCR clone 303522 (TRBV28, TRBJ2-5)
CASSFAGGETQYF

SEQ ID NO: 607045 - protein, 12 aa, Homo sapiens
  CDR3 for alpha chain variable domain of TCR clone 303523 (TRAV8-3, TRAJ8)
DLMNTGFQKLVF

SEQ ID NO: 607046 - protein, 13 aa, Homo sapiens
  CDR3 for beta chain variable domain of TCR clone 303523 (TRBV10-2, TRBJ2-3)
CASSESGDHTQYF

SEQ ID NO: 607047 - protein, 15 aa, Homo sapiens
  CDR3 for alpha chain variable domain of TCR clone 303524 (TRAV26-1, TRAJ44)
CIVSIGTGTASKLTF

SEQ ID NO: 607048 - protein, 15 aa, Homo sapiens
  CDR3 for beta chain variable domain of TCR clone 303524 (TRBV7-6, TRBJ2-1)
CASSSLAGEGNEQFF

SEQ ID NO: 607049 - protein, 12 aa, Homo sapiens
  CDR3 for alpha chain variable domain of TCR clone 303525 (TRAV12-3, TRAJ17)
CAMTLTCSKLTF

SEQ ID NO: 607050 - protein, 20 aa, Homo sapiens
  CDR3 for beta chain variable domain of TCR clone 303525 (TRBV28, TRBJ2-1)
CASTPIGRSPGLAGGNEQFF

SEQ ID NO: 607051 - protein, 16 aa, Homo sapiens
  CDR3 for alpha chain variable domain of TCR clone 303526 (TRAV30, TRAJ24)
CVTEIVDADSWGKFQF

SEQ ID NO: 607052 - protein, 15 aa, Homo sapiens
  CDR3 for beta chain variable domain of TCR clone 303526 (TRBV20-1, TRBJ2-6)
CSARDRGPGANVLTF

SEQ ID NO: 607053 - protein, 15 aa, Homo sapiens
  CDR3 for alpha chain variable domain of TCR clone 303527 (TRAV3, TRAJ29)
CAVRDSPSGNTPLVF

SEQ ID NO: 607054 - protein, 14 aa, Homo sapiens
  CDR3 for beta chain variable domain of TCR clone 303527 (TRBV7-7, TRBJ2-2)
CATRQDSDTGELFF

SEQ ID NO: 607055 - protein, 16 aa, Homo sapiens
  CDR3 for alpha chain variable domain of TCR clone 303528 (TRAV3, TRAJ21)
CAGRDIERGNFDKFYF

SEQ ID NO: 607056 - protein, 13 aa, Homo sapiens
  CDR3 for beta chain variable domain of TCR clone 303528 (TRBV27, TRBJ2-7)
CASSLTTGYEQYF

SEQ ID NO: 607057 - protein, 14 aa, Homo sapiens
  CDR3 for alpha chain variable domain of TCR clone 303529 (TRAV12-2, TRAJ17)
CAALFKAAGNKLTF

SEQ ID NO: 607058 - protein, 15 aa, Homo sapiens
  CDR3 for beta chain variable domain of TCR clone 303529 (TRBV18, TRBJ2-3)
CASSPLAGETGTQYF

SEQ ID NO: 607059 - protein, 19 aa, Homo sapiens
  CDR3 for alpha chain variable domain of TCR clone 303530 (TRAV13-1, TRAJ52)
CAASPYQNAGGTSYGKLTF

SEQ ID NO: 607060 - protein, 13 aa, Homo sapiens
  CDR3 for beta chain variable domain of TCR clone 303530 (TRBV15, TRBJ2-7)
CATSTSGHYEQYF

SEQ ID NO: 607061 - protein, 13 aa, Homo sapiens
  CDR3 for alpha chain variable domain of TCR clone 303531 (TRAV3, TRAJ21)
CAVREPDFNKFYF

SEQ ID NO: 607062 - protein, 12 aa, Homo sapiens
  CDR3 for beta chain variable domain of TCR clone 303531 (TRBV18, TRBJ2-7)
CASSLDSYEQYF

SEQ ID NO: 607063 - protein, 16 aa, Homo sapiens
  CDR3 for alpha chain variable domain of TCR clone 303532 (TRAV13-1, TRAJ48)
CAASIFGNFGNDKLTF

SEQ ID NO: 607064 - protein, 16 aa, Homo sapiens
  CDR3 for beta chain variable domain of TCR clone 303532 (TRBV7-2, TRBJ2-6)
CASSERRASGANVLTF

SEQ ID NO: 607065 - protein, 15 aa, Homo sapiens
  CDR3 for alpha chain variable domain of TCR clone 303533 (TRAV8-3, TRAJ40)
CAAPSLGSGTYKYMF

SEQ ID NO: 607066 - protein, 16 aa, Homo sapiens
  CDR3 for beta chain variable domain of TCR clone 303533 (TRBV7-3, TRBJ2-3)
CASSLSGYRPEDTQYF

SEQ ID NO: 607067 - protein, 13 aa, Homo sapiens
  CDR3 for alpha chain variable domain of TCR clone 303534 (TRAV13-2, TRAJ53)
CTENMGSNYKLTF

SEQ ID NO: 607068 - protein, 13 aa, Homo sapiens
  CDR3 for beta chain variable domain of TCR clone 303534 (TRBV4-1, TRBJ2-2)
CASSQENTGELFF

SEQ ID NO: 607069 - protein, 11 aa, Homo sapiens
  CDR3 for alpha chain variable domain of TCR clone 303535 (TRAV12-3, TRAJ43)
CAMSVSNDMRF

SEQ ID NO: 607070 - protein, 16 aa, Homo sapiens
  CDR3 for beta chain variable domain of TCR clone 303535 (TRBV29-1, TRBJ2-7)
CSVEDAEDGTAYEQYF

SEQ ID NO: 607071 - protein, 12 aa, Homo sapiens
  CDR3 for alpha chain variable domain of TCR clone 303536 (TRAV12-3, TRAJ20)
CAMVRGDYKLSL

SEQ ID NO: 607072 - protein, 20 aa, Homo sapiens
  CDR3 for beta chain variable domain of TCR clone 303536 (TRBV28, TRBJ2-1)
CASTPIGRSPGLAGGNEQFF

SEQ ID NO: 607073 - protein, 13 aa, Homo sapiens
  CDR3 for alpha chain variable domain of TCR clone 303537 (TRAV13-2, TRAJ13)
CAERPGGYQKVTF

SEQ ID NO: 607074 - protein, 13 aa, Homo sapiens
  CDR3 for beta chain variable domain of TCR clone 303537 (TRBV7-3, TRBJ1-1)
CASSQDWGAEAFF

SEQ ID NO: 607075 - protein, 14 aa, Homo sapiens
  CDR3 for alpha chain variable domain of TCR clone 303538 (TRAV1-2, TRAJ8)
CAVREDTGFQKLVF

SEQ ID NO: 607076 - protein, 14 aa, Homo sapiens
  CDR3 for beta chain variable domain of TCR clone 303538 (TRBV11-3, TRBJ1-1)
CASSADRDHAEAFF

SEQ ID NO: 607077 - protein, 13 aa, Homo sapiens
  CDR3 for alpha chain variable domain of TCR clone 303539 (TRAV13-1, TRAJ49)
CAAMLYTGNQFYC

SEQ ID NO: 607078 - protein, 15 aa, Homo sapiens
  CDR3 for beta chain variable domain of TCR clone 303539 (TRBV12-4, TRBJ1-5)
CASTRGSGFGQPQHF

SEQ ID NO: 607079 - protein, 14 aa, Homo sapiens
  CDR3 for alpha chain variable domain of TCR clone 303540 (TRAV26-1, TRAJ52)
CIVRAHRNAGGTSY

SEQ ID NO: 607080 - protein, 15 aa, Homo sapiens
  CDR3 for beta chain variable domain of TCR clone 303540 (TRBV29-1, TRBJ2-1)
CSGRDRKSSYNEQFF

SEQ ID NO: 607081 - protein, 15 aa, Homo sapiens
  CDR3 for alpha chain variable domain of TCR clone 303541 (TRAV26-1, TRAJ42)
CIVRVKGGSQGNLIF

SEQ ID NO: 607082 - protein, 15 aa, Homo sapiens
  CDR3 for beta chain variable domain of TCR clone 303541 (TRBV9, TRBJ1-6)
CASSVAGTGDSPLHF

SEQ ID NO: 607083 - protein, 18 aa, Homo sapiens
  CDR3 for alpha chain variable domain of TCR clone 303542 (TRAV21, TRAJ52)
CAVRPSPAGGTSYGKVTF

SEQ ID NO: 607084 - protein, 13 aa, Homo sapiens
  CDR3 for beta chain variable domain of TCR clone 303542 (TRBV10-3, TRBJ2-7)
CASKLAVNYEQYF

SEQ ID NO: 607085 - protein, 16 aa, Homo sapiens
  CDR3 for alpha chain variable domain of TCR clone 303543 (TRAV13-1, TRAJ18)
CAASRMRGSTLGRLYF

SEQ ID NO: 607086 - protein, 13 aa, Homo sapiens
  CDR3 for beta chain variable domain of TCR clone 303543 (TRBV20-1, TRBJ2-3)
CSARLAGTDTQYF

SEQ ID NO: 607087 - protein, 14 aa, Homo sapiens
  CDR3 for alpha chain variable domain of TCR clone 303544 (TRAV2, TRAJ9)
CAVEDRSGGFKTIF

SEQ ID NO: 607088 - protein, 14 aa, Homo sapiens
  CDR3 for beta chain variable domain of TCR clone 303544 (TRBV7-3, TRBJ2-1)
CASSVAGGTNEQFF

SEQ ID NO: 607089 - protein, 15 aa, Homo sapiens
  CDR3 for alpha chain variable domain of TCR clone 303545 (TRAV8-3, TRAJ45)
CASSYSGGGADGLTF

SEQ ID NO: 607090 - protein, 12 aa, Homo sapiens
  CDR3 for beta chain variable domain of TCR clone 303545 (TRBV12-4, TRBJ2-3)
CASSTLPDTQYF

SEQ ID NO: 607091 - protein, 14 aa, Homo sapiens
  CDR3 for alpha chain variable domain of TCR clone 303546 (TRAV9-2, TRAJ39)
CALYIYNAGNMLTL

SEQ ID NO: 607092 - protein, 14 aa, Homo sapiens
  CDR3 for beta chain variable domain of TCR clone 303546 (TRBV13, TRBJ2-5)
CASSLGPRGETQYF

SEQ ID NO: 607093 - protein, 14 aa, Homo sapiens
  CDR3 for alpha chain variable domain of TCR clone 303547 (TRAV1-1, TRAJ27)
CAVIYNTNEGKSTI

SEQ ID NO: 607094 - protein, 12 aa, Homo sapiens
  CDR3 for beta chain variable domain of TCR clone 303547 (TRBV11-2, TRBJ2-1)
CASSPGNNEQFF

SEQ ID NO: 607095 - protein, 15 aa, Homo sapiens
  CDR3 for alpha chain variable domain of TCR clone 303548 (TRAV3, TRAJ5)
CAVRDLYTGRRELNF

SEQ ID NO: 607096 - protein, 18 aa, Homo sapiens
  CDR3 for beta chain variable domain of TCR clone 303548 (TRBV20-1, TRBJ1-4)
CSAPGQGLLTNEKLFLAV

SEQ ID NO: 607097 - protein, 16 aa, Homo sapiens
  CDR3 for alpha chain variable domain of TCR clone 303549 (TRAV12-2, TRAJ28)
CAVIRGSGAGSYQLTF

SEQ ID NO: 607098 - protein, 16 aa, Homo sapiens
  CDR3 for beta chain variable domain of TCR clone 303549 (TRBV4-2, TRBJ2-3)
CASSQELAGDTDTQYF

SEQ ID NO: 607099 - protein, 13 aa, Homo sapiens
  CDR3 for alpha chain variable domain of TCR clone 303550 (TRAV29/DV5, TRAJ31)
CAASRTNNARLMF

SEQ ID NO: 607100 - protein, 14 aa, Homo sapiens
  CDR3 for beta chain variable domain of TCR clone 303550 (TRBV12-4, TRBJ2-3)
CASSLGQGTDTQYF

SEQ ID NO: 607101 - protein, 16 aa, Homo sapiens
  CDR3 for alpha chain variable domain of TCR clone 303551 (TRAV12-2, TRAJ18)
CAVTTERGSTLGRLYF

SEQ ID NO: 607102 - protein, 14 aa, Homo sapiens
  CDR3 for beta chain variable domain of TCR clone 303551 (TRBV4-2, TRBJ1-5)
CASSQDSINQPQHF

SEQ ID NO: 607103 - protein, 11 aa, Homo sapiens
  CDR3 for alpha chain variable domain of TCR clone 303552 (TRAV17, TRAJ9)
CATTGGFKTTF

SEQ ID NO: 607104 - protein, 17 aa, Homo sapiens
  CDR3 for beta chain variable domain of TCR clone 303552 (TRBV20-1, TRBJ2-2)
CSASGSGQGGLTGELFF

SEQ ID NO: 607105 - protein, 12 aa, Homo sapiens
  CDR3 for alpha chain variable domain of TCR clone 303553 (TRAV13-1, TRAJ40)
CAANSGTYKYIF

SEQ ID NO: 607106 - protein, 12 aa, Homo sapiens
  CDR3 for beta chain variable domain of TCR clone 303553 (TRBV12-4, TRBJ2-7)
CASSVGGYEQYF

SEQ ID NO: 607107 - protein, 12 aa, Homo sapiens
  CDR3 for alpha chain variable domain of TCR clone 303554 (TRAV13-2, TRAJ23)
CAERHRGGKLIF

SEQ ID NO: 607108 - protein, 15 aa, Homo sapiens
  CDR3 for beta chain variable domain of TCR clone 303554 (TRBV7-9, TRBJ2-7)
CASSLALAEAYEQYF

SEQ ID NO: 607109 - protein, 12 aa, Homo sapiens
  CDR3 for alpha chain variable domain of TCR clone 303555 (TRAV13-1, TRAJ21)
CAAKEGFNKFYF

SEQ ID NO: 607110 - protein, 12 aa, Homo sapiens
  CDR3 for beta chain variable domain of TCR clone 303555 (TRBV11-2, TRBJ2-2)
CASTLGGGELFF

SEQ ID NO: 607111 - protein, 14 aa, Homo sapiens
  CDR3 for alpha chain variable domain of TCR clone 303556 (TRAV1-2, TRAJ16)
CAVNRISDGQKLLF

SEQ ID NO: 607112 - protein, 16 aa, Homo sapiens
  CDR3 for beta chain variable domain of TCR clone 303556 (TRBV20-1, TRBJ1-4)
CSARPYGGELNEKLFF

SEQ ID NO: 607113 - protein, 11 aa, Homo sapiens
  CDR3 for alpha chain variable domain of TCR clone 303557 (TRAV2, TRAJ21)
CAVFNFNKFYF

SEQ ID NO: 607114 - protein, 15 aa, Homo sapiens
  CDR3 for beta chain variable domain of TCR clone 303557 (TRBV4-1, TRBJ2-5)
CASSQWDLYQETQYF

SEQ ID NO: 607115 - protein, 14 aa, Homo sapiens
  CDR3 for alpha chain variable domain of TCR clone 303558 (TRAV8-3, TRAJ12)
CAVGARDSSYKLIF

SEQ ID NO: 607116 - protein, 13 aa, Homo sapiens
  CDR3 for beta chain variable domain of TCR clone 303558 (TRBV29-1, TRBJ2-5)
CSVTIASEETQYF

SEQ ID NO: 607117 - protein, 17 aa, Homo sapiens
  CDR3 for alpha chain variable domain of TCR clone 303559 (TRAV17, TRAJ52)
CATERPSGGTSYGKLTF

SEQ ID NO: 607118 - protein, 13 aa, Homo sapiens
  CDR3 for beta chain variable domain of TCR clone 303559 (TRBV3-1, TRBJ1-5)
CAITRRDGQPQHF

SEQ ID NO: 607119 - protein, 15 aa, Homo sapiens
  CDR3 for alpha chain variable domain of TCR clone 303560 (TRAV13-1, TRAJ5)
CAASPRGHGQESTYF

SEQ ID NO: 607120 - protein, 12 aa, Homo sapiens
  CDR3 for beta chain variable domain of TCR clone 303560 (TRBV7-8, TRBJ2-7)
CASSLGDREQYF

SEQ ID NO: 607121 - protein, 16 aa, Homo sapiens
  CDR3 for alpha chain variable domain of TCR clone 303561 (TRAV30, TRAJ24)
CGTEIVDADSWEKFQF

SEQ ID NO: 607122 - protein, 14 aa, Homo sapiens
  CDR3 for beta chain variable domain of TCR clone 303561 (TRBV20-1, TRBJ1-1)
CSAQTRIGGTEAFF

SEQ ID NO: 607123 - protein, 12 aa, Homo sapiens
  CDR3 for alpha chain variable domain of TCR clone 303562 (TRAV12-3, TRAJ34)
CAMGYNTDKLIF

SEQ ID NO: 607124 - protein, 16 aa, Homo sapiens
  CDR3 for beta chain variable domain of TCR clone 303562 (TRBV14, TRBJ2-2)
CASSRSLGDDTGELFF

SEQ ID NO: 607125 - protein, 11 aa, Homo sapiens
  CDR3 for alpha chain variable domain of TCR clone 303563 (TRAV12-1, TRAJ34)
CAVNKGREVIF

SEQ ID NO: 607126 - protein, 15 aa, Homo sapiens
  CDR3 for beta chain variable domain of TCR clone 303563 (TRBV10-3, TRBJ2-1)
CAIRNGTSGHNEQFF

SEQ ID NO: 607127 - protein, 14 aa, Homo sapiens
  CDR3 for alpha chain variable domain of TCR clone 303564 (TRAV17, TRAJ5)
CATSTETGRRALTF

SEQ ID NO: 607128 - protein, 14 aa, Homo sapiens
  CDR3 for beta chain variable domain of TCR clone 303564 (TRBV3-1, TRBJ1-5)
CASSTGDSNQPQHF

SEQ ID NO: 607129 - protein, 16 aa, Homo sapiens
  CDR3 for alpha chain variable domain of TCR clone 303565 (TRAV12-1, TRAJ42)
CVVTPYYGGSQGNLIF

SEQ ID NO: 607130 - protein, 17 aa, Homo sapiens
  CDR3 for beta chain variable domain of TCR clone 303565 (TRBV13, TRBJ2-3)
CASSLSRVAGGRNTQYL

SEQ ID NO: 607131 - protein, 14 aa, Homo sapiens
  CDR3 for alpha chain variable domain of TCR clone 303566 (TRAV13-1, TRAJ9)
CAASALTGGFKTIF

SEQ ID NO: 607132 - protein, 16 aa, Homo sapiens
  CDR3 for beta chain variable domain of TCR clone 303566 (TRBV7-8, TRBJ2-4)
CASSAERTLAKNIQYV

SEQ ID NO: 607133 - protein, 13 aa, Homo sapiens
  CDR3 for alpha chain variable domain of TCR clone 303567 (TRAV12-3, TRAJ31)
CAMSANNTARLMF

SEQ ID NO: 607134 - protein, 16 aa, Homo sapiens
  CDR3 for beta chain variable domain of TCR clone 303567 (TRBV7-9, TRBJ1-2)
CASSLGFSSGEDGYTF

SEQ ID NO: 607135 - protein, 14 aa, Homo sapiens
  CDR3 for alpha chain variable domain of TCR clone 303568 (TRAV26-2, TRAJ27)
CILRDISDAGKSTF

SEQ ID NO: 607136 - protein, 15 aa, Homo sapiens
  CDR3 for beta chain variable domain of TCR clone 303568 (TRBV11-2, TRBJ2-1)
CASSLGTSGLNEQFF

SEQ ID NO: 607137 - protein, 23 aa, Homo sapiens
  CDR3 for alpha chain variable domain of TCR clone 303569 (TRAV2, TRAJ32)
GAGGRCRCLLLWGGGGATNKLIF

SEQ ID NO: 607138 - protein, 15 aa, Homo sapiens
  CDR3 for beta chain variable domain of TCR clone 303569 (TRBV20-1, TRBJ1-1)
CSARGGGTLKLSLDK

SEQ ID NO: 607139 - protein, 12 aa, Homo sapiens
  CDR3 for alpha chain variable domain of TCR clone 303570 (TRAV12-3, TRAJ17)
CAMTLTGNELTF

SEQ ID NO: 607140 - protein, 16 aa, Homo sapiens
  CDR3 for beta chain variable domain of TCR clone 303570 (TRBV28, TRBJ1-5)
CASSLTGQGWNQPQHF

SEQ ID NO: 607141 - protein, 11 aa, Homo sapiens
  CDR3 for alpha chain variable domain of TCR clone 303571 (TRAV12-2, TRAJ30)
CAVGRDDKIIF

SEQ ID NO: 607142 - protein, 16 aa, Homo sapiens
  CDR3 for beta chain variable domain of TCR clone 303571 (TRBV7-3, TRBJ2-1)
CASSLEGYRSYNEQFF

SEQ ID NO: 607143 - protein, 11 aa, Homo sapiens
  CDR3 for alpha chain variable domain of TCR clone 303572 (TRAV27, TRAJ40)
SLTSGTYKYIF

SEQ ID NO: 607144 - protein, 12 aa, Homo sapiens
  CDR3 for beta chain variable domain of TCR clone 303572 (TRBV18, TRBJ2-3)
CQLNQNTDTQYF

SEQ ID NO: 607145 - protein, 13 aa, Homo sapiens
  CDR3 for alpha chain variable domain of TCR clone 303573 (TRAV13-1, TRAJ11)
CAAVLAGYSTLTF

SEQ ID NO: 607146 - protein, 17 aa, Homo sapiens
  CDR3 for beta chain variable domain of TCR clone 303573 (TRBV25-1, TRBJ2-7)
YASSDARVVFSSYEQYF

SEQ ID NO: 607147 - protein, 17 aa, Homo sapiens
  CDR3 for alpha chain variable domain of TCR clone 303574 (TRAV3, TRAJ28)
CAVREAYSGAGGYQLTF

SEQ ID NO: 607148 - protein, 11 aa, Homo sapiens
  CDR3 for beta chain variable domain of TCR clone 303574 (TRBV19, TRBJ2-2)
CASRYSGELFF

SEQ ID NO: 607149 - protein, 15 aa, Homo sapiens
  CDR3 for alpha chain variable domain of TCR clone 303575 (TRAV12-2, TRAJ8)
CAVREENTGFQKLVF

SEQ ID NO: 607150 - protein, 16 aa, Homo sapiens
  CDR3 for beta chain variable domain of TCR clone 303575 (TRBV7-3, TRBJ2-3)
CASSLSGYRPEDTQYF

SEQ ID NO: 607151 - protein, 15 aa, Homo sapiens
  CDR3 for alpha chain variable domain of TCR clone 303576 (TRAV20, TRAJ6)
CAVRLQSGGSYIHTF

SEQ ID NO: 607152 - protein, 14 aa, Homo sapiens
  CDR3 for beta chain variable domain of TCR clone 303576 (TRBV12-4, TRBJ2-7)
CASSASGGWYEQYF

SEQ ID NO: 607153 - protein, 10 aa, Homo sapiens
  CDR3 for alpha chain variable domain of TCR clone 303577 (TRAV17, TRAJ52)
SATSYGKLTF

SEQ ID NO: 607154 - protein, 12 aa, Homo sapiens
  CDR3 for beta chain variable domain of TCR clone 303577 (TRBV7-8, TRBJ2-7)
CASSLGDREQYF

SEQ ID NO: 607155 - protein, 13 aa, Homo sapiens
  CDR3 for alpha chain variable domain of TCR clone 303578 (TRAV2, TRAJ40)
CAVVSSVTYKYIF

SEQ ID NO: 607156 - protein, 14 aa, Homo sapiens
  CDR3 for beta chain variable domain of TCR clone 303578 (TRBV19, TRBJ2-1)
CASPTFVLSGEQFF

SEQ ID NO: 607157 - protein, 14 aa, Homo sapiens
  CDR3 for alpha chain variable domain of TCR clone 303579 (TRAV13-1, TRAJ40)
CAASMTSGTYKYIF

SEQ ID NO: 607158 - protein, 15 aa, Homo sapiens
  CDR3 for beta chain variable domain of TCR clone 303579 (TRBV7-3, TRBJ2-1)
CGSSPTGGGEVEQFF

SEQ ID NO: 607159 - protein, 14 aa, Homo sapiens
  CDR3 for alpha chain variable domain of TCR clone 303580 (TRAV12-2, TRAJ13)
CAVNPSGGYQKVTF

SEQ ID NO: 607160 - protein, 13 aa, Homo sapiens
  CDR3 for beta chain variable domain of TCR clone 303580 (TRBV20-1, TRBJ1-6)
CSAKLGGPSPLHF

SEQ ID NO: 607161 - protein, 17 aa, Homo sapiens
  CDR3 for alpha chain variable domain of TCR clone 303581 (TRAV3, TRAJ6)
CAVRDGPRAGGSYIPTF

SEQ ID NO: 607162 - protein, 17 aa, Homo sapiens
  CDR3 for beta chain variable domain of TCR clone 303581 (TRBV3-1, TRBJ2-2)
CASSQFRDKVDTGELFF

SEQ ID NO: 607163 - protein, 14 aa, Homo sapiens
  CDR3 for alpha chain variable domain of TCR clone 303582 (TRAV1-2, TRAJ15)
CAVRDRQAGTALIF

SEQ ID NO: 607164 - protein, 14 aa, Homo sapiens
  CDR3 for beta chain variable domain of TCR clone 303582 (TRBV7-2, TRBJ2-7)
CARSPKTSFYEQYF

SEQ ID NO: 607165 - protein, 13 aa, Homo sapiens
  CDR3 for alpha chain variable domain of TCR clone 303583 (TRAV1-2, TRAJ9)
CAVLNTGGFKTIF

SEQ ID NO: 607166 - protein, 14 aa, Homo sapiens
  CDR3 for beta chain variable domain of TCR clone 303583 (TRBV5-1, TRBJ2-2)
CASSLGGGSGKLFF

SEQ ID NO: 607167 - protein, 11 aa, Homo sapiens
  CDR3 for alpha chain variable domain of TCR clone 303584 (TRAV2, TRAJ13)
CASGGYQKVTF

SEQ ID NO: 607168 - protein, 14 aa, Homo sapiens
  CDR3 for beta chain variable domain of TCR clone 303584 (TRBV7-3, TRBJ2-1)
GASSLAGGTNEQFF

SEQ ID NO: 607169 - protein, 14 aa, Homo sapiens
  CDR3 for alpha chain variable domain of TCR clone 303585 (TRAV12-2, TRAJ44)
CAVNPAGTASKLTF

SEQ ID NO: 607170 - protein, 13 aa, Homo sapiens
  CDR3 for beta chain variable domain of TCR clone 303585 (TRBV20-1, TRBJ1-6)
YSAPLGVGSPLHF

SEQ ID NO: 607171 - protein, 16 aa, Homo sapiens
  CDR3 for alpha chain variable domain of TCR clone 303586 (TRAV1-2, TRAJ10)
CAVRGVLTGGGNKLTF

SEQ ID NO: 607172 - protein, 13 aa, Homo sapiens
  CDR3 for beta chain variable domain of TCR clone 303586 (TRBV11-3, TRBJ2-7)
CASSLDKLYEQYF

SEQ ID NO: 607173 - protein, 13 aa, Homo sapiens
  CDR3 for alpha chain variable domain of TCR clone 303587 (TRAV35, TRAJ48)
CAGHEFGNEKLTF

SEQ ID NO: 607174 - protein, 16 aa, Homo sapiens
  CDR3 for beta chain variable domain of TCR clone 303587 (TRBV12-5, TRBJ2-5)
CASGPRTSGKQETQYF

SEQ ID NO: 607175 - protein, 14 aa, Homo sapiens
  CDR3 for alpha chain variable domain of TCR clone 303588 (TRAV26-1, TRAJ48)
CIVRTNFGNVKLTF

SEQ ID NO: 607176 - protein, 12 aa, Homo sapiens
  CDR3 for beta chain variable domain of TCR clone 303588 (TRBV20-1, TRBJ2-7)
CSASSGANEQYF

SEQ ID NO: 607177 - protein, 11 aa, Homo sapiens
  CDR3 for alpha chain variable domain of TCR clone 303589 (TRAV12-1, TRAJ40)
CVVPGTYKYIF

SEQ ID NO: 607178 - protein, 15 aa, Homo sapiens
  CDR3 for beta chain variable domain of TCR clone 303589 (TRBV6-3, TRBJ2-7)
CASSSPGTVFYEQYF

SEQ ID NO: 607179 - protein, 14 aa, Homo sapiens
  CDR3 for alpha chain variable domain of TCR clone 303590 (TRAV30, TRAJ33)
CGTVAPRSNYQLIW

SEQ ID NO: 607180 - protein, 16 aa, Homo sapiens
  CDR3 for beta chain variable domain of TCR clone 303590 (TRBV3-1, TRBJ2-5)
CASSPGQFNGFGTQYF

SEQ ID NO: 607181 - protein, 14 aa, Homo sapiens
  CDR3 for alpha chain variable domain of TCR clone 303591 (TRAV1-2, TRAJ8)
CAVREDTGFQKLVF

SEQ ID NO: 607182 - protein, 14 aa, Homo sapiens
  CDR3 for beta chain variable domain of TCR clone 303591 (TRBV29-1, TRBJ2-5)
CSVETSGSGGTQYL

SEQ ID NO: 607183 - protein, 12 aa, Homo sapiens
  CDR3 for alpha chain variable domain of TCR clone 303592 (TRAV2, TRAJ33)
CAVWGSHYQLIW

SEQ ID NO: 607184 - protein, 16 aa, Homo sapiens
  CDR3 for beta chain variable domain of TCR clone 303592 (TRBV20-1, TRBJ1-4)
CSAPGQGLLTNEKLFF

SEQ ID NO: 607185 - protein, 12 aa, Homo sapiens
  CDR3 for alpha chain variable domain of TCR clone 303593 (TRAV2, TRAJ26)
CAVGEYGQNFVF

SEQ ID NO: 607186 - protein, 14 aa, Homo sapiens
  CDR3 for beta chain variable domain of TCR clone 303593 (TRBV7-2, TRBJ2-2)
CASSPSGGTGEIFF

SEQ ID NO: 607187 - protein, 17 aa, Homo sapiens
  CDR3 for alpha chain variable domain of TCR clone 303594 (TRAV13-1, TRAJ49)
CAARRRAYTNTGNQFYF

SEQ ID NO: 607188 - protein, 13 aa, Homo sapiens
  CDR3 for beta chain variable domain of TCR clone 303594 (TRBV7-6, TRBJ1-2)
CASSLVADYGYTF

SEQ ID NO: 607189 - protein, 14 aa, Homo sapiens
  CDR3 for alpha chain variable domain of TCR clone 303595 (TRAV3, TRAJ15)
CAVTLNQAGTALFF

SEQ ID NO: 607190 - protein, 17 aa, Homo sapiens
  CDR3 for beta chain variable domain of TCR clone 303595 (TRBV7-8, TRBJ2-7)
CASSFTSGRPPSYEQYF

SEQ ID NO: 607191 - protein, 15 aa, Homo sapiens
  CDR3 for alpha chain variable domain of TCR clone 303596 (TRAV26-1, TRAJ3)
CIVRSGYSSASKIIF

SEQ ID NO: 607192 - protein, 17 aa, Homo sapiens
  CDR3 for beta chain variable domain of TCR clone 303596 (TRBV13, TRBJ2-3)
CASSLSRVAGGRNTQYF

SEQ ID NO: 607193 - protein, 13 aa, Homo sapiens
  CDR3 for alpha chain variable domain of TCR clone 303597 (TRAV8-6, TRAJ21)
WAVSPSSLNKFYF

SEQ ID NO: 607194 - protein, 14 aa, Homo sapiens
  CDR3 for beta chain variable domain of TCR clone 303597 (TRBV7-9, TRBJ2-5)
CASSLDTAQDTQYF

SEQ ID NO: 607195 - protein, 12 aa, Homo sapiens
  CDR3 for alpha chain variable domain of TCR clone 303598 (TRAV12-3, TRAJ17)
CAMTLTGKKLTF

SEQ ID NO: 607196 - protein, 13 aa, Homo sapiens
  CDR3 for beta chain variable domain of TCR clone 303598 (TRBV7-3, TRBJ1-1)
CASSQDWGAEAFF

SEQ ID NO: 607197 - protein, 11 aa, Homo sapiens
  CDR3 for alpha chain variable domain of TCR clone 303599 (TRAV1-2, TRAJ11)
CAVRGYSTLTF

SEQ ID NO: 607198 - protein, 12 aa, Homo sapiens
  CDR3 for beta chain variable domain of TCR clone 303599 (TRBV14, TRBJ2-7)
CASSRLKGEQYF

SEQ ID NO: 607199 - protein, 15 aa, Homo sapiens
  CDR3 for alpha chain variable domain of TCR clone 303600 (TRAV35, TRAJ23)
CAGQRGYNQGGKLIF

SEQ ID NO: 607200 - protein, 16 aa, Homo sapiens
  CDR3 for beta chain variable domain of TCR clone 303600 (TRBV27, TRBJ2-1)
CASSSRLAVNYNEQFF

SEQ ID NO: 607201 - protein, 15 aa, Homo sapiens
  CDR3 for alpha chain variable domain of TCR clone 303601 (TRAV12-1, TRAJ42)
CVVTRDGGSQGDLIF

SEQ ID NO: 607202 - protein, 14 aa, Homo sapiens
  CDR3 for beta chain variable domain of TCR clone 303601 (TRBV11-2, TRBJ2-3)
CASSLGGGANTQYF

SEQ ID NO: 607203 - protein, 13 aa, Homo sapiens
  CDR3 for alpha chain variable domain of TCR clone 303602 (TRAV21, TRAJ20)
CAVGVFADYKLSF

SEQ ID NO: 607204 - protein, 16 aa, Homo sapiens
  CDR3 for beta chain variable domain of TCR clone 303602 (TRBV4-1, TRBJ2-3)
CASSQSTSGAEDTQYF

SEQ ID NO: 607205 - protein, 14 aa, Homo sapiens
  CDR3 for alpha chain variable domain of TCR clone 303603 (TRAV12-3, TRAJ54)
CAMGGIQGAQKLVL

SEQ ID NO: 607206 - protein, 13 aa, Homo sapiens
  CDR3 for beta chain variable domain of TCR clone 303603 (TRBV19, TRBJ1-1)
CASSPSNGGEAFF

SEQ ID NO: 607207 - protein, 13 aa, Homo sapiens
  CDR3 for alpha chain variable domain of TCR clone 303604 (TRAV12-2, TRAJ24)
CAVSTDSWGKLQF

SEQ ID NO: 607208 - protein, 14 aa, Homo sapiens
  CDR3 for beta chain variable domain of TCR clone 303604 (TRBV7-2, TRBJ2-7)
CASRSQGAAYEQYF

SEQ ID NO: 607209 - protein, 14 aa, Homo sapiens
  CDR3 for alpha chain variable domain of TCR clone 303605 (TRAV17, TRAJ57)
CATDPQGGSAKLVF

SEQ ID NO: 607210 - protein, 18 aa, Homo sapiens
  CDR3 for beta chain variable domain of TCR clone 303605 (TRBV25-1, TRBJ2-1)
CASSESRAGGPGYNEQFF

SEQ ID NO: 607211 - protein, 14 aa, Homo sapiens
  CDR3 for alpha chain variable domain of TCR clone 303606 (TRAV9-2, TRAJ39)
CALYIYNAGNMLTF

SEQ ID NO: 607212 - protein, 15 aa, Homo sapiens
  CDR3 for beta chain variable domain of TCR clone 303606 (TRBV7-9, TRBJ2-2)
CASNSWGGRTGELFF

SEQ ID NO: 607213 - protein, 17 aa, Homo sapiens
  CDR3 for alpha chain variable domain of TCR clone 303607 (TRAV3, TRAJ6)
CAARDGPRAGGSYIPTF

SEQ ID NO: 607214 - protein, 14 aa, Homo sapiens
  CDR3 for beta chain variable domain of TCR clone 303607 (TRBV7-2, TRBJ2-7)
CVSSPKTSFYEQYF

SEQ ID NO: 607215 - protein, 17 aa, Homo sapiens
  CDR3 for alpha chain variable domain of TCR clone 303608 (TRAV3, TRAJ42)
CAVRDRDYGGSQGNLIF

SEQ ID NO: 607216 - protein, 14 aa, Homo sapiens
  CDR3 for beta chain variable domain of TCR clone 303608 (TRBV19, TRBJ2-2)
RTSSGQGIAGELFF

SEQ ID NO: 607217 - protein, 17 aa, Homo sapiens
  CDR3 for alpha chain variable domain of TCR clone 303609 (TRAV1-2, TRAJ8)
CDVRDPDENTGFQKLVF

SEQ ID NO: 607218 - protein, 16 aa, Homo sapiens
  CDR3 for beta chain variable domain of TCR clone 303609 (TRBV7-9, TRBJ2-2)
CASSGFGGANTGELFF

SEQ ID NO: 607219 - protein, 12 aa, Homo sapiens
  CDR3 for alpha chain variable domain of TCR clone 303610 (TRAV17, TRAJ20)
CATDRYDYKLSF

SEQ ID NO: 607220 - protein, 14 aa, Homo sapiens
  CDR3 for beta chain variable domain of TCR clone 303610 (TRBV19, TRBJ2-1)
CASTTFVLSGEQFF

SEQ ID NO: 607221 - protein, 17 aa, Homo sapiens
  CDR3 for alpha chain variable domain of TCR clone 303611 (TRAV14/DV4, TRAJ28)
CAMREPVTGTGSYQLTF

SEQ ID NO: 607222 - protein, 14 aa, Homo sapiens
  CDR3 for beta chain variable domain of TCR clone 303611 (TRBV7-2, TRBJ2-7)
CASSPKTSFYEQYF

SEQ ID NO: 607223 - protein, 19 aa, Homo sapiens
  CDR3 for alpha chain variable domain of TCR clone 303612 (TRAV29/DV5, TRAJ49)
CSVLLCSKLTVDTGNQFYF

SEQ ID NO: 607224 - protein, 13 aa, Homo sapiens
  CDR3 for beta chain variable domain of TCR clone 303612 (TRBV7-9, TRBJ2-3)
CASSPGSTDTQYF

SEQ ID NO: 607225 - protein, 14 aa, Homo sapiens
  CDR3 for alpha chain variable domain of TCR clone 303613 (TRAV1-2, TRAJ16)
CAVNRFSDGQKLFF

SEQ ID NO: 607226 - protein, 15 aa, Homo sapiens
  CDR3 for beta chain variable domain of TCR clone 303613 (TRBV6-6, TRBJ2-7)
CASSYSYGGSYEQYF

SEQ ID NO: 607227 - protein, 18 aa, Homo sapiens
  CDR3 for alpha chain variable domain of TCR clone 303614 (TRAV29/DV5, TRAJ53)
CSVLLCSKRGGSNYKLTF

SEQ ID NO: 607228 - protein, 15 aa, Homo sapiens
  CDR3 for beta chain variable domain of TCR clone 303614 (TRBV7-9, TRBJ1-4)
CASSATGGNNEKLFF

SEQ ID NO: 607229 - protein, 14 aa, Homo sapiens
  CDR3 for alpha chain variable domain of TCR clone 303615 (TRAV1-1, TRAJ27)
CAVIDNTNAGKSTF

SEQ ID NO: 607230 - protein, 13 aa, Homo sapiens
  CDR3 for beta chain variable domain of TCR clone 303615 (TRBV7-9, TRBJ1-2)
CASSLKQNYGYTF

SEQ ID NO: 607231 - protein, 14 aa, Homo sapiens
  CDR3 for alpha chain variable domain of TCR clone 303616 (TRAV17, TRAJ22)
CATSPSGSARQLTF

SEQ ID NO: 607232 - protein, 15 aa, Homo sapiens
  CDR3 for beta chain variable domain of TCR clone 303616 (TRBV4-1, TRBJ2-5)
CASSEWDLYQENQYF

SEQ ID NO: 607233 - protein, 14 aa, Homo sapiens
  CDR3 for alpha chain variable domain of TCR clone 303617 (TRAV26-1, TRAJ44)
CISPLPGTASKLTF

SEQ ID NO: 607234 - protein, 16 aa, Homo sapiens
  CDR3 for beta chain variable domain of TCR clone 303617 (TRBV19, TRBJ2-1)
YASSKAGPSSYNEQFF

SEQ ID NO: 607235 - protein, 14 aa, Homo sapiens
  CDR3 for alpha chain variable domain of TCR clone 303618 (TRAV12-2, TRAJ17)
CAVLFKAAGNKLTF

SEQ ID NO: 607236 - protein, 14 aa, Homo sapiens
  CDR3 for beta chain variable domain of TCR clone 303618 (TRBV4-1, TRBJ2-2)
CASSQAVNTGERFF

SEQ ID NO: 607237 - protein, 16 aa, Homo sapiens
  CDR3 for alpha chain variable domain of TCR clone 303619 (TRAV23/DV6, TRAJ9)
CAASIGGNTGGFKTIF

SEQ ID NO: 607238 - protein, 18 aa, Homo sapiens
  CDR3 for beta chain variable domain of TCR clone 303619 (TRBV4-3, TRBJ2-6)
CASSQDIQGGPGANVLTF

SEQ ID NO: 607239 - protein, 13 aa, Homo sapiens
  CDR3 for alpha chain variable domain of TCR clone 303620 (TRAV13-1, TRAJ29)
CAASIGLNTPLVF

SEQ ID NO: 607240 - protein, 13 aa, Homo sapiens
  CDR3 for beta chain variable domain of TCR clone 303620 (TRBV20-1, TRBJ2-7)
CSARGRGAYEQYS

SEQ ID NO: 607241 - protein, 14 aa, Homo sapiens
  CDR3 for alpha chain variable domain of TCR clone 303621 (TRAV13-2, TRAJ43)
CAEIPTYNNNDMRF

SEQ ID NO: 607242 - protein, 17 aa, Homo sapiens
  CDR3 for beta chain variable domain of TCR clone 303621 (TRBV18, TRBJ2-1)
CASSKGLSGGADNEQFF

SEQ ID NO: 607243 - protein, 14 aa, Homo sapiens
  CDR3 for alpha chain variable domain of TCR clone 303622 (TRAV4, TRAJ26)
CLVGPHNYGQNFVF

SEQ ID NO: 607244 - protein, 14 aa, Homo sapiens
  CDR3 for beta chain variable domain of TCR clone 303622 (TRBV11-2, TRBJ2-7)
CASSLGAGAYEQYF

SEQ ID NO: 607245 - protein, 12 aa, Homo sapiens
  CDR3 for alpha chain variable domain of TCR clone 303623 (TRAV13-1, TRAJ36)
WRGGAGANNLFF

SEQ ID NO: 607246 - protein, 16 aa, Homo sapiens
  CDR3 for beta chain variable domain of TCR clone 303623 (TRBV7-9, TRBJ2-5)
CASRLEIGTRKENQYF

SEQ ID NO: 607247 - protein, 13 aa, Homo sapiens
  CDR3 for alpha chain variable domain of TCR clone 303624 (TRAV3, TRAJ20)
CAVRSLNDHKLSF

SEQ ID NO: 607248 - protein, 16 aa, Homo sapiens
  CDR3 for beta chain variable domain of TCR clone 303624 (TRBV7-3, TRBJ2-2)
CASSLKRGTLSGELFF

SEQ ID NO: 607249 - protein, 13 aa, Homo sapiens
  CDR3 for alpha chain variable domain of TCR clone 303625 (TRAV21, TRAJ27)
CAALNTNAGKSTF

SEQ ID NO: 607250 - protein, 13 aa, Homo sapiens
  CDR3 for beta chain variable domain of TCR clone 303625 (TRBV20-1, TRBJ1-1)
CSARGGGNTEAFF

SEQ ID NO: 607251 - protein, 14 aa, Homo sapiens
  CDR3 for alpha chain variable domain of TCR clone 303626 (TRAV12-1, TRAJ23)
CVVNIPNQGGKLIF

SEQ ID NO: 607252 - protein, 16 aa, Homo sapiens
  CDR3 for beta chain variable domain of TCR clone 303626 (TRBV6-6, TRBJ2-1)
CASSWGGQGPYNEQFF

SEQ ID NO: 607253 - protein, 12 aa, Homo sapiens
  CDR3 for alpha chain variable domain of TCR clone 303627 (TRAV2, TRAJ9)
CAVGAGGFKPIF

SEQ ID NO: 607254 - protein, 14 aa, Homo sapiens
  CDR3 for beta chain variable domain of TCR clone 303627 (TRBV6-1, TRBJ1-3)
CASVQGGGGNTIYF

SEQ ID NO: 607255 - protein, 15 aa, Homo sapiens
  CDR3 for alpha chain variable domain of TCR clone 303628 (TRAV34, TRAJ38)
CGADFTPGNNRKLIW

SEQ ID NO: 607256 - protein, 16 aa, Homo sapiens
  CDR3 for beta chain variable domain of TCR clone 303628 (TRBV7-9, TRBJ2-1)
CASSRKNFSSPREQFF

SEQ ID NO: 607257 - protein, 11 aa, Homo sapiens
  CDR3 for alpha chain variable domain of TCR clone 303629 (TRAV1-2, TRAJ20)
CAVANDYELSF

SEQ ID NO: 607258 - protein, 13 aa, Homo sapiens
  CDR3 for beta chain variable domain of TCR clone 303629 (TRBV7-2, TRBJ2-2)
CASSLAVTGELFF

SEQ ID NO: 607259 - protein, 16 aa, Homo sapiens
  CDR3 for alpha chain variable domain of TCR clone 303630 (TRAV35, TRAJ28)
CAGQKYSGSGSYQLTF

SEQ ID NO: 607260 - protein, 16 aa, Homo sapiens
  CDR3 for beta chain variable domain of TCR clone 303630 (TRBV7-3, TRBJ2-2)
CASSLKRGTLSGELFF

SEQ ID NO: 607261 - protein, 15 aa, Homo sapiens
  CDR3 for alpha chain variable domain of TCR clone 303631 (TRAV3, TRAJ22)
CAVRDRGGSARQRTF

SEQ ID NO: 607262 - protein, 16 aa, Homo sapiens
  CDR3 for beta chain variable domain of TCR clone 303631 (TRBV5-4, TRBJ2-3)
CASQQPGAGGSDTQYF

SEQ ID NO: 607263 - protein, 14 aa, Homo sapiens
  CDR3 for alpha chain variable domain of TCR clone 303632 (TRAV38-1, TRAJ40)
CALRPTSGTYKCIF

SEQ ID NO: 607264 - protein, 15 aa, Homo sapiens
  CDR3 for beta chain variable domain of TCR clone 303632 (TRBV18, TRBJ2-1)
CASSPPSASYNEQFF

SEQ ID NO: 607265 - protein, 15 aa, Homo sapiens
  CDR3 for alpha chain variable domain of TCR clone 303633 (TRAV13-1, TRAJ44)
CAASRGGGTTSKLTF

SEQ ID NO: 607266 - protein, 12 aa, Homo sapiens
  CDR3 for beta chain variable domain of TCR clone 303633 (TRBV11-2, TRBJ2-2)
CASSLGGGELFF

SEQ ID NO: 607267 - protein, 16 aa, Homo sapiens
  CDR3 for alpha chain variable domain of TCR clone 303634 (TRAV1-2, TRAJ10)
CAVRGVLTGGGKKLTF

SEQ ID NO: 607268 - protein, 14 aa, Homo sapiens
  CDR3 for beta chain variable domain of TCR clone 303634 (TRBV6-1, TRBJ1-3)
CASVQGGGGNTIYF

SEQ ID NO: 607269 - protein, 11 aa, Homo sapiens
  CDR3 for alpha chain variable domain of TCR clone 303635 (TRAV12-2, TRAJ43)
CASPIGNDMRF

SEQ ID NO: 607270 - protein, 15 aa, Homo sapiens
  CDR3 for beta chain variable domain of TCR clone 303635 (TRBV29-1, TRBJ2-7)
CSVEFFDRGSYEQYF

SEQ ID NO: 607271 - protein, 14 aa, Homo sapiens
  CDR3 for alpha chain variable domain of TCR clone 303636 (TRAV16, TRAJ33)
CALSAMDSNYKLIW

SEQ ID NO: 607272 - protein, 14 aa, Homo sapiens
  CDR3 for beta chain variable domain of TCR clone 303636 (TRBV4-2, TRBJ2-1)
CASGLDRAYNEQFF

SEQ ID NO: 607273 - protein, 12 aa, Homo sapiens
  CDR3 for alpha chain variable domain of TCR clone 303637 (TRAV8-3, TRAJ26)
CAGDNYGQNFLF

SEQ ID NO: 607274 - protein, 13 aa, Homo sapiens
  CDR3 for beta chain variable domain of TCR clone 303637 (TRBV7-2, TRBJ2-7)
CASSSPSGSEQYF

SEQ ID NO: 607275 - protein, 12 aa, Homo sapiens
  CDR3 for alpha chain variable domain of TCR clone 303638 (TRAV21, TRAJ39)
CASDNAGNMLTF

SEQ ID NO: 607276 - protein, 13 aa, Homo sapiens
  CDR3 for beta chain variable domain of TCR clone 303638 (TRBV6-1, TRBJ1-1)
CASSRQGNTEAFF

SEQ ID NO: 607277 - protein, 10 aa, Homo sapiens
  CDR3 for alpha chain variable domain of TCR clone 303639 (TRAV9-2, TRAJ49)
CALTGNQFYF

SEQ ID NO: 607278 - protein, 14 aa, Homo sapiens
  CDR3 for beta chain variable domain of TCR clone 303639 (TRBV19, TRBJ2-1)
CASGKSTQYNEQFF

SEQ ID NO: 607279 - protein, 13 aa, Homo sapiens
  CDR3 for alpha chain variable domain of TCR clone 303640 (TRAV21, TRAJ58)
CAVKESSGSRLTF

SEQ ID NO: 607280 - protein, 17 aa, Homo sapiens
  CDR3 for beta chain variable domain of TCR clone 303640 (TRBV5-1, TRBJ2-3)
CASSLAGWGSVVDTQYL

SEQ ID NO: 607281 - protein, 16 aa, Homo sapiens
  CDR3 for alpha chain variable domain of TCR clone 303641 (TRAV35, TRAJ28)
CAGQRYSGAGSYQLTL

SEQ ID NO: 607282 - protein, 14 aa, Homo sapiens
  CDR3 for beta chain variable domain of TCR clone 303641 (TRBV18, TRBJ2-7)
CASSPRGGAYEQYF

SEQ ID NO: 607283 - protein, 12 aa, Homo sapiens
  CDR3 for alpha chain variable domain of TCR clone 303642 (TRAV8-6, TRAJ43)
CAVSHNNNDLRF

SEQ ID NO: 607284 - protein, 13 aa, Homo sapiens
  CDR3 for beta chain variable domain of TCR clone 303642 (TRBV7-3, TRBJ1-1)
CASSQDWGAEAFF

SEQ ID NO: 607285 - protein, 14 aa, Homo sapiens
  CDR3 for alpha chain variable domain of TCR clone 303643 (TRAV1-2, TRAJ16)
CAVNRFSDGQKLLF

SEQ ID NO: 607286 - protein, 16 aa, Homo sapiens
  CDR3 for beta chain variable domain of TCR clone 303643 (TRBV25-1, TRBJ1-3)
CQQCSRDILSGNTIYF

SEQ ID NO: 607287 - protein, 14 aa, Homo sapiens
  CDR3 for alpha chain variable domain of TCR clone 303644 (TRAV1-2, TRAJ16)
CAVNRFSDGQTLLF

SEQ ID NO: 607288 - protein, 14 aa, Homo sapiens
  CDR3 for beta chain variable domain of TCR clone 303644 (TRBV2, TRBJ2-1)
CASSDRAYYNEQFF

SEQ ID NO: 607289 - protein, 15 aa, Homo sapiens
  CDR3 for alpha chain variable domain of TCR clone 303645 (TRAV3, TRAJ18)
CCERRERLTLGRLYF

SEQ ID NO: 607290 - protein, 15 aa, Homo sapiens
  CDR3 for beta chain variable domain of TCR clone 303645 (TRBV7-9, TRBJ1-6)
CASSSPGRGNSPLHF

SEQ ID NO: 607291 - protein, 12 aa, Homo sapiens
  CDR3 for alpha chain variable domain of TCR clone 303646 (TRAV1-2, TRAJ29)
CAVPSGNTPLVS

SEQ ID NO: 607292 - protein, 14 aa, Homo sapiens
  CDR3 for beta chain variable domain of TCR clone 303646 (TRBV18, TRBJ2-5)
CASSPGVSQETQYF

SEQ ID NO: 607293 - protein, 12 aa, Homo sapiens
  CDR3 for alpha chain variable domain of TCR clone 303647 (TRAV12-2, TRAJ43)
CAVNVNNNDMRF

SEQ ID NO: 607294 - protein, 13 aa, Homo sapiens
  CDR3 for beta chain variable domain of TCR clone 303647 (TRBV2, TRBJ1-4)
CASSELGVEKLFF

SEQ ID NO: 607295 - protein, 19 aa, Homo sapiens
  CDR3 for alpha chain variable domain of TCR clone 303648 (TRAV23/DV6, TRAJ30)
LVTQPPTSVQQARDDKIIF

SEQ ID NO: 607296 - protein, 17 aa, Homo sapiens
  CDR3 for beta chain variable domain of TCR clone 303648 (TRBV10-3, TRBJ1-2)
CAISETRDRGLEYGYTF

SEQ ID NO: 607297 - protein, 13 aa, Homo sapiens
  CDR3 for alpha chain variable domain of TCR clone 303649 (TRAV12-3, TRAJ7)
CAMTPYGNNRLDF

SEQ ID NO: 607298 - protein, 16 aa, Homo sapiens
  CDR3 for beta chain variable domain of TCR clone 303649 (TRBV20-1, TRBJ1-4)
CSAPGQGLLTNEKLFF

SEQ ID NO: 607299 - protein, 14 aa, Homo sapiens
  CDR3 for alpha chain variable domain of TCR clone 303650 (TRAV1-2, TRAJ8)
CAVREATGFQKLVF

SEQ ID NO: 607300 - protein, 18 aa, Homo sapiens
  CDR3 for beta chain variable domain of TCR clone 303650 (TRBV6-6, TRBJ1-3)
CASSYSKWDSISGNTIYF

SEQ ID NO: 607301 - protein, 18 aa, Homo sapiens
  CDR3 for alpha chain variable domain of TCR clone 303651 (TRAV9-2, TRAJ52)
CALSRHNAGGTSYGKLTF

SEQ ID NO: 607302 - protein, 16 aa, Homo sapiens
  CDR3 for beta chain variable domain of TCR clone 303651 (TRBV19, TRBJ2-1)
CASSKAGPSSCNEQFF

SEQ ID NO: 607303 - protein, 13 aa, Homo sapiens
  CDR3 for alpha chain variable domain of TCR clone 303652 (TRAV8-3, TRAJ4)
WVFYSGGYNKLIF

SEQ ID NO: 607304 - protein, 16 aa, Homo sapiens
  CDR3 for beta chain variable domain of TCR clone 303652 (TRBV7-8, TRBJ2-3)
CASSTEGQRETDTRYF

SEQ ID NO: 607305 - protein, 12 aa, Homo sapiens
  CDR3 for alpha chain variable domain of TCR clone 303653 (TRAV13-1, TRAJ49)
CAASPMGNQFYF

SEQ ID NO: 607306 - protein, 13 aa, Homo sapiens
  CDR3 for beta chain variable domain of TCR clone 303653 (TRBV20-1, TRBJ2-2)
CSASAAGTGELFI

SEQ ID NO: 607307 - protein, 16 aa, Homo sapiens
  CDR3 for alpha chain variable domain of TCR clone 303654 (TRAV17, TRAJ52)
CATSNAGGTSYGKLTF

SEQ ID NO: 607308 - protein, 13 aa, Homo sapiens
  CDR3 for beta chain variable domain of TCR clone 303654 (TRBV27, TRBJ1-6)
CASSLVLVSPLHS

SEQ ID NO: 607309 - protein, 16 aa, Homo sapiens
  CDR3 for alpha chain variable domain of TCR clone 303655 (TRAV26-1, TRAJ37)
CIVRGDGSGNTGKLIF

SEQ ID NO: 607310 - protein, 19 aa, Homo sapiens
  CDR3 for beta chain variable domain of TCR clone 303655 (TRBV11-2, TRBJ2-2)
LRTRPCISVPAAYPGSCFF

SEQ ID NO: 607311 - protein, 16 aa, Homo sapiens
  CDR3 for alpha chain variable domain of TCR clone 303656 (TRAV3, TRAJ10)
CAVRDMRAGGGKKLTF

SEQ ID NO: 607312 - protein, 17 aa, Homo sapiens
  CDR3 for beta chain variable domain of TCR clone 303656 (TRBV20-1, TRBJ2-2)
CSASGSGQGGLTGELCF

SEQ ID NO: 607313 - protein, 14 aa, Homo sapiens
  CDR3 for alpha chain variable domain of TCR clone 303657 (TRAV12-2, TRAJ13)
CAVKKTGGYKKVTF

SEQ ID NO: 607314 - protein, 16 aa, Homo sapiens
  CDR3 for beta chain variable domain of TCR clone 303657 (TRBV11-2, TRBJ2-7)
CASSPLAGGPRYEQYF

SEQ ID NO: 607315 - protein, 13 aa, Homo sapiens
  CDR3 for alpha chain variable domain of TCR clone 303658 (TRAV13-2, TRAJ40)
CEEFTSGTYKYIF

SEQ ID NO: 607316 - protein, 14 aa, Homo sapiens
  CDR3 for beta chain variable domain of TCR clone 303658 (TRBV10-2, TRBJ1-5)
CASSSTGRKQPQHF

SEQ ID NO: 607317 - protein, 12 aa, Homo sapiens
  CDR3 for alpha chain variable domain of TCR clone 303659 (TRAV1-1, TRAJ8)
CAGGPGFQKLVF

SEQ ID NO: 607318 - protein, 16 aa, Homo sapiens
  CDR3 for beta chain variable domain of TCR clone 303659 (TRBV12-5, TRBJ2-5)
CASGPRTSGNQETQYF

SEQ ID NO: 607319 - protein, 13 aa, Homo sapiens
  CDR3 for alpha chain variable domain of TCR clone 303660 (TRAV12-2, TRAJ7)
CAMTPYGNNRLAF

SEQ ID NO: 607320 - protein, 16 aa, Homo sapiens
  CDR3 for beta chain variable domain of TCR clone 303660 (TRBV20-1, TRBJ1-4)
CSASPYGGELNEKLFF

SEQ ID NO: 607321 - protein, 13 aa, Homo sapiens
  CDR3 for alpha chain variable domain of TCR clone 303661 (TRAV26-1, TRAJ34)
CIVRPWITDKLIF

SEQ ID NO: 607322 - protein, 14 aa, Homo sapiens
  CDR3 for beta chain variable domain of TCR clone 303661 (TRBV12-4, TRBJ1-4)
FASSRQGANEKLFF

SEQ ID NO: 607323 - protein, 13 aa, Homo sapiens
  CDR3 for alpha chain variable domain of TCR clone 303662 (TRAV2, TRAJ37)
CAVSSGNTGKLLF

SEQ ID NO: 607324 - protein, 17 aa, Homo sapiens
  CDR3 for beta chain variable domain of TCR clone 303662 (TRBV5-1, TRBJ2-5)
CASSLLGLAANQETQYF

SEQ ID NO: 607325 - protein, 15 aa, Homo sapiens
  CDR3 for alpha chain variable domain of TCR clone 303663 (TRAV35, TRAJ58)
CAGRRQETSGSRLTF

SEQ ID NO: 607326 - protein, 11 aa, Homo sapiens
  CDR3 for beta chain variable domain of TCR clone 303663 (TRBV11-2, TRBJ1-1)
CTSSINTEAFF

SEQ ID NO: 607327 - protein, 18 aa, Homo sapiens
  CDR3 for alpha chain variable domain of TCR clone 303664 (TRAV9-2, TRAJ52)
CALSRHNAGGTSYGKLTF

SEQ ID NO: 607328 - protein, 14 aa, Homo sapiens
  CDR3 for beta chain variable domain of TCR clone 303664 (TRBV19, TRBJ2-3)
CASSAPRGTDTQYF

SEQ ID NO: 607329 - protein, 17 aa, Homo sapiens
  CDR3 for alpha chain variable domain of TCR clone 303665 (TRAV3, TRAJ6)
CAVGDGPRVGGSYIPTF

SEQ ID NO: 607330 - protein, 12 aa, Homo sapiens
  CDR3 for beta chain variable domain of TCR clone 303665 (TRBV11-2, TRBJ2-2)
CASSHGGGELFF

SEQ ID NO: 607331 - protein, 18 aa, Homo sapiens
  CDR3 for alpha chain variable domain of TCR clone 303666 (TRAV21, TRAJ52)
CAVRPSPAGGTIYGKLTF

SEQ ID NO: 607332 - protein, 16 aa, Homo sapiens
  CDR3 for beta chain variable domain of TCR clone 303666 (TRBV19, TRBJ2-1)
CASSKAGPSSYNEQFF

SEQ ID NO: 607333 - protein, 11 aa, Homo sapiens
  CDR3 for alpha chain variable domain of TCR clone 303667 (TRAV3, TRAJ21)
CAVGNFNKFYF

SEQ ID NO: 607334 - protein, 13 aa, Homo sapiens
  CDR3 for beta chain variable domain of TCR clone 303667 (TRBV18, TRBJ2-7)
CASSRSGSYEQYF

SEQ ID NO: 607335 - protein, 18 aa, Homo sapiens
  CDR3 for alpha chain variable domain of TCR clone 303668 (TRAV8-4, TRAJ52)
LAVTRANAGGTSYGKLTF

SEQ ID NO: 607336 - protein, 12 aa, Homo sapiens
  CDR3 for beta chain variable domain of TCR clone 303668 (TRBV12-4, TRBJ2-7)
CASSLGGYEQYF

SEQ ID NO: 607337 - protein, 14 aa, Homo sapiens
  CDR3 for alpha chain variable domain of TCR clone 303669 (TRAV2, TRAJ9)
CAVEDRSGGFKTIF

SEQ ID NO: 607338 - protein, 12 aa, Homo sapiens
  CDR3 for beta chain variable domain of TCR clone 303669 (TRBV7-3, TRBJ2-1)
CASSFQSGPQFF

SEQ ID NO: 607339 - protein, 14 aa, Homo sapiens
  CDR3 for alpha chain variable domain of TCR clone 303670 (TRAV13-1, TRAJ44)
CAAKATVTASKLTF

SEQ ID NO: 607340 - protein, 16 aa, Homo sapiens
  CDR3 for beta chain variable domain of TCR clone 303670 (TRBV15, TRBJ1-2)
CATSRGPRTGGGGYTF

SEQ ID NO: 607341 - protein, 14 aa, Homo sapiens
  CDR3 for alpha chain variable domain of TCR clone 303671 (TRAV20, TRAJ42)
CAVQAGGSQGNLIF

SEQ ID NO: 607342 - protein, 11 aa, Homo sapiens
  CDR3 for beta chain variable domain of TCR clone 303671 (TRBV19, TRBJ1-1)
CASSIGSEAFF

SEQ ID NO: 607343 - protein, 14 aa, Homo sapiens
  CDR3 for alpha chain variable domain of TCR clone 303672 (TRAV12-1, TRAJ23)
CVVIVYNQGGKLIF

SEQ ID NO: 607344 - protein, 17 aa, Homo sapiens
  CDR3 for beta chain variable domain of TCR clone 303672 (TRBV11-2, TRBJ2-5)
CASSFSSQETSTSGQAR

SEQ ID NO: 607345 - protein, 12 aa, Homo sapiens
  CDR3 for alpha chain variable domain of TCR clone 303673 (TRAV13-2, TRAJ23)
CAERHRGGKLIF

SEQ ID NO: 607346 - protein, 16 aa, Homo sapiens
  CDR3 for beta chain variable domain of TCR clone 303673 (TRBV4-2, TRBJ2-1)
CASSQETATPYNEQFF

SEQ ID NO: 607347 - protein, 18 aa, Homo sapiens
  CDR3 for alpha chain variable domain of TCR clone 303674 (TRAV26-1, TRAJ52)
CIVRVEGAGGTSYGKLTF

SEQ ID NO: 607348 - protein, 14 aa, Homo sapiens
  CDR3 for beta chain variable domain of TCR clone 303674 (TRBV20-1, TRBJ1-1)
CSAQTRIGGTEAFF

SEQ ID NO: 607349 - protein, 21 aa, Homo sapiens
  CDR3 for alpha chain variable domain of TCR clone 303675 (TRAV16, TRAJ22)
HLKKPFAQEEDSARYLRHLTF

SEQ ID NO: 607350 - protein, 15 aa, Homo sapiens
  CDR3 for beta chain variable domain of TCR clone 303675 (TRBV7-9, TRBJ1-6)
CASSSPGRGNSPLHF

SEQ ID NO: 607351 - protein, 10 aa, Homo sapiens
  CDR3 for alpha chain variable domain of TCR clone 303676 (TRAV23/DV6, TRAJ57)
RAASSTLSQG

SEQ ID NO: 607352 - protein, 14 aa, Homo sapiens
  CDR3 for beta chain variable domain of TCR clone 303676 (TRBV25-1, TRBJ1-1)
CASTHLGGNTEAFF

SEQ ID NO: 607353 - protein, 12 aa, Homo sapiens
  CDR3 for alpha chain variable domain of TCR clone 303677 (TRAV12-1, TRAJ40)
CEVPSGTYKYIF

SEQ ID NO: 607354 - protein, 15 aa, Homo sapiens
  CDR3 for beta chain variable domain of TCR clone 303677 (TRBV12-4, TRBJ2-1)
CASSPLSGRNNEQFF

SEQ ID NO: 607355 - protein, 19 aa, Homo sapiens
  CDR3 for alpha chain variable domain of TCR clone 303678 (TRAV13-1, TRAJ52)
CAASPYQSAGGTSYGKLTF

SEQ ID NO: 607356 - protein, 13 aa, Homo sapiens
  CDR3 for beta chain variable domain of TCR clone 303678 (TRBV15, TRBJ2-7)
GATSTTGHYEQYF

SEQ ID NO: 607357 - protein, 15 aa, Homo sapiens
  CDR3 for alpha chain variable domain of TCR clone 303679 (TRAV4, TRAJ39)
CLVGPNNNAGNMLTF

SEQ ID NO: 607358 - protein, 13 aa, Homo sapiens
  CDR3 for beta chain variable domain of TCR clone 303679 (TRBV20-1, TRBJ1-1)
CSASKRGLTEAFF

SEQ ID NO: 607359 - protein, 13 aa, Homo sapiens
  CDR3 for alpha chain variable domain of TCR clone 303680 (TRAV36/DV7, TRAJ37)
CAVFSSNTGKLIF

SEQ ID NO: 607360 - protein, 16 aa, Homo sapiens
  CDR3 for beta chain variable domain of TCR clone 303680 (TRBV4-2, TRBJ2-1)
CASSQETATPYNEQFF

SEQ ID NO: 607361 - protein, 14 aa, Homo sapiens
  CDR3 for alpha chain variable domain of TCR clone 303681 (TRAV1-1, TRAJ23)
CAVSIYNQGGKLIF

SEQ ID NO: 607362 - protein, 15 aa, Homo sapiens
  CDR3 for beta chain variable domain of TCR clone 303681 (TRBV9, TRBJ1-6)
CASSVAGTGDSPLLF

SEQ ID NO: 607363 - protein, 13 aa, Homo sapiens
  CDR3 for alpha chain variable domain of TCR clone 303682 (TRAV13-1, TRAJ9)
CAASGTGGFKAIF

SEQ ID NO: 607364 - protein, 13 aa, Homo sapiens
  CDR3 for beta chain variable domain of TCR clone 303682 (TRBV12-4, TRBJ2-7)
CASSLERVREQYF

SEQ ID NO: 607365 - protein, 12 aa, Homo sapiens
  CDR3 for alpha chain variable domain of TCR clone 303683 (TRAV12-2, TRAJ45)
CAVTGGADGLTF

SEQ ID NO: 607366 - protein, 12 aa, Homo sapiens
  CDR3 for beta chain variable domain of TCR clone 303683 (TRBV11-2, TRBJ2-2)
CASSLGGGELFF

SEQ ID NO: 607367 - protein, 14 aa, Homo sapiens
  CDR3 for alpha chain variable domain of TCR clone 303684 (TRAV13-1, TRAJ35)
CAASKGGFGNGLHC

SEQ ID NO: 607368 - protein, 13 aa, Homo sapiens
  CDR3 for beta chain variable domain of TCR clone 303684 (TRBV7-3, TRBJ1-1)
CACSQDWGAEAFF

SEQ ID NO: 607369 - protein, 14 aa, Homo sapiens
  CDR3 for alpha chain variable domain of TCR clone 303685 (TRAV29/DV5, TRAJ45)
CAASFRGGADRLTF

SEQ ID NO: 607370 - protein, 11 aa, Homo sapiens
  CDR3 for beta chain variable domain of TCR clone 303685 (TRBV11-2, TRBJ2-2)
CASSLPGELFF

SEQ ID NO: 607371 - protein, 16 aa, Homo sapiens
  CDR3 for alpha chain variable domain of TCR clone 303686 (TRAV30, TRAJ24)
CGSEIVDADSWWKFQF

SEQ ID NO: 607372 - protein, 14 aa, Homo sapiens
  CDR3 for beta chain variable domain of TCR clone 303686 (TRBV12-5, TRBJ2-5)
CASGSRTHQETQYF

SEQ ID NO: 607373 - protein, 12 aa, Homo sapiens
  CDR3 for alpha chain variable domain of TCR clone 303687 (TRAV20, TRAJ39)
CAVGNAGNMLTF

SEQ ID NO: 607374 - protein, 16 aa, Homo sapiens
  CDR3 for beta chain variable domain of TCR clone 303687 (TRBV15, TRBJ1-2)
CATSRGPGTGGGGYTF

SEQ ID NO: 607375 - protein, 16 aa, Homo sapiens
  CDR3 for alpha chain variable domain of TCR clone 303688 (TRAV21, TRAJ37)
CAFRTAGSSNTGKLIF

SEQ ID NO: 607376 - protein, 13 aa, Homo sapiens
  CDR3 for beta chain variable domain of TCR clone 303688 (TRBV7-9, TRBJ2-5)
RASLPSGRETQYF

SEQ ID NO: 607377 - protein, 12 aa, Homo sapiens
  CDR3 for alpha chain variable domain of TCR clone 303689 (TRAV2, TRAJ36)
CAELTGANNLFF

SEQ ID NO: 607378 - protein, 13 aa, Homo sapiens
  CDR3 for beta chain variable domain of TCR clone 303689 (TRBV18, TRBJ2-7)
CQLTERGAYEQYF

SEQ ID NO: 607379 - protein, 13 aa, Homo sapiens
  CDR3 for alpha chain variable domain of TCR clone 303690 (TRAV8-3, TRAJ43)
CAVVPYNNNDMRF

SEQ ID NO: 607380 - protein, 16 aa, Homo sapiens
  CDR3 for beta chain variable domain of TCR clone 303690 (TRBV7-2, TRBJ2-5)
CASSTFPTGGEETQYF

SEQ ID NO: 607381 - protein, 17 aa, Homo sapiens
  CDR3 for alpha chain variable domain of TCR clone 303691 (TRAV27, TRAJ42)
CAERVIYYGGSQGNLIF

SEQ ID NO: 607382 - protein, 15 aa, Homo sapiens
  CDR3 for beta chain variable domain of TCR clone 303691 (TRBV7-3, TRBJ2-2)
CASSETGQGTGELFF

SEQ ID NO: 607383 - protein, 14 aa, Homo sapiens
  CDR3 for alpha chain variable domain of TCR clone 303692 (TRAV12-1, TRAJ17)
CVVNYKAAGNKLTF

SEQ ID NO: 607384 - protein, 13 aa, Homo sapiens
  CDR3 for beta chain variable domain of TCR clone 303692 (TRBV5-5, TRBJ1-2)
CASSSWRGEDYTF

SEQ ID NO: 607385 - protein, 18 aa, Homo sapiens
  CDR3 for alpha chain variable domain of TCR clone 303693 (TRAV21, TRAJ52)
CAVRPCPAGGTSYGKLTF

SEQ ID NO: 607386 - protein, 17 aa, Homo sapiens
  CDR3 for beta chain variable domain of TCR clone 303693 (TRBV25-1, TRBJ2-1)
CASSAYGQGRGVYEQFF

SEQ ID NO: 607387 - protein, 16 aa, Homo sapiens
  CDR3 for alpha chain variable domain of TCR clone 303694 (TRAV30, TRAJ24)
CGTEIVDADSWGKFQF

SEQ ID NO: 607388 - protein, 16 aa, Homo sapiens
  CDR3 for beta chain variable domain of TCR clone 303694 (TRBV15, TRBJ2-3)
CATSRSRQGGTDTQYF

SEQ ID NO: 607389 - protein, 12 aa, Homo sapiens
  CDR3 for alpha chain variable domain of TCR clone 303695 (TRAV12-3, TRAJ17)
CAMTLTGNKLTF

SEQ ID NO: 607390 - protein, 12 aa, Homo sapiens
  CDR3 for beta chain variable domain of TCR clone 303695 (TRBV11-2, TRBJ2-1)
CASSPGNNEQFF

SEQ ID NO: 607391 - protein, 13 aa, Homo sapiens
  CDR3 for alpha chain variable domain of TCR clone 303696 (TRAV12-1, TRAJ17)
CGEPQSCRQKLTF

SEQ ID NO: 607392 - protein, 16 aa, Homo sapiens
  CDR3 for beta chain variable domain of TCR clone 303696 (TRBV20-1, TRBJ2-1)
CSASASGYSSYNEQFF

SEQ ID NO: 607393 - protein, 11 aa, Homo sapiens
  CDR3 for alpha chain variable domain of TCR clone 303697 (TRAV8-6, TRAJ23)
CAVISGGKLNF

SEQ ID NO: 607394 - protein, 14 aa, Homo sapiens
  CDR3 for beta chain variable domain of TCR clone 303697 (TRBV12-5, TRBJ2-5)
CASGSRTHQETQYF

SEQ ID NO: 607395 - protein, 12 aa, Homo sapiens
  CDR3 for alpha chain variable domain of TCR clone 303698 (TRAV36/DV7, TRAJ54)
CAVVRGAQRLVF

SEQ ID NO: 607396 - protein, 13 aa, Homo sapiens
  CDR3 for beta chain variable domain of TCR clone 303698 (TRBV7-3, TRBJ1-1)
CQQLKGGNTEAFF

SEQ ID NO: 607397 - protein, 16 aa, Homo sapiens
  CDR3 for alpha chain variable domain of TCR clone 303699 (TRAV13-1, TRAJ48)
CAASIFGNFGNEKLTF

SEQ ID NO: 607398 - protein, 16 aa, Homo sapiens
  CDR3 for beta chain variable domain of TCR clone 303699 (TRBV18, TRBJ1-5)
CASSPYRVEGNQPQHC

SEQ ID NO: 607399 - protein, 15 aa, Homo sapiens
  CDR3 for alpha chain variable domain of TCR clone 303700 (TRAV8-6, TRAJ10)
CAVSDQAGEGNKFTF

SEQ ID NO: 607400 - protein, 15 aa, Homo sapiens
  CDR3 for beta chain variable domain of TCR clone 303700 (TRBV3-1, TRBJ2-5)
CASSANLGGPETQYF

SEQ ID NO: 607401 - protein, 15 aa, Homo sapiens
  CDR3 for alpha chain variable domain of TCR clone 303701 (TRAV21, TRAJ24)
CAARSSTASWGKLQV

SEQ ID NO: 607402 - protein, 13 aa, Homo sapiens
  CDR3 for beta chain variable domain of TCR clone 303701 (TRBV11-2, TRBJ2-5)
CASSSTGEETQYF

SEQ ID NO: 607403 - protein, 15 aa, Homo sapiens
  CDR3 for alpha chain variable domain of TCR clone 303702 (TRAV12-3, TRAJ6)
CAMSATSGGSYISTF

SEQ ID NO: 607404 - protein, 11 aa, Homo sapiens
  CDR3 for beta chain variable domain of TCR clone 303702 (TRBV20-1, TRBJ1-5)
CSAQGDQPQHF

SEQ ID NO: 607405 - protein, 13 aa, Homo sapiens
  CDR3 for alpha chain variable domain of TCR clone 303703 (TRAV21, TRAJ27)
CAARPGNSGKSTF

SEQ ID NO: 607406 - protein, 14 aa, Homo sapiens
  CDR3 for beta chain variable domain of TCR clone 303703 (TRBV7-6, TRBJ2-1)
CASSLGGGQMSSSS

SEQ ID NO: 607407 - protein, 15 aa, Homo sapiens
  CDR3 for alpha chain variable domain of TCR clone 303704 (TRAV8-3, TRAJ44)
CAVGLLNSGYSTLTF

SEQ ID NO: 607408 - protein, 16 aa, Homo sapiens
  CDR3 for beta chain variable domain of TCR clone 303704 (TRBV7-7, TRBJ2-1)
CASSLASGTSYNEQFF

SEQ ID NO: 607409 - protein, 18 aa, Homo sapiens
  CDR3 for alpha chain variable domain of TCR clone 303705 (TRAV12-2, )
CAVEDIQNPDPAVYQLRE

SEQ ID NO: 607410 - protein, 15 aa, Homo sapiens
  CDR3 for beta chain variable domain of TCR clone 303705 (TRBV9, TRBJ1-6)
CASSVAGTGDSPLHF

SEQ ID NO: 607411 - protein, 14 aa, Homo sapiens
  CDR3 for alpha chain variable domain of TCR clone 303706 (TRAV12-1, TRAJ9)
CVVTGDTGGFKTIF

SEQ ID NO: 607412 - protein, 13 aa, Homo sapiens
  CDR3 for beta chain variable domain of TCR clone 303706 (TRBV20-1, TRBJ1-1)
CSARAGGNTEAFF

SEQ ID NO: 607413 - protein, 14 aa, Homo sapiens
  CDR3 for alpha chain variable domain of TCR clone 303707 (TRAV21, TRAJ23)
CAVGIYNQGGKLIF

SEQ ID NO: 607414 - protein, 15 aa, Homo sapiens
  CDR3 for beta chain variable domain of TCR clone 303707 (TRBV12-4, TRBJ2-5)
CASSGTGQAQETQYF

SEQ ID NO: 607415 - protein, 20 aa, Homo sapiens
  CDR3 for alpha chain variable domain of TCR clone 303708 (TRAV25, TRAJ21)
TATQTTDVGTYTLSFNKFYF

SEQ ID NO: 607416 - protein, 14 aa, Homo sapiens
  CDR3 for beta chain variable domain of TCR clone 303708 (TRBV6-1, TRBJ2-1)
CASAKDGFYNEQFF

SEQ ID NO: 607417 - protein, 16 aa, Homo sapiens
  CDR3 for alpha chain variable domain of TCR clone 303709 (TRAV8-3, TRAJ13)
YAVGAYPSGGYQKVTF

SEQ ID NO: 607418 - protein, 15 aa, Homo sapiens
  CDR3 for beta chain variable domain of TCR clone 303709 (TRBV19, TRBJ1-5)
CASSIVWADNQPQHF

SEQ ID NO: 607419 - protein, 14 aa, Homo sapiens
  CDR3 for alpha chain variable domain of TCR clone 303710 (TRAV12-2, TRAJ29)
CAGRRNSGNTPLVF

SEQ ID NO: 607420 - protein, 13 aa, Homo sapiens
  CDR3 for beta chain variable domain of TCR clone 303710 (TRBV12-4, TRBJ2-1)
CASSHYTDNEQFF

SEQ ID NO: 607421 - protein, 14 aa, Homo sapiens
  CDR3 for alpha chain variable domain of TCR clone 303711 (TRAV16, TRAJ15)
CALSFNQAGTALIF

SEQ ID NO: 607422 - protein, 17 aa, Homo sapiens
  CDR3 for beta chain variable domain of TCR clone 303711 (TRBV7-8, TRBJ2-6)
CASSAGTGGAGANVLTF

SEQ ID NO: 607423 - protein, 11 aa, Homo sapiens
  CDR3 for alpha chain variable domain of TCR clone 303712 (TRAV8-2, TRAJ45)
CTGGGADGLPF

SEQ ID NO: 607424 - protein, 16 aa, Homo sapiens
  CDR3 for beta chain variable domain of TCR clone 303712 (TRBV19, TRBJ2-2)
CASSLQRGGNTGELFF

SEQ ID NO: 607425 - protein, 15 aa, Homo sapiens
  CDR3 for alpha chain variable domain of TCR clone 303713 (TRAV17, TRAJ10)
CATVLLTGGGNKLTF

SEQ ID NO: 607426 - protein, 17 aa, Homo sapiens
  CDR3 for beta chain variable domain of TCR clone 303713 (TRBV11-2, TRBJ2-1)
CASSLYPPGVEYNEQVF

SEQ ID NO: 607427 - protein, 15 aa, Homo sapiens
  CDR3 for alpha chain variable domain of TCR clone 303714 (TRAV8-3, TRAJ15)
CAVGAANQAGTALIF

SEQ ID NO: 607428 - protein, 14 aa, Homo sapiens
  CDR3 for beta chain variable domain of TCR clone 303714 (TRBV20-1, TRBJ2-1)
CSPTDEASYNEQFF

SEQ ID NO: 607429 - protein, 16 aa, Homo sapiens
  CDR3 for alpha chain variable domain of TCR clone 303715 (TRAV2, TRAJ4)
CAVEDRFSGGYNKLIF

SEQ ID NO: 607430 - protein, 15 aa, Homo sapiens
  CDR3 for beta chain variable domain of TCR clone 303715 (TRBV29-1, TRBJ2-7)
CSVEFFDRGSYEQYF

SEQ ID NO: 607431 - protein, 15 aa, Homo sapiens
  CDR3 for alpha chain variable domain of TCR clone 303716 (TRAV25, TRAJ52)
CAGRPGGTSYGKLTF

SEQ ID NO: 607432 - protein, 13 aa, Homo sapiens
  CDR3 for beta chain variable domain of TCR clone 303716 (TRBV19, TRBJ1-4)
CAGPTQGNEKLFF

SEQ ID NO: 607433 - protein, 15 aa, Homo sapiens
  CDR3 for alpha chain variable domain of TCR clone 303717 (TRAV3, TRAJ5)
CAVRDLDTGRRALPF

SEQ ID NO: 607434 - protein, 13 aa, Homo sapiens
  CDR3 for beta chain variable domain of TCR clone 303717 (TRBV12-4, TRBJ2-7)
CASSPIETYEQYF

SEQ ID NO: 607435 - protein, 12 aa, Homo sapiens
  CDR3 for alpha chain variable domain of TCR clone 303718 (TRAV12-1, TRAJ31)
CVSWNNNARLMF

SEQ ID NO: 607436 - protein, 15 aa, Homo sapiens
  CDR3 for beta chain variable domain of TCR clone 303718 (TRBV7-2, TRBJ1-5)
CASSIDRGQDQPQHF

SEQ ID NO: 607437 - protein, 11 aa, Homo sapiens
  CDR3 for alpha chain variable domain of TCR clone 303719 (TRAV2, TRAJ13)
CASGGYQKVTF

SEQ ID NO: 607438 - protein, 13 aa, Homo sapiens
  CDR3 for beta chain variable domain of TCR clone 303719 (TRBV10-3, TRBJ2-3)
CAIRGDRADTQYF

SEQ ID NO: 607439 - protein, 12 aa, Homo sapiens
  CDR3 for alpha chain variable domain of TCR clone 303720 (TRAV1-2, TRAJ24)
CAVGGSWGKFQF

SEQ ID NO: 607440 - protein, 15 aa, Homo sapiens
  CDR3 for beta chain variable domain of TCR clone 303720 (TRBV6-1, TRBJ2-7)
CASSDGVGNPYEQYF

SEQ ID NO: 607441 - protein, 14 aa, Homo sapiens
  CDR3 for alpha chain variable domain of TCR clone 303721 (TRAV16, TRAJ15)
CALSFNQAGTALIF

SEQ ID NO: 607442 - protein, 16 aa, Homo sapiens
  CDR3 for beta chain variable domain of TCR clone 303721 (TRBV9, TRBJ2-7)
GASSAGPDRSPYEQYF

SEQ ID NO: 607443 - protein, 14 aa, Homo sapiens
  CDR3 for alpha chain variable domain of TCR clone 303722 (TRAV12-2, TRAJ8)
CTVKENTGFQKLVF

SEQ ID NO: 607444 - protein, 13 aa, Homo sapiens
  CDR3 for beta chain variable domain of TCR clone 303722 (TRBV18, TRBJ1-2)
CASSASATEGYTF

SEQ ID NO: 607445 - protein, 12 aa, Homo sapiens
  CDR3 for alpha chain variable domain of TCR clone 303723 (TRAV21, TRAJ13)
PGPSGGYQKVTF

SEQ ID NO: 607446 - protein, 14 aa, Homo sapiens
  CDR3 for beta chain variable domain of TCR clone 303723 (TRBV20-1, TRBJ2-7)
CGAKDRKGAYEQYF

SEQ ID NO: 607447 - protein, 14 aa, Homo sapiens
  CDR3 for alpha chain variable domain of TCR clone 303724 (TRAV1-2, TRAJ16)
CAVNRFSDGQKLLF

SEQ ID NO: 607448 - protein, 18 aa, Homo sapiens
  CDR3 for beta chain variable domain of TCR clone 303724 (TRBV29-1, TRBJ2-7)
SAALNSSTGGPTSSTSGR

SEQ ID NO: 607449 - protein, 17 aa, Homo sapiens
  CDR3 for alpha chain variable domain of TCR clone 303725 (TRAV3, TRAJ42)
CAVRDRDYGGSQGNLIF

SEQ ID NO: 607450 - protein, 17 aa, Homo sapiens
  CDR3 for beta chain variable domain of TCR clone 303725 (TRBV5-1, TRBJ2-2)
CASSLAGLSGGTGELFF

SEQ ID NO: 607451 - protein, 14 aa, Homo sapiens
  CDR3 for alpha chain variable domain of TCR clone 303726 (TRAV8-4, TRAJ13)
CAVSEGWGLPENYL

SEQ ID NO: 607452 - protein, 15 aa, Homo sapiens
  CDR3 for beta chain variable domain of TCR clone 303726 (TRBV12-4, TRBJ1-1)
CASSLAVSRGAEAFF

SEQ ID NO: 607453 - protein, 14 aa, Homo sapiens
  CDR3 for alpha chain variable domain of TCR clone 303727 (TRAV12-2, TRAJ45)
CAVNIGGGADGLTF

SEQ ID NO: 607454 - protein, 15 aa, Homo sapiens
  CDR3 for beta chain variable domain of TCR clone 303727 (TRBV2, TRBJ2-7)
CASSEGLARSYEQYF

SEQ ID NO: 607455 - protein, 17 aa, Homo sapiens
  CDR3 for alpha chain variable domain of TCR clone 303728 (TRAV3, TRAJ6)
CAVRDGPRAGGSYIPTF

SEQ ID NO: 607456 - protein, 13 aa, Homo sapiens
  CDR3 for beta chain variable domain of TCR clone 303728 (TRBV12-5, TRBJ2-3)
CASGDRQSDTRYF

SEQ ID NO: 607457 - protein, 13 aa, Homo sapiens
  CDR3 for alpha chain variable domain of TCR clone 303729 (TRAV8-6, TRAJ49)
CAVITNTGNQFYF

SEQ ID NO: 607458 - protein, 13 aa, Homo sapiens
  CDR3 for beta chain variable domain of TCR clone 303729 (TRBV7-3, TRBJ1-2)
CASSLKRGYSYTF

SEQ ID NO: 607459 - protein, 16 aa, Homo sapiens
  CDR3 for alpha chain variable domain of TCR clone 303730 (TRAV30, TRAJ24)
CGTEIVDADSWGKFQF

SEQ ID NO: 607460 - protein, 16 aa, Homo sapiens
  CDR3 for beta chain variable domain of TCR clone 303730 (TRBV7-3, TRBJ2-2)
RASSLKRGTLSGELFF

SEQ ID NO: 607461 - protein, 12 aa, Homo sapiens
  CDR3 for alpha chain variable domain of TCR clone 303731 (TRAV9-2, TRAJ40)
CSLTSGTYKYIF

SEQ ID NO: 607462 - protein, 16 aa, Homo sapiens
  CDR3 for beta chain variable domain of TCR clone 303731 (TRBV7-7, TRBJ2-2)
CASSPRTGLNTGELFF

SEQ ID NO: 607463 - protein, 15 aa, Homo sapiens
  CDR3 for alpha chain variable domain of TCR clone 303732 (TRAV25, TRAJ32)
CAGLHYGGATNKLIF

SEQ ID NO: 607464 - protein, 14 aa, Homo sapiens
  CDR3 for beta chain variable domain of TCR clone 303732 (TRBV27, TRBJ2-1)
CASRHLGGGKEQFF

SEQ ID NO: 607465 - protein, 11 aa, Homo sapiens
  CDR3 for alpha chain variable domain of TCR clone 303733 (TRAV26-1, TRAJ37)
CIVRVGRKLIF

SEQ ID NO: 607466 - protein, 13 aa, Homo sapiens
  CDR3 for beta chain variable domain of TCR clone 303733 (TRBV4-2, TRBJ1-1)
CASSQAGNTEAFF

SEQ ID NO: 607467 - protein, 15 aa, Homo sapiens
  CDR3 for alpha chain variable domain of TCR clone 303734 (TRAV25, TRAJ52)
CAGRPGGTSYGKLTF

SEQ ID NO: 607468 - protein, 14 aa, Homo sapiens
  CDR3 for beta chain variable domain of TCR clone 303734 (TRBV5-1, TRBJ2-1)
CASSALWAGNEQFF

SEQ ID NO: 607469 - protein, 13 aa, Homo sapiens
  CDR3 for alpha chain variable domain of TCR clone 303735 (TRAV21, TRAJ27)
CAARPGNACKSTF

SEQ ID NO: 607470 - protein, 14 aa, Homo sapiens
  CDR3 for beta chain variable domain of TCR clone 303735 (TRBV7-6, TRBJ2-3)
CASSLGTVTDAQYF

SEQ ID NO: 607471 - protein, 11 aa, Homo sapiens
  CDR3 for alpha chain variable domain of TCR clone 303736 (TRAV12-2, TRAJ31)
CAILNNARLMF

SEQ ID NO: 607472 - protein, 16 aa, Homo sapiens
  CDR3 for beta chain variable domain of TCR clone 303736 (TRBV13, TRBJ2-2)
CASSPGTGEHTGELFF

SEQ ID NO: 607473 - protein, 13 aa, Homo sapiens
  CDR3 for alpha chain variable domain of TCR clone 303737 (TRAV13-1, TRAJ13)
CAASKRGYQKVTF

SEQ ID NO: 607474 - protein, 16 aa, Homo sapiens
  CDR3 for beta chain variable domain of TCR clone 303737 (TRBV18, TRBJ1-2)
CASSPPERVTIYGYTF

SEQ ID NO: 607475 - protein, 13 aa, Homo sapiens
  CDR3 for alpha chain variable domain of TCR clone 303738 (TRAV12-3, TRAJ49)
CAMSRNTGSQVYF

SEQ ID NO: 607476 - protein, 16 aa, Homo sapiens
  CDR3 for beta chain variable domain of TCR clone 303738 (TRBV5-8, TRBJ2-2)
CASSLINPGGAGELFF

SEQ ID NO: 607477 - protein, 12 aa, Homo sapiens
  CDR3 for alpha chain variable domain of TCR clone 303739 (TRAV8-3, TRAJ20)
CAVDFKDYKLSF

SEQ ID NO: 607478 - protein, 17 aa, Homo sapiens
  CDR3 for beta chain variable domain of TCR clone 303739 (TRBV7-8, TRBJ2-6)
CASSAGTGGAGANVLTF

SEQ ID NO: 607479 - protein, 16 aa, Homo sapiens
  CDR3 for alpha chain variable domain of TCR clone 303740 (TRAV26-1, TRAJ32)
CIVRTNYGGATNKTIF

SEQ ID NO: 607480 - protein, 13 aa, Homo sapiens
  CDR3 for beta chain variable domain of TCR clone 303740 (TRBV7-9, TRBJ2-3)
CASSPGSTDTQYF

SEQ ID NO: 607481 - protein, 10 aa, Homo sapiens
  CDR3 for alpha chain variable domain of TCR clone 303741 (TRAV2, TRAJ34)
CAVVNDKLIF

SEQ ID NO: 607482 - protein, 14 aa, Homo sapiens
  CDR3 for beta chain variable domain of TCR clone 303741 (TRBV7-9, TRBJ2-2)
CASSFDRGTGELFF

SEQ ID NO: 607483 - protein, 13 aa, Homo sapiens
  CDR3 for alpha chain variable domain of TCR clone 303742 (TRAV26-2, TRAJ43)
CILRAVNNNDMRF

SEQ ID NO: 607484 - protein, 19 aa, Homo sapiens
  CDR3 for beta chain variable domain of TCR clone 303742 (TRBV7-2, TRBJ2-3)
CASSFLSRNWGGGTDTQYF

SEQ ID NO: 607485 - protein, 12 aa, Homo sapiens
  CDR3 for alpha chain variable domain of TCR clone 303743 (TRAV13-1, TRAJ30)
CAASYRDDKIIF

SEQ ID NO: 607486 - protein, 19 aa, Homo sapiens
  CDR3 for beta chain variable domain of TCR clone 303743 (TRBV7-2, TRBJ2-3)
CASSFLSRNWGGGTDTQYF

SEQ ID NO: 607487 - protein, 14 aa, Homo sapiens
  CDR3 for alpha chain variable domain of TCR clone 303744 (TRAV12-2, TRAJ17)
CAVLFKASGNKLTF

SEQ ID NO: 607488 - protein, 17 aa, Homo sapiens
  CDR3 for beta chain variable domain of TCR clone 303744 (TRBV20-1, TRBJ2-2)
CSASGSGQGGVTGELFF

SEQ ID NO: 607489 - protein, 12 aa, Homo sapiens
  CDR3 for alpha chain variable domain of TCR clone 303745 (TRAV12-3, TRAJ17)
CAMTLTGNKLTF

SEQ ID NO: 607490 - protein, 14 aa, Homo sapiens
  CDR3 for beta chain variable domain of TCR clone 303745 (TRBV20-1, TRBJ1-3)
CSASPTGAGYTIYF

SEQ ID NO: 607491 - protein, 12 aa, Homo sapiens
  CDR3 for alpha chain variable domain of TCR clone 303746 (TRAV21, TRAJ13)
PGPSGGYQKVTF

SEQ ID NO: 607492 - protein, 16 aa, Homo sapiens
  CDR3 for beta chain variable domain of TCR clone 303746 (TRBV28, TRBJ2-7)
CASSSGTSGRGYEQYF

SEQ ID NO: 607493 - protein, 14 aa, Homo sapiens
  CDR3 for alpha chain variable domain of TCR clone 303747 (TRAV12-1, TRAJ26)
FVVKGSNYGQNFVF

SEQ ID NO: 607494 - protein, 17 aa, Homo sapiens
  CDR3 for beta chain variable domain of TCR clone 303747 (TRBV11-2, TRBJ2-6)
CASSQRDIFSGANDLTF

SEQ ID NO: 607495 - protein, 14 aa, Homo sapiens
  CDR3 for alpha chain variable domain of TCR clone 303748 (TRAV1-2, TRAJ8)
CAVREDTGFQKLVF

SEQ ID NO: 607496 - protein, 14 aa, Homo sapiens
  CDR3 for beta chain variable domain of TCR clone 303748 (TRBV5-1, TRBJ1-5)
CASSLGQGAQPQHF

SEQ ID NO: 607497 - protein, 11 aa, Homo sapiens
  CDR3 for alpha chain variable domain of TCR clone 303749 (TRAV21, TRAJ27)
CAVRMQANQPL

SEQ ID NO: 607498 - protein, 15 aa, Homo sapiens
  CDR3 for beta chain variable domain of TCR clone 303749 (TRBV19, TRBJ2-3)
CASSSDKVRTDTQYF

SEQ ID NO: 607499 - protein, 12 aa, Homo sapiens
  CDR3 for alpha chain variable domain of TCR clone 303750 (TRAV12-1, TRAJ40)
CVVYSGTYKYIF

SEQ ID NO: 607500 - protein, 16 aa, Homo sapiens
  CDR3 for beta chain variable domain of TCR clone 303750 (TRBV5-1, TRBJ2-3)
CASSWGLAVYTDTQYF

SEQ ID NO: 607501 - protein, 11 aa, Homo sapiens
  CDR3 for alpha chain variable domain of TCR clone 303751 (TRAV2, TRAJ13)
CASGGYQKVTF

SEQ ID NO: 607502 - protein, 16 aa, Homo sapiens
  CDR3 for beta chain variable domain of TCR clone 303751 (TRBV7-6, TRBJ2-1)
YASSAPGPSSYNEQFF

SEQ ID NO: 607503 - protein, 12 aa, Homo sapiens
  CDR3 for alpha chain variable domain of TCR clone 303752 (TRAV12-3, TRAJ5)
CAMDTGRRELTF

SEQ ID NO: 607504 - protein, 13 aa, Homo sapiens
  CDR3 for beta chain variable domain of TCR clone 303752 (TRBV7-7, TRBJ2-2)
CASSLTSAGELSF

SEQ ID NO: 607505 - protein, 10 aa, Homo sapiens
  CDR3 for alpha chain variable domain of TCR clone 303753 (TRAV12-1, TRAJ43)
CVVHNNDMRF

SEQ ID NO: 607506 - protein, 16 aa, Homo sapiens
  CDR3 for beta chain variable domain of TCR clone 303753 (TRBV15, TRBJ2-3)
CATSRDLGIVTDTQYF

SEQ ID NO: 607507 - protein, 16 aa, Homo sapiens
  CDR3 for alpha chain variable domain of TCR clone 303754 (TRAV30, TRAJ24)
CGTEIVDADSWGKFQF

SEQ ID NO: 607508 - protein, 17 aa, Homo sapiens
  CDR3 for beta chain variable domain of TCR clone 303754 (TRBV20-1, TRBJ2-1)
CSARDRRRASPYNEQFF

SEQ ID NO: 607509 - protein, 13 aa, Homo sapiens
  CDR3 for alpha chain variable domain of TCR clone 303755 (TRAV27, TRAJ45)
CRSSGGGADGLTF

SEQ ID NO: 607510 - protein, 13 aa, Homo sapiens
  CDR3 for beta chain variable domain of TCR clone 303755 (TRBV2, TRBJ1-1)
CARNPTGGFHAFF

SEQ ID NO: 607511 - protein, 13 aa, Homo sapiens
  CDR3 for alpha chain variable domain of TCR clone 303756 (TRAV8-3, TRAJ21)
CAVGASNFNKFYF

SEQ ID NO: 607512 - protein, 16 aa, Homo sapiens
  CDR3 for beta chain variable domain of TCR clone 303756 (TRBV19, TRBJ2-1)
CASSMGGGSSYNEQCF

SEQ ID NO: 607513 - protein, 19 aa, Homo sapiens
  CDR3 for alpha chain variable domain of TCR clone 303757 (TRAV26-1, TRAJ42)
CCVLFHRQSQGRKQGNLIF

SEQ ID NO: 607514 - protein, 14 aa, Homo sapiens
  CDR3 for beta chain variable domain of TCR clone 303757 (TRBV19, TRBJ2-2)
CATTGHANTGELFF

SEQ ID NO: 607515 - protein, 16 aa, Homo sapiens
  CDR3 for alpha chain variable domain of TCR clone 303758 (TRAV12-3, TRAJ10)
GAMKKGITGGGNKLTF

SEQ ID NO: 607516 - protein, 12 aa, Homo sapiens
  CDR3 for beta chain variable domain of TCR clone 303758 (TRBV20-1, TRBJ2-7)
CSAITPTKEQYF

SEQ ID NO: 607517 - protein, 15 aa, Homo sapiens
  CDR3 for alpha chain variable domain of TCR clone 303759 (TRAV17, TRAJ20)
CATDGGGSNDYKLSF

SEQ ID NO: 607518 - protein, 15 aa, Homo sapiens
  CDR3 for beta chain variable domain of TCR clone 303759 (TRBV20-1, TRBJ1-5)
CSATSDRGLGQPQHF

SEQ ID NO: 607519 - protein, 13 aa, Homo sapiens
  CDR3 for alpha chain variable domain of TCR clone 303760 (TRAV8-3, TRAJ28)
CAVGAVRSYQLTF

SEQ ID NO: 607520 - protein, 16 aa, Homo sapiens
  CDR3 for beta chain variable domain of TCR clone 303760 (TRBV4-1, TRBJ1-2)
CASSQDAGQVLYGYTF

SEQ ID NO: 607521 - protein, 15 aa, Homo sapiens
  CDR3 for alpha chain variable domain of TCR clone 303761 (TRAV8-4, TRAJ45)
CAVIWTGGGADGLTF

SEQ ID NO: 607522 - protein, 12 aa, Homo sapiens
  CDR3 for beta chain variable domain of TCR clone 303761 (TRBV29-1, TRBJ2-7)
CSVGPSGDEPYF

SEQ ID NO: 607523 - protein, 13 aa, Homo sapiens
  CDR3 for alpha chain variable domain of TCR clone 303762 (TRAV13-1, TRAJ5)
CAASDTGRRALTF

SEQ ID NO: 607524 - protein, 16 aa, Homo sapiens
  CDR3 for beta chain variable domain of TCR clone 303762 (TRBV28, TRBJ1-4)
CASSPPYRGRSEKLFF

SEQ ID NO: 607525 - protein, 13 aa, Homo sapiens
  CDR3 for alpha chain variable domain of TCR clone 303763 (TRAV13-1, TRAJ39)
CAASIWAGNMLTF

SEQ ID NO: 607526 - protein, 14 aa, Homo sapiens
  CDR3 for beta chain variable domain of TCR clone 303763 (TRBV7-2, TRBJ1-2)
CASSQTGSTYGYTF

SEQ ID NO: 607527 - protein, 12 aa, Homo sapiens
  CDR3 for alpha chain variable domain of TCR clone 303764 (TRAV21, TRAJ20)
CAVRGNHYKLSF

SEQ ID NO: 607528 - protein, 14 aa, Homo sapiens
  CDR3 for beta chain variable domain of TCR clone 303764 (TRBV7-8, TRBJ2-7)
CASRQTQGADEQYF

SEQ ID NO: 607529 - protein, 14 aa, Homo sapiens
  CDR3 for alpha chain variable domain of TCR clone 303765 (TRAV1-1, TRAJ27)
CAVIYNTNAGNSTF

SEQ ID NO: 607530 - protein, 14 aa, Homo sapiens
  CDR3 for beta chain variable domain of TCR clone 303765 (TRBV25-1, TRBJ1-1)
CASTHLGGNTEAFF

SEQ ID NO: 607531 - protein, 15 aa, Homo sapiens
  CDR3 for alpha chain variable domain of TCR clone 303766 (TRAV17, TRAJ52)
CATEAGGTSYGKLTF

SEQ ID NO: 607532 - protein, 14 aa, Homo sapiens
  CDR3 for beta chain variable domain of TCR clone 303766 (TRBV28, TRBJ1-5)
CANSLGVLVKPQHF

SEQ ID NO: 607533 - protein, 13 aa, Homo sapiens
  CDR3 for alpha chain variable domain of TCR clone 303767 (TRAV3, TRAJ20)
CAVRDTGDYKLSF

SEQ ID NO: 607534 - protein, 13 aa, Homo sapiens
  CDR3 for beta chain variable domain of TCR clone 303767 (TRBV7-3, TRBJ1-1)
CASSQDWGAEAFF

SEQ ID NO: 607535 - protein, 18 aa, Homo sapiens
  CDR3 for alpha chain variable domain of TCR clone 303768 (TRAV27, TRAJ34)
CAGGGLGDYNTTSSSLGL

SEQ ID NO: 607536 - protein, 15 aa, Homo sapiens
  CDR3 for beta chain variable domain of TCR clone 303768 (TRBV9, TRBJ1-4)
CASSVGGSTNEKLFF

SEQ ID NO: 607537 - protein, 16 aa, Homo sapiens
  CDR3 for alpha chain variable domain of TCR clone 303769 (TRAV8-3, TRAJ44)
CAVGTLMTGTASKLTF

SEQ ID NO: 607538 - protein, 13 aa, Homo sapiens
  CDR3 for beta chain variable domain of TCR clone 303769 (TRBV10-3, TRBJ2-7)
CASKLAVNYEQYF

SEQ ID NO: 607539 - protein, 12 aa, Homo sapiens
  CDR3 for alpha chain variable domain of TCR clone 303770 (TRAV13-1, TRAJ27)
CAAHTNAGKSTF

SEQ ID NO: 607540 - protein, 16 aa, Homo sapiens
  CDR3 for beta chain variable domain of TCR clone 303770 (TRBV7-7, TRBJ2-1)
CASSLASGTSYNEQFF

SEQ ID NO: 607541 - protein, 15 aa, Homo sapiens
  CDR3 for alpha chain variable domain of TCR clone 303771 (TRAV30, TRAJ32)
CGTEILGGATNKLIF

SEQ ID NO: 607542 - protein, 13 aa, Homo sapiens
  CDR3 for beta chain variable domain of TCR clone 303771 (TRBV6-3, TRBJ2-7)
CASSFSGGYEKYF

SEQ ID NO: 607543 - protein, 13 aa, Homo sapiens
  CDR3 for alpha chain variable domain of TCR clone 303772 (TRAV35, TRAJ44)
CAGLSGTASKLTF

SEQ ID NO: 607544 - protein, 15 aa, Homo sapiens
  CDR3 for beta chain variable domain of TCR clone 303772 (TRBV6-6, TRBJ2-5)
CASSPGGGLEETQYF

SEQ ID NO: 607545 - protein, 11 aa, Homo sapiens
  CDR3 for alpha chain variable domain of TCR clone 303773 (TRAV2, TRAJ33)
CAVESNYQLIW

SEQ ID NO: 607546 - protein, 12 aa, Homo sapiens
  CDR3 for beta chain variable domain of TCR clone 303773 (TRBV19, TRBJ1-5)
CASSIAQQPQHF

SEQ ID NO: 607547 - protein, 15 aa, Homo sapiens
  CDR3 for alpha chain variable domain of TCR clone 303774 (TRAV17, TRAJ22)
CATAPISGSARQLTF

SEQ ID NO: 607548 - protein, 13 aa, Homo sapiens
  CDR3 for beta chain variable domain of TCR clone 303774 (TRBV6-5, TRBJ1-2)
CTSSLDTYYGYTF

SEQ ID NO: 607549 - protein, 16 aa, Homo sapiens
  CDR3 for alpha chain variable domain of TCR clone 303775 (TRAV3, TRAJ6)
CAVRDGMGRRKLHTYI

SEQ ID NO: 607550 - protein, 14 aa, Homo sapiens
  CDR3 for beta chain variable domain of TCR clone 303775 (TRBV7-6, TRBJ2-3)
CASSLGTVTDTQYF

SEQ ID NO: 607551 - protein, 11 aa, Homo sapiens
  CDR3 for alpha chain variable domain of TCR clone 303776 (TRAV1-1, TRAJ21)
CAVFNDYKLSF

SEQ ID NO: 607552 - protein, 13 aa, Homo sapiens
  CDR3 for beta chain variable domain of TCR clone 303776 (TRBV7-9, TRBJ1-2)
CASSLKQNYGYTF

SEQ ID NO: 607553 - protein, 12 aa, Homo sapiens
  CDR3 for alpha chain variable domain of TCR clone 303777 (TRAV35, TRAJ43)
CAGAYNNNDMRF

SEQ ID NO: 607554 - protein, 14 aa, Homo sapiens
  CDR3 for beta chain variable domain of TCR clone 303777 (TRBV2, TRBJ2-2)
CGSSWQGATGELFF

SEQ ID NO: 607555 - protein, 13 aa, Homo sapiens
  CDR3 for alpha chain variable domain of TCR clone 303778 (TRAV13-1, TRAJ39)
CAASIVMQATFSP

SEQ ID NO: 607556 - protein, 14 aa, Homo sapiens
  CDR3 for beta chain variable domain of TCR clone 303778 (TRBV3-1, TRBJ1-1)
CASSQGGRGSEAFF

SEQ ID NO: 607557 - protein, 14 aa, Homo sapiens
  CDR3 for alpha chain variable domain of TCR clone 303779 (TRAV12-1, TRAJ17)
CVVNYKAAGNKLTF

SEQ ID NO: 607558 - protein, 17 aa, Homo sapiens
  CDR3 for beta chain variable domain of TCR clone 303779 (TRBV20-1, TRBJ2-1)
RSASSSGLAGSYNEQFF

SEQ ID NO: 607559 - protein, 15 aa, Homo sapiens
  CDR3 for alpha chain variable domain of TCR clone 303780 (TRAV25, TRAJ23)
CALAPNYNQGGKLIF

SEQ ID NO: 607560 - protein, 13 aa, Homo sapiens
  CDR3 for beta chain variable domain of TCR clone 303780 (TRBV11-3, TRBJ1-1)
CASSWDGNAEAFF

SEQ ID NO: 607561 - protein, 14 aa, Homo sapiens
  CDR3 for alpha chain variable domain of TCR clone 303781 (TRAV4, TRAJ6)
CLVGEAGGSYIPTF

SEQ ID NO: 607562 - protein, 15 aa, Homo sapiens
  CDR3 for beta chain variable domain of TCR clone 303781 (TRBV20-1, TRBJ2-7)
CSARDRVSGMDEQYF

SEQ ID NO: 607563 - protein, 14 aa, Homo sapiens
  CDR3 for alpha chain variable domain of TCR clone 303782 (TRAV38-1, TRAJ40)
CALRPTSGTYRYIF

SEQ ID NO: 607564 - protein, 14 aa, Homo sapiens
  CDR3 for beta chain variable domain of TCR clone 303782 (TRBV7-9, TRBJ1-4)
CAITEGEANEKLFF

SEQ ID NO: 607565 - protein, 16 aa, Homo sapiens
  CDR3 for alpha chain variable domain of TCR clone 303783 (TRAV30, TRAJ24)
CGAEIVEADSWGKFQF

SEQ ID NO: 607566 - protein, 13 aa, Homo sapiens
  CDR3 for beta chain variable domain of TCR clone 303783 (TRBV4-1, TRBJ2-2)
CASSQENTGELFF

SEQ ID NO: 607567 - protein, 15 aa, Homo sapiens
  CDR3 for alpha chain variable domain of TCR clone 303784 (TRAV8-3, TRAJ20)
CAVEAKGSNDYKLSF

SEQ ID NO: 607568 - protein, 15 aa, Homo sapiens
  CDR3 for beta chain variable domain of TCR clone 303784 (TRBV27, TRBJ2-1)
CASSNGGGSSNEQFF

SEQ ID NO: 607569 - protein, 15 aa, Homo sapiens
  CDR3 for alpha chain variable domain of TCR clone 303785 (TRAV25, TRAJ53)
CAASGGGGSNYKLTF

SEQ ID NO: 607570 - protein, 12 aa, Homo sapiens
  CDR3 for beta chain variable domain of TCR clone 303785 (TRBV7-8, TRBJ2-7)
CASSLGDREQYF

SEQ ID NO: 607571 - protein, 16 aa, Homo sapiens
  CDR3 for alpha chain variable domain of TCR clone 303786 (TRAV3, TRAJ21)
CAVRNIERGNFNKFYF

SEQ ID NO: 607572 - protein, 16 aa, Homo sapiens
  CDR3 for beta chain variable domain of TCR clone 303786 (TRBV12-4, TRBJ1-5)
CASSRPVGGSNQPQHF

SEQ ID NO: 607573 - protein, 16 aa, Homo sapiens
  CDR3 for alpha chain variable domain of TCR clone 303787 (TRAV22, TRAJ45)
CAVERGKRGGADGLSF

SEQ ID NO: 607574 - protein, 20 aa, Homo sapiens
  CDR3 for beta chain variable domain of TCR clone 303787 (TRBV7-8, TRBJ2-2)
CASSHLFPGPTIHITGELFF

SEQ ID NO: 607575 - protein, 11 aa, Homo sapiens
  CDR3 for alpha chain variable domain of TCR clone 303788 (TRAV35, TRAJ30)
CAPGGDDKIIF

SEQ ID NO: 607576 - protein, 13 aa, Homo sapiens
  CDR3 for beta chain variable domain of TCR clone 303788 (TRBV14, TRBJ2-7)
CASSQDRRYEQYF

SEQ ID NO: 607577 - protein, 23 aa, Homo sapiens
  CDR3 for alpha chain variable domain of TCR clone 303789 (TRAV13-2, TRAJ20)
QLLNLETQLSTFVQGYNDYKLSF

SEQ ID NO: 607578 - protein, 17 aa, Homo sapiens
  CDR3 for beta chain variable domain of TCR clone 303789 (TRBV11-2, TRBJ2-1)
CASSLYPPGVEYNEQFF

SEQ ID NO: 607579 - protein, 14 aa, Homo sapiens
  CDR3 for alpha chain variable domain of TCR clone 303790 (TRAV1-2, TRAJ16)
CAVNRFSDGQRLLF

SEQ ID NO: 607580 - protein, 15 aa, Homo sapiens
  CDR3 for beta chain variable domain of TCR clone 303790 (TRBV9, TRBJ1-6)
CASSVAGTGDSALHF

SEQ ID NO: 607581 - protein, 14 aa, Homo sapiens
  CDR3 for alpha chain variable domain of TCR clone 303791 (TRAV4, TRAJ20)
CLVGRRSNDYKLSF

SEQ ID NO: 607582 - protein, 15 aa, Homo sapiens
  CDR3 for beta chain variable domain of TCR clone 303791 (TRBV15, TRBJ1-5)
CATSRDPVSNQPQHF

SEQ ID NO: 607583 - protein, 15 aa, Homo sapiens
  CDR3 for alpha chain variable domain of TCR clone 303792 (TRAV3, TRAJ5)
CAVRDRKTGRRALTL

SEQ ID NO: 607584 - protein, 15 aa, Homo sapiens
  CDR3 for beta chain variable domain of TCR clone 303792 (TRBV7-8, TRBJ2-1)
CTSSLADSLYNEQFF

SEQ ID NO: 607585 - protein, 15 aa, Homo sapiens
  CDR3 for alpha chain variable domain of TCR clone 303793 (TRAV35, TRAJ40)
CAGQLCTSGTYKYIF

SEQ ID NO: 607586 - protein, 14 aa, Homo sapiens
  CDR3 for beta chain variable domain of TCR clone 303793 (TRBV5-1, TRBJ2-7)
CASSRGESVYEQYF

SEQ ID NO: 607587 - protein, 12 aa, Homo sapiens
  CDR3 for alpha chain variable domain of TCR clone 303794 (TRAV6, TRAJ27)
CSRIRGAGKSTF

SEQ ID NO: 607588 - protein, 13 aa, Homo sapiens
  CDR3 for beta chain variable domain of TCR clone 303794 (TRBV4-3, TRBJ1-1)
CACSQAGNTEAFF

SEQ ID NO: 607589 - protein, 17 aa, Homo sapiens
  CDR3 for alpha chain variable domain of TCR clone 303795 (TRAV3, TRAJ37)
CAVRDMRTPGNTGKLIF

SEQ ID NO: 607590 - protein, 14 aa, Homo sapiens
  CDR3 for beta chain variable domain of TCR clone 303795 (TRBV7-2, TRBJ2-7)
CASSPETSFYEQYF

SEQ ID NO: 607591 - protein, 15 aa, Homo sapiens
  CDR3 for alpha chain variable domain of TCR clone 303796 (TRAV20, TRAJ43)
CSVQAGKSSNNDMRF

SEQ ID NO: 607592 - protein, 13 aa, Homo sapiens
  CDR3 for beta chain variable domain of TCR clone 303796 (TRBV27, TRBJ1-1)
CASSLSIGAEAFF

SEQ ID NO: 607593 - protein, 16 aa, Homo sapiens
  CDR3 for alpha chain variable domain of TCR clone 303797 (TRAV30, TRAJ24)
CGTEIVDADSWGKLQF

SEQ ID NO: 607594 - protein, 14 aa, Homo sapiens
  CDR3 for beta chain variable domain of TCR clone 303797 (TRBV12-5, TRBJ2-5)
CAGGSRTHQETQYF

SEQ ID NO: 607595 - protein, 16 aa, Homo sapiens
  CDR3 for alpha chain variable domain of TCR clone 303798 (TRAV20, TRAJ10)
CAVLRGLTGGGNKLTF

SEQ ID NO: 607596 - protein, 13 aa, Homo sapiens
  CDR3 for beta chain variable domain of TCR clone 303798 (TRBV29-1, TRBJ2-1)
CSVEGGRVNEQFF

SEQ ID NO: 607597 - protein, 16 aa, Homo sapiens
  CDR3 for alpha chain variable domain of TCR clone 303799 (TRAV3, TRAJ10)
CAVRDMRTGGGNKLTF

SEQ ID NO: 607598 - protein, 15 aa, Homo sapiens
  CDR3 for beta chain variable domain of TCR clone 303799 (TRBV5-1, TRBJ2-1)
CASSPPRAPYNEQFF

SEQ ID NO: 607599 - protein, 12 aa, Homo sapiens
  CDR3 for alpha chain variable domain of TCR clone 303800 (TRAV17, TRAJ49)
CATVTTGNQFYF

SEQ ID NO: 607600 - protein, 18 aa, Homo sapiens
  CDR3 for beta chain variable domain of TCR clone 303800 (TRBV11-2, TRBJ2-6)
CASSLNPVLGTGANVLTF

SEQ ID NO: 607601 - protein, 14 aa, Homo sapiens
  CDR3 for alpha chain variable domain of TCR clone 303801 (TRAV12-2, TRAJ17)
CAVLFKAAGNKLTF

SEQ ID NO: 607602 - protein, 13 aa, Homo sapiens
  CDR3 for beta chain variable domain of TCR clone 303801 (TRBV14, TRBJ2-7)
CASSQDRRYEQYF

SEQ ID NO: 607603 - protein, 13 aa, Homo sapiens
  CDR3 for alpha chain variable domain of TCR clone 303802 (TRAV21, TRAJ27)
CAARPGNAGKSNF

SEQ ID NO: 607604 - protein, 14 aa, Homo sapiens
  CDR3 for beta chain variable domain of TCR clone 303802 (TRBV7-6, TRBJ2-3)
CASSLGTVTDTQYF

SEQ ID NO: 607605 - protein, 15 aa, Homo sapiens
  CDR3 for alpha chain variable domain of TCR clone 303803 (TRAV2, TRAJ9)
CAVAALNTGGFKTIF

SEQ ID NO: 607606 - protein, 13 aa, Homo sapiens
  CDR3 for beta chain variable domain of TCR clone 303803 (TRBV19, TRBJ2-2)
CASSIWSTGELFF

SEQ ID NO: 607607 - protein, 16 aa, Homo sapiens
  CDR3 for alpha chain variable domain of TCR clone 303804 (TRAV16, TRAJ42)
CARKMNYGGSQGNLIL

SEQ ID NO: 607608 - protein, 15 aa, Homo sapiens
  CDR3 for beta chain variable domain of TCR clone 303804 (TRBV20-1, TRBJ2-7)
CSAREGRDSLYEQYF

SEQ ID NO: 607609 - protein, 14 aa, Homo sapiens
  CDR3 for alpha chain variable domain of TCR clone 303805 (TRAV12-2, TRAJ9)
CAVNMEGGGFKTNI

SEQ ID NO: 607610 - protein, 14 aa, Homo sapiens
  CDR3 for beta chain variable domain of TCR clone 303805 (TRBV2, TRBJ2-5)
CASSEVLAQETQYF

SEQ ID NO: 607611 - protein, 14 aa, Homo sapiens
  CDR3 for alpha chain variable domain of TCR clone 303806 (TRAV8-6, TRAJ29)
YAVSRASGNTPLVF

SEQ ID NO: 607612 - protein, 13 aa, Homo sapiens
  CDR3 for beta chain variable domain of TCR clone 303806 (TRBV19, TRBJ1-5)
CASSEGSNQPQHF

SEQ ID NO: 607613 - protein, 15 aa, Homo sapiens
  CDR3 for alpha chain variable domain of TCR clone 303807 (TRAV17, TRAJ57)
CATGPSQGGSEKLVF

SEQ ID NO: 607614 - protein, 18 aa, Homo sapiens
  CDR3 for beta chain variable domain of TCR clone 303807 (TRBV7-9, TRBJ2-7)
CASSLTTSGSRTGYEQYF

SEQ ID NO: 607615 - protein, 15 aa, Homo sapiens
  CDR3 for alpha chain variable domain of TCR clone 303808 (TRAV4, TRAJ10)
CLVGDEEGGGNKLTV

SEQ ID NO: 607616 - protein, 17 aa, Homo sapiens
  CDR3 for beta chain variable domain of TCR clone 303808 (TRBV19, TRBJ2-6)
CASSTGQVFSGANVLTF

SEQ ID NO: 607617 - protein, 18 aa, Homo sapiens
  CDR3 for alpha chain variable domain of TCR clone 303809 (TRAV4, TRAJ17)
CCVLLPRGDMAAGNKLTF

SEQ ID NO: 607618 - protein, 13 aa, Homo sapiens
  CDR3 for beta chain variable domain of TCR clone 303809 (TRBV18, TRBJ2-7)
CASQSGGGYEQYF

SEQ ID NO: 607619 - protein, 12 aa, Homo sapiens
  CDR3 for alpha chain variable domain of TCR clone 303810 (TRAV12-3, TRAJ42)
CAPGGSQGNLIF

SEQ ID NO: 607620 - protein, 16 aa, Homo sapiens
  CDR3 for beta chain variable domain of TCR clone 303810 (TRBV10-3, TRBJ2-1)
CAISLTSGNSYNEQFF

SEQ ID NO: 607621 - protein, 14 aa, Homo sapiens
  CDR3 for alpha chain variable domain of TCR clone 303811 (TRAV8-4, TRAJ43)
RAVSDPRNNNDMRF

SEQ ID NO: 607622 - protein, 15 aa, Homo sapiens
  CDR3 for beta chain variable domain of TCR clone 303811 (TRBV4-2, TRBJ1-2)
CASSQRTGGRDGYAF

SEQ ID NO: 607623 - protein, 11 aa, Homo sapiens
  CDR3 for alpha chain variable domain of TCR clone 303812 (TRAV12-3, TRAJ43)
CAMSVSDDMRF

SEQ ID NO: 607624 - protein, 13 aa, Homo sapiens
  CDR3 for beta chain variable domain of TCR clone 303812 (TRBV19, TRBJ1-2)
CASSVPGQDGYTF

SEQ ID NO: 607625 - protein, 14 aa, Homo sapiens
  CDR3 for alpha chain variable domain of TCR clone 303813 (TRAV12-2, TRAJ13)
CDVKQTGGYQKVTF

SEQ ID NO: 607626 - protein, 15 aa, Homo sapiens
  CDR3 for beta chain variable domain of TCR clone 303813 (TRBV7-2, TRBJ2-1)
CASSSGLAGGDEQFF

SEQ ID NO: 607627 - protein, 14 aa, Homo sapiens
  CDR3 for alpha chain variable domain of TCR clone 303814 (TRAV35, TRAJ10)
CAGILTGGGNKLTF

SEQ ID NO: 607628 - protein, 15 aa, Homo sapiens
  CDR3 for beta chain variable domain of TCR clone 303814 (TRBV6-3, TRBJ2-7)
CASSSPGTVFYEQYF

SEQ ID NO: 607629 - protein, 14 aa, Homo sapiens
  CDR3 for alpha chain variable domain of TCR clone 303815 (TRAV25, TRAJ27)
CAGEHLTNAGKSTF

SEQ ID NO: 607630 - protein, 13 aa, Homo sapiens
  CDR3 for beta chain variable domain of TCR clone 303815 (TRBV7-9, TRBJ2-3)
CASSPGSTDTQYF

SEQ ID NO: 607631 - protein, 13 aa, Homo sapiens
  CDR3 for alpha chain variable domain of TCR clone 303816 (TRAV21, TRAJ57)
CAVTQGGSEKLVF

SEQ ID NO: 607632 - protein, 11 aa, Homo sapiens
  CDR3 for beta chain variable domain of TCR clone 303816 (TRBV11-2, TRBJ2-2)
CASSLPGELVF

SEQ ID NO: 607633 - protein, 13 aa, Homo sapiens
  CDR3 for alpha chain variable domain of TCR clone 303817 (TRAV35, TRAJ36)
CAGPPIGANNLFF

SEQ ID NO: 607634 - protein, 15 aa, Homo sapiens
  CDR3 for beta chain variable domain of TCR clone 303817 (TRBV28, TRBJ2-5)
CASSPPWSYQETQYF

SEQ ID NO: 607635 - protein, 14 aa, Homo sapiens
  CDR3 for alpha chain variable domain of TCR clone 303818 (TRAV12-1, TRAJ17)
CVVTFKAAGNKLTF

SEQ ID NO: 607636 - protein, 14 aa, Homo sapiens
  CDR3 for beta chain variable domain of TCR clone 303818 (TRBV12-4, TRBJ2-7)
CASSLTGRAYEQYF

SEQ ID NO: 607637 - protein, 12 aa, Homo sapiens
  CDR3 for alpha chain variable domain of TCR clone 303819 (TRAV21, TRAJ33)
CAVQASDYQLIW

SEQ ID NO: 607638 - protein, 14 aa, Homo sapiens
  CDR3 for beta chain variable domain of TCR clone 303819 (TRBV28, TRBJ2-1)
CASSPGEGGNEQFF

SEQ ID NO: 607639 - protein, 14 aa, Homo sapiens
  CDR3 for alpha chain variable domain of TCR clone 303820 (TRAV20, TRAJ32)
CCGRYGGATNKLIF

SEQ ID NO: 607640 - protein, 16 aa, Homo sapiens
  CDR3 for beta chain variable domain of TCR clone 303820 (TRBV19, TRBJ2-2)
CASRSLGTGATGELFF

SEQ ID NO: 607641 - protein, 13 aa, Homo sapiens
  CDR3 for alpha chain variable domain of TCR clone 303821 (TRAV1-2, TRAJ9)
CAALNTGGFKTIF

SEQ ID NO: 607642 - protein, 13 aa, Homo sapiens
  CDR3 for beta chain variable domain of TCR clone 303821 (TRBV19, TRBJ1-2)
CASSVPGQDGYTF

SEQ ID NO: 607643 - protein, 16 aa, Homo sapiens
  CDR3 for alpha chain variable domain of TCR clone 303822 (TRAV8-3, TRAJ10)
CAVGPILTGGGNKLTF

SEQ ID NO: 607644 - protein, 16 aa, Homo sapiens
  CDR3 for beta chain variable domain of TCR clone 303822 (TRBV24-1, TRBJ2-3)
CATSDPGTGATDTQYF

SEQ ID NO: 607645 - protein, 12 aa, Homo sapiens
  CDR3 for alpha chain variable domain of TCR clone 303823 (TRAV12-2, TRAJ31)
CAVNTPDARLRF

SEQ ID NO: 607646 - protein, 12 aa, Homo sapiens
  CDR3 for beta chain variable domain of TCR clone 303823 (TRBV12-4, TRBJ2-7)
CASSLGGYEQYF

SEQ ID NO: 607647 - protein, 11 aa, Homo sapiens
  CDR3 for alpha chain variable domain of TCR clone 303824 (TRAV12-2, TRAJ29)
CAVTLRSPLVF

SEQ ID NO: 607648 - protein, 15 aa, Homo sapiens
  CDR3 for beta chain variable domain of TCR clone 303824 (TRBV5-7, TRBJ1-5)
CASSYGKLWDQPQHF

SEQ ID NO: 607649 - protein, 13 aa, Homo sapiens
  CDR3 for alpha chain variable domain of TCR clone 303825 (TRAV21, TRAJ20)
CAVGLRVDYKLSC

SEQ ID NO: 607650 - protein, 11 aa, Homo sapiens
  CDR3 for beta chain variable domain of TCR clone 303825 (TRBV29-1, TRBJ2-5)
CSEDRTGTQYF

SEQ ID NO: 607651 - protein, 16 aa, Homo sapiens
  CDR3 for alpha chain variable domain of TCR clone 303826 (TRAV30, TRAJ24)
CGTENVDADSWGKFQF

SEQ ID NO: 607652 - protein, 14 aa, Homo sapiens
  CDR3 for beta chain variable domain of TCR clone 303826 (TRBV7-2, TRBJ1-2)
CASSQTGSTYGYTF

SEQ ID NO: 607653 - protein, 14 aa, Homo sapiens
  CDR3 for alpha chain variable domain of TCR clone 303827 (TRAV12-2, TRAJ17)
CAALFKAAGNKLTF

SEQ ID NO: 607654 - protein, 16 aa, Homo sapiens
  CDR3 for beta chain variable domain of TCR clone 303827 (TRBV20-1, TRBJ2-2)
CSASASGIPGAGELFS

SEQ ID NO: 607655 - protein, 13 aa, Homo sapiens
  CDR3 for alpha chain variable domain of TCR clone 303828 (TRAV2, TRAJ29)
CAVYSSGTTPLVF

SEQ ID NO: 607656 - protein, 14 aa, Homo sapiens
  CDR3 for beta chain variable domain of TCR clone 303828 (TRBV7-9, TRBJ1-1)
CASSLGGLKTEAFF

SEQ ID NO: 607657 - protein, 15 aa, Homo sapiens
  CDR3 for alpha chain variable domain of TCR clone 303829 (TRAV23/DV6, TRAJ18)
CAARYRGSTLGRLYF

SEQ ID NO: 607658 - protein, 13 aa, Homo sapiens
  CDR3 for beta chain variable domain of TCR clone 303829 (TRBV7-2, TRBJ2-7)
GASSSPSGSEQYF

SEQ ID NO: 607659 - protein, 16 aa, Homo sapiens
  CDR3 for alpha chain variable domain of TCR clone 303830 (TRAV12-3, TRAJ53)
CAMSPGSGGSNYKLKF

SEQ ID NO: 607660 - protein, 11 aa, Homo sapiens
  CDR3 for beta chain variable domain of TCR clone 303830 (TRBV29-1, TRBJ2-5)
CSEDRAGTQYF

SEQ ID NO: 607661 - protein, 13 aa, Homo sapiens
  CDR3 for alpha chain variable domain of TCR clone 303831 (TRAV12-2, TRAJ29)
CAVMLSGNTPLVF

SEQ ID NO: 607662 - protein, 15 aa, Homo sapiens
  CDR3 for beta chain variable domain of TCR clone 303831 (TRBV10-1, TRBJ2-3)
CASSATSGGFDTQYF

SEQ ID NO: 607663 - protein, 14 aa, Homo sapiens
  CDR3 for alpha chain variable domain of TCR clone 303832 (TRAV17, TRAJ45)
CATASGGGADGLNF

SEQ ID NO: 607664 - protein, 15 aa, Homo sapiens
  CDR3 for beta chain variable domain of TCR clone 303832 (TRBV11-2, TRBJ2-1)
CASSRNRGLMYEQFF

SEQ ID NO: 607665 - protein, 15 aa, Homo sapiens
  CDR3 for alpha chain variable domain of TCR clone 303833 (TRAV17, TRAJ53)
CATDDSGGSNYKLTF

SEQ ID NO: 607666 - protein, 13 aa, Homo sapiens
  CDR3 for beta chain variable domain of TCR clone 303833 (TRBV7-9, TRBJ1-2)
CASSLKQNYGYTF

SEQ ID NO: 607667 - protein, 14 aa, Homo sapiens
  CDR3 for alpha chain variable domain of TCR clone 303834 (TRAV1-2, TRAJ16)
CAVNRVSDGQKLLF

SEQ ID NO: 607668 - protein, 13 aa, Homo sapiens
  CDR3 for beta chain variable domain of TCR clone 303834 (TRBV12-4, TRBJ2-5)
CASSLGGSRTQYF

SEQ ID NO: 607669 - protein, 15 aa, Homo sapiens
  CDR3 for alpha chain variable domain of TCR clone 303835 (TRAV8-2, TRAJ15)
CVVTMGNQAGTALIF

SEQ ID NO: 607670 - protein, 14 aa, Homo sapiens
  CDR3 for beta chain variable domain of TCR clone 303835 (TRBV5-1, TRBJ2-3)
CASRVDGVSDTKYF

SEQ ID NO: 607671 - protein, 13 aa, Homo sapiens
  CDR3 for alpha chain variable domain of TCR clone 303836 (TRAV23/DV6, TRAJ47)
CAASSQYGNKLVF

SEQ ID NO: 607672 - protein, 16 aa, Homo sapiens
  CDR3 for beta chain variable domain of TCR clone 303836 (TRBV19, TRBJ2-5)
CASSIEVLAGAETQYF

SEQ ID NO: 607673 - protein, 14 aa, Homo sapiens
  CDR3 for alpha chain variable domain of TCR clone 303837 (TRAV8-3, TRAJ4)
CAVGAAGGYNKLIF

SEQ ID NO: 607674 - protein, 13 aa, Homo sapiens
  CDR3 for beta chain variable domain of TCR clone 303837 (TRBV7-3, TRBJ2-1)
CQQLSGGTNEQFF

SEQ ID NO: 607675 - protein, 16 aa, Homo sapiens
  CDR3 for alpha chain variable domain of TCR clone 303838 (TRAV30, TRAJ24)
CGTEIVDADSWGKFQV

SEQ ID NO: 607676 - protein, 13 aa, Homo sapiens
  CDR3 for beta chain variable domain of TCR clone 303838 (TRBV20-1, TRBJ1-1)
CSTRGGGNTEAFF

SEQ ID NO: 607677 - protein, 15 aa, Homo sapiens
  CDR3 for alpha chain variable domain of TCR clone 303839 (TRAV8-4, TRAJ29)
CAVSEDFRGNTPLVF

SEQ ID NO: 607678 - protein, 18 aa, Homo sapiens
  CDR3 for beta chain variable domain of TCR clone 303839 (TRBV20-1, TRBJ2-6)
CSARTLAGGPSGANVVTF

SEQ ID NO: 607679 - protein, 16 aa, Homo sapiens
  CDR3 for alpha chain variable domain of TCR clone 303840 (TRAV25, TRAJ53)
CAGPKGSGGSNYNLTF

SEQ ID NO: 607680 - protein, 17 aa, Homo sapiens
  CDR3 for beta chain variable domain of TCR clone 303840 (TRBV11-3, TRBJ2-6)
CASKWGQGLSGANVLTF

SEQ ID NO: 607681 - protein, 11 aa, Homo sapiens
  CDR3 for alpha chain variable domain of TCR clone 303841 (TRAV35, TRAJ57)
GPQGGSEKLVF

SEQ ID NO: 607682 - protein, 13 aa, Homo sapiens
  CDR3 for beta chain variable domain of TCR clone 303841 (TRBV18, TRBJ2-1)
CASSPPSSNEQFF

SEQ ID NO: 607683 - protein, 16 aa, Homo sapiens
  CDR3 for alpha chain variable domain of TCR clone 303842 (TRAV17, TRAJ52)
CATGIIGGTSYGKLTF

SEQ ID NO: 607684 - protein, 14 aa, Homo sapiens
  CDR3 for beta chain variable domain of TCR clone 303842 (TRBV19, TRBJ2-1)
CASPTFVVSGEQFF

SEQ ID NO: 607685 - protein, 13 aa, Homo sapiens
  CDR3 for alpha chain variable domain of TCR clone 303843 (TRAV13-1, TRAJ21)
CAASIYNFNKFYF

SEQ ID NO: 607686 - protein, 12 aa, Homo sapiens
  CDR3 for beta chain variable domain of TCR clone 303843 (TRBV11-2, TRBJ2-1)
CASSPGNNGQFF

SEQ ID NO: 607687 - protein, 14 aa, Homo sapiens
  CDR3 for alpha chain variable domain of TCR clone 303844 (TRAV8-2, TRAJ37)
CVVSDLGNTGKLIF

SEQ ID NO: 607688 - protein, 13 aa, Homo sapiens
  CDR3 for beta chain variable domain of TCR clone 303844 (TRBV7-2, TRBJ2-2)
CASSLAVTGELFF

SEQ ID NO: 607689 - protein, 14 aa, Homo sapiens
  CDR3 for alpha chain variable domain of TCR clone 303845 (TRAV13-2, TRAJ17)
CAENSKAAGNKLTF

SEQ ID NO: 607690 - protein, 20 aa, Homo sapiens
  CDR3 for beta chain variable domain of TCR clone 303845 (TRBV28, TRBJ2-1)
CASTPIGRSPRLAGGNEQFF

SEQ ID NO: 607691 - protein, 12 aa, Homo sapiens
  CDR3 for alpha chain variable domain of TCR clone 303846 (TRAV16, TRAJ26)
CALRSYGQNFVF

SEQ ID NO: 607692 - protein, 17 aa, Homo sapiens
  CDR3 for beta chain variable domain of TCR clone 303846 (TRBV13, TRBJ2-3)
CASSLSRVAGGRNTQYF

SEQ ID NO: 607693 - protein, 12 aa, Homo sapiens
  CDR3 for alpha chain variable domain of TCR clone 303847 (TRAV16, TRAJ10)
CSRTGGGNKLTF

SEQ ID NO: 607694 - protein, 15 aa, Homo sapiens
  CDR3 for beta chain variable domain of TCR clone 303847 (TRBV11-2, TRBJ1-3)
CASSAHSSSGNTMYF

SEQ ID NO: 607695 - protein, 13 aa, Homo sapiens
  CDR3 for alpha chain variable domain of TCR clone 303848 (TRAV8-6, TRAJ21)
SAVSPSSLNKFYF

SEQ ID NO: 607696 - protein, 14 aa, Homo sapiens
  CDR3 for beta chain variable domain of TCR clone 303848 (TRBV7-9, TRBJ2-5)
CASSLDTAQETQYF

SEQ ID NO: 607697 - protein, 18 aa, Homo sapiens
  CDR3 for alpha chain variable domain of TCR clone 303849 (TRAV1-2, TRAJ8)
CLLPLCLREDTGFQKLVF

SEQ ID NO: 607698 - protein, 15 aa, Homo sapiens
  CDR3 for beta chain variable domain of TCR clone 303849 (TRBV6-3, TRBJ2-7)
CASSSPGTVFYEQYF

SEQ ID NO: 607699 - protein, 11 aa, Homo sapiens
  CDR3 for alpha chain variable domain of TCR clone 303850 (TRAV2, TRAJ23)
CAVETRGKLIF

SEQ ID NO: 607700 - protein, 14 aa, Homo sapiens
  CDR3 for beta chain variable domain of TCR clone 303850 (TRBV2, TRBJ2-3)
CASSEGQYTDTQYF

SEQ ID NO: 607701 - protein, 17 aa, Homo sapiens
  CDR3 for alpha chain variable domain of TCR clone 303851 (TRAV8-6, TRAJ58)
CAVSSWVGETSGSRLTF

SEQ ID NO: 607702 - protein, 22 aa, Homo sapiens
  CDR3 for beta chain variable domain of TCR clone 303851 (TRBV19, TRBJ2-1)
CASSVRDRVTGTSGRIYNEQFF

SEQ ID NO: 607703 - protein, 13 aa, Homo sapiens
  CDR3 for alpha chain variable domain of TCR clone 303852 (TRAV8-4, TRAJ36)
CAVSEGGANNLFF

SEQ ID NO: 607704 - protein, 12 aa, Homo sapiens
  CDR3 for beta chain variable domain of TCR clone 303852 (TRBV28, TRBJ2-7)
CASTGNQYEQYF

SEQ ID NO: 607705 - protein, 14 aa, Homo sapiens
  CDR3 for alpha chain variable domain of TCR clone 303853 (TRAV17, TRAJ5)
CATVALTGRRALTF

SEQ ID NO: 607706 - protein, 16 aa, Homo sapiens
  CDR3 for beta chain variable domain of TCR clone 303853 (TRBV28, TRBJ2-7)
CTSASSPYGMAYEQYF

SEQ ID NO: 607707 - protein, 14 aa, Homo sapiens
  CDR3 for alpha chain variable domain of TCR clone 303854 (TRAV17, TRAJ15)
CATATNQAGTALIF

SEQ ID NO: 607708 - protein, 16 aa, Homo sapiens
  CDR3 for beta chain variable domain of TCR clone 303854 (TRBV4-1, TRBJ2-7)
CASSRGDILNSYEQYF

SEQ ID NO: 607709 - protein, 14 aa, Homo sapiens
  CDR3 for alpha chain variable domain of TCR clone 303855 (TRAV23/DV6, TRAJ13)
CAASETGGYQKVTL

SEQ ID NO: 607710 - protein, 16 aa, Homo sapiens
  CDR3 for beta chain variable domain of TCR clone 303855 (TRBV5-1, TRBJ1-3)
CASSPWAPSSGNTIYF

SEQ ID NO: 607711 - protein, 13 aa, Homo sapiens
  CDR3 for alpha chain variable domain of TCR clone 303856 (TRAV3, TRAJ27)
CAVRPLGAGKTTF

SEQ ID NO: 607712 - protein, 16 aa, Homo sapiens
  CDR3 for beta chain variable domain of TCR clone 303856 (TRBV10-3, TRBJ2-1)
CAISLTSGNSYNEQFF

SEQ ID NO: 607713 - protein, 12 aa, Homo sapiens
  CDR3 for alpha chain variable domain of TCR clone 303857 (TRAV8-3, TRAJ41)
CAVGALGYALNF

SEQ ID NO: 607714 - protein, 14 aa, Homo sapiens
  CDR3 for beta chain variable domain of TCR clone 303857 (TRBV19, TRBJ2-1)
CASPTFVLSGEQFF

SEQ ID NO: 607715 - protein, 14 aa, Homo sapiens
  CDR3 for alpha chain variable domain of TCR clone 303858 (TRAV29/DV5, TRAJ44)
CAAFLVGTAIKLTF

SEQ ID NO: 607716 - protein, 15 aa, Homo sapiens
  CDR3 for beta chain variable domain of TCR clone 303858 (TRBV7-3, TRBJ2-2)
CASSETGQGTGELFF

SEQ ID NO: 607717 - protein, 10 aa, Homo sapiens
  CDR3 for alpha chain variable domain of TCR clone 303859 (TRAV12-1, TRAJ23)
CVVSGGKLIF

SEQ ID NO: 607718 - protein, 14 aa, Homo sapiens
  CDR3 for beta chain variable domain of TCR clone 303859 (TRBV20-1, TRBJ1-1)
CNAQTRIGGTEAFF

SEQ ID NO: 607719 - protein, 14 aa, Homo sapiens
  CDR3 for alpha chain variable domain of TCR clone 303860 (TRAV21, TRAJ48)
CAVIAHFGNEKLTF

SEQ ID NO: 607720 - protein, 14 aa, Homo sapiens
  CDR3 for beta chain variable domain of TCR clone 303860 (TRBV2, TRBJ2-7)
CASSQLAGTYEQYF

SEQ ID NO: 607721 - protein, 21 aa, Homo sapiens
  CDR3 for alpha chain variable domain of TCR clone 303861 (TRAV9-2, )
CALIQIGDIQNPYPAVYQLRD

SEQ ID NO: 607722 - protein, 13 aa, Homo sapiens
  CDR3 for beta chain variable domain of TCR clone 303861 (TRBV20-1, TRBJ1-1)
CSARGGGNTEAFF

SEQ ID NO: 607723 - protein, 14 aa, Homo sapiens
  CDR3 for alpha chain variable domain of TCR clone 303862 (TRAV25, TRAJ35)
CARRMEGFGNVLHC

SEQ ID NO: 607724 - protein, 13 aa, Homo sapiens
  CDR3 for beta chain variable domain of TCR clone 303862 (TRBV7-2, TRBJ1-4)
CASSLAGLDNLFF

SEQ ID NO: 607725 - protein, 18 aa, Homo sapiens
  CDR3 for alpha chain variable domain of TCR clone 303863 (TRAV12-3, TRAJ52)
CARSRTNAGGTSYGKLTF

SEQ ID NO: 607726 - protein, 17 aa, Homo sapiens
  CDR3 for beta chain variable domain of TCR clone 303863 (TRBV7-3, TRBJ2-3)
CASSLMKRMRGADTQYF

SEQ ID NO: 607727 - protein, 14 aa, Homo sapiens
  CDR3 for alpha chain variable domain of TCR clone 303864 (TRAV1-2, TRAJ8)
CAVREDTGFQKLVF

SEQ ID NO: 607728 - protein, 14 aa, Homo sapiens
  CDR3 for beta chain variable domain of TCR clone 303864 (TRBV7-6, TRBJ2-3)
CASSLGTVIDTQYF

SEQ ID NO: 607729 - protein, 15 aa, Homo sapiens
  CDR3 for alpha chain variable domain of TCR clone 303865 (TRAV38-1, TRAJ37)
CAFIFASGNTGKLIF

SEQ ID NO: 607730 - protein, 12 aa, Homo sapiens
  CDR3 for beta chain variable domain of TCR clone 303865 (TRBV7-9, TRBJ2-7)
CASSLEGYEQYF

SEQ ID NO: 607731 - protein, 18 aa, Homo sapiens
  CDR3 for alpha chain variable domain of TCR clone 303866 (TRAV26-2, TRAJ33)
CCVLLHPEEPASNYQLIW

SEQ ID NO: 607732 - protein, 15 aa, Homo sapiens
  CDR3 for beta chain variable domain of TCR clone 303866 (TRBV10-2, TRBJ2-5)
CASRGSGGPQETLYF

SEQ ID NO: 607733 - protein, 15 aa, Homo sapiens
  CDR3 for alpha chain variable domain of TCR clone 303867 (TRAV38-1, TRAJ37)
CAFIHGSGNTGKLIF

SEQ ID NO: 607734 - protein, 14 aa, Homo sapiens
  CDR3 for beta chain variable domain of TCR clone 303867 (TRBV2, TRBJ2-1)
CASRTGSSYNEQFF

SEQ ID NO: 607735 - protein, 15 aa, Homo sapiens
  CDR3 for alpha chain variable domain of TCR clone 303868 (TRAV12-3, TRAJ22)
CARRSSSGSARQLTF

SEQ ID NO: 607736 - protein, 18 aa, Homo sapiens
  CDR3 for beta chain variable domain of TCR clone 303868 (TRBV27, TRBJ2-1)
CASRRGGRGESSGNEQFF

SEQ ID NO: 607737 - protein, 15 aa, Homo sapiens
  CDR3 for alpha chain variable domain of TCR clone 303869 (TRAV10, TRAJ43)
CVVSAGRSNNNDMRF

SEQ ID NO: 607738 - protein, 14 aa, Homo sapiens
  CDR3 for beta chain variable domain of TCR clone 303869 (TRBV5-5, TRBJ1-1)
CASSGRGTGTEAFF

SEQ ID NO: 607739 - protein, 13 aa, Homo sapiens
  CDR3 for alpha chain variable domain of TCR clone 303870 (TRAV8-6, TRAJ49)
CAVITNTGNQFYF

SEQ ID NO: 607740 - protein, 16 aa, Homo sapiens
  CDR3 for beta chain variable domain of TCR clone 303870 (TRBV5-1, TRBJ2-7)
CASSYASTSSGGEQYF

SEQ ID NO: 607741 - protein, 12 aa, Homo sapiens
  CDR3 for alpha chain variable domain of TCR clone 303871 (TRAV25, TRAJ11)
CAGASGYSTLTF

SEQ ID NO: 607742 - protein, 18 aa, Homo sapiens
  CDR3 for beta chain variable domain of TCR clone 303871 (TRBV27, TRBJ2-1)
CASGNRAVGVGSKNEQFF

SEQ ID NO: 607743 - protein, 11 aa, Homo sapiens
  CDR3 for alpha chain variable domain of TCR clone 303872 (TRAV12-1, TRAJ26)
CVVAYGQNFVF

SEQ ID NO: 607744 - protein, 15 aa, Homo sapiens
  CDR3 for beta chain variable domain of TCR clone 303872 (TRBV12-4, TRBJ2-5)
CASRGTGQAQETQYF

SEQ ID NO: 607745 - protein, 15 aa, Homo sapiens
  CDR3 for alpha chain variable domain of TCR clone 303873 (TRAV35, TRAJ41)
CAGQLFSNSGYALNF

SEQ ID NO: 607746 - protein, 14 aa, Homo sapiens
  CDR3 for beta chain variable domain of TCR clone 303873 (TRBV7-2, TRBJ2-7)
CASSPKTSFYEQYF

SEQ ID NO: 607747 - protein, 23 aa, Homo sapiens
  CDR3 for alpha chain variable domain of TCR clone 303874 (TRAV30, TRAJ43)
CTLRPPSSVTQEPTSAALGDMRF

SEQ ID NO: 607748 - protein, 13 aa, Homo sapiens
  CDR3 for beta chain variable domain of TCR clone 303874 (TRBV12-4, TRBJ2-2)
CASSITGSGELFF

SEQ ID NO: 607749 - protein, 11 aa, Homo sapiens
  CDR3 for alpha chain variable domain of TCR clone 303875 (TRAV16, TRAJ33)
CALHSNYQLIW

SEQ ID NO: 607750 - protein, 16 aa, Homo sapiens
  CDR3 for beta chain variable domain of TCR clone 303875 (TRBV18, TRBJ1-2)
GASSPPERVTIYGYTF

SEQ ID NO: 607751 - protein, 13 aa, Homo sapiens
  CDR3 for alpha chain variable domain of TCR clone 303876 (TRAV12-1, TRAJ22)
RVASGGSARQLTF

SEQ ID NO: 607752 - protein, 12 aa, Homo sapiens
  CDR3 for beta chain variable domain of TCR clone 303876 (TRBV29-1, TRBJ2-3)
CSVTGGADTQYF

SEQ ID NO: 607753 - protein, 14 aa, Homo sapiens
  CDR3 for alpha chain variable domain of TCR clone 303877 (TRAV3, TRAJ21)
CALGRGSTNFTLDL

SEQ ID NO: 607754 - protein, 14 aa, Homo sapiens
  CDR3 for beta chain variable domain of TCR clone 303877 (TRBV7-9, TRBJ2-4)
CASSLAMGGNIRYF

SEQ ID NO: 607755 - protein, 12 aa, Homo sapiens
  CDR3 for alpha chain variable domain of TCR clone 303878 (TRAV12-3, TRAJ17)
CAMTLTGNKLTF

SEQ ID NO: 607756 - protein, 15 aa, Homo sapiens
  CDR3 for beta chain variable domain of TCR clone 303878 (TRBV20-1, TRBJ2-7)
SSASDRVSGMDEQYF

SEQ ID NO: 607757 - protein, 15 aa, Homo sapiens
  CDR3 for alpha chain variable domain of TCR clone 303879 (TRAV38-2/DV8, TRAJ48)
CAYRSGGFGNEKLTF

SEQ ID NO: 607758 - protein, 16 aa, Homo sapiens
  CDR3 for beta chain variable domain of TCR clone 303879 (TRBV28, TRBJ2-7)
CASSQWVATGDLSQYF

SEQ ID NO: 607759 - protein, 14 aa, Homo sapiens
  CDR3 for alpha chain variable domain of TCR clone 303880 (TRAV17, TRAJ49)
CATDARDTGKQSYF

SEQ ID NO: 607760 - protein, 14 aa, Homo sapiens
  CDR3 for beta chain variable domain of TCR clone 303880 (TRBV5-5, TRBJ1-2)
CASSFGQINYGYTF

SEQ ID NO: 607761 - protein, 14 aa, Homo sapiens
  CDR3 for alpha chain variable domain of TCR clone 303881 (TRAV20, TRAJ10)
CAVRVEGGGNKLTF

SEQ ID NO: 607762 - protein, 14 aa, Homo sapiens
  CDR3 for beta chain variable domain of TCR clone 303881 (TRBV12-5, TRBJ2-3)
CASEGIPSTDTQYF

SEQ ID NO: 607763 - protein, 16 aa, Homo sapiens
  CDR3 for alpha chain variable domain of TCR clone 303882 (TRAV30, TRAJ24)
YGTEIVDADSWGKFQF

SEQ ID NO: 607764 - protein, 14 aa, Homo sapiens
  CDR3 for beta chain variable domain of TCR clone 303882 (TRBV12-5, TRBJ2-5)
CASGSRTQQETQYF

SEQ ID NO: 607765 - protein, 13 aa, Homo sapiens
  CDR3 for alpha chain variable domain of TCR clone 303883 (TRAV1-2, TRAJ9)
CAALNTGGFKTIF

SEQ ID NO: 607766 - protein, 14 aa, Homo sapiens
  CDR3 for beta chain variable domain of TCR clone 303883 (TRBV7-9, TRBJ2-5)
CASSPRPSGETQYF

SEQ ID NO: 607767 - protein, 14 aa, Homo sapiens
  CDR3 for alpha chain variable domain of TCR clone 303884 (TRAV27, )
CAVRTQIRISRTLT

SEQ ID NO: 607768 - protein, 16 aa, Homo sapiens
  CDR3 for beta chain variable domain of TCR clone 303884 (TRBV5-1, TRBJ2-3)
CASSLGLAVYTDTQYF

SEQ ID NO: 607769 - protein, 11 aa, Homo sapiens
  CDR3 for alpha chain variable domain of TCR clone 303885 (TRAV3, TRAJ21)
CAVGNFNKFYF

SEQ ID NO: 607770 - protein, 14 aa, Homo sapiens
  CDR3 for beta chain variable domain of TCR clone 303885 (TRBV12-4, TRBJ2-5)
CQQSPTGLQETQYF

SEQ ID NO: 607771 - protein, 17 aa, Homo sapiens
  CDR3 for alpha chain variable domain of TCR clone 303886 (TRAV4, TRAJ42)
CLVGVLNYGGSQGNLIF

SEQ ID NO: 607772 - protein, 14 aa, Homo sapiens
  CDR3 for beta chain variable domain of TCR clone 303886 (TRBV12-5, TRBJ2-5)
CASGSRTHQETQYF

SEQ ID NO: 607773 - protein, 11 aa, Homo sapiens
  CDR3 for alpha chain variable domain of TCR clone 303887 (TRAV12-3, TRAJ43)
CAMSVSNDMRF

SEQ ID NO: 607774 - protein, 18 aa, Homo sapiens
  CDR3 for beta chain variable domain of TCR clone 303887 (TRBV13, TRBJ2-6)
CASSPMTSGGSGANVLTF

SEQ ID NO: 607775 - protein, 15 aa, Homo sapiens
  CDR3 for alpha chain variable domain of TCR clone 303888 (TRAV12-1, TRAJ4)
WVVNPFSGGYNKLIF

SEQ ID NO: 607776 - protein, 16 aa, Homo sapiens
  CDR3 for beta chain variable domain of TCR clone 303888 (TRBV5-1, TRBJ1-1)
CASSKTGTEVGTEAFF

SEQ ID NO: 607777 - protein, 15 aa, Homo sapiens
  CDR3 for alpha chain variable domain of TCR clone 303889 (TRAV17, TRAJ42)
CATDHYGGSKGNLIF

SEQ ID NO: 607778 - protein, 13 aa, Homo sapiens
  CDR3 for beta chain variable domain of TCR clone 303889 (TRBV7-2, TRBJ1-5)
CASSFARNQPQHF

SEQ ID NO: 607779 - protein, 12 aa, Homo sapiens
  CDR3 for alpha chain variable domain of TCR clone 303890 (TRAV26-1, TRAJ13)
CIVSRGYQKVTF

SEQ ID NO: 607780 - protein, 14 aa, Homo sapiens
  CDR3 for beta chain variable domain of TCR clone 303890 (TRBV18, TRBJ2-5)
CASSPGVSQETQYF

SEQ ID NO: 607781 - protein, 14 aa, Homo sapiens
  CDR3 for alpha chain variable domain of TCR clone 303891 (TRAV26-1, TRAJ34)
CIVRVAYNTDQLIF

SEQ ID NO: 607782 - protein, 16 aa, Homo sapiens
  CDR3 for beta chain variable domain of TCR clone 303891 (TRBV7-3, TRBJ2-2)
CASSLKRGTLSGELFF

SEQ ID NO: 607783 - protein, 15 aa, Homo sapiens
  CDR3 for alpha chain variable domain of TCR clone 303892 (TRAV8-3, TRAJ4)
CAVGAYSGGYNKLIF

SEQ ID NO: 607784 - protein, 16 aa, Homo sapiens
  CDR3 for beta chain variable domain of TCR clone 303892 (TRBV12-4, TRBJ1-5)
CASSRPVGGSNQPQHF

SEQ ID NO: 607785 - protein, 14 aa, Homo sapiens
  CDR3 for alpha chain variable domain of TCR clone 303893 (TRAV12-3, TRAJ10)
SHLPLTGGGNKLTF

SEQ ID NO: 607786 - protein, 17 aa, Homo sapiens
  CDR3 for beta chain variable domain of TCR clone 303893 (TRBV14, TRBJ2-1)
CASSQDRRVTSYNEQFF

SEQ ID NO: 607787 - protein, 14 aa, Homo sapiens
  CDR3 for alpha chain variable domain of TCR clone 303894 (TRAV13-1, TRAJ44)
CAAKATGTASKLTF

SEQ ID NO: 607788 - protein, 14 aa, Homo sapiens
  CDR3 for beta chain variable domain of TCR clone 303894 (TRBV7-8, TRBJ1-2)
CASSPDSLSYGYTF

SEQ ID NO: 607789 - protein, 14 aa, Homo sapiens
  CDR3 for alpha chain variable domain of TCR clone 303895 (TRAV12-2, TRAJ45)
CAVNIGGGADGLTF

SEQ ID NO: 607790 - protein, 17 aa, Homo sapiens
  CDR3 for beta chain variable domain of TCR clone 303895 (TRBV20-1, TRBJ2-2)
CSASGSGQGALTGELFF

SEQ ID NO: 607791 - protein, 14 aa, Homo sapiens
  CDR3 for alpha chain variable domain of TCR clone 303896 (TRAV2, TRAJ9)
GAVEDRSGGFKTIF

SEQ ID NO: 607792 - protein, 19 aa, Homo sapiens
  CDR3 for beta chain variable domain of TCR clone 303896 (TRBV25-1, TRBJ2-2)
CAILVYRVDRGRKTGELFF

SEQ ID NO: 607793 - protein, 16 aa, Homo sapiens
  CDR3 for alpha chain variable domain of TCR clone 303897 (TRAV4, TRAJ9)
CLVGDPNKPGGFKTIF

SEQ ID NO: 607794 - protein, 14 aa, Homo sapiens
  CDR3 for beta chain variable domain of TCR clone 303897 (TRBV20-1, TRBJ1-1)
CSAQTRIGGTDAFF

SEQ ID NO: 607795 - protein, 16 aa, Homo sapiens
  CDR3 for alpha chain variable domain of TCR clone 303898 (TRAV3, TRAJ10)
CAVRDMRAGGGNKLTF

SEQ ID NO: 607796 - protein, 14 aa, Homo sapiens
  CDR3 for beta chain variable domain of TCR clone 303898 (TRBV18, TRBJ1-2)
CASSLNRENYGYTF

SEQ ID NO: 607797 - protein, 17 aa, Homo sapiens
  CDR3 for alpha chain variable domain of TCR clone 303899 (TRAV13-1, TRAJ52)
CAASSGAGGTSYGKLTF

SEQ ID NO: 607798 - protein, 14 aa, Homo sapiens
  CDR3 for beta chain variable domain of TCR clone 303899 (TRBV5-1, TRBJ1-1)
CASSLQGASTEAFF

SEQ ID NO: 607799 - protein, 17 aa, Homo sapiens
  CDR3 for alpha chain variable domain of TCR clone 303900 (TRAV38-2/DV8, TRAJ23)
CALSRKLILGQGTELSV

SEQ ID NO: 607800 - protein, 17 aa, Homo sapiens
  CDR3 for beta chain variable domain of TCR clone 303900 (TRBV5-4, TRBJ2-1)
CASSSAGGRGPYNEQFF

SEQ ID NO: 607801 - protein, 14 aa, Homo sapiens
  CDR3 for alpha chain variable domain of TCR clone 303901 (TRAV17, TRAJ16)
CATADFSDGQRLLV

SEQ ID NO: 607802 - protein, 15 aa, Homo sapiens
  CDR3 for beta chain variable domain of TCR clone 303901 (TRBV18, TRBJ2-1)
CASSPPSASYNEQFF

SEQ ID NO: 607803 - protein, 14 aa, Homo sapiens
  CDR3 for alpha chain variable domain of TCR clone 303902 (TRAV12-2, TRAJ17)
CAVLFKAAGNKLTF

SEQ ID NO: 607804 - protein, 15 aa, Homo sapiens
  CDR3 for beta chain variable domain of TCR clone 303902 (TRBV28, TRBJ1-3)
CASSMGWASGNTIYF

SEQ ID NO: 607805 - protein, 17 aa, Homo sapiens
  CDR3 for alpha chain variable domain of TCR clone 303903 (TRAV3, TRAJ6)
CAVRDGPRAGGSYIPTF

SEQ ID NO: 607806 - protein, 14 aa, Homo sapiens
  CDR3 for beta chain variable domain of TCR clone 303903 (TRBV19, TRBJ1-5)
CASRAPDSFLSQHF

SEQ ID NO: 607807 - protein, 13 aa, Homo sapiens
  CDR3 for alpha chain variable domain of TCR clone 303904 (TRAV3, TRAJ27)
CAVRSLGAGKSTF

SEQ ID NO: 607808 - protein, 15 aa, Homo sapiens
  CDR3 for beta chain variable domain of TCR clone 303904 (TRBV9, TRBJ1-6)
CASSVAGTGDSPLHF

SEQ ID NO: 607809 - protein, 10 aa, Homo sapiens
  CDR3 for alpha chain variable domain of TCR clone 303905 (TRAV12-1, TRAJ37)
ARGNTGKLIF

SEQ ID NO: 607810 - protein, 14 aa, Homo sapiens
  CDR3 for beta chain variable domain of TCR clone 303905 (TRBV7-6, TRBJ2-3)
CASSLGTVTDTQYF

SEQ ID NO: 607811 - protein, 16 aa, Homo sapiens
  CDR3 for alpha chain variable domain of TCR clone 303906 (TRAV27, TRAJ13)
CAGAKSDSGGYQKVTF

SEQ ID NO: 607812 - protein, 15 aa, Homo sapiens
  CDR3 for beta chain variable domain of TCR clone 303906 (TRBV29-1, TRBJ2-1)
CSVGRHASFYNEQFF

SEQ ID NO: 607813 - protein, 18 aa, Homo sapiens
  CDR3 for alpha chain variable domain of TCR clone 303907 (TRAV21, TRAJ52)
CAVRPSPAGGTSYGKLTF

SEQ ID NO: 607814 - protein, 15 aa, Homo sapiens
  CDR3 for beta chain variable domain of TCR clone 303907 (TRBV24-1, TRBJ1-4)
CATSDPQGADEKLFF

SEQ ID NO: 607815 - protein, 15 aa, Homo sapiens
  CDR3 for alpha chain variable domain of TCR clone 303908 (TRAV17, TRAJ57)
CATGPSQGGSEKLVF

SEQ ID NO: 607816 - protein, 14 aa, Homo sapiens
  CDR3 for beta chain variable domain of TCR clone 303908 (TRBV11-2, TRBJ1-2)
CAGSLYRGNYGYTF

SEQ ID NO: 607817 - protein, 14 aa, Homo sapiens
  CDR3 for alpha chain variable domain of TCR clone 303909 (TRAV12-2, TRAJ17)
CAVLFKAAGNKLTF

SEQ ID NO: 607818 - protein, 14 aa, Homo sapiens
  CDR3 for beta chain variable domain of TCR clone 303909 (TRBV7-6, TRBJ2-3)
CASSLVTVTDTQYF

SEQ ID NO: 607819 - protein, 19 aa, Homo sapiens
  CDR3 for alpha chain variable domain of TCR clone 303910 (TRAV2, TRAJ20)
ILQVREVDAAVYRDCKLSF

SEQ ID NO: 607820 - protein, 13 aa, Homo sapiens
  CDR3 for beta chain variable domain of TCR clone 303910 (TRBV15, TRBJ1-6)
CATSGGLNSPLHF

SEQ ID NO: 607821 - protein, 18 aa, Homo sapiens
  CDR3 for alpha chain variable domain of TCR clone 303911 (TRAV29/DV5, TRAJ52)
QCTSVQQADGTSYGKLTF

SEQ ID NO: 607822 - protein, 12 aa, Homo sapiens
  CDR3 for beta chain variable domain of TCR clone 303911 (TRBV7-2, TRBJ1-1)
CKQSKGAKVAFF

SEQ ID NO: 607823 - protein, 15 aa, Homo sapiens
  CDR3 for alpha chain variable domain of TCR clone 303912 (TRAV21, TRAJ52)
CAVRGGGTSYGKLTF

SEQ ID NO: 607824 - protein, 15 aa, Homo sapiens
  CDR3 for beta chain variable domain of TCR clone 303912 (TRBV18, TRBJ1-5)
CASSPSDRSNQPPHF

SEQ ID NO: 607825 - protein, 20 aa, Homo sapiens
  CDR3 for alpha chain variable domain of TCR clone 303913 (TRAV26-1, TRAJ42)
CCVLLHRQTYYGGNQGNLIF

SEQ ID NO: 607826 - protein, 16 aa, Homo sapiens
  CDR3 for beta chain variable domain of TCR clone 303913 (TRBV4-1, TRBJ1-1)
CASSSMSERPNTEAFF

SEQ ID NO: 607827 - protein, 14 aa, Homo sapiens
  CDR3 for alpha chain variable domain of TCR clone 303914 (TRAV26-1, TRAJ39)
CIVRGSRAGNMLTF

SEQ ID NO: 607828 - protein, 15 aa, Homo sapiens
  CDR3 for beta chain variable domain of TCR clone 303914 (TRBV7-9, TRBJ1-5)
CGSSQGHQPNQPQDF

SEQ ID NO: 607829 - protein, 14 aa, Homo sapiens
  CDR3 for alpha chain variable domain of TCR clone 303915 (TRAV19, TRAJ49)
CALSEGNTGNQFYF

SEQ ID NO: 607830 - protein, 12 aa, Homo sapiens
  CDR3 for beta chain variable domain of TCR clone 303915 (TRBV11-2, TRBJ2-2)
CASSLGGGELFF

SEQ ID NO: 607831 - protein, 15 aa, Homo sapiens
  CDR3 for alpha chain variable domain of TCR clone 303916 (TRAV3, TRAJ3)
CAVRDMSSSASKIIF

SEQ ID NO: 607832 - protein, 14 aa, Homo sapiens
  CDR3 for beta chain variable domain of TCR clone 303916 (TRBV7-6, TRBJ2-7)
CASSLNSGTKEQYF

SEQ ID NO: 607833 - protein, 13 aa, Homo sapiens
  CDR3 for alpha chain variable domain of TCR clone 303917 (TRAV16, TRAJ48)
CSPLNFGNEKLTF

SEQ ID NO: 607834 - protein, 13 aa, Homo sapiens
  CDR3 for beta chain variable domain of TCR clone 303917 (TRBV19, TRBJ2-1)
CATSRGVYNEQFF

SEQ ID NO: 607835 - protein, 12 aa, Homo sapiens
  CDR3 for alpha chain variable domain of TCR clone 303918 (TRAV21, TRAJ23)
CAVMLQGGKLIF

SEQ ID NO: 607836 - protein, 14 aa, Homo sapiens
  CDR3 for beta chain variable domain of TCR clone 303918 (TRBV7-9, TRBJ1-4)
CDITEGEANEKLFF

SEQ ID NO: 607837 - protein, 13 aa, Homo sapiens
  CDR3 for alpha chain variable domain of TCR clone 303919 (TRAV4, TRAJ22)
CIGGSGSARQLTF

SEQ ID NO: 607838 - protein, 15 aa, Homo sapiens
  CDR3 for beta chain variable domain of TCR clone 303919 (TRBV7-9, TRBJ1-6)
CASSSPGRGNSPLHF

SEQ ID NO: 607839 - protein, 12 aa, Homo sapiens
  CDR3 for alpha chain variable domain of TCR clone 303920 (TRAV36/DV7, TRAJ54)
RAVVRGAQKLVF

SEQ ID NO: 607840 - protein, 14 aa, Homo sapiens
  CDR3 for beta chain variable domain of TCR clone 303920 (TRBV7-3, TRBJ1-1)
CASSLEGGNTEAFF

SEQ ID NO: 607841 - protein, 11 aa, Homo sapiens
  CDR3 for alpha chain variable domain of TCR clone 303921 (TRAV2, TRAJ13)
CASGGYQKVTF

SEQ ID NO: 607842 - protein, 17 aa, Homo sapiens
  CDR3 for beta chain variable domain of TCR clone 303921 (TRBV7-9, TRBJ2-7)
CASSWQGRWREAYEQYF

SEQ ID NO: 607843 - protein, 23 aa, Homo sapiens
  CDR3 for alpha chain variable domain of TCR clone 303922 (TRAV8-6, TRAJ38)
CAVRNAGNNHIQNPDPAVYQLRD

SEQ ID NO: 607844 - protein, 15 aa, Homo sapiens
  CDR3 for beta chain variable domain of TCR clone 303922 (TRBV4-1, TRBJ2-2)
CASSGGQGSTGELFF

SEQ ID NO: 607845 - protein, 14 aa, Homo sapiens
  CDR3 for alpha chain variable domain of TCR clone 303923 (TRAV38-1, TRAJ40)
CALCPTSGTYKYIF

SEQ ID NO: 607846 - protein, 14 aa, Homo sapiens
  CDR3 for beta chain variable domain of TCR clone 303923 (TRBV25-1, TRBJ1-1)
CASTHLGGNTGAFF

SEQ ID NO: 607847 - protein, 22 aa, Homo sapiens
  CDR3 for alpha chain variable domain of TCR clone 303924 (TRAV21, )
CAVRQDAGNNHIQNPDPAVYQL

SEQ ID NO: 607848 - protein, 16 aa, Homo sapiens
  CDR3 for beta chain variable domain of TCR clone 303924 (TRBV4-2, TRBJ1-1)
CASRPLDGGVNTEAFF

SEQ ID NO: 607849 - protein, 14 aa, Homo sapiens
  CDR3 for alpha chain variable domain of TCR clone 303925 (TRAV20, TRAJ42)
CAVHAGGSQGNLIF

SEQ ID NO: 607850 - protein, 14 aa, Homo sapiens
  CDR3 for beta chain variable domain of TCR clone 303925 (TRBV28, TRBJ1-2)
CASRIQGANYGDTF

SEQ ID NO: 607851 - protein, 16 aa, Homo sapiens
  CDR3 for alpha chain variable domain of TCR clone 303926 (TRAV38-1, TRAJ45)
CAFMKGAGGGADGLTF

SEQ ID NO: 607852 - protein, 15 aa, Homo sapiens
  CDR3 for beta chain variable domain of TCR clone 303926 (TRBV20-1, TRBJ2-7)
CSAREGRDSLYEQYF

SEQ ID NO: 607853 - protein, 16 aa, Homo sapiens
  CDR3 for alpha chain variable domain of TCR clone 303927 (TRAV3, TRAJ10)
CAVRDMRAGGGNKLTF

SEQ ID NO: 607854 - protein, 16 aa, Homo sapiens
  CDR3 for beta chain variable domain of TCR clone 303927 (TRBV2, TRBJ2-1)
CASRSPAGGKYNEQFF

SEQ ID NO: 607855 - protein, 15 aa, Homo sapiens
  CDR3 for alpha chain variable domain of TCR clone 303928 (TRAV27, TRAJ38)
CAGRFTAGNNRKRIW

SEQ ID NO: 607856 - protein, 13 aa, Homo sapiens
  CDR3 for beta chain variable domain of TCR clone 303928 (TRBV12-5, TRBJ2-3)
CASQNRGTDTQYF

SEQ ID NO: 607857 - protein, 13 aa, Homo sapiens
  CDR3 for alpha chain variable domain of TCR clone 303929 (TRAV21, TRAJ57)
CAVTQGGSEKLVS

SEQ ID NO: 607858 - protein, 16 aa, Homo sapiens
  CDR3 for beta chain variable domain of TCR clone 303929 (TRBV29-1, TRBJ2-7)
CSVEDAEDGTAYEQYF

SEQ ID NO: 607859 - protein, 13 aa, Homo sapiens
  CDR3 for alpha chain variable domain of TCR clone 303930 (TRAV2, TRAJ40)
CAVVTSGTYKYIF

SEQ ID NO: 607860 - protein, 12 aa, Homo sapiens
  CDR3 for beta chain variable domain of TCR clone 303930 (TRBV11-2, TRBJ2-2)
CASSLGCGELFF

SEQ ID NO: 607861 - protein, 20 aa, Homo sapiens
  CDR3 for alpha chain variable domain of TCR clone 303931 (TRAV26-1, TRAJ42)
CCVLLHQQTYYGGSQGNLIF

SEQ ID NO: 607862 - protein, 16 aa, Homo sapiens
  CDR3 for beta chain variable domain of TCR clone 303931 (TRBV7-3, TRBJ2-2)
CASSLKRGTLSGELFF

SEQ ID NO: 607863 - protein, 16 aa, Homo sapiens
  CDR3 for alpha chain variable domain of TCR clone 303932 (TRAV3, TRAJ10)
CAVRDMRAGGGNKLTL

SEQ ID NO: 607864 - protein, 14 aa, Homo sapiens
  CDR3 for beta chain variable domain of TCR clone 303932 (TRBV7-2, TRBJ2-7)
CASSPKTSFYEQYF

SEQ ID NO: 607865 - protein, 14 aa, Homo sapiens
  CDR3 for alpha chain variable domain of TCR clone 303933 (TRAV12-2, TRAJ13)
CALKKTGGYQKVTF

SEQ ID NO: 607866 - protein, 15 aa, Homo sapiens
  CDR3 for beta chain variable domain of TCR clone 303933 (TRBV27, TRBJ2-1)
CASSGGGGWWGEQFL

SEQ ID NO: 607867 - protein, 14 aa, Homo sapiens
  CDR3 for alpha chain variable domain of TCR clone 303934 (TRAV20, TRAJ42)
CAVQAGGSQGNLIF

SEQ ID NO: 607868 - protein, 14 aa, Homo sapiens
  CDR3 for beta chain variable domain of TCR clone 303934 (TRBV28, TRBJ1-2)
CASGIQWANYGYTF

SEQ ID NO: 607869 - protein, 13 aa, Homo sapiens
  CDR3 for alpha chain variable domain of TCR clone 303935 (TRAV35, TRAJ42)
CAGFPGSQGNLIF

SEQ ID NO: 607870 - protein, 14 aa, Homo sapiens
  CDR3 for beta chain variable domain of TCR clone 303935 (TRBV19, TRBJ2-7)
CASPTFVLSGEQYF

SEQ ID NO: 607871 - protein, 13 aa, Homo sapiens
  CDR3 for alpha chain variable domain of TCR clone 303936 (TRAV8-3, TRAJ48)
CAVVPFGNEKLTF

SEQ ID NO: 607872 - protein, 12 aa, Homo sapiens
  CDR3 for beta chain variable domain of TCR clone 303936 (TRBV11-2, TRBJ2-2)
CATSLGGGELFF

SEQ ID NO: 607873 - protein, 15 aa, Homo sapiens
  CDR3 for alpha chain variable domain of TCR clone 303937 (TRAV17, TRAJ22)
CATVAPSGSARQLTF

SEQ ID NO: 607874 - protein, 13 aa, Homo sapiens
  CDR3 for beta chain variable domain of TCR clone 303937 (TRBV11-2, TRBJ2-7)
CASSLDLGYEQYF

SEQ ID NO: 607875 - protein, 12 aa, Homo sapiens
  CDR3 for alpha chain variable domain of TCR clone 303938 (TRAV2, TRAJ45)
CAEEAVLTDSPL

SEQ ID NO: 607876 - protein, 14 aa, Homo sapiens
  CDR3 for beta chain variable domain of TCR clone 303938 (TRBV27, TRBJ2-5)
CASSWREGLETQYF

SEQ ID NO: 607877 - protein, 14 aa, Homo sapiens
  CDR3 for alpha chain variable domain of TCR clone 303939 (TRAV8-3, TRAJ4)
RAVGAAGGYNKLIF

SEQ ID NO: 607878 - protein, 11 aa, Homo sapiens
  CDR3 for beta chain variable domain of TCR clone 303939 (TRBV7-2, TRBJ2-3)
CASSSSDTQYF

SEQ ID NO: 607879 - protein, 17 aa, Homo sapiens
  CDR3 for alpha chain variable domain of TCR clone 303940 (TRAV27, TRAJ42)
CAERVIYYGGSQGNLIF

SEQ ID NO: 607880 - protein, 16 aa, Homo sapiens
  CDR3 for beta chain variable domain of TCR clone 303940 (TRBV2, TRBJ2-1)
CASSVGGSLSYNEQFF

SEQ ID NO: 607881 - protein, 13 aa, Homo sapiens
  CDR3 for alpha chain variable domain of TCR clone 303941 (TRAV36/DV7, TRAJ7)
CAGTRYGNNRLAF

SEQ ID NO: 607882 - protein, 11 aa, Homo sapiens
  CDR3 for beta chain variable domain of TCR clone 303941 (TRBV29-1, TRBJ2-5)
CSEDRTGTQYF

SEQ ID NO: 607883 - protein, 17 aa, Homo sapiens
  CDR3 for alpha chain variable domain of TCR clone 303942 (TRAV36/DV7, TRAJ52)
CAVAQRAGGTSYGKLTL

SEQ ID NO: 607884 - protein, 16 aa, Homo sapiens
  CDR3 for beta chain variable domain of TCR clone 303942 (TRBV20-1, TRBJ2-1)
CSARDLKQGMNNEQFF

SEQ ID NO: 607885 - protein, 14 aa, Homo sapiens
  CDR3 for alpha chain variable domain of TCR clone 303943 (TRAV1-2, TRAJ16)
CAVNRFSDVQKLLF

SEQ ID NO: 607886 - protein, 12 aa, Homo sapiens
  CDR3 for beta chain variable domain of TCR clone 303943 (TRBV27, TRBJ2-5)
CASSPTGETQYF

SEQ ID NO: 607887 - protein, 13 aa, Homo sapiens
  CDR3 for alpha chain variable domain of TCR clone 303944 (TRAV2, TRAJ16)
CAVERSDGRKLIF

SEQ ID NO: 607888 - protein, 15 aa, Homo sapiens
  CDR3 for beta chain variable domain of TCR clone 303944 (TRBV20-1, TRBJ2-5)
CSAIKGQGSQETQYF

SEQ ID NO: 607889 - protein, 14 aa, Homo sapiens
  CDR3 for alpha chain variable domain of TCR clone 303945 (TRAV9-2, TRAJ39)
CALYIYNAGNMLTF

SEQ ID NO: 607890 - protein, 15 aa, Homo sapiens
  CDR3 for beta chain variable domain of TCR clone 303945 (TRBV7-9, TRBJ2-2)
CASSFGQLNTGELFF

SEQ ID NO: 607891 - protein, 11 aa, Homo sapiens
  CDR3 for alpha chain variable domain of TCR clone 303946 (TRAV21, TRAJ34)
CAHYNTDKLIF

SEQ ID NO: 607892 - protein, 13 aa, Homo sapiens
  CDR3 for beta chain variable domain of TCR clone 303946 (TRBV20-1, TRBJ2-7)
CSADPGATYEEYF

SEQ ID NO: 607893 - protein, 15 aa, Homo sapiens
  CDR3 for alpha chain variable domain of TCR clone 303947 (TRAV34, TRAJ36)
CGAPSRLGGANNLFF

SEQ ID NO: 607894 - protein, 16 aa, Homo sapiens
  CDR3 for beta chain variable domain of TCR clone 303947 (TRBV4-3, TRBJ2-1)
CASSYRRLGSWDEQYF

SEQ ID NO: 607895 - protein, 16 aa, Homo sapiens
  CDR3 for alpha chain variable domain of TCR clone 303948 (TRAV1-2, TRAJ10)
CAVRGVLTGGGNKLTF

SEQ ID NO: 607896 - protein, 15 aa, Homo sapiens
  CDR3 for beta chain variable domain of TCR clone 303948 (TRBV7-2, TRBJ2-7)
CASSSRTGVPYEQYF

SEQ ID NO: 607897 - protein, 14 aa, Homo sapiens
  CDR3 for alpha chain variable domain of TCR clone 303949 (TRAV9-2, TRAJ39)
CALYIYNAGNMLTF

SEQ ID NO: 607898 - protein, 16 aa, Homo sapiens
  CDR3 for beta chain variable domain of TCR clone 303949 (TRBV12-4, TRBJ1-2)
CASSPTATGKTRGYTF

SEQ ID NO: 607899 - protein, 14 aa, Homo sapiens
  CDR3 for alpha chain variable domain of TCR clone 303950 (TRAV8-1, TRAJ5)
CAVRTDTGRRALTF

SEQ ID NO: 607900 - protein, 16 aa, Homo sapiens
  CDR3 for beta chain variable domain of TCR clone 303950 (TRBV25-1, TRBJ2-7)
CASSELTGGGIYEQYF

SEQ ID NO: 607901 - protein, 20 aa, Homo sapiens
  CDR3 for alpha chain variable domain of TCR clone 303951 (TRAV12-3, TRAJ52)
CAMTQSYQNAGGTSYGKLTF

SEQ ID NO: 607902 - protein, 16 aa, Homo sapiens
  CDR3 for beta chain variable domain of TCR clone 303951 (TRBV7-6, TRBJ2-2)
CASSPGLADYTGELFF

SEQ ID NO: 607903 - protein, 14 aa, Homo sapiens
  CDR3 for alpha chain variable domain of TCR clone 303952 (TRAV12-3, TRAJ6)
CAMSATGGSYIPTF

SEQ ID NO: 607904 - protein, 14 aa, Homo sapiens
  CDR3 for beta chain variable domain of TCR clone 303952 (TRBV25-1, TRBJ1-1)
CASTHLGGNTEAFF

SEQ ID NO: 607905 - protein, 15 aa, Homo sapiens
  CDR3 for alpha chain variable domain of TCR clone 303953 (TRAV8-6, TRAJ9)
CAVSDRETGGFKTIF

SEQ ID NO: 607906 - protein, 16 aa, Homo sapiens
  CDR3 for beta chain variable domain of TCR clone 303953 (TRBV19, TRBJ2-3)
CASSPEWDRGTDTQYF

SEQ ID NO: 607907 - protein, 14 aa, Homo sapiens
  CDR3 for alpha chain variable domain of TCR clone 303954 (TRAV12-3, TRAJ10)
SHLPLTGGGDKLTF

SEQ ID NO: 607908 - protein, 15 aa, Homo sapiens
  CDR3 for beta chain variable domain of TCR clone 303954 (TRBV20-1, TRBJ2-7)
CSARDRVSGMDEQYF

SEQ ID NO: 607909 - protein, 14 aa, Homo sapiens
  CDR3 for alpha chain variable domain of TCR clone 303955 (TRAV26-1, TRAJ30)
CIVRVANRDDKIIF

SEQ ID NO: 607910 - protein, 15 aa, Homo sapiens
  CDR3 for beta chain variable domain of TCR clone 303955 (TRBV7-2, TRBJ2-3)
CASSSTGLETDTQYF

SEQ ID NO: 607911 - protein, 17 aa, Homo sapiens
  CDR3 for alpha chain variable domain of TCR clone 303956 (TRAV13-1, TRAJ31)
CAPRDRLMLGDGSQLVV

SEQ ID NO: 607912 - protein, 12 aa, Homo sapiens
  CDR3 for beta chain variable domain of TCR clone 303956 (TRBV7-9, TRBJ2-7)
CASSLEGYEQYF

SEQ ID NO: 607913 - protein, 14 aa, Homo sapiens
  CDR3 for alpha chain variable domain of TCR clone 303957 (TRAV12-2, TRAJ39)
CAVKGGNAGNILTF

SEQ ID NO: 607914 - protein, 13 aa, Homo sapiens
  CDR3 for beta chain variable domain of TCR clone 303957 (TRBV12-4, TRBJ1-1)
CASSSGRGTEAFF

SEQ ID NO: 607915 - protein, 13 aa, Homo sapiens
  CDR3 for alpha chain variable domain of TCR clone 303958 (TRAV3, TRAJ27)
CAVRPLGAGKSTF

SEQ ID NO: 607916 - protein, 16 aa, Homo sapiens
  CDR3 for beta chain variable domain of TCR clone 303958 (TRBV27, TRBJ2-2)
CASSSSGVSNTGELFF

SEQ ID NO: 607917 - protein, 13 aa, Homo sapiens
  CDR3 for alpha chain variable domain of TCR clone 303959 (TRAV12-2, TRAJ47)
CAVFMEYGNKLVF

SEQ ID NO: 607918 - protein, 14 aa, Homo sapiens
  CDR3 for beta chain variable domain of TCR clone 303959 (TRBV4-1, TRBJ1-5)
CASSQGPTNQPQHS

SEQ ID NO: 607919 - protein, 15 aa, Homo sapiens
  CDR3 for alpha chain variable domain of TCR clone 303960 (TRAV12-1, TRAJ26)
CVVNSWVTMVRILSL

SEQ ID NO: 607920 - protein, 12 aa, Homo sapiens
  CDR3 for beta chain variable domain of TCR clone 303960 (TRBV14, TRBJ2-4)
CASSNLKSIQYF

SEQ ID NO: 607921 - protein, 13 aa, Homo sapiens
  CDR3 for alpha chain variable domain of TCR clone 303961 (TRAV26-2, TRAJ43)
CILRAVNNNDMRF

SEQ ID NO: 607922 - protein, 11 aa, Homo sapiens
  CDR3 for beta chain variable domain of TCR clone 303961 (TRBV29-1, TRBJ2-5)
CSEDRTGTKYF

SEQ ID NO: 607923 - protein, 14 aa, Homo sapiens
  CDR3 for alpha chain variable domain of TCR clone 303962 (TRAV1-2, TRAJ8)
CAVREDTGFQKLVF

SEQ ID NO: 607924 - protein, 14 aa, Homo sapiens
  CDR3 for beta chain variable domain of TCR clone 303962 (TRBV15, TRBJ2-3)
CATRSGTSTDTQYF

SEQ ID NO: 607925 - protein, 13 aa, Homo sapiens
  CDR3 for alpha chain variable domain of TCR clone 303963 (TRAV13-1, TRAJ39)
CSKYSNAGNMLTF

SEQ ID NO: 607926 - protein, 16 aa, Homo sapiens
  CDR3 for beta chain variable domain of TCR clone 303963 (TRBV7-2, TRBJ2-3)
CASSLVAQYSTDTQYF

SEQ ID NO: 607927 - protein, 12 aa, Homo sapiens
  CDR3 for alpha chain variable domain of TCR clone 303964 (TRAV21, TRAJ3)
CCFYSSASKIIF

SEQ ID NO: 607928 - protein, 11 aa, Homo sapiens
  CDR3 for beta chain variable domain of TCR clone 303964 (TRBV12-4, TRBJ2-3)
CASTTTDTQYF

SEQ ID NO: 607929 - protein, 11 aa, Homo sapiens
  CDR3 for alpha chain variable domain of TCR clone 303965 (TRAV12-1, TRAJ21)
CVVNNFNKFYF

SEQ ID NO: 607930 - protein, 13 aa, Homo sapiens
  CDR3 for beta chain variable domain of TCR clone 303965 (TRBV7-9, TRBJ1-2)
CASSLKQNYGYTF

SEQ ID NO: 607931 - protein, 14 aa, Homo sapiens
  CDR3 for alpha chain variable domain of TCR clone 303966 (TRAV23/DV6, TRAJ13)
CAAMYSGGYQKGTF

SEQ ID NO: 607932 - protein, 14 aa, Homo sapiens
  CDR3 for beta chain variable domain of TCR clone 303966 (TRBV7-9, TRBJ2-1)
CASSPRDSLYEQFF

SEQ ID NO: 607933 - protein, 13 aa, Homo sapiens
  CDR3 for alpha chain variable domain of TCR clone 303967 (TRAV30, TRAJ27)
CGTGNTNAGKSTF

SEQ ID NO: 607934 - protein, 14 aa, Homo sapiens
  CDR3 for beta chain variable domain of TCR clone 303967 (TRBV7-2, TRBJ1-6)
CASSLQGANSPLHF

SEQ ID NO: 607935 - protein, 14 aa, Homo sapiens
  CDR3 for alpha chain variable domain of TCR clone 303968 (TRAV2, TRAJ9)
CAVPLNTGGFKTIF

SEQ ID NO: 607936 - protein, 17 aa, Homo sapiens
  CDR3 for beta chain variable domain of TCR clone 303968 (TRBV20-1, TRBJ2-2)
CSASGSGQGGLTGELFF

SEQ ID NO: 607937 - protein, 14 aa, Homo sapiens
  CDR3 for alpha chain variable domain of TCR clone 303969 (TRAV3, TRAJ16)
CCERLKSDSQKLLF

SEQ ID NO: 607938 - protein, 15 aa, Homo sapiens
  CDR3 for beta chain variable domain of TCR clone 303969 (TRBV28, TRBJ2-7)
CASSPGGRGFYEQYF

SEQ ID NO: 607939 - protein, 15 aa, Homo sapiens
  CDR3 for alpha chain variable domain of TCR clone 303970 (TRAV4, TRAJ39)
CLVGPNNNAGNMLAF

SEQ ID NO: 607940 - protein, 13 aa, Homo sapiens
  CDR3 for beta chain variable domain of TCR clone 303970 (TRBV7-9, TRBJ1-2)
CASSLKQNYGYTF

SEQ ID NO: 607941 - protein, 15 aa, Homo sapiens
  CDR3 for alpha chain variable domain of TCR clone 303971 (TRAV27, TRAJ38)
CAARRNAGNNGKLIW

SEQ ID NO: 607942 - protein, 13 aa, Homo sapiens
  CDR3 for beta chain variable domain of TCR clone 303971 (TRBV10-3, TRBJ2-7)
CASKLAVNYEQYF

SEQ ID NO: 607943 - protein, 15 aa, Homo sapiens
  CDR3 for alpha chain variable domain of TCR clone 303972 (TRAV23/DV6, TRAJ17)
CAASGYGAAGNKLTF

SEQ ID NO: 607944 - protein, 14 aa, Homo sapiens
  CDR3 for beta chain variable domain of TCR clone 303972 (TRBV7-2, TRBJ1-5)
CASSRDGSNQPQHF

SEQ ID NO: 607945 - protein, 19 aa, Homo sapiens
  CDR3 for alpha chain variable domain of TCR clone 303973 (TRAV2, TRAJ20)
ILQVREADAAVYRDCKLSF

SEQ ID NO: 607946 - protein, 16 aa, Homo sapiens
  CDR3 for beta chain variable domain of TCR clone 303973 (TRBV20-1, TRBJ1-4)
CSSPGQGLLTNEKLFF

SEQ ID NO: 607947 - protein, 18 aa, Homo sapiens
  CDR3 for alpha chain variable domain of TCR clone 303974 (TRAV21, TRAJ52)
CAVRHSPAGGTSYGKLTF

SEQ ID NO: 607948 - protein, 17 aa, Homo sapiens
  CDR3 for beta chain variable domain of TCR clone 303974 (TRBV20-1, TRBJ2-2)
CSASGSGQGGLTGELFF

SEQ ID NO: 607949 - protein, 15 aa, Homo sapiens
  CDR3 for alpha chain variable domain of TCR clone 303975 (TRAV3, TRAJ47)
CAVRDIWEYGNKLVF

SEQ ID NO: 607950 - protein, 14 aa, Homo sapiens
  CDR3 for beta chain variable domain of TCR clone 303975 (TRBV13, TRBJ2-5)
CASSLERVGETQYF

SEQ ID NO: 607951 - protein, 14 aa, Homo sapiens
  CDR3 for alpha chain variable domain of TCR clone 303976 (TRAV1-2, TRAJ8)
CAVREDTGFHKLVF

SEQ ID NO: 607952 - protein, 18 aa, Homo sapiens
  CDR3 for beta chain variable domain of TCR clone 303976 (TRBV4-2, TRBJ2-7)
CASSPGRAGRSLSYEQYF

SEQ ID NO: 607953 - protein, 16 aa, Homo sapiens
  CDR3 for alpha chain variable domain of TCR clone 303977 (TRAV3, TRAJ10)
CAVRDMNAGGGNKLTF

SEQ ID NO: 607954 - protein, 15 aa, Homo sapiens
  CDR3 for beta chain variable domain of TCR clone 303977 (TRBV20-1, TRBJ2-7)
WSARDRVSGMDEQYF

SEQ ID NO: 607955 - protein, 12 aa, Homo sapiens
  CDR3 for alpha chain variable domain of TCR clone 303978 (TRAV27, TRAJ35)
CAGADFGNVLHC

SEQ ID NO: 607956 - protein, 13 aa, Homo sapiens
  CDR3 for beta chain variable domain of TCR clone 303978 (TRBV12-4, TRBJ1-2)
CASSLRQGKGYTF

SEQ ID NO: 607957 - protein, 15 aa, Homo sapiens
  CDR3 for alpha chain variable domain of TCR clone 303979 (TRAV14/DV4, TRAJ40)
CAMRGFTSGTYKYIF

SEQ ID NO: 607958 - protein, 16 aa, Homo sapiens
  CDR3 for beta chain variable domain of TCR clone 303979 (TRBV13, TRBJ2-2)
CASSTRTGEHTGELFF

SEQ ID NO: 607959 - protein, 10 aa, Homo sapiens
  CDR3 for alpha chain variable domain of TCR clone 303980 (TRAV26-1, TRAJ40)
CIAGTYKYIF

SEQ ID NO: 607960 - protein, 15 aa, Homo sapiens
  CDR3 for beta chain variable domain of TCR clone 303980 (TRBV19, TRBJ2-1)
CARSSPGVPLDEQFF

SEQ ID NO: 607961 - protein, 11 aa, Homo sapiens
  CDR3 for alpha chain variable domain of TCR clone 303981 (TRAV3, TRAJ21)
FAVGNSNKFYF

SEQ ID NO: 607962 - protein, 14 aa, Homo sapiens
  CDR3 for beta chain variable domain of TCR clone 303981 (TRBV29-1, TRBJ2-2)
CSGRGSGNTGELFF

SEQ ID NO: 607963 - protein, 15 aa, Homo sapiens
  CDR3 for alpha chain variable domain of TCR clone 303982 (TRAV2, TRAJ40)
CAVVTSGTYKYILEQ

SEQ ID NO: 607964 - protein, 14 aa, Homo sapiens
  CDR3 for beta chain variable domain of TCR clone 303982 (TRBV19, TRBJ2-1)
CASLTFVLSGEQFF

SEQ ID NO: 607965 - protein, 13 aa, Homo sapiens
  CDR3 for alpha chain variable domain of TCR clone 303983 (TRAV10, TRAJ40)
CVVSALGTYKYIF

SEQ ID NO: 607966 - protein, 14 aa, Homo sapiens
  CDR3 for beta chain variable domain of TCR clone 303983 (TRBV6-1, TRBJ2-1)
CASAKDGFYNEQFF

SEQ ID NO: 607967 - protein, 15 aa, Homo sapiens
  CDR3 for alpha chain variable domain of TCR clone 303984 (TRAV8-3, TRAJ15)
CAVGAHNQAGTALIF

SEQ ID NO: 607968 - protein, 14 aa, Homo sapiens
  CDR3 for beta chain variable domain of TCR clone 303984 (TRBV20-1, TRBJ2-1)
CSPNDEASYNEQFF

SEQ ID NO: 607969 - protein, 16 aa, Homo sapiens
  CDR3 for alpha chain variable domain of TCR clone 303985 (TRAV3, TRAJ10)
WAVRDMRAGGGNKLTF

SEQ ID NO: 607970 - protein, 13 aa, Homo sapiens
  CDR3 for beta chain variable domain of TCR clone 303985 (TRBV4-2, TRBJ1-1)
CASSQAGNTEAFF

SEQ ID NO: 607971 - protein, 16 aa, Homo sapiens
  CDR3 for alpha chain variable domain of TCR clone 303986 (TRAV16, TRAJ4)
CALSRMFSGGYNKLIF

SEQ ID NO: 607972 - protein, 15 aa, Homo sapiens
  CDR3 for beta chain variable domain of TCR clone 303986 (TRBV12-4, TRBJ1-5)
CQQPTGRGSNQPQHF

SEQ ID NO: 607973 - protein, 19 aa, Homo sapiens
  CDR3 for alpha chain variable domain of TCR clone 303987 (TRAV3, TRAJ6)
CAVRDRNPSRSGGSYIPPF

SEQ ID NO: 607974 - protein, 15 aa, Homo sapiens
  CDR3 for beta chain variable domain of TCR clone 303987 (TRBV18, TRBJ2-7)
CASSPTFMDSYEQYF

SEQ ID NO: 607975 - protein, 12 aa, Homo sapiens
  CDR3 for alpha chain variable domain of TCR clone 303988 (TRAV16, TRAJ49)
CALNEGGNQFNF

SEQ ID NO: 607976 - protein, 14 aa, Homo sapiens
  CDR3 for beta chain variable domain of TCR clone 303988 (TRBV7-9, TRBJ2-1)
CASRPTGLRNEQFF

SEQ ID NO: 607977 - protein, 13 aa, Homo sapiens
  CDR3 for alpha chain variable domain of TCR clone 303989 (TRAV12-3, TRAJ13)
CAMTSGGYQKATF

SEQ ID NO: 607978 - protein, 13 aa, Homo sapiens
  CDR3 for beta chain variable domain of TCR clone 303989 (TRBV7-9, TRBJ1-2)
CASSLKQNYGYTF

SEQ ID NO: 607979 - protein, 11 aa, Homo sapiens
  CDR3 for alpha chain variable domain of TCR clone 303990 (TRAV3, TRAJ21)
CAVGNFNKFYF

SEQ ID NO: 607980 - protein, 14 aa, Homo sapiens
  CDR3 for beta chain variable domain of TCR clone 303990 (TRBV2, TRBJ2-1)
CASGLSGSQGEQFF

SEQ ID NO: 607981 - protein, 16 aa, Homo sapiens
  CDR3 for alpha chain variable domain of TCR clone 303991 (TRAV17, TRAJ52)
CATGTIGGTSYGKLTF

SEQ ID NO: 607982 - protein, 12 aa, Homo sapiens
  CDR3 for beta chain variable domain of TCR clone 303991 (TRBV7-3, TRBJ2-1)
CASSFINNEQFF

SEQ ID NO: 607983 - protein, 13 aa, Homo sapiens
  CDR3 for alpha chain variable domain of TCR clone 303992 (TRAV41, TRAJ54)
CAVRIQGAQKLLF

SEQ ID NO: 607984 - protein, 14 aa, Homo sapiens
  CDR3 for beta chain variable domain of TCR clone 303992 (TRBV2, TRBJ2-1)
CASRTGSSYNEQFF

SEQ ID NO: 607985 - protein, 13 aa, Homo sapiens
  CDR3 for alpha chain variable domain of TCR clone 303993 (TRAV21, TRAJ27)
CAARPGTAGKSTF

SEQ ID NO: 607986 - protein, 14 aa, Homo sapiens
  CDR3 for beta chain variable domain of TCR clone 303993 (TRBV7-9, TRBJ2-5)
CASSLDTAQETQYF

SEQ ID NO: 607987 - protein, 11 aa, Homo sapiens
  CDR3 for alpha chain variable domain of TCR clone 303994 (TRAV17, TRAJ9)
CGFTGGFKTIF

SEQ ID NO: 607988 - protein, 13 aa, Homo sapiens
  CDR3 for beta chain variable domain of TCR clone 303994 (TRBV7-9, TRBJ2-2)
CQQLSSRPGELFF

SEQ ID NO: 607989 - protein, 12 aa, Homo sapiens
  CDR3 for alpha chain variable domain of TCR clone 303995 (TRAV1-2, TRAJ39)
TSLLYAGNMFTF

SEQ ID NO: 607990 - protein, 16 aa, Homo sapiens
  CDR3 for beta chain variable domain of TCR clone 303995 (TRBV11-2, TRBJ2-1)
CASSLLLLSSYNEQFF

SEQ ID NO: 607991 - protein, 15 aa, Homo sapiens
  CDR3 for alpha chain variable domain of TCR clone 303996 (TRAV26-1, TRAJ29)
CIVRVEGSGNTPLVF

SEQ ID NO: 607992 - protein, 15 aa, Homo sapiens
  CDR3 for beta chain variable domain of TCR clone 303996 (TRBV7-2, TRBJ2-1)
CASSSRTSREDEQFF

SEQ ID NO: 607993 - protein, 15 aa, Homo sapiens
  CDR3 for alpha chain variable domain of TCR clone 303997 (TRAV26-1, TRAJ32)
CIVRSYGGATNKLIF

SEQ ID NO: 607994 - protein, 16 aa, Homo sapiens
  CDR3 for beta chain variable domain of TCR clone 303997 (TRBV7-9, TRBJ2-1)
CASSDVAGGSYNEQFF

SEQ ID NO: 607995 - protein, 15 aa, Homo sapiens
  CDR3 for alpha chain variable domain of TCR clone 303998 (TRAV12-3, TRAJ27)
CAMRAYNTNAGKSTF

SEQ ID NO: 607996 - protein, 12 aa, Homo sapiens
  CDR3 for beta chain variable domain of TCR clone 303998 (TRBV7-9, TRBJ2-7)
CASSIKREEQYF

SEQ ID NO: 607997 - protein, 14 aa, Homo sapiens
  CDR3 for alpha chain variable domain of TCR clone 303999 (TRAV16, TRAJ40)
CALHESYYLRNLQI

SEQ ID NO: 607998 - protein, 13 aa, Homo sapiens
  CDR3 for beta chain variable domain of TCR clone 303999 (TRBV5-7, TRBJ1-2)
CASSLGTGYGYTF

SEQ ID NO: 607999 - protein, 12 aa, Homo sapiens
  CDR3 for alpha chain variable domain of TCR clone 304000 (TRAV2, TRAJ9)
CAVGAGGFKTIF

SEQ ID NO: 608000 - protein, 19 aa, Homo sapiens
  CDR3 for beta chain variable domain of TCR clone 304000 (TRBV7-9, TRBJ2-6)
CASSLESATVLPGANVLSF

SEQ ID NO: 608001 - protein, 14 aa, Homo sapiens
  CDR3 for alpha chain variable domain of TCR clone 304001 (TRAV1-2, TRAJ8)
CAVREDTGFQKLVF

SEQ ID NO: 608002 - protein, 15 aa, Homo sapiens
  CDR3 for beta chain variable domain of TCR clone 304001 (TRBV7-3, TRBJ2-2)
CACSETGQGTGELFF

SEQ ID NO: 608003 - protein, 15 aa, Homo sapiens
  CDR3 for alpha chain variable domain of TCR clone 304002 (TRAV4, TRAJ10)
CLVGDEEGGGNKLTF

SEQ ID NO: 608004 - protein, 15 aa, Homo sapiens
  CDR3 for beta chain variable domain of TCR clone 304002 (TRBV7-2, TRBJ2-7)
CASSLTGQGTYERYF

SEQ ID NO: 608005 - protein, 16 aa, Homo sapiens
  CDR3 for alpha chain variable domain of TCR clone 304003 (TRAV13-1, TRAJ37)
CAASSLGSSHTGNLIF

SEQ ID NO: 608006 - protein, 12 aa, Homo sapiens
  CDR3 for beta chain variable domain of TCR clone 304003 (TRBV6-1, TRBJ2-5)
CASSEGRETQYF

SEQ ID NO: 608007 - protein, 13 aa, Homo sapiens
  CDR3 for alpha chain variable domain of TCR clone 304004 (TRAV12-1, TRAJ33)
CGDAPDSNYQLIW

SEQ ID NO: 608008 - protein, 14 aa, Homo sapiens
  CDR3 for beta chain variable domain of TCR clone 304004 (TRBV25-1, TRBJ1-1)
CASTHLGGNTEAFF

SEQ ID NO: 608009 - protein, 14 aa, Homo sapiens
  CDR3 for alpha chain variable domain of TCR clone 304005 (TRAV29/DV5, TRAJ36)
CAARRKTGATNLFF

SEQ ID NO: 608010 - protein, 14 aa, Homo sapiens
  CDR3 for beta chain variable domain of TCR clone 304005 (TRBV9, TRBJ1-2)
CASSVSGTLYGYTF

SEQ ID NO: 608011 - protein, 12 aa, Homo sapiens
  CDR3 for alpha chain variable domain of TCR clone 304006 (TRAV13-1, TRAJ17)
CAARTAGNKLTF

SEQ ID NO: 608012 - protein, 14 aa, Homo sapiens
  CDR3 for beta chain variable domain of TCR clone 304006 (TRBV7-9, TRBJ1-2)
CASSLGPPQWPATF

SEQ ID NO: 608013 - protein, 15 aa, Homo sapiens
  CDR3 for alpha chain variable domain of TCR clone 304007 (TRAV17, TRAJ28)
CATVDSGAGSYQLTF

SEQ ID NO: 608014 - protein, 13 aa, Homo sapiens
  CDR3 for beta chain variable domain of TCR clone 304007 (TRBV5-4, TRBJ2-5)
FASSRQEGETQYF

SEQ ID NO: 608015 - protein, 14 aa, Homo sapiens
  CDR3 for alpha chain variable domain of TCR clone 304008 (TRAV23/DV6, TRAJ13)
CAAMNSGGYQKVTF

SEQ ID NO: 608016 - protein, 16 aa, Homo sapiens
  CDR3 for beta chain variable domain of TCR clone 304008 (TRBV9, TRBJ2-1)
CASSALGGIGNNEQFF

SEQ ID NO: 608017 - protein, 13 aa, Homo sapiens
  CDR3 for alpha chain variable domain of TCR clone 304009 (TRAV21, TRAJ26)
CAVLDDYGQNFVF

SEQ ID NO: 608018 - protein, 16 aa, Homo sapiens
  CDR3 for beta chain variable domain of TCR clone 304009 (TRBV29-1, TRBJ2-2)
CSVETRASGNTGELFF

SEQ ID NO: 608019 - protein, 17 aa, Homo sapiens
  CDR3 for alpha chain variable domain of TCR clone 304010 (TRAV36/DV7, TRAJ52)
CAVAQRAGGTSYGKLTF

SEQ ID NO: 608020 - protein, 16 aa, Homo sapiens
  CDR3 for beta chain variable domain of TCR clone 304010 (TRBV6-1, TRBJ1-2)
CASSGAWQGRSHGYTF

SEQ ID NO: 608021 - protein, 13 aa, Homo sapiens
  CDR3 for alpha chain variable domain of TCR clone 304011 (TRAV12-1, TRAJ40)
CVVPTSGTYKYIF

SEQ ID NO: 608022 - protein, 18 aa, Homo sapiens
  CDR3 for beta chain variable domain of TCR clone 304011 (TRBV7-6, TRBJ2-1)
CASSPRTSGLSSYNEQFF

SEQ ID NO: 608023 - protein, 16 aa, Homo sapiens
  CDR3 for alpha chain variable domain of TCR clone 304012 (TRAV12-2, TRAJ10)
CAVNRVLTGGGNKLTF

SEQ ID NO: 608024 - protein, 13 aa, Homo sapiens
  CDR3 for beta chain variable domain of TCR clone 304012 (TRBV28, TRBJ2-2)
CASIRESTGELFF

SEQ ID NO: 608025 - protein, 13 aa, Homo sapiens
  CDR3 for alpha chain variable domain of TCR clone 304013 (TRAV17, TRAJ9)
CATDYTGGFKTIF

SEQ ID NO: 608026 - protein, 15 aa, Homo sapiens
  CDR3 for beta chain variable domain of TCR clone 304013 (TRBV5-1, TRBJ2-2)
CASSSQGGNTGELFF

SEQ ID NO: 608027 - protein, 15 aa, Homo sapiens
  CDR3 for alpha chain variable domain of TCR clone 304014 (TRAV13-1, TRAJ32)
CAASIYGGATYKLIF

SEQ ID NO: 608028 - protein, 14 aa, Homo sapiens
  CDR3 for beta chain variable domain of TCR clone 304014 (TRBV7-9, TRBJ2-1)
CASSLASGSNEQFF

SEQ ID NO: 608029 - protein, 14 aa, Homo sapiens
  CDR3 for alpha chain variable domain of TCR clone 304015 (TRAV38-1, TRAJ45)
CASHSGGGADGLTF

SEQ ID NO: 608030 - protein, 15 aa, Homo sapiens
  CDR3 for beta chain variable domain of TCR clone 304015 (TRBV20-1, TRBJ2-7)
CSAESGTSGAYEQYF

SEQ ID NO: 608031 - protein, 14 aa, Homo sapiens
  CDR3 for alpha chain variable domain of TCR clone 304016 (TRAV1-2, TRAJ16)
CAVNRFSDVQKLLF

SEQ ID NO: 608032 - protein, 15 aa, Homo sapiens
  CDR3 for beta chain variable domain of TCR clone 304016 (TRBV5-1, TRBJ2-1)
CASSPPRAPYNEQFF

SEQ ID NO: 608033 - protein, 13 aa, Homo sapiens
  CDR3 for alpha chain variable domain of TCR clone 304017 (TRAV21, TRAJ27)
CAARPGHAGKSTF

SEQ ID NO: 608034 - protein, 14 aa, Homo sapiens
  CDR3 for beta chain variable domain of TCR clone 304017 (TRBV7-7, TRBJ2-3)
CASSLGTVTDTQYF

SEQ ID NO: 608035 - protein, 14 aa, Homo sapiens
  CDR3 for alpha chain variable domain of TCR clone 304018 (TRAV1-2, TRAJ16)
CAVNRFSDGQKLLF

SEQ ID NO: 608036 - protein, 12 aa, Homo sapiens
  CDR3 for beta chain variable domain of TCR clone 304018 (TRBV19, TRBJ1-4)
CASKDWPGGLFF

SEQ ID NO: 608037 - protein, 15 aa, Homo sapiens
  CDR3 for alpha chain variable domain of TCR clone 304019 (TRAV17, TRAJ13)
CATDAGSGGYQKVTF

SEQ ID NO: 608038 - protein, 17 aa, Homo sapiens
  CDR3 for beta chain variable domain of TCR clone 304019 (TRBV11-2, TRBJ2-1)
CASSLYPPGVKYSEQFF

SEQ ID NO: 608039 - protein, 14 aa, Homo sapiens
  CDR3 for alpha chain variable domain of TCR clone 304020 (TRAV4, TRAJ26)
CLVGPHNYVQNLVF

SEQ ID NO: 608040 - protein, 17 aa, Homo sapiens
  CDR3 for beta chain variable domain of TCR clone 304020 (TRBV24-1, TRBJ2-1)
CATSDVSTSGTYNEQFF

SEQ ID NO: 608041 - protein, 15 aa, Homo sapiens
  CDR3 for alpha chain variable domain of TCR clone 304021 (TRAV12-2, TRAJ8)
CAVREENTGFQKLVC

SEQ ID NO: 608042 - protein, 15 aa, Homo sapiens
  CDR3 for beta chain variable domain of TCR clone 304021 (TRBV28, TRBJ2-4)
CAAGSGTLLMGIQYF

SEQ ID NO: 608043 - protein, 13 aa, Homo sapiens
  CDR3 for alpha chain variable domain of TCR clone 304022 (TRAV3, TRAJ20)
CAVRDTPRYKLSF

SEQ ID NO: 608044 - protein, 16 aa, Homo sapiens
  CDR3 for beta chain variable domain of TCR clone 304022 (TRBV20-1, TRBJ2-7)
CSASAPGLALSYEQYF

SEQ ID NO: 608045 - protein, 14 aa, Homo sapiens
  CDR3 for alpha chain variable domain of TCR clone 304023 (TRAV4, TRAJ6)
CLGGEAGGSYIPPF

SEQ ID NO: 608046 - protein, 16 aa, Homo sapiens
  CDR3 for beta chain variable domain of TCR clone 304023 (TRBV7-6, TRBJ2-1)
CASSLNEGPSYNEQFF

SEQ ID NO: 608047 - protein, 17 aa, Homo sapiens
  CDR3 for alpha chain variable domain of TCR clone 304024 (TRAV3, TRAJ42)
CAVRDRDYGGSQGNLIF

SEQ ID NO: 608048 - protein, 13 aa, Homo sapiens
  CDR3 for beta chain variable domain of TCR clone 304024 (TRBV10-3, TRBJ2-7)
CASKLAVNYEQYL

SEQ ID NO: 608049 - protein, 16 aa, Homo sapiens
  CDR3 for alpha chain variable domain of TCR clone 304025 (TRAV3, TRAJ18)
CAVRDGRGSTLGGLNF

SEQ ID NO: 608050 - protein, 15 aa, Homo sapiens
  CDR3 for beta chain variable domain of TCR clone 304025 (TRBV7-9, TRBJ1-6)
CASSSPGRGNSPLHF

SEQ ID NO: 608051 - protein, 12 aa, Homo sapiens
  CDR3 for alpha chain variable domain of TCR clone 304026 (TRAV21, TRAJ56)
CAVGVNRSKLTF

SEQ ID NO: 608052 - protein, 12 aa, Homo sapiens
  CDR3 for beta chain variable domain of TCR clone 304026 (TRBV11-2, TRBJ2-2)
CASSLGGGELFF

SEQ ID NO: 608053 - protein, 10 aa, Homo sapiens
  CDR3 for alpha chain variable domain of TCR clone 304027 (TRAV12-1, TRAJ37)
ARGNTGKLIF

SEQ ID NO: 608054 - protein, 15 aa, Homo sapiens
  CDR3 for beta chain variable domain of TCR clone 304027 (TRBV5-1, TRBJ1-1)
CASSSTTGTNTEAFF

SEQ ID NO: 608055 - protein, 12 aa, Homo sapiens
  CDR3 for alpha chain variable domain of TCR clone 304028 (TRAV21, TRAJ12)
CAVLDSSYKLIF

SEQ ID NO: 608056 - protein, 16 aa, Homo sapiens
  CDR3 for beta chain variable domain of TCR clone 304028 (TRBV2, TRBJ2-4)
CASSKGTGMDKNIQYF

SEQ ID NO: 608057 - protein, 11 aa, Homo sapiens
  CDR3 for alpha chain variable domain of TCR clone 304029 (TRAV2, TRAJ13)
CASGGYQKVTF

SEQ ID NO: 608058 - protein, 12 aa, Homo sapiens
  CDR3 for beta chain variable domain of TCR clone 304029 (TRBV19, TRBJ1-4)
CASKDWPGGLFF

SEQ ID NO: 608059 - protein, 15 aa, Homo sapiens
  CDR3 for alpha chain variable domain of TCR clone 304030 (TRAV17, TRAJ42)
CATPYYGGSQGNLIF

SEQ ID NO: 608060 - protein, 13 aa, Homo sapiens
  CDR3 for beta chain variable domain of TCR clone 304030 (TRBV19, TRBJ2-7)
CASSPRQSYEQYF

SEQ ID NO: 608061 - protein, 13 aa, Homo sapiens
  CDR3 for alpha chain variable domain of TCR clone 304031 (TRAV6, TRAJ20)
CALAVSNDYKLTF

SEQ ID NO: 608062 - protein, 16 aa, Homo sapiens
  CDR3 for beta chain variable domain of TCR clone 304031 (TRBV7-9, TRBJ2-1)
CASSDVAGGSYNEQFF

SEQ ID NO: 608063 - protein, 18 aa, Homo sapiens
  CDR3 for alpha chain variable domain of TCR clone 304032 (TRAV26-1, TRAJ23)
CIVRVGLAVWNQGGKLIF

SEQ ID NO: 608064 - protein, 16 aa, Homo sapiens
  CDR3 for beta chain variable domain of TCR clone 304032 (TRBV12-4, TRBJ2-5)
CASSFFVRGRQETQYV

SEQ ID NO: 608065 - protein, 13 aa, Homo sapiens
  CDR3 for alpha chain variable domain of TCR clone 304033 (TRAV36/DV7, TRAJ54)
CAVLIQGAQKLVF

SEQ ID NO: 608066 - protein, 15 aa, Homo sapiens
  CDR3 for beta chain variable domain of TCR clone 304033 (TRBV29-1, TRBJ2-4)
SAWGRGPKTFSTSAP

SEQ ID NO: 608067 - protein, 12 aa, Homo sapiens
  CDR3 for alpha chain variable domain of TCR clone 304034 (TRAV25, TRAJ35)
CAGIGLGNVLHF

SEQ ID NO: 608068 - protein, 15 aa, Homo sapiens
  CDR3 for beta chain variable domain of TCR clone 304034 (TRBV20-1, TRBJ2-5)
CSAPPRTGFGETQYF

SEQ ID NO: 608069 - protein, 15 aa, Homo sapiens
  CDR3 for alpha chain variable domain of TCR clone 304035 (TRAV17, TRAJ52)
CVTEVGGTSYGKLTF

SEQ ID NO: 608070 - protein, 14 aa, Homo sapiens
  CDR3 for beta chain variable domain of TCR clone 304035 (TRBV28, TRBJ1-5)
CASSLGVLVKPQHF

SEQ ID NO: 608071 - protein, 14 aa, Homo sapiens
  CDR3 for alpha chain variable domain of TCR clone 304036 (TRAV26-1, TRAJ38)
CIADNAGNNRKLLW

SEQ ID NO: 608072 - protein, 15 aa, Homo sapiens
  CDR3 for beta chain variable domain of TCR clone 304036 (TRBV11-2, TRBJ2-1)
CASSLGPDSYNEQFF

SEQ ID NO: 608073 - protein, 14 aa, Homo sapiens
  CDR3 for alpha chain variable domain of TCR clone 304037 (TRAV26-1, TRAJ48)
CIVRVGFGNEKLTF

SEQ ID NO: 608074 - protein, 15 aa, Homo sapiens
  CDR3 for beta chain variable domain of TCR clone 304037 (TRBV20-1, TRBJ1-1)
CSASRGVTGNTEAFF

SEQ ID NO: 608075 - protein, 14 aa, Homo sapiens
  CDR3 for alpha chain variable domain of TCR clone 304038 (TRAV2, TRAJ9)
CAVEDRSGGFKTIF

SEQ ID NO: 608076 - protein, 13 aa, Homo sapiens
  CDR3 for beta chain variable domain of TCR clone 304038 (TRBV2, TRBJ2-7)
CANGLAGDYEQYF

SEQ ID NO: 608077 - protein, 14 aa, Homo sapiens
  CDR3 for alpha chain variable domain of TCR clone 304039 (TRAV26-1, TRAJ38)
CIADNAGNNRKLIW

SEQ ID NO: 608078 - protein, 13 aa, Homo sapiens
  CDR3 for beta chain variable domain of TCR clone 304039 (TRBV4-1, TRBJ2-7)
CASSQGQAYEQYV

SEQ ID NO: 608079 - protein, 11 aa, Homo sapiens
  CDR3 for alpha chain variable domain of TCR clone 304040 (TRAV12-1, TRAJ30)
CVVSGQDKIIF

SEQ ID NO: 608080 - protein, 15 aa, Homo sapiens
  CDR3 for beta chain variable domain of TCR clone 304040 (TRBV27, TRBJ2-2)
CTSVPANYSPGSCFF

SEQ ID NO: 608081 - protein, 16 aa, Homo sapiens
  CDR3 for alpha chain variable domain of TCR clone 304041 (TRAV16, TRAJ52)
CALSGVGGTSYGELTF

SEQ ID NO: 608082 - protein, 14 aa, Homo sapiens
  CDR3 for beta chain variable domain of TCR clone 304041 (TRBV19, TRBJ1-2)
CASSLQGLAYGYTF

SEQ ID NO: 608083 - protein, 15 aa, Homo sapiens
  CDR3 for alpha chain variable domain of TCR clone 304042 (TRAV17, TRAJ54)
CATEKLGQGAQKLVF

SEQ ID NO: 608084 - protein, 14 aa, Homo sapiens
  CDR3 for beta chain variable domain of TCR clone 304042 (TRBV11-2, TRBJ2-5)
CASSRTGGIETQYF

SEQ ID NO: 608085 - protein, 14 aa, Homo sapiens
  CDR3 for alpha chain variable domain of TCR clone 304043 (TRAV4, TRAJ30)
CLVGDMNRDDKIIL

SEQ ID NO: 608086 - protein, 15 aa, Homo sapiens
  CDR3 for beta chain variable domain of TCR clone 304043 (TRBV7-2, TRBJ2-7)
CASSLSSGRTYEQYF

SEQ ID NO: 608087 - protein, 18 aa, Homo sapiens
  CDR3 for alpha chain variable domain of TCR clone 304044 (TRAV17, TRAJ45)
CATSLDLYSGGGADGLTF

SEQ ID NO: 608088 - protein, 14 aa, Homo sapiens
  CDR3 for beta chain variable domain of TCR clone 304044 (TRBV25-1, TRBJ1-1)
CASTHLGGNTEAFF

SEQ ID NO: 608089 - protein, 14 aa, Homo sapiens
  CDR3 for alpha chain variable domain of TCR clone 304045 (TRAV23/DV6, TRAJ4)
CAANLSGGYNKLIF

SEQ ID NO: 608090 - protein, 17 aa, Homo sapiens
  CDR3 for beta chain variable domain of TCR clone 304045 (TRBV4-1, TRBJ1-3)
CASSPQRGVRFGNTIYF

SEQ ID NO: 608091 - protein, 13 aa, Homo sapiens
  CDR3 for alpha chain variable domain of TCR clone 304046 (TRAV16, TRAJ11)
CALTQSGYSTLTF

SEQ ID NO: 608092 - protein, 14 aa, Homo sapiens
  CDR3 for beta chain variable domain of TCR clone 304046 (TRBV19, TRBJ2-7)
CDSSTTRSSYEQYF

SEQ ID NO: 608093 - protein, 15 aa, Homo sapiens
  CDR3 for alpha chain variable domain of TCR clone 304047 (TRAV8-3, TRAJ43)
LSTSVLGAGNNDMRF

SEQ ID NO: 608094 - protein, 14 aa, Homo sapiens
  CDR3 for beta chain variable domain of TCR clone 304047 (TRBV4-2, TRBJ1-5)
CASSRDRGNQPQHF

SEQ ID NO: 608095 - protein, 14 aa, Homo sapiens
  CDR3 for alpha chain variable domain of TCR clone 304048 (TRAV20, TRAJ22)
CAVALGVSARQLTF

SEQ ID NO: 608096 - protein, 15 aa, Homo sapiens
  CDR3 for beta chain variable domain of TCR clone 304048 (TRBV7-2, TRBJ1-1)
CASSFAGDRDTEAFF

SEQ ID NO: 608097 - protein, 17 aa, Homo sapiens
  CDR3 for alpha chain variable domain of TCR clone 304049 (TRAV26-1, TRAJ37)
CIVRVITVSRNKGRLIF

SEQ ID NO: 608098 - protein, 14 aa, Homo sapiens
  CDR3 for beta chain variable domain of TCR clone 304049 (TRBV19, TRBJ2-1)
CASPTFVLSGEQFF

SEQ ID NO: 608099 - protein, 16 aa, Homo sapiens
  CDR3 for alpha chain variable domain of TCR clone 304050 (TRAV13-1, TRAJ3)
CAATGVQQCFPDNLWI

SEQ ID NO: 608100 - protein, 16 aa, Homo sapiens
  CDR3 for beta chain variable domain of TCR clone 304050 (TRBV7-3, TRBJ2-2)
CASSLKRGTLSGELFF

SEQ ID NO: 608101 - protein, 17 aa, Homo sapiens
  CDR3 for alpha chain variable domain of TCR clone 304051 (TRAV3, TRAJ42)
CAVRDRDYGGSQGNLIF

SEQ ID NO: 608102 - protein, 13 aa, Homo sapiens
  CDR3 for beta chain variable domain of TCR clone 304051 (TRBV11-2, TRBJ2-5)
CASSSTGEETQYF

SEQ ID NO: 608103 - protein, 12 aa, Homo sapiens
  CDR3 for alpha chain variable domain of TCR clone 304052 (TRAV21, TRAJ3)
CCFYSSASKIIF

SEQ ID NO: 608104 - protein, 14 aa, Homo sapiens
  CDR3 for beta chain variable domain of TCR clone 304052 (TRBV25-1, TRBJ1-1)
CASTHLGGNTEAFF

SEQ ID NO: 608105 - protein, 13 aa, Homo sapiens
  CDR3 for alpha chain variable domain of TCR clone 304053 (TRAV12-1, TRAJ7)
CVVKMRGNNRLAF

SEQ ID NO: 608106 - protein, 16 aa, Homo sapiens
  CDR3 for beta chain variable domain of TCR clone 304053 (TRBV20-1, TRBJ1-4)
CSAPGQGLLTNEKLFF

SEQ ID NO: 608107 - protein, 14 aa, Homo sapiens
  CDR3 for alpha chain variable domain of TCR clone 304054 (TRAV1-2, TRAJ16)
CAVNRFSDGQKMLF

SEQ ID NO: 608108 - protein, 13 aa, Homo sapiens
  CDR3 for beta chain variable domain of TCR clone 304054 (TRBV29-1, TRBJ1-1)
CSVGDSRNTEAFF

SEQ ID NO: 608109 - protein, 12 aa, Homo sapiens
  CDR3 for alpha chain variable domain of TCR clone 304055 (TRAV27, TRAJ35)
CAGADFGNVLHC

SEQ ID NO: 608110 - protein, 16 aa, Homo sapiens
  CDR3 for beta chain variable domain of TCR clone 304055 (TRBV6-1, TRBJ2-1)
CASISRPGSSYNEQFF

SEQ ID NO: 608111 - protein, 15 aa, Homo sapiens
  CDR3 for alpha chain variable domain of TCR clone 304056 (TRAV27, TRAJ38)
CAARRNAGNNRKLIW

SEQ ID NO: 608112 - protein, 13 aa, Homo sapiens
  CDR3 for beta chain variable domain of TCR clone 304056 (TRBV7-3, TRBJ2-1)
CASSLDSYNVQFF

SEQ ID NO: 608113 - protein, 15 aa, Homo sapiens
  CDR3 for alpha chain variable domain of TCR clone 304057 (TRAV8-4, TRAJ3)
CAVTGENLVQQCFQD

SEQ ID NO: 608114 - protein, 16 aa, Homo sapiens
  CDR3 for beta chain variable domain of TCR clone 304057 (TRBV12-5, TRBJ2-5)
CASGPRTSGNQETQYF

SEQ ID NO: 608115 - protein, 13 aa, Homo sapiens
  CDR3 for alpha chain variable domain of TCR clone 304058 (TRAV35, TRAJ39)
VLAPNNAGNMPTF

SEQ ID NO: 608116 - protein, 13 aa, Homo sapiens
  CDR3 for beta chain variable domain of TCR clone 304058 (TRBV19, TRBJ1-3)
CASRVSLGNTIYF

SEQ ID NO: 608117 - protein, 13 aa, Homo sapiens
  CDR3 for alpha chain variable domain of TCR clone 304059 (TRAV13-2, TRAJ15)
CAEKNQAGTALIF

SEQ ID NO: 608118 - protein, 13 aa, Homo sapiens
  CDR3 for beta chain variable domain of TCR clone 304059 (TRBV7-3, TRBJ1-1)
CASSQDWGAEAFF

SEQ ID NO: 608119 - protein, 13 aa, Homo sapiens
  CDR3 for alpha chain variable domain of TCR clone 304060 (TRAV20, TRAJ20)
CAVRWVRDYQLSF

SEQ ID NO: 608120 - protein, 14 aa, Homo sapiens
  CDR3 for beta chain variable domain of TCR clone 304060 (TRBV19, TRBJ2-2)
CASTVTANTGELFF

SEQ ID NO: 608121 - protein, 10 aa, Homo sapiens
  CDR3 for alpha chain variable domain of TCR clone 304061 (TRAV29/DV5, TRAJ48)
CAAGGEKLTF

SEQ ID NO: 608122 - protein, 13 aa, Homo sapiens
  CDR3 for beta chain variable domain of TCR clone 304061 (TRBV2, TRBJ2-7)
CASSVGGSGEQYF

SEQ ID NO: 608123 - protein, 16 aa, Homo sapiens
  CDR3 for alpha chain variable domain of TCR clone 304062 (TRAV3, TRAJ10)
CAVRDMRAGGGDKLTF

SEQ ID NO: 608124 - protein, 17 aa, Homo sapiens
  CDR3 for beta chain variable domain of TCR clone 304062 (TRBV11-2, TRBJ2-1)
CASSLYPPGVEYNEQFF

SEQ ID NO: 608125 - protein, 15 aa, Homo sapiens
  CDR3 for alpha chain variable domain of TCR clone 304063 (TRAV8-3, TRAJ40)
CAAPSLGSGTYRYIF

SEQ ID NO: 608126 - protein, 16 aa, Homo sapiens
  CDR3 for beta chain variable domain of TCR clone 304063 (TRBV7-3, TRBJ2-3)
CASSVSGYRPGDTQYF

SEQ ID NO: 608127 - protein, 14 aa, Homo sapiens
  CDR3 for alpha chain variable domain of TCR clone 304064 (TRAV35, TRAJ22)
CAGHLSGSARQLTF

SEQ ID NO: 608128 - protein, 15 aa, Homo sapiens
  CDR3 for beta chain variable domain of TCR clone 304064 (TRBV7-3, TRBJ1-6)
CASSLGRGAGSALNF

SEQ ID NO: 608129 - protein, 15 aa, Homo sapiens
  CDR3 for alpha chain variable domain of TCR clone 304065 (TRAV3, TRAJ9)
CPVRARNTEGFKTIF

SEQ ID NO: 608130 - protein, 12 aa, Homo sapiens
  CDR3 for beta chain variable domain of TCR clone 304065 (TRBV11-2, TRBJ2-7)
CASSLPTYEQYF

SEQ ID NO: 608131 - protein, 12 aa, Homo sapiens
  CDR3 for alpha chain variable domain of TCR clone 304066 (TRAV12-3, TRAJ17)
CAMTLTGDKLIF

SEQ ID NO: 608132 - protein, 15 aa, Homo sapiens
  CDR3 for beta chain variable domain of TCR clone 304066 (TRBV20-1, TRBJ2-7)
CSARDRVSGMDEQYF

SEQ ID NO: 608133 - protein, 10 aa, Homo sapiens
  CDR3 for alpha chain variable domain of TCR clone 304067 (TRAV1-2, TRAJ20)
CAVTDYKLSF

SEQ ID NO: 608134 - protein, 13 aa, Homo sapiens
  CDR3 for beta chain variable domain of TCR clone 304067 (TRBV10-3, TRBJ2-7)
CASKLAVNYEQYF

SEQ ID NO: 608135 - protein, 15 aa, Homo sapiens
  CDR3 for alpha chain variable domain of TCR clone 304068 (TRAV29/DV5, TRAJ29)
CSASERSPGNTPLVF

SEQ ID NO: 608136 - protein, 17 aa, Homo sapiens
  CDR3 for beta chain variable domain of TCR clone 304068 (TRBV4-1, TRBJ1-4)
CASSQEGPRGVEEKLFF

SEQ ID NO: 608137 - protein, 12 aa, Homo sapiens
  CDR3 for alpha chain variable domain of TCR clone 304069 (TRAV12-2, TRAJ9)
CAVNTGGFKTIF

SEQ ID NO: 608138 - protein, 15 aa, Homo sapiens
  CDR3 for beta chain variable domain of TCR clone 304069 (TRBV19, TRBJ2-5)
CASSIARARGETQYF

SEQ ID NO: 608139 - protein, 13 aa, Homo sapiens
  CDR3 for alpha chain variable domain of TCR clone 304070 (TRAV8-3, TRAJ28)
CAVGAVGSYQLTF

SEQ ID NO: 608140 - protein, 13 aa, Homo sapiens
  CDR3 for beta chain variable domain of TCR clone 304070 (TRBV11-2, TRBJ2-5)
CASSSTGEETQYF

SEQ ID NO: 608141 - protein, 15 aa, Homo sapiens
  CDR3 for alpha chain variable domain of TCR clone 304071 (TRAV21, TRAJ53)
CATLNSGGSNFKLTF

SEQ ID NO: 608142 - protein, 15 aa, Homo sapiens
  CDR3 for beta chain variable domain of TCR clone 304071 (TRBV18, TRBJ2-1)
CASSPPSASYNEQFF

SEQ ID NO: 608143 - protein, 14 aa, Homo sapiens
  CDR3 for alpha chain variable domain of TCR clone 304072 (TRAV38-1, TRAJ54)
CAFLSPSGAQKLVL

SEQ ID NO: 608144 - protein, 16 aa, Homo sapiens
  CDR3 for beta chain variable domain of TCR clone 304072 (TRBV28, TRBJ2-1)
CASSLGGSGSYNEQFF

SEQ ID NO: 608145 - protein, 18 aa, Homo sapiens
  CDR3 for alpha chain variable domain of TCR clone 304073 (TRAV21, TRAJ45)
CCGGPQWGSGGGADGLTF

SEQ ID NO: 608146 - protein, 12 aa, Homo sapiens
  CDR3 for beta chain variable domain of TCR clone 304073 (TRBV29-1, TRBJ1-3)
CSTRDSGNTIYF

SEQ ID NO: 608147 - protein, 14 aa, Homo sapiens
  CDR3 for alpha chain variable domain of TCR clone 304074 (TRAV38-2/DV8, TRAJ54)
AAMYQIQGTQKLVF

SEQ ID NO: 608148 - protein, 15 aa, Homo sapiens
  CDR3 for beta chain variable domain of TCR clone 304074 (TRBV28, TRBJ2-3)
CASSPDRQGANTQYF

SEQ ID NO: 608149 - protein, 16 aa, Homo sapiens
  CDR3 for alpha chain variable domain of TCR clone 304075 (TRAV26-1, TRAJ23)
CIVRPRFYNQGGKLIF

SEQ ID NO: 608150 - protein, 13 aa, Homo sapiens
  CDR3 for beta chain variable domain of TCR clone 304075 (TRBV20-1, TRBJ1-1)
CSARGVGNTEAFF

SEQ ID NO: 608151 - protein, 14 aa, Homo sapiens
  CDR3 for alpha chain variable domain of TCR clone 304076 (TRAV1-2, TRAJ16)
CAVNRISDGQKLLF

SEQ ID NO: 608152 - protein, 15 aa, Homo sapiens
  CDR3 for beta chain variable domain of TCR clone 304076 (TRBV20-1, TRBJ2-2)
SAVPRTPRTPGSCFF

SEQ ID NO: 608153 - protein, 16 aa, Homo sapiens
  CDR3 for alpha chain variable domain of TCR clone 304077 (TRAV16, TRAJ42)
CARKRNYGGSQGNLIF

SEQ ID NO: 608154 - protein, 13 aa, Homo sapiens
  CDR3 for beta chain variable domain of TCR clone 304077 (TRBV20-1, TRBJ2-7)
CSASPPSSYEQYF

SEQ ID NO: 608155 - protein, 15 aa, Homo sapiens
  CDR3 for alpha chain variable domain of TCR clone 304078 (TRAV3, TRAJ29)
CAVRDLYSANTPLVF

SEQ ID NO: 608156 - protein, 17 aa, Homo sapiens
  CDR3 for beta chain variable domain of TCR clone 304078 (TRBV20-1, TRBJ2-1)
CSARDPLAGVWDNEQFF

SEQ ID NO: 608157 - protein, 18 aa, Homo sapiens
  CDR3 for alpha chain variable domain of TCR clone 304079 (TRAV1-1, TRAJ4)
LLLRCEGFLSGGYNKLIF

SEQ ID NO: 608158 - protein, 16 aa, Homo sapiens
  CDR3 for beta chain variable domain of TCR clone 304079 (TRBV28, TRBJ1-4)
CASSPPYRGRSEKLFF

SEQ ID NO: 608159 - protein, 16 aa, Homo sapiens
  CDR3 for alpha chain variable domain of TCR clone 304080 (TRAV12-3, TRAJ53)
CAMSPGSGGSKYKLTY

SEQ ID NO: 608160 - protein, 17 aa, Homo sapiens
  CDR3 for beta chain variable domain of TCR clone 304080 (TRBV28, TRBJ2-5)
CASSTPEGDALQETQYF

SEQ ID NO: 608161 - protein, 12 aa, Homo sapiens
  CDR3 for alpha chain variable domain of TCR clone 304081 (TRAV13-2, TRAJ23)
CAERHRGGKLIL

SEQ ID NO: 608162 - protein, 18 aa, Homo sapiens
  CDR3 for beta chain variable domain of TCR clone 304081 (TRBV11-2, TRBJ2-3)
CASSLGGASRGAPNTQYF

SEQ ID NO: 608163 - protein, 15 aa, Homo sapiens
  CDR3 for alpha chain variable domain of TCR clone 304082 (TRAV12-3, TRAJ10)
CASYILTGGGNKLTF

SEQ ID NO: 608164 - protein, 15 aa, Homo sapiens
  CDR3 for beta chain variable domain of TCR clone 304082 (TRBV7-2, TRBJ1-6)
CVSSLGPDRGMPLYF

SEQ ID NO: 608165 - protein, 13 aa, Homo sapiens
  CDR3 for alpha chain variable domain of TCR clone 304083 (TRAV12-3, TRAJ33)
CAMSVNSNYQLIW

SEQ ID NO: 608166 - protein, 13 aa, Homo sapiens
  CDR3 for beta chain variable domain of TCR clone 304083 (TRBV7-2, TRBJ1-4)
CASSVSLGEKLFF

SEQ ID NO: 608167 - protein, 14 aa, Homo sapiens
  CDR3 for alpha chain variable domain of TCR clone 304084 (TRAV12-1, TRAJ26)
CVVKGSNYGQNFVF

SEQ ID NO: 608168 - protein, 15 aa, Homo sapiens
  CDR3 for beta chain variable domain of TCR clone 304084 (TRBV7-2, TRBJ1-2)
CASSPRAGWNYGYTF

SEQ ID NO: 608169 - protein, 14 aa, Homo sapiens
  CDR3 for alpha chain variable domain of TCR clone 304085 (TRAV8-1, TRAJ5)
CAVRTDTGRRALNF

SEQ ID NO: 608170 - protein, 14 aa, Homo sapiens
  CDR3 for beta chain variable domain of TCR clone 304085 (TRBV7-8, TRBJ2-3)
CASSFPDGQDTQYF

SEQ ID NO: 608171 - protein, 15 aa, Homo sapiens
  CDR3 for alpha chain variable domain of TCR clone 304086 (TRAV29/DV5, TRAJ29)
CAASERSSGNTPLVF

SEQ ID NO: 608172 - protein, 13 aa, Homo sapiens
  CDR3 for beta chain variable domain of TCR clone 304086 (TRBV12-5, TRBJ2-3)
CASGDRQSDTQYF

SEQ ID NO: 608173 - protein, 14 aa, Homo sapiens
  CDR3 for alpha chain variable domain of TCR clone 304087 (TRAV1-2, TRAJ17)
CALRRGAAGNKLTF

SEQ ID NO: 608174 - protein, 15 aa, Homo sapiens
  CDR3 for beta chain variable domain of TCR clone 304087 (TRBV20-1, TRBJ2-7)
CSARDRVSGMDEQYF

SEQ ID NO: 608175 - protein, 17 aa, Homo sapiens
  CDR3 for alpha chain variable domain of TCR clone 304088 (TRAV27, TRAJ18)
CAGLHRGSGSTLGRLYF

SEQ ID NO: 608176 - protein, 14 aa, Homo sapiens
  CDR3 for beta chain variable domain of TCR clone 304088 (TRBV20-1, TRBJ1-5)
CSARGRGSNQPQHF

SEQ ID NO: 608177 - protein, 17 aa, Homo sapiens
  CDR3 for alpha chain variable domain of TCR clone 304089 (TRAV3, TRAJ6)
CAVRDGPRAGGSYIPTF

SEQ ID NO: 608178 - protein, 14 aa, Homo sapiens
  CDR3 for beta chain variable domain of TCR clone 304089 (TRBV19, TRBJ2-1)
CASPTFVLSGGQFF

SEQ ID NO: 608179 - protein, 14 aa, Homo sapiens
  CDR3 for alpha chain variable domain of TCR clone 304090 (TRAV8-3, TRAJ30)
CAVGDMNRDDKIIF

SEQ ID NO: 608180 - protein, 17 aa, Homo sapiens
  CDR3 for beta chain variable domain of TCR clone 304090 (TRBV19, TRBJ2-2)
CDSSRNPGGFGTGELFF

SEQ ID NO: 608181 - protein, 23 aa, Homo sapiens
  CDR3 for alpha chain variable domain of TCR clone 304091 (TRAV26-1, TRAJ29)
CIVRVEGSGNTPLVLERAQDFLL

SEQ ID NO: 608182 - protein, 15 aa, Homo sapiens
  CDR3 for beta chain variable domain of TCR clone 304091 (TRBV7-9, TRBJ1-5)
CASSQGHQPNQPQHF

SEQ ID NO: 608183 - protein, 17 aa, Homo sapiens
  CDR3 for alpha chain variable domain of TCR clone 304092 (TRAV3, TRAJ12)
CAVRDGGRMDSSYKLMF

SEQ ID NO: 608184 - protein, 13 aa, Homo sapiens
  CDR3 for beta chain variable domain of TCR clone 304092 (TRBV15, TRBJ1-6)
CATSGGLNSPLHF

SEQ ID NO: 608185 - protein, 13 aa, Homo sapiens
  CDR3 for alpha chain variable domain of TCR clone 304093 (TRAV21, TRAJ57)
CAVTQGGSEKLVF

SEQ ID NO: 608186 - protein, 17 aa, Homo sapiens
  CDR3 for beta chain variable domain of TCR clone 304093 (TRBV10-3, TRBJ2-6)
CAISELSESSGANVLTF

SEQ ID NO: 608187 - protein, 13 aa, Homo sapiens
  CDR3 for alpha chain variable domain of TCR clone 304094 (TRAV1-2, TRAJ9)
CAALNTGGFKTIF

SEQ ID NO: 608188 - protein, 15 aa, Homo sapiens
  CDR3 for beta chain variable domain of TCR clone 304094 (TRBV24-1, TRBJ2-1)
CATSGSGGYYNEQFF

SEQ ID NO: 608189 - protein, 21 aa, Homo sapiens
  CDR3 for alpha chain variable domain of TCR clone 304095 (TRAV12-3, )
CASRQIPDIQNPDPSVYQLRD

SEQ ID NO: 608190 - protein, 14 aa, Homo sapiens
  CDR3 for beta chain variable domain of TCR clone 304095 (TRBV7-2, TRBJ1-3)
CASSLGTAGNTIYF

SEQ ID NO: 608191 - protein, 14 aa, Homo sapiens
  CDR3 for alpha chain variable domain of TCR clone 304096 (TRAV1-1, TRAJ28)
CAAPSGAGSYQLTF

SEQ ID NO: 608192 - protein, 13 aa, Homo sapiens
  CDR3 for beta chain variable domain of TCR clone 304096 (TRBV2, TRBJ2-7)
CASSVGGSGEQYF

SEQ ID NO: 608193 - protein, 11 aa, Homo sapiens
  CDR3 for alpha chain variable domain of TCR clone 304097 (TRAV12-3, TRAJ43)
YAMSVSNDMRF

SEQ ID NO: 608194 - protein, 12 aa, Homo sapiens
  CDR3 for beta chain variable domain of TCR clone 304097 (TRBV20-1, TRBJ1-1)
QCSTWGGTEAFF

SEQ ID NO: 608195 - protein, 16 aa, Homo sapiens
  CDR3 for alpha chain variable domain of TCR clone 304098 (TRAV3, TRAJ10)
CAVRAMRAGGGNKLTF

SEQ ID NO: 608196 - protein, 15 aa, Homo sapiens
  CDR3 for beta chain variable domain of TCR clone 304098 (TRBV11-3, TRBJ2-7)
CASSPGPASSYEQYF

SEQ ID NO: 608197 - protein, 14 aa, Homo sapiens
  CDR3 for alpha chain variable domain of TCR clone 304099 (TRAV13-2, TRAJ39)
CADHPPGAGNMLTC

SEQ ID NO: 608198 - protein, 18 aa, Homo sapiens
  CDR3 for beta chain variable domain of TCR clone 304099 (TRBV27, TRBJ2-3)
CASSLSGTSGRGTDTQYL

SEQ ID NO: 608199 - protein, 14 aa, Homo sapiens
  CDR3 for alpha chain variable domain of TCR clone 304100 (TRAV8-1, TRAJ5)
CAVRTDTGRRALTF

SEQ ID NO: 608200 - protein, 14 aa, Homo sapiens
  CDR3 for beta chain variable domain of TCR clone 304100 (TRBV4-2, TRBJ2-1)
CASGLDRAYNEQFF

SEQ ID NO: 608201 - protein, 13 aa, Homo sapiens
  CDR3 for alpha chain variable domain of TCR clone 304101 (TRAV12-3, TRAJ33)
CAMSVNSNYQLIW

SEQ ID NO: 608202 - protein, 16 aa, Homo sapiens
  CDR3 for beta chain variable domain of TCR clone 304101 (TRBV4-1, TRBJ1-2)
CASSQDAGQVLYGYTF

SEQ ID NO: 608203 - protein, 13 aa, Homo sapiens
  CDR3 for alpha chain variable domain of TCR clone 304102 (TRAV27, TRAJ11)
CAGGGSGYSTLTF

SEQ ID NO: 608204 - protein, 15 aa, Homo sapiens
  CDR3 for beta chain variable domain of TCR clone 304102 (TRBV5-1, TRBJ1-1)
CASSLGQGRFAEAVF

SEQ ID NO: 608205 - protein, 14 aa, Homo sapiens
  CDR3 for alpha chain variable domain of TCR clone 304103 (TRAV12-3, TRAJ6)
CAMSATGGSYIPTF

SEQ ID NO: 608206 - protein, 16 aa, Homo sapiens
  CDR3 for beta chain variable domain of TCR clone 304103 (TRBV4-2, TRBJ2-1)
CASRPRAGQGAPGPFF

SEQ ID NO: 608207 - protein, 21 aa, Homo sapiens
  CDR3 for alpha chain variable domain of TCR clone 304104 (TRAV21, TRAJ27)
CAARPGNAGKSTCVDGTTLTV

SEQ ID NO: 608208 - protein, 14 aa, Homo sapiens
  CDR3 for beta chain variable domain of TCR clone 304104 (TRBV7-6, TRBJ2-3)
CASSLGTVTDTQYF

SEQ ID NO: 608209 - protein, 14 aa, Homo sapiens
  CDR3 for alpha chain variable domain of TCR clone 304105 (TRAV13-1, TRAJ44)
CAAMATGTASKLTF

SEQ ID NO: 608210 - protein, 13 aa, Homo sapiens
  CDR3 for beta chain variable domain of TCR clone 304105 (TRBV5-5, TRBJ1-2)
CASSFWRGEDYTF

SEQ ID NO: 608211 - protein, 15 aa, Homo sapiens
  CDR3 for alpha chain variable domain of TCR clone 304106 (TRAV27, TRAJ38)
CAARRNAGNNRKLIW

SEQ ID NO: 608212 - protein, 14 aa, Homo sapiens
  CDR3 for beta chain variable domain of TCR clone 304106 (TRBV7-8, TRBJ2-3)
CASSLEAGTDTQYS

SEQ ID NO: 608213 - protein, 14 aa, Homo sapiens
  CDR3 for alpha chain variable domain of TCR clone 304107 (TRAV1-2, TRAJ8)
CAVREDTGFQKLVF

SEQ ID NO: 608214 - protein, 15 aa, Homo sapiens
  CDR3 for beta chain variable domain of TCR clone 304107 (TRBV5-4, TRBJ2-1)
CASSSGLAGVNEQFF

SEQ ID NO: 608215 - protein, 14 aa, Homo sapiens
  CDR3 for alpha chain variable domain of TCR clone 304108 (TRAV1-2, TRAJ8)
CAVREDTGFRKLVF

SEQ ID NO: 608216 - protein, 11 aa, Homo sapiens
  CDR3 for beta chain variable domain of TCR clone 304108 (TRBV11-3, TRBJ2-7)
CASSRTYEQYF

SEQ ID NO: 608217 - protein, 12 aa, Homo sapiens
  CDR3 for alpha chain variable domain of TCR clone 304109 (TRAV21, TRAJ27)
CAPPGNAGKSTF

SEQ ID NO: 608218 - protein, 13 aa, Homo sapiens
  CDR3 for beta chain variable domain of TCR clone 304109 (TRBV2, TRBJ1-1)
CARNPTGGSHAFF

SEQ ID NO: 608219 - protein, 16 aa, Homo sapiens
  CDR3 for alpha chain variable domain of TCR clone 304110 (TRAV21, TRAJ52)
CAVSDAGGTSYGNLTF

SEQ ID NO: 608220 - protein, 13 aa, Homo sapiens
  CDR3 for beta chain variable domain of TCR clone 304110 (TRBV7-3, TRBJ2-5)
CASSFRGSQTQYF

SEQ ID NO: 608221 - protein, 11 aa, Homo sapiens
  CDR3 for alpha chain variable domain of TCR clone 304111 (TRAV12-1, TRAJ21)
CVVNNFNNFYF

SEQ ID NO: 608222 - protein, 11 aa, Homo sapiens
  CDR3 for beta chain variable domain of TCR clone 304111 (TRBV10-3, TRBJ2-7)
CAISEGIEQYF

SEQ ID NO: 608223 - protein, 14 aa, Homo sapiens
  CDR3 for alpha chain variable domain of TCR clone 304112 (TRAV12-3, TRAJ21)
CAMEGHQGFNKFYF

SEQ ID NO: 608224 - protein, 14 aa, Homo sapiens
  CDR3 for beta chain variable domain of TCR clone 304112 (TRBV7-8, TRBJ2-3)
CASSLEAGTDTQYF

SEQ ID NO: 608225 - protein, 13 aa, Homo sapiens
  CDR3 for alpha chain variable domain of TCR clone 304113 (TRAV36/DV7, TRAJ37)
CAVFSSNTGKLIF

SEQ ID NO: 608226 - protein, 16 aa, Homo sapiens
  CDR3 for beta chain variable domain of TCR clone 304113 (TRBV3-1, TRBJ2-5)
CASRPGQFNGFGTQYF

SEQ ID NO: 608227 - protein, 17 aa, Homo sapiens
  CDR3 for alpha chain variable domain of TCR clone 304114 (TRAV1-1, TRAJ28)
CDVDPAYSGAGSYQLTF

SEQ ID NO: 608228 - protein, 14 aa, Homo sapiens
  CDR3 for beta chain variable domain of TCR clone 304114 (TRBV19, TRBJ2-1)
CASPTFVLSGEQFF

SEQ ID NO: 608229 - protein, 14 aa, Homo sapiens
  CDR3 for alpha chain variable domain of TCR clone 304115 (TRAV35, TRAJ50)
CAGHRKTSYDKVIF

SEQ ID NO: 608230 - protein, 13 aa, Homo sapiens
  CDR3 for beta chain variable domain of TCR clone 304115 (TRBV7-7, TRBJ2-3)
CASSLSRTDTQYF

SEQ ID NO: 608231 - protein, 12 aa, Homo sapiens
  CDR3 for alpha chain variable domain of TCR clone 304116 (TRAV3, TRAJ20)
CAVRDPDYKLSF

SEQ ID NO: 608232 - protein, 13 aa, Homo sapiens
  CDR3 for beta chain variable domain of TCR clone 304116 (TRBV9, TRBJ2-1)
CASIGGQGGEQFF

SEQ ID NO: 608233 - protein, 12 aa, Homo sapiens
  CDR3 for alpha chain variable domain of TCR clone 304117 (TRAV8-3, TRAJ34)
WASWYNTDKLIF

SEQ ID NO: 608234 - protein, 13 aa, Homo sapiens
  CDR3 for beta chain variable domain of TCR clone 304117 (TRBV6-4, TRBJ2-3)
CASSVSWADTQYF

SEQ ID NO: 608235 - protein, 14 aa, Homo sapiens
  CDR3 for alpha chain variable domain of TCR clone 304118 (TRAV30, TRAJ33)
CGTVAPRSNYQLIW

SEQ ID NO: 608236 - protein, 14 aa, Homo sapiens
  CDR3 for beta chain variable domain of TCR clone 304118 (TRBV7-2, TRBJ2-7)
CASSPKTSFYEQYF

SEQ ID NO: 608237 - protein, 21 aa, Homo sapiens
  CDR3 for alpha chain variable domain of TCR clone 304119 (TRAV12-1, TRAJ37)
CVVNGGLWQHRQTNLWARNNF

SEQ ID NO: 608238 - protein, 12 aa, Homo sapiens
  CDR3 for beta chain variable domain of TCR clone 304119 (TRBV20-1, TRBJ1-2)
CSAPGFNYGYTF

SEQ ID NO: 608239 - protein, 15 aa, Homo sapiens
  CDR3 for alpha chain variable domain of TCR clone 304120 (TRAV8-4, TRAJ12)
CAVSDRVDSSYKLIF

SEQ ID NO: 608240 - protein, 15 aa, Homo sapiens
  CDR3 for beta chain variable domain of TCR clone 304120 (TRBV27, TRBJ2-7)
CASSTAGTGSYEQYF

SEQ ID NO: 608241 - protein, 18 aa, Homo sapiens
  CDR3 for alpha chain variable domain of TCR clone 304121 (TRAV29/DV5, TRAJ52)
CAAGFRGAGGTSYGKLTF

SEQ ID NO: 608242 - protein, 13 aa, Homo sapiens
  CDR3 for beta chain variable domain of TCR clone 304121 (TRBV12-5, TRBJ2-3)
CASGDRQSDTQYF

SEQ ID NO: 608243 - protein, 16 aa, Homo sapiens
  CDR3 for alpha chain variable domain of TCR clone 304122 (TRAV12-2, TRAJ40)
CAVIRGGTSGTYKYIF

SEQ ID NO: 608244 - protein, 13 aa, Homo sapiens
  CDR3 for beta chain variable domain of TCR clone 304122 (TRBV5-5, TRBJ1-2)
CASSFWRGEDYTF

SEQ ID NO: 608245 - protein, 15 aa, Homo sapiens
  CDR3 for alpha chain variable domain of TCR clone 304123 (TRAV16, TRAJ12)
CSKWPLSDSSYKLIF

SEQ ID NO: 608246 - protein, 13 aa, Homo sapiens
  CDR3 for beta chain variable domain of TCR clone 304123 (TRBV4-2, TRBJ1-1)
CASSQAGNTEAFF

SEQ ID NO: 608247 - protein, 14 aa, Homo sapiens
  CDR3 for alpha chain variable domain of TCR clone 304124 (TRAV38-2/DV8, TRAJ54)
AAMYQIQGAQKLVC

SEQ ID NO: 608248 - protein, 17 aa, Homo sapiens
  CDR3 for beta chain variable domain of TCR clone 304124 (TRBV6-1, TRBJ2-3)
CASSEALRLISTDTQYF

SEQ ID NO: 608249 - protein, 15 aa, Homo sapiens
  CDR3 for alpha chain variable domain of TCR clone 304125 (TRAV1-1, TRAJ5)
CAVRHMDTGRRALTF

SEQ ID NO: 608250 - protein, 17 aa, Homo sapiens
  CDR3 for beta chain variable domain of TCR clone 304125 (TRBV28, TRBJ2-7)
FASSPGLAGGDSSEQYF

SEQ ID NO: 608251 - protein, 13 aa, Homo sapiens
  CDR3 for alpha chain variable domain of TCR clone 304126 (TRAV2, TRAJ15)
CAVASQAGTALIF

SEQ ID NO: 608252 - protein, 13 aa, Homo sapiens
  CDR3 for beta chain variable domain of TCR clone 304126 (TRBV11-2, TRBJ2-7)
CASSGTRPYEQYF

SEQ ID NO: 608253 - protein, 15 aa, Homo sapiens
  CDR3 for alpha chain variable domain of TCR clone 304127 (TRAV8-3, TRAJ11)
CAVGLLNSGYSILTF

SEQ ID NO: 608254 - protein, 16 aa, Homo sapiens
  CDR3 for beta chain variable domain of TCR clone 304127 (TRBV7-9, TRBJ1-2)
CASSLGFSSGEDGYNF

SEQ ID NO: 608255 - protein, 11 aa, Homo sapiens
  CDR3 for alpha chain variable domain of TCR clone 304128 (TRAV27, TRAJ45)
CAGAEEEVLTD

SEQ ID NO: 608256 - protein, 17 aa, Homo sapiens
  CDR3 for beta chain variable domain of TCR clone 304128 (TRBV11-2, TRBJ2-1)
CASSLYPPGVEYNEQFF

SEQ ID NO: 608257 - protein, 13 aa, Homo sapiens
  CDR3 for alpha chain variable domain of TCR clone 304129 (TRAV27, TRAJ42)
CAGARGSHGNLIF

SEQ ID NO: 608258 - protein, 15 aa, Homo sapiens
  CDR3 for beta chain variable domain of TCR clone 304129 (TRBV10-3, TRBJ2-2)
CAIRTDREDTGELFF

SEQ ID NO: 608259 - protein, 14 aa, Homo sapiens
  CDR3 for alpha chain variable domain of TCR clone 304130 (TRAV17, TRAJ16)
CATADFPDGQKLLF

SEQ ID NO: 608260 - protein, 15 aa, Homo sapiens
  CDR3 for beta chain variable domain of TCR clone 304130 (TRBV6-5, TRBJ2-1)
CASSYDAGAGNEQFF

SEQ ID NO: 608261 - protein, 12 aa, Homo sapiens
  CDR3 for alpha chain variable domain of TCR clone 304131 (TRAV12-1, TRAJ40)
CVVYSGTYKYIF

SEQ ID NO: 608262 - protein, 16 aa, Homo sapiens
  CDR3 for beta chain variable domain of TCR clone 304131 (TRBV12-5, TRBJ2-5)
CASGPRTSGNQETKYF

SEQ ID NO: 608263 - protein, 12 aa, Homo sapiens
  CDR3 for alpha chain variable domain of TCR clone 304132 (TRAV12-1, TRAJ40)
CVVYSGTYKYIF

SEQ ID NO: 608264 - protein, 12 aa, Homo sapiens
  CDR3 for beta chain variable domain of TCR clone 304132 (TRBV3-1, TRBJ2-1)
CASSQGSSGQFF

SEQ ID NO: 608265 - protein, 13 aa, Homo sapiens
  CDR3 for alpha chain variable domain of TCR clone 304133 (TRAV12-1, TRAJ6)
CVVYPGGSYIPTF

SEQ ID NO: 608266 - protein, 13 aa, Homo sapiens
  CDR3 for beta chain variable domain of TCR clone 304133 (TRBV20-1, TRBJ1-3)
CSAGVYSGNTIYF

SEQ ID NO: 608267 - protein, 15 aa, Homo sapiens
  CDR3 for alpha chain variable domain of TCR clone 304134 (TRAV21, TRAJ38)
CAVRQDAGNNRKLMW

SEQ ID NO: 608268 - protein, 16 aa, Homo sapiens
  CDR3 for beta chain variable domain of TCR clone 304134 (TRBV4-2, TRBJ1-1)
CASRPLDGGGDTEAFF

SEQ ID NO: 608269 - protein, 18 aa, Homo sapiens
  CDR3 for alpha chain variable domain of TCR clone 304135 (TRAV21, TRAJ52)
CAVRPSPAGGTSYGKLTF

SEQ ID NO: 608270 - protein, 18 aa, Homo sapiens
  CDR3 for beta chain variable domain of TCR clone 304135 (TRBV7-9, TRBJ2-6)
CASSFPGAGISGANVLTF

SEQ ID NO: 608271 - protein, 14 aa, Homo sapiens
  CDR3 for alpha chain variable domain of TCR clone 304136 (TRAV13-1, TRAJ24)
CAASRTDSWGKLQF

SEQ ID NO: 608272 - protein, 15 aa, Homo sapiens
  CDR3 for beta chain variable domain of TCR clone 304136 (TRBV27, TRBJ2-7)
CASSTAGTGSYEQYF

SEQ ID NO: 608273 - protein, 12 aa, Homo sapiens
  CDR3 for alpha chain variable domain of TCR clone 304137 (TRAV13-1, TRAJ21)
CAAKEGFNKFYF

SEQ ID NO: 608274 - protein, 14 aa, Homo sapiens
  CDR3 for beta chain variable domain of TCR clone 304137 (TRBV5-1, TRBJ2-3)
CASSASGGQDTQYF

SEQ ID NO: 608275 - protein, 11 aa, Homo sapiens
  CDR3 for alpha chain variable domain of TCR clone 304138 (TRAV2, TRAJ13)
CASGGYQKVTF

SEQ ID NO: 608276 - protein, 14 aa, Homo sapiens
  CDR3 for beta chain variable domain of TCR clone 304138 (TRBV4-1, TRBJ2-7)
CASRLTSGSYEQYF

SEQ ID NO: 608277 - protein, 14 aa, Homo sapiens
  CDR3 for alpha chain variable domain of TCR clone 304139 (TRAV1-2, TRAJ16)
FAVNRFSDGQKLLF

SEQ ID NO: 608278 - protein, 13 aa, Homo sapiens
  CDR3 for beta chain variable domain of TCR clone 304139 (TRBV4-1, TRBJ2-1)
CASSQEVQYEQFF

SEQ ID NO: 608279 - protein, 12 aa, Homo sapiens
  CDR3 for alpha chain variable domain of TCR clone 304140 (TRAV12-1, TRAJ31)
CVVNDNNARLMF

SEQ ID NO: 608280 - protein, 15 aa, Homo sapiens
  CDR3 for beta chain variable domain of TCR clone 304140 (TRBV3-1, TRBJ2-5)
CASSQEVRLEETQHF

SEQ ID NO: 608281 - protein, 14 aa, Homo sapiens
  CDR3 for alpha chain variable domain of TCR clone 304141 (TRAV13-1, TRAJ35)
CAAIKGGFGNVLHC

SEQ ID NO: 608282 - protein, 13 aa, Homo sapiens
  CDR3 for beta chain variable domain of TCR clone 304141 (TRBV7-3, TRBJ1-1)
CASSHDWGADAFF

SEQ ID NO: 608283 - protein, 16 aa, Homo sapiens
  CDR3 for alpha chain variable domain of TCR clone 304142 (TRAV8-3, TRAJ13)
CAVGAYPSWGYQKVTF

SEQ ID NO: 608284 - protein, 15 aa, Homo sapiens
  CDR3 for beta chain variable domain of TCR clone 304142 (TRBV19, TRBJ1-5)
CASSIVCADNQPQHF

SEQ ID NO: 608285 - protein, 13 aa, Homo sapiens
  CDR3 for alpha chain variable domain of TCR clone 304143 (TRAV38-1, TRAJ42)
CARWGGSQGNLIF

SEQ ID NO: 608286 - protein, 14 aa, Homo sapiens
  CDR3 for beta chain variable domain of TCR clone 304143 (TRBV11-2, TRBJ2-7)
CASSSTGEGYEQYF

SEQ ID NO: 608287 - protein, 21 aa, Homo sapiens
  CDR3 for alpha chain variable domain of TCR clone 304144 (TRAV1-1, TRAJ6)
CLLLLRCERLERTGGSYVPTF

SEQ ID NO: 608288 - protein, 15 aa, Homo sapiens
  CDR3 for beta chain variable domain of TCR clone 304144 (TRBV7-2, TRBJ2-3)
CASSLVVRGPDTQYF

SEQ ID NO: 608289 - protein, 13 aa, Homo sapiens
  CDR3 for alpha chain variable domain of TCR clone 304145 (TRAV12-2, TRAJ7)
CAGNLYGNNRLAF

SEQ ID NO: 608290 - protein, 14 aa, Homo sapiens
  CDR3 for beta chain variable domain of TCR clone 304145 (TRBV25-1, TRBJ1-2)
CASSEATGPYGYTF

SEQ ID NO: 608291 - protein, 18 aa, Homo sapiens
  CDR3 for alpha chain variable domain of TCR clone 304146 (TRAV21, TRAJ45)
CCGGPQGGSGGGAGGLTF

SEQ ID NO: 608292 - protein, 12 aa, Homo sapiens
  CDR3 for beta chain variable domain of TCR clone 304146 (TRBV29-1, TRBJ1-3)
CSTRDSGNTIYF

SEQ ID NO: 608293 - protein, 16 aa, Homo sapiens
  CDR3 for alpha chain variable domain of TCR clone 304147 (TRAV3, TRAJ6)
CAVRDGMGMRKLHTYI

SEQ ID NO: 608294 - protein, 15 aa, Homo sapiens
  CDR3 for beta chain variable domain of TCR clone 304147 (TRBV5-1, TRBJ2-7)
CASSLGDFTTYEQYF

SEQ ID NO: 608295 - protein, 16 aa, Homo sapiens
  CDR3 for alpha chain variable domain of TCR clone 304148 (TRAV14/DV4, TRAJ53)
CAMREGGGGSNYKLTF

SEQ ID NO: 608296 - protein, 12 aa, Homo sapiens
  CDR3 for beta chain variable domain of TCR clone 304148 (TRBV7-9, TRBJ1-4)
CASSTDREKLFF

SEQ ID NO: 608297 - protein, 15 aa, Homo sapiens
  CDR3 for alpha chain variable domain of TCR clone 304149 (TRAV8-6, TRAJ6)
CAVRDASGGSYIPTF

SEQ ID NO: 608298 - protein, 15 aa, Homo sapiens
  CDR3 for beta chain variable domain of TCR clone 304149 (TRBV7-9, TRBJ2-2)
CASGPLDTFPGELFF

SEQ ID NO: 608299 - protein, 12 aa, Homo sapiens
  CDR3 for alpha chain variable domain of TCR clone 304150 (TRAV26-2, TRAJ47)
CILVEYVNKLVF

SEQ ID NO: 608300 - protein, 16 aa, Homo sapiens
  CDR3 for beta chain variable domain of TCR clone 304150 (TRBV18, TRBJ1-4)
CASSPLVGDRAEKLFF

SEQ ID NO: 608301 - protein, 13 aa, Homo sapiens
  CDR3 for alpha chain variable domain of TCR clone 304151 (TRAV12-3, TRAJ33)
CAMSVNSNYQLIW

SEQ ID NO: 608302 - protein, 17 aa, Homo sapiens
  CDR3 for beta chain variable domain of TCR clone 304151 (TRBV7-3, TRBJ2-3)
CASSLMKRMRGADTQYF

SEQ ID NO: 608303 - protein, 14 aa, Homo sapiens
  CDR3 for alpha chain variable domain of TCR clone 304152 (TRAV3, TRAJ22)
CAVRDYGSARQLTF

SEQ ID NO: 608304 - protein, 15 aa, Homo sapiens
  CDR3 for beta chain variable domain of TCR clone 304152 (TRBV11-3, TRBJ1-3)
CASSLFGPSGNTMYF

SEQ ID NO: 608305 - protein, 15 aa, Homo sapiens
  CDR3 for alpha chain variable domain of TCR clone 304153 (TRAV12-3, TRAJ6)
CAMSATKGGSYIPTF

SEQ ID NO: 608306 - protein, 16 aa, Homo sapiens
  CDR3 for beta chain variable domain of TCR clone 304153 (TRBV20-1, TRBJ1-2)
RSASMGQGVANYGYTF

SEQ ID NO: 608307 - protein, 14 aa, Homo sapiens
  CDR3 for alpha chain variable domain of TCR clone 304154 (TRAV12-2, TRAJ33)
CAVKRARSNYQLIW

SEQ ID NO: 608308 - protein, 16 aa, Homo sapiens
  CDR3 for beta chain variable domain of TCR clone 304154 (TRBV20-1, TRBJ1-4)
CSAPGQGLLTNEKLFF

SEQ ID NO: 608309 - protein, 15 aa, Homo sapiens
  CDR3 for alpha chain variable domain of TCR clone 304155 (TRAV12-3, TRAJ6)
CAMSATTGGSDIPTF

SEQ ID NO: 608310 - protein, 16 aa, Homo sapiens
  CDR3 for beta chain variable domain of TCR clone 304155 (TRBV27, TRBJ2-5)
CAGSFGPGGTKETQYF

SEQ ID NO: 608311 - protein, 16 aa, Homo sapiens
  CDR3 for alpha chain variable domain of TCR clone 304156 (TRAV16, TRAJ4)
CARSRMFSGGYNKLIF

SEQ ID NO: 608312 - protein, 16 aa, Homo sapiens
  CDR3 for beta chain variable domain of TCR clone 304156 (TRBV24-1, TRBJ2-3)
CVTSDPGTGATDTQYF

SEQ ID NO: 608313 - protein, 14 aa, Homo sapiens
  CDR3 for alpha chain variable domain of TCR clone 304157 (TRAV1-2, TRAJ16)
CAVNRFSDGQKLLF

SEQ ID NO: 608314 - protein, 17 aa, Homo sapiens
  CDR3 for beta chain variable domain of TCR clone 304157 (TRBV7-9, TRBJ2-1)
CASSLVASYPYTMSSSS

SEQ ID NO: 608315 - protein, 12 aa, Homo sapiens
  CDR3 for alpha chain variable domain of TCR clone 304158 (TRAV3, TRAJ43)
CAVRDPDNDMRF

SEQ ID NO: 608316 - protein, 14 aa, Homo sapiens
  CDR3 for beta chain variable domain of TCR clone 304158 (TRBV5-1, TRBJ2-3)
CASSLFGPTDTQYF

SEQ ID NO: 608317 - protein, 13 aa, Homo sapiens
  CDR3 for alpha chain variable domain of TCR clone 304159 (TRAV21, TRAJ27)
CASRPGTAGKSTF

SEQ ID NO: 608318 - protein, 14 aa, Homo sapiens
  CDR3 for beta chain variable domain of TCR clone 304159 (TRBV7-6, TRBJ2-3)
CASSLGTVTDTQYF

SEQ ID NO: 608319 - protein, 11 aa, Homo sapiens
  CDR3 for alpha chain variable domain of TCR clone 304160 (TRAV13-1, TRAJ39)
CAPHAGNMLTF

SEQ ID NO: 608320 - protein, 15 aa, Homo sapiens
  CDR3 for beta chain variable domain of TCR clone 304160 (TRBV20-1, TRBJ2-7)
CSARDRVSGMDEQYC

SEQ ID NO: 608321 - protein, 16 aa, Homo sapiens
  CDR3 for alpha chain variable domain of TCR clone 304161 (TRAV8-2, TRAJ50)
CVVSDHMKTSYDKGIF

SEQ ID NO: 608322 - protein, 15 aa, Homo sapiens
  CDR3 for beta chain variable domain of TCR clone 304161 (TRBV7-2, TRBJ2-1)
CASSFQADEYNEQFF

SEQ ID NO: 608323 - protein, 17 aa, Homo sapiens
  CDR3 for alpha chain variable domain of TCR clone 304162 (TRAV38-2/DV8, TRAJ23)
CALSRKLIFGQGRELSV

SEQ ID NO: 608324 - protein, 12 aa, Homo sapiens
  CDR3 for beta chain variable domain of TCR clone 304162 (TRBV11-2, TRBJ2-2)
CASSLGGGELFF

SEQ ID NO: 608325 - protein, 13 aa, Homo sapiens
  CDR3 for alpha chain variable domain of TCR clone 304163 (TRAV35, TRAJ42)
CAGFPGSQGDLIF

SEQ ID NO: 608326 - protein, 14 aa, Homo sapiens
  CDR3 for beta chain variable domain of TCR clone 304163 (TRBV4-1, TRBJ2-2)
CASSQAVNTEELFF

SEQ ID NO: 608327 - protein, 15 aa, Homo sapiens
  CDR3 for alpha chain variable domain of TCR clone 304164 (TRAV35, TRAJ58)
CAGRRQETSGSRLTF

SEQ ID NO: 608328 - protein, 15 aa, Homo sapiens
  CDR3 for beta chain variable domain of TCR clone 304164 (TRBV25-1, TRBJ2-3)
CASSEYMGGGDTQYF

SEQ ID NO: 608329 - protein, 13 aa, Homo sapiens
  CDR3 for alpha chain variable domain of TCR clone 304165 (TRAV8-1, TRAJ28)
CAVSGAGSYQLTF

SEQ ID NO: 608330 - protein, 14 aa, Homo sapiens
  CDR3 for beta chain variable domain of TCR clone 304165 (TRBV12-4, TRBJ1-1)
CASSLGTGGTEAFF

SEQ ID NO: 608331 - protein, 15 aa, Homo sapiens
  CDR3 for alpha chain variable domain of TCR clone 304166 (TRAV21, TRAJ56)
CAVTKYTGANSKLTF

SEQ ID NO: 608332 - protein, 15 aa, Homo sapiens
  CDR3 for beta chain variable domain of TCR clone 304166 (TRBV19, TRBJ1-2)
CARSVGQVLNYGYTF

SEQ ID NO: 608333 - protein, 13 aa, Homo sapiens
  CDR3 for alpha chain variable domain of TCR clone 304167 (TRAV35, TRAJ32)
CAGVGGATNKLIF

SEQ ID NO: 608334 - protein, 13 aa, Homo sapiens
  CDR3 for beta chain variable domain of TCR clone 304167 (TRBV20-1, TRBJ1-1)
CSAGTVGNTEAFF

SEQ ID NO: 608335 - protein, 13 aa, Homo sapiens
  CDR3 for alpha chain variable domain of TCR clone 304168 (TRAV20, TRAJ49)
CAVQARTGNQFYF

SEQ ID NO: 608336 - protein, 14 aa, Homo sapiens
  CDR3 for beta chain variable domain of TCR clone 304168 (TRBV5-1, TRBJ1-1)
CASSLQGASTEAFL

SEQ ID NO: 608337 - protein, 13 aa, Homo sapiens
  CDR3 for alpha chain variable domain of TCR clone 304169 (TRAV8-4, TRAJ48)
CAVSLFGNEKLTF

SEQ ID NO: 608338 - protein, 17 aa, Homo sapiens
  CDR3 for beta chain variable domain of TCR clone 304169 (TRBV13, TRBJ2-3)
CASSLSRVAGGRNTQYF

SEQ ID NO: 608339 - protein, 14 aa, Homo sapiens
  CDR3 for alpha chain variable domain of TCR clone 304170 (TRAV3, TRAJ33)
CAVRDMDSNYQLIW

SEQ ID NO: 608340 - protein, 19 aa, Homo sapiens
  CDR3 for beta chain variable domain of TCR clone 304170 (TRBV7-3, TRBJ1-2)
CASSFPQGNDGELWLLLRC

SEQ ID NO: 608341 - protein, 15 aa, Homo sapiens
  CDR3 for alpha chain variable domain of TCR clone 304171 (TRAV8-4, TRAJ3)
CAVTGENLVQPCFQD

SEQ ID NO: 608342 - protein, 16 aa, Homo sapiens
  CDR3 for beta chain variable domain of TCR clone 304171 (TRBV4-2, TRBJ1-1)
CACSQAGFGMNTEAFF

SEQ ID NO: 608343 - protein, 14 aa, Homo sapiens
  CDR3 for alpha chain variable domain of TCR clone 304172 (TRAV1-1, TRAJ28)
CAAPSGAGSYQLTF

SEQ ID NO: 608344 - protein, 14 aa, Homo sapiens
  CDR3 for beta chain variable domain of TCR clone 304172 (TRBV12-5, TRBJ2-5)
CASGSRTHQETQYF

SEQ ID NO: 608345 - protein, 11 aa, Homo sapiens
  CDR3 for alpha chain variable domain of TCR clone 304173 (TRAV3, TRAJ21)
CAVGNFNKFYF

SEQ ID NO: 608346 - protein, 19 aa, Homo sapiens
  CDR3 for beta chain variable domain of TCR clone 304173 (TRBV5-8, TRBJ2-6)
CASSFHRGRAHSGANVLTF

SEQ ID NO: 608347 - protein, 15 aa, Homo sapiens
  CDR3 for alpha chain variable domain of TCR clone 304174 (TRAV12-3, TRAJ10)
CASCILTGGGNKLTF

SEQ ID NO: 608348 - protein, 15 aa, Homo sapiens
  CDR3 for beta chain variable domain of TCR clone 304174 (TRBV7-2, TRBJ1-6)
CASSLGPDRGMPLHF

SEQ ID NO: 608349 - protein, 13 aa, Homo sapiens
  CDR3 for alpha chain variable domain of TCR clone 304175 (TRAV35, TRAJ43)
CAGYPYNNNDMRF

SEQ ID NO: 608350 - protein, 15 aa, Homo sapiens
  CDR3 for beta chain variable domain of TCR clone 304175 (TRBV25-1, TRBJ1-4)
CASSKRIATNGKLLF

SEQ ID NO: 608351 - protein, 17 aa, Homo sapiens
  CDR3 for alpha chain variable domain of TCR clone 304176 (TRAV4, TRAJ18)
CLVGERSVGSTLGRLNF

SEQ ID NO: 608352 - protein, 14 aa, Homo sapiens
  CDR3 for beta chain variable domain of TCR clone 304176 (TRBV6-5, TRBJ1-2)
CASSYDGTGGGYTF

SEQ ID NO: 608353 - protein, 14 aa, Homo sapiens
  CDR3 for alpha chain variable domain of TCR clone 304177 (TRAV39, TRAJ33)
CSVDIKNSNYQLIW

SEQ ID NO: 608354 - protein, 13 aa, Homo sapiens
  CDR3 for beta chain variable domain of TCR clone 304177 (TRBV4-2, TRBJ2-1)
CASSPGTYNEQFF

SEQ ID NO: 608355 - protein, 13 aa, Homo sapiens
  CDR3 for alpha chain variable domain of TCR clone 304178 (TRAV35, TRAJ37)
CAGSSGNTGKLIF

SEQ ID NO: 608356 - protein, 15 aa, Homo sapiens
  CDR3 for beta chain variable domain of TCR clone 304178 (TRBV7-9, TRBJ1-6)
CAGSSPGRGNSPLHF

SEQ ID NO: 608357 - protein, 16 aa, Homo sapiens
  CDR3 for alpha chain variable domain of TCR clone 304179 (TRAV1-2, TRAJ10)
CAVRDQGGGGGNKLTF

SEQ ID NO: 608358 - protein, 14 aa, Homo sapiens
  CDR3 for beta chain variable domain of TCR clone 304179 (TRBV19, TRBJ2-1)
CASGRAGPGNEQFF

SEQ ID NO: 608359 - protein, 14 aa, Homo sapiens
  CDR3 for alpha chain variable domain of TCR clone 304180 (TRAV3, TRAJ7)
CAVREEEREQQTRF

SEQ ID NO: 608360 - protein, 12 aa, Homo sapiens
  CDR3 for beta chain variable domain of TCR clone 304180 (TRBV24-1, TRBJ1-4)
CATSDPNDKLFF

SEQ ID NO: 608361 - protein, 13 aa, Homo sapiens
  CDR3 for alpha chain variable domain of TCR clone 304181 (TRAV12-3, TRAJ7)
CAMTPYGNNRLAF

SEQ ID NO: 608362 - protein, 14 aa, Homo sapiens
  CDR3 for beta chain variable domain of TCR clone 304181 (TRBV19, TRBJ2-5)
CASSIEHSQETQYF

SEQ ID NO: 608363 - protein, 15 aa, Homo sapiens
  CDR3 for alpha chain variable domain of TCR clone 304182 (TRAV21, TRAJ53)
CATLNSGGRNYKLTF

SEQ ID NO: 608364 - protein, 13 aa, Homo sapiens
  CDR3 for beta chain variable domain of TCR clone 304182 (TRBV7-9, TRBJ2-3)
CASSPGSTDTQYF

SEQ ID NO: 608365 - protein, 14 aa, Homo sapiens
  CDR3 for alpha chain variable domain of TCR clone 304183 (TRAV17, TRAJ22)
CATVLSGSARQLTF

SEQ ID NO: 608366 - protein, 13 aa, Homo sapiens
  CDR3 for beta chain variable domain of TCR clone 304183 (TRBV15, TRBJ1-6)
CATSGGLNSPLLV

SEQ ID NO: 608367 - protein, 14 aa, Homo sapiens
  CDR3 for alpha chain variable domain of TCR clone 304184 (TRAV12-1, TRAJ12)
CVVTRMDSSYKLIF

SEQ ID NO: 608368 - protein, 13 aa, Homo sapiens
  CDR3 for beta chain variable domain of TCR clone 304184 (TRBV20-1, TRBJ1-1)
CSARSGGNTEAFF

SEQ ID NO: 608369 - protein, 14 aa, Homo sapiens
  CDR3 for alpha chain variable domain of TCR clone 304185 (TRAV12-1, TRAJ27)
CGEHIRTNAGKSTL

SEQ ID NO: 608370 - protein, 15 aa, Homo sapiens
  CDR3 for beta chain variable domain of TCR clone 304185 (TRBV19, TRBJ1-1)
CASTSGQIQNTEAFF

SEQ ID NO: 608371 - protein, 12 aa, Homo sapiens
  CDR3 for alpha chain variable domain of TCR clone 304186 (TRAV2, TRAJ5)
CALDTGRRALTF

SEQ ID NO: 608372 - protein, 15 aa, Homo sapiens
  CDR3 for beta chain variable domain of TCR clone 304186 (TRBV10-3, TRBJ2-1)
CAISDVQGRAYEQFF

SEQ ID NO: 608373 - protein, 13 aa, Homo sapiens
  CDR3 for alpha chain variable domain of TCR clone 304187 (TRAV1-2, TRAJ9)
CAALNTGGFKTIF

SEQ ID NO: 608374 - protein, 14 aa, Homo sapiens
  CDR3 for beta chain variable domain of TCR clone 304187 (TRBV7-3, TRBJ2-1)
CASSLGTSANEQFF

SEQ ID NO: 608375 - protein, 11 aa, Homo sapiens
  CDR3 for alpha chain variable domain of TCR clone 304188 (TRAV3, TRAJ21)
CAVGNFNRFYF

SEQ ID NO: 608376 - protein, 14 aa, Homo sapiens
  CDR3 for beta chain variable domain of TCR clone 304188 (TRBV20-1, TRBJ2-2)
RSAPDTANTGELFF

SEQ ID NO: 608377 - protein, 14 aa, Homo sapiens
  CDR3 for alpha chain variable domain of TCR clone 304189 (TRAV26-1, TRAJ38)
CIADNAGNNRELIW

SEQ ID NO: 608378 - protein, 14 aa, Homo sapiens
  CDR3 for beta chain variable domain of TCR clone 304189 (TRBV20-1, TRBJ1-1)
CSAQTRIGGTEAFF

SEQ ID NO: 608379 - protein, 15 aa, Homo sapiens
  CDR3 for alpha chain variable domain of TCR clone 304190 (TRAV3, TRAJ42)
FAVRGGTGSQGNLIF

SEQ ID NO: 608380 - protein, 16 aa, Homo sapiens
  CDR3 for beta chain variable domain of TCR clone 304190 (TRBV13, TRBJ2-2)
CASSPRTGEHTGELFF

SEQ ID NO: 608381 - protein, 15 aa, Homo sapiens
  CDR3 for alpha chain variable domain of TCR clone 304191 (TRAV12-3, TRAJ6)
CAMSPASGGNYIPTF

SEQ ID NO: 608382 - protein, 15 aa, Homo sapiens
  CDR3 for beta chain variable domain of TCR clone 304191 (TRBV7-2, TRBJ2-1)
CASSSGLAGGNEQFF

SEQ ID NO: 608383 - protein, 16 aa, Homo sapiens
  CDR3 for alpha chain variable domain of TCR clone 304192 (TRAV30, TRAJ24)
CGTEIVDADSWGKFHF

SEQ ID NO: 608384 - protein, 13 aa, Homo sapiens
  CDR3 for beta chain variable domain of TCR clone 304192 (TRBV20-1, TRBJ1-1)
CSDRGGGNTEAFF

SEQ ID NO: 608385 - protein, 15 aa, Homo sapiens
  CDR3 for alpha chain variable domain of TCR clone 304193 (TRAV12-3, TRAJ6)
CAMSATTGGSYIPTF

SEQ ID NO: 608386 - protein, 15 aa, Homo sapiens
  CDR3 for beta chain variable domain of TCR clone 304193 (TRBV7-6, TRBJ2-5)
CASSKPTGPQETQYF

SEQ ID NO: 608387 - protein, 16 aa, Homo sapiens
  CDR3 for alpha chain variable domain of TCR clone 304194 (TRAV12-2, TRAJ40)
CAVIRGGTSGTYKYIF

SEQ ID NO: 608388 - protein, 15 aa, Homo sapiens
  CDR3 for beta chain variable domain of TCR clone 304194 (TRBV6-5, TRBJ2-1)
CASSYDAGAGNEQFF

SEQ ID NO: 608389 - protein, 12 aa, Homo sapiens
  CDR3 for alpha chain variable domain of TCR clone 304195 (TRAV12-1, TRAJ34)
CVVAGATGKLIF

SEQ ID NO: 608390 - protein, 12 aa, Homo sapiens
  CDR3 for beta chain variable domain of TCR clone 304195 (TRBV7-9, TRBJ1-1)
CASSVVRGEAFF

SEQ ID NO: 608391 - protein, 15 aa, Homo sapiens
  CDR3 for alpha chain variable domain of TCR clone 304196 (TRAV8-4, TRAJ37)
CAVSRGSCNTGKLIF

SEQ ID NO: 608392 - protein, 15 aa, Homo sapiens
  CDR3 for beta chain variable domain of TCR clone 304196 (TRBV5-1, TRBJ2-7)
CASSLDLTSSYEQYF

SEQ ID NO: 608393 - protein, 16 aa, Homo sapiens
  CDR3 for alpha chain variable domain of TCR clone 304197 (TRAV17, TRAJ28)
CATASVSGAGSYQLTF

SEQ ID NO: 608394 - protein, 20 aa, Homo sapiens
  CDR3 for beta chain variable domain of TCR clone 304197 (TRBV28, TRBJ2-1)
CASTPIGRSPGLAGGNEQFF

SEQ ID NO: 608395 - protein, 15 aa, Homo sapiens
  CDR3 for alpha chain variable domain of TCR clone 304198 (TRAV27, TRAJ38)
CAGRFNAGNNRKLIG

SEQ ID NO: 608396 - protein, 13 aa, Homo sapiens
  CDR3 for beta chain variable domain of TCR clone 304198 (TRBV20-1, TRBJ1-1)
CSARVGGNTEAFF

SEQ ID NO: 608397 - protein, 12 aa, Homo sapiens
  CDR3 for alpha chain variable domain of TCR clone 304199 (TRAV17, TRAJ20)
CATYSNDYKLSF

SEQ ID NO: 608398 - protein, 17 aa, Homo sapiens
  CDR3 for beta chain variable domain of TCR clone 304199 (TRBV13, TRBJ2-3)
CASSLSRVAGGRNTQYF

SEQ ID NO: 608399 - protein, 14 aa, Homo sapiens
  CDR3 for alpha chain variable domain of TCR clone 304200 (TRAV12-1, TRAJ3)
CVVNTGSSASKIIF

SEQ ID NO: 608400 - protein, 14 aa, Homo sapiens
  CDR3 for beta chain variable domain of TCR clone 304200 (TRBV20-1, TRBJ2-3)
CSARGGTSTDTQYF

SEQ ID NO: 608401 - protein, 14 aa, Homo sapiens
  CDR3 for alpha chain variable domain of TCR clone 304201 (TRAV12-1, TRAJ4)
CGEPFSGGYNKLIF

SEQ ID NO: 608402 - protein, 16 aa, Homo sapiens
  CDR3 for beta chain variable domain of TCR clone 304201 (TRBV5-1, TRBJ1-1)
CASSKTGTEVGTEAFF

SEQ ID NO: 608403 - protein, 16 aa, Homo sapiens
  CDR3 for alpha chain variable domain of TCR clone 304202 (TRAV8-4, TRAJ18)
CAVTANGGSPLGRLYF

SEQ ID NO: 608404 - protein, 14 aa, Homo sapiens
  CDR3 for beta chain variable domain of TCR clone 304202 (TRBV12-4, TRBJ1-2)
CASSSAGHIYGYTF

SEQ ID NO: 608405 - protein, 19 aa, Homo sapiens
  CDR3 for alpha chain variable domain of TCR clone 304203 (TRAV2, TRAJ20)
ILQVREADAAVYRDCKRSF

SEQ ID NO: 608406 - protein, 13 aa, Homo sapiens
  CDR3 for beta chain variable domain of TCR clone 304203 (TRBV15, TRBJ1-6)
CATSGGLNSPLLF

SEQ ID NO: 608407 - protein, 23 aa, Homo sapiens
  CDR3 for alpha chain variable domain of TCR clone 304204 (TRAV4, TRAJ26)
IPADRKSSTLSLPRVYYGQNFVF

SEQ ID NO: 608408 - protein, 16 aa, Homo sapiens
  CDR3 for beta chain variable domain of TCR clone 304204 (TRBV7-2, TRBJ1-2)
CASSSNQDRRRHGYTF

SEQ ID NO: 608409 - protein, 15 aa, Homo sapiens
  CDR3 for alpha chain variable domain of TCR clone 304205 (TRAV12-1, TRAJ44)
CVADEYTGTAGKLTF

SEQ ID NO: 608410 - protein, 14 aa, Homo sapiens
  CDR3 for beta chain variable domain of TCR clone 304205 (TRBV5-1, TRBJ1-2)
CASSLEPVNYGYTF

SEQ ID NO: 608411 - protein, 14 aa, Homo sapiens
  CDR3 for alpha chain variable domain of TCR clone 304206 (TRAV12-2, TRAJ13)
CAVRKTGGYQKVTF

SEQ ID NO: 608412 - protein, 15 aa, Homo sapiens
  CDR3 for beta chain variable domain of TCR clone 304206 (TRBV11-1, TRBJ2-1)
CASSNGGGSSNEQFF

SEQ ID NO: 608413 - protein, 14 aa, Homo sapiens
  CDR3 for alpha chain variable domain of TCR clone 304207 (TRAV21, TRAJ35)
CAVMPIGFGNVLHC

SEQ ID NO: 608414 - protein, 16 aa, Homo sapiens
  CDR3 for beta chain variable domain of TCR clone 304207 (TRBV12-4, TRBJ2-1)
CASSAVGQGNGDEQFF

SEQ ID NO: 608415 - protein, 14 aa, Homo sapiens
  CDR3 for alpha chain variable domain of TCR clone 304208 (TRAV8-1, TRAJ22)
CAAPSSGSARQLTF

SEQ ID NO: 608416 - protein, 14 aa, Homo sapiens
  CDR3 for beta chain variable domain of TCR clone 304208 (TRBV4-2, TRBJ2-1)
CASGLDRAYNEQFF

SEQ ID NO: 608417 - protein, 13 aa, Homo sapiens
  CDR3 for alpha chain variable domain of TCR clone 304209 (TRAV27, TRAJ41)
WAGEGNSGYALNF

SEQ ID NO: 608418 - protein, 14 aa, Homo sapiens
  CDR3 for beta chain variable domain of TCR clone 304209 (TRBV25-1, TRBJ1-1)
CASTHLGGNTEAFF

SEQ ID NO: 608419 - protein, 13 aa, Homo sapiens
  CDR3 for alpha chain variable domain of TCR clone 304210 (TRAV29/DV5, TRAJ49)
CAASTNTGNTFYF

SEQ ID NO: 608420 - protein, 13 aa, Homo sapiens
  CDR3 for beta chain variable domain of TCR clone 304210 (TRBV7-2, TRBJ1-4)
CASSLAGLEKLFF

SEQ ID NO: 608421 - protein, 12 aa, Homo sapiens
  CDR3 for alpha chain variable domain of TCR clone 304211 (TRAV12-3, TRAJ17)
CAMTLTGNKLTF

SEQ ID NO: 608422 - protein, 16 aa, Homo sapiens
  CDR3 for beta chain variable domain of TCR clone 304211 (TRBV12-4, TRBJ2-3)
CASSIPSGGGTDTQYF

SEQ ID NO: 608423 - protein, 23 aa, Homo sapiens
  CDR3 for alpha chain variable domain of TCR clone 304212 (TRAV26-1, TRAJ38)
CIADNAGNNHIQNPDPAVYQLRV

SEQ ID NO: 608424 - protein, 12 aa, Homo sapiens
  CDR3 for beta chain variable domain of TCR clone 304212 (TRBV11-2, TRBJ2-2)
CASSLGGGELFF

SEQ ID NO: 608425 - protein, 14 aa, Homo sapiens
  CDR3 for alpha chain variable domain of TCR clone 304213 (TRAV12-2, TRAJ13)
CAVKKTGGYQKVTF

SEQ ID NO: 608426 - protein, 14 aa, Homo sapiens
  CDR3 for beta chain variable domain of TCR clone 304213 (TRBV12-5, TRBJ2-5)
CASGSRPHQETQYF

SEQ ID NO: 608427 - protein, 15 aa, Homo sapiens
  CDR3 for alpha chain variable domain of TCR clone 304214 (TRAV34, TRAJ38)
CGADFTPGNNRKLTW

SEQ ID NO: 608428 - protein, 14 aa, Homo sapiens
  CDR3 for beta chain variable domain of TCR clone 304214 (TRBV12-5, TRBJ2-5)
CASGSRTHQETQYF

SEQ ID NO: 608429 - protein, 16 aa, Homo sapiens
  CDR3 for alpha chain variable domain of TCR clone 304215 (TRAV12-3, TRAJ28)
CAMRANSGAGSYQLTF

SEQ ID NO: 608430 - protein, 16 aa, Homo sapiens
  CDR3 for beta chain variable domain of TCR clone 304215 (TRBV7-3, TRBJ2-2)
CASSLKRGTLSGELFF

SEQ ID NO: 608431 - protein, 20 aa, Homo sapiens
  CDR3 for alpha chain variable domain of TCR clone 304216 (TRAV16, TRAJ32)
CSRGRLSHVLGGGSTNKLIF

SEQ ID NO: 608432 - protein, 15 aa, Homo sapiens
  CDR3 for beta chain variable domain of TCR clone 304216 (TRBV7-9, TRBJ1-2)
CASSLDREPNYGYTF

SEQ ID NO: 608433 - protein, 17 aa, Homo sapiens
  CDR3 for alpha chain variable domain of TCR clone 304217 (TRAV3, TRAJ6)
CAVRDGPRAGGSYIPTF

SEQ ID NO: 608434 - protein, 15 aa, Homo sapiens
  CDR3 for beta chain variable domain of TCR clone 304217 (TRBV7-9, TRBJ1-6)
CASSSPGRGNSHLHF

SEQ ID NO: 608435 - protein, 15 aa, Homo sapiens
  CDR3 for alpha chain variable domain of TCR clone 304218 (TRAV26-1, TRAJ29)
CIVRVEGSGNTPFVF

SEQ ID NO: 608436 - protein, 14 aa, Homo sapiens
  CDR3 for beta chain variable domain of TCR clone 304218 (TRBV18, TRBJ2-5)
CDSSPGVSQETQYF

SEQ ID NO: 608437 - protein, 15 aa, Homo sapiens
  CDR3 for alpha chain variable domain of TCR clone 304219 (TRAV13-2, TRAJ6)
FAEKVLAGGSYIPTF

SEQ ID NO: 608438 - protein, 13 aa, Homo sapiens
  CDR3 for beta chain variable domain of TCR clone 304219 (TRBV20-1, TRBJ1-1)
CSARGGGNTEAFF

SEQ ID NO: 608439 - protein, 10 aa, Homo sapiens
  CDR3 for alpha chain variable domain of TCR clone 304220 (TRAV12-1, TRAJ33)
CVASIYQLIW

SEQ ID NO: 608440 - protein, 15 aa, Homo sapiens
  CDR3 for beta chain variable domain of TCR clone 304220 (TRBV5-4, TRBJ1-4)
CASSHGDGENEKLFF

SEQ ID NO: 608441 - protein, 14 aa, Homo sapiens
  CDR3 for alpha chain variable domain of TCR clone 304221 (TRAV12-3, TRAJ15)
CAMIPPQVGTALIF

SEQ ID NO: 608442 - protein, 12 aa, Homo sapiens
  CDR3 for beta chain variable domain of TCR clone 304221 (TRBV11-2, TRBJ2-2)
CASSFGGGELFF

SEQ ID NO: 608443 - protein, 12 aa, Homo sapiens
  CDR3 for alpha chain variable domain of TCR clone 304222 (TRAV21, TRAJ49)
CAVTNNGNQFYF

SEQ ID NO: 608444 - protein, 17 aa, Homo sapiens
  CDR3 for beta chain variable domain of TCR clone 304222 (TRBV13, TRBJ2-3)
CASSLSRVAGGRNTQYF

SEQ ID NO: 608445 - protein, 12 aa, Homo sapiens
  CDR3 for alpha chain variable domain of TCR clone 304223 (TRAV2, TRAJ9)
CAVGAGGFKTIF

SEQ ID NO: 608446 - protein, 14 aa, Homo sapiens
  CDR3 for beta chain variable domain of TCR clone 304223 (TRBV11-2, TRBJ2-1)
CASSLGPSGGGSSS

SEQ ID NO: 608447 - protein, 15 aa, Homo sapiens
  CDR3 for alpha chain variable domain of TCR clone 304224 (TRAV17, TRAJ37)
CATDHGSSHTDKLIF

SEQ ID NO: 608448 - protein, 14 aa, Homo sapiens
  CDR3 for beta chain variable domain of TCR clone 304224 (TRBV7-2, TRBJ2-3)
CASSRTGGADTQYF

SEQ ID NO: 608449 - protein, 14 aa, Homo sapiens
  CDR3 for alpha chain variable domain of TCR clone 304225 (TRAV8-4, TRAJ17)
CAVSDQAAGNKLTF

SEQ ID NO: 608450 - protein, 15 aa, Homo sapiens
  CDR3 for beta chain variable domain of TCR clone 304225 (TRBV7-2, TRBJ1-2)
CASSLAPDRGVGYTF

SEQ ID NO: 608451 - protein, 15 aa, Homo sapiens
  CDR3 for alpha chain variable domain of TCR clone 304226 (TRAV21, TRAJ22)
CAVRLFFWSCKATDL

SEQ ID NO: 608452 - protein, 14 aa, Homo sapiens
  CDR3 for beta chain variable domain of TCR clone 304226 (TRBV19, TRBJ1-5)
CASRAPDSFLAQHF

SEQ ID NO: 608453 - protein, 13 aa, Homo sapiens
  CDR3 for alpha chain variable domain of TCR clone 304227 (TRAV30, TRAJ29)
CGTEDSGNTPLVF

SEQ ID NO: 608454 - protein, 14 aa, Homo sapiens
  CDR3 for beta chain variable domain of TCR clone 304227 (TRBV7-2, TRBJ2-7)
CASRSQGAAYEQYF

SEQ ID NO: 608455 - protein, 14 aa, Homo sapiens
  CDR3 for alpha chain variable domain of TCR clone 304228 (TRAV21, TRAJ10)
SHLPLTGGGNKLTF

SEQ ID NO: 608456 - protein, 11 aa, Homo sapiens
  CDR3 for beta chain variable domain of TCR clone 304228 (TRBV19, TRBJ1-1)
CASSIGSEALF

SEQ ID NO: 608457 - protein, 14 aa, Homo sapiens
  CDR3 for alpha chain variable domain of TCR clone 304229 (TRAV34, TRAJ22)
CGADTSGSARQLTF

SEQ ID NO: 608458 - protein, 13 aa, Homo sapiens
  CDR3 for beta chain variable domain of TCR clone 304229 (TRBV20-1, TRBJ1-1)
CSARVGGNTEAFF

SEQ ID NO: 608459 - protein, 19 aa, Homo sapiens
  CDR3 for alpha chain variable domain of TCR clone 304230 (TRAV26-1, TRAJ42)
CVLLRRQTSYGGSQGNLIF

SEQ ID NO: 608460 - protein, 16 aa, Homo sapiens
  CDR3 for beta chain variable domain of TCR clone 304230 (TRBV7-3, TRBJ2-2)
CASSLKRGTLSGELFF

SEQ ID NO: 608461 - protein, 12 aa, Homo sapiens
  CDR3 for alpha chain variable domain of TCR clone 304231 (TRAV1-2, TRAJ17)
CAVRAAGNKLTF

SEQ ID NO: 608462 - protein, 16 aa, Homo sapiens
  CDR3 for beta chain variable domain of TCR clone 304231 (TRBV20-1, TRBJ2-1)
RSAPGLAGSYSDEQFF

SEQ ID NO: 608463 - protein, 14 aa, Homo sapiens
  CDR3 for alpha chain variable domain of TCR clone 304232 (TRAV3, TRAJ9)
CAVRANTGGFKTIF

SEQ ID NO: 608464 - protein, 14 aa, Homo sapiens
  CDR3 for beta chain variable domain of TCR clone 304232 (TRBV15, TRBJ2-1)
CATSGVEDYNEQFF

SEQ ID NO: 608465 - protein, 15 aa, Homo sapiens
  CDR3 for alpha chain variable domain of TCR clone 304233 (TRAV8-6, TRAJ38)
CAVSSNAGNNRKLIW

SEQ ID NO: 608466 - protein, 16 aa, Homo sapiens
  CDR3 for beta chain variable domain of TCR clone 304233 (TRBV4-2, TRBJ1-1)
CASSPSPGRAAPEAFF

SEQ ID NO: 608467 - protein, 13 aa, Homo sapiens
  CDR3 for alpha chain variable domain of TCR clone 304234 (TRAV29/DV5, TRAJ33)
CPASVESNYQLIW

SEQ ID NO: 608468 - protein, 14 aa, Homo sapiens
  CDR3 for beta chain variable domain of TCR clone 304234 (TRBV11-2, TRBJ2-5)
CASSRTGGIETQYF

SEQ ID NO: 608469 - protein, 14 aa, Homo sapiens
  CDR3 for alpha chain variable domain of TCR clone 304235 (TRAV9-2, TRAJ39)
CALYIYNAGNMLTF

SEQ ID NO: 608470 - protein, 15 aa, Homo sapiens
  CDR3 for beta chain variable domain of TCR clone 304235 (TRBV19, TRBJ2-4)
CASGGPRRGENIQYF

SEQ ID NO: 608471 - protein, 13 aa, Homo sapiens
  CDR3 for alpha chain variable domain of TCR clone 304236 (TRAV16, TRAJ9)
CALRATGGFKSIF

SEQ ID NO: 608472 - protein, 16 aa, Homo sapiens
  CDR3 for beta chain variable domain of TCR clone 304236 (TRBV5-1, TRBJ1-3)
CASSRSGEDSGNTIYF

SEQ ID NO: 608473 - protein, 14 aa, Homo sapiens
  CDR3 for alpha chain variable domain of TCR clone 304237 (TRAV1-2, TRAJ8)
CAVREDIGFQKLVF

SEQ ID NO: 608474 - protein, 13 aa, Homo sapiens
  CDR3 for beta chain variable domain of TCR clone 304237 (TRBV4-2, TRBJ2-2)
CASEDRGTGELFF

SEQ ID NO: 608475 - protein, 12 aa, Homo sapiens
  CDR3 for alpha chain variable domain of TCR clone 304238 (TRAV13-2, TRAJ16)
CAENMYGQKLLF

SEQ ID NO: 608476 - protein, 15 aa, Homo sapiens
  CDR3 for beta chain variable domain of TCR clone 304238 (TRBV28, TRBJ2-7)
CASSPGGRGFYEQYF

SEQ ID NO: 608477 - protein, 13 aa, Homo sapiens
  CDR3 for alpha chain variable domain of TCR clone 304239 (TRAV13-1, TRAJ6)
CAASKGGSYMPTF

SEQ ID NO: 608478 - protein, 13 aa, Homo sapiens
  CDR3 for beta chain variable domain of TCR clone 304239 (TRBV7-9, TRBJ2-5)
CASLPSGRETQYF

SEQ ID NO: 608479 - protein, 15 aa, Homo sapiens
  CDR3 for alpha chain variable domain of TCR clone 304240 (TRAV12-1, TRAJ44)
CVADLPTGTASKLTF

SEQ ID NO: 608480 - protein, 12 aa, Homo sapiens
  CDR3 for beta chain variable domain of TCR clone 304240 (TRBV9, TRBJ1-6)
CASSVLDSPLHF

SEQ ID NO: 608481 - protein, 14 aa, Homo sapiens
  CDR3 for alpha chain variable domain of TCR clone 304241 (TRAV1-2, TRAJ8)
CAVREGTGFQKLVF

SEQ ID NO: 608482 - protein, 13 aa, Homo sapiens
  CDR3 for beta chain variable domain of TCR clone 304241 (TRBV24-1, TRBJ2-2)
CATSDWSTGELFF

SEQ ID NO: 608483 - protein, 12 aa, Homo sapiens
  CDR3 for alpha chain variable domain of TCR clone 304242 (TRAV8-4, TRAJ31)
CAVRDSNARLMF

SEQ ID NO: 608484 - protein, 16 aa, Homo sapiens
  CDR3 for beta chain variable domain of TCR clone 304242 (TRBV5-7, TRBJ1-4)
CASSPSGGLKTEKLFF

SEQ ID NO: 608485 - protein, 11 aa, Homo sapiens
  CDR3 for alpha chain variable domain of TCR clone 304243 (TRAV1-1, TRAJ23)
CAVRQGGKLIF

SEQ ID NO: 608486 - protein, 15 aa, Homo sapiens
  CDR3 for beta chain variable domain of TCR clone 304243 (TRBV4-1, TRBJ1-4)
CASSDTGGTNERLFF

SEQ ID NO: 608487 - protein, 16 aa, Homo sapiens
  CDR3 for alpha chain variable domain of TCR clone 304244 (TRAV38-1, TRAJ39)
CAFMKHYLGAGNMLTF

SEQ ID NO: 608488 - protein, 19 aa, Homo sapiens
  CDR3 for beta chain variable domain of TCR clone 304244 (TRBV6-7, TRBJ2-1)
CASSSTAGERGGGVNEQFF

SEQ ID NO: 608489 - protein, 11 aa, Homo sapiens
  CDR3 for alpha chain variable domain of TCR clone 304245 (TRAV12-1, TRAJ26)
CVVAYGPNFVF

SEQ ID NO: 608490 - protein, 15 aa, Homo sapiens
  CDR3 for beta chain variable domain of TCR clone 304245 (TRBV12-4, TRBJ2-5)
CASSGTGQAQETQYF

SEQ ID NO: 608491 - protein, 13 aa, Homo sapiens
  CDR3 for alpha chain variable domain of TCR clone 304246 (TRAV13-2, TRAJ48)
CAEMDFGNEKLTF

SEQ ID NO: 608492 - protein, 14 aa, Homo sapiens
  CDR3 for beta chain variable domain of TCR clone 304246 (TRBV7-8, TRBJ2-3)
CASSLEAGTDTQYF

SEQ ID NO: 608493 - protein, 11 aa, Homo sapiens
  CDR3 for alpha chain variable domain of TCR clone 304247 (TRAV12-3, TRAJ27)
CAMANAGKSTF

SEQ ID NO: 608494 - protein, 15 aa, Homo sapiens
  CDR3 for beta chain variable domain of TCR clone 304247 (TRBV20-1, TRBJ2-7)
CSAESGTSGAYEQYF

SEQ ID NO: 608495 - protein, 15 aa, Homo sapiens
  CDR3 for alpha chain variable domain of TCR clone 304248 (TRAV12-1, TRAJ32)
CVVTPYGGATNKLIF

SEQ ID NO: 608496 - protein, 22 aa, Homo sapiens
  CDR3 for beta chain variable domain of TCR clone 304248 (TRBV19, TRBJ2-1)
CASSVRDRVTGTSGRIYNEQFF

SEQ ID NO: 608497 - protein, 14 aa, Homo sapiens
  CDR3 for alpha chain variable domain of TCR clone 304249 (TRAV12-2, TRAJ5)
CAVNRSTGRRALTF

SEQ ID NO: 608498 - protein, 15 aa, Homo sapiens
  CDR3 for beta chain variable domain of TCR clone 304249 (TRBV5-1, TRBJ1-2)
CASSPGDRGSYGYTF

SEQ ID NO: 608499 - protein, 12 aa, Homo sapiens
  CDR3 for alpha chain variable domain of TCR clone 304250 (TRAV17, TRAJ53)
CATECSNYKLTF

SEQ ID NO: 608500 - protein, 19 aa, Homo sapiens
  CDR3 for beta chain variable domain of TCR clone 304250 (TRBV5-1, TRBJ2-3)
CASSLWTSGGITTPDTQYF

SEQ ID NO: 608501 - protein, 13 aa, Homo sapiens
  CDR3 for alpha chain variable domain of TCR clone 304251 (TRAV25, TRAJ26)
CAGLDNYGQNFGF

SEQ ID NO: 608502 - protein, 15 aa, Homo sapiens
  CDR3 for beta chain variable domain of TCR clone 304251 (TRBV10-3, TRBJ2-1)
CAIRNGTSGHNEQFF

SEQ ID NO: 608503 - protein, 13 aa, Homo sapiens
  CDR3 for alpha chain variable domain of TCR clone 304252 (TRAV3, TRAJ30)
CAVRDRGDDKIIF

SEQ ID NO: 608504 - protein, 16 aa, Homo sapiens
  CDR3 for beta chain variable domain of TCR clone 304252 (TRBV7-3, TRBJ2-2)
CASILKRGTLSGELFF

SEQ ID NO: 608505 - protein, 13 aa, Homo sapiens
  CDR3 for alpha chain variable domain of TCR clone 304253 (TRAV12-2, TRAJ3)
CASQYSSASKIIF

SEQ ID NO: 608506 - protein, 11 aa, Homo sapiens
  CDR3 for beta chain variable domain of TCR clone 304253 (TRBV20-1, TRBJ2-3)
CSGTSSTTQYF

SEQ ID NO: 608507 - protein, 13 aa, Homo sapiens
  CDR3 for alpha chain variable domain of TCR clone 304254 (TRAV13-2, TRAJ48)
CAEMDFGNEKLTF

SEQ ID NO: 608508 - protein, 15 aa, Homo sapiens
  CDR3 for beta chain variable domain of TCR clone 304254 (TRBV7-9, TRBJ2-2)
CASGPLDTFPGELFF

SEQ ID NO: 608509 - protein, 11 aa, Homo sapiens
  CDR3 for alpha chain variable domain of TCR clone 304255 (TRAV23/DV6, TRAJ48)
CAPRWGEKLTF

SEQ ID NO: 608510 - protein, 15 aa, Homo sapiens
  CDR3 for beta chain variable domain of TCR clone 304255 (TRBV12-4, TRBJ2-5)
CASSPPTGLQETQYF

SEQ ID NO: 608511 - protein, 11 aa, Homo sapiens
  CDR3 for alpha chain variable domain of TCR clone 304256 (TRAV12-1, TRAJ37)
CVVNTPGKLIF

SEQ ID NO: 608512 - protein, 13 aa, Homo sapiens
  CDR3 for beta chain variable domain of TCR clone 304256 (TRBV12-4, TRBJ1-5)
CASSPDRAQPQHC

SEQ ID NO: 608513 - protein, 14 aa, Homo sapiens
  CDR3 for alpha chain variable domain of TCR clone 304257 (TRAV1-2, TRAJ16)
CAVNRFSDCQELLF

SEQ ID NO: 608514 - protein, 13 aa, Homo sapiens
  CDR3 for beta chain variable domain of TCR clone 304257 (TRBV19, TRBJ2-7)
CASSTSGSYEQYF

SEQ ID NO: 608515 - protein, 14 aa, Homo sapiens
  CDR3 for alpha chain variable domain of TCR clone 304258 (TRAV3, TRAJ21)
CAVESQANFNKFYF

SEQ ID NO: 608516 - protein, 12 aa, Homo sapiens
  CDR3 for beta chain variable domain of TCR clone 304258 (TRBV6-3, TRBJ2-7)
CASSLTPYEQSF

SEQ ID NO: 608517 - protein, 13 aa, Homo sapiens
  CDR3 for alpha chain variable domain of TCR clone 304259 (TRAV29/DV5, TRAJ31)
CAASRNNNARLMF

SEQ ID NO: 608518 - protein, 15 aa, Homo sapiens
  CDR3 for beta chain variable domain of TCR clone 304259 (TRBV7-3, TRBJ2-1)
CASSLGQGPFGEQFF

SEQ ID NO: 608519 - protein, 10 aa, Homo sapiens
  CDR3 for alpha chain variable domain of TCR clone 304260 (TRAV1-2, TRAJ18)
CAVRGEAQPW

SEQ ID NO: 608520 - protein, 15 aa, Homo sapiens
  CDR3 for beta chain variable domain of TCR clone 304260 (TRBV20-1, TRBJ2-1)
CSAGGGLLAGDEQFF

SEQ ID NO: 608521 - protein, 13 aa, Homo sapiens
  CDR3 for alpha chain variable domain of TCR clone 304261 (TRAV8-3, TRAJ37)
CAVPPSNTGKLIF

SEQ ID NO: 608522 - protein, 12 aa, Homo sapiens
  CDR3 for beta chain variable domain of TCR clone 304261 (TRBV11-2, TRBJ2-1)
CASSPGNNEQFF

SEQ ID NO: 608523 - protein, 15 aa, Homo sapiens
  CDR3 for alpha chain variable domain of TCR clone 304262 (TRAV27, TRAJ38)
CAGRFNAGNNRKLIW

SEQ ID NO: 608524 - protein, 15 aa, Homo sapiens
  CDR3 for beta chain variable domain of TCR clone 304262 (TRBV10-3, TRBJ2-1)
CAIRNGTSGHNEQFF

SEQ ID NO: 608525 - protein, 12 aa, Homo sapiens
  CDR3 for alpha chain variable domain of TCR clone 304263 (TRAV12-3, TRAJ20)
CAMVRGDYNLSF

SEQ ID NO: 608526 - protein, 16 aa, Homo sapiens
  CDR3 for beta chain variable domain of TCR clone 304263 (TRBV5-1, TRBJ2-3)
CASSLGLAVYTDTQYF

SEQ ID NO: 608527 - protein, 18 aa, Homo sapiens
  CDR3 for alpha chain variable domain of TCR clone 304264 (TRAV21, TRAJ52)
CAVRPSPAGGTSYGKLTF

SEQ ID NO: 608528 - protein, 16 aa, Homo sapiens
  CDR3 for beta chain variable domain of TCR clone 304264 (TRBV13, TRBJ2-3)
CQQPLQGSGGMNTQYF

SEQ ID NO: 608529 - protein, 13 aa, Homo sapiens
  CDR3 for alpha chain variable domain of TCR clone 304265 (TRAV4, TRAJ15)
CPVGPEAGTALIF

SEQ ID NO: 608530 - protein, 15 aa, Homo sapiens
  CDR3 for beta chain variable domain of TCR clone 304265 (TRBV7-2, TRBJ2-1)
CASSFDPGRRNEQFF

SEQ ID NO: 608531 - protein, 14 aa, Homo sapiens
  CDR3 for alpha chain variable domain of TCR clone 304266 (TRAV16, TRAJ17)
CAPRIKAAGNKLTF

SEQ ID NO: 608532 - protein, 17 aa, Homo sapiens
  CDR3 for beta chain variable domain of TCR clone 304266 (TRBV7-2, TRBJ2-3)
CASSSYCGTRRADTQYF

SEQ ID NO: 608533 - protein, 14 aa, Homo sapiens
  CDR3 for alpha chain variable domain of TCR clone 304267 (TRAV2, TRAJ37)
CAVDFTSNTGKLIF

SEQ ID NO: 608534 - protein, 14 aa, Homo sapiens
  CDR3 for beta chain variable domain of TCR clone 304267 (TRBV25-1, TRBJ1-2)
CASSDAGANYGYTF

SEQ ID NO: 608535 - protein, 12 aa, Homo sapiens
  CDR3 for alpha chain variable domain of TCR clone 304268 (TRAV13-1, TRAJ49)
CAASIRSNQFYF

SEQ ID NO: 608536 - protein, 14 aa, Homo sapiens
  CDR3 for beta chain variable domain of TCR clone 304268 (TRBV7-2, TRBJ2-1)
CASSPGLEGNEQFF

SEQ ID NO: 608537 - protein, 14 aa, Homo sapiens
  CDR3 for alpha chain variable domain of TCR clone 304269 (TRAV8-4, TRAJ13)
CAVTLSGGYQQVTF

SEQ ID NO: 608538 - protein, 16 aa, Homo sapiens
  CDR3 for beta chain variable domain of TCR clone 304269 (TRBV29-1, TRBJ2-7)
CSVEDAEDGTAYEQYF

SEQ ID NO: 608539 - protein, 14 aa, Homo sapiens
  CDR3 for alpha chain variable domain of TCR clone 304270 (TRAV1-2, TRAJ16)
CAVNRFSVGQKLLF

SEQ ID NO: 608540 - protein, 14 aa, Homo sapiens
  CDR3 for beta chain variable domain of TCR clone 304270 (TRBV19, TRBJ2-1)
CASPTFVLSGEQFF

SEQ ID NO: 608541 - protein, 15 aa, Homo sapiens
  CDR3 for alpha chain variable domain of TCR clone 304271 (TRAV26-2, TRAJ39)
CSLRGNNNAGNMLTF

SEQ ID NO: 608542 - protein, 13 aa, Homo sapiens
  CDR3 for beta chain variable domain of TCR clone 304271 (TRBV12-5, TRBJ2-3)
CASGDRQSDTQYF

SEQ ID NO: 608543 - protein, 18 aa, Homo sapiens
  CDR3 for alpha chain variable domain of TCR clone 304272 (TRAV12-3, TRAJ52)
CAMSRTNAGGTSYGKLTF

SEQ ID NO: 608544 - protein, 15 aa, Homo sapiens
  CDR3 for beta chain variable domain of TCR clone 304272 (TRBV19, TRBJ1-2)
CASSVGQVLKYGYTF

SEQ ID NO: 608545 - protein, 10 aa, Homo sapiens
  CDR3 for alpha chain variable domain of TCR clone 304273 (TRAV36/DV7, TRAJ48)
CAVGNEKSTF

SEQ ID NO: 608546 - protein, 12 aa, Homo sapiens
  CDR3 for beta chain variable domain of TCR clone 304273 (TRBV20-1, TRBJ2-5)
CSAGGAGETQYF

SEQ ID NO: 608547 - protein, 14 aa, Homo sapiens
  CDR3 for alpha chain variable domain of TCR clone 304274 (TRAV12-1, TRAJ23)
CVVMIYNQGGKLIF

SEQ ID NO: 608548 - protein, 23 aa, Homo sapiens
  CDR3 for beta chain variable domain of TCR clone 304274 (TRBV7-3, TRBJ1-6)
CASSLTSRDEASDPSSCNSPLHF

SEQ ID NO: 608549 - protein, 14 aa, Homo sapiens
  CDR3 for alpha chain variable domain of TCR clone 304275 (TRAV17, TRAJ16)
CATADFSDGQKLLF

SEQ ID NO: 608550 - protein, 14 aa, Homo sapiens
  CDR3 for beta chain variable domain of TCR clone 304275 (TRBV18, TRBJ2-1)
CQLTTSASYNEQFF

SEQ ID NO: 608551 - protein, 15 aa, Homo sapiens
  CDR3 for alpha chain variable domain of TCR clone 304276 (TRAV23/DV6, TRAJ4)
CAASPLRGGYNKLIF

SEQ ID NO: 608552 - protein, 12 aa, Homo sapiens
  CDR3 for beta chain variable domain of TCR clone 304276 (TRBV11-2, TRBJ2-2)
CASSLPTGELFF

SEQ ID NO: 608553 - protein, 14 aa, Homo sapiens
  CDR3 for alpha chain variable domain of TCR clone 304277 (TRAV1-2, TRAJ8)
CAVREDTGFQQLVF

SEQ ID NO: 608554 - protein, 13 aa, Homo sapiens
  CDR3 for beta chain variable domain of TCR clone 304277 (TRBV12-4, TRBJ1-5)
CASSPDRAQPQHF

SEQ ID NO: 608555 - protein, 14 aa, Homo sapiens
  CDR3 for alpha chain variable domain of TCR clone 304278 (TRAV12-3, TRAJ42)
CAMNYGGSQGNLIF

SEQ ID NO: 608556 - protein, 13 aa, Homo sapiens
  CDR3 for beta chain variable domain of TCR clone 304278 (TRBV19, TRBJ1-2)
CASSVPGQDGYTF

SEQ ID NO: 608557 - protein, 13 aa, Homo sapiens
  CDR3 for alpha chain variable domain of TCR clone 304279 (TRAV13-1, TRAJ39)
CAASIWAGNMLTF

SEQ ID NO: 608558 - protein, 17 aa, Homo sapiens
  CDR3 for beta chain variable domain of TCR clone 304279 (TRBV7-9, TRBJ1-1)
CASSYSNRGALKLSLDK

SEQ ID NO: 608559 - protein, 13 aa, Homo sapiens
  CDR3 for alpha chain variable domain of TCR clone 304280 (TRAV3, TRAJ21)
CAVREPDSNKFYF

SEQ ID NO: 608560 - protein, 14 aa, Homo sapiens
  CDR3 for beta chain variable domain of TCR clone 304280 (TRBV12-5, TRBJ2-5)
CASGSRTHQETQYF

SEQ ID NO: 608561 - protein, 19 aa, Homo sapiens
  CDR3 for alpha chain variable domain of TCR clone 304281 (TRAV4, TRAJ5)
CTTASCGRTMDTGRRALTF

SEQ ID NO: 608562 - protein, 13 aa, Homo sapiens
  CDR3 for beta chain variable domain of TCR clone 304281 (TRBV4-3, TRBJ1-2)
CASSLSASGGYTF

SEQ ID NO: 608563 - protein, 14 aa, Homo sapiens
  CDR3 for alpha chain variable domain of TCR clone 304282 (TRAV26-1, TRAJ52)
CIPAGGTSYGKLTF

SEQ ID NO: 608564 - protein, 14 aa, Homo sapiens
  CDR3 for beta chain variable domain of TCR clone 304282 (TRBV19, TRBJ2-1)
CASPTFVLSGEQFF

SEQ ID NO: 608565 - protein, 11 aa, Homo sapiens
  CDR3 for alpha chain variable domain of TCR clone 304283 (TRAV12-2, TRAJ29)
CAVTLLSPLVF

SEQ ID NO: 608566 - protein, 16 aa, Homo sapiens
  CDR3 for beta chain variable domain of TCR clone 304283 (TRBV19, TRBJ1-5)
CASSIDRGGPRQPQHF

SEQ ID NO: 608567 - protein, 14 aa, Homo sapiens
  CDR3 for alpha chain variable domain of TCR clone 304284 (TRAV8-3, TRAJ4)
CAVGAAGGYNKLIF

SEQ ID NO: 608568 - protein, 13 aa, Homo sapiens
  CDR3 for beta chain variable domain of TCR clone 304284 (TRBV29-1, TRBJ2-1)
CSVEGGRVNEQFF

SEQ ID NO: 608569 - protein, 16 aa, Homo sapiens
  CDR3 for alpha chain variable domain of TCR clone 304285 (TRAV30, TRAJ24)
CGTEIVDTDSWGKFQF

SEQ ID NO: 608570 - protein, 13 aa, Homo sapiens
  CDR3 for beta chain variable domain of TCR clone 304285 (TRBV18, TRBJ1-2)
CASSASATEGYTF

SEQ ID NO: 608571 - protein, 18 aa, Homo sapiens
  CDR3 for alpha chain variable domain of TCR clone 304286 (TRAV21, TRAJ52)
CAVRPSPAGGTSYGKLTF

SEQ ID NO: 608572 - protein, 12 aa, Homo sapiens
  CDR3 for beta chain variable domain of TCR clone 304286 (TRBV14, TRBJ2-5)
CASSHLKETQYF

SEQ ID NO: 608573 - protein, 15 aa, Homo sapiens
  CDR3 for alpha chain variable domain of TCR clone 304287 (TRAV27, TRAJ38)
CAARRTAGNNRKLIL

SEQ ID NO: 608574 - protein, 13 aa, Homo sapiens
  CDR3 for beta chain variable domain of TCR clone 304287 (TRBV12-5, TRBJ2-3)
CASGDRQSDTQYF

SEQ ID NO: 608575 - protein, 15 aa, Homo sapiens
  CDR3 for alpha chain variable domain of TCR clone 304288 (TRAV26-1, TRAJ22)
CIVRVSFRFCKATAL

SEQ ID NO: 608576 - protein, 13 aa, Homo sapiens
  CDR3 for beta chain variable domain of TCR clone 304288 (TRBV7-9, TRBJ1-2)
CASSLKQNYGYTF

SEQ ID NO: 608577 - protein, 13 aa, Homo sapiens
  CDR3 for alpha chain variable domain of TCR clone 304289 (TRAV21, TRAJ27)
CAARPGNAGKSTF

SEQ ID NO: 608578 - protein, 16 aa, Homo sapiens
  CDR3 for beta chain variable domain of TCR clone 304289 (TRBV5-5, TRBJ1-2)
CSSLGSLDGQSEGYTF

SEQ ID NO: 608579 - protein, 14 aa, Homo sapiens
  CDR3 for alpha chain variable domain of TCR clone 304290 (TRAV3, TRAJ9)
CAVRLNTGGFKTIF

SEQ ID NO: 608580 - protein, 13 aa, Homo sapiens
  CDR3 for beta chain variable domain of TCR clone 304290 (TRBV7-9, TRBJ2-3)
CASSPGSTDTQYF

SEQ ID NO: 608581 - protein, 14 aa, Homo sapiens
  CDR3 for alpha chain variable domain of TCR clone 304291 (TRAV38-2/DV8, TRAJ40)
CAYTRISGTYKYIF

SEQ ID NO: 608582 - protein, 15 aa, Homo sapiens
  CDR3 for beta chain variable domain of TCR clone 304291 (TRBV12-4, TRBJ2-5)
CASSPPTGLQETQYF

SEQ ID NO: 608583 - protein, 12 aa, Homo sapiens
  CDR3 for alpha chain variable domain of TCR clone 304292 (TRAV21, TRAJ27)
CAPPRNAGKSTF

SEQ ID NO: 608584 - protein, 13 aa, Homo sapiens
  CDR3 for beta chain variable domain of TCR clone 304292 (TRBV2, TRBJ1-1)
CARNPTGGFHAFF

SEQ ID NO: 608585 - protein, 13 aa, Homo sapiens
  CDR3 for alpha chain variable domain of TCR clone 304293 (TRAV27, TRAJ16)
CAGACSGGQKLLF

SEQ ID NO: 608586 - protein, 14 aa, Homo sapiens
  CDR3 for beta chain variable domain of TCR clone 304293 (TRBV11-2, TRBJ1-3)
CASSLAVPGNTMYS

SEQ ID NO: 608587 - protein, 12 aa, Homo sapiens
  CDR3 for alpha chain variable domain of TCR clone 304294 (TRAV16, TRAJ57)
CALEGGSEKLVF

SEQ ID NO: 608588 - protein, 12 aa, Homo sapiens
  CDR3 for beta chain variable domain of TCR clone 304294 (TRBV28, TRBJ2-7)
CASIGRPYEQYF

SEQ ID NO: 608589 - protein, 12 aa, Homo sapiens
  CDR3 for alpha chain variable domain of TCR clone 304295 (TRAV13-1, TRAJ20)
CAASMGGYKLSF

SEQ ID NO: 608590 - protein, 15 aa, Homo sapiens
  CDR3 for beta chain variable domain of TCR clone 304295 (TRBV11-3, TRBJ2-3)
CASNGGLDSTDTQYF

SEQ ID NO: 608591 - protein, 15 aa, Homo sapiens
  CDR3 for alpha chain variable domain of TCR clone 304296 (TRAV3, TRAJ7)
CAVRDKDNGNNRLAL

SEQ ID NO: 608592 - protein, 19 aa, Homo sapiens
  CDR3 for beta chain variable domain of TCR clone 304296 (TRBV5-8, TRBJ2-3)
CASSFLGTSGSHRTDTQYF

SEQ ID NO: 608593 - protein, 15 aa, Homo sapiens
  CDR3 for alpha chain variable domain of TCR clone 304297 (TRAV8-3, TRAJ45)
CASSYSGGGAEGLTF

SEQ ID NO: 608594 - protein, 16 aa, Homo sapiens
  CDR3 for beta chain variable domain of TCR clone 304297 (TRBV20-1, TRBJ2-2)
CSASASGIPGAGELFF

SEQ ID NO: 608595 - protein, 13 aa, Homo sapiens
  CDR3 for alpha chain variable domain of TCR clone 304298 (TRAV26-1, )
CIVSHRVEGFWNQ

SEQ ID NO: 608596 - protein, 14 aa, Homo sapiens
  CDR3 for beta chain variable domain of TCR clone 304298 (TRBV20-1, TRBJ2-7)
CSAWTALSSYEQYC

SEQ ID NO: 608597 - protein, 14 aa, Homo sapiens
  CDR3 for alpha chain variable domain of TCR clone 304299 (TRAV8-4, TRAJ9)
CTVRINTGGFKTIF

SEQ ID NO: 608598 - protein, 15 aa, Homo sapiens
  CDR3 for beta chain variable domain of TCR clone 304299 (TRBV20-1, TRBJ2-7)
CSARDRVSGMDEQYF

SEQ ID NO: 608599 - protein, 15 aa, Homo sapiens
  CDR3 for alpha chain variable domain of TCR clone 304300 (TRAV3, TRAJ17)
CAVSPKEAAGNKLTF

SEQ ID NO: 608600 - protein, 15 aa, Homo sapiens
  CDR3 for beta chain variable domain of TCR clone 304300 (TRBV6-5, TRBJ2-1)
CASSYDAGAGNEQFF

SEQ ID NO: 608601 - protein, 10 aa, Homo sapiens
  CDR3 for alpha chain variable domain of TCR clone 304301 (TRAV12-3, TRAJ49)
CAINDDQFYF

SEQ ID NO: 608602 - protein, 16 aa, Homo sapiens
  CDR3 for beta chain variable domain of TCR clone 304301 (TRBV20-1, TRBJ1-4)
CSAPGQGLLTNEKLFF

SEQ ID NO: 608603 - protein, 13 aa, Homo sapiens
  CDR3 for alpha chain variable domain of TCR clone 304302 (TRAV26-2, TRAJ43)
CILRAVNNNEMRF

SEQ ID NO: 608604 - protein, 13 aa, Homo sapiens
  CDR3 for beta chain variable domain of TCR clone 304302 (TRBV14, TRBJ2-1)
CASSQDRRNEQFF

SEQ ID NO: 608605 - protein, 16 aa, Homo sapiens
  CDR3 for alpha chain variable domain of TCR clone 304303 (TRAV3, TRAJ18)
CAVRDGRGSTLGRRSF

SEQ ID NO: 608606 - protein, 15 aa, Homo sapiens
  CDR3 for beta chain variable domain of TCR clone 304303 (TRBV7-9, TRBJ1-6)
CASSSPGRGNSPLHF

SEQ ID NO: 608607 - protein, 12 aa, Homo sapiens
  CDR3 for alpha chain variable domain of TCR clone 304304 (TRAV12-2, TRAJ42)
CAVGGSQGDLIF

SEQ ID NO: 608608 - protein, 16 aa, Homo sapiens
  CDR3 for beta chain variable domain of TCR clone 304304 (TRBV7-3, TRBJ2-2)
CASSLKRGTLSGELFF

SEQ ID NO: 608609 - protein, 13 aa, Homo sapiens
  CDR3 for alpha chain variable domain of TCR clone 304305 (TRAV12-1, TRAJ9)
CVVLNTGGFKTIF

SEQ ID NO: 608610 - protein, 13 aa, Homo sapiens
  CDR3 for beta chain variable domain of TCR clone 304305 (TRBV20-1, TRBJ1-1)
CSARGGGNTETFF

SEQ ID NO: 608611 - protein, 14 aa, Homo sapiens
  CDR3 for alpha chain variable domain of TCR clone 304306 (TRAV26-1, TRAJ38)
CIADNAGNNRKLIW

SEQ ID NO: 608612 - protein, 16 aa, Homo sapiens
  CDR3 for beta chain variable domain of TCR clone 304306 (TRBV7-8, TRBJ2-3)
CASSTEGQRETDTQYF

SEQ ID NO: 608613 - protein, 14 aa, Homo sapiens
  CDR3 for alpha chain variable domain of TCR clone 304307 (TRAV1-2, TRAJ16)
CAVNRFSDGQNLLF

SEQ ID NO: 608614 - protein, 18 aa, Homo sapiens
  CDR3 for beta chain variable domain of TCR clone 304307 (TRBV20-1, TRBJ2-6)
CSAETTPTHGSGANVLTF

SEQ ID NO: 608615 - protein, 17 aa, Homo sapiens
  CDR3 for alpha chain variable domain of TCR clone 304308 (TRAV8-3, TRAJ4)
CAVGVILVATISRFLEQ

SEQ ID NO: 608616 - protein, 14 aa, Homo sapiens
  CDR3 for beta chain variable domain of TCR clone 304308 (TRBV7-9, TRBJ2-3)
CASSLEDGTDTQYF

SEQ ID NO: 608617 - protein, 14 aa, Homo sapiens
  CDR3 for alpha chain variable domain of TCR clone 304309 (TRAV3, TRAJ28)
CAVRRGAGSYQLAF

SEQ ID NO: 608618 - protein, 16 aa, Homo sapiens
  CDR3 for beta chain variable domain of TCR clone 304309 (TRBV4-1, TRBJ2-7)
CASSQEWTSGPLEQYF

SEQ ID NO: 608619 - protein, 14 aa, Homo sapiens
  CDR3 for alpha chain variable domain of TCR clone 304310 (TRAV35, TRAJ13)
CAGSPSGGYQKVTF

SEQ ID NO: 608620 - protein, 15 aa, Homo sapiens
  CDR3 for beta chain variable domain of TCR clone 304310 (TRBV2, TRBJ1-2)
CASSEIGGANYGYTF

SEQ ID NO: 608621 - protein, 14 aa, Homo sapiens
  CDR3 for alpha chain variable domain of TCR clone 304311 (TRAV27, TRAJ44)
CAASFTGTASKITF

SEQ ID NO: 608622 - protein, 13 aa, Homo sapiens
  CDR3 for beta chain variable domain of TCR clone 304311 (TRBV11-2, TRBJ1-5)
CQQLRQGRQPQHF

SEQ ID NO: 608623 - protein, 14 aa, Homo sapiens
  CDR3 for alpha chain variable domain of TCR clone 304312 (TRAV13-1, TRAJ35)
CAASKRGFGNVLHC

SEQ ID NO: 608624 - protein, 13 aa, Homo sapiens
  CDR3 for beta chain variable domain of TCR clone 304312 (TRBV7-3, TRBJ1-1)
CASSQDWGAEAFL

SEQ ID NO: 608625 - protein, 15 aa, Homo sapiens
  CDR3 for alpha chain variable domain of TCR clone 304313 (TRAV4, TRAJ8)
CLVGEQHTGFQKLVC

SEQ ID NO: 608626 - protein, 15 aa, Homo sapiens
  CDR3 for beta chain variable domain of TCR clone 304313 (TRBV7-9, TRBJ2-5)
CASSNRDYLQETQYF

SEQ ID NO: 608627 - protein, 14 aa, Homo sapiens
  CDR3 for alpha chain variable domain of TCR clone 304314 (TRAV12-3, TRAJ10)
SHLPLTGGGNKLTF

SEQ ID NO: 608628 - protein, 14 aa, Homo sapiens
  CDR3 for beta chain variable domain of TCR clone 304314 (TRBV7-2, TRBJ1-5)
CASSTQGAGQPQHF

SEQ ID NO: 608629 - protein, 13 aa, Homo sapiens
  CDR3 for alpha chain variable domain of TCR clone 304315 (TRAV27, TRAJ6)
CAGGTRGSYIPTF

SEQ ID NO: 608630 - protein, 14 aa, Homo sapiens
  CDR3 for beta chain variable domain of TCR clone 304315 (TRBV5-1, TRBJ1-1)
CASSLTRRSTEAFF

SEQ ID NO: 608631 - protein, 18 aa, Homo sapiens
  CDR3 for alpha chain variable domain of TCR clone 304316 (TRAV21, TRAJ52)
CAVRPSPACGTSYGKLTF

SEQ ID NO: 608632 - protein, 17 aa, Homo sapiens
  CDR3 for beta chain variable domain of TCR clone 304316 (TRBV13, TRBJ2-3)
CASSLSRVAGGMNTQYF

SEQ ID NO: 608633 - protein, 15 aa, Homo sapiens
  CDR3 for alpha chain variable domain of TCR clone 304317 (TRAV23/DV6, TRAJ18)
CAARYRGSTLGRLYF

SEQ ID NO: 608634 - protein, 13 aa, Homo sapiens
  CDR3 for beta chain variable domain of TCR clone 304317 (TRBV7-2, TRBJ2-7)
CTSSSPSGSEQYF

SEQ ID NO: 608635 - protein, 15 aa, Homo sapiens
  CDR3 for alpha chain variable domain of TCR clone 304318 (TRAV12-2, TRAJ53)
CAGNGGGGSNYKLTF

SEQ ID NO: 608636 - protein, 12 aa, Homo sapiens
  CDR3 for beta chain variable domain of TCR clone 304318 (TRBV7-6, TRBJ2-5)
CASSLSQETQYF

SEQ ID NO: 608637 - protein, 15 aa, Homo sapiens
  CDR3 for alpha chain variable domain of TCR clone 304319 (TRAV26-2, TRAJ45)
CILRGRVDQEEVLTD

SEQ ID NO: 608638 - protein, 15 aa, Homo sapiens
  CDR3 for beta chain variable domain of TCR clone 304319 (TRBV7-6, TRBJ2-5)
CASSKPTGPQETQYF

SEQ ID NO: 608639 - protein, 15 aa, Homo sapiens
  CDR3 for alpha chain variable domain of TCR clone 304320 (TRAV27, TRAJ38)
CAARRNAGKNRKVIW

SEQ ID NO: 608640 - protein, 13 aa, Homo sapiens
  CDR3 for beta chain variable domain of TCR clone 304320 (TRBV12-5, TRBJ2-3)
CASGDRQSDTQYF

SEQ ID NO: 608641 - protein, 12 aa, Homo sapiens
  CDR3 for alpha chain variable domain of TCR clone 304321 (TRAV26-1, TRAJ36)
CIVRVRADNLFF

SEQ ID NO: 608642 - protein, 14 aa, Homo sapiens
  CDR3 for beta chain variable domain of TCR clone 304321 (TRBV20-1, TRBJ1-1)
CSAQTRIGGTEAFF

SEQ ID NO: 608643 - protein, 12 aa, Homo sapiens
  CDR3 for alpha chain variable domain of TCR clone 304322 (TRAV12-2, TRAJ29)
CAWDSGNTPLVF

SEQ ID NO: 608644 - protein, 14 aa, Homo sapiens
  CDR3 for beta chain variable domain of TCR clone 304322 (TRBV19, TRBJ2-1)
CASSIRQPRNEQFF

SEQ ID NO: 608645 - protein, 14 aa, Homo sapiens
  CDR3 for alpha chain variable domain of TCR clone 304323 (TRAV12-2, TRAJ13)
CAVKKTGGDQKVTF

SEQ ID NO: 608646 - protein, 13 aa, Homo sapiens
  CDR3 for beta chain variable domain of TCR clone 304323 (TRBV20-1, TRBJ1-1)
CSARLGQGTEAFF

SEQ ID NO: 608647 - protein, 13 aa, Homo sapiens
  CDR3 for alpha chain variable domain of TCR clone 304324 (TRAV36/DV7, TRAJ53)
CALSGGSNYKLTF

SEQ ID NO: 608648 - protein, 20 aa, Homo sapiens
  CDR3 for beta chain variable domain of TCR clone 304324 (TRBV7-8, TRBJ2-2)
CASSHLFPGPTIHITGELFF

SEQ ID NO: 608649 - protein, 14 aa, Homo sapiens
  CDR3 for alpha chain variable domain of TCR clone 304325 (TRAV35, TRAJ22)
CAGLRPGSARQLTF

SEQ ID NO: 608650 - protein, 13 aa, Homo sapiens
  CDR3 for beta chain variable domain of TCR clone 304325 (TRBV20-1, TRBJ2-7)
WCVVGGGGYVVYF

SEQ ID NO: 608651 - protein, 12 aa, Homo sapiens
  CDR3 for alpha chain variable domain of TCR clone 304326 (TRAV30, TRAJ43)
CGTEERGNDMRF

SEQ ID NO: 608652 - protein, 17 aa, Homo sapiens
  CDR3 for beta chain variable domain of TCR clone 304326 (TRBV7-8, TRBJ2-6)
CASSAGTGGGGANVLTF

SEQ ID NO: 608653 - protein, 15 aa, Homo sapiens
  CDR3 for alpha chain variable domain of TCR clone 304327 (TRAV2, TRAJ15)
CAVEDRGQAGTALIF

SEQ ID NO: 608654 - protein, 13 aa, Homo sapiens
  CDR3 for beta chain variable domain of TCR clone 304327 (TRBV10-2, TRBJ2-7)
CASGASGGYEQYY

SEQ ID NO: 608655 - protein, 13 aa, Homo sapiens
  CDR3 for alpha chain variable domain of TCR clone 304328 (TRAV30, TRAJ26)
CGTEIPLGQNFVF

SEQ ID NO: 608656 - protein, 14 aa, Homo sapiens
  CDR3 for beta chain variable domain of TCR clone 304328 (TRBV5-4, TRBJ2-2)
CASRLDGGTGELFF

SEQ ID NO: 608657 - protein, 14 aa, Homo sapiens
  CDR3 for alpha chain variable domain of TCR clone 304329 (TRAV17, TRAJ15)
CATMGIQAGTALIF

SEQ ID NO: 608658 - protein, 12 aa, Homo sapiens
  CDR3 for beta chain variable domain of TCR clone 304329 (TRBV2, TRBJ2-7)
CASSDPGYEQYF

SEQ ID NO: 608659 - protein, 16 aa, Homo sapiens
  CDR3 for alpha chain variable domain of TCR clone 304330 (TRAV38-1, TRAJ32)
CAFMKGGGGATNKLIF

SEQ ID NO: 608660 - protein, 16 aa, Homo sapiens
  CDR3 for beta chain variable domain of TCR clone 304330 (TRBV11-2, TRBJ2-7)
CASSPLAGGPRYEQYF

SEQ ID NO: 608661 - protein, 13 aa, Homo sapiens
  CDR3 for alpha chain variable domain of TCR clone 304331 (TRAV25, TRAJ40)
CAGSASGTYKYIF

SEQ ID NO: 608662 - protein, 14 aa, Homo sapiens
  CDR3 for beta chain variable domain of TCR clone 304331 (TRBV7-2, TRBJ2-7)
CASRSQGAAYEQFF

SEQ ID NO: 608663 - protein, 14 aa, Homo sapiens
  CDR3 for alpha chain variable domain of TCR clone 304332 (TRAV26-1, TRAJ34)
CIVRVAYNTDKPIF

SEQ ID NO: 608664 - protein, 15 aa, Homo sapiens
  CDR3 for beta chain variable domain of TCR clone 304332 (TRBV7-9, TRBJ1-4)
CAGSRTGGFNEKLFF

SEQ ID NO: 608665 - protein, 12 aa, Homo sapiens
  CDR3 for alpha chain variable domain of TCR clone 304333 (TRAV21, TRAJ33)
FAKMDSNYQLIW

SEQ ID NO: 608666 - protein, 13 aa, Homo sapiens
  CDR3 for beta chain variable domain of TCR clone 304333 (TRBV12-4, TRBJ2-5)
CASSPGTEETQYF

SEQ ID NO: 608667 - protein, 11 aa, Homo sapiens
  CDR3 for alpha chain variable domain of TCR clone 304334 (TRAV17, TRAJ36)
CAPTGANNLFF

SEQ ID NO: 608668 - protein, 13 aa, Homo sapiens
  CDR3 for beta chain variable domain of TCR clone 304334 (TRBV29-1, TRBJ1-1)
CSVGDSRNAEAFF

SEQ ID NO: 608669 - protein, 13 aa, Homo sapiens
  CDR3 for alpha chain variable domain of TCR clone 304335 (TRAV21, TRAJ57)
CAVTQGGSEKLVF

SEQ ID NO: 608670 - protein, 15 aa, Homo sapiens
  CDR3 for beta chain variable domain of TCR clone 304335 (TRBV7-3, TRBJ2-3)
WANSLTSGVGDTQYF

SEQ ID NO: 608671 - protein, 14 aa, Homo sapiens
  CDR3 for alpha chain variable domain of TCR clone 304336 (TRAV17, TRAJ22)
CATSPSGSARQLTF

SEQ ID NO: 608672 - protein, 15 aa, Homo sapiens
  CDR3 for beta chain variable domain of TCR clone 304336 (TRBV4-1, TRBJ2-5)
CASRKWDLYQETQYF

SEQ ID NO: 608673 - protein, 11 aa, Homo sapiens
  CDR3 for alpha chain variable domain of TCR clone 304337 (TRAV13-1, TRAJ49)
CACGGGNQFYF

SEQ ID NO: 608674 - protein, 16 aa, Homo sapiens
  CDR3 for beta chain variable domain of TCR clone 304337 (TRBV11-2, TRBJ2-2)
CASSLRTGNLIGELFF

SEQ ID NO: 608675 - protein, 14 aa, Homo sapiens
  CDR3 for alpha chain variable domain of TCR clone 304338 (TRAV12-2, TRAJ13)
CAVKKTGGYQKVTF

SEQ ID NO: 608676 - protein, 16 aa, Homo sapiens
  CDR3 for beta chain variable domain of TCR clone 304338 (TRBV18, TRBJ1-1)
CASSPGVGGRGGEAFF

SEQ ID NO: 608677 - protein, 14 aa, Homo sapiens
  CDR3 for alpha chain variable domain of TCR clone 304339 (TRAV26-2, TRAJ38)
CILYNAGNNRKLIW

SEQ ID NO: 608678 - protein, 13 aa, Homo sapiens
  CDR3 for beta chain variable domain of TCR clone 304339 (TRBV5-1, TRBJ2-3)
CASSRQYTDTQYF

SEQ ID NO: 608679 - protein, 10 aa, Homo sapiens
  CDR3 for alpha chain variable domain of TCR clone 304340 (TRAV12-2, TRAJ20)
CAVYPYKLSF

SEQ ID NO: 608680 - protein, 18 aa, Homo sapiens
  CDR3 for beta chain variable domain of TCR clone 304340 (TRBV11-2, TRBJ2-3)
CASSLGGASRGAPNTQYF

SEQ ID NO: 608681 - protein, 18 aa, Homo sapiens
  CDR3 for alpha chain variable domain of TCR clone 304341 (TRAV8-4, TRAJ52)
CAVTRANAGGTSYGKLTF

SEQ ID NO: 608682 - protein, 20 aa, Homo sapiens
  CDR3 for beta chain variable domain of TCR clone 304341 (TRBV19, TRBJ2-1)
CASSISRTVTSTRRNNEQFF

SEQ ID NO: 608683 - protein, 17 aa, Homo sapiens
  CDR3 for alpha chain variable domain of TCR clone 304342 (TRAV19, TRAJ28)
CALSEASSGAGSYQLTF

SEQ ID NO: 608684 - protein, 18 aa, Homo sapiens
  CDR3 for beta chain variable domain of TCR clone 304342 (TRBV11-2, TRBJ2-3)
CASSLGGASRGAPNTQYF

SEQ ID NO: 608685 - protein, 19 aa, Homo sapiens
  CDR3 for alpha chain variable domain of TCR clone 304343 (TRAV2, TRAJ20)
ILQVREADAAVYRDCKLSF

SEQ ID NO: 608686 - protein, 15 aa, Homo sapiens
  CDR3 for beta chain variable domain of TCR clone 304343 (TRBV19, TRBJ1-5)
CASSILTGENQPQHF

SEQ ID NO: 608687 - protein, 14 aa, Homo sapiens
  CDR3 for alpha chain variable domain of TCR clone 304344 (TRAV27, TRAJ23)
RAGAFDNQGGKLIF

SEQ ID NO: 608688 - protein, 15 aa, Homo sapiens
  CDR3 for beta chain variable domain of TCR clone 304344 (TRBV7-3, TRBJ2-7)
CASSLTGQGKYEQYF

SEQ ID NO: 608689 - protein, 10 aa, Homo sapiens
  CDR3 for alpha chain variable domain of TCR clone 304345 (TRAV12-1, TRAJ3)
CVEPPWCFQD

SEQ ID NO: 608690 - protein, 13 aa, Homo sapiens
  CDR3 for beta chain variable domain of TCR clone 304345 (TRBV28, TRBJ1-5)
CASSDRGNQPQHF

SEQ ID NO: 608691 - protein, 13 aa, Homo sapiens
  CDR3 for alpha chain variable domain of TCR clone 304346 (TRAV2, TRAJ23)
CAVMGNQGGKLIF

SEQ ID NO: 608692 - protein, 15 aa, Homo sapiens
  CDR3 for beta chain variable domain of TCR clone 304346 (TRBV20-1, TRBJ2-5)
CSAPPRTGFGETQYF

SEQ ID NO: 608693 - protein, 15 aa, Homo sapiens
  CDR3 for alpha chain variable domain of TCR clone 304347 (TRAV26-1, TRAJ29)
RIVRVEGSGNTPLVF

SEQ ID NO: 608694 - protein, 14 aa, Homo sapiens
  CDR3 for beta chain variable domain of TCR clone 304347 (TRBV18, TRBJ2-5)
CAGSPGVSQETQYF

SEQ ID NO: 608695 - protein, 14 aa, Homo sapiens
  CDR3 for alpha chain variable domain of TCR clone 304348 (TRAV12-2, TRAJ13)
CAVKKTGGYQKVTL

SEQ ID NO: 608696 - protein, 15 aa, Homo sapiens
  CDR3 for beta chain variable domain of TCR clone 304348 (TRBV27, TRBJ2-1)
CASSNGGGSSNEQLF

SEQ ID NO: 608697 - protein, 14 aa, Homo sapiens
  CDR3 for alpha chain variable domain of TCR clone 304349 (TRAV3, TRAJ21)
CAVRDAYNFNKFYF

SEQ ID NO: 608698 - protein, 17 aa, Homo sapiens
  CDR3 for beta chain variable domain of TCR clone 304349 (TRBV20-1, TRBJ1-6)
CSARGGYIFSYNSPLHF

SEQ ID NO: 608699 - protein, 16 aa, Homo sapiens
  CDR3 for alpha chain variable domain of TCR clone 304350 (TRAV8-3, TRAJ22)
CAVDLLGPGSASQLTF

SEQ ID NO: 608700 - protein, 14 aa, Homo sapiens
  CDR3 for beta chain variable domain of TCR clone 304350 (TRBV11-2, TRBJ2-7)
CASSLELEGYEQYF

SEQ ID NO: 608701 - protein, 19 aa, Homo sapiens
  CDR3 for alpha chain variable domain of TCR clone 304351 (TRAV2, TRAJ20)
ILQVREADADVYRDCKLSF

SEQ ID NO: 608702 - protein, 13 aa, Homo sapiens
  CDR3 for beta chain variable domain of TCR clone 304351 (TRBV15, TRBJ1-6)
CATSGGLNSPLHF

SEQ ID NO: 608703 - protein, 12 aa, Homo sapiens
  CDR3 for alpha chain variable domain of TCR clone 304352 (TRAV12-3, TRAJ20)
WSMVRGDYKLSF

SEQ ID NO: 608704 - protein, 12 aa, Homo sapiens
  CDR3 for beta chain variable domain of TCR clone 304352 (TRBV6-1, TRBJ2-7)
CASSDYSYEQYF

SEQ ID NO: 608705 - protein, 16 aa, Homo sapiens
  CDR3 for alpha chain variable domain of TCR clone 304353 (TRAV39, TRAJ32)
CAVDMECGGATNKLIF

SEQ ID NO: 608706 - protein, 14 aa, Homo sapiens
  CDR3 for beta chain variable domain of TCR clone 304353 (TRBV9, TRBJ2-4)
CASSPSGTSGFQYF

SEQ ID NO: 608707 - protein, 12 aa, Homo sapiens
  CDR3 for alpha chain variable domain of TCR clone 304354 (TRAV26-1, TRAJ26)
CIVFIYGQNFVF

SEQ ID NO: 608708 - protein, 15 aa, Homo sapiens
  CDR3 for beta chain variable domain of TCR clone 304354 (TRBV7-9, TRBJ1-5)
CASSQGHQPNQPQHF

SEQ ID NO: 608709 - protein, 16 aa, Homo sapiens
  CDR3 for alpha chain variable domain of TCR clone 304355 (TRAV1-2, TRAJ10)
CAVRERITGGGNKLTF

SEQ ID NO: 608710 - protein, 17 aa, Homo sapiens
  CDR3 for beta chain variable domain of TCR clone 304355 (TRBV13, TRBJ2-3)
CASSLSRVAGGRNTQYF

SEQ ID NO: 608711 - protein, 18 aa, Homo sapiens
  CDR3 for alpha chain variable domain of TCR clone 304356 (TRAV21, TRAJ52)
CAVRPSPAVGTSYGKLTF

SEQ ID NO: 608712 - protein, 14 aa, Homo sapiens
  CDR3 for beta chain variable domain of TCR clone 304356 (TRBV4-1, TRBJ2-2)
CASSQAVNTGELFF

SEQ ID NO: 608713 - protein, 13 aa, Homo sapiens
  CDR3 for alpha chain variable domain of TCR clone 304357 (TRAV13-2, TRAJ48)
CAEMDFGNEKLTF

SEQ ID NO: 608714 - protein, 15 aa, Homo sapiens
  CDR3 for beta chain variable domain of TCR clone 304357 (TRBV18, TRBJ2-7)
CASSPRSGTAYEQYF

SEQ ID NO: 608715 - protein, 13 aa, Homo sapiens
  CDR3 for alpha chain variable domain of TCR clone 304358 (TRAV12-3, TRAJ13)
CAMTSGGYQKVTF

SEQ ID NO: 608716 - protein, 13 aa, Homo sapiens
  CDR3 for beta chain variable domain of TCR clone 304358 (TRBV20-1, TRBJ1-1)
CSAPPGGHTEAFF

SEQ ID NO: 608717 - protein, 16 aa, Homo sapiens
  CDR3 for alpha chain variable domain of TCR clone 304359 (TRAV30, TRAJ24)
CGTEIVDADSWGKFQF

SEQ ID NO: 608718 - protein, 18 aa, Homo sapiens
  CDR3 for beta chain variable domain of TCR clone 304359 (TRBV7-9, TRBJ2-7)
CTSSLTTSRSRTWYEQYF

SEQ ID NO: 608719 - protein, 14 aa, Homo sapiens
  CDR3 for alpha chain variable domain of TCR clone 304360 (TRAV12-3, TRAJ10)
SHLPLTGGGNKLTF

SEQ ID NO: 608720 - protein, 14 aa, Homo sapiens
  CDR3 for beta chain variable domain of TCR clone 304360 (TRBV6-1, TRBJ2-7)
CASNRARPDYEQYF

SEQ ID NO: 608721 - protein, 19 aa, Homo sapiens
  CDR3 for alpha chain variable domain of TCR clone 304361 (TRAV26-1, TRAJ22)
CCVLLHRWAFSGSARQLTF

SEQ ID NO: 608722 - protein, 13 aa, Homo sapiens
  CDR3 for beta chain variable domain of TCR clone 304361 (TRBV4-2, TRBJ1-1)
CASSQAGNTEAFF

SEQ ID NO: 608723 - protein, 18 aa, Homo sapiens
  CDR3 for alpha chain variable domain of TCR clone 304362 (TRAV26-2, TRAJ45)
CILRVDKYSGGGADGITF

SEQ ID NO: 608724 - protein, 12 aa, Homo sapiens
  CDR3 for beta chain variable domain of TCR clone 304362 (TRBV29-1, TRBJ2-3)
CSVTGGADTQYF

SEQ ID NO: 608725 - protein, 12 aa, Homo sapiens
  CDR3 for alpha chain variable domain of TCR clone 304363 (TRAV3, TRAJ26)
CAVRDYGQNFVF

SEQ ID NO: 608726 - protein, 15 aa, Homo sapiens
  CDR3 for beta chain variable domain of TCR clone 304363 (TRBV9, TRBJ1-6)
CASSVAGTGDPPLHF

SEQ ID NO: 608727 - protein, 14 aa, Homo sapiens
  CDR3 for alpha chain variable domain of TCR clone 304364 (TRAV8-4, TRAJ15)
CAVTIREAGTALIF

SEQ ID NO: 608728 - protein, 14 aa, Homo sapiens
  CDR3 for beta chain variable domain of TCR clone 304364 (TRBV19, TRBJ2-1)
CASPTFVLSGEQFF

SEQ ID NO: 608729 - protein, 18 aa, Homo sapiens
  CDR3 for alpha chain variable domain of TCR clone 304365 (TRAV13-1, TRAJ52)
CAAKNPNAGGTSYGKLTF

SEQ ID NO: 608730 - protein, 20 aa, Homo sapiens
  CDR3 for beta chain variable domain of TCR clone 304365 (TRBV12-4, TRBJ2-4)
CASSRTGAVDVAKTFSTSAP

SEQ ID NO: 608731 - protein, 15 aa, Homo sapiens
  CDR3 for alpha chain variable domain of TCR clone 304366 (TRAV17, TRAJ23)
CATDAEDNQGGKLIF

SEQ ID NO: 608732 - protein, 16 aa, Homo sapiens
  CDR3 for beta chain variable domain of TCR clone 304366 (TRBV2, TRBJ2-5)
CASSETQGVGEETQYF

SEQ ID NO: 608733 - protein, 17 aa, Homo sapiens
  CDR3 for alpha chain variable domain of TCR clone 304367 (TRAV4, TRAJ13)
CLVGVQGSSGGYQKVTF

SEQ ID NO: 608734 - protein, 18 aa, Homo sapiens
  CDR3 for beta chain variable domain of TCR clone 304367 (TRBV15, TRBJ2-3)
CATSRDGARSWDTDTQYS

SEQ ID NO: 608735 - protein, 17 aa, Homo sapiens
  CDR3 for alpha chain variable domain of TCR clone 304368 (TRAV26-1, TRAJ53)
CIVRVDDSGGSNYKLRF

SEQ ID NO: 608736 - protein, 15 aa, Homo sapiens
  CDR3 for beta chain variable domain of TCR clone 304368 (TRBV20-1, TRBJ2-7)
CSARVPAAYFYEQYF

SEQ ID NO: 608737 - protein, 13 aa, Homo sapiens
  CDR3 for alpha chain variable domain of TCR clone 304369 (TRAV13-2, TRAJ15)
CAEKNQAGTALTF

SEQ ID NO: 608738 - protein, 15 aa, Homo sapiens
  CDR3 for beta chain variable domain of TCR clone 304369 (TRBV29-1, TRBJ2-5)
CSVAPGQGARETQYF

SEQ ID NO: 608739 - protein, 14 aa, Homo sapiens
  CDR3 for alpha chain variable domain of TCR clone 304370 (TRAV21, TRAJ45)
CAVHSGGGAYGLTF

SEQ ID NO: 608740 - protein, 14 aa, Homo sapiens
  CDR3 for beta chain variable domain of TCR clone 304370 (TRBV20-1, TRBJ2-1)
CSARRLAEANEQFF

SEQ ID NO: 608741 - protein, 13 aa, Homo sapiens
  CDR3 for alpha chain variable domain of TCR clone 304371 (TRAV13-1, TRAJ9)
SASALTGGFKTIF

SEQ ID NO: 608742 - protein, 13 aa, Homo sapiens
  CDR3 for beta chain variable domain of TCR clone 304371 (TRBV20-1, TRBJ1-1)
CSAGTVGNTEAFF

SEQ ID NO: 608743 - protein, 12 aa, Homo sapiens
  CDR3 for alpha chain variable domain of TCR clone 304372 (TRAV23/DV6, TRAJ31)
CAARRIGARLMF

SEQ ID NO: 608744 - protein, 14 aa, Homo sapiens
  CDR3 for beta chain variable domain of TCR clone 304372 (TRBV7-2, TRBJ2-7)
CASSLYPGRYEQYF

SEQ ID NO: 608745 - protein, 14 aa, Homo sapiens
  CDR3 for alpha chain variable domain of TCR clone 304373 (TRAV26-1, TRAJ45)
CIEVTGGGADGLTF

SEQ ID NO: 608746 - protein, 13 aa, Homo sapiens
  CDR3 for beta chain variable domain of TCR clone 304373 (TRBV7-6, TRBJ1-2)
CASGLVADYGDTF

SEQ ID NO: 608747 - protein, 14 aa, Homo sapiens
  CDR3 for alpha chain variable domain of TCR clone 304374 (TRAV8-4, TRAJ9)
CAVSDRTGGFKTIF

SEQ ID NO: 608748 - protein, 13 aa, Homo sapiens
  CDR3 for beta chain variable domain of TCR clone 304374 (TRBV11-2, TRBJ2-7)
CASSLGDSYEQYF

SEQ ID NO: 608749 - protein, 14 aa, Homo sapiens
  CDR3 for alpha chain variable domain of TCR clone 304375 (TRAV12-2, TRAJ11)
CAVNRGSGYSTLTF

SEQ ID NO: 608750 - protein, 16 aa, Homo sapiens
  CDR3 for beta chain variable domain of TCR clone 304375 (TRBV12-5, TRBJ2-5)
CASGRRTSGNQETQYF

SEQ ID NO: 608751 - protein, 14 aa, Homo sapiens
  CDR3 for alpha chain variable domain of TCR clone 304376 (TRAV26-1, TRAJ39)
CIVRGSRAGNMLTF

SEQ ID NO: 608752 - protein, 15 aa, Homo sapiens
  CDR3 for beta chain variable domain of TCR clone 304376 (TRBV7-9, TRBJ1-5)
SASSQGHQPNQPQHF

SEQ ID NO: 608753 - protein, 14 aa, Homo sapiens
  CDR3 for alpha chain variable domain of TCR clone 304377 (TRAV2, TRAJ9)
CAVEVRSGGFKTIF

SEQ ID NO: 608754 - protein, 14 aa, Homo sapiens
  CDR3 for beta chain variable domain of TCR clone 304377 (TRBV7-3, TRBJ2-1)
CASSLAGGTNEQFF

SEQ ID NO: 608755 - protein, 14 aa, Homo sapiens
  CDR3 for alpha chain variable domain of TCR clone 304378 (TRAV8-4, TRAJ54)
CAVSEVLGAQKLVF

SEQ ID NO: 608756 - protein, 13 aa, Homo sapiens
  CDR3 for beta chain variable domain of TCR clone 304378 (TRBV27, TRBJ2-7)
CASSFVSYYEQYF

SEQ ID NO: 608757 - protein, 16 aa, Homo sapiens
  CDR3 for alpha chain variable domain of TCR clone 304379 (TRAV26-1, )
CIDIQNPDLAVYQLRD

SEQ ID NO: 608758 - protein, 19 aa, Homo sapiens
  CDR3 for beta chain variable domain of TCR clone 304379 (TRBV19, TRBJ2-5)
CASSIGQVTDFFLGETQYF

SEQ ID NO: 608759 - protein, 14 aa, Homo sapiens
  CDR3 for alpha chain variable domain of TCR clone 304380 (TRAV9-2, TRAJ39)
CALYIYNAGNMLTF

SEQ ID NO: 608760 - protein, 12 aa, Homo sapiens
  CDR3 for beta chain variable domain of TCR clone 304380 (TRBV11-2, TRBJ2-1)
CASSPGSNEQFF

SEQ ID NO: 608761 - protein, 18 aa, Homo sapiens
  CDR3 for alpha chain variable domain of TCR clone 304381 (TRAV1-2, TRAJ10)
CAVRALTPVTGGGNKRTF

SEQ ID NO: 608762 - protein, 14 aa, Homo sapiens
  CDR3 for beta chain variable domain of TCR clone 304381 (TRBV4-1, TRBJ1-1)
CASSQQGNGNEAFF

SEQ ID NO: 608763 - protein, 12 aa, Homo sapiens
  CDR3 for alpha chain variable domain of TCR clone 304382 (TRAV2, TRAJ9)
CAVGAGGFKTIF

SEQ ID NO: 608764 - protein, 16 aa, Homo sapiens
  CDR3 for beta chain variable domain of TCR clone 304382 (TRBV13, TRBJ2-2)
CASSPRTGGHTGELLF

SEQ ID NO: 608765 - protein, 14 aa, Homo sapiens
  CDR3 for alpha chain variable domain of TCR clone 304383 (TRAV2, TRAJ37)
CAVDFTSNTGELIF

SEQ ID NO: 608766 - protein, 16 aa, Homo sapiens
  CDR3 for beta chain variable domain of TCR clone 304383 (TRBV20-1, TRBJ1-2)
CSASMGQGVANYGYTF

SEQ ID NO: 608767 - protein, 22 aa, Homo sapiens
  CDR3 for alpha chain variable domain of TCR clone 304384 (TRAV12-2, TRAJ40)
SPVIQPPTSAVKIPSGTYKYIF

SEQ ID NO: 608768 - protein, 14 aa, Homo sapiens
  CDR3 for beta chain variable domain of TCR clone 304384 (TRBV20-1, TRBJ1-1)
CSAQTRIGGTEAFF

SEQ ID NO: 608769 - protein, 16 aa, Homo sapiens
  CDR3 for alpha chain variable domain of TCR clone 304385 (TRAV12-3, TRAJ53)
CAMSPGSGGRHYKLTF

SEQ ID NO: 608770 - protein, 11 aa, Homo sapiens
  CDR3 for beta chain variable domain of TCR clone 304385 (TRBV29-1, TRBJ2-5)
CSEDRTGTQYF

SEQ ID NO: 608771 - protein, 14 aa, Homo sapiens
  CDR3 for alpha chain variable domain of TCR clone 304386 (TRAV12-2, TRAJ24)
CAVTPADGWGKLQF

SEQ ID NO: 608772 - protein, 16 aa, Homo sapiens
  CDR3 for beta chain variable domain of TCR clone 304386 (TRBV6-4, TRBJ2-3)
APSEGGRAWGTDTQYF

SEQ ID NO: 608773 - protein, 10 aa, Homo sapiens
  CDR3 for alpha chain variable domain of TCR clone 304387 (TRAV21, TRAJ31)
CAVDNARLMF

SEQ ID NO: 608774 - protein, 16 aa, Homo sapiens
  CDR3 for beta chain variable domain of TCR clone 304387 (TRBV7-6, TRBJ2-3)
CASSLWREMGPDTQYF

SEQ ID NO: 608775 - protein, 15 aa, Homo sapiens
  CDR3 for alpha chain variable domain of TCR clone 304388 (TRAV8-4, TRAJ8)
CAVSDLNTGFQKLVF

SEQ ID NO: 608776 - protein, 13 aa, Homo sapiens
  CDR3 for beta chain variable domain of TCR clone 304388 (TRBV10-2, TRBJ2-7)
CASGASGGYEQYF

SEQ ID NO: 608777 - protein, 13 aa, Homo sapiens
  CDR3 for alpha chain variable domain of TCR clone 304389 (TRAV3, TRAJ21)
CAVREPDFNKFYF

SEQ ID NO: 608778 - protein, 11 aa, Homo sapiens
  CDR3 for beta chain variable domain of TCR clone 304389 (TRBV3-1, TRBJ2-7)
CASTSLGEQYF

SEQ ID NO: 608779 - protein, 13 aa, Homo sapiens
  CDR3 for alpha chain variable domain of TCR clone 304390 (TRAV21, TRAJ20)
CAVGLRVDYKLSF

SEQ ID NO: 608780 - protein, 14 aa, Homo sapiens
  CDR3 for beta chain variable domain of TCR clone 304390 (TRBV25-1, TRBJ1-4)
CASSGGGQPEKLFF

SEQ ID NO: 608781 - protein, 14 aa, Homo sapiens
  CDR3 for alpha chain variable domain of TCR clone 304391 (TRAV1-2, TRAJ16)
CAVNRFSDGQKLLF

SEQ ID NO: 608782 - protein, 13 aa, Homo sapiens
  CDR3 for beta chain variable domain of TCR clone 304391 (TRBV7-9, TRBJ1-2)
CASSLKENYGYTF

SEQ ID NO: 608783 - protein, 14 aa, Homo sapiens
  CDR3 for alpha chain variable domain of TCR clone 304392 (TRAV13-1, TRAJ26)
CAASSAHYGQNFVI

SEQ ID NO: 608784 - protein, 17 aa, Homo sapiens
  CDR3 for beta chain variable domain of TCR clone 304392 (TRBV25-1, TRBJ2-5)
CASSRRGGRGGQETQYF

SEQ ID NO: 608785 - protein, 16 aa, Homo sapiens
  CDR3 for alpha chain variable domain of TCR clone 304393 (TRAV23/DV6, )
CAEPDIQNPDPAVYQL

SEQ ID NO: 608786 - protein, 15 aa, Homo sapiens
  CDR3 for beta chain variable domain of TCR clone 304393 (TRBV12-4, TRBJ2-5)
CASTLNSGRRETQYF

SEQ ID NO: 608787 - protein, 15 aa, Homo sapiens
  CDR3 for alpha chain variable domain of TCR clone 304394 (TRAV27, TRAJ53)
CAGEGRGGSNYKLTF

SEQ ID NO: 608788 - protein, 15 aa, Homo sapiens
  CDR3 for beta chain variable domain of TCR clone 304394 (TRBV28, TRBJ2-2)
CASSFLGRNTGELFF

SEQ ID NO: 608789 - protein, 18 aa, Homo sapiens
  CDR3 for alpha chain variable domain of TCR clone 304395 (TRAV21, TRAJ52)
CAVRPSPAGGTSYGKLTF

SEQ ID NO: 608790 - protein, 12 aa, Homo sapiens
  CDR3 for beta chain variable domain of TCR clone 304395 (TRBV11-2, TRBJ2-4)
CASSSASGSEYF

SEQ ID NO: 608791 - protein, 15 aa, Homo sapiens
  CDR3 for alpha chain variable domain of TCR clone 304396 (TRAV27, TRAJ38)
CAGRFDAGNNRKLLW

SEQ ID NO: 608792 - protein, 13 aa, Homo sapiens
  CDR3 for beta chain variable domain of TCR clone 304396 (TRBV20-1, TRBJ2-1)
TSGALPPGNEQFF

SEQ ID NO: 608793 - protein, 16 aa, Homo sapiens
  CDR3 for alpha chain variable domain of TCR clone 304397 (TRAV22, TRAJ45)
CAVERGKRGVADGLTF

SEQ ID NO: 608794 - protein, 11 aa, Homo sapiens
  CDR3 for beta chain variable domain of TCR clone 304397 (TRBV29-1, TRBJ2-5)
CSEGRTGTQYF

SEQ ID NO: 608795 - protein, 13 aa, Homo sapiens
  CDR3 for alpha chain variable domain of TCR clone 304398 (TRAV8-3, TRAJ6)
CAARRGGGYIHTF

SEQ ID NO: 608796 - protein, 15 aa, Homo sapiens
  CDR3 for beta chain variable domain of TCR clone 304398 (TRBV4-1, TRBJ2-3)
CASSNLAGGRDTQYF

SEQ ID NO: 608797 - protein, 12 aa, Homo sapiens
  CDR3 for alpha chain variable domain of TCR clone 304399 (TRAV13-1, TRAJ20)
CAASRGDYKLSF

SEQ ID NO: 608798 - protein, 15 aa, Homo sapiens
  CDR3 for beta chain variable domain of TCR clone 304399 (TRBV20-1, TRBJ2-7)
CSARGRGPSSYEQYF

SEQ ID NO: 608799 - protein, 14 aa, Homo sapiens
  CDR3 for alpha chain variable domain of TCR clone 304400 (TRAV23/DV6, TRAJ17)
CAARGRAAGNKLTI

SEQ ID NO: 608800 - protein, 12 aa, Homo sapiens
  CDR3 for beta chain variable domain of TCR clone 304400 (TRBV7-9, TRBJ2-3)
CASSFITDTQYF

SEQ ID NO: 608801 - protein, 21 aa, Homo sapiens
  CDR3 for alpha chain variable domain of TCR clone 304401 (TRAV4, TRAJ39)
CCVLLPRGGAAGGNAGNMLTF

SEQ ID NO: 608802 - protein, 13 aa, Homo sapiens
  CDR3 for beta chain variable domain of TCR clone 304401 (TRBV7-9, TRBJ1-2)
CASSLKQNYGYTF

SEQ ID NO: 608803 - protein, 16 aa, Homo sapiens
  CDR3 for alpha chain variable domain of TCR clone 304402 (TRAV27, TRAJ13)
CAGAKGDSGGYQKVTF

SEQ ID NO: 608804 - protein, 15 aa, Homo sapiens
  CDR3 for beta chain variable domain of TCR clone 304402 (TRBV29-1, TRBJ2-1)
CCVGRHALFYNEQFF

SEQ ID NO: 608805 - protein, 10 aa, Homo sapiens
  CDR3 for alpha chain variable domain of TCR clone 304403 (TRAV26-1, TRAJ22)
RSGSARQLTF

SEQ ID NO: 608806 - protein, 13 aa, Homo sapiens
  CDR3 for beta chain variable domain of TCR clone 304403 (TRBV7-9, TRBJ1-2)
CASSLKQNYGYAF

SEQ ID NO: 608807 - protein, 13 aa, Homo sapiens
  CDR3 for alpha chain variable domain of TCR clone 304404 (TRAV21, TRAJ27)
CVARPGNAGKSTF

SEQ ID NO: 608808 - protein, 18 aa, Homo sapiens
  CDR3 for beta chain variable domain of TCR clone 304404 (TRBV7-9, TRBJ2-7)
CASSLTTSGSRTWYEQYF

SEQ ID NO: 608809 - protein, 14 aa, Homo sapiens
  CDR3 for alpha chain variable domain of TCR clone 304405 (TRAV12-2, TRAJ32)
CAHPERGATNKPIF

SEQ ID NO: 608810 - protein, 14 aa, Homo sapiens
  CDR3 for beta chain variable domain of TCR clone 304405 (TRBV4-2, TRBJ2-3)
CASRETRAPGMQYF

SEQ ID NO: 608811 - protein, 22 aa, Homo sapiens
  CDR3 for alpha chain variable domain of TCR clone 304406 (TRAV4, )
CLVGPHNYDIQNPDPAVYQLRD

SEQ ID NO: 608812 - protein, 17 aa, Homo sapiens
  CDR3 for beta chain variable domain of TCR clone 304406 (TRBV24-1, TRBJ2-1)
CATSDVSTSGTYNEQFL

SEQ ID NO: 608813 - protein, 18 aa, Homo sapiens
  CDR3 for alpha chain variable domain of TCR clone 304407 (TRAV13-1, TRAJ52)
CAADLPNAGGTSNGKLTF

SEQ ID NO: 608814 - protein, 14 aa, Homo sapiens
  CDR3 for beta chain variable domain of TCR clone 304407 (TRBV11-2, TRBJ2-3)
CASSLYAGRDTQYF

SEQ ID NO: 608815 - protein, 11 aa, Homo sapiens
  CDR3 for alpha chain variable domain of TCR clone 304408 (TRAV1-1, TRAJ23)
CAVRQGGKLIF

SEQ ID NO: 608816 - protein, 16 aa, Homo sapiens
  CDR3 for beta chain variable domain of TCR clone 304408 (TRBV19, TRBJ1-1)
CASRVDVTGAAWGAFF

SEQ ID NO: 608817 - protein, 16 aa, Homo sapiens
  CDR3 for alpha chain variable domain of TCR clone 304409 (TRAV12-3, TRAJ53)
CAMSPGSGGSNYKLTF

SEQ ID NO: 608818 - protein, 17 aa, Homo sapiens
  CDR3 for beta chain variable domain of TCR clone 304409 (TRBV7-9, TRBJ2-3)
CASSPTVAGDLTDTQYF

SEQ ID NO: 608819 - protein, 14 aa, Homo sapiens
  CDR3 for alpha chain variable domain of TCR clone 304410 (TRAV17, TRAJ33)
CATDALRSNYQLIW

SEQ ID NO: 608820 - protein, 14 aa, Homo sapiens
  CDR3 for beta chain variable domain of TCR clone 304410 (TRBV25-1, TRBJ1-4)
CASSGGGQPEKLFF

SEQ ID NO: 608821 - protein, 19 aa, Homo sapiens
  CDR3 for alpha chain variable domain of TCR clone 304411 (TRAV3, TRAJ6)
RAVRDRNPSRSGGSYIPTF

SEQ ID NO: 608822 - protein, 16 aa, Homo sapiens
  CDR3 for beta chain variable domain of TCR clone 304411 (TRBV7-6, TRBJ2-1)
CASSAPGPSSYNEQFF

SEQ ID NO: 608823 - protein, 11 aa, Homo sapiens
  CDR3 for alpha chain variable domain of TCR clone 304412 (TRAV2, TRAJ23)
CAVETRGKLIF

SEQ ID NO: 608824 - protein, 16 aa, Homo sapiens
  CDR3 for beta chain variable domain of TCR clone 304412 (TRBV12-5, TRBJ2-5)
CASGPRTSGNQETQYF

SEQ ID NO: 608825 - protein, 10 aa, Homo sapiens
  CDR3 for alpha chain variable domain of TCR clone 304413 (TRAV23/DV6, TRAJ57)
CAASSTLSQG

SEQ ID NO: 608826 - protein, 14 aa, Homo sapiens
  CDR3 for beta chain variable domain of TCR clone 304413 (TRBV25-1, TRBJ1-1)
RASTHLGGNTEALF

SEQ ID NO: 608827 - protein, 14 aa, Homo sapiens
  CDR3 for alpha chain variable domain of TCR clone 304414 (TRAV12-2, TRAJ13)
CAVKKTGGYQTVTF

SEQ ID NO: 608828 - protein, 13 aa, Homo sapiens
  CDR3 for beta chain variable domain of TCR clone 304414 (TRBV19, TRBJ1-2)
CASSQGQVYGYTF

SEQ ID NO: 608829 - protein, 14 aa, Homo sapiens
  CDR3 for alpha chain variable domain of TCR clone 304415 (TRAV17, TRAJ17)
CATDARAAGNKLTF

SEQ ID NO: 608830 - protein, 13 aa, Homo sapiens
  CDR3 for beta chain variable domain of TCR clone 304415 (TRBV7-6, TRBJ1-2)
CASSLVADYGYTF

SEQ ID NO: 608831 - protein, 15 aa, Homo sapiens
  CDR3 for alpha chain variable domain of TCR clone 304416 (TRAV38-1, TRAJ37)
CAFIFGSGNTGKPLF

SEQ ID NO: 608832 - protein, 12 aa, Homo sapiens
  CDR3 for beta chain variable domain of TCR clone 304416 (TRBV7-9, TRBJ2-7)
CASSLAGYEQYF

SEQ ID NO: 608833 - protein, 13 aa, Homo sapiens
  CDR3 for alpha chain variable domain of TCR clone 304417 (TRAV12-1, TRAJ26)
CVVRRNYGQNFVF

SEQ ID NO: 608834 - protein, 13 aa, Homo sapiens
  CDR3 for beta chain variable domain of TCR clone 304417 (TRBV10-3, TRBJ2-7)
CASKLAVNYEQYF

SEQ ID NO: 608835 - protein, 14 aa, Homo sapiens
  CDR3 for alpha chain variable domain of TCR clone 304418 (TRAV12-2, TRAJ44)
CAVNPAGTASKITF

SEQ ID NO: 608836 - protein, 16 aa, Homo sapiens
  CDR3 for beta chain variable domain of TCR clone 304418 (TRBV2, TRBJ2-6)
CASSEVGGAGANVLTF

SEQ ID NO: 608837 - protein, 12 aa, Homo sapiens
  CDR3 for alpha chain variable domain of TCR clone 304419 (TRAV40, TRAJ20)
CLRGLNDYKLSF

SEQ ID NO: 608838 - protein, 14 aa, Homo sapiens
  CDR3 for beta chain variable domain of TCR clone 304419 (TRBV7-2, TRBJ2-7)
CASSPKTSFYEQHF

SEQ ID NO: 608839 - protein, 13 aa, Homo sapiens
  CDR3 for alpha chain variable domain of TCR clone 304420 (TRAV21, TRAJ57)
CAVTQGGSEKLVF

SEQ ID NO: 608840 - protein, 14 aa, Homo sapiens
  CDR3 for beta chain variable domain of TCR clone 304420 (TRBV7-3, TRBJ1-1)
CASSLKGGNTEAFF

SEQ ID NO: 608841 - protein, 11 aa, Homo sapiens
  CDR3 for alpha chain variable domain of TCR clone 304421 (TRAV2, TRAJ13)
CASGGYQKVTF

SEQ ID NO: 608842 - protein, 15 aa, Homo sapiens
  CDR3 for beta chain variable domain of TCR clone 304421 (TRBV5-7, TRBJ2-7)
CASSLPGQVFYEQYF

SEQ ID NO: 608843 - protein, 12 aa, Homo sapiens
  CDR3 for alpha chain variable domain of TCR clone 304422 (TRAV21, TRAJ31)
FAVSPARGRPMF

SEQ ID NO: 608844 - protein, 14 aa, Homo sapiens
  CDR3 for beta chain variable domain of TCR clone 304422 (TRBV28, TRBJ2-7)
CASSLLRISYEQYF

SEQ ID NO: 608845 - protein, 17 aa, Homo sapiens
  CDR3 for alpha chain variable domain of TCR clone 304423 (TRAV3, TRAJ38)
CAVRDCLNAGNNSKLIC

SEQ ID NO: 608846 - protein, 14 aa, Homo sapiens
  CDR3 for beta chain variable domain of TCR clone 304423 (TRBV5-5, TRBJ1-5)
CASSGQGVDQPQHF

SEQ ID NO: 608847 - protein, 14 aa, Homo sapiens
  CDR3 for alpha chain variable domain of TCR clone 304424 (TRAV12-1, TRAJ37)
CVVNRSGNTGKLIF

SEQ ID NO: 608848 - protein, 14 aa, Homo sapiens
  CDR3 for beta chain variable domain of TCR clone 304424 (TRBV7-9, TRBJ2-2)
CASSLVQDTGELFF

SEQ ID NO: 608849 - protein, 12 aa, Homo sapiens
  CDR3 for alpha chain variable domain of TCR clone 304425 (TRAV29/DV5, TRAJ15)
CASNQAGTALIF

SEQ ID NO: 608850 - protein, 14 aa, Homo sapiens
  CDR3 for beta chain variable domain of TCR clone 304425 (TRBV11-2, TRBJ2-2)
CASSQAVNTGELFF

SEQ ID NO: 608851 - protein, 14 aa, Homo sapiens
  CDR3 for alpha chain variable domain of TCR clone 304426 (TRAV4, TRAJ15)
CLVGGDQAGTALIF

SEQ ID NO: 608852 - protein, 14 aa, Homo sapiens
  CDR3 for beta chain variable domain of TCR clone 304426 (TRBV20-1, TRBJ2-1)
CSARVADIYNEQFF

SEQ ID NO: 608853 - protein, 15 aa, Homo sapiens
  CDR3 for alpha chain variable domain of TCR clone 304427 (TRAV12-3, TRAJ6)
CAMSATTGGSYIPTF

SEQ ID NO: 608854 - protein, 19 aa, Homo sapiens
  CDR3 for beta chain variable domain of TCR clone 304427 (TRBV7-2, TRBJ2-5)
GRVSPSSSGILAGAETQYF

SEQ ID NO: 608855 - protein, 14 aa, Homo sapiens
  CDR3 for alpha chain variable domain of TCR clone 304428 (TRAV26-1, TRAJ5)
CIVGVRFNMRALTF

SEQ ID NO: 608856 - protein, 17 aa, Homo sapiens
  CDR3 for beta chain variable domain of TCR clone 304428 (TRBV29-1, TRBJ2-3)
CSVEVLAGETSTDTQYF

SEQ ID NO: 608857 - protein, 13 aa, Homo sapiens
  CDR3 for alpha chain variable domain of TCR clone 304429 (TRAV23/DV6, TRAJ9)
CAASIDGKGLVIL

SEQ ID NO: 608858 - protein, 12 aa, Homo sapiens
  CDR3 for beta chain variable domain of TCR clone 304429 (TRBV7-8, TRBJ2-7)
CASSLGDREQYF

SEQ ID NO: 608859 - protein, 12 aa, Homo sapiens
  CDR3 for alpha chain variable domain of TCR clone 304430 (TRAV8-6, TRAJ4)
CAVSDHPNKLIF

SEQ ID NO: 608860 - protein, 11 aa, Homo sapiens
  CDR3 for beta chain variable domain of TCR clone 304430 (TRBV19, TRBJ1-1)
CAGSIGGEAFF

SEQ ID NO: 608861 - protein, 14 aa, Homo sapiens
  CDR3 for alpha chain variable domain of TCR clone 304431 (TRAV27, TRAJ17)
CRSTIRAAGNKLTF

SEQ ID NO: 608862 - protein, 16 aa, Homo sapiens
  CDR3 for beta chain variable domain of TCR clone 304431 (TRBV5-7, TRBJ2-5)
CASTLAPAGGRETQCF

SEQ ID NO: 608863 - protein, 17 aa, Homo sapiens
  CDR3 for alpha chain variable domain of TCR clone 304432 (TRAV9-2, TRAJ52)
CALTPGAGGTSYGKLTF

SEQ ID NO: 608864 - protein, 13 aa, Homo sapiens
  CDR3 for beta chain variable domain of TCR clone 304432 (TRBV11-2, TRBJ1-1)
CASSLGNGAEAFF

SEQ ID NO: 608865 - protein, 12 aa, Homo sapiens
  CDR3 for alpha chain variable domain of TCR clone 304433 (TRAV21, TRAJ33)
CAKMDSNYQLIW

SEQ ID NO: 608866 - protein, 11 aa, Homo sapiens
  CDR3 for beta chain variable domain of TCR clone 304433 (TRBV20-1, TRBJ2-1)
CSLSSGSEQFF

SEQ ID NO: 608867 - protein, 18 aa, Homo sapiens
  CDR3 for alpha chain variable domain of TCR clone 304434 (TRAV13-1, TRAJ52)
CAAKNPNAGGTSYGKLTF

SEQ ID NO: 608868 - protein, 15 aa, Homo sapiens
  CDR3 for beta chain variable domain of TCR clone 304434 (TRBV27, TRBJ2-5)
CASSLYPRGGETQYL

SEQ ID NO: 608869 - protein, 12 aa, Homo sapiens
  CDR3 for alpha chain variable domain of TCR clone 304435 (TRAV23/DV6, TRAJ30)
CAASKGDDKIIF

SEQ ID NO: 608870 - protein, 13 aa, Homo sapiens
  CDR3 for beta chain variable domain of TCR clone 304435 (TRBV19, TRBJ1-2)
CASSVPGQDGYAF

SEQ ID NO: 608871 - protein, 15 aa, Homo sapiens
  CDR3 for alpha chain variable domain of TCR clone 304436 (TRAV21, TRAJ40)
CTVRPQTSGTYKYIF

SEQ ID NO: 608872 - protein, 13 aa, Homo sapiens
  CDR3 for beta chain variable domain of TCR clone 304436 (TRBV7-2, TRBJ2-2)
CASSSVRAGELFF

SEQ ID NO: 608873 - protein, 14 aa, Homo sapiens
  CDR3 for alpha chain variable domain of TCR clone 304437 (TRAV1-2, TRAJ16)
RAVNRFSDGQKLLF

SEQ ID NO: 608874 - protein, 14 aa, Homo sapiens
  CDR3 for beta chain variable domain of TCR clone 304437 (TRBV19, TRBJ2-1)
CARGARSFQWEQFF

SEQ ID NO: 608875 - protein, 17 aa, Homo sapiens
  CDR3 for alpha chain variable domain of TCR clone 304438 (TRAV4, TRAJ42)
CLVGVLNYGGSQGNLIF

SEQ ID NO: 608876 - protein, 13 aa, Homo sapiens
  CDR3 for beta chain variable domain of TCR clone 304438 (TRBV12-4, TRBJ1-2)
CASSLRQGKGYTF

SEQ ID NO: 608877 - protein, 11 aa, Homo sapiens
  CDR3 for alpha chain variable domain of TCR clone 304439 (TRAV13-2, TRAJ23)
CRAYRGGKLIF

SEQ ID NO: 608878 - protein, 13 aa, Homo sapiens
  CDR3 for beta chain variable domain of TCR clone 304439 (TRBV7-9, TRBJ2-3)
CASSPGSTDTQYF

SEQ ID NO: 608879 - protein, 15 aa, Homo sapiens
  CDR3 for alpha chain variable domain of TCR clone 304440 (TRAV26-1, TRAJ29)
CIVRVEGYGNTPLVF

SEQ ID NO: 608880 - protein, 15 aa, Homo sapiens
  CDR3 for beta chain variable domain of TCR clone 304440 (TRBV7-9, TRBJ1-5)
CASSQGHQPNQPQHF

SEQ ID NO: 608881 - protein, 15 aa, Homo sapiens
  CDR3 for alpha chain variable domain of TCR clone 304441 (TRAV1-2, TRAJ28)
CAVQYSGAGSYQLTF

SEQ ID NO: 608882 - protein, 15 aa, Homo sapiens
  CDR3 for beta chain variable domain of TCR clone 304441 (TRBV27, TRBJ1-6)
CASSFDRGLGSLLHF

SEQ ID NO: 608883 - protein, 17 aa, Homo sapiens
  CDR3 for alpha chain variable domain of TCR clone 304442 (TRAV3, TRAJ42)
CAVRDRDYGGSQGNLIF

SEQ ID NO: 608884 - protein, 15 aa, Homo sapiens
  CDR3 for beta chain variable domain of TCR clone 304442 (TRBV6-6, TRBJ2-7)
CASSYSYGGSYELYF

SEQ ID NO: 608885 - protein, 14 aa, Homo sapiens
  CDR3 for alpha chain variable domain of TCR clone 304443 (TRAV26-1, TRAJ45)
CIEVTGGGADGLTF

SEQ ID NO: 608886 - protein, 15 aa, Homo sapiens
  CDR3 for beta chain variable domain of TCR clone 304443 (TRBV11-3, TRBJ2-3)
CASLKDGREGDTQYF

SEQ ID NO: 608887 - protein, 15 aa, Homo sapiens
  CDR3 for alpha chain variable domain of TCR clone 304444 (TRAV26-1, TRAJ48)
SIVRVGDFGNEKLTF

SEQ ID NO: 608888 - protein, 13 aa, Homo sapiens
  CDR3 for beta chain variable domain of TCR clone 304444 (TRBV18, TRBJ2-3)
CASSTGRTDTQYF

SEQ ID NO: 608889 - protein, 15 aa, Homo sapiens
  CDR3 for alpha chain variable domain of TCR clone 304445 (TRAV8-3, TRAJ41)
CAVGSNSNSGYALNF

SEQ ID NO: 608890 - protein, 15 aa, Homo sapiens
  CDR3 for beta chain variable domain of TCR clone 304445 (TRBV4-1, TRBJ2-5)
CASSQWDLYQETQYF

SEQ ID NO: 608891 - protein, 10 aa, Homo sapiens
  CDR3 for alpha chain variable domain of TCR clone 304446 (TRAV1-2, TRAJ23)
CAGQGGKLIF

SEQ ID NO: 608892 - protein, 13 aa, Homo sapiens
  CDR3 for beta chain variable domain of TCR clone 304446 (TRBV19, TRBJ2-3)
CATWDKITDTQYF

SEQ ID NO: 608893 - protein, 12 aa, Homo sapiens
  CDR3 for alpha chain variable domain of TCR clone 304447 (TRAV3, TRAJ43)
CAVRDPNNDMRF

SEQ ID NO: 608894 - protein, 15 aa, Homo sapiens
  CDR3 for beta chain variable domain of TCR clone 304447 (TRBV6-5, TRBJ2-1)
CAGSYDAGAGNEQFF

SEQ ID NO: 608895 - protein, 14 aa, Homo sapiens
  CDR3 for alpha chain variable domain of TCR clone 304448 (TRAV23/DV6, TRAJ23)
CAAGPYNQGGKLIF

SEQ ID NO: 608896 - protein, 16 aa, Homo sapiens
  CDR3 for beta chain variable domain of TCR clone 304448 (TRBV4-2, TRBJ1-1)
CQQPSCNRGVNTEAFF

SEQ ID NO: 608897 - protein, 13 aa, Homo sapiens
  CDR3 for alpha chain variable domain of TCR clone 304449 (TRAV13-1, TRAJ10)
CAATAGGGNKHTF

SEQ ID NO: 608898 - protein, 14 aa, Homo sapiens
  CDR3 for beta chain variable domain of TCR clone 304449 (TRBV12-4, TRBJ2-7)
CASSPAGLKYEQYF

SEQ ID NO: 608899 - protein, 17 aa, Homo sapiens
  CDR3 for alpha chain variable domain of TCR clone 304450 (TRAV3, TRAJ6)
CAVRDGPRAGGSYIPTF

SEQ ID NO: 608900 - protein, 13 aa, Homo sapiens
  CDR3 for beta chain variable domain of TCR clone 304450 (TRBV2, TRBJ1-6)
CASGRGGISPLHF

SEQ ID NO: 608901 - protein, 17 aa, Homo sapiens
  CDR3 for alpha chain variable domain of TCR clone 304451 (TRAV35, TRAJ47)
GLLDGRTHTAYGNKLVF

SEQ ID NO: 608902 - protein, 11 aa, Homo sapiens
  CDR3 for beta chain variable domain of TCR clone 304451 (TRBV29-1, TRBJ1-1)
CSVEVGTRTFF

SEQ ID NO: 608903 - protein, 10 aa, Homo sapiens
  CDR3 for alpha chain variable domain of TCR clone 304452 (TRAV26-1, TRAJ22)
CIAGSRQLTF

SEQ ID NO: 608904 - protein, 17 aa, Homo sapiens
  CDR3 for beta chain variable domain of TCR clone 304452 (TRBV5-4, TRBJ1-1)
CSSFPPKGRLQNTEAFF

SEQ ID NO: 608905 - protein, 16 aa, Homo sapiens
  CDR3 for alpha chain variable domain of TCR clone 304453 (TRAV20, TRAJ10)
CAVLRGLTGGGNKLTF

SEQ ID NO: 608906 - protein, 16 aa, Homo sapiens
  CDR3 for beta chain variable domain of TCR clone 304453 (TRBV13, TRBJ2-2)
CASSPRTGEHTGELFF

SEQ ID NO: 608907 - protein, 12 aa, Homo sapiens
  CDR3 for alpha chain variable domain of TCR clone 304454 (TRAV3, TRAJ43)
CAVRDPNNDMRF

SEQ ID NO: 608908 - protein, 15 aa, Homo sapiens
  CDR3 for beta chain variable domain of TCR clone 304454 (TRBV11-1, TRBJ1-5)
CASSLGTGLDQPQHF

SEQ ID NO: 608909 - protein, 13 aa, Homo sapiens
  CDR3 for alpha chain variable domain of TCR clone 304455 (TRAV3, TRAJ21)
CAVRELDFNKFYF

SEQ ID NO: 608910 - protein, 15 aa, Homo sapiens
  CDR3 for beta chain variable domain of TCR clone 304455 (TRBV6-1, TRBJ2-3)
CASSERGGITDTQYF

SEQ ID NO: 608911 - protein, 21 aa, Homo sapiens
  CDR3 for alpha chain variable domain of TCR clone 304456 (TRAV2, TRAJ30)
ILQVREADAAVYYWGDDKIIF

SEQ ID NO: 608912 - protein, 13 aa, Homo sapiens
  CDR3 for beta chain variable domain of TCR clone 304456 (TRBV11-2, TRBJ2-2)
CASGRDREEELFF

SEQ ID NO: 608913 - protein, 11 aa, Homo sapiens
  CDR3 for alpha chain variable domain of TCR clone 304457 (TRAV12-1, TRAJ15)
CVANAGTALIF

SEQ ID NO: 608914 - protein, 16 aa, Homo sapiens
  CDR3 for beta chain variable domain of TCR clone 304457 (TRBV28, TRBJ2-1)
CASSSRVRDSYNEQFF

SEQ ID NO: 608915 - protein, 14 aa, Homo sapiens
  CDR3 for alpha chain variable domain of TCR clone 304458 (TRAV12-2, TRAJ13)
CAVTKTGGYQKVTF

SEQ ID NO: 608916 - protein, 15 aa, Homo sapiens
  CDR3 for beta chain variable domain of TCR clone 304458 (TRBV5-1, TRBJ2-5)
CASSLGLAEQETQYF

SEQ ID NO: 608917 - protein, 13 aa, Homo sapiens
  CDR3 for alpha chain variable domain of TCR clone 304459 (TRAV1-2, TRAJ9)
CAALNTGGFKTIF

SEQ ID NO: 608918 - protein, 16 aa, Homo sapiens
  CDR3 for beta chain variable domain of TCR clone 304459 (TRBV12-5, TRBJ2-5)
CASGPRTSGNQETQYV

SEQ ID NO: 608919 - protein, 14 aa, Homo sapiens
  CDR3 for alpha chain variable domain of TCR clone 304460 (TRAV16, TRAJ16)
CALSVLSDGQKLLF

SEQ ID NO: 608920 - protein, 13 aa, Homo sapiens
  CDR3 for beta chain variable domain of TCR clone 304460 (TRBV20-1, TRBJ1-1)
CSAPLGGGTEAFF

SEQ ID NO: 608921 - protein, 17 aa, Homo sapiens
  CDR3 for alpha chain variable domain of TCR clone 304461 (TRAV26-1, TRAJ11)
CIVRVGQSNSGYSTLTF

SEQ ID NO: 608922 - protein, 15 aa, Homo sapiens
  CDR3 for beta chain variable domain of TCR clone 304461 (TRBV19, TRBJ2-2)
CASSPRTGWTGELFF

SEQ ID NO: 608923 - protein, 14 aa, Homo sapiens
  CDR3 for alpha chain variable domain of TCR clone 304462 (TRAV17, TRAJ24)
CATLTTDSWGKFKF

SEQ ID NO: 608924 - protein, 16 aa, Homo sapiens
  CDR3 for beta chain variable domain of TCR clone 304462 (TRBV4-2, TRBJ2-7)
CASSQDGGSLRGEQYF

SEQ ID NO: 608925 - protein, 18 aa, Homo sapiens
  CDR3 for alpha chain variable domain of TCR clone 304463 (TRAV21, TRAJ52)
CAVRPSPAAGTSYGKLTF

SEQ ID NO: 608926 - protein, 18 aa, Homo sapiens
  CDR3 for beta chain variable domain of TCR clone 304463 (TRBV7-2, TRBJ2-3)
CASSLKREGSGITDTQYF

SEQ ID NO: 608927 - protein, 11 aa, Homo sapiens
  CDR3 for alpha chain variable domain of TCR clone 304464 (TRAV17, TRAJ9)
CSTNGGFKTIF

SEQ ID NO: 608928 - protein, 14 aa, Homo sapiens
  CDR3 for beta chain variable domain of TCR clone 304464 (TRBV7-9, TRBJ2-2)
CASSGLADTGELFF

SEQ ID NO: 608929 - protein, 10 aa, Homo sapiens
  CDR3 for alpha chain variable domain of TCR clone 304465 (TRAV3, TRAJ30)
CAVREIEIIF

SEQ ID NO: 608930 - protein, 15 aa, Homo sapiens
  CDR3 for beta chain variable domain of TCR clone 304465 (TRBV20-1, TRBJ2-7)
CSARVPAAYFYEQYF

SEQ ID NO: 608931 - protein, 13 aa, Homo sapiens
  CDR3 for alpha chain variable domain of TCR clone 304466 (TRAV12-2, TRAJ6)
CAVYVSRKLHTHI

SEQ ID NO: 608932 - protein, 12 aa, Homo sapiens
  CDR3 for beta chain variable domain of TCR clone 304466 (TRBV29-1, TRBJ2-3)
CSVTGGADTQYF

SEQ ID NO: 608933 - protein, 14 aa, Homo sapiens
  CDR3 for alpha chain variable domain of TCR clone 304467 (TRAV13-1, TRAJ35)
CAASKGGFGNVLHC

SEQ ID NO: 608934 - protein, 16 aa, Homo sapiens
  CDR3 for beta chain variable domain of TCR clone 304467 (TRBV20-1, TRBJ2-7)
CSARAPGLALSYEQYF

SEQ ID NO: 608935 - protein, 12 aa, Homo sapiens
  CDR3 for alpha chain variable domain of TCR clone 304468 (TRAV13-2, TRAJ8)
CAPWLGFQNLVF

SEQ ID NO: 608936 - protein, 14 aa, Homo sapiens
  CDR3 for beta chain variable domain of TCR clone 304468 (TRBV18, TRBJ1-5)
CASSRQQRNQPQHF

SEQ ID NO: 608937 - protein, 18 aa, Homo sapiens
  CDR3 for alpha chain variable domain of TCR clone 304469 (TRAV21, TRAJ52)
CAVRPSPAGGTSFVKLTF

SEQ ID NO: 608938 - protein, 17 aa, Homo sapiens
  CDR3 for beta chain variable domain of TCR clone 304469 (TRBV13, TRBJ2-3)
CASSLSRVAGGRNTQYF

SEQ ID NO: 608939 - protein, 17 aa, Homo sapiens
  CDR3 for alpha chain variable domain of TCR clone 304470 (TRAV3, TRAJ42)
CTVRDRDYGGSQGNLIF

SEQ ID NO: 608940 - protein, 14 aa, Homo sapiens
  CDR3 for beta chain variable domain of TCR clone 304470 (TRBV12-5, TRBJ2-5)
CASGSRTHQETQYF

SEQ ID NO: 608941 - protein, 14 aa, Homo sapiens
  CDR3 for alpha chain variable domain of TCR clone 304471 (TRAV8-3, TRAJ4)
CAVGAAGGYNKLIF

SEQ ID NO: 608942 - protein, 15 aa, Homo sapiens
  CDR3 for beta chain variable domain of TCR clone 304471 (TRBV9, TRBJ1-6)
CASSVAGTGDSTLHF

SEQ ID NO: 608943 - protein, 13 aa, Homo sapiens
  CDR3 for alpha chain variable domain of TCR clone 304472 (TRAV12-1, TRAJ11)
CVVTRGGYSTLTF

SEQ ID NO: 608944 - protein, 13 aa, Homo sapiens
  CDR3 for beta chain variable domain of TCR clone 304472 (TRBV11-2, TRBJ2-5)
CASSSTTQETQYF

SEQ ID NO: 608945 - protein, 17 aa, Homo sapiens
  CDR3 for alpha chain variable domain of TCR clone 304473 (TRAV26-1, TRAJ53)
CIVRVDDSGGSNYKLTF

SEQ ID NO: 608946 - protein, 16 aa, Homo sapiens
  CDR3 for beta chain variable domain of TCR clone 304473 (TRBV11-2, TRBJ1-2)
CASSLDRGGNNYGYSF

SEQ ID NO: 608947 - protein, 13 aa, Homo sapiens
  CDR3 for alpha chain variable domain of TCR clone 304474 (TRAV12-1, TRAJ22)
CVASGGSARQLTF

SEQ ID NO: 608948 - protein, 13 aa, Homo sapiens
  CDR3 for beta chain variable domain of TCR clone 304474 (TRBV11-2, TRBJ1-3)
CASSLEPVNTIYF

SEQ ID NO: 608949 - protein, 16 aa, Homo sapiens
  CDR3 for alpha chain variable domain of TCR clone 304475 (TRAV30, TRAJ24)
CGTEIVDADSWGKFQF

SEQ ID NO: 608950 - protein, 14 aa, Homo sapiens
  CDR3 for beta chain variable domain of TCR clone 304475 (TRBV12-5, TRBJ1-4)
CASRMTGRSEKLFF

SEQ ID NO: 608951 - protein, 13 aa, Homo sapiens
  CDR3 for alpha chain variable domain of TCR clone 304476 (TRAV20, TRAJ54)
CAVQAGGAQKLVF

SEQ ID NO: 608952 - protein, 11 aa, Homo sapiens
  CDR3 for beta chain variable domain of TCR clone 304476 (TRBV29-1, TRBJ2-5)
CSEDRTGTQYF

SEQ ID NO: 608953 - protein, 13 aa, Homo sapiens
  CDR3 for alpha chain variable domain of TCR clone 304477 (TRAV21, TRAJ27)
CAARPGNAGKSTS

SEQ ID NO: 608954 - protein, 20 aa, Homo sapiens
  CDR3 for beta chain variable domain of TCR clone 304477 (TRBV7-8, TRBJ2-2)
CASSHLFPGPTIHITGELFF

SEQ ID NO: 608955 - protein, 12 aa, Homo sapiens
  CDR3 for alpha chain variable domain of TCR clone 304478 (TRAV25, TRAJ35)
CAGIGFGNVLHC

SEQ ID NO: 608956 - protein, 12 aa, Homo sapiens
  CDR3 for beta chain variable domain of TCR clone 304478 (TRBV6-3, TRBJ2-7)
CASSRQVYEQYF

SEQ ID NO: 608957 - protein, 15 aa, Homo sapiens
  CDR3 for alpha chain variable domain of TCR clone 304479 (TRAV38-2/DV8, TRAJ48)
CAYRSGGFGNVKLTF

SEQ ID NO: 608958 - protein, 16 aa, Homo sapiens
  CDR3 for beta chain variable domain of TCR clone 304479 (TRBV28, TRBJ2-7)
CASSPWVATGDLSQYF

SEQ ID NO: 608959 - protein, 13 aa, Homo sapiens
  CDR3 for alpha chain variable domain of TCR clone 304480 (TRAV21, TRAJ11)
CAGPNSGYSTLTF

SEQ ID NO: 608960 - protein, 13 aa, Homo sapiens
  CDR3 for beta chain variable domain of TCR clone 304480 (TRBV3-1, TRBJ2-7)
CASSLRDGYEQYF

SEQ ID NO: 608961 - protein, 14 aa, Homo sapiens
  CDR3 for alpha chain variable domain of TCR clone 304481 (TRAV8-3, TRAJ21)
CAVDARDNFNKFYF

SEQ ID NO: 608962 - protein, 11 aa, Homo sapiens
  CDR3 for beta chain variable domain of TCR clone 304481 (TRBV20-1, TRBJ2-1)
LAGHPYNEQFF

SEQ ID NO: 608963 - protein, 19 aa, Homo sapiens
  CDR3 for alpha chain variable domain of TCR clone 304482 (TRAV2, TRAJ20)
ILQVREADAAVYRDCKLSV

SEQ ID NO: 608964 - protein, 16 aa, Homo sapiens
  CDR3 for beta chain variable domain of TCR clone 304482 (TRBV9, TRBJ2-2)
CASSAMGKGNTGELFF

SEQ ID NO: 608965 - protein, 12 aa, Homo sapiens
  CDR3 for alpha chain variable domain of TCR clone 304483 (TRAV12-1, TRAJ40)
CVVYSGTYKYIF

SEQ ID NO: 608966 - protein, 18 aa, Homo sapiens
  CDR3 for beta chain variable domain of TCR clone 304483 (TRBV11-2, TRBJ2-3)
CASSVGGASGGAPNTQYF

SEQ ID NO: 608967 - protein, 10 aa, Homo sapiens
  CDR3 for alpha chain variable domain of TCR clone 304484 (TRAV13-1, TRAJ5)
CAASRRALTF

SEQ ID NO: 608968 - protein, 13 aa, Homo sapiens
  CDR3 for beta chain variable domain of TCR clone 304484 (TRBV4-1, TRBJ1-1)
CASSRKMNTEAFF

SEQ ID NO: 608969 - protein, 16 aa, Homo sapiens
  CDR3 for alpha chain variable domain of TCR clone 304485 (TRAV3, TRAJ37)
CSVRGKGSGNTGKRIF

SEQ ID NO: 608970 - protein, 21 aa, Homo sapiens
  CDR3 for beta chain variable domain of TCR clone 304485 (TRBV15, TRBJ2-1)
AWGTQPCTCVPPAEVDTARFF

SEQ ID NO: 608971 - protein, 12 aa, Homo sapiens
  CDR3 for alpha chain variable domain of TCR clone 304486 (TRAV17, TRAJ6)
CATGGGSYIPTF

SEQ ID NO: 608972 - protein, 14 aa, Homo sapiens
  CDR3 for beta chain variable domain of TCR clone 304486 (TRBV4-2, TRBJ2-1)
CASGLDRAYNEQFF

SEQ ID NO: 608973 - protein, 14 aa, Homo sapiens
  CDR3 for alpha chain variable domain of TCR clone 304487 (TRAV12-3, TRAJ22)
CAMSLFGSARQLTF

SEQ ID NO: 608974 - protein, 15 aa, Homo sapiens
  CDR3 for beta chain variable domain of TCR clone 304487 (TRBV7-8, TRBJ2-1)
CASSLHGGPYNEQFF

SEQ ID NO: 608975 - protein, 14 aa, Homo sapiens
  CDR3 for alpha chain variable domain of TCR clone 304488 (TRAV6, TRAJ10)
CALDFTGGGNKLTF

SEQ ID NO: 608976 - protein, 15 aa, Homo sapiens
  CDR3 for beta chain variable domain of TCR clone 304488 (TRBV9, TRBJ1-6)
CASSVAGTGDSPLHF

SEQ ID NO: 608977 - protein, 15 aa, Homo sapiens
  CDR3 for alpha chain variable domain of TCR clone 304489 (TRAV25, TRAJ52)
CAGTSGGTSYGKLTF

SEQ ID NO: 608978 - protein, 16 aa, Homo sapiens
  CDR3 for beta chain variable domain of TCR clone 304489 (TRBV10-3, TRBJ2-1)
CAISGVGDGGGGEQFF

SEQ ID NO: 608979 - protein, 14 aa, Homo sapiens
  CDR3 for alpha chain variable domain of TCR clone 304490 (TRAV12-2, TRAJ40)
CAVKIPSGTYKYIF

SEQ ID NO: 608980 - protein, 17 aa, Homo sapiens
  CDR3 for beta chain variable domain of TCR clone 304490 (TRBV11-2, TRBJ2-1)
CASSLYPPGVENNEQFF

SEQ ID NO: 608981 - protein, 14 aa, Homo sapiens
  CDR3 for alpha chain variable domain of TCR clone 304491 (TRAV1-2, TRAJ10)
CALRVKGGGKKLTF

SEQ ID NO: 608982 - protein, 12 aa, Homo sapiens
  CDR3 for beta chain variable domain of TCR clone 304491 (TRBV5-4, TRBJ1-1)
CASSFGQTEAFF

SEQ ID NO: 608983 - protein, 16 aa, Homo sapiens
  CDR3 for alpha chain variable domain of TCR clone 304492 (TRAV3, TRAJ37)
CAVRGKGSGNTGQLIF

SEQ ID NO: 608984 - protein, 16 aa, Homo sapiens
  CDR3 for beta chain variable domain of TCR clone 304492 (TRBV28, TRBJ1-5)
CASSLRGGYSNQPQHF

SEQ ID NO: 608985 - protein, 12 aa, Homo sapiens
  CDR3 for alpha chain variable domain of TCR clone 304493 (TRAV20, TRAJ4)
CSASGGYNKLIF

SEQ ID NO: 608986 - protein, 13 aa, Homo sapiens
  CDR3 for beta chain variable domain of TCR clone 304493 (TRBV9, TRBJ2-1)
CASSPSGVNEQFF

SEQ ID NO: 608987 - protein, 13 aa, Homo sapiens
  CDR3 for alpha chain variable domain of TCR clone 304494 (TRAV12-3, TRAJ33)
CAMSVNSNYQLIW

SEQ ID NO: 608988 - protein, 14 aa, Homo sapiens
  CDR3 for beta chain variable domain of TCR clone 304494 (TRBV11-3, TRBJ2-3)
CASSLSGSTDTQYF

SEQ ID NO: 608989 - protein, 14 aa, Homo sapiens
  CDR3 for alpha chain variable domain of TCR clone 304495 (TRAV29/DV5, TRAJ48)
CAASANFGNEKLTF

SEQ ID NO: 608990 - protein, 15 aa, Homo sapiens
  CDR3 for beta chain variable domain of TCR clone 304495 (TRBV7-2, TRBJ1-2)
CASSPRAGWNYGYTF

SEQ ID NO: 608991 - protein, 14 aa, Homo sapiens
  CDR3 for alpha chain variable domain of TCR clone 304496 (TRAV21, TRAJ28)
CAVGSGAGSYQLTF

SEQ ID NO: 608992 - protein, 14 aa, Homo sapiens
  CDR3 for beta chain variable domain of TCR clone 304496 (TRBV18, TRBJ1-4)
CASSPGPNGEKLSF

SEQ ID NO: 608993 - protein, 13 aa, Homo sapiens
  CDR3 for alpha chain variable domain of TCR clone 304497 (TRAV27, TRAJ41)
CAGEGNSGYALNF

SEQ ID NO: 608994 - protein, 14 aa, Homo sapiens
  CDR3 for beta chain variable domain of TCR clone 304497 (TRBV7-2, TRBJ1-1)
CASSFLTGKTEAFF

SEQ ID NO: 608995 - protein, 11 aa, Homo sapiens
  CDR3 for alpha chain variable domain of TCR clone 304498 (TRAV1-2, TRAJ31)
CAVNNNARLMF

SEQ ID NO: 608996 - protein, 18 aa, Homo sapiens
  CDR3 for beta chain variable domain of TCR clone 304498 (TRBV25-1, TRBJ1-2)
CASSGLQNGQGLIFGYTC

SEQ ID NO: 608997 - protein, 12 aa, Homo sapiens
  CDR3 for alpha chain variable domain of TCR clone 304499 (TRAV36/DV7, TRAJ37)
CACYGNKGKLIF

SEQ ID NO: 608998 - protein, 13 aa, Homo sapiens
  CDR3 for beta chain variable domain of TCR clone 304499 (TRBV10-3, TRBJ2-7)
CASKLAVNYEQYF

SEQ ID NO: 608999 - protein, 17 aa, Homo sapiens
  CDR3 for alpha chain variable domain of TCR clone 304500 (TRAV26-1, TRAJ53)
CIVRVDDSGGSNYRLTF

SEQ ID NO: 609000 - protein, 16 aa, Homo sapiens
  CDR3 for beta chain variable domain of TCR clone 304500 (TRBV12-4, TRBJ1-5)
CASSRPVGGSNQPQHF

SEQ ID NO: 609001 - protein, 13 aa, Homo sapiens
  CDR3 for alpha chain variable domain of TCR clone 304501 (TRAV12-3, TRAJ41)
CAIAPTSGYALNF

SEQ ID NO: 609002 - protein, 14 aa, Homo sapiens
  CDR3 for beta chain variable domain of TCR clone 304501 (TRBV7-2, TRBJ1-3)
CASSLGTAGNTIYF

SEQ ID NO: 609003 - protein, 15 aa, Homo sapiens
  CDR3 for alpha chain variable domain of TCR clone 304502 (TRAV13-1, TRAJ44)
CEASRNTGTASKLTF

SEQ ID NO: 609004 - protein, 14 aa, Homo sapiens
  CDR3 for beta chain variable domain of TCR clone 304502 (TRBV11-2, TRBJ1-2)
CASSLYRGNYGYTF

SEQ ID NO: 609005 - protein, 12 aa, Homo sapiens
  CDR3 for alpha chain variable domain of TCR clone 304503 (TRAV3, TRAJ43)
CAVRDPNDDMRF

SEQ ID NO: 609006 - protein, 15 aa, Homo sapiens
  CDR3 for beta chain variable domain of TCR clone 304503 (TRBV27, TRBJ1-5)
CASSLGTGFDQPQHF

SEQ ID NO: 609007 - protein, 15 aa, Homo sapiens
  CDR3 for alpha chain variable domain of TCR clone 304504 (TRAV21, TRAJ24)
CAARSSTTSWGKLQF

SEQ ID NO: 609008 - protein, 13 aa, Homo sapiens
  CDR3 for beta chain variable domain of TCR clone 304504 (TRBV11-2, TRBJ2-5)
CASSSTGEETQYF

SEQ ID NO: 609009 - protein, 15 aa, Homo sapiens
  CDR3 for alpha chain variable domain of TCR clone 304505 (TRAV8-2, TRAJ40)
CVVLGTTSGTYKYIF

SEQ ID NO: 609010 - protein, 12 aa, Homo sapiens
  CDR3 for beta chain variable domain of TCR clone 304505 (TRBV7-8, TRBJ2-3)
CASSLWDEAQYF

SEQ ID NO: 609011 - protein, 17 aa, Homo sapiens
  CDR3 for alpha chain variable domain of TCR clone 304506 (TRAV3, TRAJ6)
CGVRDGPRAGGSYIPTF

SEQ ID NO: 609012 - protein, 20 aa, Homo sapiens
  CDR3 for beta chain variable domain of TCR clone 304506 (TRBV28, TRBJ2-1)
CASTPIGRSPGLAGGNEQFF

SEQ ID NO: 609013 - protein, 12 aa, Homo sapiens
  CDR3 for alpha chain variable domain of TCR clone 304507 (TRAV16, TRAJ10)
CSRAGGGNKRTF

SEQ ID NO: 609014 - protein, 13 aa, Homo sapiens
  CDR3 for beta chain variable domain of TCR clone 304507 (TRBV7-3, TRBJ1-1)
CASSQDWGAEAFF

SEQ ID NO: 609015 - protein, 13 aa, Homo sapiens
  CDR3 for alpha chain variable domain of TCR clone 304508 (TRAV12-2, TRAJ50)
CSVIVTSYDKVIF

SEQ ID NO: 609016 - protein, 14 aa, Homo sapiens
  CDR3 for beta chain variable domain of TCR clone 304508 (TRBV4-2, TRBJ2-1)
CASGLDRAYNEQFF

SEQ ID NO: 609017 - protein, 13 aa, Homo sapiens
  CDR3 for alpha chain variable domain of TCR clone 304509 (TRAV21, TRAJ15)
CAVANQAGTALIF

SEQ ID NO: 609018 - protein, 15 aa, Homo sapiens
  CDR3 for beta chain variable domain of TCR clone 304509 (TRBV7-9, TRBJ1-4)
CASSRTGGFNEKLFF

SEQ ID NO: 609019 - protein, 13 aa, Homo sapiens
  CDR3 for alpha chain variable domain of TCR clone 304510 (TRAV8-3, TRAJ36)
CAVGATGANNLFF

SEQ ID NO: 609020 - protein, 17 aa, Homo sapiens
  CDR3 for beta chain variable domain of TCR clone 304510 (TRBV18, TRBJ2-2)
CASSPSDPWQNTGELFF

SEQ ID NO: 609021 - protein, 13 aa, Homo sapiens
  CDR3 for alpha chain variable domain of TCR clone 304511 (TRAV12-1, TRAJ34)
CVVTGYDTDKLIF

SEQ ID NO: 609022 - protein, 13 aa, Homo sapiens
  CDR3 for beta chain variable domain of TCR clone 304511 (TRBV10-3, TRBJ2-7)
CASKLAVNYEQYF

SEQ ID NO: 609023 - protein, 15 aa, Homo sapiens
  CDR3 for alpha chain variable domain of TCR clone 304512 (TRAV13-1, TRAJ11)
CAASNRNSGYSTLTF

SEQ ID NO: 609024 - protein, 11 aa, Homo sapiens
  CDR3 for beta chain variable domain of TCR clone 304512 (TRBV20-1, TRBJ2-7)
CSARLSYEHYF

SEQ ID NO: 609025 - protein, 15 aa, Homo sapiens
  CDR3 for alpha chain variable domain of TCR clone 304513 (TRAV3, TRAJ5)
RAVRDMKTGRRALTF

SEQ ID NO: 609026 - protein, 15 aa, Homo sapiens
  CDR3 for beta chain variable domain of TCR clone 304513 (TRBV7-8, TRBJ2-1)
CASSLADSLYNEQFF

SEQ ID NO: 609027 - protein, 13 aa, Homo sapiens
  CDR3 for alpha chain variable domain of TCR clone 304514 (TRAV25, TRAJ26)
CAGMDNYGQTFVF

SEQ ID NO: 609028 - protein, 13 aa, Homo sapiens
  CDR3 for beta chain variable domain of TCR clone 304514 (TRBV4-2, TRBJ1-1)
CASSQAGNTEAFF

SEQ ID NO: 609029 - protein, 16 aa, Homo sapiens
  CDR3 for alpha chain variable domain of TCR clone 304515 (TRAV22, TRAJ45)
CAVERGKRGGADGLTC

SEQ ID NO: 609030 - protein, 13 aa, Homo sapiens
  CDR3 for beta chain variable domain of TCR clone 304515 (TRBV27, TRBJ1-1)
CASSLSIGAEAFF

SEQ ID NO: 609031 - protein, 16 aa, Homo sapiens
  CDR3 for alpha chain variable domain of TCR clone 304516 (TRAV12-2, TRAJ18)
CAVTTDRGSTLGRLYF

SEQ ID NO: 609032 - protein, 16 aa, Homo sapiens
  CDR3 for beta chain variable domain of TCR clone 304516 (TRBV2, TRBJ2-1)
CASSVGGSLSYNEQFF

SEQ ID NO: 609033 - protein, 15 aa, Homo sapiens
  CDR3 for alpha chain variable domain of TCR clone 304517 (TRAV3, TRAJ13)
CAVRVYSGGYQKVTF

SEQ ID NO: 609034 - protein, 15 aa, Homo sapiens
  CDR3 for beta chain variable domain of TCR clone 304517 (TRBV5-7, TRBJ1-2)
CASSLGVADNYGYTF

SEQ ID NO: 609035 - protein, 13 aa, Homo sapiens
  CDR3 for alpha chain variable domain of TCR clone 304518 (TRAV21, TRAJ56)
CAGWVGANSKLTF

SEQ ID NO: 609036 - protein, 13 aa, Homo sapiens
  CDR3 for beta chain variable domain of TCR clone 304518 (TRBV2, TRBJ1-1)
CASSVLMNTEAFF

SEQ ID NO: 609037 - protein, 15 aa, Homo sapiens
  CDR3 for alpha chain variable domain of TCR clone 304519 (TRAV14/DV4, TRAJ20)
CEMRERGSNDYKLSF

SEQ ID NO: 609038 - protein, 13 aa, Homo sapiens
  CDR3 for beta chain variable domain of TCR clone 304519 (TRBV7-9, TRBJ1-2)
CASSLKQNYGYTF

SEQ ID NO: 609039 - protein, 13 aa, Homo sapiens
  CDR3 for alpha chain variable domain of TCR clone 304520 (TRAV20, TRAJ21)
CAVEGYDFNKFYF

SEQ ID NO: 609040 - protein, 16 aa, Homo sapiens
  CDR3 for beta chain variable domain of TCR clone 304520 (TRBV7-2, TRBJ1-2)
CASSSNQDRRGHGYTF

SEQ ID NO: 609041 - protein, 15 aa, Homo sapiens
  CDR3 for alpha chain variable domain of TCR clone 304521 (TRAV20, TRAJ6)
CTVRLQSGGSYIPTF

SEQ ID NO: 609042 - protein, 14 aa, Homo sapiens
  CDR3 for beta chain variable domain of TCR clone 304521 (TRBV12-4, TRBJ2-7)
CASSASGDWYEQYF

SEQ ID NO: 609043 - protein, 15 aa, Homo sapiens
  CDR3 for alpha chain variable domain of TCR clone 304522 (TRAV19, TRAJ9)
FALCLPDTGGFKTIF

SEQ ID NO: 609044 - protein, 17 aa, Homo sapiens
  CDR3 for beta chain variable domain of TCR clone 304522 (TRBV20-1, TRBJ2-1)
CSARDPLAGVWDNEQFF

SEQ ID NO: 609045 - protein, 14 aa, Homo sapiens
  CDR3 for alpha chain variable domain of TCR clone 304523 (TRAV12-3, TRAJ15)
CAMIPPQAGTALIF

SEQ ID NO: 609046 - protein, 14 aa, Homo sapiens
  CDR3 for beta chain variable domain of TCR clone 304523 (TRBV18, TRBJ2-5)
CASSPGVSQETQYF

SEQ ID NO: 609047 - protein, 13 aa, Homo sapiens
  CDR3 for alpha chain variable domain of TCR clone 304524 (TRAV13-1, TRAJ39)
CSKYSNAGNMLTF

SEQ ID NO: 609048 - protein, 12 aa, Homo sapiens
  CDR3 for beta chain variable domain of TCR clone 304524 (TRBV2, TRBJ1-5)
CSRGGGNQPQHF

SEQ ID NO: 609049 - protein, 14 aa, Homo sapiens
  CDR3 for alpha chain variable domain of TCR clone 304525 (TRAV29/DV5, TRAJ45)
CAASFRGGADGLTF

SEQ ID NO: 609050 - protein, 14 aa, Homo sapiens
  CDR3 for beta chain variable domain of TCR clone 304525 (TRBV25-1, TRBJ1-1)
CASTHLGGNTEAFF

SEQ ID NO: 609051 - protein, 14 aa, Homo sapiens
  CDR3 for alpha chain variable domain of TCR clone 304526 (TRAV38-1, TRAJ31)
CAFMKHDNNARLMF

SEQ ID NO: 609052 - protein, 16 aa, Homo sapiens
  CDR3 for beta chain variable domain of TCR clone 304526 (TRBV23-1, TRBJ2-1)
CISAPATGPAYNEQFF

SEQ ID NO: 609053 - protein, 15 aa, Homo sapiens
  CDR3 for alpha chain variable domain of TCR clone 304527 (TRAV26-1, TRAJ3)
CIVRSGYSSASKIIF

SEQ ID NO: 609054 - protein, 14 aa, Homo sapiens
  CDR3 for beta chain variable domain of TCR clone 304527 (TRBV4-2, TRBJ2-1)
CASGLDRAYNEQFF

SEQ ID NO: 609055 - protein, 17 aa, Homo sapiens
  CDR3 for alpha chain variable domain of TCR clone 304528 (TRAV13-1, TRAJ28)
CAASPHTLGLGVTNSLS

SEQ ID NO: 609056 - protein, 12 aa, Homo sapiens
  CDR3 for beta chain variable domain of TCR clone 304528 (TRBV7-9, TRBJ2-7)
CASSIKREEQYF

SEQ ID NO: 609057 - protein, 12 aa, Homo sapiens
  CDR3 for alpha chain variable domain of TCR clone 304529 (TRAV17, TRAJ57)
CDTDGGSEKLVF

SEQ ID NO: 609058 - protein, 12 aa, Homo sapiens
  CDR3 for beta chain variable domain of TCR clone 304529 (TRBV29-1, TRBJ2-2)
CSVDKYTGELFF

SEQ ID NO: 609059 - protein, 14 aa, Homo sapiens
  CDR3 for alpha chain variable domain of TCR clone 304530 (TRAV13-2, TRAJ10)
CAETFTGRGNKLTF

SEQ ID NO: 609060 - protein, 16 aa, Homo sapiens
  CDR3 for beta chain variable domain of TCR clone 304530 (TRBV18, TRBJ2-7)
CASSPRSQGISYEQYF

SEQ ID NO: 609061 - protein, 13 aa, Homo sapiens
  CDR3 for alpha chain variable domain of TCR clone 304531 (TRAV17, TRAJ9)
CATDYTGGFKTIF

SEQ ID NO: 609062 - protein, 15 aa, Homo sapiens
  CDR3 for beta chain variable domain of TCR clone 304531 (TRBV28, TRBJ2-7)
CASSPGGRGFYEQYF

SEQ ID NO: 609063 - protein, 12 aa, Homo sapiens
  CDR3 for alpha chain variable domain of TCR clone 304532 (TRAV17, TRAJ21)
CALRYHFNKFYF

SEQ ID NO: 609064 - protein, 13 aa, Homo sapiens
  CDR3 for beta chain variable domain of TCR clone 304532 (TRBV24-1, TRBJ2-5)
CATSTGGTETQYF

SEQ ID NO: 609065 - protein, 15 aa, Homo sapiens
  CDR3 for alpha chain variable domain of TCR clone 304533 (TRAV3, TRAJ29)
CAVRDLYSGNTPLFF

SEQ ID NO: 609066 - protein, 17 aa, Homo sapiens
  CDR3 for beta chain variable domain of TCR clone 304533 (TRBV20-1, TRBJ2-1)
CSARDPLAGVWDNEQFF

SEQ ID NO: 609067 - protein, 18 aa, Homo sapiens
  CDR3 for alpha chain variable domain of TCR clone 304534 (TRAV21, TRAJ52)
CAVRPSPAGGTSYGKLTF

SEQ ID NO: 609068 - protein, 16 aa, Homo sapiens
  CDR3 for beta chain variable domain of TCR clone 304534 (TRBV20-1, TRBJ1-4)
CSAPGQGLLSNEKLFF

SEQ ID NO: 609069 - protein, 10 aa, Homo sapiens
  CDR3 for alpha chain variable domain of TCR clone 304535 (TRAV21, TRAJ31)
CAVDNARLMF

SEQ ID NO: 609070 - protein, 12 aa, Homo sapiens
  CDR3 for beta chain variable domain of TCR clone 304535 (TRBV12-4, TRBJ2-7)
CASSLGGYEQYF

SEQ ID NO: 609071 - protein, 12 aa, Homo sapiens
  CDR3 for alpha chain variable domain of TCR clone 304536 (TRAV30, TRAJ31)
CGTAKHNARLMF

SEQ ID NO: 609072 - protein, 17 aa, Homo sapiens
  CDR3 for beta chain variable domain of TCR clone 304536 (TRBV13, TRBJ2-3)
WASSLSRVAGGRNTQYF

SEQ ID NO: 609073 - protein, 14 aa, Homo sapiens
  CDR3 for alpha chain variable domain of TCR clone 304537 (TRAV1-2, TRAJ16)
CAVNRFSDGQTLLF

SEQ ID NO: 609074 - protein, 14 aa, Homo sapiens
  CDR3 for beta chain variable domain of TCR clone 304537 (TRBV4-1, TRBJ2-2)
CASSQAVNTGELFF

SEQ ID NO: 609075 - protein, 13 aa, Homo sapiens
  CDR3 for alpha chain variable domain of TCR clone 304538 (TRAV12-2, TRAJ10)
CAVPTGGGSKLTF

SEQ ID NO: 609076 - protein, 14 aa, Homo sapiens
  CDR3 for beta chain variable domain of TCR clone 304538 (TRBV25-1, TRBJ1-1)
CASTRLGGNTEAFF

SEQ ID NO: 609077 - protein, 13 aa, Homo sapiens
  CDR3 for alpha chain variable domain of TCR clone 304539 (TRAV13-2, TRAJ48)
CAEMDFGNEKLTF

SEQ ID NO: 609078 - protein, 12 aa, Homo sapiens
  CDR3 for beta chain variable domain of TCR clone 304539 (TRBV12-4, TRBJ1-2)
CQQFTTGKGYTF

SEQ ID NO: 609079 - protein, 15 aa, Homo sapiens
  CDR3 for alpha chain variable domain of TCR clone 304540 (TRAV26-1, TRAJ48)
CVARWSWFGNEKLTF

SEQ ID NO: 609080 - protein, 12 aa, Homo sapiens
  CDR3 for beta chain variable domain of TCR clone 304540 (TRBV19, TRBJ2-5)
CASSISEETQYF

SEQ ID NO: 609081 - protein, 10 aa, Homo sapiens
  CDR3 for alpha chain variable domain of TCR clone 304541 (TRAV12-1, TRAJ37)
ARGNTGELIF

SEQ ID NO: 609082 - protein, 15 aa, Homo sapiens
  CDR3 for beta chain variable domain of TCR clone 304541 (TRBV7-8, TRBJ2-3)
CASSLEQGGTDTQYF

SEQ ID NO: 609083 - protein, 12 aa, Homo sapiens
  CDR3 for alpha chain variable domain of TCR clone 304542 (TRAV2, TRAJ9)
CAVGAGGFKTIF

SEQ ID NO: 609084 - protein, 12 aa, Homo sapiens
  CDR3 for beta chain variable domain of TCR clone 304542 (TRBV12-4, TRBJ2-7)
CASSLGGYGQYF

SEQ ID NO: 609085 - protein, 14 aa, Homo sapiens
  CDR3 for alpha chain variable domain of TCR clone 304543 (TRAV1-2, TRAJ16)
CAVNRFSDGEKLLF

SEQ ID NO: 609086 - protein, 14 aa, Homo sapiens
  CDR3 for beta chain variable domain of TCR clone 304543 (TRBV18, TRBJ2-5)
CASSPGVSQETQYF

SEQ ID NO: 609087 - protein, 14 aa, Homo sapiens
  CDR3 for alpha chain variable domain of TCR clone 304544 (TRAV12-3, TRAJ10)
SHLPLAGGGNKLTF

SEQ ID NO: 609088 - protein, 15 aa, Homo sapiens
  CDR3 for beta chain variable domain of TCR clone 304544 (TRBV11-2, TRBJ1-3)
CASSLDGTVGNTVYF

SEQ ID NO: 609089 - protein, 18 aa, Homo sapiens
  CDR3 for alpha chain variable domain of TCR clone 304545 (TRAV21, TRAJ52)
CAVRPSPAGGTSYGRLTF

SEQ ID NO: 609090 - protein, 17 aa, Homo sapiens
  CDR3 for beta chain variable domain of TCR clone 304545 (TRBV13, TRBJ2-3)
CASSLARVAGGRNTQYF

SEQ ID NO: 609091 - protein, 15 aa, Homo sapiens
  CDR3 for alpha chain variable domain of TCR clone 304546 (TRAV8-3, TRAJ27)
CTVGPSKTNAGKSTF

SEQ ID NO: 609092 - protein, 15 aa, Homo sapiens
  CDR3 for beta chain variable domain of TCR clone 304546 (TRBV7-2, TRBJ2-1)
CASSSGLAGGNKQFF

SEQ ID NO: 609093 - protein, 14 aa, Homo sapiens
  CDR3 for alpha chain variable domain of TCR clone 304547 (TRAV17, TRAJ34)
CTTDSLEGTDKLIF

SEQ ID NO: 609094 - protein, 13 aa, Homo sapiens
  CDR3 for beta chain variable domain of TCR clone 304547 (TRBV11-2, TRBJ2-7)
CASSGARPYEQYF

SEQ ID NO: 609095 - protein, 15 aa, Homo sapiens
  CDR3 for alpha chain variable domain of TCR clone 304548 (TRAV23/DV6, TRAJ18)
CAARYRGSTVGRLYF

SEQ ID NO: 609096 - protein, 13 aa, Homo sapiens
  CDR3 for beta chain variable domain of TCR clone 304548 (TRBV7-2, TRBJ2-7)
CASSSPSGSEQYF

SEQ ID NO: 609097 - protein, 14 aa, Homo sapiens
  CDR3 for alpha chain variable domain of TCR clone 304549 (TRAV23/DV6, TRAJ37)
CAASTSSTTGKLIF

SEQ ID NO: 609098 - protein, 13 aa, Homo sapiens
  CDR3 for beta chain variable domain of TCR clone 304549 (TRBV7-7, TRBJ1-1)
CASSLGANTEAFF

SEQ ID NO: 609099 - protein, 11 aa, Homo sapiens
  CDR3 for alpha chain variable domain of TCR clone 304550 (TRAV17, TRAJ31)
CATSNNARLMF

SEQ ID NO: 609100 - protein, 17 aa, Homo sapiens
  CDR3 for beta chain variable domain of TCR clone 304550 (TRBV11-2, TRBJ2-1)
CASSLYPPGVEYNEQFF

SEQ ID NO: 609101 - protein, 11 aa, Homo sapiens
  CDR3 for alpha chain variable domain of TCR clone 304551 (TRAV23/DV6, TRAJ17)
CKWAAGTKLTF

SEQ ID NO: 609102 - protein, 14 aa, Homo sapiens
  CDR3 for beta chain variable domain of TCR clone 304551 (TRBV6-1, TRBJ2-7)
CASSGGSYLYGQYF

SEQ ID NO: 609103 - protein, 13 aa, Homo sapiens
  CDR3 for alpha chain variable domain of TCR clone 304552 (TRAV30, TRAJ49)
CGTESQPVTSSIL

SEQ ID NO: 609104 - protein, 15 aa, Homo sapiens
  CDR3 for beta chain variable domain of TCR clone 304552 (TRBV6-1, TRBJ2-7)
CASSESMGDFYEQYF

SEQ ID NO: 609105 - protein, 20 aa, Homo sapiens
  CDR3 for alpha chain variable domain of TCR clone 304553 (TRAV26-1, TRAJ47)
CCVLFHRQSSFMEYGNKLVF

SEQ ID NO: 609106 - protein, 14 aa, Homo sapiens
  CDR3 for beta chain variable domain of TCR clone 304553 (TRBV7-2, TRBJ1-2)
CASSRGGTNYGYTF

SEQ ID NO: 609107 - protein, 12 aa, Homo sapiens
  CDR3 for alpha chain variable domain of TCR clone 304554 (TRAV2, TRAJ31)
CAVEDNNARLMF

SEQ ID NO: 609108 - protein, 12 aa, Homo sapiens
  CDR3 for beta chain variable domain of TCR clone 304554 (TRBV11-2, TRBJ2-5)
CASSLGQETQYF

SEQ ID NO: 609109 - protein, 13 aa, Homo sapiens
  CDR3 for alpha chain variable domain of TCR clone 304555 (TRAV16, TRAJ29)
CALSRRGNTPLVF

SEQ ID NO: 609110 - protein, 17 aa, Homo sapiens
  CDR3 for beta chain variable domain of TCR clone 304555 (TRBV13, TRBJ2-3)
CASSLSRVAGGRNTQYF

SEQ ID NO: 609111 - protein, 15 aa, Homo sapiens
  CDR3 for alpha chain variable domain of TCR clone 304556 (TRAV21, TRAJ52)
CAVRGGGTSYGKLTF

SEQ ID NO: 609112 - protein, 15 aa, Homo sapiens
  CDR3 for beta chain variable domain of TCR clone 304556 (TRBV18, TRBJ1-5)
CASSPSDRSNQPQYF

SEQ ID NO: 609113 - protein, 14 aa, Homo sapiens
  CDR3 for alpha chain variable domain of TCR clone 304557 (TRAV26-1, TRAJ38)
CIADNASNNRKLIW

SEQ ID NO: 609114 - protein, 13 aa, Homo sapiens
  CDR3 for beta chain variable domain of TCR clone 304557 (TRBV20-1, TRBJ1-1)
CSARGGGNTEALF

SEQ ID NO: 609115 - protein, 12 aa, Homo sapiens
  CDR3 for alpha chain variable domain of TCR clone 304558 (TRAV36/DV7, TRAJ54)
CAAVRGAQKLVF

SEQ ID NO: 609116 - protein, 15 aa, Homo sapiens
  CDR3 for beta chain variable domain of TCR clone 304558 (TRBV20-1, TRBJ2-3)
CSARPSGFYTDTQYF

SEQ ID NO: 609117 - protein, 15 aa, Homo sapiens
  CDR3 for alpha chain variable domain of TCR clone 304559 (TRAV1-2, TRAJ31)
CLLPLCCNNNARLMF

SEQ ID NO: 609118 - protein, 15 aa, Homo sapiens
  CDR3 for beta chain variable domain of TCR clone 304559 (TRBV28, TRBJ2-1)
CASSIIAGGRSEQFF

SEQ ID NO: 609119 - protein, 11 aa, Homo sapiens
  CDR3 for alpha chain variable domain of TCR clone 304560 (TRAV3, TRAJ21)
CAVGNFKKFYF

SEQ ID NO: 609120 - protein, 16 aa, Homo sapiens
  CDR3 for beta chain variable domain of TCR clone 304560 (TRBV19, TRBJ2-1)
CASSTAGPSSYNEQFF

SEQ ID NO: 609121 - protein, 17 aa, Homo sapiens
  CDR3 for alpha chain variable domain of TCR clone 304561 (TRAV22, TRAJ53)
CAVEFSNSGGSNYKLTF

SEQ ID NO: 609122 - protein, 14 aa, Homo sapiens
  CDR3 for beta chain variable domain of TCR clone 304561 (TRBV19, TRBJ2-1)
CASPTFVLSGEQFL

SEQ ID NO: 609123 - protein, 14 aa, Homo sapiens
  CDR3 for alpha chain variable domain of TCR clone 304562 (TRAV35, TRAJ22)
CAGLRPGSARQLPF

SEQ ID NO: 609124 - protein, 15 aa, Homo sapiens
  CDR3 for beta chain variable domain of TCR clone 304562 (TRBV2, TRBJ1-5)
CASSPGPTGNQPQHF

SEQ ID NO: 609125 - protein, 20 aa, Homo sapiens
  CDR3 for alpha chain variable domain of TCR clone 304563 (TRAV4, TRAJ29)
CCVLLPRGRHPYSGNTPLVL

SEQ ID NO: 609126 - protein, 14 aa, Homo sapiens
  CDR3 for beta chain variable domain of TCR clone 304563 (TRBV5-1, TRBJ2-3)
CASSFPGNTDTQYF

SEQ ID NO: 609127 - protein, 14 aa, Homo sapiens
  CDR3 for alpha chain variable domain of TCR clone 304564 (TRAV8-6, TRAJ27)
CAVSARTNAGKSTF

SEQ ID NO: 609128 - protein, 17 aa, Homo sapiens
  CDR3 for beta chain variable domain of TCR clone 304564 (TRBV11-2, TRBJ2-1)
CASSLYPPGVEYNEQFF

SEQ ID NO: 609129 - protein, 14 aa, Homo sapiens
  CDR3 for alpha chain variable domain of TCR clone 304565 (TRAV17, TRAJ31)
CATVPLSGNARLMF

SEQ ID NO: 609130 - protein, 15 aa, Homo sapiens
  CDR3 for beta chain variable domain of TCR clone 304565 (TRBV15, TRBJ2-2)
CATSGTGGRVGELVF

SEQ ID NO: 609131 - protein, 15 aa, Homo sapiens
  CDR3 for alpha chain variable domain of TCR clone 304566 (TRAV3, TRAJ3)
CAVRDGHSSASQIIF

SEQ ID NO: 609132 - protein, 17 aa, Homo sapiens
  CDR3 for beta chain variable domain of TCR clone 304566 (TRBV25-1, TRBJ2-7)
CASSDARVVFSSYEQYF

SEQ ID NO: 609133 - protein, 17 aa, Homo sapiens
  CDR3 for alpha chain variable domain of TCR clone 304567 (TRAV8-6, TRAJ4)
CAVSEKMVFGSGTRLAV

SEQ ID NO: 609134 - protein, 14 aa, Homo sapiens
  CDR3 for beta chain variable domain of TCR clone 304567 (TRBV20-1, TRBJ1-1)
CSAQTRIGGTEAFF

SEQ ID NO: 609135 - protein, 14 aa, Homo sapiens
  CDR3 for alpha chain variable domain of TCR clone 304568 (TRAV1-2, TRAJ16)
CAVNRFSDGQKLLF

SEQ ID NO: 609136 - protein, 14 aa, Homo sapiens
  CDR3 for beta chain variable domain of TCR clone 304568 (TRBV5-1, TRBJ1-2)
CASNIGTGDYGYTF

SEQ ID NO: 609137 - protein, 12 aa, Homo sapiens
  CDR3 for alpha chain variable domain of TCR clone 304569 (TRAV35, TRAJ39)
LAPNNAGNMLTF

SEQ ID NO: 609138 - protein, 16 aa, Homo sapiens
  CDR3 for beta chain variable domain of TCR clone 304569 (TRBV6-4, TRBJ2-3)
CASSTSVEGVTDTQYF

SEQ ID NO: 609139 - protein, 14 aa, Homo sapiens
  CDR3 for alpha chain variable domain of TCR clone 304570 (TRAV4, TRAJ9)
CLVGSGTGGFKTIF

SEQ ID NO: 609140 - protein, 12 aa, Homo sapiens
  CDR3 for beta chain variable domain of TCR clone 304570 (TRBV6-3, TRBJ1-5)
CASSLGNQPQHF

SEQ ID NO: 609141 - protein, 16 aa, Homo sapiens
  CDR3 for alpha chain variable domain of TCR clone 304571 (TRAV14/DV4, TRAJ54)
CAMREGRIQGAQKLVF

SEQ ID NO: 609142 - protein, 17 aa, Homo sapiens
  CDR3 for beta chain variable domain of TCR clone 304571 (TRBV7-3, TRBJ2-3)
CASSPRGQVYGTDTQYF

SEQ ID NO: 609143 - protein, 13 aa, Homo sapiens
  CDR3 for alpha chain variable domain of TCR clone 304572 (TRAV1-2, TRAJ11)
CAVRREGYSSLTF

SEQ ID NO: 609144 - protein, 14 aa, Homo sapiens
  CDR3 for beta chain variable domain of TCR clone 304572 (TRBV25-1, TRBJ1-1)
CASTHLGGNTEAFF

SEQ ID NO: 609145 - protein, 14 aa, Homo sapiens
  CDR3 for alpha chain variable domain of TCR clone 304573 (TRAV13-1, TRAJ9)
CAASALTGGFKTIF

SEQ ID NO: 609146 - protein, 13 aa, Homo sapiens
  CDR3 for beta chain variable domain of TCR clone 304573 (TRBV20-1, TRBJ1-1)
CSAGTGGNTEAFF

SEQ ID NO: 609147 - protein, 12 aa, Homo sapiens
  CDR3 for alpha chain variable domain of TCR clone 304574 (TRAV12-1, TRAJ31)
CVSWNNIARLMF

SEQ ID NO: 609148 - protein, 15 aa, Homo sapiens
  CDR3 for beta chain variable domain of TCR clone 304574 (TRBV7-2, TRBJ1-5)
CASSLDRGQDQPQHF

SEQ ID NO: 609149 - protein, 15 aa, Homo sapiens
  CDR3 for alpha chain variable domain of TCR clone 304575 (TRAV17, TRAJ57)
CATGASQGGSEKLFF

SEQ ID NO: 609150 - protein, 15 aa, Homo sapiens
  CDR3 for beta chain variable domain of TCR clone 304575 (TRBV19, TRBJ2-4)
CASRGPRRGENIQYF

SEQ ID NO: 609151 - protein, 14 aa, Homo sapiens
  CDR3 for alpha chain variable domain of TCR clone 304576 (TRAV25, TRAJ22)
CAVRSSGSARQLTF

SEQ ID NO: 609152 - protein, 16 aa, Homo sapiens
  CDR3 for beta chain variable domain of TCR clone 304576 (TRBV4-2, TRBJ1-1)
CASSPSPGRAAPEAFF

SEQ ID NO: 609153 - protein, 12 aa, Homo sapiens
  CDR3 for alpha chain variable domain of TCR clone 304577 (TRAV8-3, TRAJ26)
CAGDNYVQNFVF

SEQ ID NO: 609154 - protein, 15 aa, Homo sapiens
  CDR3 for beta chain variable domain of TCR clone 304577 (TRBV5-1, TRBJ2-3)
CASSVTSGSTDTQYF

SEQ ID NO: 609155 - protein, 19 aa, Homo sapiens
  CDR3 for alpha chain variable domain of TCR clone 304578 (TRAV26-1, TRAJ22)
CCVLLHRWVFSGSARQLTF

SEQ ID NO: 609156 - protein, 19 aa, Homo sapiens
  CDR3 for beta chain variable domain of TCR clone 304578 (TRBV19, TRBJ2-5)
CASSIRQVTDFFLGETQYF

SEQ ID NO: 609157 - protein, 16 aa, Homo sapiens
  CDR3 for alpha chain variable domain of TCR clone 304579 (TRAV38-1, TRAJ37)
CAFKGDGSSNTGKLIF

SEQ ID NO: 609158 - protein, 13 aa, Homo sapiens
  CDR3 for beta chain variable domain of TCR clone 304579 (TRBV12-4, TRBJ2-5)
CASSVFRRETKYF

SEQ ID NO: 609159 - protein, 16 aa, Homo sapiens
  CDR3 for alpha chain variable domain of TCR clone 304580 (TRAV17, TRAJ22)
CATGPISSGSASQLPF

SEQ ID NO: 609160 - protein, 13 aa, Homo sapiens
  CDR3 for beta chain variable domain of TCR clone 304580 (TRBV11-2, TRBJ2-1)
CASSLGLAGGRFF

SEQ ID NO: 609161 - protein, 18 aa, Homo sapiens
  CDR3 for alpha chain variable domain of TCR clone 304581 (TRAV17, TRAJ45)
CATSLDLYSGGGADGLTF

SEQ ID NO: 609162 - protein, 13 aa, Homo sapiens
  CDR3 for beta chain variable domain of TCR clone 304581 (TRBV4-2, TRBJ2-3)
CASSQGNTDTQYF

SEQ ID NO: 609163 - protein, 16 aa, Homo sapiens
  CDR3 for alpha chain variable domain of TCR clone 304582 (TRAV1-2, TRAJ10)
CAVRGVLTGGGNKLNF

SEQ ID NO: 609164 - protein, 12 aa, Homo sapiens
  CDR3 for beta chain variable domain of TCR clone 304582 (TRBV7-8, TRBJ2-7)
CASSLGDREQYL

SEQ ID NO: 609165 - protein, 11 aa, Homo sapiens
  CDR3 for alpha chain variable domain of TCR clone 304583 (TRAV23/DV6, TRAJ4)
APAGVYNKLIF

SEQ ID NO: 609166 - protein, 17 aa, Homo sapiens
  CDR3 for beta chain variable domain of TCR clone 304583 (TRBV20-1, TRBJ2-1)
CSAPDRGSGVAYNEQFF

SEQ ID NO: 609167 - protein, 17 aa, Homo sapiens
  CDR3 for alpha chain variable domain of TCR clone 304584 (TRAV8-1, TRAJ43)
CAVTNDMRFGAGTRLTV

SEQ ID NO: 609168 - protein, 15 aa, Homo sapiens
  CDR3 for beta chain variable domain of TCR clone 304584 (TRBV5-5, TRBJ1-5)
CASSSTPGSNQPQHF

SEQ ID NO: 609169 - protein, 10 aa, Homo sapiens
  CDR3 for alpha chain variable domain of TCR clone 304585 (TRAV12-2, TRAJ27)
CGANAGKSTF

SEQ ID NO: 609170 - protein, 17 aa, Homo sapiens
  CDR3 for beta chain variable domain of TCR clone 304585 (TRBV28, TRBJ2-5)
CASSTPEGDALQETQYF

SEQ ID NO: 609171 - protein, 15 aa, Homo sapiens
  CDR3 for alpha chain variable domain of TCR clone 304586 (TRAV26-2, TRAJ39)
CSLRGNNNAGNMLTF

SEQ ID NO: 609172 - protein, 15 aa, Homo sapiens
  CDR3 for beta chain variable domain of TCR clone 304586 (TRBV5-4, TRBJ1-1)
CASSSLGWANNEAFF

SEQ ID NO: 609173 - protein, 13 aa, Homo sapiens
  CDR3 for alpha chain variable domain of TCR clone 304587 (TRAV2, TRAJ40)
CAVVTSGIYKYIF

SEQ ID NO: 609174 - protein, 13 aa, Homo sapiens
  CDR3 for beta chain variable domain of TCR clone 304587 (TRBV6-1, TRBJ1-1)
CASSRQGNTEAFF

SEQ ID NO: 609175 - protein, 14 aa, Homo sapiens
  CDR3 for alpha chain variable domain of TCR clone 304588 (TRAV26-1, TRAJ48)
CIVRVGFGNEKLTF

SEQ ID NO: 609176 - protein, 13 aa, Homo sapiens
  CDR3 for beta chain variable domain of TCR clone 304588 (TRBV28, TRBJ2-7)
CASKAGGVYEQYF

SEQ ID NO: 609177 - protein, 16 aa, Homo sapiens
  CDR3 for alpha chain variable domain of TCR clone 304589 (TRAV1-2, TRAJ10)
CAVRGVLTGGGNKLTF

SEQ ID NO: 609178 - protein, 20 aa, Homo sapiens
  CDR3 for beta chain variable domain of TCR clone 304589 (TRBV7-8, TRBJ2-2)
CASSHLFPGPTIHITGELFC

SEQ ID NO: 609179 - protein, 13 aa, Homo sapiens
  CDR3 for alpha chain variable domain of TCR clone 304590 (TRAV13-1, TRAJ5)
CAARVTGRRALTF

SEQ ID NO: 609180 - protein, 13 aa, Homo sapiens
  CDR3 for beta chain variable domain of TCR clone 304590 (TRBV7-2, TRBJ1-5)
CASTPTVNQPQHF

SEQ ID NO: 609181 - protein, 16 aa, Homo sapiens
  CDR3 for alpha chain variable domain of TCR clone 304591 (TRAV35, TRAJ28)
CAGYLYSGAGSYQLTF

SEQ ID NO: 609182 - protein, 15 aa, Homo sapiens
  CDR3 for beta chain variable domain of TCR clone 304591 (TRBV5-5, TRBJ1-5)
CASSLKGGGEQPQHF

SEQ ID NO: 609183 - protein, 12 aa, Homo sapiens
  CDR3 for alpha chain variable domain of TCR clone 304592 (TRAV26-1, TRAJ54)
CISGWGAQKLVF

SEQ ID NO: 609184 - protein, 14 aa, Homo sapiens
  CDR3 for beta chain variable domain of TCR clone 304592 (TRBV11-2, TRBJ1-2)
CASSSGQAGDGYTF

SEQ ID NO: 609185 - protein, 15 aa, Homo sapiens
  CDR3 for alpha chain variable domain of TCR clone 304593 (TRAV12-2, TRAJ8)
CAVREENTGVQKLVF

SEQ ID NO: 609186 - protein, 16 aa, Homo sapiens
  CDR3 for beta chain variable domain of TCR clone 304593 (TRBV7-3, TRBJ2-2)
CASSLKRGTLSGELFF

SEQ ID NO: 609187 - protein, 13 aa, Homo sapiens
  CDR3 for alpha chain variable domain of TCR clone 304594 (TRAV30, TRAJ6)
CGFIEGGSYIPKF

SEQ ID NO: 609188 - protein, 13 aa, Homo sapiens
  CDR3 for beta chain variable domain of TCR clone 304594 (TRBV5-4, TRBJ2-5)
CASSPVPQETQYF

SEQ ID NO: 609189 - protein, 13 aa, Homo sapiens
  CDR3 for alpha chain variable domain of TCR clone 304595 (TRAV27, TRAJ45)
CRSSGGGADGLTF

SEQ ID NO: 609190 - protein, 11 aa, Homo sapiens
  CDR3 for beta chain variable domain of TCR clone 304595 (TRBV6-1, TRBJ2-1)
CASISSNEQFF

SEQ ID NO: 609191 - protein, 18 aa, Homo sapiens
  CDR3 for alpha chain variable domain of TCR clone 304596 (TRAV13-1, TRAJ52)
CAAKNPNPGGTGYGKLTF

SEQ ID NO: 609192 - protein, 14 aa, Homo sapiens
  CDR3 for beta chain variable domain of TCR clone 304596 (TRBV6-5, TRBJ1-1)
CASSFGQGLTEAFF

SEQ ID NO: 609193 - protein, 15 aa, Homo sapiens
  CDR3 for alpha chain variable domain of TCR clone 304597 (TRAV16, TRAJ39)
CALSRSNNAGNMLTF

SEQ ID NO: 609194 - protein, 14 aa, Homo sapiens
  CDR3 for beta chain variable domain of TCR clone 304597 (TRBV7-7, TRBJ2-7)
CASSPGGPTYEQYF

SEQ ID NO: 609195 - protein, 16 aa, Homo sapiens
  CDR3 for alpha chain variable domain of TCR clone 304598 (TRAV30, TRAJ24)
CGTEIEDADSWGKFQF

SEQ ID NO: 609196 - protein, 14 aa, Homo sapiens
  CDR3 for beta chain variable domain of TCR clone 304598 (TRBV12-5, TRBJ2-5)
CASGSRAHQETQYF

SEQ ID NO: 609197 - protein, 14 aa, Homo sapiens
  CDR3 for alpha chain variable domain of TCR clone 304599 (TRAV4, TRAJ26)
CLVGPHNYGQNFVF

SEQ ID NO: 609198 - protein, 18 aa, Homo sapiens
  CDR3 for beta chain variable domain of TCR clone 304599 (TRBV7-3, TRBJ2-1)
CASSLTLASGRAMVSSSS

SEQ ID NO: 609199 - protein, 15 aa, Homo sapiens
  CDR3 for alpha chain variable domain of TCR clone 304600 (TRAV12-2, TRAJ53)
CAVNGGGGSNYTLTF

SEQ ID NO: 609200 - protein, 13 aa, Homo sapiens
  CDR3 for beta chain variable domain of TCR clone 304600 (TRBV3-1, TRBJ1-1)
CSSSPGVITEAFF

SEQ ID NO: 609201 - protein, 14 aa, Homo sapiens
  CDR3 for alpha chain variable domain of TCR clone 304601 (TRAV16, TRAJ42)
CALLAGGSQGNLIF

SEQ ID NO: 609202 - protein, 13 aa, Homo sapiens
  CDR3 for beta chain variable domain of TCR clone 304601 (TRBV7-2, TRBJ2-2)
CASSLAVTGELFF

SEQ ID NO: 609203 - protein, 15 aa, Homo sapiens
  CDR3 for alpha chain variable domain of TCR clone 304602 (TRAV25, TRAJ48)
CAGPGANFGNEKLTF

SEQ ID NO: 609204 - protein, 12 aa, Homo sapiens
  CDR3 for beta chain variable domain of TCR clone 304602 (TRBV11-2, TRBJ2-1)
CASSPGNNEQFF

SEQ ID NO: 609205 - protein, 13 aa, Homo sapiens
  CDR3 for alpha chain variable domain of TCR clone 304603 (TRAV1-2, TRAJ9)
CAALNTGGFTTIF

SEQ ID NO: 609206 - protein, 16 aa, Homo sapiens
  CDR3 for beta chain variable domain of TCR clone 304603 (TRBV28, TRBJ2-2)
CASSLEGGSNTGELFF

SEQ ID NO: 609207 - protein, 13 aa, Homo sapiens
  CDR3 for alpha chain variable domain of TCR clone 304604 (TRAV12-3, TRAJ43)
CAMIRPNNNDMRF

SEQ ID NO: 609208 - protein, 16 aa, Homo sapiens
  CDR3 for beta chain variable domain of TCR clone 304604 (TRBV19, TRBJ2-1)
CASSKAGPSSYNEQFF

SEQ ID NO: 609209 - protein, 11 aa, Homo sapiens
  CDR3 for alpha chain variable domain of TCR clone 304605 (TRAV21, TRAJ34)
FAHYNTDKLIF

SEQ ID NO: 609210 - protein, 13 aa, Homo sapiens
  CDR3 for beta chain variable domain of TCR clone 304605 (TRBV20-1, TRBJ2-7)
CSADPGATYEQYF

SEQ ID NO: 609211 - protein, 13 aa, Homo sapiens
  CDR3 for alpha chain variable domain of TCR clone 304606 (TRAV26-1, TRAJ33)
CIVRVEGNYQVIW

SEQ ID NO: 609212 - protein, 13 aa, Homo sapiens
  CDR3 for beta chain variable domain of TCR clone 304606 (TRBV6-3, TRBJ2-7)
CASTWGSSYEQYF

SEQ ID NO: 609213 - protein, 13 aa, Homo sapiens
  CDR3 for alpha chain variable domain of TCR clone 304607 (TRAV3, TRAJ27)
CAVRPLGAGKSTF

SEQ ID NO: 609214 - protein, 16 aa, Homo sapiens
  CDR3 for beta chain variable domain of TCR clone 304607 (TRBV11-2, TRBJ1-2)
CASSLDTGGADYGYTF

SEQ ID NO: 609215 - protein, 12 aa, Homo sapiens
  CDR3 for alpha chain variable domain of TCR clone 304608 (TRAV12-1, TRAJ6)
CVVSGRSYIPTF

SEQ ID NO: 609216 - protein, 17 aa, Homo sapiens
  CDR3 for beta chain variable domain of TCR clone 304608 (TRBV20-1, TRBJ2-1)
CSAPPRLAGTRYNEQFF

SEQ ID NO: 609217 - protein, 16 aa, Homo sapiens
  CDR3 for alpha chain variable domain of TCR clone 304609 (TRAV3, TRAJ4)
CAVRPSPSCGYNKLIF

SEQ ID NO: 609218 - protein, 12 aa, Homo sapiens
  CDR3 for beta chain variable domain of TCR clone 304609 (TRBV7-9, TRBJ2-7)
CASSQGVYEQYF

SEQ ID NO: 609219 - protein, 11 aa, Homo sapiens
  CDR3 for alpha chain variable domain of TCR clone 304610 (TRAV12-1, TRAJ21)
CVVYNFNKFYF

SEQ ID NO: 609220 - protein, 17 aa, Homo sapiens
  CDR3 for beta chain variable domain of TCR clone 304610 (TRBV13, TRBJ2-3)
CASSLSRVAGGRNTQYF

SEQ ID NO: 609221 - protein, 15 aa, Homo sapiens
  CDR3 for alpha chain variable domain of TCR clone 304611 (TRAV12-3, TRAJ6)
CAMSATTGGSYIPTF

SEQ ID NO: 609222 - protein, 15 aa, Homo sapiens
  CDR3 for beta chain variable domain of TCR clone 304611 (TRBV5-1, TRBJ2-7)
CASSVNGGPAREQYF

SEQ ID NO: 609223 - protein, 11 aa, Homo sapiens
  CDR3 for alpha chain variable domain of TCR clone 304612 (TRAV13-1, TRAJ8)
CAAWGFQKLVF

SEQ ID NO: 609224 - protein, 16 aa, Homo sapiens
  CDR3 for beta chain variable domain of TCR clone 304612 (TRBV19, TRBJ1-5)
CASSTRGTRSNQPQHF

SEQ ID NO: 609225 - protein, 12 aa, Homo sapiens
  CDR3 for alpha chain variable domain of TCR clone 304613 (TRAV12-2, TRAJ10)
WGVTGGGNKLTF

SEQ ID NO: 609226 - protein, 13 aa, Homo sapiens
  CDR3 for beta chain variable domain of TCR clone 304613 (TRBV11-2, TRBJ2-1)
CAGSLGLAGGRFF

SEQ ID NO: 609227 - protein, 14 aa, Homo sapiens
  CDR3 for alpha chain variable domain of TCR clone 304614 (TRAV8-3, TRAJ30)
CAVGDMNRDDKITF

SEQ ID NO: 609228 - protein, 17 aa, Homo sapiens
  CDR3 for beta chain variable domain of TCR clone 304614 (TRBV19, TRBJ2-2)
CASSRNPGGFGTGELFF

SEQ ID NO: 609229 - protein, 13 aa, Homo sapiens
  CDR3 for alpha chain variable domain of TCR clone 304615 (TRAV2, TRAJ40)
CAVVTSGTYKYIF

SEQ ID NO: 609230 - protein, 12 aa, Homo sapiens
  CDR3 for beta chain variable domain of TCR clone 304615 (TRBV14, TRBJ2-5)
CASSHLKETQYF

SEQ ID NO: 609231 - protein, 14 aa, Homo sapiens
  CDR3 for alpha chain variable domain of TCR clone 304616 (TRAV13-1, TRAJ15)
CAASTNQAGTALIF

SEQ ID NO: 609232 - protein, 18 aa, Homo sapiens
  CDR3 for beta chain variable domain of TCR clone 304616 (TRBV7-2, TRBJ2-1)
RRTRPCISVPSLRDNEFF

SEQ ID NO: 609233 - protein, 15 aa, Homo sapiens
  CDR3 for alpha chain variable domain of TCR clone 304617 (TRAV3, TRAJ29)
CAVRPGNSGNTPRVF

SEQ ID NO: 609234 - protein, 16 aa, Homo sapiens
  CDR3 for beta chain variable domain of TCR clone 304617 (TRBV24-1, TRBJ2-2)
CATSDPGTANTGELFF

SEQ ID NO: 609235 - protein, 13 aa, Homo sapiens
  CDR3 for alpha chain variable domain of TCR clone 304618 (TRAV8-3, TRAJ48)
CAVGPFGNEELTF

SEQ ID NO: 609236 - protein, 14 aa, Homo sapiens
  CDR3 for beta chain variable domain of TCR clone 304618 (TRBV12-5, TRBJ2-5)
CASGSRTHQETQYF

SEQ ID NO: 609237 - protein, 13 aa, Homo sapiens
  CDR3 for alpha chain variable domain of TCR clone 304619 (TRAV2, TRAJ40)
CAVVTSGTYKYIF

SEQ ID NO: 609238 - protein, 14 aa, Homo sapiens
  CDR3 for beta chain variable domain of TCR clone 304619 (TRBV12-4, TRBJ2-5)
CARSYSGYFETQYF

SEQ ID NO: 609239 - protein, 12 aa, Homo sapiens
  CDR3 for alpha chain variable domain of TCR clone 304620 (TRAV12-1, TRAJ40)
CGVNGETYKYIF

SEQ ID NO: 609240 - protein, 14 aa, Homo sapiens
  CDR3 for beta chain variable domain of TCR clone 304620 (TRBV7-9, TRBJ1-1)
CASSSTKGNTEAFF

SEQ ID NO: 609241 - protein, 15 aa, Homo sapiens
  CDR3 for alpha chain variable domain of TCR clone 304621 (TRAV26-1, TRAJ40)
CIVRAVPSGTYKYNF

SEQ ID NO: 609242 - protein, 16 aa, Homo sapiens
  CDR3 for beta chain variable domain of TCR clone 304621 (TRBV7-2, TRBJ2-2)
CASSLRGQANTGELFF

SEQ ID NO: 609243 - protein, 13 aa, Homo sapiens
  CDR3 for alpha chain variable domain of TCR clone 304622 (TRAV12-3, TRAJ44)
CARTTGTASKLTL

SEQ ID NO: 609244 - protein, 15 aa, Homo sapiens
  CDR3 for beta chain variable domain of TCR clone 304622 (TRBV29-1, TRBJ1-2)
CSGLDVRGANYGYTF

SEQ ID NO: 609245 - protein, 15 aa, Homo sapiens
  CDR3 for alpha chain variable domain of TCR clone 304623 (TRAV3, TRAJ4)
CAVRDGTGGYNKLIF

SEQ ID NO: 609246 - protein, 16 aa, Homo sapiens
  CDR3 for beta chain variable domain of TCR clone 304623 (TRBV27, TRBJ2-2)
CASSSSGVSNTAELFF

SEQ ID NO: 609247 - protein, 14 aa, Homo sapiens
  CDR3 for alpha chain variable domain of TCR clone 304624 (TRAV12-3, TRAJ10)
SHLSLTGGGNKLTF

SEQ ID NO: 609248 - protein, 16 aa, Homo sapiens
  CDR3 for beta chain variable domain of TCR clone 304624 (TRBV20-1, TRBJ2-1)
CSARDHLAGGRGEQFF

SEQ ID NO: 609249 - protein, 14 aa, Homo sapiens
  CDR3 for alpha chain variable domain of TCR clone 304625 (TRAV12-1, TRAJ17)
CVVNYKAAGNKLTF

SEQ ID NO: 609250 - protein, 13 aa, Homo sapiens
  CDR3 for beta chain variable domain of TCR clone 304625 (TRBV20-1, TRBJ2-7)
CSARGDTQDEQYF

SEQ ID NO: 609251 - protein, 16 aa, Homo sapiens
  CDR3 for alpha chain variable domain of TCR clone 304626 (TRAV3, TRAJ37)
CAVRPHGSGNTGKLIF

SEQ ID NO: 609252 - protein, 16 aa, Homo sapiens
  CDR3 for beta chain variable domain of TCR clone 304626 (TRBV7-9, TRBJ2-3)
CASSPWRKVGTDTQYF

SEQ ID NO: 609253 - protein, 14 aa, Homo sapiens
  CDR3 for alpha chain variable domain of TCR clone 304627 (TRAV3, TRAJ37)
CAVKESVNTGKLIF

SEQ ID NO: 609254 - protein, 16 aa, Homo sapiens
  CDR3 for beta chain variable domain of TCR clone 304627 (TRBV19, TRBJ1-1)
CASSPTRFWPGTEAFF

SEQ ID NO: 609255 - protein, 14 aa, Homo sapiens
  CDR3 for alpha chain variable domain of TCR clone 304628 (TRAV1-2, TRAJ27)
CAPAEYTNAGKSTF

SEQ ID NO: 609256 - protein, 17 aa, Homo sapiens
  CDR3 for beta chain variable domain of TCR clone 304628 (TRBV20-1, TRBJ2-1)
CSAPPRLAGTRYNEQFF

SEQ ID NO: 609257 - protein, 14 aa, Homo sapiens
  CDR3 for alpha chain variable domain of TCR clone 304629 (TRAV17, TRAJ6)
CATNPAGGSYIPTF

SEQ ID NO: 609258 - protein, 17 aa, Homo sapiens
  CDR3 for beta chain variable domain of TCR clone 304629 (TRBV11-2, TRBJ2-1)
CASSLYPPGAEYNEQFF

SEQ ID NO: 609259 - protein, 16 aa, Homo sapiens
  CDR3 for alpha chain variable domain of TCR clone 304630 (TRAV1-1, TRAJ29)
CAGRSTRNSGNTPLVF

SEQ ID NO: 609260 - protein, 15 aa, Homo sapiens
  CDR3 for beta chain variable domain of TCR clone 304630 (TRBV19, TRBJ2-5)
CASSIARGRQETQYF

SEQ ID NO: 609261 - protein, 15 aa, Homo sapiens
  CDR3 for alpha chain variable domain of TCR clone 304631 (TRAV12-1, TRAJ45)
CVVLSGGGGADGLTF

SEQ ID NO: 609262 - protein, 15 aa, Homo sapiens
  CDR3 for beta chain variable domain of TCR clone 304631 (TRBV12-5, TRBJ2-5)
CASGSGLAGREIQYF

SEQ ID NO: 609263 - protein, 16 aa, Homo sapiens
  CDR3 for alpha chain variable domain of TCR clone 304632 (TRAV12-3, TRAJ53)
CAMSPGSGGSNYKLTF

SEQ ID NO: 609264 - protein, 11 aa, Homo sapiens
  CDR3 for beta chain variable domain of TCR clone 304632 (TRBV29-1, TRBJ2-5)
YSEERTGTQYF

SEQ ID NO: 609265 - protein, 15 aa, Homo sapiens
  CDR3 for alpha chain variable domain of TCR clone 304633 (TRAV8-2, TRAJ15)
CVVTMGNQAGTALIF

SEQ ID NO: 609266 - protein, 15 aa, Homo sapiens
  CDR3 for beta chain variable domain of TCR clone 304633 (TRBV4-3, TRBJ2-7)
CASSQGGRGIYEQYF

SEQ ID NO: 609267 - protein, 13 aa, Homo sapiens
  CDR3 for alpha chain variable domain of TCR clone 304634 (TRAV3, TRAJ27)
CAVRPLGADKSTF

SEQ ID NO: 609268 - protein, 13 aa, Homo sapiens
  CDR3 for beta chain variable domain of TCR clone 304634 (TRBV7-9, TRBJ2-3)
CASSPGSTDTQYF

SEQ ID NO: 609269 - protein, 14 aa, Homo sapiens
  CDR3 for alpha chain variable domain of TCR clone 304635 (TRAV3, TRAJ8)
CAVSRNTGFQKLVF

SEQ ID NO: 609270 - protein, 13 aa, Homo sapiens
  CDR3 for beta chain variable domain of TCR clone 304635 (TRBV7-9, TRBJ1-2)
CASSLKQNYGYTF

SEQ ID NO: 609271 - protein, 10 aa, Homo sapiens
  CDR3 for alpha chain variable domain of TCR clone 304636 (TRAV16, TRAJ34)
CALPYRQAHL

SEQ ID NO: 609272 - protein, 15 aa, Homo sapiens
  CDR3 for beta chain variable domain of TCR clone 304636 (TRBV7-2, TRBJ2-1)
CASSSGLAGGNEQFF

SEQ ID NO: 609273 - protein, 14 aa, Homo sapiens
  CDR3 for alpha chain variable domain of TCR clone 304637 (TRAV10, TRAJ20)
YVVSLSSNDYKLSF

SEQ ID NO: 609274 - protein, 11 aa, Homo sapiens
  CDR3 for beta chain variable domain of TCR clone 304637 (TRBV29-1, TRBJ2-5)
CSEDRTGTQYF

SEQ ID NO: 609275 - protein, 14 aa, Homo sapiens
  CDR3 for alpha chain variable domain of TCR clone 304638 (TRAV1-2, TRAJ16)
CAVNRFSDVQKLLF

SEQ ID NO: 609276 - protein, 14 aa, Homo sapiens
  CDR3 for beta chain variable domain of TCR clone 304638 (TRBV6-1, TRBJ1-6)
CASSGTAYNSPLHF

SEQ ID NO: 609277 - protein, 14 aa, Homo sapiens
  CDR3 for alpha chain variable domain of TCR clone 304639 (TRAV1-2, TRAJ16)
CAVNRFSDGQKLLF

SEQ ID NO: 609278 - protein, 14 aa, Homo sapiens
  CDR3 for beta chain variable domain of TCR clone 304639 (TRBV7-9, TRBJ2-2)
CASSTVLGRVELFF

SEQ ID NO: 609279 - protein, 10 aa, Homo sapiens
  CDR3 for alpha chain variable domain of TCR clone 304640 (TRAV23/DV6, TRAJ57)
CAASSPLSQS

SEQ ID NO: 609280 - protein, 14 aa, Homo sapiens
  CDR3 for beta chain variable domain of TCR clone 304640 (TRBV25-1, TRBJ1-1)
CASTHLGGNTEAFF

SEQ ID NO: 609281 - protein, 14 aa, Homo sapiens
  CDR3 for alpha chain variable domain of TCR clone 304641 (TRAV8-6, TRAJ54)
CAVTEGRGSQKLVF

SEQ ID NO: 609282 - protein, 14 aa, Homo sapiens
  CDR3 for beta chain variable domain of TCR clone 304641 (TRBV27, TRBJ2-7)
CASSIGQGAQKQYF

SEQ ID NO: 609283 - protein, 14 aa, Homo sapiens
  CDR3 for alpha chain variable domain of TCR clone 304642 (TRAV12-1, TRAJ37)
CVVTGSSNTGKLIF

SEQ ID NO: 609284 - protein, 20 aa, Homo sapiens
  CDR3 for beta chain variable domain of TCR clone 304642 (TRBV23-1, TRBJ2-5)
CISVPAVPERVLLIQETQYF

SEQ ID NO: 609285 - protein, 16 aa, Homo sapiens
  CDR3 for alpha chain variable domain of TCR clone 304643 (TRAV38-2/DV8, TRAJ47)
CAYRIAIMEYGNKLVF

SEQ ID NO: 609286 - protein, 14 aa, Homo sapiens
  CDR3 for beta chain variable domain of TCR clone 304643 (TRBV19, TRBJ2-7)
CASSIFAGTYEQYF

SEQ ID NO: 609287 - protein, 14 aa, Homo sapiens
  CDR3 for alpha chain variable domain of TCR clone 304644 (TRAV12-2, TRAJ45)
CALPERGGADGLTF

SEQ ID NO: 609288 - protein, 13 aa, Homo sapiens
  CDR3 for beta chain variable domain of TCR clone 304644 (TRBV10-1, TRBJ2-1)
CASSAGPDNEQFF

SEQ ID NO: 609289 - protein, 14 aa, Homo sapiens
  CDR3 for alpha chain variable domain of TCR clone 304645 (TRAV2, TRAJ9)
CAVEDRSGGFKTIF

SEQ ID NO: 609290 - protein, 16 aa, Homo sapiens
  CDR3 for beta chain variable domain of TCR clone 304645 (TRBV7-7, TRBJ2-1)
CASGLASGTSYNEQFF

SEQ ID NO: 609291 - protein, 14 aa, Homo sapiens
  CDR3 for alpha chain variable domain of TCR clone 304646 (TRAV12-1, TRAJ8)
CVVNSNTGFLKLVF

SEQ ID NO: 609292 - protein, 16 aa, Homo sapiens
  CDR3 for beta chain variable domain of TCR clone 304646 (TRBV20-1, TRBJ2-2)
CSARDDRVGLTGELFF

SEQ ID NO: 609293 - protein, 14 aa, Homo sapiens
  CDR3 for alpha chain variable domain of TCR clone 304647 (TRAV12-3, TRAJ58)
CAISTETSGSRLTF

SEQ ID NO: 609294 - protein, 11 aa, Homo sapiens
  CDR3 for beta chain variable domain of TCR clone 304647 (TRBV29-1, TRBJ2-5)
CSEDRTGTQYF

SEQ ID NO: 609295 - protein, 11 aa, Homo sapiens
  CDR3 for alpha chain variable domain of TCR clone 304648 (TRAV1-1, TRAJ23)
CAVRQGGKLIF

SEQ ID NO: 609296 - protein, 13 aa, Homo sapiens
  CDR3 for beta chain variable domain of TCR clone 304648 (TRBV7-3, TRBJ1-1)
CASSQDWGAEAFS

SEQ ID NO: 609297 - protein, 12 aa, Homo sapiens
  CDR3 for alpha chain variable domain of TCR clone 304649 (TRAV12-2, TRAJ6)
CAVKVGSYIPTF

SEQ ID NO: 609298 - protein, 17 aa, Homo sapiens
  CDR3 for beta chain variable domain of TCR clone 304649 (TRBV27, TRBJ2-3)
CASSFFPPNTSTDTQYF

SEQ ID NO: 609299 - protein, 16 aa, Homo sapiens
  CDR3 for alpha chain variable domain of TCR clone 304650 (TRAV14/DV4, TRAJ53)
CAMREGGGGSNSKLTF

SEQ ID NO: 609300 - protein, 18 aa, Homo sapiens
  CDR3 for beta chain variable domain of TCR clone 304650 (TRBV18, TRBJ1-3)
CASSPRGGAGPSGNTIYF

SEQ ID NO: 609301 - protein, 11 aa, Homo sapiens
  CDR3 for alpha chain variable domain of TCR clone 304651 (TRAV1-2, TRAJ20)
CAVSNDYKLSF

SEQ ID NO: 609302 - protein, 16 aa, Homo sapiens
  CDR3 for beta chain variable domain of TCR clone 304651 (TRBV7-2, TRBJ1-4)
CASSLAPGRRDEKLFF

SEQ ID NO: 609303 - protein, 12 aa, Homo sapiens
  CDR3 for alpha chain variable domain of TCR clone 304652 (TRAV25, TRAJ31)
CAGHLNNARLMF

SEQ ID NO: 609304 - protein, 13 aa, Homo sapiens
  CDR3 for beta chain variable domain of TCR clone 304652 (TRBV2, TRBJ1-4)
CASNRGTNEKLFF

SEQ ID NO: 609305 - protein, 13 aa, Homo sapiens
  CDR3 for alpha chain variable domain of TCR clone 304653 (TRAV12-3, TRAJ48)
CAMSLVGNEKLTF

SEQ ID NO: 609306 - protein, 12 aa, Homo sapiens
  CDR3 for beta chain variable domain of TCR clone 304653 (TRBV11-2, TRBJ2-1)
CASSPGNNEQFF

SEQ ID NO: 609307 - protein, 17 aa, Homo sapiens
  CDR3 for alpha chain variable domain of TCR clone 304654 (TRAV3, TRAJ38)
CAVRDCLNAANNRKLIW

SEQ ID NO: 609308 - protein, 13 aa, Homo sapiens
  CDR3 for beta chain variable domain of TCR clone 304654 (TRBV23-1, TRBJ1-4)
CASRGKFNEKLFF

SEQ ID NO: 609309 - protein, 15 aa, Homo sapiens
  CDR3 for alpha chain variable domain of TCR clone 304655 (TRAV17, TRAJ57)
CATGPPQGGSEKLAF

SEQ ID NO: 609310 - protein, 16 aa, Homo sapiens
  CDR3 for beta chain variable domain of TCR clone 304655 (TRBV12-4, TRBJ1-5)
CASSRPVGGSNQPQHF

SEQ ID NO: 609311 - protein, 21 aa, Homo sapiens
  CDR3 for alpha chain variable domain of TCR clone 304656 (TRAV2, TRAJ39)
CGRQMPLFTTVHNNAGNMLTF

SEQ ID NO: 609312 - protein, 16 aa, Homo sapiens
  CDR3 for beta chain variable domain of TCR clone 304656 (TRBV24-1, TRBJ2-3)
CATSGYRDRDTDTQYF

SEQ ID NO: 609313 - protein, 15 aa, Homo sapiens
  CDR3 for alpha chain variable domain of TCR clone 304657 (TRAV26-1, TRAJ29)
CIVRVEGSGNTPLVF

SEQ ID NO: 609314 - protein, 14 aa, Homo sapiens
  CDR3 for beta chain variable domain of TCR clone 304657 (TRBV4-2, TRBJ2-3)
CASSQERGTDTQYF

SEQ ID NO: 609315 - protein, 16 aa, Homo sapiens
  CDR3 for alpha chain variable domain of TCR clone 304658 (TRAV3, TRAJ4)
CAVGPSPSGGYNKLIF

SEQ ID NO: 609316 - protein, 12 aa, Homo sapiens
  CDR3 for beta chain variable domain of TCR clone 304658 (TRBV7-9, TRBJ1-5)
CASSPQGQPQHF

SEQ ID NO: 609317 - protein, 15 aa, Homo sapiens
  CDR3 for alpha chain variable domain of TCR clone 304659 (TRAV38-1, TRAJ57)
CAFMDSQGGSEKLVF

SEQ ID NO: 609318 - protein, 17 aa, Homo sapiens
  CDR3 for beta chain variable domain of TCR clone 304659 (TRBV19, TRBJ1-1)
CASSIAGRGLMNTEAFF

SEQ ID NO: 609319 - protein, 16 aa, Homo sapiens
  CDR3 for alpha chain variable domain of TCR clone 304660 (TRAV12-3, TRAJ53)
CAMSPGSGGSNYKLTF

SEQ ID NO: 609320 - protein, 20 aa, Homo sapiens
  CDR3 for beta chain variable domain of TCR clone 304660 (TRBV7-8, TRBJ2-2)
CASSHLFPGPTIHIAGELFF

SEQ ID NO: 609321 - protein, 15 aa, Homo sapiens
  CDR3 for alpha chain variable domain of TCR clone 304661 (TRAV12-1, TRAJ42)
CVVTRDGGSQGNRIF

SEQ ID NO: 609322 - protein, 13 aa, Homo sapiens
  CDR3 for beta chain variable domain of TCR clone 304661 (TRBV27, TRBJ2-7)
CASSLTTGYEQYF

SEQ ID NO: 609323 - protein, 14 aa, Homo sapiens
  CDR3 for alpha chain variable domain of TCR clone 304662 (TRAV1-1, TRAJ27)
CADDRGLGVTNSLS

SEQ ID NO: 609324 - protein, 12 aa, Homo sapiens
  CDR3 for beta chain variable domain of TCR clone 304662 (TRBV11-2, TRBJ2-2)
CASSLGGGELFF

SEQ ID NO: 609325 - protein, 14 aa, Homo sapiens
  CDR3 for alpha chain variable domain of TCR clone 304663 (TRAV23/DV6, TRAJ57)
CAAALKGGSEKLVF

SEQ ID NO: 609326 - protein, 14 aa, Homo sapiens
  CDR3 for beta chain variable domain of TCR clone 304663 (TRBV6-1, TRBJ1-3)
CASVQGGGGNTIYF

SEQ ID NO: 609327 - protein, 12 aa, Homo sapiens
  CDR3 for alpha chain variable domain of TCR clone 304664 (TRAV21, TRAJ23)
CAVMIQGGKLIF

SEQ ID NO: 609328 - protein, 14 aa, Homo sapiens
  CDR3 for beta chain variable domain of TCR clone 304664 (TRBV7-9, TRBJ1-4)
CAITEGEANEKLFF

SEQ ID NO: 609329 - protein, 14 aa, Homo sapiens
  CDR3 for alpha chain variable domain of TCR clone 304665 (TRAV2, TRAJ9)
CAVADRSGGFKTLF

SEQ ID NO: 609330 - protein, 15 aa, Homo sapiens
  CDR3 for beta chain variable domain of TCR clone 304665 (TRBV6-6, TRBJ2-7)
CASSYSYGGSYEQYF

SEQ ID NO: 609331 - protein, 13 aa, Homo sapiens
  CDR3 for alpha chain variable domain of TCR clone 304666 (TRAV21, TRAJ27)
CAARPGNAGKSTF

SEQ ID NO: 609332 - protein, 16 aa, Homo sapiens
  CDR3 for beta chain variable domain of TCR clone 304666 (TRBV12-4, TRBJ1-5)
CASRQPVEGSNQPQHF

SEQ ID NO: 609333 - protein, 13 aa, Homo sapiens
  CDR3 for alpha chain variable domain of TCR clone 304667 (TRAV8-6, TRAJ49)
CAVITNTGNQFYF

SEQ ID NO: 609334 - protein, 15 aa, Homo sapiens
  CDR3 for beta chain variable domain of TCR clone 304667 (TRBV6-3, TRBJ2-7)
CDSSSPGTVFYEQYF

SEQ ID NO: 609335 - protein, 15 aa, Homo sapiens
  CDR3 for alpha chain variable domain of TCR clone 304668 (TRAV8-6, TRAJ10)
CAWSDQAGGGNKLTF

SEQ ID NO: 609336 - protein, 15 aa, Homo sapiens
  CDR3 for beta chain variable domain of TCR clone 304668 (TRBV3-1, TRBJ2-5)
CASSANLGGPETQYF

SEQ ID NO: 609337 - protein, 13 aa, Homo sapiens
  CDR3 for alpha chain variable domain of TCR clone 304669 (TRAV12-3, TRAJ47)
CAMKKEYGNKLVF

SEQ ID NO: 609338 - protein, 16 aa, Homo sapiens
  CDR3 for beta chain variable domain of TCR clone 304669 (TRBV3-1, TRBJ2-6)
CARSLTWVSGANVLTF

SEQ ID NO: 609339 - protein, 18 aa, Homo sapiens
  CDR3 for alpha chain variable domain of TCR clone 304670 (TRAV13-1, TRAJ45)
CAAPPQEYSGGGADGLTF

SEQ ID NO: 609340 - protein, 13 aa, Homo sapiens
  CDR3 for beta chain variable domain of TCR clone 304670 (TRBV12-4, TRBJ1-2)
CACSLRQGKGYTF

SEQ ID NO: 609341 - protein, 17 aa, Homo sapiens
  CDR3 for alpha chain variable domain of TCR clone 304671 (TRAV3, TRAJ12)
CAVRDGGRMDSSYTLIF

SEQ ID NO: 609342 - protein, 13 aa, Homo sapiens
  CDR3 for beta chain variable domain of TCR clone 304671 (TRBV15, TRBJ1-6)
CATSGGLNSPLHF

SEQ ID NO: 609343 - protein, 11 aa, Homo sapiens
  CDR3 for alpha chain variable domain of TCR clone 304672 (TRAV12-1, TRAJ21)
CVVYNFNKFYF

SEQ ID NO: 609344 - protein, 14 aa, Homo sapiens
  CDR3 for beta chain variable domain of TCR clone 304672 (TRBV19, TRBJ2-1)
CASSMGQGAIEQFF

SEQ ID NO: 609345 - protein, 11 aa, Homo sapiens
  CDR3 for alpha chain variable domain of TCR clone 304673 (TRAV12-2, TRAJ31)
CAILNNARLMF

SEQ ID NO: 609346 - protein, 13 aa, Homo sapiens
  CDR3 for beta chain variable domain of TCR clone 304673 (TRBV20-1, TRBJ1-1)
CSARLGQGTEALF

SEQ ID NO: 609347 - protein, 14 aa, Homo sapiens
  CDR3 for alpha chain variable domain of TCR clone 304674 (TRAV29/DV5, TRAJ45)
CAVSFRGCADGLTF

SEQ ID NO: 609348 - protein, 11 aa, Homo sapiens
  CDR3 for beta chain variable domain of TCR clone 304674 (TRBV11-2, TRBJ2-2)
CASSLPGELFF

SEQ ID NO: 609349 - protein, 12 aa, Homo sapiens
  CDR3 for alpha chain variable domain of TCR clone 304675 (TRAV36/DV7, TRAJ54)
CAVVRGAQKLVF

SEQ ID NO: 609350 - protein, 12 aa, Homo sapiens
  CDR3 for beta chain variable domain of TCR clone 304675 (TRBV2, TRBJ2-1)
GRGLPSYNEQFF

SEQ ID NO: 609351 - protein, 14 aa, Homo sapiens
  CDR3 for alpha chain variable domain of TCR clone 304676 (TRAV13-1, TRAJ44)
CAAKATGTASKLTF

SEQ ID NO: 609352 - protein, 15 aa, Homo sapiens
  CDR3 for beta chain variable domain of TCR clone 304676 (TRBV19, TRBJ2-1)
CASSIGLAGWDEQFF

SEQ ID NO: 609353 - protein, 14 aa, Homo sapiens
  CDR3 for alpha chain variable domain of TCR clone 304677 (TRAV8-4, TRAJ9)
CAVRTNTGGFKTIF

SEQ ID NO: 609354 - protein, 15 aa, Homo sapiens
  CDR3 for beta chain variable domain of TCR clone 304677 (TRBV10-2, TRBJ2-6)
CASSEQGTGANVLTF

SEQ ID NO: 609355 - protein, 16 aa, Homo sapiens
  CDR3 for alpha chain variable domain of TCR clone 304678 (TRAV26-1, TRAJ58)
CIVKRWRETSGSRLTF

SEQ ID NO: 609356 - protein, 14 aa, Homo sapiens
  CDR3 for beta chain variable domain of TCR clone 304678 (TRBV12-5, TRBJ2-5)
CASGSRTHQETQYF

SEQ ID NO: 609357 - protein, 14 aa, Homo sapiens
  CDR3 for alpha chain variable domain of TCR clone 304679 (TRAV17, TRAJ56)
CATVPAGANSKLTF

SEQ ID NO: 609358 - protein, 16 aa, Homo sapiens
  CDR3 for beta chain variable domain of TCR clone 304679 (TRBV20-1, TRBJ1-4)
CSARPYGGKLNEKLFF

SEQ ID NO: 609359 - protein, 15 aa, Homo sapiens
  CDR3 for alpha chain variable domain of TCR clone 304680 (TRAV8-3, TRAJ23)
CAVVTGITRAESLSS

SEQ ID NO: 609360 - protein, 22 aa, Homo sapiens
  CDR3 for beta chain variable domain of TCR clone 304680 (TRBV29-1, TRBJ2-5)
TVSNMSPEDSSIYLCSAGTQYF

SEQ ID NO: 609361 - protein, 12 aa, Homo sapiens
  CDR3 for alpha chain variable domain of TCR clone 304681 (TRAV30, TRAJ43)
CGTEERGNDMNF

SEQ ID NO: 609362 - protein, 13 aa, Homo sapiens
  CDR3 for beta chain variable domain of TCR clone 304681 (TRBV27, TRBJ2-7)
CASSFSQGYEQYF

SEQ ID NO: 609363 - protein, 16 aa, Homo sapiens
  CDR3 for alpha chain variable domain of TCR clone 304682 (TRAV3, TRAJ10)
CAVRDMRAGGGNKLTF

SEQ ID NO: 609364 - protein, 17 aa, Homo sapiens
  CDR3 for beta chain variable domain of TCR clone 304682 (TRBV28, TRBJ2-5)
GASSTPEGDALQETQYF

SEQ ID NO: 609365 - protein, 17 aa, Homo sapiens
  CDR3 for alpha chain variable domain of TCR clone 304683 (TRAV3, TRAJ6)
CAVRDGPRARGSYIPTC

SEQ ID NO: 609366 - protein, 14 aa, Homo sapiens
  CDR3 for beta chain variable domain of TCR clone 304683 (TRBV7-2, TRBJ2-7)
CASSPKTSFYEQYF

SEQ ID NO: 609367 - protein, 12 aa, Homo sapiens
  CDR3 for alpha chain variable domain of TCR clone 304684 (TRAV8-3, TRAJ20)
CAVGGGDYKLSF

SEQ ID NO: 609368 - protein, 14 aa, Homo sapiens
  CDR3 for beta chain variable domain of TCR clone 304684 (TRBV7-3, TRBJ1-1)
CASSRQGGDTEAFF

SEQ ID NO: 609369 - protein, 12 aa, Homo sapiens
  CDR3 for alpha chain variable domain of TCR clone 304685 (TRAV12-3, TRAJ17)
CEMTLTGDKLTF

SEQ ID NO: 609370 - protein, 15 aa, Homo sapiens
  CDR3 for beta chain variable domain of TCR clone 304685 (TRBV20-1, TRBJ2-7)
CSARDRVSGMDEQYF

SEQ ID NO: 609371 - protein, 14 aa, Homo sapiens
  CDR3 for alpha chain variable domain of TCR clone 304686 (TRAV13-2, TRAJ43)
CAEIPTYNNNDMRF

SEQ ID NO: 609372 - protein, 13 aa, Homo sapiens
  CDR3 for beta chain variable domain of TCR clone 304686 (TRBV10-3, TRBJ2-7)
CASKLAVNYEQYF

SEQ ID NO: 609373 - protein, 12 aa, Homo sapiens
  CDR3 for alpha chain variable domain of TCR clone 304687 (TRAV3, TRAJ20)
CAVRHGDYKLSF

SEQ ID NO: 609374 - protein, 13 aa, Homo sapiens
  CDR3 for beta chain variable domain of TCR clone 304687 (TRBV9, TRBJ2-1)
CASSVGQGGEQFF

SEQ ID NO: 609375 - protein, 11 aa, Homo sapiens
  CDR3 for alpha chain variable domain of TCR clone 304688 (TRAV12-1, TRAJ8)
CVVTGFQKLVF

SEQ ID NO: 609376 - protein, 14 aa, Homo sapiens
  CDR3 for beta chain variable domain of TCR clone 304688 (TRBV7-6, TRBJ2-3)
CASSLGTVTDTQYF

SEQ ID NO: 609377 - protein, 17 aa, Homo sapiens
  CDR3 for alpha chain variable domain of TCR clone 304689 (TRAV26-1, TRAJ37)
CIVRVITVSSNTGKLIF

SEQ ID NO: 609378 - protein, 13 aa, Homo sapiens
  CDR3 for beta chain variable domain of TCR clone 304689 (TRBV7-7, TRBJ2-2)
CASSLDGTGELFF

SEQ ID NO: 609379 - protein, 12 aa, Homo sapiens
  CDR3 for alpha chain variable domain of TCR clone 304690 (TRAV1-2, TRAJ24)
CAVGGSWGNFQF

SEQ ID NO: 609380 - protein, 15 aa, Homo sapiens
  CDR3 for beta chain variable domain of TCR clone 304690 (TRBV6-1, TRBJ2-7)
CASSEGVGNPYEQYF

SEQ ID NO: 609381 - protein, 14 aa, Homo sapiens
  CDR3 for alpha chain variable domain of TCR clone 304691 (TRAV13-1, TRAJ35)
CAASKGGFGNVLHC

SEQ ID NO: 609382 - protein, 14 aa, Homo sapiens
  CDR3 for beta chain variable domain of TCR clone 304691 (TRBV5-1, TRBJ2-5)
CASSLAGKQETQYF

SEQ ID NO: 609383 - protein, 16 aa, Homo sapiens
  CDR3 for alpha chain variable domain of TCR clone 304692 (TRAV30, TRAJ24)
CGTEIVDADSWGKFQF

SEQ ID NO: 609384 - protein, 15 aa, Homo sapiens
  CDR3 for beta chain variable domain of TCR clone 304692 (TRBV15, TRBJ1-5)
CVTSRDPVSNQPQHF

SEQ ID NO: 609385 - protein, 15 aa, Homo sapiens
  CDR3 for alpha chain variable domain of TCR clone 304693 (TRAV38-1, TRAJ37)
CAFIFGSGNTGKQIF

SEQ ID NO: 609386 - protein, 12 aa, Homo sapiens
  CDR3 for beta chain variable domain of TCR clone 304693 (TRBV7-9, TRBJ2-7)
CASSLEGYEQYF

SEQ ID NO: 609387 - protein, 13 aa, Homo sapiens
  CDR3 for alpha chain variable domain of TCR clone 304694 (TRAV29/DV5, TRAJ31)
CAASRNNNARLMF

SEQ ID NO: 609388 - protein, 14 aa, Homo sapiens
  CDR3 for beta chain variable domain of TCR clone 304694 (TRBV11-2, TRBJ2-7)
CASSLGAGAYEQYF

SEQ ID NO: 609389 - protein, 12 aa, Homo sapiens
  CDR3 for alpha chain variable domain of TCR clone 304695 (TRAV12-1, TRAJ23)
CVVNIPGGKLIF

SEQ ID NO: 609390 - protein, 15 aa, Homo sapiens
  CDR3 for beta chain variable domain of TCR clone 304695 (TRBV6-3, TRBJ2-7)
CASSPPGTVFYEQYF

SEQ ID NO: 609391 - protein, 13 aa, Homo sapiens
  CDR3 for alpha chain variable domain of TCR clone 304696 (TRAV12-1, TRAJ7)
CVVNMRGNNRLAF

SEQ ID NO: 609392 - protein, 14 aa, Homo sapiens
  CDR3 for beta chain variable domain of TCR clone 304696 (TRBV18, TRBJ2-5)
CASSPGVSQETQYF

SEQ ID NO: 609393 - protein, 16 aa, Homo sapiens
  CDR3 for alpha chain variable domain of TCR clone 304697 (TRAV12-3, TRAJ53)
CAMSPWSGSSNYKLTF

SEQ ID NO: 609394 - protein, 16 aa, Homo sapiens
  CDR3 for beta chain variable domain of TCR clone 304697 (TRBV7-2, TRBJ2-6)
CAILSGVSSGANVLTF

SEQ ID NO: 609395 - protein, 21 aa, Homo sapiens
  CDR3 for alpha chain variable domain of TCR clone 304698 (TRAV3, )
CAVRPTPDIQNPDPAVYQLRA

SEQ ID NO: 609396 - protein, 15 aa, Homo sapiens
  CDR3 for beta chain variable domain of TCR clone 304698 (TRBV11-3, TRBJ2-5)
CASSDTSGGIETQYF

SEQ ID NO: 609397 - protein, 14 aa, Homo sapiens
  CDR3 for alpha chain variable domain of TCR clone 304699 (TRAV8-6, TRAJ54)
CAVSPALGAQKLVF

SEQ ID NO: 609398 - protein, 15 aa, Homo sapiens
  CDR3 for beta chain variable domain of TCR clone 304699 (TRBV4-1, TRBJ1-6)
CASSAAQGYNSPLHF

SEQ ID NO: 609399 - protein, 12 aa, Homo sapiens
  CDR3 for alpha chain variable domain of TCR clone 304700 (TRAV8-3, TRAJ20)
CAVGANDYKLSF

SEQ ID NO: 609400 - protein, 16 aa, Homo sapiens
  CDR3 for beta chain variable domain of TCR clone 304700 (TRBV19, TRBJ2-2)
CASRSPGTGTTGELFS

SEQ ID NO: 609401 - protein, 10 aa, Homo sapiens
  CDR3 for alpha chain variable domain of TCR clone 304701 (TRAV13-1, TRAJ43)
CAASKNDMRF

SEQ ID NO: 609402 - protein, 12 aa, Homo sapiens
  CDR3 for beta chain variable domain of TCR clone 304701 (TRBV7-9, TRBJ2-7)
CASSFGSYEQYF

SEQ ID NO: 609403 - protein, 13 aa, Homo sapiens
  CDR3 for alpha chain variable domain of TCR clone 304702 (TRAV12-1, TRAJ16)
FVVNGPDGQKLLF

SEQ ID NO: 609404 - protein, 13 aa, Homo sapiens
  CDR3 for beta chain variable domain of TCR clone 304702 (TRBV2, TRBJ1-1)
CARNPTGGLHAFF

SEQ ID NO: 609405 - protein, 13 aa, Homo sapiens
  CDR3 for alpha chain variable domain of TCR clone 304703 (TRAV29/DV5, TRAJ33)
CAASVESNYQLIW

SEQ ID NO: 609406 - protein, 14 aa, Homo sapiens
  CDR3 for beta chain variable domain of TCR clone 304703 (TRBV5-7, TRBJ1-1)
CASSLAGYWTEAFF

SEQ ID NO: 609407 - protein, 15 aa, Homo sapiens
  CDR3 for alpha chain variable domain of TCR clone 304704 (TRAV8-3, TRAJ27)
CAVGPSKTNAGKSTF

SEQ ID NO: 609408 - protein, 15 aa, Homo sapiens
  CDR3 for beta chain variable domain of TCR clone 304704 (TRBV12-4, TRBJ2-5)
CASSFSSGGGETQYF

SEQ ID NO: 609409 - protein, 14 aa, Homo sapiens
  CDR3 for alpha chain variable domain of TCR clone 304705 (TRAV8-2, TRAJ6)
CVVISAGGSYKPTF

SEQ ID NO: 609410 - protein, 16 aa, Homo sapiens
  CDR3 for beta chain variable domain of TCR clone 304705 (TRBV7-6, TRBJ2-6)
CASSLPGLSGANVLTF

SEQ ID NO: 609411 - protein, 14 aa, Homo sapiens
  CDR3 for alpha chain variable domain of TCR clone 304706 (TRAV12-1, TRAJ12)
CVVNGRDSSYKLIF

SEQ ID NO: 609412 - protein, 16 aa, Homo sapiens
  CDR3 for beta chain variable domain of TCR clone 304706 (TRBV12-4, TRBJ1-5)
CASSRPVGGSNQPQHF

SEQ ID NO: 609413 - protein, 15 aa, Homo sapiens
  CDR3 for alpha chain variable domain of TCR clone 304707 (TRAV12-3, TRAJ52)
CNGGAGGTSYGRMTF

SEQ ID NO: 609414 - protein, 13 aa, Homo sapiens
  CDR3 for beta chain variable domain of TCR clone 304707 (TRBV20-1, TRBJ2-5)
CSARGDYQETQYF

SEQ ID NO: 609415 - protein, 16 aa, Homo sapiens
  CDR3 for alpha chain variable domain of TCR clone 304708 (TRAV27, TRAJ53)
CAAPEGSGGSNYKLTF

SEQ ID NO: 609416 - protein, 15 aa, Homo sapiens
  CDR3 for beta chain variable domain of TCR clone 304708 (TRBV7-3, TRBJ2-1)
CASSPTGGGEVEQFF

SEQ ID NO: 609417 - protein, 16 aa, Homo sapiens
  CDR3 for alpha chain variable domain of TCR clone 304709 (TRAV27, TRAJ13)
CAGAKSDSGGYQKVTF

SEQ ID NO: 609418 - protein, 17 aa, Homo sapiens
  CDR3 for beta chain variable domain of TCR clone 304709 (TRBV28, TRBJ2-5)
CASSTPEGDALQETQYF

SEQ ID NO: 609419 - protein, 16 aa, Homo sapiens
  CDR3 for alpha chain variable domain of TCR clone 304710 (TRAV21, TRAJ18)
CAVLADRGSTLGRLYF

SEQ ID NO: 609420 - protein, 13 aa, Homo sapiens
  CDR3 for beta chain variable domain of TCR clone 304710 (TRBV27, TRBJ2-1)
CASSLSSYNEQFF

SEQ ID NO: 609421 - protein, 12 aa, Homo sapiens
  CDR3 for alpha chain variable domain of TCR clone 304711 (TRAV8-2, TRAJ45)
CVQGGGADRLTF

SEQ ID NO: 609422 - protein, 14 aa, Homo sapiens
  CDR3 for beta chain variable domain of TCR clone 304711 (TRBV4-3, TRBJ1-1)
CASSQGWTPARAFF

SEQ ID NO: 609423 - protein, 11 aa, Homo sapiens
  CDR3 for alpha chain variable domain of TCR clone 304712 (TRAV23/DV6, TRAJ29)
CAASRNTPLVF

SEQ ID NO: 609424 - protein, 12 aa, Homo sapiens
  CDR3 for beta chain variable domain of TCR clone 304712 (TRBV7-8, TRBJ2-7)
CASSLGDREQYF

SEQ ID NO: 609425 - protein, 12 aa, Homo sapiens
  CDR3 for alpha chain variable domain of TCR clone 304713 (TRAV36/DV7, TRAJ50)
CAVEPENLLRQG

SEQ ID NO: 609426 - protein, 13 aa, Homo sapiens
  CDR3 for beta chain variable domain of TCR clone 304713 (TRBV7-2, TRBJ2-7)
CASTSPSGSEQYF

SEQ ID NO: 609427 - protein, 16 aa, Homo sapiens
  CDR3 for alpha chain variable domain of TCR clone 304714 (TRAV30, TRAJ24)
CGTEIVDADSWGKFQF

SEQ ID NO: 609428 - protein, 14 aa, Homo sapiens
  CDR3 for beta chain variable domain of TCR clone 304714 (TRBV25-1, TRBJ1-1)
CASTHLGGNTEAVF

SEQ ID NO: 609429 - protein, 10 aa, Homo sapiens
  CDR3 for alpha chain variable domain of TCR clone 304715 (TRAV30, TRAJ48)
CGIGSEKLTF

SEQ ID NO: 609430 - protein, 14 aa, Homo sapiens
  CDR3 for beta chain variable domain of TCR clone 304715 (TRBV6-1, TRBJ1-3)
CASVQGGGGNTIYF

SEQ ID NO: 609431 - protein, 13 aa, Homo sapiens
  CDR3 for alpha chain variable domain of TCR clone 304716 (TRAV8-2, TRAJ43)
CVVSVQGDNDMRF

SEQ ID NO: 609432 - protein, 12 aa, Homo sapiens
  CDR3 for beta chain variable domain of TCR clone 304716 (TRBV7-9, TRBJ2-7)
CASRTGFDEQYF

SEQ ID NO: 609433 - protein, 14 aa, Homo sapiens
  CDR3 for alpha chain variable domain of TCR clone 304717 (TRAV1-2, TRAJ8)
CAVREDTGFQKLVF

SEQ ID NO: 609434 - protein, 15 aa, Homo sapiens
  CDR3 for beta chain variable domain of TCR clone 304717 (TRBV27, TRBJ2-7)
CASSTAGTGSYEQYF

SEQ ID NO: 609435 - protein, 12 aa, Homo sapiens
  CDR3 for alpha chain variable domain of TCR clone 304718 (TRAV12-3, TRAJ17)
CAMTLTGNKLTF

SEQ ID NO: 609436 - protein, 15 aa, Homo sapiens
  CDR3 for beta chain variable domain of TCR clone 304718 (TRBV20-1, TRBJ2-7)
CSARDRVSGMDELYF

SEQ ID NO: 609437 - protein, 19 aa, Homo sapiens
  CDR3 for alpha chain variable domain of TCR clone 304719 (TRAV8-3, TRAJ40)
CAAPSLGSGTYRYIWNRHQ

SEQ ID NO: 609438 - protein, 16 aa, Homo sapiens
  CDR3 for beta chain variable domain of TCR clone 304719 (TRBV7-3, TRBJ2-3)
CASSLSGYRPEDTQYF

SEQ ID NO: 609439 - protein, 17 aa, Homo sapiens
  CDR3 for alpha chain variable domain of TCR clone 304720 (TRAV38-1, TRAJ28)
CAFMKPTSGAGSYQLTF

SEQ ID NO: 609440 - protein, 15 aa, Homo sapiens
  CDR3 for beta chain variable domain of TCR clone 304720 (TRBV5-1, TRBJ2-4)
CASSLGGGGSYIQYY

SEQ ID NO: 609441 - protein, 11 aa, Homo sapiens
  CDR3 for alpha chain variable domain of TCR clone 304721 (TRAV12-2, TRAJ36)
CAVDGANNLFF

SEQ ID NO: 609442 - protein, 13 aa, Homo sapiens
  CDR3 for beta chain variable domain of TCR clone 304721 (TRBV7-2, TRBJ2-7)
CASSSASGSEQYF

SEQ ID NO: 609443 - protein, 14 aa, Homo sapiens
  CDR3 for alpha chain variable domain of TCR clone 304722 (TRAV4, TRAJ21)
CLVVTTSTNFTLDL

SEQ ID NO: 609444 - protein, 12 aa, Homo sapiens
  CDR3 for beta chain variable domain of TCR clone 304722 (TRBV6-6, TRBJ2-5)
CASNRQSGTQYF

SEQ ID NO: 609445 - protein, 12 aa, Homo sapiens
  CDR3 for alpha chain variable domain of TCR clone 304723 (TRAV3, TRAJ43)
CAVRDPNNDMRY

SEQ ID NO: 609446 - protein, 15 aa, Homo sapiens
  CDR3 for beta chain variable domain of TCR clone 304723 (TRBV27, TRBJ1-5)
CASSLGTGFDQPQHF

SEQ ID NO: 609447 - protein, 12 aa, Homo sapiens
  CDR3 for alpha chain variable domain of TCR clone 304724 (TRAV8-6, TRAJ8)
RAVTPGFQKLVF

SEQ ID NO: 609448 - protein, 16 aa, Homo sapiens
  CDR3 for beta chain variable domain of TCR clone 304724 (TRBV7-3, TRBJ2-2)
CASSLKRGTLSGELFF

SEQ ID NO: 609449 - protein, 13 aa, Homo sapiens
  CDR3 for alpha chain variable domain of TCR clone 304725 (TRAV38-1, TRAJ42)
CARWGGSQGNPIF

SEQ ID NO: 609450 - protein, 17 aa, Homo sapiens
  CDR3 for beta chain variable domain of TCR clone 304725 (TRBV20-1, TRBJ2-1)
CSARDTLAGVWDNEQFF

SEQ ID NO: 609451 - protein, 14 aa, Homo sapiens
  CDR3 for alpha chain variable domain of TCR clone 304726 (TRAV2, TRAJ9)
CAVEDRSGGFKTIF

SEQ ID NO: 609452 - protein, 14 aa, Homo sapiens
  CDR3 for beta chain variable domain of TCR clone 304726 (TRBV9, TRBJ2-1)
CARSVAGTFDEQFF

SEQ ID NO: 609453 - protein, 14 aa, Homo sapiens
  CDR3 for alpha chain variable domain of TCR clone 304727 (TRAV12-2, TRAJ40)
CAVKIPSGTYKYIF

SEQ ID NO: 609454 - protein, 13 aa, Homo sapiens
  CDR3 for beta chain variable domain of TCR clone 304727 (TRBV12-4, TRBJ2-7)
CASSPTGTYEQYF

SEQ ID NO: 609455 - protein, 17 aa, Homo sapiens
  CDR3 for alpha chain variable domain of TCR clone 304728 (TRAV12-2, TRAJ39)
CAVNNMLTSGGGTRVMV

SEQ ID NO: 609456 - protein, 16 aa, Homo sapiens
  CDR3 for beta chain variable domain of TCR clone 304728 (TRBV5-3, TRBJ2-2)
CARSFGTGTNTGELFF

SEQ ID NO: 609457 - protein, 16 aa, Homo sapiens
  CDR3 for alpha chain variable domain of TCR clone 304729 (TRAV30, TRAJ24)
CGAEIVDADSWGKFQF

SEQ ID NO: 609458 - protein, 18 aa, Homo sapiens
  CDR3 for beta chain variable domain of TCR clone 304729 (TRBV7-9, TRBJ2-7)
CASSLTTSGSRTWYEQYF

SEQ ID NO: 609459 - protein, 14 aa, Homo sapiens
  CDR3 for alpha chain variable domain of TCR clone 304730 (TRAV8-3, TRAJ4)
CAVGAAGVYNKRIF

SEQ ID NO: 609460 - protein, 15 aa, Homo sapiens
  CDR3 for beta chain variable domain of TCR clone 304730 (TRBV6-5, TRBJ2-1)
CASSYDAGAGNEQFF

SEQ ID NO: 609461 - protein, 11 aa, Homo sapiens
  CDR3 for alpha chain variable domain of TCR clone 304731 (TRAV13-1, TRAJ23)
CAASSRGKLIF

SEQ ID NO: 609462 - protein, 14 aa, Homo sapiens
  CDR3 for beta chain variable domain of TCR clone 304731 (TRBV5-1, TRBJ2-7)
CASSRGESLYEQYF

SEQ ID NO: 609463 - protein, 16 aa, Homo sapiens
  CDR3 for alpha chain variable domain of TCR clone 304732 (TRAV26-1, TRAJ53)
CIVRVAMGGSNYKLTF

SEQ ID NO: 609464 - protein, 15 aa, Homo sapiens
  CDR3 for beta chain variable domain of TCR clone 304732 (TRBV20-1, TRBJ1-5)
CSARGSVDSNQPQHF

SEQ ID NO: 609465 - protein, 16 aa, Homo sapiens
  CDR3 for alpha chain variable domain of TCR clone 304733 (TRAV16, TRAJ52)
CALSGVGGTSYGKLTF

SEQ ID NO: 609466 - protein, 11 aa, Homo sapiens
  CDR3 for beta chain variable domain of TCR clone 304733 (TRBV19, TRBJ1-2)
CASSLRGRPMA

SEQ ID NO: 609467 - protein, 16 aa, Homo sapiens
  CDR3 for alpha chain variable domain of TCR clone 304734 (TRAV26-1, TRAJ36)
CIVRAIGRSGANNRFF

SEQ ID NO: 609468 - protein, 14 aa, Homo sapiens
  CDR3 for beta chain variable domain of TCR clone 304734 (TRBV25-1, TRBJ2-1)
CASSKTGGYNEQFF

SEQ ID NO: 609469 - protein, 13 aa, Homo sapiens
  CDR3 for alpha chain variable domain of TCR clone 304735 (TRAV21, TRAJ37)
CAVSSGNTGKLIF

SEQ ID NO: 609470 - protein, 16 aa, Homo sapiens
  CDR3 for beta chain variable domain of TCR clone 304735 (TRBV19, TRBJ2-1)
CASSKAGPSSYNEQFF

SEQ ID NO: 609471 - protein, 12 aa, Homo sapiens
  CDR3 for alpha chain variable domain of TCR clone 304736 (TRAV5, TRAJ29)
CAESKKETHLLS

SEQ ID NO: 609472 - protein, 18 aa, Homo sapiens
  CDR3 for beta chain variable domain of TCR clone 304736 (TRBV7-8, TRBJ2-1)
CASSPYLGQRGSNNEQFF

SEQ ID NO: 609473 - protein, 16 aa, Homo sapiens
  CDR3 for alpha chain variable domain of TCR clone 304737 (TRAV30, TRAJ24)
CGTEIVDANSWGKFQV

SEQ ID NO: 609474 - protein, 14 aa, Homo sapiens
  CDR3 for beta chain variable domain of TCR clone 304737 (TRBV12-5, TRBJ2-5)
CASGSRTHQETQYF

SEQ ID NO: 609475 - protein, 14 aa, Homo sapiens
  CDR3 for alpha chain variable domain of TCR clone 304738 (TRAV13-1, TRAJ50)
CAARSKTSYDKVIF

SEQ ID NO: 609476 - protein, 17 aa, Homo sapiens
  CDR3 for beta chain variable domain of TCR clone 304738 (TRBV13, TRBJ2-3)
CASSLSRVAGGRNTRYV

SEQ ID NO: 609477 - protein, 11 aa, Homo sapiens
  CDR3 for alpha chain variable domain of TCR clone 304739 (TRAV12-1, TRAJ21)
CVVNNFNKFYF

SEQ ID NO: 609478 - protein, 15 aa, Homo sapiens
  CDR3 for beta chain variable domain of TCR clone 304739 (TRBV11-3, TRBJ2-3)
CASLKDGREGDTQYF

SEQ ID NO: 609479 - protein, 15 aa, Homo sapiens
  CDR3 for alpha chain variable domain of TCR clone 304740 (TRAV12-3, TRAJ6)
CAMSAASGGSYIPTF

SEQ ID NO: 609480 - protein, 13 aa, Homo sapiens
  CDR3 for beta chain variable domain of TCR clone 304740 (TRBV20-1, TRBJ1-2)
SSASTERIYGYTF

SEQ ID NO: 609481 - protein, 14 aa, Homo sapiens
  CDR3 for alpha chain variable domain of TCR clone 304741 (TRAV13-2, TRAJ10)
CAETFTGGGNKLTS

SEQ ID NO: 609482 - protein, 16 aa, Homo sapiens
  CDR3 for beta chain variable domain of TCR clone 304741 (TRBV18, TRBJ2-7)
CASSPRSQGISYEQYF

SEQ ID NO: 609483 - protein, 12 aa, Homo sapiens
  CDR3 for alpha chain variable domain of TCR clone 304742 (TRAV12-2, TRAJ31)
CAENTPDARLMF

SEQ ID NO: 609484 - protein, 15 aa, Homo sapiens
  CDR3 for beta chain variable domain of TCR clone 304742 (TRBV20-1, TRBJ2-7)
CSAESGTSGAYEQYF

SEQ ID NO: 609485 - protein, 14 aa, Homo sapiens
  CDR3 for alpha chain variable domain of TCR clone 304743 (TRAV26-1, TRAJ34)
CIVRESYNTDKLIF

SEQ ID NO: 609486 - protein, 12 aa, Homo sapiens
  CDR3 for beta chain variable domain of TCR clone 304743 (TRBV19, TRBJ2-1)
CHLQGVYNEQFF

SEQ ID NO: 609487 - protein, 13 aa, Homo sapiens
  CDR3 for alpha chain variable domain of TCR clone 304744 (TRAV20, TRAJ56)
CAVQAGANSKLPF

SEQ ID NO: 609488 - protein, 15 aa, Homo sapiens
  CDR3 for beta chain variable domain of TCR clone 304744 (TRBV27, TRBJ2-1)
CASSNGGGSSNEQFF

SEQ ID NO: 609489 - protein, 14 aa, Homo sapiens
  CDR3 for alpha chain variable domain of TCR clone 304745 (TRAV12-2, TRAJ13)
CAVKKTGGYQKVTF

SEQ ID NO: 609490 - protein, 15 aa, Homo sapiens
  CDR3 for beta chain variable domain of TCR clone 304745 (TRBV28, TRBJ2-5)
CASSPAWSYQETQYF

SEQ ID NO: 609491 - protein, 14 aa, Homo sapiens
  CDR3 for alpha chain variable domain of TCR clone 304746 (TRAV12-2, TRAJ44)
CAVNKVGTASKLTF

SEQ ID NO: 609492 - protein, 12 aa, Homo sapiens
  CDR3 for beta chain variable domain of TCR clone 304746 (TRBV19, TRBJ1-4)
CASKDWPGGLFF

SEQ ID NO: 609493 - protein, 15 aa, Homo sapiens
  CDR3 for alpha chain variable domain of TCR clone 304747 (TRAV21, TRAJ52)
CAVDAGGTSYGKLTF

SEQ ID NO: 609494 - protein, 13 aa, Homo sapiens
  CDR3 for beta chain variable domain of TCR clone 304747 (TRBV7-7, TRBJ2-3)
CASSLSRADTQYF

SEQ ID NO: 609495 - protein, 16 aa, Homo sapiens
  CDR3 for alpha chain variable domain of TCR clone 304748 (TRAV30, TRAJ24)
CGTEIVDAYSWGKVQF

SEQ ID NO: 609496 - protein, 11 aa, Homo sapiens
  CDR3 for beta chain variable domain of TCR clone 304748 (TRBV19, TRBJ1-1)
CASSIGSEAFF

SEQ ID NO: 609497 - protein, 13 aa, Homo sapiens
  CDR3 for alpha chain variable domain of TCR clone 304749 (TRAV12-3, TRAJ13)
CAMTFGGYQKVTF

SEQ ID NO: 609498 - protein, 13 aa, Homo sapiens
  CDR3 for beta chain variable domain of TCR clone 304749 (TRBV20-1, TRBJ2-2)
CSALIGGAGELFF

SEQ ID NO: 609499 - protein, 14 aa, Homo sapiens
  CDR3 for alpha chain variable domain of TCR clone 304750 (TRAV12-1, TRAJ17)
CVVNYKAAGNKLTL

SEQ ID NO: 609500 - protein, 14 aa, Homo sapiens
  CDR3 for beta chain variable domain of TCR clone 304750 (TRBV20-1, TRBJ1-1)
CSAQTRIGGTEAFF

SEQ ID NO: 609501 - protein, 12 aa, Homo sapiens
  CDR3 for alpha chain variable domain of TCR clone 304751 (TRAV8-3, TRAJ40)
CAVGSGTYKYIF

SEQ ID NO: 609502 - protein, 15 aa, Homo sapiens
  CDR3 for beta chain variable domain of TCR clone 304751 (TRBV20-1, TRBJ2-7)
CSAESGTSGAYEQYF

SEQ ID NO: 609503 - protein, 13 aa, Homo sapiens
  CDR3 for alpha chain variable domain of TCR clone 304752 (TRAV3, TRAJ30)
CAVRGVRDDKIIF

SEQ ID NO: 609504 - protein, 15 aa, Homo sapiens
  CDR3 for beta chain variable domain of TCR clone 304752 (TRBV19, TRBJ2-1)
CASSIGPLEGNEQFF

SEQ ID NO: 609505 - protein, 14 aa, Homo sapiens
  CDR3 for alpha chain variable domain of TCR clone 304753 (TRAV13-1, TRAJ48)
CAASRSFGNEKLTF

SEQ ID NO: 609506 - protein, 13 aa, Homo sapiens
  CDR3 for beta chain variable domain of TCR clone 304753 (TRBV15, TRBJ1-6)
CATSGGLNSPLHF

SEQ ID NO: 609507 - protein, 14 aa, Homo sapiens
  CDR3 for alpha chain variable domain of TCR clone 304754 (TRAV12-3, TRAJ10)
SHLPLTGGGNKLTF

SEQ ID NO: 609508 - protein, 11 aa, Homo sapiens
  CDR3 for beta chain variable domain of TCR clone 304754 (TRBV19, TRBJ1-1)
CVSSIGSEAFF

SEQ ID NO: 609509 - protein, 11 aa, Homo sapiens
  CDR3 for alpha chain variable domain of TCR clone 304755 (TRAV12-1, TRAJ21)
CVVNNFNKFYL

SEQ ID NO: 609510 - protein, 14 aa, Homo sapiens
  CDR3 for beta chain variable domain of TCR clone 304755 (TRBV18, TRBJ2-7)
CASSPRGGAYEQYF

SEQ ID NO: 609511 - protein, 15 aa, Homo sapiens
  CDR3 for alpha chain variable domain of TCR clone 304756 (TRAV21, TRAJ24)
CAARSSTDSWGKLQF

SEQ ID NO: 609512 - protein, 13 aa, Homo sapiens
  CDR3 for beta chain variable domain of TCR clone 304756 (TRBV11-2, TRBJ2-5)
CASSSKGEETQYF

SEQ ID NO: 609513 - protein, 14 aa, Homo sapiens
  CDR3 for alpha chain variable domain of TCR clone 304757 (TRAV12-3, TRAJ10)
SHLPLTGGGNKLTF

SEQ ID NO: 609514 - protein, 16 aa, Homo sapiens
  CDR3 for beta chain variable domain of TCR clone 304757 (TRBV19, TRBJ1-1)
CASRFGGPVTATEAFF

SEQ ID NO: 609515 - protein, 16 aa, Homo sapiens
  CDR3 for alpha chain variable domain of TCR clone 304758 (TRAV12-3, TRAJ53)
CAMSPGSGGSNHKLTF

SEQ ID NO: 609516 - protein, 14 aa, Homo sapiens
  CDR3 for beta chain variable domain of TCR clone 304758 (TRBV18, TRBJ2-5)
CASSPGVSQETQYF

SEQ ID NO: 609517 - protein, 12 aa, Homo sapiens
  CDR3 for alpha chain variable domain of TCR clone 304759 (TRAV3, TRAJ31)
CAVRDGNARLMF

SEQ ID NO: 609518 - protein, 14 aa, Homo sapiens
  CDR3 for beta chain variable domain of TCR clone 304759 (TRBV10-3, TRBJ1-2)
CAIRAGTGDYGYTF

SEQ ID NO: 609519 - protein, 15 aa, Homo sapiens
  CDR3 for alpha chain variable domain of TCR clone 304760 (TRAV17, TRAJ45)
TSVLRTGGGADGLTF

SEQ ID NO: 609520 - protein, 15 aa, Homo sapiens
  CDR3 for beta chain variable domain of TCR clone 304760 (TRBV5-7, TRBJ1-5)
CASSDGKLWDQPQHF

SEQ ID NO: 609521 - protein, 14 aa, Homo sapiens
  CDR3 for alpha chain variable domain of TCR clone 304761 (TRAV8-1, TRAJ23)
CAVQAYNQGGKLSF

SEQ ID NO: 609522 - protein, 13 aa, Homo sapiens
  CDR3 for beta chain variable domain of TCR clone 304761 (TRBV5-1, TRBJ2-7)
CASSLEDNQEQYF

SEQ ID NO: 609523 - protein, 15 aa, Homo sapiens
  CDR3 for alpha chain variable domain of TCR clone 304762 (TRAV12-1, TRAJ10)
CVADLPTGTASKLTF

SEQ ID NO: 609524 - protein, 18 aa, Homo sapiens
  CDR3 for beta chain variable domain of TCR clone 304762 (TRBV7-3, TRBJ2-1)
CASSLALASGRAMVSSSS

SEQ ID NO: 609525 - protein, 15 aa, Homo sapiens
  CDR3 for alpha chain variable domain of TCR clone 304763 (TRAV38-1, TRAJ45)
CAFMKGGGGADGLTF

SEQ ID NO: 609526 - protein, 13 aa, Homo sapiens
  CDR3 for beta chain variable domain of TCR clone 304763 (TRBV7-9, TRBJ1-2)
CASSSKQNCGYTF

SEQ ID NO: 609527 - protein, 16 aa, Homo sapiens
  CDR3 for alpha chain variable domain of TCR clone 304764 (TRAV30, TRAJ24)
CGTEIVDADSWGKFQF

SEQ ID NO: 609528 - protein, 16 aa, Homo sapiens
  CDR3 for beta chain variable domain of TCR clone 304764 (TRBV7-2, TRBJ2-1)
CASSPRLAGSNNEQFF

SEQ ID NO: 609529 - protein, 15 aa, Homo sapiens
  CDR3 for alpha chain variable domain of TCR clone 304765 (TRAV2, TRAJ44)
CAVEAYTGTASKLTF

SEQ ID NO: 609530 - protein, 18 aa, Homo sapiens
  CDR3 for beta chain variable domain of TCR clone 304765 (TRBV11-2, TRBJ2-6)
CASSLNPFLGTGANVLTF

SEQ ID NO: 609531 - protein, 16 aa, Homo sapiens
  CDR3 for alpha chain variable domain of TCR clone 304766 (TRAV30, TRAJ24)
CGTEIVDADSWGKFQF

SEQ ID NO: 609532 - protein, 13 aa, Homo sapiens
  CDR3 for beta chain variable domain of TCR clone 304766 (TRBV10-3, TRBJ2-7)
CAAKLAVNYEQYF

SEQ ID NO: 609533 - protein, 14 aa, Homo sapiens
  CDR3 for alpha chain variable domain of TCR clone 304767 (TRAV13-1, TRAJ40)
CAASMNSGTYKYIF

SEQ ID NO: 609534 - protein, 15 aa, Homo sapiens
  CDR3 for beta chain variable domain of TCR clone 304767 (TRBV7-3, TRBJ2-1)
CASSPTGGGEVEKFF

SEQ ID NO: 609535 - protein, 15 aa, Homo sapiens
  CDR3 for alpha chain variable domain of TCR clone 304768 (TRAV1-2, TRAJ30)
CAVRPHGNRDDKLIF

SEQ ID NO: 609536 - protein, 15 aa, Homo sapiens
  CDR3 for beta chain variable domain of TCR clone 304768 (TRBV19, TRBJ1-1)
CASTSGQIQNTEAFF

SEQ ID NO: 609537 - protein, 13 aa, Homo sapiens
  CDR3 for alpha chain variable domain of TCR clone 304769 (TRAV12-1, TRAJ16)
CVVNGPDGQKLLF

SEQ ID NO: 609538 - protein, 15 aa, Homo sapiens
  CDR3 for beta chain variable domain of TCR clone 304769 (TRBV29-1, TRBJ2-1)
CSGRDRKSSYNEQFF

SEQ ID NO: 609539 - protein, 14 aa, Homo sapiens
  CDR3 for alpha chain variable domain of TCR clone 304770 (TRAV12-2, TRAJ40)
CAVKIPSGTYKYIF

SEQ ID NO: 609540 - protein, 14 aa, Homo sapiens
  CDR3 for beta chain variable domain of TCR clone 304770 (TRBV20-1, TRBJ1-1)
CSAQTLIGATEAFF

SEQ ID NO: 609541 - protein, 15 aa, Homo sapiens
  CDR3 for alpha chain variable domain of TCR clone 304771 (TRAV8-4, TRAJ6)
CAVSAPSGGSYIPTF

SEQ ID NO: 609542 - protein, 15 aa, Homo sapiens
  CDR3 for beta chain variable domain of TCR clone 304771 (TRBV7-2, TRBJ2-7)
CASSLKGALTYEQYF

SEQ ID NO: 609543 - protein, 17 aa, Homo sapiens
  CDR3 for alpha chain variable domain of TCR clone 304772 (TRAV1-2, TRAJ23)
CAVRPHSIYNQGGKLIF

SEQ ID NO: 609544 - protein, 14 aa, Homo sapiens
  CDR3 for beta chain variable domain of TCR clone 304772 (TRBV19, TRBJ2-1)
CASPTFVLSGEQFF

SEQ ID NO: 609545 - protein, 11 aa, Homo sapiens
  CDR3 for alpha chain variable domain of TCR clone 304773 (TRAV1-2, TRAJ20)
CAVANDYKLSF

SEQ ID NO: 609546 - protein, 14 aa, Homo sapiens
  CDR3 for beta chain variable domain of TCR clone 304773 (TRBV7-3, TRBJ1-1)
CASSLGTGYTEAFF

SEQ ID NO: 609547 - protein, 13 aa, Homo sapiens
  CDR3 for alpha chain variable domain of TCR clone 304774 (TRAV27, TRAJ8)
CAGGPTGFQKLVF

SEQ ID NO: 609548 - protein, 15 aa, Homo sapiens
  CDR3 for beta chain variable domain of TCR clone 304774 (TRBV15, TRBJ2-7)
CATSSRQESSYEQYF

SEQ ID NO: 609549 - protein, 14 aa, Homo sapiens
  CDR3 for alpha chain variable domain of TCR clone 304775 (TRAV13-1, TRAJ20)
CAARPGSNDYKLSF

SEQ ID NO: 609550 - protein, 16 aa, Homo sapiens
  CDR3 for beta chain variable domain of TCR clone 304775 (TRBV12-5, TRBJ2-5)
CASGPRTSGNQETQYF

SEQ ID NO: 609551 - protein, 17 aa, Homo sapiens
  CDR3 for alpha chain variable domain of TCR clone 304776 (TRAV8-2, )
CVVNIQNPDPAVYQLRD

SEQ ID NO: 609552 - protein, 14 aa, Homo sapiens
  CDR3 for beta chain variable domain of TCR clone 304776 (TRBV7-9, TRBJ2-5)
CASSLVGGEEAQYF

SEQ ID NO: 609553 - protein, 13 aa, Homo sapiens
  CDR3 for alpha chain variable domain of TCR clone 304777 (TRAV20, TRAJ29)
CAVQAVGNTPLVF

SEQ ID NO: 609554 - protein, 12 aa, Homo sapiens
  CDR3 for beta chain variable domain of TCR clone 304777 (TRBV7-8, TRBJ2-7)
CASSLGDREQYF

SEQ ID NO: 609555 - protein, 13 aa, Homo sapiens
  CDR3 for alpha chain variable domain of TCR clone 304778 (TRAV8-1, TRAJ30)
CAVNGRREDKIIL

SEQ ID NO: 609556 - protein, 15 aa, Homo sapiens
  CDR3 for beta chain variable domain of TCR clone 304778 (TRBV5-7, TRBJ1-5)
CASSYGKLWDQPQHF

SEQ ID NO: 609557 - protein, 13 aa, Homo sapiens
  CDR3 for alpha chain variable domain of TCR clone 304779 (TRAV13-1, TRAJ6)
CARGSGGSYIPTF

SEQ ID NO: 609558 - protein, 17 aa, Homo sapiens
  CDR3 for beta chain variable domain of TCR clone 304779 (TRBV13, TRBJ2-3)
CASSLSRVAGGRNTQYF

SEQ ID NO: 609559 - protein, 14 aa, Homo sapiens
  CDR3 for alpha chain variable domain of TCR clone 304780 (TRAV8-4, TRAJ4)
CAVSTSGGYNKLIF

SEQ ID NO: 609560 - protein, 15 aa, Homo sapiens
  CDR3 for beta chain variable domain of TCR clone 304780 (TRBV7-8, TRBJ2-3)
CASSLSADSGGAQYF

SEQ ID NO: 609561 - protein, 13 aa, Homo sapiens
  CDR3 for alpha chain variable domain of TCR clone 304781 (TRAV21, TRAJ27)
CAARPGNAGKSTF

SEQ ID NO: 609562 - protein, 14 aa, Homo sapiens
  CDR3 for beta chain variable domain of TCR clone 304781 (TRBV7-9, TRBJ2-5)
CASSLETAQETQYF

SEQ ID NO: 609563 - protein, 10 aa, Homo sapiens
  CDR3 for alpha chain variable domain of TCR clone 304782 (TRAV27, TRAJ58)
SETSGSRLTF

SEQ ID NO: 609564 - protein, 15 aa, Homo sapiens
  CDR3 for beta chain variable domain of TCR clone 304782 (TRBV7-9, TRBJ1-4)
CASSARTGGNEKLFF

SEQ ID NO: 609565 - protein, 14 aa, Homo sapiens
  CDR3 for alpha chain variable domain of TCR clone 304783 (TRAV12-2, TRAJ40)
CAVKTPSGTYKYIF

SEQ ID NO: 609566 - protein, 14 aa, Homo sapiens
  CDR3 for beta chain variable domain of TCR clone 304783 (TRBV20-1, TRBJ1-1)
CSSQTRIGGTEAFF

SEQ ID NO: 609567 - protein, 17 aa, Homo sapiens
  CDR3 for alpha chain variable domain of TCR clone 304784 (TRAV1-2, TRAJ8)
CALRDPDENTGFQKLVF

SEQ ID NO: 609568 - protein, 16 aa, Homo sapiens
  CDR3 for beta chain variable domain of TCR clone 304784 (TRBV7-9, TRBJ2-2)
CASSGFGGANTGELFF

SEQ ID NO: 609569 - protein, 13 aa, Homo sapiens
  CDR3 for alpha chain variable domain of TCR clone 304785 (TRAV1-2, TRAJ9)
CAALNTGGFKTIF

SEQ ID NO: 609570 - protein, 15 aa, Homo sapiens
  CDR3 for beta chain variable domain of TCR clone 304785 (TRBV5-5, TRBJ1-5)
CASSSTPGSNQTQQF

SEQ ID NO: 609571 - protein, 17 aa, Homo sapiens
  CDR3 for alpha chain variable domain of TCR clone 304786 (TRAV3, TRAJ6)
CAVRDGPREGGSYIPTF

SEQ ID NO: 609572 - protein, 12 aa, Homo sapiens
  CDR3 for beta chain variable domain of TCR clone 304786 (TRBV11-2, TRBJ2-2)
CASSLGGGELFF

SEQ ID NO: 609573 - protein, 17 aa, Homo sapiens
  CDR3 for alpha chain variable domain of TCR clone 304787 (TRAV3, TRAJ6)
CAVRDGPRAGGSYIPTF

SEQ ID NO: 609574 - protein, 14 aa, Homo sapiens
  CDR3 for beta chain variable domain of TCR clone 304787 (TRBV27, TRBJ1-1)
CASSPQGRRAEAFF

SEQ ID NO: 609575 - protein, 13 aa, Homo sapiens
  CDR3 for alpha chain variable domain of TCR clone 304788 (TRAV3, TRAJ21)
CAVREPDFNKFYF

SEQ ID NO: 609576 - protein, 13 aa, Homo sapiens
  CDR3 for beta chain variable domain of TCR clone 304788 (TRBV29-1, TRBJ2-2)
CSTTGVNTGELFF

SEQ ID NO: 609577 - protein, 11 aa, Homo sapiens
  CDR3 for alpha chain variable domain of TCR clone 304789 (TRAV23/DV6, TRAJ47)
CAAGYGNKLVF

SEQ ID NO: 609578 - protein, 14 aa, Homo sapiens
  CDR3 for beta chain variable domain of TCR clone 304789 (TRBV15, TRBJ2-3)
CATRSGTSTDTQYF

SEQ ID NO: 609579 - protein, 13 aa, Homo sapiens
  CDR3 for alpha chain variable domain of TCR clone 304790 (TRAV8-3, TRAJ40)
CAVGAQYLRNLQI

SEQ ID NO: 609580 - protein, 14 aa, Homo sapiens
  CDR3 for beta chain variable domain of TCR clone 304790 (TRBV4-2, TRBJ2-1)
CASGLDRAYNEQFF

SEQ ID NO: 609581 - protein, 17 aa, Homo sapiens
  CDR3 for alpha chain variable domain of TCR clone 304791 (TRAV3, TRAJ6)
RAVRDGPRAGGSYIPTF

SEQ ID NO: 609582 - protein, 14 aa, Homo sapiens
  CDR3 for beta chain variable domain of TCR clone 304791 (TRBV7-3, TRBJ2-1)
CASSLAGGMNEQFF

SEQ ID NO: 609583 - protein, 13 aa, Homo sapiens
  CDR3 for alpha chain variable domain of TCR clone 304792 (TRAV23/DV6, TRAJ22)
CATYPGSARQLTF

SEQ ID NO: 609584 - protein, 15 aa, Homo sapiens
  CDR3 for beta chain variable domain of TCR clone 304792 (TRBV11-2, TRBJ1-6)
CASSLDPWAVSPLHF

SEQ ID NO: 609585 - protein, 16 aa, Homo sapiens
  CDR3 for alpha chain variable domain of TCR clone 304793 (TRAV3, TRAJ21)
CAVRDIERGNFNKFYF

SEQ ID NO: 609586 - protein, 13 aa, Homo sapiens
  CDR3 for beta chain variable domain of TCR clone 304793 (TRBV10-3, TRBJ1-2)
CAISERDSYGYTF

SEQ ID NO: 609587 - protein, 12 aa, Homo sapiens
  CDR3 for alpha chain variable domain of TCR clone 304794 (TRAV12-3, TRAJ29)
CAAREGNTPLVF

SEQ ID NO: 609588 - protein, 17 aa, Homo sapiens
  CDR3 for beta chain variable domain of TCR clone 304794 (TRBV18, TRBJ2-1)
CASSPLAAGAGDNEQFV

SEQ ID NO: 609589 - protein, 14 aa, Homo sapiens
  CDR3 for alpha chain variable domain of TCR clone 304795 (TRAV12-2, TRAJ24)
CAVTPADSWGKLQF

SEQ ID NO: 609590 - protein, 15 aa, Homo sapiens
  CDR3 for beta chain variable domain of TCR clone 304795 (TRBV7-3, TRBJ2-1)
CASSPTGGGEVEQFF

SEQ ID NO: 609591 - protein, 13 aa, Homo sapiens
  CDR3 for alpha chain variable domain of TCR clone 304796 (TRAV2, TRAJ26)
CAVVGHYGQNFVF

SEQ ID NO: 609592 - protein, 14 aa, Homo sapiens
  CDR3 for beta chain variable domain of TCR clone 304796 (TRBV6-5, TRBJ2-2)
CASTEGQETGELFF

SEQ ID NO: 609593 - protein, 14 aa, Homo sapiens
  CDR3 for alpha chain variable domain of TCR clone 304797 (TRAV38-1, TRAJ40)
CALRPTSGTYKYIF

SEQ ID NO: 609594 - protein, 14 aa, Homo sapiens
  CDR3 for beta chain variable domain of TCR clone 304797 (TRBV4-2, TRBJ2-1)
CASGLDRAYNEQFF

SEQ ID NO: 609595 - protein, 16 aa, Homo sapiens
  CDR3 for alpha chain variable domain of TCR clone 304798 (TRAV12-1, TRAJ42)
CVVTPYYGGSQGNLIF

SEQ ID NO: 609596 - protein, 13 aa, Homo sapiens
  CDR3 for beta chain variable domain of TCR clone 304798 (TRBV2, TRBJ1-1)
CASSVSGYTEAFF

SEQ ID NO: 609597 - protein, 15 aa, Homo sapiens
  CDR3 for alpha chain variable domain of TCR clone 304799 (TRAV3, TRAJ9)
CAVRARNTGGFKTIF

SEQ ID NO: 609598 - protein, 15 aa, Homo sapiens
  CDR3 for beta chain variable domain of TCR clone 304799 (TRBV28, TRBJ2-1)
CASSGLAEVDNEQFF

SEQ ID NO: 609599 - protein, 17 aa, Homo sapiens
  CDR3 for alpha chain variable domain of TCR clone 304800 (TRAV3, TRAJ6)
CAVSRRTDTGGSYIPTF

SEQ ID NO: 609600 - protein, 18 aa, Homo sapiens
  CDR3 for beta chain variable domain of TCR clone 304800 (TRBV7-2, TRBJ2-3)
CASSLETSRGRKADTQYL

SEQ ID NO: 609601 - protein, 12 aa, Homo sapiens
  CDR3 for alpha chain variable domain of TCR clone 304801 (TRAV26-1, TRAJ36)
CIVRVRAVNLFF

SEQ ID NO: 609602 - protein, 13 aa, Homo sapiens
  CDR3 for beta chain variable domain of TCR clone 304801 (TRBV11-2, TRBJ2-5)
CASSRGPSETQYF

SEQ ID NO: 609603 - protein, 15 aa, Homo sapiens
  CDR3 for alpha chain variable domain of TCR clone 304802 (TRAV20, TRAJ58)
CAVQDLETSGSRLTF

SEQ ID NO: 609604 - protein, 15 aa, Homo sapiens
  CDR3 for beta chain variable domain of TCR clone 304802 (TRBV19, TRBJ1-2)
CASSVGQVLNYGYTF

SEQ ID NO: 609605 - protein, 14 aa, Homo sapiens
  CDR3 for alpha chain variable domain of TCR clone 304803 (TRAV26-1, TRAJ46)
CIVRVVKEKQRRQA

SEQ ID NO: 609606 - protein, 16 aa, Homo sapiens
  CDR3 for beta chain variable domain of TCR clone 304803 (TRBV27, TRBJ2-2)
CASSCRGLVRTGELFF

SEQ ID NO: 609607 - protein, 15 aa, Homo sapiens
  CDR3 for alpha chain variable domain of TCR clone 304804 (TRAV3, TRAJ20)
CAVRDINLSNYKLSF

SEQ ID NO: 609608 - protein, 15 aa, Homo sapiens
  CDR3 for beta chain variable domain of TCR clone 304804 (TRBV7-9, TRBJ1-6)
CASSSPGRGNSPLHF

SEQ ID NO: 609609 - protein, 13 aa, Homo sapiens
  CDR3 for alpha chain variable domain of TCR clone 304805 (TRAV21, TRAJ20)
CAVSLRVDYKLSF

SEQ ID NO: 609610 - protein, 13 aa, Homo sapiens
  CDR3 for beta chain variable domain of TCR clone 304805 (TRBV6-1, TRBJ1-1)
CASSRQGNTEAFF

SEQ ID NO: 609611 - protein, 10 aa, Homo sapiens
  CDR3 for alpha chain variable domain of TCR clone 304806 (TRAV12-3, TRAJ49)
CAMNDDQFYF

SEQ ID NO: 609612 - protein, 14 aa, Homo sapiens
  CDR3 for beta chain variable domain of TCR clone 304806 (TRBV4-1, TRBJ2-2)
CASSLTENTGELFF

SEQ ID NO: 609613 - protein, 13 aa, Homo sapiens
  CDR3 for alpha chain variable domain of TCR clone 304807 (TRAV22, TRAJ29)
CAVGGSVNTPLVF

SEQ ID NO: 609614 - protein, 18 aa, Homo sapiens
  CDR3 for beta chain variable domain of TCR clone 304807 (TRBV10-3, TRBJ2-3)
CAISESRVGPMRGDTQYF

SEQ ID NO: 609615 - protein, 14 aa, Homo sapiens
  CDR3 for alpha chain variable domain of TCR clone 304808 (TRAV12-2, TRAJ13)
CAVKKTGGYQKVTF

SEQ ID NO: 609616 - protein, 16 aa, Homo sapiens
  CDR3 for beta chain variable domain of TCR clone 304808 (TRBV28, TRBJ1-2)
CASSHGQGVYKDGYTF

SEQ ID NO: 609617 - protein, 11 aa, Homo sapiens
  CDR3 for alpha chain variable domain of TCR clone 304809 (TRAV1-2, TRAJ20)
CAVSNDYKLSF

SEQ ID NO: 609618 - protein, 17 aa, Homo sapiens
  CDR3 for beta chain variable domain of TCR clone 304809 (TRBV20-1, TRBJ2-6)
CSASGSGQGGLTGELFF

SEQ ID NO: 609619 - protein, 13 aa, Homo sapiens
  CDR3 for alpha chain variable domain of TCR clone 304810 (TRAV12-1, TRAJ31)
CVVIPNNNARLMF

SEQ ID NO: 609620 - protein, 14 aa, Homo sapiens
  CDR3 for beta chain variable domain of TCR clone 304810 (TRBV7-2, TRBJ2-7)
CASRSQGAAYEQYF

SEQ ID NO: 609621 - protein, 13 aa, Homo sapiens
  CDR3 for alpha chain variable domain of TCR clone 304811 (TRAV1-2, TRAJ9)
CAVFNTGGFKTIF

SEQ ID NO: 609622 - protein, 14 aa, Homo sapiens
  CDR3 for beta chain variable domain of TCR clone 304811 (TRBV20-1, TRBJ2-3)
CSARGGTSTDTQYF

SEQ ID NO: 609623 - protein, 10 aa, Homo sapiens
  CDR3 for alpha chain variable domain of TCR clone 304812 (TRAV12-2, TRAJ10)
CAAWTGVETH

SEQ ID NO: 609624 - protein, 14 aa, Homo sapiens
  CDR3 for beta chain variable domain of TCR clone 304812 (TRBV12-4, TRBJ2-1)
CASSLGSSPLEQFF

SEQ ID NO: 609625 - protein, 13 aa, Homo sapiens
  CDR3 for alpha chain variable domain of TCR clone 304813 (TRAV12-3, TRAJ33)
CAMSVNSNDQLIW

SEQ ID NO: 609626 - protein, 16 aa, Homo sapiens
  CDR3 for beta chain variable domain of TCR clone 304813 (TRBV13, TRBJ2-5)
CASSLRTGGSWETQYF

SEQ ID NO: 609627 - protein, 13 aa, Homo sapiens
  CDR3 for alpha chain variable domain of TCR clone 304814 (TRAV29/DV5, TRAJ49)
CAASTNTGNQFYF

SEQ ID NO: 609628 - protein, 15 aa, Homo sapiens
  CDR3 for beta chain variable domain of TCR clone 304814 (TRBV7-9, TRBJ1-5)
CASSQGHQPNQPQHF

SEQ ID NO: 609629 - protein, 15 aa, Homo sapiens
  CDR3 for alpha chain variable domain of TCR clone 304815 (TRAV8-3, TRAJ11)
CAVGLLNSGYSTLTF

SEQ ID NO: 609630 - protein, 14 aa, Homo sapiens
  CDR3 for beta chain variable domain of TCR clone 304815 (TRBV4-1, TRBJ2-3)
CASSQDWSTDTQYF

SEQ ID NO: 609631 - protein, 14 aa, Homo sapiens
  CDR3 for alpha chain variable domain of TCR clone 304816 (TRAV35, TRAJ40)
CAGSTTSGTNKYIF

SEQ ID NO: 609632 - protein, 13 aa, Homo sapiens
  CDR3 for beta chain variable domain of TCR clone 304816 (TRBV20-1, TRBJ1-6)
CSAPLGVGSPLHF

SEQ ID NO: 609633 - protein, 14 aa, Homo sapiens
  CDR3 for alpha chain variable domain of TCR clone 304817 (TRAV2, TRAJ29)
CAVELPSRNTPLVF

SEQ ID NO: 609634 - protein, 15 aa, Homo sapiens
  CDR3 for beta chain variable domain of TCR clone 304817 (TRBV12-4, TRBJ2-5)
CASSPPTGLQETQYF

SEQ ID NO: 609635 - protein, 12 aa, Homo sapiens
  CDR3 for alpha chain variable domain of TCR clone 304818 (TRAV12-1, TRAJ23)
CVVNIPRGKLIF

SEQ ID NO: 609636 - protein, 15 aa, Homo sapiens
  CDR3 for beta chain variable domain of TCR clone 304818 (TRBV7-2, TRBJ2-7)
CASSLVSSGSYEQYF

SEQ ID NO: 609637 - protein, 14 aa, Homo sapiens
  CDR3 for alpha chain variable domain of TCR clone 304819 (TRAV3, TRAJ32)
CCERRAGATDKLIF

SEQ ID NO: 609638 - protein, 12 aa, Homo sapiens
  CDR3 for beta chain variable domain of TCR clone 304819 (TRBV6-1, TRBJ2-7)
CASSDYSYEQYF

SEQ ID NO: 609639 - protein, 18 aa, Homo sapiens
  CDR3 for alpha chain variable domain of TCR clone 304820 (TRAV21, TRAJ52)
CAVRPSPAGGTSYGKLTF

SEQ ID NO: 609640 - protein, 15 aa, Homo sapiens
  CDR3 for beta chain variable domain of TCR clone 304820 (TRBV20-1, TRBJ2-7)
RSARDRVSGMDEQYF

SEQ ID NO: 609641 - protein, 15 aa, Homo sapiens
  CDR3 for alpha chain variable domain of TCR clone 304821 (TRAV12-3, TRAJ6)
CAMSATTGGSYIPTF

SEQ ID NO: 609642 - protein, 10 aa, Homo sapiens
  CDR3 for beta chain variable domain of TCR clone 304821 (TRBV12-4, TRBJ2-3)
CQTATDTQYF

SEQ ID NO: 609643 - protein, 14 aa, Homo sapiens
  CDR3 for alpha chain variable domain of TCR clone 304822 (TRAV1-2, TRAJ16)
CAVNRFSDGQKLLF

SEQ ID NO: 609644 - protein, 15 aa, Homo sapiens
  CDR3 for beta chain variable domain of TCR clone 304822 (TRBV20-1, TRBJ1-5)
CSAFKSGQRNQPQHF

SEQ ID NO: 609645 - protein, 13 aa, Homo sapiens
  CDR3 for alpha chain variable domain of TCR clone 304823 (TRAV2, TRAJ40)
CAVVTSGTYKYIF

SEQ ID NO: 609646 - protein, 14 aa, Homo sapiens
  CDR3 for beta chain variable domain of TCR clone 304823 (TRBV7-2, TRBJ1-1)
CASRFLTGTTEAFF

SEQ ID NO: 609647 - protein, 14 aa, Homo sapiens
  CDR3 for alpha chain variable domain of TCR clone 304824 (TRAV16, TRAJ32)
CALKSGGATNKLIF

SEQ ID NO: 609648 - protein, 15 aa, Homo sapiens
  CDR3 for beta chain variable domain of TCR clone 304824 (TRBV7-3, TRBJ2-7)
CASSLTPTGYDEQYF

SEQ ID NO: 609649 - protein, 19 aa, Homo sapiens
  CDR3 for alpha chain variable domain of TCR clone 304825 (TRAV2, TRAJ20)
ILQVREADAAVYRDCKLSF

SEQ ID NO: 609650 - protein, 12 aa, Homo sapiens
  CDR3 for beta chain variable domain of TCR clone 304825 (TRBV11-2, TRBJ2-1)
CASSPGTNEQFF

SEQ ID NO: 609651 - protein, 14 aa, Homo sapiens
  CDR3 for alpha chain variable domain of TCR clone 304826 (TRAV1-2, TRAJ16)
CAVNRFSDGEKLLF

SEQ ID NO: 609652 - protein, 15 aa, Homo sapiens
  CDR3 for beta chain variable domain of TCR clone 304826 (TRBV12-4, TRBJ2-5)
CASSPPTGLQETQYF

SEQ ID NO: 609653 - protein, 12 aa, Homo sapiens
  CDR3 for alpha chain variable domain of TCR clone 304827 (TRAV8-3, TRAJ40)
CAVTSGTYKYIF

SEQ ID NO: 609654 - protein, 14 aa, Homo sapiens
  CDR3 for beta chain variable domain of TCR clone 304827 (TRBV12-4, TRBJ2-3)
CASSGQGSTDTQYS

SEQ ID NO: 609655 - protein, 13 aa, Homo sapiens
  CDR3 for alpha chain variable domain of TCR clone 304828 (TRAV12-1, TRAJ39)
CVARSSAGNMLTF

SEQ ID NO: 609656 - protein, 13 aa, Homo sapiens
  CDR3 for beta chain variable domain of TCR clone 304828 (TRBV7-9, TRBJ1-2)
CASSLKQNYGYTF

SEQ ID NO: 609657 - protein, 14 aa, Homo sapiens
  CDR3 for alpha chain variable domain of TCR clone 304829 (TRAV12-2, TRAJ40)
CDVKIPPGTYKCIF

SEQ ID NO: 609658 - protein, 14 aa, Homo sapiens
  CDR3 for beta chain variable domain of TCR clone 304829 (TRBV20-1, TRBJ1-1)
CSAQTRIGGTEAFF

SEQ ID NO: 609659 - protein, 14 aa, Homo sapiens
  CDR3 for alpha chain variable domain of TCR clone 304830 (TRAV12-3, TRAJ10)
SHLPLTGGENKLTF

SEQ ID NO: 609660 - protein, 13 aa, Homo sapiens
  CDR3 for beta chain variable domain of TCR clone 304830 (TRBV9, TRBJ2-1)
CASSPSGGNEQFF

SEQ ID NO: 609661 - protein, 10 aa, Homo sapiens
  CDR3 for alpha chain variable domain of TCR clone 304831 (TRAV1-2, TRAJ23)
CAGQGGKLIF

SEQ ID NO: 609662 - protein, 16 aa, Homo sapiens
  CDR3 for beta chain variable domain of TCR clone 304831 (TRBV11-2, TRBJ1-1)
CARSLRQGGEHSKAFF

SEQ ID NO: 609663 - protein, 15 aa, Homo sapiens
  CDR3 for alpha chain variable domain of TCR clone 304832 (TRAV17, TRAJ17)
CATDASIIRRQQANF

SEQ ID NO: 609664 - protein, 13 aa, Homo sapiens
  CDR3 for beta chain variable domain of TCR clone 304832 (TRBV7-3, TRBJ1-1)
CASSQDWGAEAFF

SEQ ID NO: 609665 - protein, 15 aa, Homo sapiens
  CDR3 for alpha chain variable domain of TCR clone 304833 (TRAV3, TRAJ20)
CAVRDIKLSDYKLRF

SEQ ID NO: 609666 - protein, 15 aa, Homo sapiens
  CDR3 for beta chain variable domain of TCR clone 304833 (TRBV7-9, TRBJ1-6)
CASSSPGRGNSPLLF

SEQ ID NO: 609667 - protein, 14 aa, Homo sapiens
  CDR3 for alpha chain variable domain of TCR clone 304834 (TRAV26-2, TRAJ38)
CILYNAGNNRKLIW

SEQ ID NO: 609668 - protein, 13 aa, Homo sapiens
  CDR3 for beta chain variable domain of TCR clone 304834 (TRBV6-6, TRBJ2-3)
CASSQGGRGTQYF

SEQ ID NO: 609669 - protein, 11 aa, Homo sapiens
  CDR3 for alpha chain variable domain of TCR clone 304835 (TRAV1-1, TRAJ23)
CAVRQGGKLIF

SEQ ID NO: 609670 - protein, 15 aa, Homo sapiens
  CDR3 for beta chain variable domain of TCR clone 304835 (TRBV7-2, TRBJ2-3)
CASSQLAGVGDTQYF

SEQ ID NO: 609671 - protein, 14 aa, Homo sapiens
  CDR3 for alpha chain variable domain of TCR clone 304836 (TRAV38-2/DV8, TRAJ23)
CADRSQNQGGKLIF

SEQ ID NO: 609672 - protein, 13 aa, Homo sapiens
  CDR3 for beta chain variable domain of TCR clone 304836 (TRBV24-1, TRBJ2-1)
CATSAGPYNEQFF

SEQ ID NO: 609673 - protein, 12 aa, Homo sapiens
  CDR3 for alpha chain variable domain of TCR clone 304837 (TRAV13-2, TRAJ23)
CAERHRGGKLIF

SEQ ID NO: 609674 - protein, 20 aa, Homo sapiens
  CDR3 for beta chain variable domain of TCR clone 304837 (TRBV7-8, TRBJ2-2)
CASSHLFPGPTVHITGELFF

SEQ ID NO: 609675 - protein, 15 aa, Homo sapiens
  CDR3 for alpha chain variable domain of TCR clone 304838 (TRAV35, TRAJ58)
CAGRRQESSGSRLTF

SEQ ID NO: 609676 - protein, 11 aa, Homo sapiens
  CDR3 for beta chain variable domain of TCR clone 304838 (TRBV11-2, TRBJ1-1)
CASSINTEAFF

SEQ ID NO: 609677 - protein, 13 aa, Homo sapiens
  CDR3 for alpha chain variable domain of TCR clone 304839 (TRAV8-3, TRAJ43)
CAVGPDNNNDMRF

SEQ ID NO: 609678 - protein, 14 aa, Homo sapiens
  CDR3 for beta chain variable domain of TCR clone 304839 (TRBV19, TRBJ2-1)
CARPTFVLSGEQFF

SEQ ID NO: 609679 - protein, 13 aa, Homo sapiens
  CDR3 for alpha chain variable domain of TCR clone 304840 (TRAV35, TRAJ33)
CAGRHDSNYQLIC

SEQ ID NO: 609680 - protein, 19 aa, Homo sapiens
  CDR3 for beta chain variable domain of TCR clone 304840 (TRBV6-3, TRBJ2-1)
CASSYSWTSGRATYNEQFF

SEQ ID NO: 609681 - protein, 14 aa, Homo sapiens
  CDR3 for alpha chain variable domain of TCR clone 304841 (TRAV8-2, TRAJ4)
CVVSPSGGYNKLIF

SEQ ID NO: 609682 - protein, 14 aa, Homo sapiens
  CDR3 for beta chain variable domain of TCR clone 304841 (TRBV20-1, TRBJ1-3)
CSASPTGAGNTIYF

SEQ ID NO: 609683 - protein, 16 aa, Homo sapiens
  CDR3 for alpha chain variable domain of TCR clone 304842 (TRAV12-3, TRAJ53)
CAMSPGSGGSSYKLTF

SEQ ID NO: 609684 - protein, 17 aa, Homo sapiens
  CDR3 for beta chain variable domain of TCR clone 304842 (TRBV11-2, TRBJ2-1)
CASSLYPPGVEYNEQFF

SEQ ID NO: 609685 - protein, 14 aa, Homo sapiens
  CDR3 for alpha chain variable domain of TCR clone 304843 (TRAV12-2, TRAJ44)
GAVNPAGTASKLTF

SEQ ID NO: 609686 - protein, 14 aa, Homo sapiens
  CDR3 for beta chain variable domain of TCR clone 304843 (TRBV6-1, TRBJ1-3)
CASVQGGGGNTIYF

SEQ ID NO: 609687 - protein, 17 aa, Homo sapiens
  CDR3 for alpha chain variable domain of TCR clone 304844 (TRAV27, TRAJ18)
CAGLHRVRGSTLGRLYF

SEQ ID NO: 609688 - protein, 14 aa, Homo sapiens
  CDR3 for beta chain variable domain of TCR clone 304844 (TRBV20-1, TRBJ1-5)
CSARGRGSNQPQHF

SEQ ID NO: 609689 - protein, 14 aa, Homo sapiens
  CDR3 for alpha chain variable domain of TCR clone 304845 (TRAV3, TRAJ37)
CAVRESGNTGKLIF

SEQ ID NO: 609690 - protein, 14 aa, Homo sapiens
  CDR3 for beta chain variable domain of TCR clone 304845 (TRBV2, TRBJ1-5)
CASSENRGGQPQHF

SEQ ID NO: 609691 - protein, 13 aa, Homo sapiens
  CDR3 for alpha chain variable domain of TCR clone 304846 (TRAV12-3, TRAJ21)
CAPGPHNFNKFYF

SEQ ID NO: 609692 - protein, 13 aa, Homo sapiens
  CDR3 for beta chain variable domain of TCR clone 304846 (TRBV4-2, TRBJ1-1)
CASSHAGNTEAFF

SEQ ID NO: 609693 - protein, 13 aa, Homo sapiens
  CDR3 for alpha chain variable domain of TCR clone 304847 (TRAV21, TRAJ20)
CAVGLRVDYKLSF

SEQ ID NO: 609694 - protein, 15 aa, Homo sapiens
  CDR3 for beta chain variable domain of TCR clone 304847 (TRBV10-3, TRBJ2-6)
CATPAAASGANVLTF

SEQ ID NO: 609695 - protein, 15 aa, Homo sapiens
  CDR3 for alpha chain variable domain of TCR clone 304848 (TRAV3, TRAJ20)
CAVRDIKLSDYKLSF

SEQ ID NO: 609696 - protein, 13 aa, Homo sapiens
  CDR3 for beta chain variable domain of TCR clone 304848 (TRBV28, TRBJ2-7)
CASTPGLAGEQYF

SEQ ID NO: 609697 - protein, 14 aa, Homo sapiens
  CDR3 for alpha chain variable domain of TCR clone 304849 (TRAV1-2, TRAJ16)
CAVNRFSDGQKLLF

SEQ ID NO: 609698 - protein, 15 aa, Homo sapiens
  CDR3 for beta chain variable domain of TCR clone 304849 (TRBV28, TRBJ1-3)
CVSGATGNSGNTIYF

SEQ ID NO: 609699 - protein, 16 aa, Homo sapiens
  CDR3 for alpha chain variable domain of TCR clone 304850 (TRAV2, TRAJ3)
CAVEASLYSSASKIIF

SEQ ID NO: 609700 - protein, 13 aa, Homo sapiens
  CDR3 for beta chain variable domain of TCR clone 304850 (TRBV29-1, TRBJ2-1)
CSVEGGRVNEQFF

SEQ ID NO: 609701 - protein, 14 aa, Homo sapiens
  CDR3 for alpha chain variable domain of TCR clone 304851 (TRAV13-1, TRAJ39)
CAASYNNAGNMLTF

SEQ ID NO: 609702 - protein, 13 aa, Homo sapiens
  CDR3 for beta chain variable domain of TCR clone 304851 (TRBV24-1, TRBJ1-4)
CATNNGRSETLFF

SEQ ID NO: 609703 - protein, 14 aa, Homo sapiens
  CDR3 for alpha chain variable domain of TCR clone 304852 (TRAV14/DV4, TRAJ38)
CAMRGAGNNRKLIW

SEQ ID NO: 609704 - protein, 12 aa, Homo sapiens
  CDR3 for beta chain variable domain of TCR clone 304852 (TRBV27, TRBJ2-1)
CSRTLGVGEQFF

SEQ ID NO: 609705 - protein, 14 aa, Homo sapiens
  CDR3 for alpha chain variable domain of TCR clone 304853 (TRAV3, TRAJ33)
CAVRDMDSNYQLIW

SEQ ID NO: 609706 - protein, 14 aa, Homo sapiens
  CDR3 for beta chain variable domain of TCR clone 304853 (TRBV7-3, TRBJ2-1)
CASSLAGGTNEQFF

SEQ ID NO: 609707 - protein, 15 aa, Homo sapiens
  CDR3 for alpha chain variable domain of TCR clone 304854 (TRAV17, TRAJ57)
CAKGPSQGGSEKRVF

SEQ ID NO: 609708 - protein, 16 aa, Homo sapiens
  CDR3 for beta chain variable domain of TCR clone 304854 (TRBV12-4, TRBJ1-5)
CASSRPVGGSNQPQHF

SEQ ID NO: 609709 - protein, 12 aa, Homo sapiens
  CDR3 for alpha chain variable domain of TCR clone 304855 (TRAV1-2, TRAJ42)
CVAGGSQGNLIF

SEQ ID NO: 609710 - protein, 12 aa, Homo sapiens
  CDR3 for beta chain variable domain of TCR clone 304855 (TRBV24-1, TRBJ1-1)
CAISDSDRGAFF

SEQ ID NO: 609711 - protein, 18 aa, Homo sapiens
  CDR3 for alpha chain variable domain of TCR clone 304856 (TRAV8-4, TRAJ52)
CAVTRANAGVTSYGKLTF

SEQ ID NO: 609712 - protein, 11 aa, Homo sapiens
  CDR3 for beta chain variable domain of TCR clone 304856 (TRBV19, TRBJ2-7)
CASGLSHEQYF

SEQ ID NO: 609713 - protein, 15 aa, Homo sapiens
  CDR3 for alpha chain variable domain of TCR clone 304857 (TRAV3, TRAJ20)
CAVRDSRSNDYKLSF

SEQ ID NO: 609714 - protein, 14 aa, Homo sapiens
  CDR3 for beta chain variable domain of TCR clone 304857 (TRBV20-1, TRBJ2-7)
CSARRGNGICEQYF

SEQ ID NO: 609715 - protein, 16 aa, Homo sapiens
  CDR3 for alpha chain variable domain of TCR clone 304858 (TRAV22, TRAJ45)
CAVERGKRGGADGLTF

SEQ ID NO: 609716 - protein, 12 aa, Homo sapiens
  CDR3 for beta chain variable domain of TCR clone 304858 (TRBV11-2, TRBJ2-2)
CASSLGGGELLF

SEQ ID NO: 609717 - protein, 11 aa, Homo sapiens
  CDR3 for alpha chain variable domain of TCR clone 304859 (TRAV3, TRAJ21)
CAVRDRSASTN

SEQ ID NO: 609718 - protein, 16 aa, Homo sapiens
  CDR3 for beta chain variable domain of TCR clone 304859 (TRBV7-2, TRBJ2-5)
CASSLESAGGRETQYF

SEQ ID NO: 609719 - protein, 15 aa, Homo sapiens
  CDR3 for alpha chain variable domain of TCR clone 304860 (TRAV8-3, TRAJ11)
CAVGLLNSGYSTLTL

SEQ ID NO: 609720 - protein, 16 aa, Homo sapiens
  CDR3 for beta chain variable domain of TCR clone 304860 (TRBV6-6, TRBJ2-1)
RASSYSFSGSYNEQFF

SEQ ID NO: 609721 - protein, 11 aa, Homo sapiens
  CDR3 for alpha chain variable domain of TCR clone 304861 (TRAV22, TRAJ30)
CAGNRDDKIIF

SEQ ID NO: 609722 - protein, 14 aa, Homo sapiens
  CDR3 for beta chain variable domain of TCR clone 304861 (TRBV19, TRBJ2-1)
CASPTFVLSGEQFF

SEQ ID NO: 609723 - protein, 17 aa, Homo sapiens
  CDR3 for alpha chain variable domain of TCR clone 304862 (TRAV4, TRAJ42)
CLMGVLNYGGSQGNLIF

SEQ ID NO: 609724 - protein, 12 aa, Homo sapiens
  CDR3 for beta chain variable domain of TCR clone 304862 (TRBV20-1, TRBJ2-1)
CSAQYTYNEQFF

SEQ ID NO: 609725 - protein, 13 aa, Homo sapiens
  CDR3 for alpha chain variable domain of TCR clone 304863 (TRAV23/DV6, TRAJ30)
CAASNSGDDKIIF

SEQ ID NO: 609726 - protein, 16 aa, Homo sapiens
  CDR3 for beta chain variable domain of TCR clone 304863 (TRBV28, TRBJ2-7)
CASSSGTSGRGYEQYF

SEQ ID NO: 609727 - protein, 14 aa, Homo sapiens
  CDR3 for alpha chain variable domain of TCR clone 304864 (TRAV21, TRAJ35)
CAVMLIGFGNVLHC

SEQ ID NO: 609728 - protein, 12 aa, Homo sapiens
  CDR3 for beta chain variable domain of TCR clone 304864 (TRBV7-9, TRBJ2-7)
CASSIKREEQYF

SEQ ID NO: 609729 - protein, 14 aa, Homo sapiens
  CDR3 for alpha chain variable domain of TCR clone 304865 (TRAV16, TRAJ33)
CALSAMDSNYQLIW

SEQ ID NO: 609730 - protein, 14 aa, Homo sapiens
  CDR3 for beta chain variable domain of TCR clone 304865 (TRBV5-4, TRBJ1-1)
CANSLDSRRDEAFF

SEQ ID NO: 609731 - protein, 13 aa, Homo sapiens
  CDR3 for alpha chain variable domain of TCR clone 304866 (TRAV2, TRAJ26)
CAVVGNYGQNFVF

SEQ ID NO: 609732 - protein, 15 aa, Homo sapiens
  CDR3 for beta chain variable domain of TCR clone 304866 (TRBV13, TRBJ2-7)
CASSPGVRGAYEQYF

SEQ ID NO: 609733 - protein, 14 aa, Homo sapiens
  CDR3 for alpha chain variable domain of TCR clone 304867 (TRAV1-2, TRAJ16)
CAVNRFSDGQKLLF

SEQ ID NO: 609734 - protein, 14 aa, Homo sapiens
  CDR3 for beta chain variable domain of TCR clone 304867 (TRBV19, TRBJ2-1)
CASPTFVLSGEQLF

SEQ ID NO: 609735 - protein, 15 aa, Homo sapiens
  CDR3 for alpha chain variable domain of TCR clone 304868 (TRAV29/DV5, TRAJ42)
CAAKTDGGSQGNLIF

SEQ ID NO: 609736 - protein, 15 aa, Homo sapiens
  CDR3 for beta chain variable domain of TCR clone 304868 (TRBV5-1, TRBJ2-2)
CASSSQGGNTGELVF

SEQ ID NO: 609737 - protein, 15 aa, Homo sapiens
  CDR3 for alpha chain variable domain of TCR clone 304869 (TRAV38-1, TRAJ37)
CAFIFGSGNTGKLIF

SEQ ID NO: 609738 - protein, 15 aa, Homo sapiens
  CDR3 for beta chain variable domain of TCR clone 304869 (TRBV7-2, TRBJ2-7)
CASSWGQGAIYEQYF

SEQ ID NO: 609739 - protein, 14 aa, Homo sapiens
  CDR3 for alpha chain variable domain of TCR clone 304870 (TRAV35, TRAJ22)
CAGLRPGSARQLTF

SEQ ID NO: 609740 - protein, 15 aa, Homo sapiens
  CDR3 for beta chain variable domain of TCR clone 304870 (TRBV20-1, TRBJ2-7)
CSARDQVSGTDEQYF

SEQ ID NO: 609741 - protein, 16 aa, Homo sapiens
  CDR3 for alpha chain variable domain of TCR clone 304871 (TRAV13-1, TRAJ18)
CAASRMRGSPLGRLYF

SEQ ID NO: 609742 - protein, 16 aa, Homo sapiens
  CDR3 for beta chain variable domain of TCR clone 304871 (TRBV27, TRBJ1-1)
CASSSRGRTGYTEAFF

SEQ ID NO: 609743 - protein, 16 aa, Homo sapiens
  CDR3 for alpha chain variable domain of TCR clone 304872 (TRAV17, TRAJ22)
CATGPVSSGSARQLTF

SEQ ID NO: 609744 - protein, 13 aa, Homo sapiens
  CDR3 for beta chain variable domain of TCR clone 304872 (TRBV11-2, TRBJ2-1)
CASSLGLAGGRFF

SEQ ID NO: 609745 - protein, 16 aa, Homo sapiens
  CDR3 for alpha chain variable domain of TCR clone 304873 (TRAV12-2, TRAJ52)
CRLSNAGGTSYGKLTF

SEQ ID NO: 609746 - protein, 14 aa, Homo sapiens
  CDR3 for beta chain variable domain of TCR clone 304873 (TRBV7-6, TRBJ2-3)
CASSVGTVTDTQYF

SEQ ID NO: 609747 - protein, 16 aa, Homo sapiens
  CDR3 for alpha chain variable domain of TCR clone 304874 (TRAV4, TRAJ18)
CCVLLIGGSTLGRLYF

SEQ ID NO: 609748 - protein, 13 aa, Homo sapiens
  CDR3 for beta chain variable domain of TCR clone 304874 (TRBV12-4, TRBJ1-3)
CASSLASGNTIYF

SEQ ID NO: 609749 - protein, 16 aa, Homo sapiens
  CDR3 for alpha chain variable domain of TCR clone 304875 (TRAV21, TRAJ17)
CAVRPGEEAAGNKLTF

SEQ ID NO: 609750 - protein, 18 aa, Homo sapiens
  CDR3 for beta chain variable domain of TCR clone 304875 (TRBV25-1, TRBJ1-2)
CASSGLQNGQGLIFGDTF

SEQ ID NO: 609751 - protein, 11 aa, Homo sapiens
  CDR3 for alpha chain variable domain of TCR clone 304876 (TRAV21, TRAJ48)
CAVDGNEKLTF

SEQ ID NO: 609752 - protein, 16 aa, Homo sapiens
  CDR3 for beta chain variable domain of TCR clone 304876 (TRBV7-2, TRBJ2-3)
CASSLVALYSTDTQYF

SEQ ID NO: 609753 - protein, 19 aa, Homo sapiens
  CDR3 for alpha chain variable domain of TCR clone 304877 (TRAV26-1, TRAJ52)
CIVRAHRNAGGTSYGKLTF

SEQ ID NO: 609754 - protein, 16 aa, Homo sapiens
  CDR3 for beta chain variable domain of TCR clone 304877 (TRBV7-3, TRBJ2-1)
CASSLEGYRSYNEQFF

SEQ ID NO: 609755 - protein, 14 aa, Homo sapiens
  CDR3 for alpha chain variable domain of TCR clone 304878 (TRAV8-3, TRAJ27)
CAGGGNSNAGKSTF

SEQ ID NO: 609756 - protein, 15 aa, Homo sapiens
  CDR3 for beta chain variable domain of TCR clone 304878 (TRBV11-3, TRBJ2-5)
CASSLRGSVQETQYF

SEQ ID NO: 609757 - protein, 15 aa, Homo sapiens
  CDR3 for alpha chain variable domain of TCR clone 304879 (TRAV21, TRAJ24)
CATRSSTDSWGKLQF

SEQ ID NO: 609758 - protein, 13 aa, Homo sapiens
  CDR3 for beta chain variable domain of TCR clone 304879 (TRBV11-2, TRBJ2-5)
CASSSTGDETQYF

SEQ ID NO: 609759 - protein, 11 aa, Homo sapiens
  CDR3 for alpha chain variable domain of TCR clone 304880 (TRAV3, TRAJ21)
CAVGNFDKFYF

SEQ ID NO: 609760 - protein, 16 aa, Homo sapiens
  CDR3 for beta chain variable domain of TCR clone 304880 (TRBV19, TRBJ2-1)
CASSKAGPSPYNEQFF

SEQ ID NO: 609761 - protein, 13 aa, Homo sapiens
  CDR3 for alpha chain variable domain of TCR clone 304881 (TRAV13-1, TRAJ9)
CAASGTGGFKTIF

SEQ ID NO: 609762 - protein, 12 aa, Homo sapiens
  CDR3 for beta chain variable domain of TCR clone 304881 (TRBV2, TRBJ2-1)
CAKREGYNEQFF

SEQ ID NO: 609763 - protein, 15 aa, Homo sapiens
  CDR3 for alpha chain variable domain of TCR clone 304882 (TRAV23/DV6, TRAJ28)
CAALLAYSGAGRYQL

SEQ ID NO: 609764 - protein, 15 aa, Homo sapiens
  CDR3 for beta chain variable domain of TCR clone 304882 (TRBV7-2, TRBJ2-1)
CASSLVAGRYNEQFC

SEQ ID NO: 609765 - protein, 14 aa, Homo sapiens
  CDR3 for alpha chain variable domain of TCR clone 304883 (TRAV12-2, TRAJ48)
CAVNAFFGNEKLTF

SEQ ID NO: 609766 - protein, 13 aa, Homo sapiens
  CDR3 for beta chain variable domain of TCR clone 304883 (TRBV28, TRBJ2-7)
CAGAQKGLDEQYF

SEQ ID NO: 609767 - protein, 14 aa, Homo sapiens
  CDR3 for alpha chain variable domain of TCR clone 304884 (TRAV1-2, TRAJ8)
CAVREDTGFQKLLF

SEQ ID NO: 609768 - protein, 14 aa, Homo sapiens
  CDR3 for beta chain variable domain of TCR clone 304884 (TRBV7-2, TRBJ2-7)
CASRSQGAAYEQYF

SEQ ID NO: 609769 - protein, 14 aa, Homo sapiens
  CDR3 for alpha chain variable domain of TCR clone 304885 (TRAV12-2, TRAJ17)
CAVLFKAAGNKLTF

SEQ ID NO: 609770 - protein, 14 aa, Homo sapiens
  CDR3 for beta chain variable domain of TCR clone 304885 (TRBV6-3, TRBJ2-7)
CASSYSVRVYEQYF

SEQ ID NO: 609771 - protein, 18 aa, Homo sapiens
  CDR3 for alpha chain variable domain of TCR clone 304886 (TRAV13-1, TRAJ52)
CAAKNPNAGGTSSGKLTF

SEQ ID NO: 609772 - protein, 15 aa, Homo sapiens
  CDR3 for beta chain variable domain of TCR clone 304886 (TRBV28, TRBJ2-1)
CASSIIAGGRSEQFF

SEQ ID NO: 609773 - protein, 13 aa, Homo sapiens
  CDR3 for alpha chain variable domain of TCR clone 304887 (TRAV26-2, TRAJ43)
CILRAVNNNNMRF

SEQ ID NO: 609774 - protein, 17 aa, Homo sapiens
  CDR3 for beta chain variable domain of TCR clone 304887 (TRBV20-1, TRBJ2-2)
CSASGSGQGGLTGELFF

SEQ ID NO: 609775 - protein, 16 aa, Homo sapiens
  CDR3 for alpha chain variable domain of TCR clone 304888 (TRAV16, TRAJ42)
CALSGYYGGSQGNLIF

SEQ ID NO: 609776 - protein, 14 aa, Homo sapiens
  CDR3 for beta chain variable domain of TCR clone 304888 (TRBV3-1, TRBJ2-5)
CAGSQAVRQETQYF

SEQ ID NO: 609777 - protein, 15 aa, Homo sapiens
  CDR3 for alpha chain variable domain of TCR clone 304889 (TRAV8-2, TRAJ15)
CVVSDRYQAGTALIF

SEQ ID NO: 609778 - protein, 14 aa, Homo sapiens
  CDR3 for beta chain variable domain of TCR clone 304889 (TRBV25-1, TRBJ1-1)
CASTHLGGNTEAFF

SEQ ID NO: 609779 - protein, 15 aa, Homo sapiens
  CDR3 for alpha chain variable domain of TCR clone 304890 (TRAV13-1, TRAJ17)
CAASIERAAGNKLTF

SEQ ID NO: 609780 - protein, 14 aa, Homo sapiens
  CDR3 for beta chain variable domain of TCR clone 304890 (TRBV19, TRBJ2-7)
CASTVQGRPYEQYF

SEQ ID NO: 609781 - protein, 14 aa, Homo sapiens
  CDR3 for alpha chain variable domain of TCR clone 304891 (TRAV3, TRAJ27)
CDVRDDTNAGKSTF

SEQ ID NO: 609782 - protein, 15 aa, Homo sapiens
  CDR3 for beta chain variable domain of TCR clone 304891 (TRBV7-7, TRBJ2-2)
CATSKLAKNTGELFF

SEQ ID NO: 609783 - protein, 15 aa, Homo sapiens
  CDR3 for alpha chain variable domain of TCR clone 304892 (TRAV3, TRAJ5)
CAVRDLDTGRRALTF

SEQ ID NO: 609784 - protein, 16 aa, Homo sapiens
  CDR3 for beta chain variable domain of TCR clone 304892 (TRBV19, TRBJ2-1)
CASSMGGGSSYNEQFF

SEQ ID NO: 609785 - protein, 14 aa, Homo sapiens
  CDR3 for alpha chain variable domain of TCR clone 304893 (TRAV1-2, TRAJ8)
CAVREDTGFQKLVF

SEQ ID NO: 609786 - protein, 15 aa, Homo sapiens
  CDR3 for beta chain variable domain of TCR clone 304893 (TRBV20-1, TRBJ2-7)
CSASDRVSGMDEQYF

SEQ ID NO: 609787 - protein, 15 aa, Homo sapiens
  CDR3 for alpha chain variable domain of TCR clone 304894 (TRAV3, TRAJ9)
CAVRDINTGGFKTIF

SEQ ID NO: 609788 - protein, 12 aa, Homo sapiens
  CDR3 for beta chain variable domain of TCR clone 304894 (TRBV11-2, TRBJ2-2)
CASSLGGGELFF

SEQ ID NO: 609789 - protein, 16 aa, Homo sapiens
  CDR3 for alpha chain variable domain of TCR clone 304895 (TRAV23/DV6, TRAJ9)
CAASIGGNTGGFKTIF

SEQ ID NO: 609790 - protein, 16 aa, Homo sapiens
  CDR3 for beta chain variable domain of TCR clone 304895 (TRBV19, TRBJ2-2)
CASRSPGTGATGELFF

SEQ ID NO: 609791 - protein, 15 aa, Homo sapiens
  CDR3 for alpha chain variable domain of TCR clone 304896 (TRAV13-1, TRAJ6)
CAAIHPSGGSYITTF

SEQ ID NO: 609792 - protein, 14 aa, Homo sapiens
  CDR3 for beta chain variable domain of TCR clone 304896 (TRBV7-9, TRBJ2-2)
CASGLAINTGELFF

SEQ ID NO: 609793 - protein, 14 aa, Homo sapiens
  CDR3 for alpha chain variable domain of TCR clone 304897 (TRAV12-2, TRAJ13)
CAVKKTGGYQKVTF

SEQ ID NO: 609794 - protein, 13 aa, Homo sapiens
  CDR3 for beta chain variable domain of TCR clone 304897 (TRBV5-4, TRBJ1-1)
CASSFQVNTEAFF

SEQ ID NO: 609795 - protein, 20 aa, Homo sapiens
  CDR3 for alpha chain variable domain of TCR clone 304898 (TRAV12-3, TRAJ41)
SLFIRDSQPSDSATPEALNF

SEQ ID NO: 609796 - protein, 12 aa, Homo sapiens
  CDR3 for beta chain variable domain of TCR clone 304898 (TRBV11-2, TRBJ2-2)
CASSLGGGELFF

SEQ ID NO: 609797 - protein, 23 aa, Homo sapiens
  CDR3 for alpha chain variable domain of TCR clone 304899 (TRAV21, TRAJ38)
CAVANAGNNHIQNPDPAVYQLRD

SEQ ID NO: 609798 - protein, 14 aa, Homo sapiens
  CDR3 for beta chain variable domain of TCR clone 304899 (TRBV28, TRBJ2-6)
CASRHPSGANVLTF

SEQ ID NO: 609799 - protein, 11 aa, Homo sapiens
  CDR3 for alpha chain variable domain of TCR clone 304900 (TRAV1-1, TRAJ23)
CAVRQGGKLIF

SEQ ID NO: 609800 - protein, 12 aa, Homo sapiens
  CDR3 for beta chain variable domain of TCR clone 304900 (TRBV5-1, TRBJ2-3)
CASSLRGVTQYF

SEQ ID NO: 609801 - protein, 10 aa, Homo sapiens
  CDR3 for alpha chain variable domain of TCR clone 304901 (TRAV8-4, TRAJ39)
CAVSGNMLTF

SEQ ID NO: 609802 - protein, 12 aa, Homo sapiens
  CDR3 for beta chain variable domain of TCR clone 304901 (TRBV11-2, TRBJ2-2)
CASSLPTGELFF

SEQ ID NO: 609803 - protein, 13 aa, Homo sapiens
  CDR3 for alpha chain variable domain of TCR clone 304902 (TRAV12-1, TRAJ26)
CVVRRNYGQNFVF

SEQ ID NO: 609804 - protein, 16 aa, Homo sapiens
  CDR3 for beta chain variable domain of TCR clone 304902 (TRBV7-9, TRBJ2-1)
CASSDVAGGSYNEQFF

SEQ ID NO: 609805 - protein, 16 aa, Homo sapiens
  CDR3 for alpha chain variable domain of TCR clone 304903 (TRAV17, TRAJ17)
CATALQEEAAGNKLTF

SEQ ID NO: 609806 - protein, 12 aa, Homo sapiens
  CDR3 for beta chain variable domain of TCR clone 304903 (TRBV4-2, TRBJ2-5)
RASGGAQETQYF

SEQ ID NO: 609807 - protein, 10 aa, Homo sapiens
  CDR3 for alpha chain variable domain of TCR clone 304904 (TRAV25, TRAJ53)
CAGSNYKLTF

SEQ ID NO: 609808 - protein, 12 aa, Homo sapiens
  CDR3 for beta chain variable domain of TCR clone 304904 (TRBV14, TRBJ2-7)
CASSSLKGEQYF

SEQ ID NO: 609809 - protein, 14 aa, Homo sapiens
  CDR3 for alpha chain variable domain of TCR clone 304905 (TRAV13-2, TRAJ4)
CAEKGPKGYNKLIF

SEQ ID NO: 609810 - protein, 15 aa, Homo sapiens
  CDR3 for beta chain variable domain of TCR clone 304905 (TRBV18, TRBJ2-6)
CASSPSYAGANVLTF

SEQ ID NO: 609811 - protein, 11 aa, Homo sapiens
  CDR3 for alpha chain variable domain of TCR clone 304906 (TRAV2, TRAJ13)
CTSGGYQKVTF

SEQ ID NO: 609812 - protein, 18 aa, Homo sapiens
  CDR3 for beta chain variable domain of TCR clone 304906 (TRBV11-2, TRBJ2-3)
CASSLGGASRGAPNTQYF

SEQ ID NO: 609813 - protein, 10 aa, Homo sapiens
  CDR3 for alpha chain variable domain of TCR clone 304907 (TRAV30, TRAJ48)
CGIGNGKLTF

SEQ ID NO: 609814 - protein, 14 aa, Homo sapiens
  CDR3 for beta chain variable domain of TCR clone 304907 (TRBV7-6, TRBJ2-3)
CASSVAEGTDTQYF

SEQ ID NO: 609815 - protein, 17 aa, Homo sapiens
  CDR3 for alpha chain variable domain of TCR clone 304908 (TRAV3, TRAJ6)
CAVRDGPRAGGSYIPTF

SEQ ID NO: 609816 - protein, 15 aa, Homo sapiens
  CDR3 for beta chain variable domain of TCR clone 304908 (TRBV15, TRBJ1-3)
CATSRDRGPGNTIYF

SEQ ID NO: 609817 - protein, 13 aa, Homo sapiens
  CDR3 for alpha chain variable domain of TCR clone 304909 (TRAV12-2, TRAJ49)
CAVNMRTGDQFYF

SEQ ID NO: 609818 - protein, 11 aa, Homo sapiens
  CDR3 for beta chain variable domain of TCR clone 304909 (TRBV5-5, TRBJ1-1)
CASSLGVEAFF

SEQ ID NO: 609819 - protein, 14 aa, Homo sapiens
  CDR3 for alpha chain variable domain of TCR clone 304910 (TRAV13-2, TRAJ15)
CAENPNQAGTALIF

SEQ ID NO: 609820 - protein, 16 aa, Homo sapiens
  CDR3 for beta chain variable domain of TCR clone 304910 (TRBV12-4, TRBJ1-2)
CASSTTATGKTRGYTC

SEQ ID NO: 609821 - protein, 19 aa, Homo sapiens
  CDR3 for alpha chain variable domain of TCR clone 304911 (TRAV38-1, TRAJ53)
CAFMKHGRESGDSNYKLTF

SEQ ID NO: 609822 - protein, 13 aa, Homo sapiens
  CDR3 for beta chain variable domain of TCR clone 304911 (TRBV19, TRBJ2-7)
CASSPRQSYEQYF

SEQ ID NO: 609823 - protein, 14 aa, Homo sapiens
  CDR3 for alpha chain variable domain of TCR clone 304912 (TRAV12-3, TRAJ42)
CAMNYGGSQGSLIF

SEQ ID NO: 609824 - protein, 15 aa, Homo sapiens
  CDR3 for beta chain variable domain of TCR clone 304912 (TRBV7-9, TRBJ1-6)
CASSSPGRGNSPLHF

SEQ ID NO: 609825 - protein, 16 aa, Homo sapiens
  CDR3 for alpha chain variable domain of TCR clone 304913 (TRAV12-2, TRAJ10)
CAVNRVLTGGGNKLTS

SEQ ID NO: 609826 - protein, 12 aa, Homo sapiens
  CDR3 for beta chain variable domain of TCR clone 304913 (TRBV28, TRBJ2-7)
CASSVSSYEQYF

SEQ ID NO: 609827 - protein, 17 aa, Homo sapiens
  CDR3 for alpha chain variable domain of TCR clone 304914 (TRAV13-1, TRAJ28)
CAASPPYSGAGSYQFTF

SEQ ID NO: 609828 - protein, 12 aa, Homo sapiens
  CDR3 for beta chain variable domain of TCR clone 304914 (TRBV11-2, TRBJ2-2)
CASSLPTGELFF

SEQ ID NO: 609829 - protein, 15 aa, Homo sapiens
  CDR3 for alpha chain variable domain of TCR clone 304915 (TRAV8-2, TRAJ40)
CVVSDRGSGTYKYIF

SEQ ID NO: 609830 - protein, 13 aa, Homo sapiens
  CDR3 for beta chain variable domain of TCR clone 304915 (TRBV4-1, TRBJ2-1)
CASSQAGGDEQFF

SEQ ID NO: 609831 - protein, 12 aa, Homo sapiens
  CDR3 for alpha chain variable domain of TCR clone 304916 (TRAV12-1, TRAJ20)
CAVNPDDYKLSF

SEQ ID NO: 609832 - protein, 14 aa, Homo sapiens
  CDR3 for beta chain variable domain of TCR clone 304916 (TRBV5-1, TRBJ1-1)
CASSKPGPNTEAFF

SEQ ID NO: 609833 - protein, 16 aa, Homo sapiens
  CDR3 for alpha chain variable domain of TCR clone 304917 (TRAV8-6, TRAJ28)
CALTSKPGAGSYQLTF

SEQ ID NO: 609834 - protein, 16 aa, Homo sapiens
  CDR3 for beta chain variable domain of TCR clone 304917 (TRBV12-4, TRBJ2-5)
CASSWRPSGDLETQYF

SEQ ID NO: 609835 - protein, 13 aa, Homo sapiens
  CDR3 for alpha chain variable domain of TCR clone 304918 (TRAV1-2, TRAJ31)
CAVRPNNNARLMF

SEQ ID NO: 609836 - protein, 14 aa, Homo sapiens
  CDR3 for beta chain variable domain of TCR clone 304918 (TRBV11-2, TRBJ2-1)
CASSLAGPYNEQFF

SEQ ID NO: 609837 - protein, 14 aa, Homo sapiens
  CDR3 for alpha chain variable domain of TCR clone 304919 (TRAV9-2, TRAJ36)
CALHWRTGANDLFF

SEQ ID NO: 609838 - protein, 14 aa, Homo sapiens
  CDR3 for beta chain variable domain of TCR clone 304919 (TRBV2, TRBJ1-2)
CASSELQVNYGYTF

SEQ ID NO: 609839 - protein, 23 aa, Homo sapiens
  CDR3 for alpha chain variable domain of TCR clone 304920 (TRAV26-1, )
CIADNACNNHIQNPDPAVYQLRD

SEQ ID NO: 609840 - protein, 14 aa, Homo sapiens
  CDR3 for beta chain variable domain of TCR clone 304920 (TRBV7-3, TRBJ1-1)
CASSLKGGNTEAFF

SEQ ID NO: 609841 - protein, 14 aa, Homo sapiens
  CDR3 for alpha chain variable domain of TCR clone 304921 (TRAV17, TRAJ40)
CATALTSGTYKYIF

SEQ ID NO: 609842 - protein, 13 aa, Homo sapiens
  CDR3 for beta chain variable domain of TCR clone 304921 (TRBV27, TRBJ2-1)
CASSPGSYNEQFF

SEQ ID NO: 609843 - protein, 13 aa, Homo sapiens
  CDR3 for alpha chain variable domain of TCR clone 304922 (TRAV9-2, TRAJ12)
CARGEDSSYKLIF

SEQ ID NO: 609844 - protein, 14 aa, Homo sapiens
  CDR3 for beta chain variable domain of TCR clone 304922 (TRBV5-7, TRBJ1-2)
CASSLVRGDYGYTF

SEQ ID NO: 609845 - protein, 14 aa, Homo sapiens
  CDR3 for alpha chain variable domain of TCR clone 304923 (TRAV8-3, TRAJ26)
CAVAPGNYGQNFVF

SEQ ID NO: 609846 - protein, 15 aa, Homo sapiens
  CDR3 for beta chain variable domain of TCR clone 304923 (TRBV28, TRBJ2-1)
CASSIIAGGRSEQFF

SEQ ID NO: 609847 - protein, 18 aa, Homo sapiens
  CDR3 for alpha chain variable domain of TCR clone 304924 (TRAV12-3, TRAJ52)
CAMSVGGAGGTSYGKLTF

SEQ ID NO: 609848 - protein, 14 aa, Homo sapiens
  CDR3 for beta chain variable domain of TCR clone 304924 (TRBV7-2, TRBJ2-7)
WASRSQGAAYEQYF

SEQ ID NO: 609849 - protein, 12 aa, Homo sapiens
  CDR3 for alpha chain variable domain of TCR clone 304925 (TRAV3, TRAJ43)
CCERGRNNDMRF

SEQ ID NO: 609850 - protein, 13 aa, Homo sapiens
  CDR3 for beta chain variable domain of TCR clone 304925 (TRBV10-2, TRBJ1-1)
CASNDQMNTEAFF

SEQ ID NO: 609851 - protein, 11 aa, Homo sapiens
  CDR3 for alpha chain variable domain of TCR clone 304926 (TRAV12-1, TRAJ30)
CVVDGQDKIIL

SEQ ID NO: 609852 - protein, 12 aa, Homo sapiens
  CDR3 for beta chain variable domain of TCR clone 304926 (TRBV29-1, TRBJ2-3)
CSVTGGADTQYF

SEQ ID NO: 609853 - protein, 17 aa, Homo sapiens
  CDR3 for alpha chain variable domain of TCR clone 304927 (TRAV3, TRAJ42)
CAVRDRDYGGSQGDLIF

SEQ ID NO: 609854 - protein, 13 aa, Homo sapiens
  CDR3 for beta chain variable domain of TCR clone 304927 (TRBV7-9, TRBJ1-2)
CASSLKQNYGYTF

SEQ ID NO: 609855 - protein, 17 aa, Homo sapiens
  CDR3 for alpha chain variable domain of TCR clone 304928 (TRAV26-2, TRAJ42)
CILRDVGYGGSQGNLIF

SEQ ID NO: 609856 - protein, 11 aa, Homo sapiens
  CDR3 for beta chain variable domain of TCR clone 304928 (TRBV29-1, TRBJ2-5)
CSEDRTGTQYF

SEQ ID NO: 609857 - protein, 20 aa, Homo sapiens
  CDR3 for alpha chain variable domain of TCR clone 304929 (TRAV12-3, TRAJ41)
SLFIRDSQPSDSATPEALNF

SEQ ID NO: 609858 - protein, 14 aa, Homo sapiens
  CDR3 for beta chain variable domain of TCR clone 304929 (TRBV19, TRBJ2-5)
CASSMTGQQETQYF

SEQ ID NO: 609859 - protein, 12 aa, Homo sapiens
  CDR3 for alpha chain variable domain of TCR clone 304930 (TRAV27, TRAJ8)
CRRPTGFQKLVF

SEQ ID NO: 609860 - protein, 15 aa, Homo sapiens
  CDR3 for beta chain variable domain of TCR clone 304930 (TRBV6-1, TRBJ2-7)
CASSESMGDFYEQYF

SEQ ID NO: 609861 - protein, 15 aa, Homo sapiens
  CDR3 for alpha chain variable domain of TCR clone 304931 (TRAV35, TRAJ20)
CAGQLVGSNDYKLSF

SEQ ID NO: 609862 - protein, 17 aa, Homo sapiens
  CDR3 for beta chain variable domain of TCR clone 304931 (TRBV11-2, TRBJ2-1)
CASSLYPPGVEYNEQFF

SEQ ID NO: 609863 - protein, 15 aa, Homo sapiens
  CDR3 for alpha chain variable domain of TCR clone 304932 (TRAV25, TRAJ53)
CAATGGGGSNYKLTF

SEQ ID NO: 609864 - protein, 13 aa, Homo sapiens
  CDR3 for beta chain variable domain of TCR clone 304932 (TRBV7-3, TRBJ1-1)
CASSQDWGAEVFF

SEQ ID NO: 609865 - protein, 14 aa, Homo sapiens
  CDR3 for alpha chain variable domain of TCR clone 304933 (TRAV2, TRAJ9)
CAVEDRSGGFKTIF

SEQ ID NO: 609866 - protein, 13 aa, Homo sapiens
  CDR3 for beta chain variable domain of TCR clone 304933 (TRBV6-4, TRBJ1-5)
CASSADLNQPQHF

SEQ ID NO: 609867 - protein, 13 aa, Homo sapiens
  CDR3 for alpha chain variable domain of TCR clone 304934 (TRAV8-3, TRAJ28)
CALGAVGSYQLTF

SEQ ID NO: 609868 - protein, 15 aa, Homo sapiens
  CDR3 for beta chain variable domain of TCR clone 304934 (TRBV7-9, TRBJ1-5)
CASSQGHRPNQPQHF

SEQ ID NO: 609869 - protein, 16 aa, Homo sapiens
  CDR3 for alpha chain variable domain of TCR clone 304935 (TRAV3, TRAJ37)
CAVRPHGPGNTGKLIF

SEQ ID NO: 609870 - protein, 15 aa, Homo sapiens
  CDR3 for beta chain variable domain of TCR clone 304935 (TRBV5-5, TRBJ2-7)
CASSLAAPLSYEQYF

SEQ ID NO: 609871 - protein, 17 aa, Homo sapiens
  CDR3 for alpha chain variable domain of TCR clone 304936 (TRAV3, TRAJ6)
CAVRDGPRAGGSDIPTF

SEQ ID NO: 609872 - protein, 20 aa, Homo sapiens
  CDR3 for beta chain variable domain of TCR clone 304936 (TRBV11-3, TRBJ2-3)
LGTRPCISVPAAPITDTQYF

SEQ ID NO: 609873 - protein, 17 aa, Homo sapiens
  CDR3 for alpha chain variable domain of TCR clone 304937 (TRAV14/DV4, TRAJ28)
CAMREVSSGAGSYQLTF

SEQ ID NO: 609874 - protein, 11 aa, Homo sapiens
  CDR3 for beta chain variable domain of TCR clone 304937 (TRBV6-3, TRBJ2-3)
CATGQADTQYF

SEQ ID NO: 609875 - protein, 14 aa, Homo sapiens
  CDR3 for alpha chain variable domain of TCR clone 304938 (TRAV13-2, TRAJ29)
CAENIEPGNTPLFF

SEQ ID NO: 609876 - protein, 14 aa, Homo sapiens
  CDR3 for beta chain variable domain of TCR clone 304938 (TRBV19, TRBJ2-2)
CATTGHANTGELFF

SEQ ID NO: 609877 - protein, 14 aa, Homo sapiens
  CDR3 for alpha chain variable domain of TCR clone 304939 (TRAV34, TRAJ44)
CGADGTGTASKLTF

SEQ ID NO: 609878 - protein, 14 aa, Homo sapiens
  CDR3 for beta chain variable domain of TCR clone 304939 (TRBV7-8, TRBJ2-3)
CASSLEAGTDTQYF

SEQ ID NO: 609879 - protein, 11 aa, Homo sapiens
  CDR3 for alpha chain variable domain of TCR clone 304940 (TRAV3, TRAJ13)
CAVSSYQKVTF

SEQ ID NO: 609880 - protein, 15 aa, Homo sapiens
  CDR3 for beta chain variable domain of TCR clone 304940 (TRBV7-9, TRBJ2-7)
CASSSSGLAVYEQYF

SEQ ID NO: 609881 - protein, 13 aa, Homo sapiens
  CDR3 for alpha chain variable domain of TCR clone 304941 (TRAV12-2, TRAJ40)
CAVAPSGTYKYIF

SEQ ID NO: 609882 - protein, 13 aa, Homo sapiens
  CDR3 for beta chain variable domain of TCR clone 304941 (TRBV11-3, TRBJ2-5)
CASSSVLQETQYF

SEQ ID NO: 609883 - protein, 12 aa, Homo sapiens
  CDR3 for alpha chain variable domain of TCR clone 304942 (TRAV8-3, TRAJ26)
CAGDNYGQNFAF

SEQ ID NO: 609884 - protein, 20 aa, Homo sapiens
  CDR3 for beta chain variable domain of TCR clone 304942 (TRBV28, TRBJ2-1)
CASTPIGRSPGLAGGNEQFF

SEQ ID NO: 609885 - protein, 13 aa, Homo sapiens
  CDR3 for alpha chain variable domain of TCR clone 304943 (TRAV14/DV4, TRAJ20)
CAMREPNDYKLSF

SEQ ID NO: 609886 - protein, 15 aa, Homo sapiens
  CDR3 for beta chain variable domain of TCR clone 304943 (TRBV7-9, TRBJ1-1)
CASSRPGTANTEAFF

SEQ ID NO: 609887 - protein, 15 aa, Homo sapiens
  CDR3 for alpha chain variable domain of TCR clone 304944 (TRAV3, TRAJ22)
CAVRDRGGSARQLTF

SEQ ID NO: 609888 - protein, 15 aa, Homo sapiens
  CDR3 for beta chain variable domain of TCR clone 304944 (TRBV15, TRBJ1-4)
CATSRDMGSYEKLFF

SEQ ID NO: 609889 - protein, 23 aa, Homo sapiens
  CDR3 for alpha chain variable domain of TCR clone 304945 (TRAV6, TRAJ34)
ISQPPSLQTQLPTSVPYTDKLIF

SEQ ID NO: 609890 - protein, 15 aa, Homo sapiens
  CDR3 for beta chain variable domain of TCR clone 304945 (TRBV5-5, TRBJ2-2)
CASSRQASGAGELFF

SEQ ID NO: 609891 - protein, 15 aa, Homo sapiens
  CDR3 for alpha chain variable domain of TCR clone 304946 (TRAV12-1, TRAJ45)
CVVLSGGGGADGLTF

SEQ ID NO: 609892 - protein, 14 aa, Homo sapiens
  CDR3 for beta chain variable domain of TCR clone 304946 (TRBV11-2, TRBJ2-5)
CASGRTGGIETQYF

SEQ ID NO: 609893 - protein, 12 aa, Homo sapiens
  CDR3 for alpha chain variable domain of TCR clone 304947 (TRAV12-3, TRAJ17)
CAMTLTGNKLPF

SEQ ID NO: 609894 - protein, 15 aa, Homo sapiens
  CDR3 for beta chain variable domain of TCR clone 304947 (TRBV5-7, TRBJ2-7)
CASSPYFEGSYEQYF

SEQ ID NO: 609895 - protein, 13 aa, Homo sapiens
  CDR3 for alpha chain variable domain of TCR clone 304948 (TRAV8-3, TRAJ44)
YAVVPGTASKLTF

SEQ ID NO: 609896 - protein, 14 aa, Homo sapiens
  CDR3 for beta chain variable domain of TCR clone 304948 (TRBV11-2, TRBJ2-3)
CASSRLARTDTQYF

SEQ ID NO: 609897 - protein, 15 aa, Homo sapiens
  CDR3 for alpha chain variable domain of TCR clone 304949 (TRAV3, TRAJ4)
CAVRDGTGGYNKLIF

SEQ ID NO: 609898 - protein, 13 aa, Homo sapiens
  CDR3 for beta chain variable domain of TCR clone 304949 (TRBV12-5, TRBJ1-2)
CTSGVRTGNGYTF

SEQ ID NO: 609899 - protein, 12 aa, Homo sapiens
  CDR3 for alpha chain variable domain of TCR clone 304950 (TRAV12-3, TRAJ17)
CAMTLTGNKLTF

SEQ ID NO: 609900 - protein, 20 aa, Homo sapiens
  CDR3 for beta chain variable domain of TCR clone 304950 (TRBV7-8, TRBJ2-2)
CASSHLFPGPTIHSTGELFF

SEQ ID NO: 609901 - protein, 12 aa, Homo sapiens
  CDR3 for alpha chain variable domain of TCR clone 304951 (TRAV3, TRAJ20)
CAVRDPDYKLSF

SEQ ID NO: 609902 - protein, 14 aa, Homo sapiens
  CDR3 for beta chain variable domain of TCR clone 304951 (TRBV7-2, TRBJ2-7)
CASSPTTSFYEQYF

SEQ ID NO: 609903 - protein, 12 aa, Homo sapiens
  CDR3 for alpha chain variable domain of TCR clone 304952 (TRAV21, TRAJ58)
FALSASGSRLTF

SEQ ID NO: 609904 - protein, 15 aa, Homo sapiens
  CDR3 for beta chain variable domain of TCR clone 304952 (TRBV4-2, TRBJ1-2)
CASSQRTGGRDGYTF

SEQ ID NO: 609905 - protein, 13 aa, Homo sapiens
  CDR3 for alpha chain variable domain of TCR clone 304953 (TRAV36/DV7, TRAJ37)
CAVFSSNTGKLIF

SEQ ID NO: 609906 - protein, 15 aa, Homo sapiens
  CDR3 for beta chain variable domain of TCR clone 304953 (TRBV12-4, TRBJ2-5)
CQQFYVRGRQETQYF

SEQ ID NO: 609907 - protein, 14 aa, Homo sapiens
  CDR3 for alpha chain variable domain of TCR clone 304954 (TRAV12-2, TRAJ45)
CAVNKGGGADGHTF

SEQ ID NO: 609908 - protein, 15 aa, Homo sapiens
  CDR3 for beta chain variable domain of TCR clone 304954 (TRBV9, TRBJ1-6)
CASSVAGTGDSPLHF

SEQ ID NO: 609909 - protein, 16 aa, Homo sapiens
  CDR3 for alpha chain variable domain of TCR clone 304955 (TRAV27, TRAJ52)
CAGAGTGGTSYGKLTF

SEQ ID NO: 609910 - protein, 12 aa, Homo sapiens
  CDR3 for beta chain variable domain of TCR clone 304955 (TRBV11-2, TRBJ2-2)
CASSLGGGELFF

SEQ ID NO: 609911 - protein, 15 aa, Homo sapiens
  CDR3 for alpha chain variable domain of TCR clone 304956 (TRAV4, TRAJ39)
CLVGPNNNACNMRTF

SEQ ID NO: 609912 - protein, 14 aa, Homo sapiens
  CDR3 for beta chain variable domain of TCR clone 304956 (TRBV19, TRBJ2-1)
CASPTFVLSGEQFF

SEQ ID NO: 609913 - protein, 12 aa, Homo sapiens
  CDR3 for alpha chain variable domain of TCR clone 304957 (TRAV13-1, TRAJ21)
RAAKEGFNKFYF

SEQ ID NO: 609914 - protein, 13 aa, Homo sapiens
  CDR3 for beta chain variable domain of TCR clone 304957 (TRBV12-4, TRBJ1-2)
CASSLRQGKGDTF

SEQ ID NO: 609915 - protein, 13 aa, Homo sapiens
  CDR3 for alpha chain variable domain of TCR clone 304958 (TRAV22, TRAJ29)
CAVGGSGNTPLVF

SEQ ID NO: 609916 - protein, 16 aa, Homo sapiens
  CDR3 for beta chain variable domain of TCR clone 304958 (TRBV7-9, TRBJ1-2)
CASSLGFSSGEDGYTF

SEQ ID NO: 609917 - protein, 15 aa, Homo sapiens
  CDR3 for alpha chain variable domain of TCR clone 304959 (TRAV3, TRAJ20)
CAVRDIKLSDYKLSF

SEQ ID NO: 609918 - protein, 13 aa, Homo sapiens
  CDR3 for beta chain variable domain of TCR clone 304959 (TRBV20-1, TRBJ1-1)
CSARGGGNTEAFF

SEQ ID NO: 609919 - protein, 14 aa, Homo sapiens
  CDR3 for alpha chain variable domain of TCR clone 304960 (TRAV27, TRAJ36)
CAGPPKRGANNLFF

SEQ ID NO: 609920 - protein, 17 aa, Homo sapiens
  CDR3 for beta chain variable domain of TCR clone 304960 (TRBV4-1, TRBJ2-5)
CASSQDQTGGPQETQYF

SEQ ID NO: 609921 - protein, 17 aa, Homo sapiens
  CDR3 for alpha chain variable domain of TCR clone 304961 (TRAV13-1, TRAJ28)
CAASPPYSGAGSYQLTF

SEQ ID NO: 609922 - protein, 16 aa, Homo sapiens
  CDR3 for beta chain variable domain of TCR clone 304961 (TRBV7-9, TRBJ2-1)
CASSDVAGGSYNEQFF

SEQ ID NO: 609923 - protein, 15 aa, Homo sapiens
  CDR3 for alpha chain variable domain of TCR clone 304962 (TRAV17, TRAJ35)
CATAFVIGFGSVLHC

SEQ ID NO: 609924 - protein, 15 aa, Homo sapiens
  CDR3 for beta chain variable domain of TCR clone 304962 (TRBV7-9, TRBJ2-7)
CASSLALAEAYEQYF

SEQ ID NO: 609925 - protein, 14 aa, Homo sapiens
  CDR3 for alpha chain variable domain of TCR clone 304963 (TRAV1-2, TRAJ33)
CAVRASDSNYQLIW

SEQ ID NO: 609926 - protein, 14 aa, Homo sapiens
  CDR3 for beta chain variable domain of TCR clone 304963 (TRBV11-3, TRBJ1-6)
CASSFSGGDSPLHF

SEQ ID NO: 609927 - protein, 15 aa, Homo sapiens
  CDR3 for alpha chain variable domain of TCR clone 304964 (TRAV12-2, TRAJ43)
CAFDMRFGAGTRLTV

SEQ ID NO: 609928 - protein, 15 aa, Homo sapiens
  CDR3 for beta chain variable domain of TCR clone 304964 (TRBV7-9, TRBJ1-5)
CASSQGHQPNQPQHF

SEQ ID NO: 609929 - protein, 14 aa, Homo sapiens
  CDR3 for alpha chain variable domain of TCR clone 304965 (TRAV17, TRAJ15)
CATAPNQAGTALLF

SEQ ID NO: 609930 - protein, 14 aa, Homo sapiens
  CDR3 for beta chain variable domain of TCR clone 304965 (TRBV19, TRBJ2-7)
CASSMGQGAIEQYF

SEQ ID NO: 609931 - protein, 14 aa, Homo sapiens
  CDR3 for alpha chain variable domain of TCR clone 304966 (TRAV1-2, TRAJ8)
CAVREDTGFQKLVF

SEQ ID NO: 609932 - protein, 16 aa, Homo sapiens
  CDR3 for beta chain variable domain of TCR clone 304966 (TRBV2, TRBJ2-5)
CASSETQGVGEETQYF

SEQ ID NO: 609933 - protein, 15 aa, Homo sapiens
  CDR3 for alpha chain variable domain of TCR clone 304967 (TRAV21, TRAJ24)
CAPRSSTDSWGKLQF

SEQ ID NO: 609934 - protein, 13 aa, Homo sapiens
  CDR3 for beta chain variable domain of TCR clone 304967 (TRBV11-2, TRBJ2-5)
CASSSTGEETQYF

SEQ ID NO: 609935 - protein, 14 aa, Homo sapiens
  CDR3 for alpha chain variable domain of TCR clone 304968 (TRAV1-2, TRAJ29)
CAVRELTSATPLVF

SEQ ID NO: 609936 - protein, 15 aa, Homo sapiens
  CDR3 for beta chain variable domain of TCR clone 304968 (TRBV7-2, TRBJ2-7)
CASSLKGALTYEQYF

SEQ ID NO: 609937 - protein, 15 aa, Homo sapiens
  CDR3 for alpha chain variable domain of TCR clone 304969 (TRAV3, TRAJ22)
FAVRDRGGSARQLTF

SEQ ID NO: 609938 - protein, 13 aa, Homo sapiens
  CDR3 for beta chain variable domain of TCR clone 304969 (TRBV7-3, TRBJ2-1)
CASSPVAYNEQFF

SEQ ID NO: 609939 - protein, 14 aa, Homo sapiens
  CDR3 for alpha chain variable domain of TCR clone 304970 (TRAV21, TRAJ35)
CAAMPIGFGNVLHC

SEQ ID NO: 609940 - protein, 12 aa, Homo sapiens
  CDR3 for beta chain variable domain of TCR clone 304970 (TRBV7-9, TRBJ2-7)
CASSIKREEQYF

SEQ ID NO: 609941 - protein, 12 aa, Homo sapiens
  CDR3 for alpha chain variable domain of TCR clone 304971 (TRAV38-2/DV8, TRAJ48)
CALLSGNEKLTF

SEQ ID NO: 609942 - protein, 15 aa, Homo sapiens
  CDR3 for beta chain variable domain of TCR clone 304971 (TRBV6-1, TRBJ2-1)
CASSELRGQYNKQFF

SEQ ID NO: 609943 - protein, 12 aa, Homo sapiens
  CDR3 for alpha chain variable domain of TCR clone 304972 (TRAV8-3, TRAJ20)
CAVGANYYKLIF

SEQ ID NO: 609944 - protein, 16 aa, Homo sapiens
  CDR3 for beta chain variable domain of TCR clone 304972 (TRBV19, TRBJ2-2)
CASRSPGTGATGELFF

SEQ ID NO: 609945 - protein, 14 aa, Homo sapiens
  CDR3 for alpha chain variable domain of TCR clone 304973 (TRAV8-3, TRAJ4)
CAVGADGGYNKLIF

SEQ ID NO: 609946 - protein, 15 aa, Homo sapiens
  CDR3 for beta chain variable domain of TCR clone 304973 (TRBV20-1, TRBJ2-5)
CSAPPRTGFGETQYF

SEQ ID NO: 609947 - protein, 14 aa, Homo sapiens
  CDR3 for alpha chain variable domain of TCR clone 304974 (TRAV12-3, TRAJ57)
CTMSAWGGSEKLVF

SEQ ID NO: 609948 - protein, 14 aa, Homo sapiens
  CDR3 for beta chain variable domain of TCR clone 304974 (TRBV18, TRBJ2-5)
CASSPGVSQETQYF

SEQ ID NO: 609949 - protein, 16 aa, Homo sapiens
  CDR3 for alpha chain variable domain of TCR clone 304975 (TRAV30, TRAJ24)
CGTEMVDADSWGTFQF

SEQ ID NO: 609950 - protein, 14 aa, Homo sapiens
  CDR3 for beta chain variable domain of TCR clone 304975 (TRBV12-5, TRBJ2-5)
CASGSRTHQETQYF

SEQ ID NO: 609951 - protein, 19 aa, Homo sapiens
  CDR3 for alpha chain variable domain of TCR clone 304976 (TRAV2, TRAJ20)
ILQVREADAAVYRDCKLSF

SEQ ID NO: 609952 - protein, 13 aa, Homo sapiens
  CDR3 for beta chain variable domain of TCR clone 304976 (TRBV20-1, TRBJ1-1)
CSAPPGGHTEAFF

SEQ ID NO: 609953 - protein, 16 aa, Homo sapiens
  CDR3 for alpha chain variable domain of TCR clone 304977 (TRAV4, TRAJ22)
CLVGDLYSGSARQLTF

SEQ ID NO: 609954 - protein, 15 aa, Homo sapiens
  CDR3 for beta chain variable domain of TCR clone 304977 (TRBV27, TRBJ2-1)
CASSNGGGSSNEQFF

SEQ ID NO: 609955 - protein, 16 aa, Homo sapiens
  CDR3 for alpha chain variable domain of TCR clone 304978 (TRAV12-2, TRAJ45)
CAVKRNPGGGADGLTF

SEQ ID NO: 609956 - protein, 12 aa, Homo sapiens
  CDR3 for beta chain variable domain of TCR clone 304978 (TRBV6-1, TRBJ2-5)
FASSEGRETQYF

SEQ ID NO: 609957 - protein, 12 aa, Homo sapiens
  CDR3 for alpha chain variable domain of TCR clone 304979 (TRAV17, TRAJ20)
CATDSNDYKLSF

SEQ ID NO: 609958 - protein, 16 aa, Homo sapiens
  CDR3 for beta chain variable domain of TCR clone 304979 (TRBV7-2, TRBJ1-2)
CASSSNHDRRGHGYTF

SEQ ID NO: 609959 - protein, 13 aa, Homo sapiens
  CDR3 for alpha chain variable domain of TCR clone 304980 (TRAV12-2, TRAJ52)
CAVGGTSYGKLTF

SEQ ID NO: 609960 - protein, 14 aa, Homo sapiens
  CDR3 for beta chain variable domain of TCR clone 304980 (TRBV19, TRBJ2-1)
CASPTFVLSGERFF

SEQ ID NO: 609961 - protein, 15 aa, Homo sapiens
  CDR3 for alpha chain variable domain of TCR clone 304981 (TRAV12-1, TRAJ44)
CVADLPTGTASKLTF

SEQ ID NO: 609962 - protein, 15 aa, Homo sapiens
  CDR3 for beta chain variable domain of TCR clone 304981 (TRBV20-1, TRBJ2-7)
CSAESGTSGAYEQYF

SEQ ID NO: 609963 - protein, 16 aa, Homo sapiens
  CDR3 for alpha chain variable domain of TCR clone 304982 (TRAV12-3, TRAJ58)
CAVTDTEETSGSRLTF

SEQ ID NO: 609964 - protein, 22 aa, Homo sapiens
  CDR3 for beta chain variable domain of TCR clone 304982 (TRBV23-1, TRBJ2-7)
CASSRRLDSGQGYVGGGYEQYF

SEQ ID NO: 609965 - protein, 12 aa, Homo sapiens
  CDR3 for alpha chain variable domain of TCR clone 304983 (TRAV26-1, TRAJ43)
CIVRPRGDDMRF

SEQ ID NO: 609966 - protein, 14 aa, Homo sapiens
  CDR3 for beta chain variable domain of TCR clone 304983 (TRBV4-2, TRBJ2-1)
CASGLDRAYNEQFF

SEQ ID NO: 609967 - protein, 13 aa, Homo sapiens
  CDR3 for alpha chain variable domain of TCR clone 304984 (TRAV1-1, TRAJ9)
CAANNTGGCKTIF

SEQ ID NO: 609968 - protein, 14 aa, Homo sapiens
  CDR3 for beta chain variable domain of TCR clone 304984 (TRBV20-1, TRBJ2-1)
CSAQIGGSANEQFF

SEQ ID NO: 609969 - protein, 15 aa, Homo sapiens
  CDR3 for alpha chain variable domain of TCR clone 304985 (TRAV26-1, TRAJ23)
CIVGVLNNQGGKLIF

SEQ ID NO: 609970 - protein, 15 aa, Homo sapiens
  CDR3 for beta chain variable domain of TCR clone 304985 (TRBV7-3, TRBJ2-1)
CASSFGQSNYNEQFF

SEQ ID NO: 609971 - protein, 17 aa, Homo sapiens
  CDR3 for alpha chain variable domain of TCR clone 304986 (TRAV1-2, TRAJ37)
CAVRVGRGSGNTVKLIF

SEQ ID NO: 609972 - protein, 17 aa, Homo sapiens
  CDR3 for beta chain variable domain of TCR clone 304986 (TRBV24-1, TRBJ1-2)
CATSDPRQGVLSGGYTF

SEQ ID NO: 609973 - protein, 15 aa, Homo sapiens
  CDR3 for alpha chain variable domain of TCR clone 304987 (TRAV3, TRAJ22)
CAVRDRGGSARQLTF

SEQ ID NO: 609974 - protein, 16 aa, Homo sapiens
  CDR3 for beta chain variable domain of TCR clone 304987 (TRBV2, TRBJ2-4)
CASSEAPGGEQNIQYF

SEQ ID NO: 609975 - protein, 18 aa, Homo sapiens
  CDR3 for alpha chain variable domain of TCR clone 304988 (TRAV29/DV5, TRAJ26)
CSVLLCSKRKPGGQNFVF

SEQ ID NO: 609976 - protein, 17 aa, Homo sapiens
  CDR3 for beta chain variable domain of TCR clone 304988 (TRBV20-1, TRBJ2-2)
CSASGSGQGGLTGELFF

SEQ ID NO: 609977 - protein, 14 aa, Homo sapiens
  CDR3 for alpha chain variable domain of TCR clone 304989 (TRAV12-1, TRAJ12)
GVVTRIDSSYKLIF

SEQ ID NO: 609978 - protein, 13 aa, Homo sapiens
  CDR3 for beta chain variable domain of TCR clone 304989 (TRBV20-1, TRBJ1-1)
CSARGGGNTEAFF

SEQ ID NO: 609979 - protein, 15 aa, Homo sapiens
  CDR3 for alpha chain variable domain of TCR clone 304990 (TRAV12-1, TRAJ52)
CVGNAGGTSYGRLTF

SEQ ID NO: 609980 - protein, 14 aa, Homo sapiens
  CDR3 for beta chain variable domain of TCR clone 304990 (TRBV7-3, TRBJ2-2)
CASSPDPSGRELFF

SEQ ID NO: 609981 - protein, 13 aa, Homo sapiens
  CDR3 for alpha chain variable domain of TCR clone 304991 (TRAV12-3, TRAJ33)
CAMSVNSNYQLIC

SEQ ID NO: 609982 - protein, 13 aa, Homo sapiens
  CDR3 for beta chain variable domain of TCR clone 304991 (TRBV7-2, TRBJ2-2)
CASSLAVTGEPFF

SEQ ID NO: 609983 - protein, 13 aa, Homo sapiens
  CDR3 for alpha chain variable domain of TCR clone 304992 (TRAV20, TRAJ37)
CAGCSSNTGKLIF

SEQ ID NO: 609984 - protein, 14 aa, Homo sapiens
  CDR3 for beta chain variable domain of TCR clone 304992 (TRBV18, TRBJ2-7)
CASSPRGGAYEQYF

SEQ ID NO: 609985 - protein, 15 aa, Homo sapiens
  CDR3 for alpha chain variable domain of TCR clone 304993 (TRAV8-3, TRAJ23)
CAVGDRSNQGGKLIF

SEQ ID NO: 609986 - protein, 22 aa, Homo sapiens
  CDR3 for beta chain variable domain of TCR clone 304993 (TRBV29-1, TRBJ2-5)
TVSNMSPEDSSTYLCSAGTQYF

SEQ ID NO: 609987 - protein, 14 aa, Homo sapiens
  CDR3 for alpha chain variable domain of TCR clone 304994 (TRAV1-2, TRAJ16)
CAVNRSSDGQKLLF

SEQ ID NO: 609988 - protein, 15 aa, Homo sapiens
  CDR3 for beta chain variable domain of TCR clone 304994 (TRBV4-2, TRBJ1-1)
CASSQQGAGDTEAFF

SEQ ID NO: 609989 - protein, 14 aa, Homo sapiens
  CDR3 for alpha chain variable domain of TCR clone 304995 (TRAV12-2, TRAJ17)
CAVLFKAAGNKLTF

SEQ ID NO: 609990 - protein, 15 aa, Homo sapiens
  CDR3 for beta chain variable domain of TCR clone 304995 (TRBV20-1, TRBJ2-7)
CSARDRVSGMDAQYF

SEQ ID NO: 609991 - protein, 13 aa, Homo sapiens
  CDR3 for alpha chain variable domain of TCR clone 304996 (TRAV17, TRAJ9)
CATDYTGGVKNIF

SEQ ID NO: 609992 - protein, 16 aa, Homo sapiens
  CDR3 for beta chain variable domain of TCR clone 304996 (TRBV7-7, TRBJ2-1)
CASSLASGTSYNEQFF

SEQ ID NO: 609993 - protein, 13 aa, Homo sapiens
  CDR3 for alpha chain variable domain of TCR clone 304997 (TRAV12-3, TRAJ33)
CAMSVNSNYQLIW

SEQ ID NO: 609994 - protein, 15 aa, Homo sapiens
  CDR3 for beta chain variable domain of TCR clone 304997 (TRBV25-1, TRBJ1-4)
CASSPGDSTNEKLFF

SEQ ID NO: 609995 - protein, 15 aa, Homo sapiens
  CDR3 for alpha chain variable domain of TCR clone 304998 (TRAV8-3, TRAJ45)
CASSYSGGGADGLTF

SEQ ID NO: 609996 - protein, 12 aa, Homo sapiens
  CDR3 for beta chain variable domain of TCR clone 304998 (TRBV7-9, TRBJ2-7)
CGSFAGAYEQYF

SEQ ID NO: 609997 - protein, 13 aa, Homo sapiens
  CDR3 for alpha chain variable domain of TCR clone 304999 (TRAV21, TRAJ20)
CAVGLRVDYKLSF

SEQ ID NO: 609998 - protein, 14 aa, Homo sapiens
  CDR3 for beta chain variable domain of TCR clone 304999 (TRBV29-1, TRBJ2-1)
SAALKAGGLNEQFF

SEQ ID NO: 609999 - protein, 13 aa, Homo sapiens
  CDR3 for alpha chain variable domain of TCR clone 305000 (TRAV36/DV7, TRAJ31)
CAVVRNNNTRLMF

SEQ ID NO: 610000 - protein, 18 aa, Homo sapiens
  CDR3 for beta chain variable domain of TCR clone 305000 (TRBV4-1, TRBJ1-5)
CASSQDPRGQGLNQPQHF

SEQ ID NO: 610001 - protein, 14 aa, Homo sapiens
  CDR3 for alpha chain variable domain of TCR clone 305001 (TRAV12-2, TRAJ48)
CAVNAFFGNEKLTF

SEQ ID NO: 610002 - protein, 13 aa, Homo sapiens
  CDR3 for beta chain variable domain of TCR clone 305001 (TRBV28, TRBJ2-7)
CAGAQQGLYEQYF

SEQ ID NO: 610003 - protein, 14 aa, Homo sapiens
  CDR3 for alpha chain variable domain of TCR clone 305002 (TRAV8-6, TRAJ49)
CAVSDPGTGNQFYF

SEQ ID NO: 610004 - protein, 13 aa, Homo sapiens
  CDR3 for beta chain variable domain of TCR clone 305002 (TRBV7-9, TRBJ1-2)
CASSLKQNYGYTC

SEQ ID NO: 610005 - protein, 13 aa, Homo sapiens
  CDR3 for alpha chain variable domain of TCR clone 305003 (TRAV26-1, TRAJ29)
CIVRRSGNTPLVF

SEQ ID NO: 610006 - protein, 16 aa, Homo sapiens
  CDR3 for beta chain variable domain of TCR clone 305003 (TRBV11-2, TRBJ2-7)
WASSLAPTGVNYEQYF

SEQ ID NO: 610007 - protein, 15 aa, Homo sapiens
  CDR3 for alpha chain variable domain of TCR clone 305004 (TRAV1-2, TRAJ26)
CAVRDLITMVRILSL

SEQ ID NO: 610008 - protein, 15 aa, Homo sapiens
  CDR3 for beta chain variable domain of TCR clone 305004 (TRBV27, TRBJ2-1)
CASSNGGGSSNEQFF

SEQ ID NO: 610009 - protein, 15 aa, Homo sapiens
  CDR3 for alpha chain variable domain of TCR clone 305005 (TRAV3, TRAJ3)
CAVRDRGSSASKIIF

SEQ ID NO: 610010 - protein, 17 aa, Homo sapiens
  CDR3 for beta chain variable domain of TCR clone 305005 (TRBV7-8, TRBJ2-6)
CASSAGTGGAGANVLTF

SEQ ID NO: 610011 - protein, 14 aa, Homo sapiens
  CDR3 for alpha chain variable domain of TCR clone 305006 (TRAV38-1, TRAJ35)
CAFLTIVFGTVLHC

SEQ ID NO: 610012 - protein, 17 aa, Homo sapiens
  CDR3 for beta chain variable domain of TCR clone 305006 (TRBV28, TRBJ1-1)
CASSGDLRTESNTEAFF

SEQ ID NO: 610013 - protein, 16 aa, Homo sapiens
  CDR3 for alpha chain variable domain of TCR clone 305007 (TRAV30, TRAJ24)
CGTEIVDADSWGKFQF

SEQ ID NO: 610014 - protein, 15 aa, Homo sapiens
  CDR3 for beta chain variable domain of TCR clone 305007 (TRBV6-5, TRBJ2-2)
CASRPGQTNTGELFF

SEQ ID NO: 610015 - protein, 17 aa, Homo sapiens
  CDR3 for alpha chain variable domain of TCR clone 305008 (TRAV3, TRAJ6)
CAVRDGPRAGGSDIPTF

SEQ ID NO: 610016 - protein, 17 aa, Homo sapiens
  CDR3 for beta chain variable domain of TCR clone 305008 (TRBV20-1, TRBJ1-5)
CSASLSPGQGGNQPQHF

SEQ ID NO: 610017 - protein, 13 aa, Homo sapiens
  CDR3 for alpha chain variable domain of TCR clone 305009 (TRAV27, TRAJ41)
CAGDGNSGYALNF

SEQ ID NO: 610018 - protein, 20 aa, Homo sapiens
  CDR3 for beta chain variable domain of TCR clone 305009 (TRBV28, TRBJ2-1)
CASTPIGRSPGLAGGNEQFF

SEQ ID NO: 610019 - protein, 13 aa, Homo sapiens
  CDR3 for alpha chain variable domain of TCR clone 305010 (TRAV24, TRAJ44)
WALLTGTASKLTF

SEQ ID NO: 610020 - protein, 16 aa, Homo sapiens
  CDR3 for beta chain variable domain of TCR clone 305010 (TRBV2, TRBJ2-3)
CASSTSVEGVTDTQYF

SEQ ID NO: 610021 - protein, 18 aa, Homo sapiens
  CDR3 for alpha chain variable domain of TCR clone 305011 (TRAV26-1, TRAJ44)
CIVRVAGGGISTASKLTF

SEQ ID NO: 610022 - protein, 15 aa, Homo sapiens
  CDR3 for beta chain variable domain of TCR clone 305011 (TRBV20-1, TRBJ2-1)
CSARGIGGTYNEQFF

SEQ ID NO: 610023 - protein, 10 aa, Homo sapiens
  CDR3 for alpha chain variable domain of TCR clone 305012 (TRAV2, TRAJ13)
CSGGYQKVTF

SEQ ID NO: 610024 - protein, 16 aa, Homo sapiens
  CDR3 for beta chain variable domain of TCR clone 305012 (TRBV6-1, TRBJ2-5)
CASSETLDRGAETQYF

SEQ ID NO: 610025 - protein, 13 aa, Homo sapiens
  CDR3 for alpha chain variable domain of TCR clone 305013 (TRAV12-3, TRAJ48)
CAMSLVGNEKLTF

SEQ ID NO: 610026 - protein, 17 aa, Homo sapiens
  CDR3 for beta chain variable domain of TCR clone 305013 (TRBV7-9, TRBJ2-6)
CASSFGAGYSGANVLTF

SEQ ID NO: 610027 - protein, 12 aa, Homo sapiens
  CDR3 for alpha chain variable domain of TCR clone 305014 (TRAV21, TRAJ39)
CAADNAGNLLTF

SEQ ID NO: 610028 - protein, 13 aa, Homo sapiens
  CDR3 for beta chain variable domain of TCR clone 305014 (TRBV6-1, TRBJ1-1)
CASSRQGNTEAFF

SEQ ID NO: 610029 - protein, 14 aa, Homo sapiens
  CDR3 for alpha chain variable domain of TCR clone 305015 (TRAV29/DV5, TRAJ37)
CAASGSGNTGKLIF

SEQ ID NO: 610030 - protein, 17 aa, Homo sapiens
  CDR3 for beta chain variable domain of TCR clone 305015 (TRBV4-1, TRBJ2-7)
CVSSPFLTSGGVVEQYF

SEQ ID NO: 610031 - protein, 14 aa, Homo sapiens
  CDR3 for alpha chain variable domain of TCR clone 305016 (TRAV8-3, TRAJ39)
CAVGAWGAGNMLTI

SEQ ID NO: 610032 - protein, 16 aa, Homo sapiens
  CDR3 for beta chain variable domain of TCR clone 305016 (TRBV7-2, TRBJ1-3)
CASSSGRVLSGNTIYF

SEQ ID NO: 610033 - protein, 18 aa, Homo sapiens
  CDR3 for alpha chain variable domain of TCR clone 305017 (TRAV12-3, TRAJ52)
CAMSVGGAGGTSYGKLTF

SEQ ID NO: 610034 - protein, 12 aa, Homo sapiens
  CDR3 for beta chain variable domain of TCR clone 305017 (TRBV11-2, TRBJ2-1)
CASSPGNNEQSF

SEQ ID NO: 610035 - protein, 14 aa, Homo sapiens
  CDR3 for alpha chain variable domain of TCR clone 305018 (TRAV35, TRAJ28)
CAGRRGGWELLTHF

SEQ ID NO: 610036 - protein, 15 aa, Homo sapiens
  CDR3 for beta chain variable domain of TCR clone 305018 (TRBV5-1, TRBJ2-1)
CASSPPRAPYNEQFF

SEQ ID NO: 610037 - protein, 15 aa, Homo sapiens
  CDR3 for alpha chain variable domain of TCR clone 305019 (TRAV8-6, TRAJ10)
CAVSDQAGGGNKLTF

SEQ ID NO: 610038 - protein, 15 aa, Homo sapiens
  CDR3 for beta chain variable domain of TCR clone 305019 (TRBV7-2, TRBJ2-7)
CASSTPGLTRGEQYF

SEQ ID NO: 610039 - protein, 12 aa, Homo sapiens
  CDR3 for alpha chain variable domain of TCR clone 305020 (TRAV3, TRAJ27)
CAVRDKADKSTF

SEQ ID NO: 610040 - protein, 14 aa, Homo sapiens
  CDR3 for beta chain variable domain of TCR clone 305020 (TRBV5-1, TRBJ1-2)
CASSVDSTNYGYTF

SEQ ID NO: 610041 - protein, 16 aa, Homo sapiens
  CDR3 for alpha chain variable domain of TCR clone 305021 (TRAV16, TRAJ52)
SALSGVGGTSYGKLTF

SEQ ID NO: 610042 - protein, 14 aa, Homo sapiens
  CDR3 for beta chain variable domain of TCR clone 305021 (TRBV19, TRBJ1-2)
CASSLQGQAYGYTF

SEQ ID NO: 610043 - protein, 13 aa, Homo sapiens
  CDR3 for alpha chain variable domain of TCR clone 305022 (TRAV35, TRAJ21)
CAGQLSNFNKFYF

SEQ ID NO: 610044 - protein, 11 aa, Homo sapiens
  CDR3 for beta chain variable domain of TCR clone 305022 (TRBV7-6, TRBJ2-5)
CASSSQETQYF

SEQ ID NO: 610045 - protein, 16 aa, Homo sapiens
  CDR3 for alpha chain variable domain of TCR clone 305023 (TRAV1-2, TRAJ10)
CAVRDQGGGAGNKLTF

SEQ ID NO: 610046 - protein, 13 aa, Homo sapiens
  CDR3 for beta chain variable domain of TCR clone 305023 (TRBV29-1, TRBJ1-1)
CSVGDSRNTEAFF

SEQ ID NO: 610047 - protein, 11 aa, Homo sapiens
  CDR3 for alpha chain variable domain of TCR clone 305024 (TRAV21, TRAJ34)
CAHYNTYKLIF

SEQ ID NO: 610048 - protein, 11 aa, Homo sapiens
  CDR3 for beta chain variable domain of TCR clone 305024 (TRBV29-1, TRBJ2-5)
CSEDRTGTQYF

SEQ ID NO: 610049 - protein, 12 aa, Homo sapiens
  CDR3 for alpha chain variable domain of TCR clone 305025 (TRAV12-3, TRAJ17)
CAMTLTGNKLTF

SEQ ID NO: 610050 - protein, 14 aa, Homo sapiens
  CDR3 for beta chain variable domain of TCR clone 305025 (TRBV19, TRBJ1-5)
CASRAPDSFLSQHF

SEQ ID NO: 610051 - protein, 15 aa, Homo sapiens
  CDR3 for alpha chain variable domain of TCR clone 305026 (TRAV3, TRAJ20)
CAVRDIKLSDYKLSF

SEQ ID NO: 610052 - protein, 18 aa, Homo sapiens
  CDR3 for beta chain variable domain of TCR clone 305026 (TRBV20-1, TRBJ2-5)
CSQTGDSGRLGGKETQYF

SEQ ID NO: 610053 - protein, 13 aa, Homo sapiens
  CDR3 for alpha chain variable domain of TCR clone 305027 (TRAV8-4, TRAJ9)
CAVSETGGFKTIF

SEQ ID NO: 610054 - protein, 14 aa, Homo sapiens
  CDR3 for beta chain variable domain of TCR clone 305027 (TRBV11-3, TRBJ2-1)
CASSATTSGSIQFF

SEQ ID NO: 610055 - protein, 10 aa, Homo sapiens
  CDR3 for alpha chain variable domain of TCR clone 305028 (TRAV3, TRAJ30)
CAVREIEIIF

SEQ ID NO: 610056 - protein, 17 aa, Homo sapiens
  CDR3 for beta chain variable domain of TCR clone 305028 (TRBV12-4, TRBJ2-1)
CASSPGLAGGRINEQFF

SEQ ID NO: 610057 - protein, 14 aa, Homo sapiens
  CDR3 for alpha chain variable domain of TCR clone 305029 (TRAV12-2, TRAJ40)
CAVKIPSGTYKYIF

SEQ ID NO: 610058 - protein, 12 aa, Homo sapiens
  CDR3 for beta chain variable domain of TCR clone 305029 (TRBV28, TRBJ2-7)
CASSFSSYEQYF

SEQ ID NO: 610059 - protein, 15 aa, Homo sapiens
  CDR3 for alpha chain variable domain of TCR clone 305030 (TRAV21, TRAJ53)
CATLNSGGSNYKLTF

SEQ ID NO: 610060 - protein, 17 aa, Homo sapiens
  CDR3 for beta chain variable domain of TCR clone 305030 (TRBV20-1, TRBJ2-2)
CSASGSGQGGLTAELFF

SEQ ID NO: 610061 - protein, 14 aa, Homo sapiens
  CDR3 for alpha chain variable domain of TCR clone 305031 (TRAV35, TRAJ22)
CSGLRPGSARQLTF

SEQ ID NO: 610062 - protein, 14 aa, Homo sapiens
  CDR3 for beta chain variable domain of TCR clone 305031 (TRBV5-1, TRBJ2-7)
CASSRGESLYEQYF

SEQ ID NO: 610063 - protein, 11 aa, Homo sapiens
  CDR3 for alpha chain variable domain of TCR clone 305032 (TRAV1-2, TRAJ40)
CAVPGTYKYIF

SEQ ID NO: 610064 - protein, 15 aa, Homo sapiens
  CDR3 for beta chain variable domain of TCR clone 305032 (TRBV2, TRBJ2-1)
CASSEEREGDNEQFF

SEQ ID NO: 610065 - protein, 18 aa, Homo sapiens
  CDR3 for alpha chain variable domain of TCR clone 305033 (TRAV26-2, TRAJ45)
CILRLWGYAGGGADGLTF

SEQ ID NO: 610066 - protein, 17 aa, Homo sapiens
  CDR3 for beta chain variable domain of TCR clone 305033 (TRBV28, TRBJ2-3)
CASSPTPAGGRVDTQYF

SEQ ID NO: 610067 - protein, 13 aa, Homo sapiens
  CDR3 for alpha chain variable domain of TCR clone 305034 (TRAV12-2, TRAJ20)
CAVYPSNDYKLSF

SEQ ID NO: 610068 - protein, 15 aa, Homo sapiens
  CDR3 for beta chain variable domain of TCR clone 305034 (TRBV27, TRBJ2-5)
CSSSLYPRGGETQYF

SEQ ID NO: 610069 - protein, 15 aa, Homo sapiens
  CDR3 for alpha chain variable domain of TCR clone 305035 (TRAV21, TRAJ53)
CATLNSGGSNYKLTF

SEQ ID NO: 610070 - protein, 12 aa, Homo sapiens
  CDR3 for beta chain variable domain of TCR clone 305035 (TRBV7-8, TRBJ2-7)
CASTLGDREQYF

SEQ ID NO: 610071 - protein, 14 aa, Homo sapiens
  CDR3 for alpha chain variable domain of TCR clone 305036 (TRAV1-2, TRAJ16)
CAVNRFSDGQKLLF

SEQ ID NO: 610072 - protein, 15 aa, Homo sapiens
  CDR3 for beta chain variable domain of TCR clone 305036 (TRBV7-9, TRBJ2-2)
CASGPLDTFPGGLFF

SEQ ID NO: 610073 - protein, 12 aa, Homo sapiens
  CDR3 for alpha chain variable domain of TCR clone 305037 (TRAV8-3, TRAJ20)
CAVGANDYKLSS

SEQ ID NO: 610074 - protein, 14 aa, Homo sapiens
  CDR3 for beta chain variable domain of TCR clone 305037 (TRBV7-6, TRBJ2-3)
CASSLGTVTDTQYF

SEQ ID NO: 610075 - protein, 10 aa, Homo sapiens
  CDR3 for alpha chain variable domain of TCR clone 305038 (TRAV23/DV6, TRAJ57)
CAASPTLSQA

SEQ ID NO: 610076 - protein, 14 aa, Homo sapiens
  CDR3 for beta chain variable domain of TCR clone 305038 (TRBV25-1, TRBJ1-1)
CASTHLGGNTEAFF

SEQ ID NO: 610077 - protein, 14 aa, Homo sapiens
  CDR3 for alpha chain variable domain of TCR clone 305039 (TRAV1-2, TRAJ17)
CALRRGAAGNKLTF

SEQ ID NO: 610078 - protein, 13 aa, Homo sapiens
  CDR3 for beta chain variable domain of TCR clone 305039 (TRBV9, TRBJ2-1)
CASSVGQGGKQFF

SEQ ID NO: 610079 - protein, 14 aa, Homo sapiens
  CDR3 for alpha chain variable domain of TCR clone 305040 (TRAV21, TRAJ45)
CAVSSGGGADGLTF

SEQ ID NO: 610080 - protein, 13 aa, Homo sapiens
  CDR3 for beta chain variable domain of TCR clone 305040 (TRBV12-4, TRBJ2-1)
CASSLSPSNEQFF

SEQ ID NO: 610081 - protein, 11 aa, Homo sapiens
  CDR3 for alpha chain variable domain of TCR clone 305041 (TRAV2, TRAJ13)
CASGGYQKVTF

SEQ ID NO: 610082 - protein, 15 aa, Homo sapiens
  CDR3 for beta chain variable domain of TCR clone 305041 (TRBV27, TRBJ2-7)
CASSPSRDRSYEQYF

SEQ ID NO: 610083 - protein, 16 aa, Homo sapiens
  CDR3 for alpha chain variable domain of TCR clone 305042 (TRAV27, TRAJ13)
CAGAKSDSGGYQKVTF

SEQ ID NO: 610084 - protein, 15 aa, Homo sapiens
  CDR3 for beta chain variable domain of TCR clone 305042 (TRBV29-1, TRBJ2-1)
GSVGRHALFYNEQFF

SEQ ID NO: 610085 - protein, 14 aa, Homo sapiens
  CDR3 for alpha chain variable domain of TCR clone 305043 (TRAV12-2, TRAJ24)
CAVTPADSWGKLQF

SEQ ID NO: 610086 - protein, 12 aa, Homo sapiens
  CDR3 for beta chain variable domain of TCR clone 305043 (TRBV3-1, TRBJ2-1)
CASSQGSSGQCF

SEQ ID NO: 610087 - protein, 11 aa, Homo sapiens
  CDR3 for alpha chain variable domain of TCR clone 305044 (TRAV26-1, TRAJ46)
CIVRGGKEKQR

SEQ ID NO: 610088 - protein, 13 aa, Homo sapiens
  CDR3 for beta chain variable domain of TCR clone 305044 (TRBV12-5, TRBJ2-3)
CASGDRQSDTQYF

SEQ ID NO: 610089 - protein, 14 aa, Homo sapiens
  CDR3 for alpha chain variable domain of TCR clone 305045 (TRAV1-1, TRAJ27)
WAVIYNTNAGKSTF

SEQ ID NO: 610090 - protein, 15 aa, Homo sapiens
  CDR3 for beta chain variable domain of TCR clone 305045 (TRBV27, TRBJ2-1)
CASSNGGGSSNEQFF

SEQ ID NO: 610091 - protein, 16 aa, Homo sapiens
  CDR3 for alpha chain variable domain of TCR clone 305046 (TRAV1-2, TRAJ10)
CAVRGVRTGGGNKLTF

SEQ ID NO: 610092 - protein, 16 aa, Homo sapiens
  CDR3 for beta chain variable domain of TCR clone 305046 (TRBV29-1, TRBJ2-7)
CSVEVVGTSGSYEQYF

SEQ ID NO: 610093 - protein, 13 aa, Homo sapiens
  CDR3 for alpha chain variable domain of TCR clone 305047 (TRAV8-3, TRAJ28)
CAVGAVVSYQLTF

SEQ ID NO: 610094 - protein, 17 aa, Homo sapiens
  CDR3 for beta chain variable domain of TCR clone 305047 (TRBV11-2, TRBJ2-1)
CASSLYPPGVEYNERFF

SEQ ID NO: 610095 - protein, 16 aa, Homo sapiens
  CDR3 for alpha chain variable domain of TCR clone 305048 (TRAV12-2, TRAJ6)
CAAPLAGSGGSYIPTF

SEQ ID NO: 610096 - protein, 11 aa, Homo sapiens
  CDR3 for beta chain variable domain of TCR clone 305048 (TRBV12-4, TRBJ2-3)
CASTATDTQYF

SEQ ID NO: 610097 - protein, 15 aa, Homo sapiens
  CDR3 for alpha chain variable domain of TCR clone 305049 (TRAV12-2, TRAJ43)
CAFDMSFGAGTRLTV

SEQ ID NO: 610098 - protein, 14 aa, Homo sapiens
  CDR3 for beta chain variable domain of TCR clone 305049 (TRBV20-1, TRBJ2-3)
RTSGGPGTTDTQYF

SEQ ID NO: 610099 - protein, 12 aa, Homo sapiens
  CDR3 for alpha chain variable domain of TCR clone 305050 (TRAV2, TRAJ32)
CAVGGATNKLIF

SEQ ID NO: 610100 - protein, 15 aa, Homo sapiens
  CDR3 for beta chain variable domain of TCR clone 305050 (TRBV7-2, TRBJ2-1)
CASGSRTSREDGQFF

SEQ ID NO: 610101 - protein, 12 aa, Homo sapiens
  CDR3 for alpha chain variable domain of TCR clone 305051 (TRAV13-1, TRAJ21)
CAAKEGFNIFYF

SEQ ID NO: 610102 - protein, 18 aa, Homo sapiens
  CDR3 for beta chain variable domain of TCR clone 305051 (TRBV20-1, TRBJ2-6)
CSAETTPTHGSGANVLTF

SEQ ID NO: 610103 - protein, 13 aa, Homo sapiens
  CDR3 for alpha chain variable domain of TCR clone 305052 (TRAV21, TRAJ26)
CAVLDNYGQNLVF

SEQ ID NO: 610104 - protein, 16 aa, Homo sapiens
  CDR3 for beta chain variable domain of TCR clone 305052 (TRBV29-1, TRBJ2-2)
CSVETRASGNTGELFF

SEQ ID NO: 610105 - protein, 12 aa, Homo sapiens
  CDR3 for alpha chain variable domain of TCR clone 305053 (TRAV2, TRAJ9)
CAVGAGGFKTIF

SEQ ID NO: 610106 - protein, 15 aa, Homo sapiens
  CDR3 for beta chain variable domain of TCR clone 305053 (TRBV25-1, TRBJ1-4)
CASSPGDSTNEKLFF

SEQ ID NO: 610107 - protein, 14 aa, Homo sapiens
  CDR3 for alpha chain variable domain of TCR clone 305054 (TRAV17, TRAJ16)
CATADFSDGQKLLF

SEQ ID NO: 610108 - protein, 12 aa, Homo sapiens
  CDR3 for beta chain variable domain of TCR clone 305054 (TRBV7-9, TRBJ1-5)
CASSPQGQPQHF

SEQ ID NO: 610109 - protein, 14 aa, Homo sapiens
  CDR3 for alpha chain variable domain of TCR clone 305055 (TRAV20, TRAJ56)
CAVQFGGANSKLTF

SEQ ID NO: 610110 - protein, 14 aa, Homo sapiens
  CDR3 for beta chain variable domain of TCR clone 305055 (TRBV20-1, TRBJ2-7)
CSAKRGRGSYAQYF

SEQ ID NO: 610111 - protein, 15 aa, Homo sapiens
  CDR3 for alpha chain variable domain of TCR clone 305056 (TRAV26-1, TRAJ29)
CIVRVEGSGSTPLVF

SEQ ID NO: 610112 - protein, 18 aa, Homo sapiens
  CDR3 for beta chain variable domain of TCR clone 305056 (TRBV12-4, TRBJ1-1)
CASSKTGLWRTLKLSLDK

SEQ ID NO: 610113 - protein, 16 aa, Homo sapiens
  CDR3 for alpha chain variable domain of TCR clone 305057 (TRAV16, TRAJ4)
CALSRMFSGGYNKLIF

SEQ ID NO: 610114 - protein, 14 aa, Homo sapiens
  CDR3 for beta chain variable domain of TCR clone 305057 (TRBV28, TRBJ2-5)
CASSFRGPQETQYF

SEQ ID NO: 610115 - protein, 15 aa, Homo sapiens
  CDR3 for alpha chain variable domain of TCR clone 305058 (TRAV2, TRAJ9)
RAVAALNTGGFKTIF

SEQ ID NO: 610116 - protein, 16 aa, Homo sapiens
  CDR3 for beta chain variable domain of TCR clone 305058 (TRBV11-2, TRBJ2-1)
CASSFGGSFVYNEQFF

SEQ ID NO: 610117 - protein, 17 aa, Homo sapiens
  CDR3 for alpha chain variable domain of TCR clone 305059 (TRAV4, TRAJ13)
CLVGVQGSSGGYQKVTF

SEQ ID NO: 610118 - protein, 14 aa, Homo sapiens
  CDR3 for beta chain variable domain of TCR clone 305059 (TRBV11-2, TRBJ2-7)
CASSLGAGAYEQYF

SEQ ID NO: 610119 - protein, 16 aa, Homo sapiens
  CDR3 for alpha chain variable domain of TCR clone 305060 (TRAV13-1, TRAJ18)
CAASRMRGSTLGRLYS

SEQ ID NO: 610120 - protein, 16 aa, Homo sapiens
  CDR3 for beta chain variable domain of TCR clone 305060 (TRBV27, TRBJ1-1)
CASSSRGRTGYTEAFF

SEQ ID NO: 610121 - protein, 12 aa, Homo sapiens
  CDR3 for alpha chain variable domain of TCR clone 305061 (TRAV17, TRAJ39)
CATGAAGNMLTF

SEQ ID NO: 610122 - protein, 18 aa, Homo sapiens
  CDR3 for beta chain variable domain of TCR clone 305061 (TRBV20-1, TRBJ2-6)
CSAETTPTHGSGANVLTF

SEQ ID NO: 610123 - protein, 12 aa, Homo sapiens
  CDR3 for alpha chain variable domain of TCR clone 305062 (TRAV13-1, TRAJ21)
FAAKEGCNKFYF

SEQ ID NO: 610124 - protein, 13 aa, Homo sapiens
  CDR3 for beta chain variable domain of TCR clone 305062 (TRBV19, TRBJ2-7)
CASSPRQSYEQYF

SEQ ID NO: 610125 - protein, 12 aa, Homo sapiens
  CDR3 for alpha chain variable domain of TCR clone 305063 (TRAV3, TRAJ20)
CAVRDPDYKLSF

SEQ ID NO: 610126 - protein, 14 aa, Homo sapiens
  CDR3 for beta chain variable domain of TCR clone 305063 (TRBV11-3, TRBJ1-3)
CASSHNGQGNTIYF

SEQ ID NO: 610127 - protein, 14 aa, Homo sapiens
  CDR3 for alpha chain variable domain of TCR clone 305064 (TRAV2, TRAJ9)
CAVEDRSGGFKTIS

SEQ ID NO: 610128 - protein, 16 aa, Homo sapiens
  CDR3 for beta chain variable domain of TCR clone 305064 (TRBV28, TRBJ2-1)
CASSTRTSGRRNEQFF

SEQ ID NO: 610129 - protein, 14 aa, Homo sapiens
  CDR3 for alpha chain variable domain of TCR clone 305065 (TRAV26-1, TRAJ45)
CIEVTGGGADGLTL

SEQ ID NO: 610130 - protein, 12 aa, Homo sapiens
  CDR3 for beta chain variable domain of TCR clone 305065 (TRBV12-4, TRBJ2-7)
CASSLGVYEQYF

SEQ ID NO: 610131 - protein, 15 aa, Homo sapiens
  CDR3 for alpha chain variable domain of TCR clone 305066 (TRAV26-1, TRAJ44)
CIARVPFGTASKVTF

SEQ ID NO: 610132 - protein, 15 aa, Homo sapiens
  CDR3 for beta chain variable domain of TCR clone 305066 (TRBV20-1, TRBJ1-1)
CSASRGVTGNTEAFF

SEQ ID NO: 610133 - protein, 18 aa, Homo sapiens
  CDR3 for alpha chain variable domain of TCR clone 305067 (TRAV26-2, TRAJ54)
CMLRDVEVGMQGAQKLVF

SEQ ID NO: 610134 - protein, 17 aa, Homo sapiens
  CDR3 for beta chain variable domain of TCR clone 305067 (TRBV20-1, TRBJ1-5)
CSASLSPGQGGNQPQHF

SEQ ID NO: 610135 - protein, 11 aa, Homo sapiens
  CDR3 for alpha chain variable domain of TCR clone 305068 (TRAV2, TRAJ13)
CASGGYQKVTF

SEQ ID NO: 610136 - protein, 16 aa, Homo sapiens
  CDR3 for beta chain variable domain of TCR clone 305068 (TRBV6-1, TRBJ2-5)
CASSETLVRGAETQYF

SEQ ID NO: 610137 - protein, 13 aa, Homo sapiens
  CDR3 for alpha chain variable domain of TCR clone 305069 (TRAV8-3, TRAJ28)
CAVGAVGSYQLTF

SEQ ID NO: 610138 - protein, 14 aa, Homo sapiens
  CDR3 for beta chain variable domain of TCR clone 305069 (TRBV2, TRBJ1-5)
CASSGTGFNQPQHF

SEQ ID NO: 610139 - protein, 14 aa, Homo sapiens
  CDR3 for alpha chain variable domain of TCR clone 305070 (TRAV12-2, TRAJ40)
CAVKIPSGTYKYIF

SEQ ID NO: 610140 - protein, 16 aa, Homo sapiens
  CDR3 for beta chain variable domain of TCR clone 305070 (TRBV7-2, TRBJ2-5)
CASSSKWLSGQETQYF

SEQ ID NO: 610141 - protein, 15 aa, Homo sapiens
  CDR3 for alpha chain variable domain of TCR clone 305071 (TRAV3, TRAJ5)
CAVRDLDTGRRALTF

SEQ ID NO: 610142 - protein, 13 aa, Homo sapiens
  CDR3 for beta chain variable domain of TCR clone 305071 (TRBV12-3, TRBJ2-7)
CVSSPTETYEQYF

SEQ ID NO: 610143 - protein, 12 aa, Homo sapiens
  CDR3 for alpha chain variable domain of TCR clone 305072 (TRAV12-1, TRAJ40)
CVFYSGTYKYIV

SEQ ID NO: 610144 - protein, 16 aa, Homo sapiens
  CDR3 for beta chain variable domain of TCR clone 305072 (TRBV10-3, TRBJ2-1)
CAIRGGGRGDYNEQFF

SEQ ID NO: 610145 - protein, 14 aa, Homo sapiens
  CDR3 for alpha chain variable domain of TCR clone 305073 (TRAV8-2, TRAJ4)
CVVSPSGGYNKLIF

SEQ ID NO: 610146 - protein, 16 aa, Homo sapiens
  CDR3 for beta chain variable domain of TCR clone 305073 (TRBV12-4, TRBJ1-5)
CASSRPAGGSNQPQHF

SEQ ID NO: 610147 - protein, 15 aa, Homo sapiens
  CDR3 for alpha chain variable domain of TCR clone 305074 (TRAV3, TRAJ22)
CAVRDRGGSARQLTF

SEQ ID NO: 610148 - protein, 12 aa, Homo sapiens
  CDR3 for beta chain variable domain of TCR clone 305074 (TRBV7-2, TRBJ2-5)
CASSQYQETQYF

SEQ ID NO: 610149 - protein, 13 aa, Homo sapiens
  CDR3 for alpha chain variable domain of TCR clone 305075 (TRAV3, TRAJ21)
CAVREPDFNKFYF

SEQ ID NO: 610150 - protein, 13 aa, Homo sapiens
  CDR3 for beta chain variable domain of TCR clone 305075 (TRBV11-3, TRBJ2-1)
CASSSRRVDEQFF

SEQ ID NO: 610151 - protein, 16 aa, Homo sapiens
  CDR3 for alpha chain variable domain of TCR clone 305076 (TRAV3, TRAJ37)
CAVRGNGSGNPGKLIF

SEQ ID NO: 610152 - protein, 13 aa, Homo sapiens
  CDR3 for beta chain variable domain of TCR clone 305076 (TRBV4-2, TRBJ1-1)
CASSQAGNTEAFF

SEQ ID NO: 610153 - protein, 12 aa, Homo sapiens
  CDR3 for alpha chain variable domain of TCR clone 305077 (TRAV1-1, TRAJ43)
CAPRVSSIDMRF

SEQ ID NO: 610154 - protein, 15 aa, Homo sapiens
  CDR3 for beta chain variable domain of TCR clone 305077 (TRBV5-1, TRBJ2-7)
CASSLGDFTTYEQYF

SEQ ID NO: 610155 - protein, 14 aa, Homo sapiens
  CDR3 for alpha chain variable domain of TCR clone 305078 (TRAV23/DV6, TRAJ6)
CAASRSGGSYIPTF

SEQ ID NO: 610156 - protein, 17 aa, Homo sapiens
  CDR3 for beta chain variable domain of TCR clone 305078 (TRBV20-1, TRBJ2-1)
CSASASGLAGSYNEQFV

SEQ ID NO: 610157 - protein, 14 aa, Homo sapiens
  CDR3 for alpha chain variable domain of TCR clone 305079 (TRAV13-1, TRAJ44)
CAAKATGTASKLTF

SEQ ID NO: 610158 - protein, 15 aa, Homo sapiens
  CDR3 for beta chain variable domain of TCR clone 305079 (TRBV4-3, TRBJ2-7)
CASSQGDWGDYEQYF

SEQ ID NO: 610159 - protein, 15 aa, Homo sapiens
  CDR3 for alpha chain variable domain of TCR clone 305080 (TRAV3, TRAJ13)
CAVRDIGGGYQKVTF

SEQ ID NO: 610160 - protein, 15 aa, Homo sapiens
  CDR3 for beta chain variable domain of TCR clone 305080 (TRBV11-2, TRBJ2-1)
CASSLGTSGLNEQFF

SEQ ID NO: 610161 - protein, 14 aa, Homo sapiens
  CDR3 for alpha chain variable domain of TCR clone 305081 (TRAV38-1, TRAJ30)
CAFMPMNRDDKIIF

SEQ ID NO: 610162 - protein, 15 aa, Homo sapiens
  CDR3 for beta chain variable domain of TCR clone 305081 (TRBV7-9, TRBJ2-7)
CASSLDLEGPYEQYF

SEQ ID NO: 610163 - protein, 15 aa, Homo sapiens
  CDR3 for alpha chain variable domain of TCR clone 305082 (TRAV8-3, TRAJ45)
CASSYSGGGADGRTF

SEQ ID NO: 610164 - protein, 15 aa, Homo sapiens
  CDR3 for beta chain variable domain of TCR clone 305082 (TRBV19, TRBJ2-1)
CASSSPGVPLDEQFF

SEQ ID NO: 610165 - protein, 11 aa, Homo sapiens
  CDR3 for alpha chain variable domain of TCR clone 305083 (TRAV3, TRAJ21)
CAVGNFNKFYF

SEQ ID NO: 610166 - protein, 13 aa, Homo sapiens
  CDR3 for beta chain variable domain of TCR clone 305083 (TRBV7-9, TRBJ1-2)
CASSLEQNYGYTF

SEQ ID NO: 610167 - protein, 17 aa, Homo sapiens
  CDR3 for alpha chain variable domain of TCR clone 305084 (TRAV3, TRAJ6)
CAVSDGPRAGGSNIPTF

SEQ ID NO: 610168 - protein, 14 aa, Homo sapiens
  CDR3 for beta chain variable domain of TCR clone 305084 (TRBV7-2, TRBJ2-7)
CASSPKTSFYEQYF

SEQ ID NO: 610169 - protein, 12 aa, Homo sapiens
  CDR3 for alpha chain variable domain of TCR clone 305085 (TRAV12-1, TRAJ40)
CVVYSGTCKYIF

SEQ ID NO: 610170 - protein, 17 aa, Homo sapiens
  CDR3 for beta chain variable domain of TCR clone 305085 (TRBV11-3, TRBJ1-5)
CASSPLTGLRGNQPQHF

SEQ ID NO: 610171 - protein, 14 aa, Homo sapiens
  CDR3 for alpha chain variable domain of TCR clone 305086 (TRAV1-2, TRAJ16)
CAVSRFSDGQKLLF

SEQ ID NO: 610172 - protein, 15 aa, Homo sapiens
  CDR3 for beta chain variable domain of TCR clone 305086 (TRBV20-1, TRBJ2-7)
CSARVPAAYFYEQYF

SEQ ID NO: 610173 - protein, 11 aa, Homo sapiens
  CDR3 for alpha chain variable domain of TCR clone 305087 (TRAV2, TRAJ20)
CAVLNDYKLSF

SEQ ID NO: 610174 - protein, 17 aa, Homo sapiens
  CDR3 for beta chain variable domain of TCR clone 305087 (TRBV7-8, TRBJ2-6)
CASSAGTGGAGANVLTF

SEQ ID NO: 610175 - protein, 13 aa, Homo sapiens
  CDR3 for alpha chain variable domain of TCR clone 305088 (TRAV17, TRAJ43)
CATDVRYLDDMRF

SEQ ID NO: 610176 - protein, 16 aa, Homo sapiens
  CDR3 for beta chain variable domain of TCR clone 305088 (TRBV5-4, TRBJ2-3)
CASQQPGAGGADTQYF

SEQ ID NO: 610177 - protein, 10 aa, Homo sapiens
  CDR3 for alpha chain variable domain of TCR clone 305089 (TRAV5, TRAJ34)
CAEDTDKLIF

SEQ ID NO: 610178 - protein, 12 aa, Homo sapiens
  CDR3 for beta chain variable domain of TCR clone 305089 (TRBV11-2, TRBJ2-2)
CAGSLGGGELFF

SEQ ID NO: 610179 - protein, 12 aa, Homo sapiens
  CDR3 for alpha chain variable domain of TCR clone 305090 (TRAV12-2, TRAJ21)
CAVRYNFNKFYF

SEQ ID NO: 610180 - protein, 14 aa, Homo sapiens
  CDR3 for beta chain variable domain of TCR clone 305090 (TRBV28, TRBJ2-1)
CSSSYYTAYNEQFF

SEQ ID NO: 610181 - protein, 17 aa, Homo sapiens
  CDR3 for alpha chain variable domain of TCR clone 305091 (TRAV3, TRAJ6)
CAVRDAARAGGSYIPTF

SEQ ID NO: 610182 - protein, 14 aa, Homo sapiens
  CDR3 for beta chain variable domain of TCR clone 305091 (TRBV7-2, TRBJ2-7)
CASSPKTSFYEQYF

SEQ ID NO: 610183 - protein, 16 aa, Homo sapiens
  CDR3 for alpha chain variable domain of TCR clone 305092 (TRAV1-2, TRAJ10)
CAVRGVLTGGGNKLTF

SEQ ID NO: 610184 - protein, 16 aa, Homo sapiens
  CDR3 for beta chain variable domain of TCR clone 305092 (TRBV7-7, TRBJ2-1)
CAGSLASGTSYNEQFF

SEQ ID NO: 610185 - protein, 12 aa, Homo sapiens
  CDR3 for alpha chain variable domain of TCR clone 305093 (TRAV13-2, TRAJ8)
CAPLLGFQKLVF

SEQ ID NO: 610186 - protein, 18 aa, Homo sapiens
  CDR3 for beta chain variable domain of TCR clone 305093 (TRBV11-2, TRBJ2-3)
CASSLGGASRGAPNTQYF

SEQ ID NO: 610187 - protein, 14 aa, Homo sapiens
  CDR3 for alpha chain variable domain of TCR clone 305094 (TRAV12-1, TRAJ24)
CVVRSTDSGGKFQF

SEQ ID NO: 610188 - protein, 13 aa, Homo sapiens
  CDR3 for beta chain variable domain of TCR clone 305094 (TRBV2, TRBJ2-3)
CASILAGGQGQYF

SEQ ID NO: 610189 - protein, 14 aa, Homo sapiens
  CDR3 for alpha chain variable domain of TCR clone 305095 (TRAV12-3, TRAJ13)
CAMRNSGGYQNVTF

SEQ ID NO: 610190 - protein, 14 aa, Homo sapiens
  CDR3 for beta chain variable domain of TCR clone 305095 (TRBV7-9, TRBJ2-2)
CASSLVQDTGELFF

SEQ ID NO: 610191 - protein, 12 aa, Homo sapiens
  CDR3 for alpha chain variable domain of TCR clone 305096 (TRAV3, TRAJ7)
CADLLWEQQTRF

SEQ ID NO: 610192 - protein, 18 aa, Homo sapiens
  CDR3 for beta chain variable domain of TCR clone 305096 (TRBV7-3, TRBJ2-5)
CASSFRGGGDPVLRARHA

SEQ ID NO: 610193 - protein, 14 aa, Homo sapiens
  CDR3 for alpha chain variable domain of TCR clone 305097 (TRAV12-3, TRAJ9)
CAMSPNTGGFKTIF

SEQ ID NO: 610194 - protein, 13 aa, Homo sapiens
  CDR3 for beta chain variable domain of TCR clone 305097 (TRBV10-3, TRBJ2-7)
CAIRAGGPHEQYF

SEQ ID NO: 610195 - protein, 14 aa, Homo sapiens
  CDR3 for alpha chain variable domain of TCR clone 305098 (TRAV8-1, TRAJ5)
CAVRTDTGRRALTC

SEQ ID NO: 610196 - protein, 14 aa, Homo sapiens
  CDR3 for beta chain variable domain of TCR clone 305098 (TRBV5-5, TRBJ1-2)
CASSLDPYNYGYTF

SEQ ID NO: 610197 - protein, 14 aa, Homo sapiens
  CDR3 for alpha chain variable domain of TCR clone 305099 (TRAV17, TRAJ16)
CATADFSGGQKLLF

SEQ ID NO: 610198 - protein, 15 aa, Homo sapiens
  CDR3 for beta chain variable domain of TCR clone 305099 (TRBV18, TRBJ2-1)
CASSPPSASYNGQFF

SEQ ID NO: 610199 - protein, 15 aa, Homo sapiens
  CDR3 for alpha chain variable domain of TCR clone 305100 (TRAV23/DV6, TRAJ18)
CAARYRGSTLGRLTF

SEQ ID NO: 610200 - protein, 13 aa, Homo sapiens
  CDR3 for beta chain variable domain of TCR clone 305100 (TRBV7-2, TRBJ2-7)
CASSSPSGSEQYF

SEQ ID NO: 610201 - protein, 16 aa, Homo sapiens
  CDR3 for alpha chain variable domain of TCR clone 305101 (TRAV13-1, TRAJ13)
CTAFFLGVTGKLPLEL

SEQ ID NO: 610202 - protein, 15 aa, Homo sapiens
  CDR3 for beta chain variable domain of TCR clone 305101 (TRBV7-8, TRBJ2-1)
CASSLADSLYNEQFF

SEQ ID NO: 610203 - protein, 16 aa, Homo sapiens
  CDR3 for alpha chain variable domain of TCR clone 305102 (TRAV20, TRAJ52)
CAVLPDGGTSYGKLTF

SEQ ID NO: 610204 - protein, 12 aa, Homo sapiens
  CDR3 for beta chain variable domain of TCR clone 305102 (TRBV29-1, TRBJ2-3)
CSVTGGADTQYF

SEQ ID NO: 610205 - protein, 14 aa, Homo sapiens
  CDR3 for alpha chain variable domain of TCR clone 305103 (TRAV8-3, TRAJ4)
CAVGATGGYNKLIF

SEQ ID NO: 610206 - protein, 15 aa, Homo sapiens
  CDR3 for beta chain variable domain of TCR clone 305103 (TRBV5-1, TRBJ2-1)
CASSRRGPPTMSSSS

SEQ ID NO: 610207 - protein, 11 aa, Homo sapiens
  CDR3 for alpha chain variable domain of TCR clone 305104 (TRAV2, TRAJ33)
CAVESNYQLIW

SEQ ID NO: 610208 - protein, 17 aa, Homo sapiens
  CDR3 for beta chain variable domain of TCR clone 305104 (TRBV19, TRBJ2-7)
CASSISFYDSYHYEQYF

SEQ ID NO: 610209 - protein, 12 aa, Homo sapiens
  CDR3 for alpha chain variable domain of TCR clone 305105 (TRAV13-1, TRAJ21)
CAAKEGFNKFYF

SEQ ID NO: 610210 - protein, 14 aa, Homo sapiens
  CDR3 for beta chain variable domain of TCR clone 305105 (TRBV5-4, TRBJ1-1)
CASSLDSRRDEVFF

SEQ ID NO: 610211 - protein, 14 aa, Homo sapiens
  CDR3 for alpha chain variable domain of TCR clone 305106 (TRAV13-1, TRAJ44)
CAAKATGTASKPTF

SEQ ID NO: 610212 - protein, 13 aa, Homo sapiens
  CDR3 for beta chain variable domain of TCR clone 305106 (TRBV15, TRBJ2-5)
CATSQIGEETQYF

SEQ ID NO: 610213 - protein, 12 aa, Homo sapiens
  CDR3 for alpha chain variable domain of TCR clone 305107 (TRAV30, TRAJ43)
CGTEERGNDMRS

SEQ ID NO: 610214 - protein, 11 aa, Homo sapiens
  CDR3 for beta chain variable domain of TCR clone 305107 (TRBV29-1, TRBJ2-5)
CSEDRTGTQYF

SEQ ID NO: 610215 - protein, 12 aa, Homo sapiens
  CDR3 for alpha chain variable domain of TCR clone 305108 (TRAV36/DV7, TRAJ26)
CAVDNYDQNFVF

SEQ ID NO: 610216 - protein, 16 aa, Homo sapiens
  CDR3 for beta chain variable domain of TCR clone 305108 (TRBV7-3, TRBJ2-2)
CASSLTGTGTTGELFF

SEQ ID NO: 610217 - protein, 13 aa, Homo sapiens
  CDR3 for alpha chain variable domain of TCR clone 305109 (TRAV1-2, TRAJ9)
CAALNTGGFKTIF

SEQ ID NO: 610218 - protein, 14 aa, Homo sapiens
  CDR3 for beta chain variable domain of TCR clone 305109 (TRBV7-9, TRBJ1-2)
CASSRQGANYGYTF

SEQ ID NO: 610219 - protein, 14 aa, Homo sapiens
  CDR3 for alpha chain variable domain of TCR clone 305110 (TRAV12-2, TRAJ53)
CAVKGGSSNYKLTF

SEQ ID NO: 610220 - protein, 14 aa, Homo sapiens
  CDR3 for beta chain variable domain of TCR clone 305110 (TRBV7-7, TRBJ2-2)
CATRQDSDTGELFF

SEQ ID NO: 610221 - protein, 13 aa, Homo sapiens
  CDR3 for alpha chain variable domain of TCR clone 305111 (TRAV13-1, TRAJ53)
CAASKGRNYKLTF

SEQ ID NO: 610222 - protein, 13 aa, Homo sapiens
  CDR3 for beta chain variable domain of TCR clone 305111 (TRBV29-1, TRBJ2-5)
CSVTIASEETQYF

SEQ ID NO: 610223 - protein, 14 aa, Homo sapiens
  CDR3 for alpha chain variable domain of TCR clone 305112 (TRAV2, TRAJ32)
TTVGGGGATNKLIF

SEQ ID NO: 610224 - protein, 13 aa, Homo sapiens
  CDR3 for beta chain variable domain of TCR clone 305112 (TRBV20-1, TRBJ1-1)
CSARGGGNTEAFF

SEQ ID NO: 610225 - protein, 13 aa, Homo sapiens
  CDR3 for alpha chain variable domain of TCR clone 305113 (TRAV21, TRAJ20)
CAVGVFADYKLSF

SEQ ID NO: 610226 - protein, 13 aa, Homo sapiens
  CDR3 for beta chain variable domain of TCR clone 305113 (TRBV27, TRBJ2-3)
CASGQESTDTQYF

SEQ ID NO: 610227 - protein, 14 aa, Homo sapiens
  CDR3 for alpha chain variable domain of TCR clone 305114 (TRAV12-2, TRAJ5)
CAVKGDTGRRALTF

SEQ ID NO: 610228 - protein, 13 aa, Homo sapiens
  CDR3 for beta chain variable domain of TCR clone 305114 (TRBV27, TRBJ1-6)
CASSGTGDSPLHF

SEQ ID NO: 610229 - protein, 16 aa, Homo sapiens
  CDR3 for alpha chain variable domain of TCR clone 305115 (TRAV12-3, TRAJ53)
CAMSPGSGGSNYKLTF

SEQ ID NO: 610230 - protein, 15 aa, Homo sapiens
  CDR3 for beta chain variable domain of TCR clone 305115 (TRBV5-5, TRBJ1-1)
CASSLVGKDNTEAFF

SEQ ID NO: 610231 - protein, 11 aa, Homo sapiens
  CDR3 for alpha chain variable domain of TCR clone 305116 (TRAV8-3, TRAJ4)
CAVGARPDFKR

SEQ ID NO: 610232 - protein, 13 aa, Homo sapiens
  CDR3 for beta chain variable domain of TCR clone 305116 (TRBV20-1, TRBJ1-2)
CSATGIQGSGYTL

SEQ ID NO: 610233 - protein, 13 aa, Homo sapiens
  CDR3 for alpha chain variable domain of TCR clone 305117 (TRAV16, TRAJ20)
CALGPSNDYKLSF

SEQ ID NO: 610234 - protein, 16 aa, Homo sapiens
  CDR3 for beta chain variable domain of TCR clone 305117 (TRBV5-1, TRBJ2-5)
CASSLRRTSGQETQYF

SEQ ID NO: 610235 - protein, 13 aa, Homo sapiens
  CDR3 for alpha chain variable domain of TCR clone 305118 (TRAV20, TRAJ20)
CAVQAGSGYKLSF

SEQ ID NO: 610236 - protein, 13 aa, Homo sapiens
  CDR3 for beta chain variable domain of TCR clone 305118 (TRBV12-4, TRBJ1-1)
CASSPGTGFEAFF

SEQ ID NO: 610237 - protein, 12 aa, Homo sapiens
  CDR3 for alpha chain variable domain of TCR clone 305119 (TRAV35, TRAJ39)
LAPNNAGNMLTF

SEQ ID NO: 610238 - protein, 16 aa, Homo sapiens
  CDR3 for beta chain variable domain of TCR clone 305119 (TRBV2, TRBJ2-3)
CCSSTSVEGVTDTQYF

SEQ ID NO: 610239 - protein, 16 aa, Homo sapiens
  CDR3 for alpha chain variable domain of TCR clone 305120 (TRAV8-3, TRAJ28)
CAVGATLGLGVTNSLS

SEQ ID NO: 610240 - protein, 16 aa, Homo sapiens
  CDR3 for beta chain variable domain of TCR clone 305120 (TRBV7-2, TRBJ2-1)
CASSLEGYRSCNEQFF

SEQ ID NO: 610241 - protein, 12 aa, Homo sapiens
  CDR3 for alpha chain variable domain of TCR clone 305121 (TRAV23/DV6, TRAJ30)
RAASKGDDKIIF

SEQ ID NO: 610242 - protein, 17 aa, Homo sapiens
  CDR3 for beta chain variable domain of TCR clone 305121 (TRBV13, TRBJ2-3)
CASSLSRVAGGRNTQYF

SEQ ID NO: 610243 - protein, 13 aa, Homo sapiens
  CDR3 for alpha chain variable domain of TCR clone 305122 (TRAV8-3, TRAJ44)
CAVVPGTASKLTF

SEQ ID NO: 610244 - protein, 16 aa, Homo sapiens
  CDR3 for beta chain variable domain of TCR clone 305122 (TRBV12-4, TRBJ1-5)
CASSRPVGGSNQPQHF

SEQ ID NO: 610245 - protein, 12 aa, Homo sapiens
  CDR3 for alpha chain variable domain of TCR clone 305123 (TRAV12-3, TRAJ29)
CAAREGNTPLVF

SEQ ID NO: 610246 - protein, 16 aa, Homo sapiens
  CDR3 for beta chain variable domain of TCR clone 305123 (TRBV18, TRBJ2-1)
CQLTISRGAGDNEQFF

SEQ ID NO: 610247 - protein, 16 aa, Homo sapiens
  CDR3 for alpha chain variable domain of TCR clone 305124 (TRAV16, TRAJ52)
CALSGAGGTSYGKLTF

SEQ ID NO: 610248 - protein, 12 aa, Homo sapiens
  CDR3 for beta chain variable domain of TCR clone 305124 (TRBV12-4, TRBJ1-3)
CASSFSGNTIYF

SEQ ID NO: 610249 - protein, 17 aa, Homo sapiens
  CDR3 for alpha chain variable domain of TCR clone 305125 (TRAV12-3, TRAJ6)
CAMSARGGAGGGYLPTF

SEQ ID NO: 610250 - protein, 12 aa, Homo sapiens
  CDR3 for beta chain variable domain of TCR clone 305125 (TRBV12-4, TRBJ2-3)
CASSTLPDTQYF

SEQ ID NO: 610251 - protein, 16 aa, Homo sapiens
  CDR3 for alpha chain variable domain of TCR clone 305126 (TRAV3, TRAJ4)
CAVRPSPSGGYNKLIF

SEQ ID NO: 610252 - protein, 12 aa, Homo sapiens
  CDR3 for beta chain variable domain of TCR clone 305126 (TRBV7-9, TRBJ2-7)
CASGQGVYEQYF

SEQ ID NO: 610253 - protein, 15 aa, Homo sapiens
  CDR3 for alpha chain variable domain of TCR clone 305127 (TRAV29/DV5, TRAJ54)
CAAIPIVQGAQKLVF

SEQ ID NO: 610254 - protein, 15 aa, Homo sapiens
  CDR3 for beta chain variable domain of TCR clone 305127 (TRBV7-8, TRBJ1-2)
CASSLVRDGGLGYTF

SEQ ID NO: 610255 - protein, 17 aa, Homo sapiens
  CDR3 for alpha chain variable domain of TCR clone 305128 (TRAV4, TRAJ42)
CLVGVLNYGGSQGNLIF

SEQ ID NO: 610256 - protein, 15 aa, Homo sapiens
  CDR3 for beta chain variable domain of TCR clone 305128 (TRBV6-1, TRBJ2-6)
CASSSRPSGANVLTF

SEQ ID NO: 610257 - protein, 11 aa, Homo sapiens
  CDR3 for alpha chain variable domain of TCR clone 305129 (TRAV12-3, TRAJ49)
CAANTGNQFYF

SEQ ID NO: 610258 - protein, 16 aa, Homo sapiens
  CDR3 for beta chain variable domain of TCR clone 305129 (TRBV7-9, TRBJ2-3)
CASRPWREVGTDTQYF

SEQ ID NO: 610259 - protein, 12 aa, Homo sapiens
  CDR3 for alpha chain variable domain of TCR clone 305130 (TRAV3, TRAJ20)
CAVRDPDYKLSF

SEQ ID NO: 610260 - protein, 14 aa, Homo sapiens
  CDR3 for beta chain variable domain of TCR clone 305130 (TRBV7-9, TRBJ2-7)
CASSPRTGTYEQYF

SEQ ID NO: 610261 - protein, 19 aa, Homo sapiens
  CDR3 for alpha chain variable domain of TCR clone 305131 (TRAV13-2, TRAJ37)
CACRPRQHRPTNLWARDNF

SEQ ID NO: 610262 - protein, 14 aa, Homo sapiens
  CDR3 for beta chain variable domain of TCR clone 305131 (TRBV12-4, TRBJ2-7)
CASSLTAGGYEQYF

SEQ ID NO: 610263 - protein, 14 aa, Homo sapiens
  CDR3 for alpha chain variable domain of TCR clone 305132 (TRAV12-1, TRAJ3)
CVVNLGSSASKIIF

SEQ ID NO: 610264 - protein, 14 aa, Homo sapiens
  CDR3 for beta chain variable domain of TCR clone 305132 (TRBV20-1, TRBJ2-3)
CSARGGTSTDTQYF

SEQ ID NO: 610265 - protein, 12 aa, Homo sapiens
  CDR3 for alpha chain variable domain of TCR clone 305133 (TRAV1-2, TRAJ26)
CAVRYYGENFVF

SEQ ID NO: 610266 - protein, 14 aa, Homo sapiens
  CDR3 for beta chain variable domain of TCR clone 305133 (TRBV11-1, TRBJ2-7)
CASSFRQGSYEQYF

SEQ ID NO: 610267 - protein, 14 aa, Homo sapiens
  CDR3 for alpha chain variable domain of TCR clone 305134 (TRAV23/DV6, TRAJ22)
CAATGSGSARQLTF

SEQ ID NO: 610268 - protein, 11 aa, Homo sapiens
  CDR3 for beta chain variable domain of TCR clone 305134 (TRBV7-2, TRBJ2-7)
CASSSGLWQYF

SEQ ID NO: 610269 - protein, 11 aa, Homo sapiens
  CDR3 for alpha chain variable domain of TCR clone 305135 (TRAV12-2, TRAJ29)
CAVTLRSPLVF

SEQ ID NO: 610270 - protein, 14 aa, Homo sapiens
  CDR3 for beta chain variable domain of TCR clone 305135 (TRBV19, TRBJ2-2)
CASSGQGIAGELFF

SEQ ID NO: 610271 - protein, 14 aa, Homo sapiens
  CDR3 for alpha chain variable domain of TCR clone 305136 (TRAV1-2, TRAJ16)
CSVNRFSDGQKLLF

SEQ ID NO: 610272 - protein, 13 aa, Homo sapiens
  CDR3 for beta chain variable domain of TCR clone 305136 (TRBV11-2, TRBJ2-5)
CASSFSSQETQYF

SEQ ID NO: 610273 - protein, 16 aa, Homo sapiens
  CDR3 for alpha chain variable domain of TCR clone 305137 (TRAV3, TRAJ21)
CAVRDIERGNFNKFYF

SEQ ID NO: 610274 - protein, 18 aa, Homo sapiens
  CDR3 for beta chain variable domain of TCR clone 305137 (TRBV24-1, TRBJ2-1)
CATSDLMFLGRGVHEQFF

SEQ ID NO: 610275 - protein, 14 aa, Homo sapiens
  CDR3 for alpha chain variable domain of TCR clone 305138 (TRAV3, TRAJ33)
CAVRDMDSNYQLIW

SEQ ID NO: 610276 - protein, 19 aa, Homo sapiens
  CDR3 for beta chain variable domain of TCR clone 305138 (TRBV7-3, TRBJ1-2)
CASSFPQCNDGELWLHLRF

SEQ ID NO: 610277 - protein, 19 aa, Homo sapiens
  CDR3 for alpha chain variable domain of TCR clone 305139 (TRAV29/DV5, TRAJ49)
CSVLLCSKLTVDTGNQFYF

SEQ ID NO: 610278 - protein, 17 aa, Homo sapiens
  CDR3 for beta chain variable domain of TCR clone 305139 (TRBV7-8, TRBJ2-6)
CASSAGTGGAGANVLTF

SEQ ID NO: 610279 - protein, 14 aa, Homo sapiens
  CDR3 for alpha chain variable domain of TCR clone 305140 (TRAV12-2, TRAJ5)
CPVNRSTGRRALTF

SEQ ID NO: 610280 - protein, 12 aa, Homo sapiens
  CDR3 for beta chain variable domain of TCR clone 305140 (TRBV19, TRBJ1-5)
CASSIAQQPQHF

SEQ ID NO: 610281 - protein, 14 aa, Homo sapiens
  CDR3 for alpha chain variable domain of TCR clone 305141 (TRAV1-2, TRAJ16)
CAVNRFSDGQKLLF

SEQ ID NO: 610282 - protein, 15 aa, Homo sapiens
  CDR3 for beta chain variable domain of TCR clone 305141 (TRBV3-1, TRBJ2-2)
CASSQGSGTFGELFF

SEQ ID NO: 610283 - protein, 14 aa, Homo sapiens
  CDR3 for alpha chain variable domain of TCR clone 305142 (TRAV16, TRAJ33)
CALSAMDSNYQLIW

SEQ ID NO: 610284 - protein, 15 aa, Homo sapiens
  CDR3 for beta chain variable domain of TCR clone 305142 (TRBV7-2, TRBJ2-3)
CASSLAGAFIDTQYF

SEQ ID NO: 610285 - protein, 11 aa, Homo sapiens
  CDR3 for alpha chain variable domain of TCR clone 305143 (TRAV12-1, TRAJ43)
CVEYDNNDMLV

SEQ ID NO: 610286 - protein, 16 aa, Homo sapiens
  CDR3 for beta chain variable domain of TCR clone 305143 (TRBV5-4, TRBJ2-1)
CASSLVGSGQDNEQFF

SEQ ID NO: 610287 - protein, 14 aa, Homo sapiens
  CDR3 for alpha chain variable domain of TCR clone 305144 (TRAV1-2, TRAJ8)
CAVREDTGFQKLVF

SEQ ID NO: 610288 - protein, 15 aa, Homo sapiens
  CDR3 for beta chain variable domain of TCR clone 305144 (TRBV7-3, TRBJ2-7)
CASSLNAQGAYEQYF

SEQ ID NO: 610289 - protein, 16 aa, Homo sapiens
  CDR3 for alpha chain variable domain of TCR clone 305145 (TRAV12-2, TRAJ32)
CAVNLGQGGATNELIF

SEQ ID NO: 610290 - protein, 15 aa, Homo sapiens
  CDR3 for beta chain variable domain of TCR clone 305145 (TRBV20-1, TRBJ2-7)
CSARGPRAGGREQYF

SEQ ID NO: 610291 - protein, 17 aa, Homo sapiens
  CDR3 for alpha chain variable domain of TCR clone 305146 (TRAV4, TRAJ13)
CLVGVQGSSGCYQKVTF

SEQ ID NO: 610292 - protein, 18 aa, Homo sapiens
  CDR3 for beta chain variable domain of TCR clone 305146 (TRBV15, TRBJ2-3)
CATSRDGARSWDTDTQYF

SEQ ID NO: 610293 - protein, 12 aa, Homo sapiens
  CDR3 for alpha chain variable domain of TCR clone 305147 (TRAV13-1, TRAJ9)
CAASYLGFKTIF

SEQ ID NO: 610294 - protein, 14 aa, Homo sapiens
  CDR3 for beta chain variable domain of TCR clone 305147 (TRBV12-4, TRBJ2-7)
CASSPAGLKYEQYF

SEQ ID NO: 610295 - protein, 16 aa, Homo sapiens
  CDR3 for alpha chain variable domain of TCR clone 305148 (TRAV38-2/DV8, TRAJ45)
CAYTTTSGGGADGLTF

SEQ ID NO: 610296 - protein, 14 aa, Homo sapiens
  CDR3 for beta chain variable domain of TCR clone 305148 (TRBV7-9, TRBJ2-2)
CASSLGHRTGELFL

SEQ ID NO: 610297 - protein, 15 aa, Homo sapiens
  CDR3 for alpha chain variable domain of TCR clone 305149 (TRAV2, TRAJ9)
CAVEDRGTGGFKTVF

SEQ ID NO: 610298 - protein, 12 aa, Homo sapiens
  CDR3 for beta chain variable domain of TCR clone 305149 (TRBV11-2, TRBJ2-2)
CASSLGGGELFF

SEQ ID NO: 610299 - protein, 11 aa, Homo sapiens
  CDR3 for alpha chain variable domain of TCR clone 305150 (TRAV1-1, TRAJ23)
CAVRQGGKLIF

SEQ ID NO: 610300 - protein, 19 aa, Homo sapiens
  CDR3 for beta chain variable domain of TCR clone 305150 (TRBV7-8, TRBJ2-2)
CSSHLFPGPTIHITGELFF

SEQ ID NO: 610301 - protein, 13 aa, Homo sapiens
  CDR3 for alpha chain variable domain of TCR clone 305151 (TRAV21, TRAJ3)
CCEPYSSASKIIF

SEQ ID NO: 610302 - protein, 15 aa, Homo sapiens
  CDR3 for beta chain variable domain of TCR clone 305151 (TRBV6-3, TRBJ2-7)
CASSSPGTVFYEQYF

SEQ ID NO: 610303 - protein, 12 aa, Homo sapiens
  CDR3 for alpha chain variable domain of TCR clone 305152 (TRAV35, TRAJ49)
CAGWNTGNQFYF

SEQ ID NO: 610304 - protein, 14 aa, Homo sapiens
  CDR3 for beta chain variable domain of TCR clone 305152 (TRBV7-2, TRBJ2-7)
CASRSQGAAYEQYF

SEQ ID NO: 610305 - protein, 13 aa, Homo sapiens
  CDR3 for alpha chain variable domain of TCR clone 305153 (TRAV4, TRAJ20)
CLVGSSNDYKLSF

SEQ ID NO: 610306 - protein, 14 aa, Homo sapiens
  CDR3 for beta chain variable domain of TCR clone 305153 (TRBV12-4, TRBJ1-1)
CASSLGTGGTEAFF

SEQ ID NO: 610307 - protein, 16 aa, Homo sapiens
  CDR3 for alpha chain variable domain of TCR clone 305154 (TRAV8-4, TRAJ53)
CAVSVSPGGSNFKLTF

SEQ ID NO: 610308 - protein, 16 aa, Homo sapiens
  CDR3 for beta chain variable domain of TCR clone 305154 (TRBV7-3, TRBJ2-2)
CASSLKRGTLSGELFF

SEQ ID NO: 610309 - protein, 14 aa, Homo sapiens
  CDR3 for alpha chain variable domain of TCR clone 305155 (TRAV12-1, TRAJ33)
CVVNPEDINYQLIW

SEQ ID NO: 610310 - protein, 11 aa, Homo sapiens
  CDR3 for beta chain variable domain of TCR clone 305155 (TRBV7-6, TRBJ2-1)
CASSNYGEQFF

SEQ ID NO: 610311 - protein, 12 aa, Homo sapiens
  CDR3 for alpha chain variable domain of TCR clone 305156 (TRAV12-2, TRAJ10)
WGVTGGGNKLTF

SEQ ID NO: 610312 - protein, 14 aa, Homo sapiens
  CDR3 for beta chain variable domain of TCR clone 305156 (TRBV7-2, TRBJ2-5)
CASSLSGGGETQYF

SEQ ID NO: 610313 - protein, 16 aa, Homo sapiens
  CDR3 for alpha chain variable domain of TCR clone 305157 (TRAV1-2, TRAJ10)
CALRGVLTGGGNKLTV

SEQ ID NO: 610314 - protein, 12 aa, Homo sapiens
  CDR3 for beta chain variable domain of TCR clone 305157 (TRBV11-2, TRBJ2-1)
CASSPGNNEQFF

SEQ ID NO: 610315 - protein, 14 aa, Homo sapiens
  CDR3 for alpha chain variable domain of TCR clone 305158 (TRAV12-3, TRAJ33)
CAVKRARSNYQLIW

SEQ ID NO: 610316 - protein, 12 aa, Homo sapiens
  CDR3 for beta chain variable domain of TCR clone 305158 (TRBV24-1, TRBJ2-3)
CATSDSTDTQYF

SEQ ID NO: 610317 - protein, 14 aa, Homo sapiens
  CDR3 for alpha chain variable domain of TCR clone 305159 (TRAV1-2, TRAJ16)
CAVNRFSDGQKLLF

SEQ ID NO: 610318 - protein, 18 aa, Homo sapiens
  CDR3 for beta chain variable domain of TCR clone 305159 (TRBV5-5, TRBJ2-1)
CASSLGPSLGHTYNEQFF

SEQ ID NO: 610319 - protein, 14 aa, Homo sapiens
  CDR3 for alpha chain variable domain of TCR clone 305160 (TRAV12-1, TRAJ38)
CGELKAGNNRKLIW

SEQ ID NO: 610320 - protein, 15 aa, Homo sapiens
  CDR3 for beta chain variable domain of TCR clone 305160 (TRBV18, TRBJ2-1)
CACSPPSASYNEQFF

SEQ ID NO: 610321 - protein, 17 aa, Homo sapiens
  CDR3 for alpha chain variable domain of TCR clone 305161 (TRAV3, TRAJ38)
CAVRDCLNAGNNRKLIW

SEQ ID NO: 610322 - protein, 12 aa, Homo sapiens
  CDR3 for beta chain variable domain of TCR clone 305161 (TRBV2, TRBJ2-1)
CAYGPPGNEQFF

SEQ ID NO: 610323 - protein, 13 aa, Homo sapiens
  CDR3 for alpha chain variable domain of TCR clone 305162 (TRAV12-3, TRAJ13)
CAMTSGGYQKVTF

SEQ ID NO: 610324 - protein, 13 aa, Homo sapiens
  CDR3 for beta chain variable domain of TCR clone 305162 (TRBV7-9, TRBJ1-2)
RASSLKQNYGYTF

SEQ ID NO: 610325 - protein, 12 aa, Homo sapiens
  CDR3 for alpha chain variable domain of TCR clone 305163 (TRAV17, TRAJ20)
CATDRYDYKLSF

SEQ ID NO: 610326 - protein, 14 aa, Homo sapiens
  CDR3 for beta chain variable domain of TCR clone 305163 (TRBV19, TRBJ2-1)
CASPTFVLSGEQFV

SEQ ID NO: 610327 - protein, 14 aa, Homo sapiens
  CDR3 for alpha chain variable domain of TCR clone 305164 (TRAV13-1, TRAJ26)
CAAISAHYGQNFVF

SEQ ID NO: 610328 - protein, 17 aa, Homo sapiens
  CDR3 for beta chain variable domain of TCR clone 305164 (TRBV25-1, TRBJ2-5)
CASSRRGGRGGQETQYF

SEQ ID NO: 610329 - protein, 21 aa, Homo sapiens
  CDR3 for alpha chain variable domain of TCR clone 305165 (TRAV26-1, TRAJ38)
CIADNAGNNHIQHPDPAVYQL

SEQ ID NO: 610330 - protein, 13 aa, Homo sapiens
  CDR3 for beta chain variable domain of TCR clone 305165 (TRBV20-1, TRBJ1-1)
CSARGGGNTEAFF

SEQ ID NO: 610331 - protein, 12 aa, Homo sapiens
  CDR3 for alpha chain variable domain of TCR clone 305166 (TRAV27, TRAJ21)
CAGVRQIQQILL

SEQ ID NO: 610332 - protein, 14 aa, Homo sapiens
  CDR3 for beta chain variable domain of TCR clone 305166 (TRBV7-9, TRBJ1-4)
CASSLEGQSEKLFF

SEQ ID NO: 610333 - protein, 18 aa, Homo sapiens
  CDR3 for alpha chain variable domain of TCR clone 305167 (TRAV21, TRAJ52)
CAVRPSPAGGTSYGKLTF

SEQ ID NO: 610334 - protein, 16 aa, Homo sapiens
  CDR3 for beta chain variable domain of TCR clone 305167 (TRBV6-6, TRBJ2-1)
CASSWGGQGPYNEQFF

SEQ ID NO: 610335 - protein, 17 aa, Homo sapiens
  CDR3 for alpha chain variable domain of TCR clone 305168 (TRAV12-3, TRAJ26)
CAMSGGRWDNYGQNFVF

SEQ ID NO: 610336 - protein, 17 aa, Homo sapiens
  CDR3 for beta chain variable domain of TCR clone 305168 (TRBV12-4, TRBJ2-2)
CQQTLRGGALNTGELFF

SEQ ID NO: 610337 - protein, 15 aa, Homo sapiens
  CDR3 for alpha chain variable domain of TCR clone 305169 (TRAV20, TRAJ41)
CAVQATSNSGYALNF

SEQ ID NO: 610338 - protein, 14 aa, Homo sapiens
  CDR3 for beta chain variable domain of TCR clone 305169 (TRBV25-1, TRBJ1-1)
CASTHLGGNTEAFF

SEQ ID NO: 610339 - protein, 14 aa, Homo sapiens
  CDR3 for alpha chain variable domain of TCR clone 305170 (TRAV13-1, TRAJ44)
CSAKATGTASKLTF

SEQ ID NO: 610340 - protein, 14 aa, Homo sapiens
  CDR3 for beta chain variable domain of TCR clone 305170 (TRBV7-3, TRBJ1-1)
CASSLKGGNTEAFF

SEQ ID NO: 610341 - protein, 23 aa, Homo sapiens
  CDR3 for alpha chain variable domain of TCR clone 305171 (TRAV26-1, )
CIADNAGSNHIQNPDPAVYQLRD

SEQ ID NO: 610342 - protein, 13 aa, Homo sapiens
  CDR3 for beta chain variable domain of TCR clone 305171 (TRBV10-3, TRBJ2-7)
CASKLAVNYEQYF

SEQ ID NO: 610343 - protein, 14 aa, Homo sapiens
  CDR3 for alpha chain variable domain of TCR clone 305172 (TRAV17, TRAJ35)
CATDRLGFGNGLHC

SEQ ID NO: 610344 - protein, 14 aa, Homo sapiens
  CDR3 for beta chain variable domain of TCR clone 305172 (TRBV7-8, TRBJ2-3)
CASSLEAGTDTQYF

SEQ ID NO: 610345 - protein, 16 aa, Homo sapiens
  CDR3 for alpha chain variable domain of TCR clone 305173 (TRAV23/DV6, TRAJ9)
CAASIGANTGGFKTIF

SEQ ID NO: 610346 - protein, 17 aa, Homo sapiens
  CDR3 for beta chain variable domain of TCR clone 305173 (TRBV13, TRBJ2-3)
CASSLSRVAGGRNTQYF

SEQ ID NO: 610347 - protein, 15 aa, Homo sapiens
  CDR3 for alpha chain variable domain of TCR clone 305174 (TRAV8-3, TRAJ15)
CAVGAPNQAGTALIF

SEQ ID NO: 610348 - protein, 13 aa, Homo sapiens
  CDR3 for beta chain variable domain of TCR clone 305174 (TRBV19, TRBJ1-2)
CASSVPGQDGYTF

SEQ ID NO: 610349 - protein, 12 aa, Homo sapiens
  CDR3 for alpha chain variable domain of TCR clone 305175 (TRAV38-1, TRAJ20)
CAFIWNDYKLNF

SEQ ID NO: 610350 - protein, 14 aa, Homo sapiens
  CDR3 for beta chain variable domain of TCR clone 305175 (TRBV27, TRBJ1-1)
CASSPQGKRAEAFF

SEQ ID NO: 610351 - protein, 14 aa, Homo sapiens
  CDR3 for alpha chain variable domain of TCR clone 305176 (TRAV1-2, TRAJ16)
CAVNRFSDGQKLLF

SEQ ID NO: 610352 - protein, 13 aa, Homo sapiens
  CDR3 for beta chain variable domain of TCR clone 305176 (TRBV5-1, TRBJ1-1)
CASSADWDTEAVF

SEQ ID NO: 610353 - protein, 15 aa, Homo sapiens
  CDR3 for alpha chain variable domain of TCR clone 305177 (TRAV20, TRAJ53)
CAVQASGGSNYKLTF

SEQ ID NO: 610354 - protein, 15 aa, Homo sapiens
  CDR3 for beta chain variable domain of TCR clone 305177 (TRBV9, TRBJ2-1)
CASGLAGSSYNEQFF

SEQ ID NO: 610355 - protein, 14 aa, Homo sapiens
  CDR3 for alpha chain variable domain of TCR clone 305178 (TRAV12-2, TRAJ36)
CAVKISTGANNLFF

SEQ ID NO: 610356 - protein, 14 aa, Homo sapiens
  CDR3 for beta chain variable domain of TCR clone 305178 (TRBV25-1, TRBJ1-2)
CGSSDTTGVVGYTF

SEQ ID NO: 610357 - protein, 14 aa, Homo sapiens
  CDR3 for alpha chain variable domain of TCR clone 305179 (TRAV23/DV6, TRAJ8)
CAAIKNTGFQKLVF

SEQ ID NO: 610358 - protein, 16 aa, Homo sapiens
  CDR3 for beta chain variable domain of TCR clone 305179 (TRBV4-1, TRBJ2-6)
CASSQVGDPGANVLTF

SEQ ID NO: 610359 - protein, 15 aa, Homo sapiens
  CDR3 for alpha chain variable domain of TCR clone 305180 (TRAV29/DV5, TRAJ24)
CAASGATDSWGKFQF

SEQ ID NO: 610360 - protein, 15 aa, Homo sapiens
  CDR3 for beta chain variable domain of TCR clone 305180 (TRBV9, TRBJ1-6)
CASSVAGTGDSPLHF

SEQ ID NO: 610361 - protein, 12 aa, Homo sapiens
  CDR3 for alpha chain variable domain of TCR clone 305181 (TRAV26-2, TRAJ21)
CILKGNFDKFYF

SEQ ID NO: 610362 - protein, 14 aa, Homo sapiens
  CDR3 for beta chain variable domain of TCR clone 305181 (TRBV7-9, TRBJ1-1)
CASTPLQSYTEAFF

SEQ ID NO: 610363 - protein, 12 aa, Homo sapiens
  CDR3 for alpha chain variable domain of TCR clone 305182 (TRAV3, TRAJ20)
CAVRDGDYKLSF

SEQ ID NO: 610364 - protein, 16 aa, Homo sapiens
  CDR3 for beta chain variable domain of TCR clone 305182 (TRBV29-1, TRBJ2-7)
CSVEDAEDGTAYEQYF

SEQ ID NO: 610365 - protein, 19 aa, Homo sapiens
  CDR3 for alpha chain variable domain of TCR clone 305183 (TRAV26-1, TRAJ29)
CCVLLIVRVEGSRNTPLVF

SEQ ID NO: 610366 - protein, 15 aa, Homo sapiens
  CDR3 for beta chain variable domain of TCR clone 305183 (TRBV7-9, TRBJ1-5)
CASSQGHQPNQPQHF

SEQ ID NO: 610367 - protein, 13 aa, Homo sapiens
  CDR3 for alpha chain variable domain of TCR clone 305184 (TRAV27, TRAJ45)
CRSSGGGADGLTF

SEQ ID NO: 610368 - protein, 15 aa, Homo sapiens
  CDR3 for beta chain variable domain of TCR clone 305184 (TRBV11-2, TRBJ1-3)
CASSLDGTVGNTMYF

SEQ ID NO: 610369 - protein, 17 aa, Homo sapiens
  CDR3 for alpha chain variable domain of TCR clone 305185 (TRAV8-6, TRAJ58)
CAVSSWVGETSGSRLTF

SEQ ID NO: 610370 - protein, 17 aa, Homo sapiens
  CDR3 for beta chain variable domain of TCR clone 305185 (TRBV11-2, TRBJ2-1)
CASSIYPPGVEYNEQFF

SEQ ID NO: 610371 - protein, 17 aa, Homo sapiens
  CDR3 for alpha chain variable domain of TCR clone 305186 (TRAV35, TRAJ47)
GLLDCRTHTEYGNKLVF

SEQ ID NO: 610372 - protein, 11 aa, Homo sapiens
  CDR3 for beta chain variable domain of TCR clone 305186 (TRBV29-1, TRBJ1-1)
CGAEVGTRTFF

SEQ ID NO: 610373 - protein, 14 aa, Homo sapiens
  CDR3 for alpha chain variable domain of TCR clone 305187 (TRAV2, TRAJ17)
CAVVGKAAGNKLTL

SEQ ID NO: 610374 - protein, 13 aa, Homo sapiens
  CDR3 for beta chain variable domain of TCR clone 305187 (TRBV7-2, TRBJ2-7)
CASSAGLSYEQYF

SEQ ID NO: 610375 - protein, 13 aa, Homo sapiens
  CDR3 for alpha chain variable domain of TCR clone 305188 (TRAV1-1, TRAJ33)
CAVRRDSNYQLIW

SEQ ID NO: 610376 - protein, 16 aa, Homo sapiens
  CDR3 for beta chain variable domain of TCR clone 305188 (TRBV6-1, TRBJ2-2)
CASSAFRGGDTGELFV

SEQ ID NO: 610377 - protein, 17 aa, Homo sapiens
  CDR3 for alpha chain variable domain of TCR clone 305189 (TRAV13-1, TRAJ52)
CAASSGAGGTSYGKLTF

SEQ ID NO: 610378 - protein, 21 aa, Homo sapiens
  CDR3 for beta chain variable domain of TCR clone 305189 (TRBV4-2, TRBJ2-3)
PCSQKTRPCISVPAAPDTQYF

SEQ ID NO: 610379 - protein, 11 aa, Homo sapiens
  CDR3 for alpha chain variable domain of TCR clone 305190 (TRAV13-1, TRAJ39)
CASHAGNMLTF

SEQ ID NO: 610380 - protein, 16 aa, Homo sapiens
  CDR3 for beta chain variable domain of TCR clone 305190 (TRBV27, TRBJ2-2)
CASSFRGLVRTGELFF

SEQ ID NO: 610381 - protein, 16 aa, Homo sapiens
  CDR3 for alpha chain variable domain of TCR clone 305191 (TRAV4, TRAJ22)
CLVGDLYSGSASQMTF

SEQ ID NO: 610382 - protein, 16 aa, Homo sapiens
  CDR3 for beta chain variable domain of TCR clone 305191 (TRBV7-9, TRBJ2-1)
CASSDVAGGSYNEQFF

SEQ ID NO: 610383 - protein, 11 aa, Homo sapiens
  CDR3 for alpha chain variable domain of TCR clone 305192 (TRAV2, TRAJ33)
CAVDSNYQLIW

SEQ ID NO: 610384 - protein, 13 aa, Homo sapiens
  CDR3 for beta chain variable domain of TCR clone 305192 (TRBV2, TRBJ2-7)
CASSVGGSGEQYF

SEQ ID NO: 610385 - protein, 17 aa, Homo sapiens
  CDR3 for alpha chain variable domain of TCR clone 305193 (TRAV38-1, TRAJ45)
CAFMRSRSGGGADGPTF

SEQ ID NO: 610386 - protein, 15 aa, Homo sapiens
  CDR3 for beta chain variable domain of TCR clone 305193 (TRBV7-2, TRBJ2-3)
CASSLVARGPDTQYF

SEQ ID NO: 610387 - protein, 10 aa, Homo sapiens
  CDR3 for alpha chain variable domain of TCR clone 305194 (TRAV8-4, TRAJ43)
CAVRADDMRF

SEQ ID NO: 610388 - protein, 11 aa, Homo sapiens
  CDR3 for beta chain variable domain of TCR clone 305194 (TRBV12-4, TRBJ2-3)
CASTATDTQYF

SEQ ID NO: 610389 - protein, 13 aa, Homo sapiens
  CDR3 for alpha chain variable domain of TCR clone 305195 (TRAV6, TRAJ4)
CALLRGGYNKLIF

SEQ ID NO: 610390 - protein, 15 aa, Homo sapiens
  CDR3 for beta chain variable domain of TCR clone 305195 (TRBV5-7, TRBJ2-7)
CASSLGPGRGHEQYF

SEQ ID NO: 610391 - protein, 14 aa, Homo sapiens
  CDR3 for alpha chain variable domain of TCR clone 305196 (TRAV12-3, TRAJ10)
SHLPLTGGGNKLTF

SEQ ID NO: 610392 - protein, 11 aa, Homo sapiens
  CDR3 for beta chain variable domain of TCR clone 305196 (TRBV29-1, TRBJ2-5)
CSEGRTGTQYF

SEQ ID NO: 610393 - protein, 14 aa, Homo sapiens
  CDR3 for alpha chain variable domain of TCR clone 305197 (TRAV8-3, TRAJ45)
CALNSGGGADGLTF

SEQ ID NO: 610394 - protein, 13 aa, Homo sapiens
  CDR3 for beta chain variable domain of TCR clone 305197 (TRBV12-4, TRBJ1-1)
CASSPGTGFEAFF

SEQ ID NO: 610395 - protein, 15 aa, Homo sapiens
  CDR3 for alpha chain variable domain of TCR clone 305198 (TRAV12-1, TRAJ44)
CVAALPTGTASKLTF

SEQ ID NO: 610396 - protein, 13 aa, Homo sapiens
  CDR3 for beta chain variable domain of TCR clone 305198 (TRBV7-9, TRBJ1-2)
CASSLKQNYGYTF

SEQ ID NO: 610397 - protein, 11 aa, Homo sapiens
  CDR3 for alpha chain variable domain of TCR clone 305199 (TRAV13-1, TRAJ33)
CAANSNYQLIW

SEQ ID NO: 610398 - protein, 14 aa, Homo sapiens
  CDR3 for beta chain variable domain of TCR clone 305199 (TRBV7-2, TRBJ2-3)
CQQLRAGGRDTQYF

SEQ ID NO: 610399 - protein, 14 aa, Homo sapiens
  CDR3 for alpha chain variable domain of TCR clone 305200 (TRAV12-2, TRAJ45)
CALPERGGADGLTF

SEQ ID NO: 610400 - protein, 14 aa, Homo sapiens
  CDR3 for beta chain variable domain of TCR clone 305200 (TRBV18, TRBJ1-5)
CASSPGNSIQPQHF

SEQ ID NO: 610401 - protein, 14 aa, Homo sapiens
  CDR3 for alpha chain variable domain of TCR clone 305201 (TRAV12-3, TRAJ29)
CAMILFSGNTPLVF

SEQ ID NO: 610402 - protein, 16 aa, Homo sapiens
  CDR3 for beta chain variable domain of TCR clone 305201 (TRBV28, TRBJ2-7)
CASSSGTSGRGYEQYF

SEQ ID NO: 610403 - protein, 15 aa, Homo sapiens
  CDR3 for alpha chain variable domain of TCR clone 305202 (TRAV26-1, TRAJ29)
CIVRVEGSGNTPLVL

SEQ ID NO: 610404 - protein, 12 aa, Homo sapiens
  CDR3 for beta chain variable domain of TCR clone 305202 (TRBV12-4, TRBJ2-3)
CASSTLPDTQYF

SEQ ID NO: 610405 - protein, 16 aa, Homo sapiens
  CDR3 for alpha chain variable domain of TCR clone 305203 (TRAV8-3, TRAJ42)
CAVGEGNGGSQGNRIF

SEQ ID NO: 610406 - protein, 13 aa, Homo sapiens
  CDR3 for beta chain variable domain of TCR clone 305203 (TRBV20-1, TRBJ1-1)
CSAPLGGGTEAFF

SEQ ID NO: 610407 - protein, 14 aa, Homo sapiens
  CDR3 for alpha chain variable domain of TCR clone 305204 (TRAV4, TRAJ9)
CLVGSGTGGFKTIF

SEQ ID NO: 610408 - protein, 16 aa, Homo sapiens
  CDR3 for beta chain variable domain of TCR clone 305204 (TRBV12-4, TRBJ1-5)
CASRQPVEGSNQPQHF

SEQ ID NO: 610409 - protein, 10 aa, Homo sapiens
  CDR3 for alpha chain variable domain of TCR clone 305205 (TRAV20, TRAJ22)
CAAPARQLTF

SEQ ID NO: 610410 - protein, 14 aa, Homo sapiens
  CDR3 for beta chain variable domain of TCR clone 305205 (TRBV19, TRBJ2-1)
CAISMGSGATEQFF

SEQ ID NO: 610411 - protein, 13 aa, Homo sapiens
  CDR3 for alpha chain variable domain of TCR clone 305206 (TRAV3, TRAJ20)
CAVRDTGDYKLSF

SEQ ID NO: 610412 - protein, 12 aa, Homo sapiens
  CDR3 for beta chain variable domain of TCR clone 305206 (TRBV12-4, TRBJ2-7)
CASSLGGYEQYF

SEQ ID NO: 610413 - protein, 12 aa, Homo sapiens
  CDR3 for alpha chain variable domain of TCR clone 305207 (TRAV12-3, TRAJ17)
CAMTLTGNKLTF

SEQ ID NO: 610414 - protein, 15 aa, Homo sapiens
  CDR3 for beta chain variable domain of TCR clone 305207 (TRBV6-5, TRBJ2-7)
CASSASGRWSYEQYF

SEQ ID NO: 610415 - protein, 11 aa, Homo sapiens
  CDR3 for alpha chain variable domain of TCR clone 305208 (TRAV21, TRAJ34)
CAHYNTDKLIF

SEQ ID NO: 610416 - protein, 14 aa, Homo sapiens
  CDR3 for beta chain variable domain of TCR clone 305208 (TRBV6-1, TRBJ1-3)
CASGQGGGGNTMYF

SEQ ID NO: 610417 - protein, 13 aa, Homo sapiens
  CDR3 for alpha chain variable domain of TCR clone 305209 (TRAV2, TRAJ40)
CAVVTSGTSKYIF

SEQ ID NO: 610418 - protein, 12 aa, Homo sapiens
  CDR3 for beta chain variable domain of TCR clone 305209 (TRBV11-2, TRBJ2-1)
CASSPGNNEQFF

SEQ ID NO: 610419 - protein, 13 aa, Homo sapiens
  CDR3 for alpha chain variable domain of TCR clone 305210 (TRAV17, TRAJ22)
CAHHSGSARQLTF

SEQ ID NO: 610420 - protein, 14 aa, Homo sapiens
  CDR3 for beta chain variable domain of TCR clone 305210 (TRBV16, TRBJ1-1)
CASSQAGPITEAFF

SEQ ID NO: 610421 - protein, 14 aa, Homo sapiens
  CDR3 for alpha chain variable domain of TCR clone 305211 (TRAV26-1, TRAJ38)
CIAANAGNNRKLIW

SEQ ID NO: 610422 - protein, 14 aa, Homo sapiens
  CDR3 for beta chain variable domain of TCR clone 305211 (TRBV6-1, TRBJ1-3)
CASVQGGGGNTIYF

SEQ ID NO: 610423 - protein, 12 aa, Homo sapiens
  CDR3 for alpha chain variable domain of TCR clone 305212 (TRAV3, TRAJ20)
CAVRDGDYKLSF

SEQ ID NO: 610424 - protein, 14 aa, Homo sapiens
  CDR3 for beta chain variable domain of TCR clone 305212 (TRBV11-1, TRBJ2-7)
CASSWTGTAYEQYF

SEQ ID NO: 610425 - protein, 12 aa, Homo sapiens
  CDR3 for alpha chain variable domain of TCR clone 305213 (TRAV23/DV6, TRAJ30)
CAASKGDDKIIF

SEQ ID NO: 610426 - protein, 15 aa, Homo sapiens
  CDR3 for beta chain variable domain of TCR clone 305213 (TRBV29-1, TRBJ2-1)
CSGRDRKGSYNEQFF

SEQ ID NO: 610427 - protein, 12 aa, Homo sapiens
  CDR3 for alpha chain variable domain of TCR clone 305214 (TRAV12-2, TRAJ45)
CASGGGADGLTF

SEQ ID NO: 610428 - protein, 16 aa, Homo sapiens
  CDR3 for beta chain variable domain of TCR clone 305214 (TRBV19, TRBJ2-3)
CASSPGLLASTETQYF

SEQ ID NO: 610429 - protein, 13 aa, Homo sapiens
  CDR3 for alpha chain variable domain of TCR clone 305215 (TRAV1-1, TRAJ31)
CASYLNNNARLMF

SEQ ID NO: 610430 - protein, 14 aa, Homo sapiens
  CDR3 for beta chain variable domain of TCR clone 305215 (TRBV4-1, TRBJ2-5)
CASSRSGSGETQYV

SEQ ID NO: 610431 - protein, 16 aa, Homo sapiens
  CDR3 for alpha chain variable domain of TCR clone 305216 (TRAV30, TRAJ24)
CGTGIVDADSWGKFQF

SEQ ID NO: 610432 - protein, 11 aa, Homo sapiens
  CDR3 for beta chain variable domain of TCR clone 305216 (TRBV11-2, TRBJ2-2)
CASSLPGELFF

SEQ ID NO: 610433 - protein, 12 aa, Homo sapiens
  CDR3 for alpha chain variable domain of TCR clone 305217 (TRAV16, TRAJ49)
CDLNEGGNQFYF

SEQ ID NO: 610434 - protein, 14 aa, Homo sapiens
  CDR3 for beta chain variable domain of TCR clone 305217 (TRBV7-9, TRBJ2-1)
CASRPTGLRNEQFF

SEQ ID NO: 610435 - protein, 15 aa, Homo sapiens
  CDR3 for alpha chain variable domain of TCR clone 305218 (TRAV25, TRAJ52)
CAGRPGGTSYGKLTF

SEQ ID NO: 610436 - protein, 13 aa, Homo sapiens
  CDR3 for beta chain variable domain of TCR clone 305218 (TRBV25-1, TRBJ2-5)
CASSESGRETQYF

SEQ ID NO: 610437 - protein, 19 aa, Homo sapiens
  CDR3 for alpha chain variable domain of TCR clone 305219 (TRAV14/DV4, TRAJ26)
CAMRGPSEFCLWSRNQIVR

SEQ ID NO: 610438 - protein, 14 aa, Homo sapiens
  CDR3 for beta chain variable domain of TCR clone 305219 (TRBV12-4, TRBJ1-3)
CASTLTGAGNTIYF

SEQ ID NO: 610439 - protein, 13 aa, Homo sapiens
  CDR3 for alpha chain variable domain of TCR clone 305220 (TRAV36/DV7, TRAJ49)
CAVAQTPVTSSIL

SEQ ID NO: 610440 - protein, 17 aa, Homo sapiens
  CDR3 for beta chain variable domain of TCR clone 305220 (TRBV28, TRBJ2-7)
CARSSPGTGRFSYEQYF

SEQ ID NO: 610441 - protein, 12 aa, Homo sapiens
  CDR3 for alpha chain variable domain of TCR clone 305221 (TRAV13-1, TRAJ49)
CAAPNTVNQFYF

SEQ ID NO: 610442 - protein, 17 aa, Homo sapiens
  CDR3 for beta chain variable domain of TCR clone 305221 (TRBV25-1, TRBJ2-7)
RASSDARVVFSSYEQYF

SEQ ID NO: 610443 - protein, 14 aa, Homo sapiens
  CDR3 for alpha chain variable domain of TCR clone 305222 (TRAV1-2, TRAJ8)
CAVREDIGFQKLVF

SEQ ID NO: 610444 - protein, 11 aa, Homo sapiens
  CDR3 for beta chain variable domain of TCR clone 305222 (TRBV29-1, TRBJ1-4)
CSVSSGEKLFF

SEQ ID NO: 610445 - protein, 16 aa, Homo sapiens
  CDR3 for alpha chain variable domain of TCR clone 305223 (TRAV23/DV6, TRAJ3)
CSKHAVSYSGASKIIF

SEQ ID NO: 610446 - protein, 15 aa, Homo sapiens
  CDR3 for beta chain variable domain of TCR clone 305223 (TRBV7-3, TRBJ2-1)
CASSPTGGGEVEQFF

SEQ ID NO: 610447 - protein, 14 aa, Homo sapiens
  CDR3 for alpha chain variable domain of TCR clone 305224 (TRAV12-2, TRAJ13)
CAVKKTGGYQKVTF

SEQ ID NO: 610448 - protein, 16 aa, Homo sapiens
  CDR3 for beta chain variable domain of TCR clone 305224 (TRBV7-2, TRBJ1-3)
CASSSGRVLSGNTIYF

SEQ ID NO: 610449 - protein, 14 aa, Homo sapiens
  CDR3 for alpha chain variable domain of TCR clone 305225 (TRAV13-2, TRAJ9)
CAENSFTGGFKTIF

SEQ ID NO: 610450 - protein, 13 aa, Homo sapiens
  CDR3 for beta chain variable domain of TCR clone 305225 (TRBV19, TRBJ2-7)
CASSIDRTYEQYV

SEQ ID NO: 610451 - protein, 17 aa, Homo sapiens
  CDR3 for alpha chain variable domain of TCR clone 305226 (TRAV8-6, TRAJ58)
CAVSSWVGESSGSRLTF

SEQ ID NO: 610452 - protein, 14 aa, Homo sapiens
  CDR3 for beta chain variable domain of TCR clone 305226 (TRBV4-2, TRBJ2-1)
CASGLDRAYNEQFF

SEQ ID NO: 610453 - protein, 12 aa, Homo sapiens
  CDR3 for alpha chain variable domain of TCR clone 305227 (TRAV29/DV5, TRAJ49)
CAATDTGNQFYF

SEQ ID NO: 610454 - protein, 13 aa, Homo sapiens
  CDR3 for beta chain variable domain of TCR clone 305227 (TRBV7-3, TRBJ1-1)
CASSQHWGAEAFF

SEQ ID NO: 610455 - protein, 16 aa, Homo sapiens
  CDR3 for alpha chain variable domain of TCR clone 305228 (TRAV35, TRAJ28)
CAGQKYSGAWSYQLTF

SEQ ID NO: 610456 - protein, 16 aa, Homo sapiens
  CDR3 for beta chain variable domain of TCR clone 305228 (TRBV7-3, TRBJ2-2)
CASSLKRGTLSGELFF

SEQ ID NO: 610457 - protein, 11 aa, Homo sapiens
  CDR3 for alpha chain variable domain of TCR clone 305229 (TRAV1-2, TRAJ20)
CAVSNDYKLSF

SEQ ID NO: 610458 - protein, 15 aa, Homo sapiens
  CDR3 for beta chain variable domain of TCR clone 305229 (TRBV7-2, TRBJ2-1)
CASRKTGSSYNEQFF

SEQ ID NO: 610459 - protein, 15 aa, Homo sapiens
  CDR3 for alpha chain variable domain of TCR clone 305230 (TRAV8-3, TRAJ45)
CASSYSGGGADGLTF

SEQ ID NO: 610460 - protein, 15 aa, Homo sapiens
  CDR3 for beta chain variable domain of TCR clone 305230 (TRBV13, TRBJ1-5)
CASSFGRGGVQPQHF

SEQ ID NO: 610461 - protein, 13 aa, Homo sapiens
  CDR3 for alpha chain variable domain of TCR clone 305231 (TRAV39, TRAJ49)
CAEDRNTGNQFYF

SEQ ID NO: 610462 - protein, 16 aa, Homo sapiens
  CDR3 for beta chain variable domain of TCR clone 305231 (TRBV12-5, TRBJ2-5)
CASGPRTSGNQETQYF

SEQ ID NO: 610463 - protein, 14 aa, Homo sapiens
  CDR3 for alpha chain variable domain of TCR clone 305232 (TRAV26-1, TRAJ38)
CIADNAGNNRKLIW

SEQ ID NO: 610464 - protein, 16 aa, Homo sapiens
  CDR3 for beta chain variable domain of TCR clone 305232 (TRBV11-2, TRBJ1-2)
CASSLDRGGNNYGYTF

SEQ ID NO: 610465 - protein, 14 aa, Homo sapiens
  CDR3 for alpha chain variable domain of TCR clone 305233 (TRAV16, TRAJ33)
CALSAMDSNYQLIW

SEQ ID NO: 610466 - protein, 16 aa, Homo sapiens
  CDR3 for beta chain variable domain of TCR clone 305233 (TRBV12-4, TRBJ2-3)
CASSFPSNTNTDTQYL

SEQ ID NO: 610467 - protein, 14 aa, Homo sapiens
  CDR3 for alpha chain variable domain of TCR clone 305234 (TRAV12-1, TRAJ5)
CVVTGDTGRRALTF

SEQ ID NO: 610468 - protein, 14 aa, Homo sapiens
  CDR3 for beta chain variable domain of TCR clone 305234 (TRBV6-6, TRBJ2-7)
CASSDSGAGYEQYF

SEQ ID NO: 610469 - protein, 12 aa, Homo sapiens
  CDR3 for alpha chain variable domain of TCR clone 305235 (TRAV12-3, TRAJ34)
CAMGYNTDKLIF

SEQ ID NO: 610470 - protein, 13 aa, Homo sapiens
  CDR3 for beta chain variable domain of TCR clone 305235 (TRBV4-1, TRBJ2-2)
RQQPSGEHRELFF

SEQ ID NO: 610471 - protein, 12 aa, Homo sapiens
  CDR3 for alpha chain variable domain of TCR clone 305236 (TRAV1-2, TRAJ33)
CSALDSNYQLIW

SEQ ID NO: 610472 - protein, 16 aa, Homo sapiens
  CDR3 for beta chain variable domain of TCR clone 305236 (TRBV6-4, TRBJ1-2)
CASSEAVGDPNYGYTF

SEQ ID NO: 610473 - protein, 19 aa, Homo sapiens
  CDR3 for alpha chain variable domain of TCR clone 305237 (TRAV26-1, TRAJ52)
CIVRVANNAGGTSYGKLTF

SEQ ID NO: 610474 - protein, 14 aa, Homo sapiens
  CDR3 for beta chain variable domain of TCR clone 305237 (TRBV27, TRBJ2-3)
CASSWAGTTDTQYF

SEQ ID NO: 610475 - protein, 14 aa, Homo sapiens
  CDR3 for alpha chain variable domain of TCR clone 305238 (TRAV2, TRAJ3)
CAVDRCSSASKIIF

SEQ ID NO: 610476 - protein, 16 aa, Homo sapiens
  CDR3 for beta chain variable domain of TCR clone 305238 (TRBV20-1, TRBJ1-5)
CSAELPGQQTNQPQHF

SEQ ID NO: 610477 - protein, 14 aa, Homo sapiens
  CDR3 for alpha chain variable domain of TCR clone 305239 (TRAV29/DV5, TRAJ20)
CAASAPIEDYKLSF

SEQ ID NO: 610478 - protein, 13 aa, Homo sapiens
  CDR3 for beta chain variable domain of TCR clone 305239 (TRBV10-3, TRBJ2-7)
CASKLAVNYEQYL

SEQ ID NO: 610479 - protein, 11 aa, Homo sapiens
  CDR3 for alpha chain variable domain of TCR clone 305240 (TRAV26-1, TRAJ37)
CNVRVGRKLIF

SEQ ID NO: 610480 - protein, 16 aa, Homo sapiens
  CDR3 for beta chain variable domain of TCR clone 305240 (TRBV6-6, TRBJ2-3)
CASSYSHAGSTDTQYF

SEQ ID NO: 610481 - protein, 13 aa, Homo sapiens
  CDR3 for alpha chain variable domain of TCR clone 305241 (TRAV27, TRAJ8)
CAGGPTGFQKLVF

SEQ ID NO: 610482 - protein, 16 aa, Homo sapiens
  CDR3 for beta chain variable domain of TCR clone 305241 (TRBV7-3, TRBJ2-2)
CASSLKRGTLSGELFF

SEQ ID NO: 610483 - protein, 13 aa, Homo sapiens
  CDR3 for alpha chain variable domain of TCR clone 305242 (TRAV25, TRAJ10)
CAGRTGGGNKLTF

SEQ ID NO: 610484 - protein, 13 aa, Homo sapiens
  CDR3 for beta chain variable domain of TCR clone 305242 (TRBV7-3, TRBJ1-1)
CASSQDWGAEAFF

SEQ ID NO: 610485 - protein, 16 aa, Homo sapiens
  CDR3 for alpha chain variable domain of TCR clone 305243 (TRAV3, TRAJ37)
CAVRPHGSGNTGKLIF

SEQ ID NO: 610486 - protein, 13 aa, Homo sapiens
  CDR3 for beta chain variable domain of TCR clone 305243 (TRBV28, TRBJ2-7)
CASSVTWDREMYF

SEQ ID NO: 610487 - protein, 13 aa, Homo sapiens
  CDR3 for alpha chain variable domain of TCR clone 305244 (TRAV13-1, TRAJ29)
CAATISGNTPLVF

SEQ ID NO: 610488 - protein, 14 aa, Homo sapiens
  CDR3 for beta chain variable domain of TCR clone 305244 (TRBV7-2, TRBJ2-7)
CASRSQGAAYEQYF

SEQ ID NO: 610489 - protein, 12 aa, Homo sapiens
  CDR3 for alpha chain variable domain of TCR clone 305245 (TRAV20, TRAJ24)
CAVYNSWGKLQF

SEQ ID NO: 610490 - protein, 15 aa, Homo sapiens
  CDR3 for beta chain variable domain of TCR clone 305245 (TRBV20-1, TRBJ2-5)
CSAKVPPSGRETQYF

SEQ ID NO: 610491 - protein, 11 aa, Homo sapiens
  CDR3 for alpha chain variable domain of TCR clone 305246 (TRAV17, TRAJ31)
CATSNNARLMF

SEQ ID NO: 610492 - protein, 16 aa, Homo sapiens
  CDR3 for beta chain variable domain of TCR clone 305246 (TRBV7-8, TRBJ2-4)
CASSAERSLAKNIQYF

SEQ ID NO: 610493 - protein, 15 aa, Homo sapiens
  CDR3 for alpha chain variable domain of TCR clone 305247 (TRAV36/DV7, TRAJ53)
CAVEGSGSSNYKLTF

SEQ ID NO: 610494 - protein, 16 aa, Homo sapiens
  CDR3 for beta chain variable domain of TCR clone 305247 (TRBV27, TRBJ2-2)
CASSLSGFWVTGELFF

SEQ ID NO: 610495 - protein, 15 aa, Homo sapiens
  CDR3 for alpha chain variable domain of TCR clone 305248 (TRAV12-1, TRAJ52)
CVGNAGGTSYGKLTF

SEQ ID NO: 610496 - protein, 14 aa, Homo sapiens
  CDR3 for beta chain variable domain of TCR clone 305248 (TRBV7-3, TRBJ2-2)
CASSPDPSGRRLFF

SEQ ID NO: 610497 - protein, 13 aa, Homo sapiens
  CDR3 for alpha chain variable domain of TCR clone 305249 (TRAV36/DV7, TRAJ45)
CALSGGGADGLTF

SEQ ID NO: 610498 - protein, 11 aa, Homo sapiens
  CDR3 for beta chain variable domain of TCR clone 305249 (TRBV19, TRBJ2-7)
CASSLGYEQCF

SEQ ID NO: 610499 - protein, 15 aa, Homo sapiens
  CDR3 for alpha chain variable domain of TCR clone 305250 (TRAV21, TRAJ32)
CAAAPCGGATNKLIF

SEQ ID NO: 610500 - protein, 17 aa, Homo sapiens
  CDR3 for beta chain variable domain of TCR clone 305250 (TRBV18, TRBJ2-3)
CASSPFGDGGFTDTQYF

SEQ ID NO: 610501 - protein, 13 aa, Homo sapiens
  CDR3 for alpha chain variable domain of TCR clone 305251 (TRAV16, TRAJ52)
CALRGTSYGKLTF

SEQ ID NO: 610502 - protein, 12 aa, Homo sapiens
  CDR3 for beta chain variable domain of TCR clone 305251 (TRBV11-2, TRBJ2-2)
CASSLGGGELFF

SEQ ID NO: 610503 - protein, 13 aa, Homo sapiens
  CDR3 for alpha chain variable domain of TCR clone 305252 (TRAV2, TRAJ24)
CAVTTDSWGKLQF

SEQ ID NO: 610504 - protein, 16 aa, Homo sapiens
  CDR3 for beta chain variable domain of TCR clone 305252 (TRBV12-4, TRBJ2-1)
CASSAVGQGNGDEQFF

SEQ ID NO: 610505 - protein, 12 aa, Homo sapiens
  CDR3 for alpha chain variable domain of TCR clone 305253 (TRAV3, TRAJ20)
CAVRDGDYKLSF

SEQ ID NO: 610506 - protein, 14 aa, Homo sapiens
  CDR3 for beta chain variable domain of TCR clone 305253 (TRBV7-2, TRBJ1-6)
CASSLQGANSPLHF

SEQ ID NO: 610507 - protein, 12 aa, Homo sapiens
  CDR3 for alpha chain variable domain of TCR clone 305254 (TRAV21, TRAJ37)
CAVRGNTGNLIF

SEQ ID NO: 610508 - protein, 14 aa, Homo sapiens
  CDR3 for beta chain variable domain of TCR clone 305254 (TRBV19, TRBJ2-1)
CASEVTGARNEQFF

SEQ ID NO: 610509 - protein, 15 aa, Homo sapiens
  CDR3 for alpha chain variable domain of TCR clone 305255 (TRAV17, TRAJ57)
CATGPSQGGSEKLLF

SEQ ID NO: 610510 - protein, 16 aa, Homo sapiens
  CDR3 for beta chain variable domain of TCR clone 305255 (TRBV12-4, TRBJ1-5)
CASSRPVGGSNQPQHF

SEQ ID NO: 610511 - protein, 12 aa, Homo sapiens
  CDR3 for alpha chain variable domain of TCR clone 305256 (TRAV8-3, TRAJ26)
CAGDNYGQNFVF

SEQ ID NO: 610512 - protein, 14 aa, Homo sapiens
  CDR3 for beta chain variable domain of TCR clone 305256 (TRBV25-1, TRBJ1-1)
CASTHLGGNTEAVF

SEQ ID NO: 610513 - protein, 15 aa, Homo sapiens
  CDR3 for alpha chain variable domain of TCR clone 305257 (TRAV27, TRAJ38)
CAGRFNAGNNRKLIW

SEQ ID NO: 610514 - protein, 14 aa, Homo sapiens
  CDR3 for beta chain variable domain of TCR clone 305257 (TRBV4-1, TRBJ2-2)
CASSQAVNTGELFF

SEQ ID NO: 610515 - protein, 12 aa, Homo sapiens
  CDR3 for alpha chain variable domain of TCR clone 305258 (TRAV13-1, TRAJ49)
CAASPMGNQFYF

SEQ ID NO: 610516 - protein, 17 aa, Homo sapiens
  CDR3 for beta chain variable domain of TCR clone 305258 (TRBV11-2, TRBJ2-1)
CASSLYAPGVEYNEQFF

SEQ ID NO: 610517 - protein, 16 aa, Homo sapiens
  CDR3 for alpha chain variable domain of TCR clone 305259 (TRAV8-6, TRAJ58)
CAVSDHTETSGFRLTF

SEQ ID NO: 610518 - protein, 15 aa, Homo sapiens
  CDR3 for beta chain variable domain of TCR clone 305259 (TRBV27, TRBJ2-1)
CASSNGGGSSNEQFF

SEQ ID NO: 610519 - protein, 11 aa, Homo sapiens
  CDR3 for alpha chain variable domain of TCR clone 305260 (TRAV21, TRAJ48)
CAVHGNEKLTF

SEQ ID NO: 610520 - protein, 16 aa, Homo sapiens
  CDR3 for beta chain variable domain of TCR clone 305260 (TRBV19, TRBJ2-1)
CASSSKGTRSYNEQFF

SEQ ID NO: 610521 - protein, 12 aa, Homo sapiens
  CDR3 for alpha chain variable domain of TCR clone 305261 (TRAV12-1, TRAJ40)
CVVYSGTYKYIF

SEQ ID NO: 610522 - protein, 13 aa, Homo sapiens
  CDR3 for beta chain variable domain of TCR clone 305261 (TRBV11-2, TRBJ2-1)
CASSLGLAGGRFF

SEQ ID NO: 610523 - protein, 15 aa, Homo sapiens
  CDR3 for alpha chain variable domain of TCR clone 305262 (TRAV2, TRAJ22)
CAVPSRGGSARQLTF

SEQ ID NO: 610524 - protein, 15 aa, Homo sapiens
  CDR3 for beta chain variable domain of TCR clone 305262 (TRBV6-3, TRBJ2-7)
CASSSPGTVFYEQYF

SEQ ID NO: 610525 - protein, 14 aa, Homo sapiens
  CDR3 for alpha chain variable domain of TCR clone 305263 (TRAV8-3, TRAJ4)
CAVGAAGGYNKLVF

SEQ ID NO: 610526 - protein, 18 aa, Homo sapiens
  CDR3 for beta chain variable domain of TCR clone 305263 (TRBV6-5, TRBJ1-1)
CASSYSAPGGTGGTEAFF

SEQ ID NO: 610527 - protein, 15 aa, Homo sapiens
  CDR3 for alpha chain variable domain of TCR clone 305264 (TRAV8-3, TRAJ27)
CAVGPSKTNAGKSTF

SEQ ID NO: 610528 - protein, 13 aa, Homo sapiens
  CDR3 for beta chain variable domain of TCR clone 305264 (TRBV7-9, TRBJ2-7)
CASSFAGAYEQYF

SEQ ID NO: 610529 - protein, 11 aa, Homo sapiens
  CDR3 for alpha chain variable domain of TCR clone 305265 (TRAV3, TRAJ21)
CAVGNFNKFYF

SEQ ID NO: 610530 - protein, 11 aa, Homo sapiens
  CDR3 for beta chain variable domain of TCR clone 305265 (TRBV11-2, TRBJ2-5)
CASGQTETQYF

SEQ ID NO: 610531 - protein, 14 aa, Homo sapiens
  CDR3 for alpha chain variable domain of TCR clone 305266 (TRAV13-1, TRAJ12)
CSNYPMDSSYKLIF

SEQ ID NO: 610532 - protein, 12 aa, Homo sapiens
  CDR3 for beta chain variable domain of TCR clone 305266 (TRBV11-2, TRBJ2-2)
CASSLGGGELFF

SEQ ID NO: 610533 - protein, 20 aa, Homo sapiens
  CDR3 for alpha chain variable domain of TCR clone 305267 (TRAV23/DV6, )
CAATALIPDIQNPDPAVYQL

SEQ ID NO: 610534 - protein, 16 aa, Homo sapiens
  CDR3 for beta chain variable domain of TCR clone 305267 (TRBV10-3, TRBJ2-7)
CAISPRGQEQAYEQYF

SEQ ID NO: 610535 - protein, 17 aa, Homo sapiens
  CDR3 for alpha chain variable domain of TCR clone 305268 (TRAV26-1, TRAJ28)
CIVRALYSGAGSYQLTF

SEQ ID NO: 610536 - protein, 13 aa, Homo sapiens
  CDR3 for beta chain variable domain of TCR clone 305268 (TRBV7-9, TRBJ1-2)
CASSLKQNYGYTF

SEQ ID NO: 610537 - protein, 14 aa, Homo sapiens
  CDR3 for alpha chain variable domain of TCR clone 305269 (TRAV16, TRAJ44)
CALSTTGSASKLTF

SEQ ID NO: 610538 - protein, 14 aa, Homo sapiens
  CDR3 for beta chain variable domain of TCR clone 305269 (TRBV20-1, TRBJ2-7)
CSAISREASYEQYF

SEQ ID NO: 610539 - protein, 14 aa, Homo sapiens
  CDR3 for alpha chain variable domain of TCR clone 305270 (TRAV1-2, TRAJ6)
CAVRTSGGSYIPTF

SEQ ID NO: 610540 - protein, 13 aa, Homo sapiens
  CDR3 for beta chain variable domain of TCR clone 305270 (TRBV7-3, TRBJ1-1)
CASSQDWRAEAFF

SEQ ID NO: 610541 - protein, 14 aa, Homo sapiens
  CDR3 for alpha chain variable domain of TCR clone 305271 (TRAV17, TRAJ54)
CATDANQGAQKLVF

SEQ ID NO: 610542 - protein, 14 aa, Homo sapiens
  CDR3 for beta chain variable domain of TCR clone 305271 (TRBV25-1, TRBJ1-1)
CARTHLGGNTEAFF

SEQ ID NO: 610543 - protein, 14 aa, Homo sapiens
  CDR3 for alpha chain variable domain of TCR clone 305272 (TRAV1-2, TRAJ16)
CAINRFSDGQKLLF

SEQ ID NO: 610544 - protein, 14 aa, Homo sapiens
  CDR3 for beta chain variable domain of TCR clone 305272 (TRBV13, TRBJ2-5)
CASSLGRGQETQYF

SEQ ID NO: 610545 - protein, 16 aa, Homo sapiens
  CDR3 for alpha chain variable domain of TCR clone 305273 (TRAV16, TRAJ4)
CALSRMFSGGYNKLIF

SEQ ID NO: 610546 - protein, 12 aa, Homo sapiens
  CDR3 for beta chain variable domain of TCR clone 305273 (TRBV12-4, TRBJ1-3)
FASSFSGNTIYF

SEQ ID NO: 610547 - protein, 12 aa, Homo sapiens
  CDR3 for alpha chain variable domain of TCR clone 305274 (TRAV13-1, TRAJ20)
CAASRGDYKLSF

SEQ ID NO: 610548 - protein, 15 aa, Homo sapiens
  CDR3 for beta chain variable domain of TCR clone 305274 (TRBV5-1, TRBJ2-7)
CASSLGDFTTYEQYF

SEQ ID NO: 610549 - protein, 14 aa, Homo sapiens
  CDR3 for alpha chain variable domain of TCR clone 305275 (TRAV12-1, TRAJ30)
CVVNIGGRDDKIII

SEQ ID NO: 610550 - protein, 14 aa, Homo sapiens
  CDR3 for beta chain variable domain of TCR clone 305275 (TRBV7-6, TRBJ2-3)
CASSLGTVTDTQYF

SEQ ID NO: 610551 - protein, 14 aa, Homo sapiens
  CDR3 for alpha chain variable domain of TCR clone 305276 (TRAV1-2, TRAJ8)
CAVREDTGFQKLVF

SEQ ID NO: 610552 - protein, 17 aa, Homo sapiens
  CDR3 for beta chain variable domain of TCR clone 305276 (TRBV7-2, TRBJ2-7)
CASSLVGAGGARNEQYF

SEQ ID NO: 610553 - protein, 23 aa, Homo sapiens
  CDR3 for alpha chain variable domain of TCR clone 305277 (TRAV8-6, TRAJ38)
CAVRNAGNNHIQNPDPAVYHLRD

SEQ ID NO: 610554 - protein, 15 aa, Homo sapiens
  CDR3 for beta chain variable domain of TCR clone 305277 (TRBV4-1, TRBJ2-2)
CASSEGQGITGELFF

SEQ ID NO: 610555 - protein, 15 aa, Homo sapiens
  CDR3 for alpha chain variable domain of TCR clone 305278 (TRAV38-1, TRAJ57)
CAFMDSQGGSEKLVF

SEQ ID NO: 610556 - protein, 16 aa, Homo sapiens
  CDR3 for beta chain variable domain of TCR clone 305278 (TRBV10-3, TRBJ2-1)
CAIRGGGRGDYNEQVF

SEQ ID NO: 610557 - protein, 15 aa, Homo sapiens
  CDR3 for alpha chain variable domain of TCR clone 305279 (TRAV8-3, TRAJ11)
CAVGLLNSGYSNLTF

SEQ ID NO: 610558 - protein, 13 aa, Homo sapiens
  CDR3 for beta chain variable domain of TCR clone 305279 (TRBV25-1, TRBJ2-3)
CASSEWGTDTQYF

SEQ ID NO: 610559 - protein, 11 aa, Homo sapiens
  CDR3 for alpha chain variable domain of TCR clone 305280 (TRAV23/DV6, TRAJ9)
CAASLSPPNTG

SEQ ID NO: 610560 - protein, 17 aa, Homo sapiens
  CDR3 for beta chain variable domain of TCR clone 305280 (TRBV11-2, TRBJ2-1)
CASILYPPGVEYNEQFF

SEQ ID NO: 610561 - protein, 11 aa, Homo sapiens
  CDR3 for alpha chain variable domain of TCR clone 305281 (TRAV12-2, TRAJ31)
CAILNNASLMF

SEQ ID NO: 610562 - protein, 16 aa, Homo sapiens
  CDR3 for beta chain variable domain of TCR clone 305281 (TRBV13, TRBJ2-2)
CASSPRTGEHTGELFF

SEQ ID NO: 610563 - protein, 17 aa, Homo sapiens
  CDR3 for alpha chain variable domain of TCR clone 305282 (TRAV3, TRAJ6)
CAVRDGPRAGGSYIPTF

SEQ ID NO: 610564 - protein, 16 aa, Homo sapiens
  CDR3 for beta chain variable domain of TCR clone 305282 (TRBV10-3, TRBJ2-7)
CAISADFADRPYEQYF

SEQ ID NO: 610565 - protein, 14 aa, Homo sapiens
  CDR3 for alpha chain variable domain of TCR clone 305283 (TRAV9-2, TRAJ39)
CALYIYNAGNILTF

SEQ ID NO: 610566 - protein, 15 aa, Homo sapiens
  CDR3 for beta chain variable domain of TCR clone 305283 (TRBV5-5, TRBJ1-5)
CASSSTPGSNQPQHF

SEQ ID NO: 610567 - protein, 12 aa, Homo sapiens
  CDR3 for alpha chain variable domain of TCR clone 305284 (TRAV12-3, TRAJ17)
CAMTLTGNKLTF

SEQ ID NO: 610568 - protein, 16 aa, Homo sapiens
  CDR3 for beta chain variable domain of TCR clone 305284 (TRBV13, TRBJ2-2)
CASNPRTGEHTGELFF

SEQ ID NO: 610569 - protein, 15 aa, Homo sapiens
  CDR3 for alpha chain variable domain of TCR clone 305285 (TRAV36/DV7, TRAJ53)
CAVEGSGGSNYKLTF

SEQ ID NO: 610570 - protein, 16 aa, Homo sapiens
  CDR3 for beta chain variable domain of TCR clone 305285 (TRBV27, TRBJ2-2)
CGSSLSGFWVTGELFF

SEQ ID NO: 610571 - protein, 13 aa, Homo sapiens
  CDR3 for alpha chain variable domain of TCR clone 305286 (TRAV20, TRAJ48)
CAVHLFGNENLTF

SEQ ID NO: 610572 - protein, 15 aa, Homo sapiens
  CDR3 for beta chain variable domain of TCR clone 305286 (TRBV6-5, TRBJ2-6)
CASSQWEAGANVLTF

SEQ ID NO: 610573 - protein, 12 aa, Homo sapiens
  CDR3 for alpha chain variable domain of TCR clone 305287 (TRAV12-3, TRAJ17)
CAMTLTGNNLTF

SEQ ID NO: 610574 - protein, 13 aa, Homo sapiens
  CDR3 for beta chain variable domain of TCR clone 305287 (TRBV7-2, TRBJ2-2)
CASSLAVTGELFF

SEQ ID NO: 610575 - protein, 14 aa, Homo sapiens
  CDR3 for alpha chain variable domain of TCR clone 305288 (TRAV12-1, TRAJ3)
CGADRYSSASKIIF

SEQ ID NO: 610576 - protein, 15 aa, Homo sapiens
  CDR3 for beta chain variable domain of TCR clone 305288 (TRBV7-2, TRBJ2-6)
CASSREGSGANVLNF

SEQ ID NO: 610577 - protein, 14 aa, Homo sapiens
  CDR3 for alpha chain variable domain of TCR clone 305289 (TRAV13-1, TRAJ35)
CAASKGGFGNVLHC

SEQ ID NO: 610578 - protein, 14 aa, Homo sapiens
  CDR3 for beta chain variable domain of TCR clone 305289 (TRBV18, TRBJ1-1)
CASSPPTGRTEAFF

SEQ ID NO: 610579 - protein, 15 aa, Homo sapiens
  CDR3 for alpha chain variable domain of TCR clone 305290 (TRAV2, TRAJ13)
CCLLLCFRGYQKVTF

SEQ ID NO: 610580 - protein, 14 aa, Homo sapiens
  CDR3 for beta chain variable domain of TCR clone 305290 (TRBV7-2, TRBJ2-7)
CASRSQGAAYEQYF

SEQ ID NO: 610581 - protein, 16 aa, Homo sapiens
  CDR3 for alpha chain variable domain of TCR clone 305291 (TRAV4, TRAJ22)
CLVGDLYSGSAKQLTF

SEQ ID NO: 610582 - protein, 16 aa, Homo sapiens
  CDR3 for beta chain variable domain of TCR clone 305291 (TRBV7-9, TRBJ2-1)
CASSDVAGGSYNEQFF

SEQ ID NO: 610583 - protein, 14 aa, Homo sapiens
  CDR3 for alpha chain variable domain of TCR clone 305292 (TRAV13-2, TRAJ15)
CAENPNQAGTALIF

SEQ ID NO: 610584 - protein, 16 aa, Homo sapiens
  CDR3 for beta chain variable domain of TCR clone 305292 (TRBV12-4, TRBJ1-2)
CVSSPTATGKTRGYTF

SEQ ID NO: 610585 - protein, 13 aa, Homo sapiens
  CDR3 for alpha chain variable domain of TCR clone 305293 (TRAV8-1, TRAJ30)
CAVIMNRDDKIIF

SEQ ID NO: 610586 - protein, 17 aa, Homo sapiens
  CDR3 for beta chain variable domain of TCR clone 305293 (TRBV4-1, TRBJ1-4)
CASSQEGPRGVEEKLFF

SEQ ID NO: 610587 - protein, 12 aa, Homo sapiens
  CDR3 for alpha chain variable domain of TCR clone 305294 (TRAV35, TRAJ30)
CAGLNRDDKSIF

SEQ ID NO: 610588 - protein, 15 aa, Homo sapiens
  CDR3 for beta chain variable domain of TCR clone 305294 (TRBV9, TRBJ1-6)
CASSVAGTGDSPLHF

SEQ ID NO: 610589 - protein, 15 aa, Homo sapiens
  CDR3 for alpha chain variable domain of TCR clone 305295 (TRAV3, TRAJ5)
CAVRDLGTGRRALTF

SEQ ID NO: 610590 - protein, 13 aa, Homo sapiens
  CDR3 for beta chain variable domain of TCR clone 305295 (TRBV10-3, TRBJ2-7)
CASKLAVNYEQYF

SEQ ID NO: 610591 - protein, 13 aa, Homo sapiens
  CDR3 for alpha chain variable domain of TCR clone 305296 (TRAV12-2, TRAJ4)
CAVLSGGYNKLIF

SEQ ID NO: 610592 - protein, 13 aa, Homo sapiens
  CDR3 for beta chain variable domain of TCR clone 305296 (TRBV19, TRBJ1-5)
CASSIDRDQPQHF

SEQ ID NO: 610593 - protein, 18 aa, Homo sapiens
  CDR3 for alpha chain variable domain of TCR clone 305297 (TRAV26-2, TRAJ45)
CILRLWGYSGGGADGLTF

SEQ ID NO: 610594 - protein, 17 aa, Homo sapiens
  CDR3 for beta chain variable domain of TCR clone 305297 (TRBV28, TRBJ2-3)
CASSPTPAGGMVDTQYF

SEQ ID NO: 610595 - protein, 14 aa, Homo sapiens
  CDR3 for alpha chain variable domain of TCR clone 305298 (TRAV16, TRAJ17)
CAPRIKASGNKLTF

SEQ ID NO: 610596 - protein, 12 aa, Homo sapiens
  CDR3 for beta chain variable domain of TCR clone 305298 (TRBV18, TRBJ2-1)
CASSSDEDEQFF

SEQ ID NO: 610597 - protein, 14 aa, Homo sapiens
  CDR3 for alpha chain variable domain of TCR clone 305299 (TRAV23/DV6, TRAJ4)
CAAPSSGGYNKLIF

SEQ ID NO: 610598 - protein, 16 aa, Homo sapiens
  CDR3 for beta chain variable domain of TCR clone 305299 (TRBV19, TRBJ1-1)
CVSRFGGPVTGTEAFF

SEQ ID NO: 610599 - protein, 12 aa, Homo sapiens
  CDR3 for alpha chain variable domain of TCR clone 305300 (TRAV3, TRAJ20)
CVVRDPDYKLSF

SEQ ID NO: 610600 - protein, 11 aa, Homo sapiens
  CDR3 for beta chain variable domain of TCR clone 305300 (TRBV28, TRBJ2-5)
CASSLKETQYF

SEQ ID NO: 610601 - protein, 14 aa, Homo sapiens
  CDR3 for alpha chain variable domain of TCR clone 305301 (TRAV3, TRAJ33)
CAVRDMDSNYQLIW

SEQ ID NO: 610602 - protein, 19 aa, Homo sapiens
  CDR3 for beta chain variable domain of TCR clone 305301 (TRBV7-3, TRBJ1-2)
CASSFPQGNYGELWLHLRF

SEQ ID NO: 610603 - protein, 14 aa, Homo sapiens
  CDR3 for alpha chain variable domain of TCR clone 305302 (TRAV1-2, TRAJ8)
CAVREDAGFQKLVF

SEQ ID NO: 610604 - protein, 13 aa, Homo sapiens
  CDR3 for beta chain variable domain of TCR clone 305302 (TRBV4-1, TRBJ2-1)
CASSQEVQYEQFF

SEQ ID NO: 610605 - protein, 14 aa, Homo sapiens
  CDR3 for alpha chain variable domain of TCR clone 305303 (TRAV13-1, TRAJ10)
CAAKEPGGGNKLTF

SEQ ID NO: 610606 - protein, 16 aa, Homo sapiens
  CDR3 for beta chain variable domain of TCR clone 305303 (TRBV20-1, TRBJ2-1)
CSARDLKQGMNNEQFF

SEQ ID NO: 610607 - protein, 14 aa, Homo sapiens
  CDR3 for alpha chain variable domain of TCR clone 305304 (TRAV12-2, TRAJ40)
CAVKIPSGTYNYIF

SEQ ID NO: 610608 - protein, 14 aa, Homo sapiens
  CDR3 for beta chain variable domain of TCR clone 305304 (TRBV20-1, TRBJ1-1)
CSAQTRIGGTEAFC

SEQ ID NO: 610609 - protein, 13 aa, Homo sapiens
  CDR3 for alpha chain variable domain of TCR clone 305305 (TRAV1-2, TRAJ12)
CAVSMDSSYKLSF

SEQ ID NO: 610610 - protein, 15 aa, Homo sapiens
  CDR3 for beta chain variable domain of TCR clone 305305 (TRBV27, TRBJ2-5)
CASSLIPSGGETQYF

SEQ ID NO: 610611 - protein, 13 aa, Homo sapiens
  CDR3 for alpha chain variable domain of TCR clone 305306 (TRAV24, TRAJ44)
CALLTGTASKLTF

SEQ ID NO: 610612 - protein, 16 aa, Homo sapiens
  CDR3 for beta chain variable domain of TCR clone 305306 (TRBV2, TRBJ2-3)
CASSTSVEGETDTQYF

SEQ ID NO: 610613 - protein, 12 aa, Homo sapiens
  CDR3 for alpha chain variable domain of TCR clone 305307 (TRAV26-1, TRAJ17)
CIVRSAGNKLTF

SEQ ID NO: 610614 - protein, 17 aa, Homo sapiens
  CDR3 for beta chain variable domain of TCR clone 305307 (TRBV13, TRBJ2-3)
CASSLSRVAGGRNTQYF

SEQ ID NO: 610615 - protein, 13 aa, Homo sapiens
  CDR3 for alpha chain variable domain of TCR clone 305308 (TRAV3, TRAJ15)
CAVRDQAGTALIF

SEQ ID NO: 610616 - protein, 20 aa, Homo sapiens
  CDR3 for beta chain variable domain of TCR clone 305308 (TRBV23-1, TRBJ2-5)
CISAPAVPERILLIQETQYF

SEQ ID NO: 610617 - protein, 13 aa, Homo sapiens
  CDR3 for alpha chain variable domain of TCR clone 305309 (TRAV2, TRAJ40)
CAVVTSGTYKYIF

SEQ ID NO: 610618 - protein, 15 aa, Homo sapiens
  CDR3 for beta chain variable domain of TCR clone 305309 (TRBV11-3, TRBJ2-1)
CASLKDGREGDTQYF

SEQ ID NO: 610619 - protein, 12 aa, Homo sapiens
  CDR3 for alpha chain variable domain of TCR clone 305310 (TRAV20, TRAJ37)
CAPPSNTGKLIF

SEQ ID NO: 610620 - protein, 14 aa, Homo sapiens
  CDR3 for beta chain variable domain of TCR clone 305310 (TRBV19, TRBJ2-1)
CASPTFVLSGEQFF

SEQ ID NO: 610621 - protein, 11 aa, Homo sapiens
  CDR3 for alpha chain variable domain of TCR clone 305311 (TRAV12-2, )
CAVASLATTIS

SEQ ID NO: 610622 - protein, 16 aa, Homo sapiens
  CDR3 for beta chain variable domain of TCR clone 305311 (TRBV5-1, TRBJ2-2)
CTSSSRTGGRTGELFF

SEQ ID NO: 610623 - protein, 14 aa, Homo sapiens
  CDR3 for alpha chain variable domain of TCR clone 305312 (TRAV1-1, TRAJ27)
CAVTYNTNAGKSTF

SEQ ID NO: 610624 - protein, 15 aa, Homo sapiens
  CDR3 for beta chain variable domain of TCR clone 305312 (TRBV7-2, TRBJ2-1)
CASSPGLAGGNEQFF

SEQ ID NO: 610625 - protein, 14 aa, Homo sapiens
  CDR3 for alpha chain variable domain of TCR clone 305313 (TRAV12-2, TRAJ40)
CAVKIPSGTYKYIF

SEQ ID NO: 610626 - protein, 13 aa, Homo sapiens
  CDR3 for beta chain variable domain of TCR clone 305313 (TRBV28, TRBJ1-2)
CASSLQGRGGYTF

SEQ ID NO: 610627 - protein, 17 aa, Homo sapiens
  CDR3 for alpha chain variable domain of TCR clone 305314 (TRAV3, TRAJ12)
FAVRDGGRMDSSYKLIF

SEQ ID NO: 610628 - protein, 13 aa, Homo sapiens
  CDR3 for beta chain variable domain of TCR clone 305314 (TRBV20-1, TRBJ1-1)
CSAPLGGGTEAFF

SEQ ID NO: 610629 - protein, 18 aa, Homo sapiens
  CDR3 for alpha chain variable domain of TCR clone 305315 (TRAV26-1, TRAJ23)
CIVRVGLEVWNQGGKLIF

SEQ ID NO: 610630 - protein, 17 aa, Homo sapiens
  CDR3 for beta chain variable domain of TCR clone 305315 (TRBV7-8, TRBJ2-6)
CASSAGTGGAGANVLTF

SEQ ID NO: 610631 - protein, 15 aa, Homo sapiens
  CDR3 for alpha chain variable domain of TCR clone 305316 (TRAV26-1, TRAJ15)
CIVRAASQAGTALSF

SEQ ID NO: 610632 - protein, 15 aa, Homo sapiens
  CDR3 for beta chain variable domain of TCR clone 305316 (TRBV20-1, TRBJ1-1)
CSARSAATSNTEAFF

SEQ ID NO: 610633 - protein, 16 aa, Homo sapiens
  CDR3 for alpha chain variable domain of TCR clone 305317 (TRAV3, TRAJ10)
CAVRDMRAGGGNKLTV

SEQ ID NO: 610634 - protein, 15 aa, Homo sapiens
  CDR3 for beta chain variable domain of TCR clone 305317 (TRBV4-1, TRBJ1-4)
CASSDTGGTNEKLFF

SEQ ID NO: 610635 - protein, 13 aa, Homo sapiens
  CDR3 for alpha chain variable domain of TCR clone 305318 (TRAV3, TRAJ3)
CAVRALGASKIIF

SEQ ID NO: 610636 - protein, 16 aa, Homo sapiens
  CDR3 for beta chain variable domain of TCR clone 305318 (TRBV7-6, TRBJ2-1)
CASSAPGPSSYNEQFF

SEQ ID NO: 610637 - protein, 18 aa, Homo sapiens
  CDR3 for alpha chain variable domain of TCR clone 305319 (TRAV17, TRAJ45)
CATSLDLYSGGGADGLTF

SEQ ID NO: 610638 - protein, 15 aa, Homo sapiens
  CDR3 for beta chain variable domain of TCR clone 305319 (TRBV11-2, TRBJ2-1)
CASSKNLGLIYEQFF

SEQ ID NO: 610639 - protein, 15 aa, Homo sapiens
  CDR3 for alpha chain variable domain of TCR clone 305320 (TRAV25, TRAJ52)
CAGRPGGTSYGKLTF

SEQ ID NO: 610640 - protein, 17 aa, Homo sapiens
  CDR3 for beta chain variable domain of TCR clone 305320 (TRBV28, TRBJ2-7)
CASSPLHRASGVYEQYF

SEQ ID NO: 610641 - protein, 13 aa, Homo sapiens
  CDR3 for alpha chain variable domain of TCR clone 305321 (TRAV13-2, TRAJ53)
CAENMGSKYKLTF

SEQ ID NO: 610642 - protein, 13 aa, Homo sapiens
  CDR3 for beta chain variable domain of TCR clone 305321 (TRBV10-3, TRBJ2-7)
RASKLAVNYEQYF

SEQ ID NO: 610643 - protein, 13 aa, Homo sapiens
  CDR3 for alpha chain variable domain of TCR clone 305322 (TRAV26-1, TRAJ34)
CIVRPWITDKLIF

SEQ ID NO: 610644 - protein, 12 aa, Homo sapiens
  CDR3 for beta chain variable domain of TCR clone 305322 (TRBV11-2, TRBJ2-1)
CASSPGNNEQFF

SEQ ID NO: 610645 - protein, 13 aa, Homo sapiens
  CDR3 for alpha chain variable domain of TCR clone 305323 (TRAV12-1, TRAJ37)
CVVNAGNTGKLIF

SEQ ID NO: 610646 - protein, 14 aa, Homo sapiens
  CDR3 for beta chain variable domain of TCR clone 305323 (TRBV7-2, TRBJ2-3)
CASRRGLAADKQYF

SEQ ID NO: 610647 - protein, 12 aa, Homo sapiens
  CDR3 for alpha chain variable domain of TCR clone 305324 (TRAV2, TRAJ10)
CASTGGGNKLTF

SEQ ID NO: 610648 - protein, 14 aa, Homo sapiens
  CDR3 for beta chain variable domain of TCR clone 305324 (TRBV7-3, TRBJ1-1)
CASSLKGGNTEAFF

SEQ ID NO: 610649 - protein, 11 aa, Homo sapiens
  CDR3 for alpha chain variable domain of TCR clone 305325 (TRAV21, TRAJ39)
LPVNAGNMLTF

SEQ ID NO: 610650 - protein, 15 aa, Homo sapiens
  CDR3 for beta chain variable domain of TCR clone 305325 (TRBV20-1, TRBJ2-1)
CSARGIGGTYNEQFF

SEQ ID NO: 610651 - protein, 13 aa, Homo sapiens
  CDR3 for alpha chain variable domain of TCR clone 305326 (TRAV12-3, TRAJ33)
CAMSVNSNYQLIW

SEQ ID NO: 610652 - protein, 15 aa, Homo sapiens
  CDR3 for beta chain variable domain of TCR clone 305326 (TRBV28, TRBJ2-1)
CASRKTGTAYNEQFF

SEQ ID NO: 610653 - protein, 14 aa, Homo sapiens
  CDR3 for alpha chain variable domain of TCR clone 305327 (TRAV35, TRAJ22)
CAGLRPGSARQLTF

SEQ ID NO: 610654 - protein, 15 aa, Homo sapiens
  CDR3 for beta chain variable domain of TCR clone 305327 (TRBV2, TRBJ2-5)
RASSEQGLIGETQYF

SEQ ID NO: 610655 - protein, 16 aa, Homo sapiens
  CDR3 for alpha chain variable domain of TCR clone 305328 (TRAV30, TRAJ24)
CGTEIVDADSWGKFQF

SEQ ID NO: 610656 - protein, 19 aa, Homo sapiens
  CDR3 for beta chain variable domain of TCR clone 305328 (TRBV25-1, TRBJ2-2)
FAILVYRVDRGRKTGELFF

SEQ ID NO: 610657 - protein, 15 aa, Homo sapiens
  CDR3 for alpha chain variable domain of TCR clone 305329 (TRAV12-2, TRAJ53)
CAGNGGGGSNYKLTF

SEQ ID NO: 610658 - protein, 14 aa, Homo sapiens
  CDR3 for beta chain variable domain of TCR clone 305329 (TRBV4-1, TRBJ2-2)
CASSQAVNTGELFF

SEQ ID NO: 610659 - protein, 15 aa, Homo sapiens
  CDR3 for alpha chain variable domain of TCR clone 305330 (TRAV29/DV5, TRAJ28)
CAARFSEAGSYQLTF

SEQ ID NO: 610660 - protein, 13 aa, Homo sapiens
  CDR3 for beta chain variable domain of TCR clone 305330 (TRBV12-4, TRBJ1-2)
CASSLRQGKGYTF

SEQ ID NO: 610661 - protein, 13 aa, Homo sapiens
  CDR3 for alpha chain variable domain of TCR clone 305331 (TRAV38-2/DV8, TRAJ45)
CAYVGGGAVGLTF

SEQ ID NO: 610662 - protein, 13 aa, Homo sapiens
  CDR3 for beta chain variable domain of TCR clone 305331 (TRBV29-1, TRBJ2-1)
CSVEGGRVNEQFF

SEQ ID NO: 610663 - protein, 10 aa, Homo sapiens
  CDR3 for alpha chain variable domain of TCR clone 305332 (TRAV26-1, TRAJ36)
CIVRVPDQTG

SEQ ID NO: 610664 - protein, 21 aa, Homo sapiens
  CDR3 for beta chain variable domain of TCR clone 305332 (TRBV6-1, TRBJ1-1)
CASSGVGNYKGISGFDTEAFF

SEQ ID NO: 610665 - protein, 15 aa, Homo sapiens
  CDR3 for alpha chain variable domain of TCR clone 305333 (TRAV36/DV7, TRAJ53)
WEGENSGGSNYKLTF

SEQ ID NO: 610666 - protein, 13 aa, Homo sapiens
  CDR3 for beta chain variable domain of TCR clone 305333 (TRBV7-3, TRBJ1-1)
CASSQDWGAEAFF

SEQ ID NO: 610667 - protein, 15 aa, Homo sapiens
  CDR3 for alpha chain variable domain of TCR clone 305334 (TRAV3, TRAJ13)
CAVRVYSGGYQKVTF

SEQ ID NO: 610668 - protein, 12 aa, Homo sapiens
  CDR3 for beta chain variable domain of TCR clone 305334 (TRBV7-8, TRBJ2-7)
CASSLGDREQYF

SEQ ID NO: 610669 - protein, 14 aa, Homo sapiens
  CDR3 for alpha chain variable domain of TCR clone 305335 (TRAV8-3, TRAJ44)
CAVGLTGTASKLTF

SEQ ID NO: 610670 - protein, 12 aa, Homo sapiens
  CDR3 for beta chain variable domain of TCR clone 305335 (TRBV7-3, TRBJ2-1)
CASSLGCNEQFF

SEQ ID NO: 610671 - protein, 15 aa, Homo sapiens
  CDR3 for alpha chain variable domain of TCR clone 305336 (TRAV27, TRAJ38)
CAVRRNAGNNRKPIW

SEQ ID NO: 610672 - protein, 13 aa, Homo sapiens
  CDR3 for beta chain variable domain of TCR clone 305336 (TRBV12-5, TRBJ2-3)
CASGDRQSDTQYF

SEQ ID NO: 610673 - protein, 12 aa, Homo sapiens
  CDR3 for alpha chain variable domain of TCR clone 305337 (TRAV26-1, TRAJ26)
CIVFIYGQNFVF

SEQ ID NO: 610674 - protein, 14 aa, Homo sapiens
  CDR3 for beta chain variable domain of TCR clone 305337 (TRBV19, TRBJ2-1)
CASPTFVLSGEQFF

SEQ ID NO: 610675 - protein, 15 aa, Homo sapiens
  CDR3 for alpha chain variable domain of TCR clone 305338 (TRAV21, TRAJ53)
CATLNSGGSNYKLTF

SEQ ID NO: 610676 - protein, 14 aa, Homo sapiens
  CDR3 for beta chain variable domain of TCR clone 305338 (TRBV7-2, TRBJ2-7)
CASRPKTSFYEQYF

SEQ ID NO: 610677 - protein, 16 aa, Homo sapiens
  CDR3 for alpha chain variable domain of TCR clone 305339 (TRAV30, TRAJ24)
CGTEIVDADSWGKFQF

SEQ ID NO: 610678 - protein, 18 aa, Homo sapiens
  CDR3 for beta chain variable domain of TCR clone 305339 (TRBV12-5, TRBJ2-5)
CAWFTDTSRDPVLRARHA

SEQ ID NO: 610679 - protein, 11 aa, Homo sapiens
  CDR3 for alpha chain variable domain of TCR clone 305340 (TRAV2, TRAJ33)
CAVESNYQLIW

SEQ ID NO: 610680 - protein, 16 aa, Homo sapiens
  CDR3 for beta chain variable domain of TCR clone 305340 (TRBV12-5, TRBJ2-5)
CASGPRTSGNQGTQYF

SEQ ID NO: 610681 - protein, 14 aa, Homo sapiens
  CDR3 for alpha chain variable domain of TCR clone 305341 (TRAV12-2, TRAJ40)
CAVKIPSGTHKYIF

SEQ ID NO: 610682 - protein, 13 aa, Homo sapiens
  CDR3 for beta chain variable domain of TCR clone 305341 (TRBV10-3, TRBJ1-2)
CAISERDSYGYTF

SEQ ID NO: 610683 - protein, 15 aa, Homo sapiens
  CDR3 for alpha chain variable domain of TCR clone 305342 (TRAV13-1, TRAJ44)
CAARASTGTASKLTF

SEQ ID NO: 610684 - protein, 12 aa, Homo sapiens
  CDR3 for beta chain variable domain of TCR clone 305342 (TRBV11-2, TRBJ2-2)
CASSLGGGELFF

SEQ ID NO: 610685 - protein, 17 aa, Homo sapiens
  CDR3 for alpha chain variable domain of TCR clone 305343 (TRAV3, TRAJ6)
CAVRDGPRAGGSYIPTF

SEQ ID NO: 610686 - protein, 17 aa, Homo sapiens
  CDR3 for beta chain variable domain of TCR clone 305343 (TRBV25-1, TRBJ2-3)
CASSGYGGGGNTDTQYF

SEQ ID NO: 610687 - protein, 18 aa, Homo sapiens
  CDR3 for alpha chain variable domain of TCR clone 305344 (TRAV35, TRAJ28)
CAGHNYPLSGAGSSQLTF

SEQ ID NO: 610688 - protein, 12 aa, Homo sapiens
  CDR3 for beta chain variable domain of TCR clone 305344 (TRBV7-9, TRBJ1-1)
CASGLEGTEAFF

SEQ ID NO: 610689 - protein, 14 aa, Homo sapiens
  CDR3 for alpha chain variable domain of TCR clone 305345 (TRAV12-2, TRAJ13)
CAVKKTGGYQKVTF

SEQ ID NO: 610690 - protein, 15 aa, Homo sapiens
  CDR3 for beta chain variable domain of TCR clone 305345 (TRBV11-2, TRBJ1-3)
CASSIWGSYGNTIYF

SEQ ID NO: 610691 - protein, 12 aa, Homo sapiens
  CDR3 for alpha chain variable domain of TCR clone 305346 (TRAV8-4, TRAJ37)
CAVRSNQGKLIF

SEQ ID NO: 610692 - protein, 16 aa, Homo sapiens
  CDR3 for beta chain variable domain of TCR clone 305346 (TRBV7-2, TRBJ2-3)
CASSLVGDASTDTQYF

SEQ ID NO: 610693 - protein, 14 aa, Homo sapiens
  CDR3 for alpha chain variable domain of TCR clone 305347 (TRAV30, TRAJ26)
CGTEIVSYGQNFVF

SEQ ID NO: 610694 - protein, 13 aa, Homo sapiens
  CDR3 for beta chain variable domain of TCR clone 305347 (TRBV24-1, TRBJ2-2)
CATSDWSTGELFF

SEQ ID NO: 610695 - protein, 23 aa, Homo sapiens
  CDR3 for alpha chain variable domain of TCR clone 305348 (TRAV21, )
CAVRQDAGNNHIQNPDPAVYQLR

SEQ ID NO: 610696 - protein, 16 aa, Homo sapiens
  CDR3 for beta chain variable domain of TCR clone 305348 (TRBV4-2, TRBJ1-1)
CASRPLDGGGDTEAFF

SEQ ID NO: 610697 - protein, 15 aa, Homo sapiens
  CDR3 for alpha chain variable domain of TCR clone 305349 (TRAV38-2/DV8, TRAJ47)
CAYRSAKGYGNKMVF

SEQ ID NO: 610698 - protein, 15 aa, Homo sapiens
  CDR3 for beta chain variable domain of TCR clone 305349 (TRBV6-6, TRBJ2-7)
CASSYSYGGSYEHYF

SEQ ID NO: 610699 - protein, 16 aa, Homo sapiens
  CDR3 for alpha chain variable domain of TCR clone 305350 (TRAV12-3, TRAJ53)
CAMSPGSGGSNYKLTF

SEQ ID NO: 610700 - protein, 13 aa, Homo sapiens
  CDR3 for beta chain variable domain of TCR clone 305350 (TRBV7-3, TRBJ1-1)
CASSQDWGADAFF

SEQ ID NO: 610701 - protein, 12 aa, Homo sapiens
  CDR3 for alpha chain variable domain of TCR clone 305351 (TRAV8-3, TRAJ15)
CAVGAPLSALIF

SEQ ID NO: 610702 - protein, 16 aa, Homo sapiens
  CDR3 for beta chain variable domain of TCR clone 305351 (TRBV27, TRBJ2-2)
CASSFRGLVRTGELFF

SEQ ID NO: 610703 - protein, 14 aa, Homo sapiens
  CDR3 for alpha chain variable domain of TCR clone 305352 (TRAV13-2, TRAJ16)
CAENNWEDGQKLLF

SEQ ID NO: 610704 - protein, 17 aa, Homo sapiens
  CDR3 for beta chain variable domain of TCR clone 305352 (TRBV20-1, TRBJ1-6)
CSAQGGYTFSYNSPLHF

SEQ ID NO: 610705 - protein, 14 aa, Homo sapiens
  CDR3 for alpha chain variable domain of TCR clone 305353 (TRAV1-2, TRAJ16)
CAVNRFSDGQKLLF

SEQ ID NO: 610706 - protein, 17 aa, Homo sapiens
  CDR3 for beta chain variable domain of TCR clone 305353 (TRBV20-1, TRBJ2-1)
CSAGSSGLAGSYNEQFF

SEQ ID NO: 610707 - protein, 14 aa, Homo sapiens
  CDR3 for alpha chain variable domain of TCR clone 305354 (TRAV6, TRAJ37)
FALGSQGNTGKLIF

SEQ ID NO: 610708 - protein, 15 aa, Homo sapiens
  CDR3 for beta chain variable domain of TCR clone 305354 (TRBV2, TRBJ2-1)
CASSEEREGDNEQFF

SEQ ID NO: 610709 - protein, 15 aa, Homo sapiens
  CDR3 for alpha chain variable domain of TCR clone 305355 (TRAV23/DV6, TRAJ44)
CAAALNTGTASKLTF

SEQ ID NO: 610710 - protein, 15 aa, Homo sapiens
  CDR3 for beta chain variable domain of TCR clone 305355 (TRBV7-2, TRBJ1-1)
CASSFAGDRDTEAFF

SEQ ID NO: 610711 - protein, 17 aa, Homo sapiens
  CDR3 for alpha chain variable domain of TCR clone 305356 (TRAV3, TRAJ38)
CAVRDCLNAGNNRKLIW

SEQ ID NO: 610712 - protein, 15 aa, Homo sapiens
  CDR3 for beta chain variable domain of TCR clone 305356 (TRBV19, TRBJ2-7)
CASSIAGTGGYEQYF

SEQ ID NO: 610713 - protein, 10 aa, Homo sapiens
  CDR3 for alpha chain variable domain of TCR clone 305357 (TRAV12-1, TRAJ43)
CVVHNNDMRF

SEQ ID NO: 610714 - protein, 14 aa, Homo sapiens
  CDR3 for beta chain variable domain of TCR clone 305357 (TRBV7-2, TRBJ2-7)
CASSLPPGQGPQYF

SEQ ID NO: 610715 - protein, 12 aa, Homo sapiens
  CDR3 for alpha chain variable domain of TCR clone 305358 (TRAV38-1, TRAJ32)
CAPSGATNKLIF

SEQ ID NO: 610716 - protein, 17 aa, Homo sapiens
  CDR3 for beta chain variable domain of TCR clone 305358 (TRBV13, TRBJ2-3)
CASSLSRVAGGRNTQYF

SEQ ID NO: 610717 - protein, 15 aa, Homo sapiens
  CDR3 for alpha chain variable domain of TCR clone 305359 (TRAV8-3, TRAJ6)
CAVGHLGGGSYIPTF

SEQ ID NO: 610718 - protein, 14 aa, Homo sapiens
  CDR3 for beta chain variable domain of TCR clone 305359 (TRBV19, TRBJ2-2)
CASSTGQGAGELFF

SEQ ID NO: 610719 - protein, 17 aa, Homo sapiens
  CDR3 for alpha chain variable domain of TCR clone 305360 (TRAV4, TRAJ18)
WLVGERSVGSTLGRLYF

SEQ ID NO: 610720 - protein, 14 aa, Homo sapiens
  CDR3 for beta chain variable domain of TCR clone 305360 (TRBV6-5, TRBJ1-2)
CASSYDGTGGGYTF

SEQ ID NO: 610721 - protein, 18 aa, Homo sapiens
  CDR3 for alpha chain variable domain of TCR clone 305361 (TRAV35, TRAJ52)
CAGLLRYPGGTSYGKLTF

SEQ ID NO: 610722 - protein, 13 aa, Homo sapiens
  CDR3 for beta chain variable domain of TCR clone 305361 (TRBV2, TRBJ2-5)
CASGTPYQETQFF

SEQ ID NO: 610723 - protein, 15 aa, Homo sapiens
  CDR3 for alpha chain variable domain of TCR clone 305362 (TRAV12-1, TRAJ42)
CVVTLDGGSQGNLIF

SEQ ID NO: 610724 - protein, 14 aa, Homo sapiens
  CDR3 for beta chain variable domain of TCR clone 305362 (TRBV11-2, TRBJ2-3)
CASSLGGGANTQYF

SEQ ID NO: 610725 - protein, 16 aa, Homo sapiens
  CDR3 for alpha chain variable domain of TCR clone 305363 (TRAV27, TRAJ53)
CAAPEGSGGSNFKLTF

SEQ ID NO: 610726 - protein, 14 aa, Homo sapiens
  CDR3 for beta chain variable domain of TCR clone 305363 (TRBV4-3, TRBJ1-5)
CASSQGGQGWPQHF

SEQ ID NO: 610727 - protein, 12 aa, Homo sapiens
  CDR3 for alpha chain variable domain of TCR clone 305364 (TRAV12-1, TRAJ8)
CVVNTGFQKLVF

SEQ ID NO: 610728 - protein, 15 aa, Homo sapiens
  CDR3 for beta chain variable domain of TCR clone 305364 (TRBV6-3, TRBJ2-7)
CASSSPGTVFYEQYF

SEQ ID NO: 610729 - protein, 12 aa, Homo sapiens
  CDR3 for alpha chain variable domain of TCR clone 305365 (TRAV12-2, TRAJ10)
WGVTGGGNKLTF

SEQ ID NO: 610730 - protein, 17 aa, Homo sapiens
  CDR3 for beta chain variable domain of TCR clone 305365 (TRBV20-1, TRBJ2-1)
CSASSSGLAGSYNEQFF

SEQ ID NO: 610731 - protein, 18 aa, Homo sapiens
  CDR3 for alpha chain variable domain of TCR clone 305366 (TRAV26-1, TRAJ23)
CIVRSADMIYNQGGKLIF

SEQ ID NO: 610732 - protein, 10 aa, Homo sapiens
  CDR3 for beta chain variable domain of TCR clone 305366 (TRBV29-1, TRBJ1-1)
CSVAGAEAFF

SEQ ID NO: 610733 - protein, 16 aa, Homo sapiens
  CDR3 for alpha chain variable domain of TCR clone 305367 (TRAV30, TRAJ24)
CGTEIVDADSWGKFQF

SEQ ID NO: 610734 - protein, 14 aa, Homo sapiens
  CDR3 for beta chain variable domain of TCR clone 305367 (TRBV11-2, TRBJ2-1)
CASGRGLSYNEQFF

SEQ ID NO: 610735 - protein, 12 aa, Homo sapiens
  CDR3 for alpha chain variable domain of TCR clone 305368 (TRAV9-2, TRAJ26)
RALRGYGQNFVF

SEQ ID NO: 610736 - protein, 12 aa, Homo sapiens
  CDR3 for beta chain variable domain of TCR clone 305368 (TRBV29-1, TRBJ2-3)
CSVTGGADTQYF

SEQ ID NO: 610737 - protein, 15 aa, Homo sapiens
  CDR3 for alpha chain variable domain of TCR clone 305369 (TRAV36/DV7, TRAJ38)
CAVRGVAGNNRKLVW

SEQ ID NO: 610738 - protein, 17 aa, Homo sapiens
  CDR3 for beta chain variable domain of TCR clone 305369 (TRBV13, TRBJ2-3)
CASSLSRVAGGRNTQYF

SEQ ID NO: 610739 - protein, 13 aa, Homo sapiens
  CDR3 for alpha chain variable domain of TCR clone 305370 (TRAV17, TRAJ5)
CAPMDTGRRALTF

SEQ ID NO: 610740 - protein, 15 aa, Homo sapiens
  CDR3 for beta chain variable domain of TCR clone 305370 (TRBV6-6, TRBJ2-5)
CASSAGGGLEETQYF

SEQ ID NO: 610741 - protein, 14 aa, Homo sapiens
  CDR3 for alpha chain variable domain of TCR clone 305371 (TRAV13-1, TRAJ35)
CAASKGGVGNVLHC

SEQ ID NO: 610742 - protein, 15 aa, Homo sapiens
  CDR3 for beta chain variable domain of TCR clone 305371 (TRBV7-3, TRBJ2-1)
CASSLGQGPFGEQFF

SEQ ID NO: 610743 - protein, 13 aa, Homo sapiens
  CDR3 for alpha chain variable domain of TCR clone 305372 (TRAV17, TRAJ26)
CATVDKYGQNFVF

SEQ ID NO: 610744 - protein, 16 aa, Homo sapiens
  CDR3 for beta chain variable domain of TCR clone 305372 (TRBV2, TRBJ2-1)
CASSVGGSLSYNEQLF

SEQ ID NO: 610745 - protein, 13 aa, Homo sapiens
  CDR3 for alpha chain variable domain of TCR clone 305373 (TRAV12-3, TRAJ40)
CAMSARGTYKYIF

SEQ ID NO: 610746 - protein, 16 aa, Homo sapiens
  CDR3 for beta chain variable domain of TCR clone 305373 (TRBV20-1, TRBJ2-3)
CSGEAGLAWGQDTQYF

SEQ ID NO: 610747 - protein, 18 aa, Homo sapiens
  CDR3 for alpha chain variable domain of TCR clone 305374 (TRAV21, TRAJ52)
CAVRPSPAGGTSYGKLTF

SEQ ID NO: 610748 - protein, 17 aa, Homo sapiens
  CDR3 for beta chain variable domain of TCR clone 305374 (TRBV13, TRBJ2-3)
CASSRSRVAGWRNTQYF

SEQ ID NO: 610749 - protein, 14 aa, Homo sapiens
  CDR3 for alpha chain variable domain of TCR clone 305375 (TRAV1-2, TRAJ16)
CSVNRFSDGQKLLF

SEQ ID NO: 610750 - protein, 13 aa, Homo sapiens
  CDR3 for beta chain variable domain of TCR clone 305375 (TRBV7-2, TRBJ2-2)
CASSLAVTGELFF

SEQ ID NO: 610751 - protein, 13 aa, Homo sapiens
  CDR3 for alpha chain variable domain of TCR clone 305376 (TRAV35, TRAJ57)
CAGSQGGSEKLVF

SEQ ID NO: 610752 - protein, 14 aa, Homo sapiens
  CDR3 for beta chain variable domain of TCR clone 305376 (TRBV25-1, TRBJ1-1)
CASTHLGGNTEAFF

SEQ ID NO: 610753 - protein, 14 aa, Homo sapiens
  CDR3 for alpha chain variable domain of TCR clone 305377 (TRAV1-2, TRAJ16)
CAVNRFSDVQKLLF

SEQ ID NO: 610754 - protein, 15 aa, Homo sapiens
  CDR3 for beta chain variable domain of TCR clone 305377 (TRBV7-9, TRBJ1-6)
CASSFPGRGNSPLHF

SEQ ID NO: 610755 - protein, 15 aa, Homo sapiens
  CDR3 for alpha chain variable domain of TCR clone 305378 (TRAV12-2, TRAJ50)
CAVNGLETSYDEVIF

SEQ ID NO: 610756 - protein, 16 aa, Homo sapiens
  CDR3 for beta chain variable domain of TCR clone 305378 (TRBV5-4, TRBJ2-3)
CASQQPGAGGADTQYF

SEQ ID NO: 610757 - protein, 15 aa, Homo sapiens
  CDR3 for alpha chain variable domain of TCR clone 305379 (TRAV12-1, TRAJ40)
CVVNRDTSGTYKYIF

SEQ ID NO: 610758 - protein, 12 aa, Homo sapiens
  CDR3 for beta chain variable domain of TCR clone 305379 (TRBV12-4, TRBJ2-7)
CASSLGGYEQYF

SEQ ID NO: 610759 - protein, 13 aa, Homo sapiens
  CDR3 for alpha chain variable domain of TCR clone 305380 (TRAV3, TRAJ21)
CAVREPDFNKFYF

SEQ ID NO: 610760 - protein, 14 aa, Homo sapiens
  CDR3 for beta chain variable domain of TCR clone 305380 (TRBV7-9, TRBJ1-2)
CASSLGPPQWPATF

SEQ ID NO: 610761 - protein, 16 aa, Homo sapiens
  CDR3 for alpha chain variable domain of TCR clone 305381 (TRAV1-1, TRAJ45)
CAVRAYSGGGADGLTF

SEQ ID NO: 610762 - protein, 13 aa, Homo sapiens
  CDR3 for beta chain variable domain of TCR clone 305381 (TRBV20-1, TRBJ1-2)
CSARGTADCGYTF

SEQ ID NO: 610763 - protein, 14 aa, Homo sapiens
  CDR3 for alpha chain variable domain of TCR clone 305382 (TRAV1-1, TRAJ23)
CAVSIYNQGGKLIF

SEQ ID NO: 610764 - protein, 14 aa, Homo sapiens
  CDR3 for beta chain variable domain of TCR clone 305382 (TRBV15, TRBJ2-5)
CATSMGGSGETQYF

SEQ ID NO: 610765 - protein, 14 aa, Homo sapiens
  CDR3 for alpha chain variable domain of TCR clone 305383 (TRAV12-2, TRAJ13)
CAVKKTGGYQKVPF

SEQ ID NO: 610766 - protein, 16 aa, Homo sapiens
  CDR3 for beta chain variable domain of TCR clone 305383 (TRBV2, TRBJ2-1)
CASRSPAGGKYNEQFF

SEQ ID NO: 610767 - protein, 13 aa, Homo sapiens
  CDR3 for alpha chain variable domain of TCR clone 305384 (TRAV17, TRAJ34)
CATDLYNTDKLIF

SEQ ID NO: 610768 - protein, 15 aa, Homo sapiens
  CDR3 for beta chain variable domain of TCR clone 305384 (TRBV5-1, TRBJ2-1)
CASSPPRAPYNERFF

SEQ ID NO: 610769 - protein, 15 aa, Homo sapiens
  CDR3 for alpha chain variable domain of TCR clone 305385 (TRAV2, TRAJ45)
CAVDGTGGGADGLTF

SEQ ID NO: 610770 - protein, 16 aa, Homo sapiens
  CDR3 for beta chain variable domain of TCR clone 305385 (TRBV7-3, TRBJ2-1)
CASSSKSGGIYNEQFF

SEQ ID NO: 610771 - protein, 14 aa, Homo sapiens
  CDR3 for alpha chain variable domain of TCR clone 305386 (TRAV38-1, TRAJ40)
CALRPTSGTYKYIF

SEQ ID NO: 610772 - protein, 19 aa, Homo sapiens
  CDR3 for beta chain variable domain of TCR clone 305386 (TRBV28, TRBJ2-1)
CASSFSIRGSGRTRYEQFF

SEQ ID NO: 610773 - protein, 11 aa, Homo sapiens
  CDR3 for alpha chain variable domain of TCR clone 305387 (TRAV16, TRAJ26)
CALTRWSEFCL

SEQ ID NO: 610774 - protein, 16 aa, Homo sapiens
  CDR3 for beta chain variable domain of TCR clone 305387 (TRBV7-9, TRBJ1-2)
CASSLGFSSGEDGYTF

SEQ ID NO: 610775 - protein, 14 aa, Homo sapiens
  CDR3 for alpha chain variable domain of TCR clone 305388 (TRAV35, TRAJ22)
CAGLRPGAARQLTF

SEQ ID NO: 610776 - protein, 14 aa, Homo sapiens
  CDR3 for beta chain variable domain of TCR clone 305388 (TRBV5-1, TRBJ2-7)
CASSRGESLYEQYF

SEQ ID NO: 610777 - protein, 14 aa, Homo sapiens
  CDR3 for alpha chain variable domain of TCR clone 305389 (TRAV20, TRAJ42)
CCAADGGSQGKLIF

SEQ ID NO: 610778 - protein, 14 aa, Homo sapiens
  CDR3 for beta chain variable domain of TCR clone 305389 (TRBV14, TRBJ2-3)
CASSRKLAADTQYF

SEQ ID NO: 610779 - protein, 17 aa, Homo sapiens
  CDR3 for alpha chain variable domain of TCR clone 305390 (TRAV13-1, TRAJ52)
CAASSGAGGTSYGKLTF

SEQ ID NO: 610780 - protein, 15 aa, Homo sapiens
  CDR3 for beta chain variable domain of TCR clone 305390 (TRBV28, TRBJ2-4)
CAAGSGTRLMGIQYF

SEQ ID NO: 610781 - protein, 13 aa, Homo sapiens
  CDR3 for alpha chain variable domain of TCR clone 305391 (TRAV21, TRAJ27)
CAARPGNAGKSTC

SEQ ID NO: 610782 - protein, 15 aa, Homo sapiens
  CDR3 for beta chain variable domain of TCR clone 305391 (TRBV11-3, TRBJ2-7)
CASSPGPASSYEQYF

SEQ ID NO: 610783 - protein, 14 aa, Homo sapiens
  CDR3 for alpha chain variable domain of TCR clone 305392 (TRAV12-2, TRAJ13)
CAVKKTGGYQKVTF

SEQ ID NO: 610784 - protein, 15 aa, Homo sapiens
  CDR3 for beta chain variable domain of TCR clone 305392 (TRBV27, TRBJ2-1)
CGSSNGGGSANEQFF

SEQ ID NO: 610785 - protein, 14 aa, Homo sapiens
  CDR3 for alpha chain variable domain of TCR clone 305393 (TRAV17, TRAJ33)
CATDARRSNYQLIW

SEQ ID NO: 610786 - protein, 14 aa, Homo sapiens
  CDR3 for beta chain variable domain of TCR clone 305393 (TRBV25-1, TRBJ1-4)
CSSSGGGQPEKLFF

SEQ ID NO: 610787 - protein, 14 aa, Homo sapiens
  CDR3 for alpha chain variable domain of TCR clone 305394 (TRAV20, TRAJ56)
CAVQFGGANSKLTF

SEQ ID NO: 610788 - protein, 13 aa, Homo sapiens
  CDR3 for beta chain variable domain of TCR clone 305394 (TRBV28, TRBJ2-7)
CAGAQQGLDEQYF

SEQ ID NO: 610789 - protein, 14 aa, Homo sapiens
  CDR3 for alpha chain variable domain of TCR clone 305395 (TRAV1-2, TRAJ16)
CAVNRFSDGKKLLF

SEQ ID NO: 610790 - protein, 13 aa, Homo sapiens
  CDR3 for beta chain variable domain of TCR clone 305395 (TRBV12-4, TRBJ1-5)
CASSPDRAQPQHF

SEQ ID NO: 610791 - protein, 16 aa, Homo sapiens
  CDR3 for alpha chain variable domain of TCR clone 305396 (TRAV12-2, TRAJ10)
CAVNRVLTGGGNKLTF

SEQ ID NO: 610792 - protein, 15 aa, Homo sapiens
  CDR3 for beta chain variable domain of TCR clone 305396 (TRBV7-8, TRBJ2-1)
CASSLADSLYNEQFF

SEQ ID NO: 610793 - protein, 17 aa, Homo sapiens
  CDR3 for alpha chain variable domain of TCR clone 305397 (TRAV13-1, TRAJ45)
CAAKRGVAGGGADGLTF

SEQ ID NO: 610794 - protein, 14 aa, Homo sapiens
  CDR3 for beta chain variable domain of TCR clone 305397 (TRBV5-5, TRBJ1-5)
CASSGQGVDQPQHF

SEQ ID NO: 610795 - protein, 11 aa, Homo sapiens
  CDR3 for alpha chain variable domain of TCR clone 305398 (TRAV25, TRAJ21)
CAGTIFNKFYF

SEQ ID NO: 610796 - protein, 14 aa, Homo sapiens
  CDR3 for beta chain variable domain of TCR clone 305398 (TRBV12-5, TRBJ2-5)
CVSGSRTHQETQYF

SEQ ID NO: 610797 - protein, 10 aa, Homo sapiens
  CDR3 for alpha chain variable domain of TCR clone 305399 (TRAV8-4, TRAJ43)
CAVSADDMRF

SEQ ID NO: 610798 - protein, 15 aa, Homo sapiens
  CDR3 for beta chain variable domain of TCR clone 305399 (TRBV5-1, TRBJ2-3)
FAPAALLGSTDTQYF

SEQ ID NO: 610799 - protein, 16 aa, Homo sapiens
  CDR3 for alpha chain variable domain of TCR clone 305400 (TRAV30, TRAJ24)
CGTEIVDADSWGKFQF

SEQ ID NO: 610800 - protein, 15 aa, Homo sapiens
  CDR3 for beta chain variable domain of TCR clone 305400 (TRBV18, TRBJ2-1)
CASLPDRGRDSEQFF

SEQ ID NO: 610801 - protein, 12 aa, Homo sapiens
  CDR3 for alpha chain variable domain of TCR clone 305401 (TRAV3, TRAJ20)
CAVRDPDYKLSF

SEQ ID NO: 610802 - protein, 14 aa, Homo sapiens
  CDR3 for beta chain variable domain of TCR clone 305401 (TRBV4-2, TRBJ2-1)
CASGLDSAYNEQFF

SEQ ID NO: 610803 - protein, 12 aa, Homo sapiens
  CDR3 for alpha chain variable domain of TCR clone 305402 (TRAV16, TRAJ26)
CAPEELWSEFCF

SEQ ID NO: 610804 - protein, 15 aa, Homo sapiens
  CDR3 for beta chain variable domain of TCR clone 305402 (TRBV7-2, TRBJ2-3)
CASSLTGTSTDTQYF

SEQ ID NO: 610805 - protein, 17 aa, Homo sapiens
  CDR3 for alpha chain variable domain of TCR clone 305403 (TRAV3, TRAJ6)
CAVRDGPRAGGSHIPTF

SEQ ID NO: 610806 - protein, 14 aa, Homo sapiens
  CDR3 for beta chain variable domain of TCR clone 305403 (TRBV7-2, TRBJ2-7)
CASSPKTSFYEQCF

SEQ ID NO: 610807 - protein, 11 aa, Homo sapiens
  CDR3 for alpha chain variable domain of TCR clone 305404 (TRAV17, TRAJ21)
CATGNFNKFYF

SEQ ID NO: 610808 - protein, 16 aa, Homo sapiens
  CDR3 for beta chain variable domain of TCR clone 305404 (TRBV20-1, TRBJ1-2)
CSASMGQGVANYGYTF

SEQ ID NO: 610809 - protein, 12 aa, Homo sapiens
  CDR3 for alpha chain variable domain of TCR clone 305405 (TRAV17, TRAJ20)
CATDSNDYKLSF

SEQ ID NO: 610810 - protein, 10 aa, Homo sapiens
  CDR3 for beta chain variable domain of TCR clone 305405 (TRBV5-1, TRBJ2-2)
CASSLAGLSG

SEQ ID NO: 610811 - protein, 10 aa, Homo sapiens
  CDR3 for alpha chain variable domain of TCR clone 305406 (TRAV39, TRAJ49)
CAVAGNQFDF

SEQ ID NO: 610812 - protein, 14 aa, Homo sapiens
  CDR3 for beta chain variable domain of TCR clone 305406 (TRBV7-8, TRBJ2-7)
CASSPRDRVYEQYF

SEQ ID NO: 610813 - protein, 13 aa, Homo sapiens
  CDR3 for alpha chain variable domain of TCR clone 305407 (TRAV20, TRAJ54)
CAVQAGGAQKLVF

SEQ ID NO: 610814 - protein, 14 aa, Homo sapiens
  CDR3 for beta chain variable domain of TCR clone 305407 (TRBV20-1, TRBJ2-7)
CSVKTGTGGYEQYF

SEQ ID NO: 610815 - protein, 11 aa, Homo sapiens
  CDR3 for alpha chain variable domain of TCR clone 305408 (TRAV21, TRAJ11)
CAVNGYSTLTF

SEQ ID NO: 610816 - protein, 20 aa, Homo sapiens
  CDR3 for beta chain variable domain of TCR clone 305408 (TRBV28, TRBJ2-7)
CASTPIGRSPGLAGGNEQYF

SEQ ID NO: 610817 - protein, 18 aa, Homo sapiens
  CDR3 for alpha chain variable domain of TCR clone 305409 (TRAV3, TRAJ17)
CAVRARRGGRSCRQQANF

SEQ ID NO: 610818 - protein, 14 aa, Homo sapiens
  CDR3 for beta chain variable domain of TCR clone 305409 (TRBV4-1, TRBJ2-2)
CDSSQAVNTGELFF

SEQ ID NO: 610819 - protein, 19 aa, Homo sapiens
  CDR3 for alpha chain variable domain of TCR clone 305410 (TRAV13-1, TRAJ52)
CAASPYQNAGGTSYGKLTF

SEQ ID NO: 610820 - protein, 12 aa, Homo sapiens
  CDR3 for beta chain variable domain of TCR clone 305410 (TRBV11-2, TRBJ2-2)
CASSLGGGELFF

SEQ ID NO: 610821 - protein, 11 aa, Homo sapiens
  CDR3 for alpha chain variable domain of TCR clone 305411 (TRAV17, TRAJ39)
CATGAGNMLTF

SEQ ID NO: 610822 - protein, 16 aa, Homo sapiens
  CDR3 for beta chain variable domain of TCR clone 305411 (TRBV5-1, TRBJ2-1)
CASSVGVRGSYNEQFF

SEQ ID NO: 610823 - protein, 14 aa, Homo sapiens
  CDR3 for alpha chain variable domain of TCR clone 305412 (TRAV12-2, TRAJ44)
CAVNPAGTASKLTF

SEQ ID NO: 610824 - protein, 14 aa, Homo sapiens
  CDR3 for beta chain variable domain of TCR clone 305412 (TRBV4-1, TRBJ1-1)
CASSQQGNGNEAFF

SEQ ID NO: 610825 - protein, 14 aa, Homo sapiens
  CDR3 for alpha chain variable domain of TCR clone 305413 (TRAV12-2, TRAJ13)
CAVKKNGGYQKVTF

SEQ ID NO: 610826 - protein, 13 aa, Homo sapiens
  CDR3 for beta chain variable domain of TCR clone 305413 (TRBV20-1, TRBJ1-1)
CSARGGGNTEAFF

SEQ ID NO: 610827 - protein, 18 aa, Homo sapiens
  CDR3 for alpha chain variable domain of TCR clone 305414 (TRAV26-1, TRAJ52)
CIGRVAGAGGTSYGKLTF

SEQ ID NO: 610828 - protein, 13 aa, Homo sapiens
  CDR3 for beta chain variable domain of TCR clone 305414 (TRBV7-8, TRBJ1-2)
CASSAQSYYGYTF

SEQ ID NO: 610829 - protein, 14 aa, Homo sapiens
  CDR3 for alpha chain variable domain of TCR clone 305415 (TRAV13-1, TRAJ9)
CAASALTGGFKTIF

SEQ ID NO: 610830 - protein, 16 aa, Homo sapiens
  CDR3 for beta chain variable domain of TCR clone 305415 (TRBV7-8, TRBJ2-4)
CASSAERTLAKNRQYF

SEQ ID NO: 610831 - protein, 14 aa, Homo sapiens
  CDR3 for alpha chain variable domain of TCR clone 305416 (TRAV17, TRAJ31)
CATVLRNNNARLMF

SEQ ID NO: 610832 - protein, 12 aa, Homo sapiens
  CDR3 for beta chain variable domain of TCR clone 305416 (TRBV5-1, TRBJ1-2)
RASSQDTYGYTF

SEQ ID NO: 610833 - protein, 13 aa, Homo sapiens
  CDR3 for alpha chain variable domain of TCR clone 305417 (TRAV8-4, TRAJ10)
CAAFTGGGNKLTF

SEQ ID NO: 610834 - protein, 15 aa, Homo sapiens
  CDR3 for beta chain variable domain of TCR clone 305417 (TRBV10-3, TRBJ2-3)
CAISLTSGGTDTQYF

SEQ ID NO: 610835 - protein, 13 aa, Homo sapiens
  CDR3 for alpha chain variable domain of TCR clone 305418 (TRAV36/DV7, TRAJ38)
RVANAGNNRKLIW

SEQ ID NO: 610836 - protein, 14 aa, Homo sapiens
  CDR3 for beta chain variable domain of TCR clone 305418 (TRBV7-2, TRBJ2-7)
CASSLRWEVNEQYF

SEQ ID NO: 610837 - protein, 13 aa, Homo sapiens
  CDR3 for alpha chain variable domain of TCR clone 305419 (TRAV24, TRAJ15)
CALSNQAGTALIF

SEQ ID NO: 610838 - protein, 14 aa, Homo sapiens
  CDR3 for beta chain variable domain of TCR clone 305419 (TRBV4-2, TRBJ1-4)
CASSQGATNEKLFF

SEQ ID NO: 610839 - protein, 14 aa, Homo sapiens
  CDR3 for alpha chain variable domain of TCR clone 305420 (TRAV26-1, TRAJ6)
CIVSPVGGSYIPTF

SEQ ID NO: 610840 - protein, 11 aa, Homo sapiens
  CDR3 for beta chain variable domain of TCR clone 305420 (TRBV11-2, TRBJ2-2)
CAISLPGELFL

SEQ ID NO: 610841 - protein, 13 aa, Homo sapiens
  CDR3 for alpha chain variable domain of TCR clone 305421 (TRAV12-2, TRAJ3)
CAGCESSASKIIF

SEQ ID NO: 610842 - protein, 13 aa, Homo sapiens
  CDR3 for beta chain variable domain of TCR clone 305421 (TRBV3-1, TRBJ2-3)
CASSQGSTDTQYF

SEQ ID NO: 610843 - protein, 14 aa, Homo sapiens
  CDR3 for alpha chain variable domain of TCR clone 305422 (TRAV35, TRAJ33)
GAGSSQDSNYQLIW

SEQ ID NO: 610844 - protein, 15 aa, Homo sapiens
  CDR3 for beta chain variable domain of TCR clone 305422 (TRBV29-1, TRBJ2-7)
CSVEFFDRGSYEQYL

SEQ ID NO: 610845 - protein, 13 aa, Homo sapiens
  CDR3 for alpha chain variable domain of TCR clone 305423 (TRAV23/DV6, TRAJ15)
CAALPAGRNCSDL

SEQ ID NO: 610846 - protein, 14 aa, Homo sapiens
  CDR3 for beta chain variable domain of TCR clone 305423 (TRBV7-9, TRBJ1-2)
CASSRQGANFGYTF

SEQ ID NO: 610847 - protein, 16 aa, Homo sapiens
  CDR3 for alpha chain variable domain of TCR clone 305424 (TRAV26-1, TRAJ52)
CIVSNAGGTSYGKLTF

SEQ ID NO: 610848 - protein, 14 aa, Homo sapiens
  CDR3 for beta chain variable domain of TCR clone 305424 (TRBV5-1, TRBJ2-7)
CASSRGESLYEQYF

SEQ ID NO: 610849 - protein, 13 aa, Homo sapiens
  CDR3 for alpha chain variable domain of TCR clone 305425 (TRAV12-3, TRAJ13)
CAMTSGGYQKITF

SEQ ID NO: 610850 - protein, 13 aa, Homo sapiens
  CDR3 for beta chain variable domain of TCR clone 305425 (TRBV20-1, TRBJ2-2)
CSALSGGAGELFF

SEQ ID NO: 610851 - protein, 12 aa, Homo sapiens
  CDR3 for alpha chain variable domain of TCR clone 305426 (TRAV2, TRAJ37)
CAVIMNTGKLIF

SEQ ID NO: 610852 - protein, 15 aa, Homo sapiens
  CDR3 for beta chain variable domain of TCR clone 305426 (TRBV5-1, TRBJ2-5)
CASSFGGPPQETQYF

SEQ ID NO: 610853 - protein, 11 aa, Homo sapiens
  CDR3 for alpha chain variable domain of TCR clone 305427 (TRAV29/DV5, TRAJ49)
CAAVPVNQIYF

SEQ ID NO: 610854 - protein, 17 aa, Homo sapiens
  CDR3 for beta chain variable domain of TCR clone 305427 (TRBV4-2, TRBJ1-1)
CASTQFGGGSGNTEAFF

SEQ ID NO: 610855 - protein, 11 aa, Homo sapiens
  CDR3 for alpha chain variable domain of TCR clone 305428 (TRAV17, TRAJ36)
CAPTGANNLFF

SEQ ID NO: 610856 - protein, 13 aa, Homo sapiens
  CDR3 for beta chain variable domain of TCR clone 305428 (TRBV20-1, TRBJ1-1)
CSATPGGHTEAVF

SEQ ID NO: 610857 - protein, 15 aa, Homo sapiens
  CDR3 for alpha chain variable domain of TCR clone 305429 (TRAV8-3, TRAJ41)
CAVGSNSNSGYALNF

SEQ ID NO: 610858 - protein, 17 aa, Homo sapiens
  CDR3 for beta chain variable domain of TCR clone 305429 (TRBV5-1, TRBJ2-5)
CASSLAETSGFQETQYF

SEQ ID NO: 610859 - protein, 11 aa, Homo sapiens
  CDR3 for alpha chain variable domain of TCR clone 305430 (TRAV1-1, TRAJ3)
CAVRSASKIIF

SEQ ID NO: 610860 - protein, 13 aa, Homo sapiens
  CDR3 for beta chain variable domain of TCR clone 305430 (TRBV10-3, TRBJ2-7)
CASKLAVNYEQYF

SEQ ID NO: 610861 - protein, 13 aa, Homo sapiens
  CDR3 for alpha chain variable domain of TCR clone 305431 (TRAV27, TRAJ27)
CAGGITNAGNSTF

SEQ ID NO: 610862 - protein, 13 aa, Homo sapiens
  CDR3 for beta chain variable domain of TCR clone 305431 (TRBV20-1, TRBJ1-2)
CSASLGVGYGYTF

SEQ ID NO: 610863 - protein, 13 aa, Homo sapiens
  CDR3 for alpha chain variable domain of TCR clone 305432 (TRAV29/DV5, TRAJ48)
CAASSFGNEKLTF

SEQ ID NO: 610864 - protein, 15 aa, Homo sapiens
  CDR3 for beta chain variable domain of TCR clone 305432 (TRBV6-1, TRBJ2-1)
CASSELRGQYNEQFF

SEQ ID NO: 610865 - protein, 14 aa, Homo sapiens
  CDR3 for alpha chain variable domain of TCR clone 305433 (TRAV1-2, TRAJ16)
CAVNRFSDGQKLLF

SEQ ID NO: 610866 - protein, 15 aa, Homo sapiens
  CDR3 for beta chain variable domain of TCR clone 305433 (TRBV7-9, TRBJ1-6)
CASSSPGRANSPLHF

SEQ ID NO: 610867 - protein, 12 aa, Homo sapiens
  CDR3 for alpha chain variable domain of TCR clone 305434 (TRAV12-3, TRAJ42)
CAPGGSQGNLIF

SEQ ID NO: 610868 - protein, 12 aa, Homo sapiens
  CDR3 for beta chain variable domain of TCR clone 305434 (TRBV7-8, TRBJ2-7)
CASSLGDREQYF

SEQ ID NO: 610869 - protein, 15 aa, Homo sapiens
  CDR3 for alpha chain variable domain of TCR clone 305435 (TRAV8-4, TRAJ53)
CAVSDGGGSNYKLTF

SEQ ID NO: 610870 - protein, 14 aa, Homo sapiens
  CDR3 for beta chain variable domain of TCR clone 305435 (TRBV19, TRBJ2-1)
CASPTFVLSGEQFF

SEQ ID NO: 610871 - protein, 17 aa, Homo sapiens
  CDR3 for alpha chain variable domain of TCR clone 305436 (TRAV1-2, TRAJ6)
CAVRDTTRTGGSDIPTF

SEQ ID NO: 610872 - protein, 12 aa, Homo sapiens
  CDR3 for beta chain variable domain of TCR clone 305436 (TRBV24-1, TRBJ2-3)
CATSSGGDTQYF

SEQ ID NO: 610873 - protein, 14 aa, Homo sapiens
  CDR3 for alpha chain variable domain of TCR clone 305437 (TRAV17, TRAJ57)
CATDPQGGSEKLVF

SEQ ID NO: 610874 - protein, 17 aa, Homo sapiens
  CDR3 for beta chain variable domain of TCR clone 305437 (TRBV5-1, TRBJ2-5)
CASSPVALGQNQETQYF

SEQ ID NO: 610875 - protein, 14 aa, Homo sapiens
  CDR3 for alpha chain variable domain of TCR clone 305438 (TRAV12-1, TRAJ26)
CVVKGSNYGRNFVF

SEQ ID NO: 610876 - protein, 17 aa, Homo sapiens
  CDR3 for beta chain variable domain of TCR clone 305438 (TRBV11-2, TRBJ2-6)
CASSQRDSFSGANVLTF

SEQ ID NO: 610877 - protein, 11 aa, Homo sapiens
  CDR3 for alpha chain variable domain of TCR clone 305439 (TRAV4, TRAJ31)
CLVGDNARLMF

SEQ ID NO: 610878 - protein, 13 aa, Homo sapiens
  CDR3 for beta chain variable domain of TCR clone 305439 (TRBV10-3, TRBJ2-7)
CASKLAVNYEQYF

SEQ ID NO: 610879 - protein, 14 aa, Homo sapiens
  CDR3 for alpha chain variable domain of TCR clone 305440 (TRAV12-3, TRAJ42)
CAMNYGGSQGNLIF

SEQ ID NO: 610880 - protein, 16 aa, Homo sapiens
  CDR3 for beta chain variable domain of TCR clone 305440 (TRBV12-4, TRBJ1-5)
CASSSGPRGSNQHQHF

SEQ ID NO: 610881 - protein, 14 aa, Homo sapiens
  CDR3 for alpha chain variable domain of TCR clone 305441 (TRAV26-1, TRAJ38)
CIADNAGNNSKLIW

SEQ ID NO: 610882 - protein, 17 aa, Homo sapiens
  CDR3 for beta chain variable domain of TCR clone 305441 (TRBV15, TRBJ1-1)
CATSRVGGADGDTEAFF

SEQ ID NO: 610883 - protein, 15 aa, Homo sapiens
  CDR3 for alpha chain variable domain of TCR clone 305442 (TRAV13-1, TRAJ32)
CAASIYGGATNKLVF

SEQ ID NO: 610884 - protein, 14 aa, Homo sapiens
  CDR3 for beta chain variable domain of TCR clone 305442 (TRBV7-9, TRBJ2-1)
CASSLASGSNEQFF

SEQ ID NO: 610885 - protein, 15 aa, Homo sapiens
  CDR3 for alpha chain variable domain of TCR clone 305443 (TRAV17, TRAJ57)
CATGTSQGGSEKLGF

SEQ ID NO: 610886 - protein, 16 aa, Homo sapiens
  CDR3 for beta chain variable domain of TCR clone 305443 (TRBV12-4, TRBJ1-5)
CASSRPVGGSNQPQHF

SEQ ID NO: 610887 - protein, 13 aa, Homo sapiens
  CDR3 for alpha chain variable domain of TCR clone 305444 (TRAV35, TRAJ42)
CAGFPGSQGNLIF

SEQ ID NO: 610888 - protein, 14 aa, Homo sapiens
  CDR3 for beta chain variable domain of TCR clone 305444 (TRBV4-1, TRBJ2-2)
SASSQAVNTGELFF

SEQ ID NO: 610889 - protein, 16 aa, Homo sapiens
  CDR3 for alpha chain variable domain of TCR clone 305445 (TRAV3, TRAJ10)
CAVRDMRAGGGNKPTF

SEQ ID NO: 610890 - protein, 13 aa, Homo sapiens
  CDR3 for beta chain variable domain of TCR clone 305445 (TRBV7-3, TRBJ1-1)
CASSQDWGAEAFF

SEQ ID NO: 610891 - protein, 14 aa, Homo sapiens
  CDR3 for alpha chain variable domain of TCR clone 305446 (TRAV12-2, TRAJ13)
CAVKKTGGYQKVTF

SEQ ID NO: 610892 - protein, 12 aa, Homo sapiens
  CDR3 for beta chain variable domain of TCR clone 305446 (TRBV2, TRBJ2-1)
GAQRGKYNEQFF

SEQ ID NO: 610893 - protein, 15 aa, Homo sapiens
  CDR3 for alpha chain variable domain of TCR clone 305447 (TRAV3, TRAJ36)
CAVRASKTGANNLFF

SEQ ID NO: 610894 - protein, 15 aa, Homo sapiens
  CDR3 for beta chain variable domain of TCR clone 305447 (TRBV3-1, TRBJ2-1)
CASSQDYTPRGEQFF

SEQ ID NO: 610895 - protein, 16 aa, Homo sapiens
  CDR3 for alpha chain variable domain of TCR clone 305448 (TRAV1-1, TRAJ29)
CAVRSTRNSGNTPLVF

SEQ ID NO: 610896 - protein, 14 aa, Homo sapiens
  CDR3 for beta chain variable domain of TCR clone 305448 (TRBV7-2, TRBJ2-2)
CASSLGQNTGELFF

SEQ ID NO: 610897 - protein, 13 aa, Homo sapiens
  CDR3 for alpha chain variable domain of TCR clone 305449 (TRAV27, TRAJ15)
CAGAGQAGTALIF

SEQ ID NO: 610898 - protein, 14 aa, Homo sapiens
  CDR3 for beta chain variable domain of TCR clone 305449 (TRBV7-8, TRBJ2-3)
CSSSLEAGTDTQYF

SEQ ID NO: 610899 - protein, 12 aa, Homo sapiens
  CDR3 for alpha chain variable domain of TCR clone 305450 (TRAV23/DV6, TRAJ24)
CAANDSWGKLKF

SEQ ID NO: 610900 - protein, 16 aa, Homo sapiens
  CDR3 for beta chain variable domain of TCR clone 305450 (TRBV12-4, TRBJ2-5)
CASSLSTSGGKETQYF

SEQ ID NO: 610901 - protein, 12 aa, Homo sapiens
  CDR3 for alpha chain variable domain of TCR clone 305451 (TRAV17, TRAJ30)
CVPARRDDKIIF

SEQ ID NO: 610902 - protein, 17 aa, Homo sapiens
  CDR3 for beta chain variable domain of TCR clone 305451 (TRBV7-7, TRBJ2-2)
CIAVPAAGTGAPGSCFF

SEQ ID NO: 610903 - protein, 16 aa, Homo sapiens
  CDR3 for alpha chain variable domain of TCR clone 305452 (TRAV30, TRAJ24)
CGTEIVDADSWGKFKF

SEQ ID NO: 610904 - protein, 14 aa, Homo sapiens
  CDR3 for beta chain variable domain of TCR clone 305452 (TRBV7-6, TRBJ2-3)
CASSLGTVTDTQYF

SEQ ID NO: 610905 - protein, 16 aa, Homo sapiens
  CDR3 for alpha chain variable domain of TCR clone 305453 (TRAV30, TRAJ24)
CGTEIVDADSWGKFQF

SEQ ID NO: 610906 - protein, 16 aa, Homo sapiens
  CDR3 for beta chain variable domain of TCR clone 305453 (TRBV18, TRBJ2-7)
CASSPLQSATHYEQYF

SEQ ID NO: 610907 - protein, 14 aa, Homo sapiens
  CDR3 for alpha chain variable domain of TCR clone 305454 (TRAV1-2, TRAJ16)
CAVNRFSDCQKLLF

SEQ ID NO: 610908 - protein, 15 aa, Homo sapiens
  CDR3 for beta chain variable domain of TCR clone 305454 (TRBV7-9, TRBJ1-6)
CASSSPGRGNSPLLF

SEQ ID NO: 610909 - protein, 15 aa, Homo sapiens
  CDR3 for alpha chain variable domain of TCR clone 305455 (TRAV38-1, TRAJ37)
CAFIFGSGNTGKLIF

SEQ ID NO: 610910 - protein, 14 aa, Homo sapiens
  CDR3 for beta chain variable domain of TCR clone 305455 (TRBV11-3, TRBJ1-6)
CASSFSGGDSPLHF

SEQ ID NO: 610911 - protein, 12 aa, Homo sapiens
  CDR3 for alpha chain variable domain of TCR clone 305456 (TRAV20, TRAJ20)
CAVRFNDYKLSF

SEQ ID NO: 610912 - protein, 14 aa, Homo sapiens
  CDR3 for beta chain variable domain of TCR clone 305456 (TRBV20-1, TRBJ2-1)
CSAQVGGSANEQFF

SEQ ID NO: 610913 - protein, 12 aa, Homo sapiens
  CDR3 for alpha chain variable domain of TCR clone 305457 (TRAV8-3, TRAJ26)
CAGDNYGQNFVF

SEQ ID NO: 610914 - protein, 14 aa, Homo sapiens
  CDR3 for beta chain variable domain of TCR clone 305457 (TRBV7-8, TRBJ2-3)
CASSFKSSTDTQYF

SEQ ID NO: 610915 - protein, 14 aa, Homo sapiens
  CDR3 for alpha chain variable domain of TCR clone 305458 (TRAV13-1, TRAJ35)
CAASKGGFGNVLHC

SEQ ID NO: 610916 - protein, 13 aa, Homo sapiens
  CDR3 for beta chain variable domain of TCR clone 305458 (TRBV7-3, TRBJ1-1)
CASSQDWGALAFF

SEQ ID NO: 610917 - protein, 13 aa, Homo sapiens
  CDR3 for alpha chain variable domain of TCR clone 305459 (TRAV29/DV5, TRAJ31)
CAARRNNNARLMF

SEQ ID NO: 610918 - protein, 12 aa, Homo sapiens
  CDR3 for beta chain variable domain of TCR clone 305459 (TRBV14, TRBJ2-5)
CASSQLKETQYF

SEQ ID NO: 610919 - protein, 12 aa, Homo sapiens
  CDR3 for alpha chain variable domain of TCR clone 305460 (TRAV2, TRAJ36)
RIGETEANNLFF

SEQ ID NO: 610920 - protein, 14 aa, Homo sapiens
  CDR3 for beta chain variable domain of TCR clone 305460 (TRBV7-9, TRBJ2-5)
CASSLDTAQETQYF

SEQ ID NO: 610921 - protein, 15 aa, Homo sapiens
  CDR3 for alpha chain variable domain of TCR clone 305461 (TRAV26-1, TRAJ39)
CIVRVARNAGNMPTF

SEQ ID NO: 610922 - protein, 16 aa, Homo sapiens
  CDR3 for beta chain variable domain of TCR clone 305461 (TRBV5-1, TRBJ2-1)
CASSLTLAGGRNEQFF

SEQ ID NO: 610923 - protein, 13 aa, Homo sapiens
  CDR3 for alpha chain variable domain of TCR clone 305462 (TRAV1-2, TRAJ17)
CAVGTAAGNKLTF

SEQ ID NO: 610924 - protein, 15 aa, Homo sapiens
  CDR3 for beta chain variable domain of TCR clone 305462 (TRBV7-9, TRBJ2-1)
CASSGTGGDYNEQFF

SEQ ID NO: 610925 - protein, 14 aa, Homo sapiens
  CDR3 for alpha chain variable domain of TCR clone 305463 (TRAV12-3, TRAJ10)
SHLPLTGGGNKLTF

SEQ ID NO: 610926 - protein, 16 aa, Homo sapiens
  CDR3 for beta chain variable domain of TCR clone 305463 (TRBV12-4, TRBJ1-5)
CASSRPVGGSNQPQHS

SEQ ID NO: 610927 - protein, 16 aa, Homo sapiens
  CDR3 for alpha chain variable domain of TCR clone 305464 (TRAV27, TRAJ13)
CAGAKSDSGGYQKVTF

SEQ ID NO: 610928 - protein, 14 aa, Homo sapiens
  CDR3 for beta chain variable domain of TCR clone 305464 (TRBV27, TRBJ1-1)
CVSSLLNGKGQGVF

SEQ ID NO: 610929 - protein, 13 aa, Homo sapiens
  CDR3 for alpha chain variable domain of TCR clone 305465 (TRAV27, TRAJ6)
CAGGTRGSYIPTF

SEQ ID NO: 610930 - protein, 17 aa, Homo sapiens
  CDR3 for beta chain variable domain of TCR clone 305465 (TRBV15, TRBJ1-5)
CATSRAPPGTRNQPQHF

SEQ ID NO: 610931 - protein, 14 aa, Homo sapiens
  CDR3 for alpha chain variable domain of TCR clone 305466 (TRAV1-2, TRAJ8)
CAVREDTGFQKLVF

SEQ ID NO: 610932 - protein, 14 aa, Homo sapiens
  CDR3 for beta chain variable domain of TCR clone 305466 (TRBV4-1, TRBJ2-2)
CASGQAVNTGELFF

SEQ ID NO: 610933 - protein, 14 aa, Homo sapiens
  CDR3 for alpha chain variable domain of TCR clone 305467 (TRAV26-1, TRAJ38)
CIADNAGNNRKLIW

SEQ ID NO: 610934 - protein, 17 aa, Homo sapiens
  CDR3 for beta chain variable domain of TCR clone 305467 (TRBV11-2, TRBJ2-1)
CASSLSPPGVEYNEQFF

SEQ ID NO: 610935 - protein, 12 aa, Homo sapiens
  CDR3 for alpha chain variable domain of TCR clone 305468 (TRAV27, TRAJ9)
CAGESGGFKTIF

SEQ ID NO: 610936 - protein, 11 aa, Homo sapiens
  CDR3 for beta chain variable domain of TCR clone 305468 (TRBV19, TRBJ1-1)
CASSIGSEAFF

SEQ ID NO: 610937 - protein, 14 aa, Homo sapiens
  CDR3 for alpha chain variable domain of TCR clone 305469 (TRAV1-2, TRAJ16)
CAVNRFSAGQKLLF

SEQ ID NO: 610938 - protein, 15 aa, Homo sapiens
  CDR3 for beta chain variable domain of TCR clone 305469 (TRBV3-1, TRBJ2-7)
CASSQVRQGAYEQYF

SEQ ID NO: 610939 - protein, 14 aa, Homo sapiens
  CDR3 for alpha chain variable domain of TCR clone 305470 (TRAV35, TRAJ42)
CCVPYGGSQGNLIF

SEQ ID NO: 610940 - protein, 18 aa, Homo sapiens
  CDR3 for beta chain variable domain of TCR clone 305470 (TRBV13, TRBJ2-6)
CASSPMTSGGSGANVLAF

SEQ ID NO: 610941 - protein, 14 aa, Homo sapiens
  CDR3 for alpha chain variable domain of TCR clone 305471 (TRAV12-1, TRAJ17)
CVVNYKAAGNKLPF

SEQ ID NO: 610942 - protein, 14 aa, Homo sapiens
  CDR3 for beta chain variable domain of TCR clone 305471 (TRBV20-1, TRBJ1-1)
CSAQTRIGGTEAFF

SEQ ID NO: 610943 - protein, 12 aa, Homo sapiens
  CDR3 for alpha chain variable domain of TCR clone 305472 (TRAV12-3, TRAJ17)
CAMTLTGNKLTF

SEQ ID NO: 610944 - protein, 14 aa, Homo sapiens
  CDR3 for beta chain variable domain of TCR clone 305472 (TRBV12-4, TRBJ1-1)
CASRPGQGRTEAFF

SEQ ID NO: 610945 - protein, 12 aa, Homo sapiens
  CDR3 for alpha chain variable domain of TCR clone 305473 (TRAV1-1, TRAJ39)
CAVPVVGDMLTF

SEQ ID NO: 610946 - protein, 17 aa, Homo sapiens
  CDR3 for beta chain variable domain of TCR clone 305473 (TRBV28, TRBJ2-5)
CASSTPEGDALQETQYF

SEQ ID NO: 610947 - protein, 12 aa, Homo sapiens
  CDR3 for alpha chain variable domain of TCR clone 305474 (TRAV1-1, TRAJ8)
CAGGTGFQKLGF

SEQ ID NO: 610948 - protein, 15 aa, Homo sapiens
  CDR3 for beta chain variable domain of TCR clone 305474 (TRBV7-9, TRBJ1-4)
CASSRTGGSNEKLFF

SEQ ID NO: 610949 - protein, 13 aa, Homo sapiens
  CDR3 for alpha chain variable domain of TCR clone 305475 (TRAV2, TRAJ40)
CAVVTSGTYKYIF

SEQ ID NO: 610950 - protein, 11 aa, Homo sapiens
  CDR3 for beta chain variable domain of TCR clone 305475 (TRBV12-4, TRBJ2-5)
CASSFQGAQYF

SEQ ID NO: 610951 - protein, 15 aa, Homo sapiens
  CDR3 for alpha chain variable domain of TCR clone 305476 (TRAV12-2, TRAJ53)
CAVNGGGGSNYKLTF

SEQ ID NO: 610952 - protein, 13 aa, Homo sapiens
  CDR3 for beta chain variable domain of TCR clone 305476 (TRBV12-4, TRBJ2-5)
CASRLAVQETQYF

SEQ ID NO: 610953 - protein, 13 aa, Homo sapiens
  CDR3 for alpha chain variable domain of TCR clone 305477 (TRAV3, TRAJ20)
CAVRDTGDSKLSF

SEQ ID NO: 610954 - protein, 12 aa, Homo sapiens
  CDR3 for beta chain variable domain of TCR clone 305477 (TRBV29-1, TRBJ2-3)
CSVTGGADTQYF

SEQ ID NO: 610955 - protein, 13 aa, Homo sapiens
  CDR3 for alpha chain variable domain of TCR clone 305478 (TRAV30, TRAJ6)
CGFIEGGSYVPRF

SEQ ID NO: 610956 - protein, 13 aa, Homo sapiens
  CDR3 for beta chain variable domain of TCR clone 305478 (TRBV5-4, TRBJ2-5)
CASSPVSQETQYF

SEQ ID NO: 610957 - protein, 17 aa, Homo sapiens
  CDR3 for alpha chain variable domain of TCR clone 305479 (TRAV38-2/DV8, TRAJ28)
CAFLTLYSWAGSYQLTF

SEQ ID NO: 610958 - protein, 13 aa, Homo sapiens
  CDR3 for beta chain variable domain of TCR clone 305479 (TRBV7-2, TRBJ2-5)
CQQLVRGGETQYF

SEQ ID NO: 610959 - protein, 13 aa, Homo sapiens
  CDR3 for alpha chain variable domain of TCR clone 305480 (TRAV8-6, TRAJ9)
CAVWDTGGFKNIF

SEQ ID NO: 610960 - protein, 13 aa, Homo sapiens
  CDR3 for beta chain variable domain of TCR clone 305480 (TRBV27, TRBJ1-1)
CASSLSIGAEAFF

SEQ ID NO: 610961 - protein, 12 aa, Homo sapiens
  CDR3 for alpha chain variable domain of TCR clone 305481 (TRAV12-2, TRAJ10)
WGVTGGGGKLTF

SEQ ID NO: 610962 - protein, 16 aa, Homo sapiens
  CDR3 for beta chain variable domain of TCR clone 305481 (TRBV6-4, TRBJ1-2)
CASSEAVGDPNYGYTF

SEQ ID NO: 610963 - protein, 16 aa, Homo sapiens
  CDR3 for alpha chain variable domain of TCR clone 305482 (TRAV12-3, TRAJ53)
CAMSPGSGGSNYKLSF

SEQ ID NO: 610964 - protein, 13 aa, Homo sapiens
  CDR3 for beta chain variable domain of TCR clone 305482 (TRBV7-3, TRBJ1-1)
CASSQDWGAEAFF

SEQ ID NO: 610965 - protein, 22 aa, Homo sapiens
  CDR3 for alpha chain variable domain of TCR clone 305483 (TRAV8-6, TRAJ6)
CAVTLGEEATYLHLEEEPALLF

SEQ ID NO: 610966 - protein, 15 aa, Homo sapiens
  CDR3 for beta chain variable domain of TCR clone 305483 (TRBV7-2, TRBJ1-1)
CASSPQGGANTEAFF

SEQ ID NO: 610967 - protein, 16 aa, Homo sapiens
  CDR3 for alpha chain variable domain of TCR clone 305484 (TRAV12-3, TRAJ53)
CAMSPGSGGSNYILTF

SEQ ID NO: 610968 - protein, 16 aa, Homo sapiens
  CDR3 for beta chain variable domain of TCR clone 305484 (TRBV4-2, TRBJ1-1)
CASSQAGFGMNTEAFF

SEQ ID NO: 610969 - protein, 11 aa, Homo sapiens
  CDR3 for alpha chain variable domain of TCR clone 305485 (TRAV35, TRAJ30)
CCQLADDKIIF

SEQ ID NO: 610970 - protein, 17 aa, Homo sapiens
  CDR3 for beta chain variable domain of TCR clone 305485 (TRBV4-2, TRBJ2-5)
CASSPGRWRNFQETQYF

SEQ ID NO: 610971 - protein, 15 aa, Homo sapiens
  CDR3 for alpha chain variable domain of TCR clone 305486 (TRAV29/DV5, TRAJ53)
CAASASGGSNYKLTF

SEQ ID NO: 610972 - protein, 13 aa, Homo sapiens
  CDR3 for beta chain variable domain of TCR clone 305486 (TRBV10-3, TRBJ2-7)
CASKLAVNYEQYF

SEQ ID NO: 610973 - protein, 12 aa, Homo sapiens
  CDR3 for alpha chain variable domain of TCR clone 305487 (TRAV13-1, TRAJ15)
CAASQAGTALIF

SEQ ID NO: 610974 - protein, 14 aa, Homo sapiens
  CDR3 for beta chain variable domain of TCR clone 305487 (TRBV19, TRBJ2-1)
CASPTFVLSGEQFY

SEQ ID NO: 610975 - protein, 14 aa, Homo sapiens
  CDR3 for alpha chain variable domain of TCR clone 305488 (TRAV34, TRAJ22)
GGADTSGSARQLTF

SEQ ID NO: 610976 - protein, 17 aa, Homo sapiens
  CDR3 for beta chain variable domain of TCR clone 305488 (TRBV20-1, TRBJ2-3)
CSARDGWNAKEGDTQYF

SEQ ID NO: 610977 - protein, 12 aa, Homo sapiens
  CDR3 for alpha chain variable domain of TCR clone 305489 (TRAV2, TRAJ31)
CAVEDNNARLMF

SEQ ID NO: 610978 - protein, 17 aa, Homo sapiens
  CDR3 for beta chain variable domain of TCR clone 305489 (TRBV4-1, TRBJ2-1)
CASSHRDSGSSYNEQFF

SEQ ID NO: 610979 - protein, 15 aa, Homo sapiens
  CDR3 for alpha chain variable domain of TCR clone 305490 (TRAV13-2, TRAJ50)
CVEEPLKTSYDKVIF

SEQ ID NO: 610980 - protein, 15 aa, Homo sapiens
  CDR3 for beta chain variable domain of TCR clone 305490 (TRBV20-1, TRBJ1-5)
CSARGSVDSNQPQHF

SEQ ID NO: 610981 - protein, 15 aa, Homo sapiens
  CDR3 for alpha chain variable domain of TCR clone 305491 (TRAV35, TRAJ40)
CAGQLGTSGTYKHIF

SEQ ID NO: 610982 - protein, 14 aa, Homo sapiens
  CDR3 for beta chain variable domain of TCR clone 305491 (TRBV7-3, TRBJ2-1)
CASSLAGGTNEQFF

SEQ ID NO: 610983 - protein, 16 aa, Homo sapiens
  CDR3 for alpha chain variable domain of TCR clone 305492 (TRAV3, TRAJ10)
CAVRDMRAGGGNKLTF

SEQ ID NO: 610984 - protein, 16 aa, Homo sapiens
  CDR3 for beta chain variable domain of TCR clone 305492 (TRBV27, TRBJ2-2)
CASSFRGLVRTGELFF

SEQ ID NO: 610985 - protein, 15 aa, Homo sapiens
  CDR3 for alpha chain variable domain of TCR clone 305493 (TRAV3, TRAJ22)
CAVRDRGGSARQLTF

SEQ ID NO: 610986 - protein, 15 aa, Homo sapiens
  CDR3 for beta chain variable domain of TCR clone 305493 (TRBV6-3, TRBJ2-2)
CASSFLATLTGELFF

SEQ ID NO: 610987 - protein, 15 aa, Homo sapiens
  CDR3 for alpha chain variable domain of TCR clone 305494 (TRAV8-3, TRAJ45)
CASSYSGGGADGLTF

SEQ ID NO: 610988 - protein, 13 aa, Homo sapiens
  CDR3 for beta chain variable domain of TCR clone 305494 (TRBV20-1, TRBJ2-7)
CSATHTSGYEQYF

SEQ ID NO: 610989 - protein, 10 aa, Homo sapiens
  CDR3 for alpha chain variable domain of TCR clone 305495 (TRAV9-2, TRAJ49)
CALTGTQFYF

SEQ ID NO: 610990 - protein, 16 aa, Homo sapiens
  CDR3 for beta chain variable domain of TCR clone 305495 (TRBV19, TRBJ2-3)
CASSPGAASRTDTQYF

SEQ ID NO: 610991 - protein, 16 aa, Homo sapiens
  CDR3 for alpha chain variable domain of TCR clone 305496 (TRAV12-2, TRAJ28)
WAVITDSGAGSYQLTF

SEQ ID NO: 610992 - protein, 12 aa, Homo sapiens
  CDR3 for beta chain variable domain of TCR clone 305496 (TRBV9, TRBJ2-2)
CASSLVTGELFF

SEQ ID NO: 610993 - protein, 15 aa, Homo sapiens
  CDR3 for alpha chain variable domain of TCR clone 305497 (TRAV34, TRAJ38)
CGADLTPGNNRKLIG

SEQ ID NO: 610994 - protein, 16 aa, Homo sapiens
  CDR3 for beta chain variable domain of TCR clone 305497 (TRBV12-5, TRBJ2-5)
CASGPRTSGNQETQYF

SEQ ID NO: 610995 - protein, 14 aa, Homo sapiens
  CDR3 for alpha chain variable domain of TCR clone 305498 (TRAV29/DV5, TRAJ32)
CAAAYGGAPNKLIF

SEQ ID NO: 610996 - protein, 14 aa, Homo sapiens
  CDR3 for beta chain variable domain of TCR clone 305498 (TRBV20-1, TRBJ1-1)
CSAQTRIGGTEAFF

SEQ ID NO: 610997 - protein, 14 aa, Homo sapiens
  CDR3 for alpha chain variable domain of TCR clone 305499 (TRAV13-2, TRAJ17)
CAENSKAAGNKPTF

SEQ ID NO: 610998 - protein, 13 aa, Homo sapiens
  CDR3 for beta chain variable domain of TCR clone 305499 (TRBV19, TRBJ1-2)
CASSQGQVYGYTF

SEQ ID NO: 610999 - protein, 14 aa, Homo sapiens
  CDR3 for alpha chain variable domain of TCR clone 305500 (TRAV8-4, TRAJ8)
CAESVNTGFQKLVF

SEQ ID NO: 611000 - protein, 15 aa, Homo sapiens
  CDR3 for beta chain variable domain of TCR clone 305500 (TRBV20-1, TRBJ2-3)
CSARRTGLSTDTQYF

SEQ ID NO: 611001 - protein, 12 aa, Homo sapiens
  CDR3 for alpha chain variable domain of TCR clone 305501 (TRAV12-3, TRAJ17)
CAMTLTGNELTY

SEQ ID NO: 611002 - protein, 18 aa, Homo sapiens
  CDR3 for beta chain variable domain of TCR clone 305501 (TRBV4-3, TRBJ1-6)
CASSQETPASSYNSPLHF

SEQ ID NO: 611003 - protein, 14 aa, Homo sapiens
  CDR3 for alpha chain variable domain of TCR clone 305502 (TRAV13-1, TRAJ35)
CAASKGGFGNVLHC

SEQ ID NO: 611004 - protein, 12 aa, Homo sapiens
  CDR3 for beta chain variable domain of TCR clone 305502 (TRBV29-1, TRBJ1-2)
CSVEGSNYGYTF

SEQ ID NO: 611005 - protein, 15 aa, Homo sapiens
  CDR3 for alpha chain variable domain of TCR clone 305503 (TRAV3, TRAJ4)
CAQNMFSGGYNKLIF

SEQ ID NO: 611006 - protein, 16 aa, Homo sapiens
  CDR3 for beta chain variable domain of TCR clone 305503 (TRBV3-1, TRBJ1-6)
CASSKEFQGSYSPLLF

SEQ ID NO: 611007 - protein, 14 aa, Homo sapiens
  CDR3 for alpha chain variable domain of TCR clone 305504 (TRAV35, TRAJ50)
CAGHRKTSYDKVIF

SEQ ID NO: 611008 - protein, 13 aa, Homo sapiens
  CDR3 for beta chain variable domain of TCR clone 305504 (TRBV7-7, TRBJ2-3)
CASRLSRADTQYF

SEQ ID NO: 611009 - protein, 12 aa, Homo sapiens
  CDR3 for alpha chain variable domain of TCR clone 305505 (TRAV12-2, TRAJ52)
IGGGTSYGKLTF

SEQ ID NO: 611010 - protein, 14 aa, Homo sapiens
  CDR3 for beta chain variable domain of TCR clone 305505 (TRBV19, TRBJ2-7)
CASSIFAGTYEQYF

SEQ ID NO: 611011 - protein, 14 aa, Homo sapiens
  CDR3 for alpha chain variable domain of TCR clone 305506 (TRAV38-1, TRAJ40)
CALRPTSGTYKYNV

SEQ ID NO: 611012 - protein, 14 aa, Homo sapiens
  CDR3 for beta chain variable domain of TCR clone 305506 (TRBV25-1, TRBJ1-1)
CASTHLGGNTEAFF

SEQ ID NO: 611013 - protein, 15 aa, Homo sapiens
  CDR3 for alpha chain variable domain of TCR clone 305507 (TRAV27, TRAJ38)
CAARRNAGNNRKLTW

SEQ ID NO: 611014 - protein, 13 aa, Homo sapiens
  CDR3 for beta chain variable domain of TCR clone 305507 (TRBV7-3, TRBJ2-1)
CASSLDGYNEQFF

SEQ ID NO: 611015 - protein, 14 aa, Homo sapiens
  CDR3 for alpha chain variable domain of TCR clone 305508 (TRAV4, TRAJ9)
CLVGSGTGGFKTIF

SEQ ID NO: 611016 - protein, 18 aa, Homo sapiens
  CDR3 for beta chain variable domain of TCR clone 305508 (TRBV10-3, TRBJ2-1)
CTSVPSVSLRGGVDEQFF

SEQ ID NO: 611017 - protein, 12 aa, Homo sapiens
  CDR3 for alpha chain variable domain of TCR clone 305509 (TRAV26-1, TRAJ17)
CIVRSAGNKPTF

SEQ ID NO: 611018 - protein, 15 aa, Homo sapiens
  CDR3 for beta chain variable domain of TCR clone 305509 (TRBV7-6, TRBJ1-2)
CASSSGGRGGYGYTF

SEQ ID NO: 611019 - protein, 18 aa, Homo sapiens
  CDR3 for alpha chain variable domain of TCR clone 305510 (TRAV21, TRAJ52)
CAVKPSPAGGTSYGKLTF

SEQ ID NO: 611020 - protein, 16 aa, Homo sapiens
  CDR3 for beta chain variable domain of TCR clone 305510 (TRBV19, TRBJ2-2)
CASRSPGTGATGELFF

SEQ ID NO: 611021 - protein, 12 aa, Homo sapiens
  CDR3 for alpha chain variable domain of TCR clone 305511 (TRAV21, TRAJ39)
CAADNAGNMLTF

SEQ ID NO: 611022 - protein, 14 aa, Homo sapiens
  CDR3 for beta chain variable domain of TCR clone 305511 (TRBV20-1, TRBJ2-7)
CSAKRGRSSYEQYF

SEQ ID NO: 611023 - protein, 13 aa, Homo sapiens
  CDR3 for alpha chain variable domain of TCR clone 305512 (TRAV25, TRAJ48)
CAGPKGGNEKLTF

SEQ ID NO: 611024 - protein, 12 aa, Homo sapiens
  CDR3 for beta chain variable domain of TCR clone 305512 (TRBV11-2, TRBJ2-1)
CASSPGNNEQFF

SEQ ID NO: 611025 - protein, 15 aa, Homo sapiens
  CDR3 for alpha chain variable domain of TCR clone 305513 (TRAV8-3, TRAJ45)
CASSYSGVGADGLTF

SEQ ID NO: 611026 - protein, 18 aa, Homo sapiens
  CDR3 for beta chain variable domain of TCR clone 305513 (TRBV18, TRBJ1-3)
CASSPRGGAGPSGNTIYF

SEQ ID NO: 611027 - protein, 14 aa, Homo sapiens
  CDR3 for alpha chain variable domain of TCR clone 305514 (TRAV3, TRAJ7)
CAVREEEREQQTRF

SEQ ID NO: 611028 - protein, 10 aa, Homo sapiens
  CDR3 for beta chain variable domain of TCR clone 305514 (TRBV6-3, TRBJ2-2)
CASRDGELFF

SEQ ID NO: 611029 - protein, 14 aa, Homo sapiens
  CDR3 for alpha chain variable domain of TCR clone 305515 (TRAV1-2, TRAJ16)
CAVNRFSDGQKLLF

SEQ ID NO: 611030 - protein, 14 aa, Homo sapiens
  CDR3 for beta chain variable domain of TCR clone 305515 (TRBV18, TRBJ2-5)
CASSPPGHQETQYF

SEQ ID NO: 611031 - protein, 18 aa, Homo sapiens
  CDR3 for alpha chain variable domain of TCR clone 305516 (TRAV26-1, TRAJ44)
CIVRVAGGGISTASKLPF

SEQ ID NO: 611032 - protein, 14 aa, Homo sapiens
  CDR3 for beta chain variable domain of TCR clone 305516 (TRBV18, TRBJ2-5)
CASSPGVSQETQYF

SEQ ID NO: 611033 - protein, 18 aa, Homo sapiens
  CDR3 for alpha chain variable domain of TCR clone 305517 (TRAV21, TRAJ52)
CAVRPSPAGGTSYGKLTF

SEQ ID NO: 611034 - protein, 15 aa, Homo sapiens
  CDR3 for beta chain variable domain of TCR clone 305517 (TRBV4-3, TRBJ1-1)
CASSQDSLGNTEAFF

SEQ ID NO: 611035 - protein, 12 aa, Homo sapiens
  CDR3 for alpha chain variable domain of TCR clone 305518 (TRAV1-1, TRAJ8)
CAVGTGFQQLVF

SEQ ID NO: 611036 - protein, 15 aa, Homo sapiens
  CDR3 for beta chain variable domain of TCR clone 305518 (TRBV7-9, TRBJ1-4)
CASSRTGGFNEKLFF

SEQ ID NO: 611037 - protein, 14 aa, Homo sapiens
  CDR3 for alpha chain variable domain of TCR clone 305519 (TRAV21, TRAJ58)
CAVRRGRSGSRLTF

SEQ ID NO: 611038 - protein, 13 aa, Homo sapiens
  CDR3 for beta chain variable domain of TCR clone 305519 (TRBV7-9, TRBJ1-2)
CASSLRQNYGYTF

SEQ ID NO: 611039 - protein, 14 aa, Homo sapiens
  CDR3 for alpha chain variable domain of TCR clone 305520 (TRAV1-2, TRAJ16)
CAVNQFSDGQKLLF

SEQ ID NO: 611040 - protein, 13 aa, Homo sapiens
  CDR3 for beta chain variable domain of TCR clone 305520 (TRBV10-3, TRBJ2-7)
CASKLAVNYEQYF

SEQ ID NO: 611041 - protein, 14 aa, Homo sapiens
  CDR3 for alpha chain variable domain of TCR clone 305521 (TRAV35, TRAJ44)
CAGRNTGTASKLTF

SEQ ID NO: 611042 - protein, 12 aa, Homo sapiens
  CDR3 for beta chain variable domain of TCR clone 305521 (TRBV11-2, TRBJ2-2)
CASSLGGGELFF

SEQ ID NO: 611043 - protein, 12 aa, Homo sapiens
  CDR3 for alpha chain variable domain of TCR clone 305522 (TRAV12-3, TRAJ17)
CAMTLTGNMLTF

SEQ ID NO: 611044 - protein, 11 aa, Homo sapiens
  CDR3 for beta chain variable domain of TCR clone 305522 (TRBV29-1, TRBJ2-5)
CSEDRTGTQYF

SEQ ID NO: 611045 - protein, 14 aa, Homo sapiens
  CDR3 for alpha chain variable domain of TCR clone 305523 (TRAV1-2, TRAJ16)
CSVNRFSDGQKLLF

SEQ ID NO: 611046 - protein, 15 aa, Homo sapiens
  CDR3 for beta chain variable domain of TCR clone 305523 (TRBV10-2, TRBJ2-6)
CASSEQGTGANVLTF

SEQ ID NO: 611047 - protein, 15 aa, Homo sapiens
  CDR3 for alpha chain variable domain of TCR clone 305524 (TRAV27, TRAJ38)
CAARRNAGNNRKLIW

SEQ ID NO: 611048 - protein, 17 aa, Homo sapiens
  CDR3 for beta chain variable domain of TCR clone 305524 (TRBV5-8, TRBJ1-5)
CANSSRLQLYSNQPQHF

SEQ ID NO: 611049 - protein, 12 aa, Homo sapiens
  CDR3 for alpha chain variable domain of TCR clone 305525 (TRAV21, TRAJ37)
CAVRGNTGKLIF

SEQ ID NO: 611050 - protein, 13 aa, Homo sapiens
  CDR3 for beta chain variable domain of TCR clone 305525 (TRBV12-4, TRBJ2-5)
CASSLGESRTQYF

SEQ ID NO: 611051 - protein, 13 aa, Homo sapiens
  CDR3 for alpha chain variable domain of TCR clone 305526 (TRAV8-6, TRAJ49)
CAVITNTGNQFYF

SEQ ID NO: 611052 - protein, 14 aa, Homo sapiens
  CDR3 for beta chain variable domain of TCR clone 305526 (TRBV5-1, TRBJ2-7)
CASSRGESLYEQYY

SEQ ID NO: 611053 - protein, 13 aa, Homo sapiens
  CDR3 for alpha chain variable domain of TCR clone 305527 (TRAV2, TRAJ29)
CAAGKSGNTPLVF

SEQ ID NO: 611054 - protein, 16 aa, Homo sapiens
  CDR3 for beta chain variable domain of TCR clone 305527 (TRBV7-9, TRBJ1-2)
CASSPGGGAINYGYTF

SEQ ID NO: 611055 - protein, 14 aa, Homo sapiens
  CDR3 for alpha chain variable domain of TCR clone 305528 (TRAV12-2, TRAJ15)
CAPHTGQAGTALIF

SEQ ID NO: 611056 - protein, 15 aa, Homo sapiens
  CDR3 for beta chain variable domain of TCR clone 305528 (TRBV5-1, TRBJ1-4)
FAPAAWKDGNEKLFF

SEQ ID NO: 611057 - protein, 14 aa, Homo sapiens
  CDR3 for alpha chain variable domain of TCR clone 305529 (TRAV24, TRAJ39)
CAFPSSQCRQHAHL

SEQ ID NO: 611058 - protein, 16 aa, Homo sapiens
  CDR3 for beta chain variable domain of TCR clone 305529 (TRBV2, TRBJ2-7)
CASSEPWTGPSYEQYF

SEQ ID NO: 611059 - protein, 13 aa, Homo sapiens
  CDR3 for alpha chain variable domain of TCR clone 305530 (TRAV30, TRAJ6)
CGFIEGGSYIPTF

SEQ ID NO: 611060 - protein, 15 aa, Homo sapiens
  CDR3 for beta chain variable domain of TCR clone 305530 (TRBV7-3, TRBJ2-1)
CASSFGQSNYNEQFF

SEQ ID NO: 611061 - protein, 12 aa, Homo sapiens
  CDR3 for alpha chain variable domain of TCR clone 305531 (TRAV8-3, TRAJ26)
CAGDNYGQNFVF

SEQ ID NO: 611062 - protein, 17 aa, Homo sapiens
  CDR3 for beta chain variable domain of TCR clone 305531 (TRBV7-8, TRBJ2-6)
CASSAGTGGAGANVLTC

SEQ ID NO: 611063 - protein, 13 aa, Homo sapiens
  CDR3 for alpha chain variable domain of TCR clone 305532 (TRAV8-3, TRAJ36)
CSVGATGANNLFF

SEQ ID NO: 611064 - protein, 14 aa, Homo sapiens
  CDR3 for beta chain variable domain of TCR clone 305532 (TRBV7-2, TRBJ2-7)
CARRSQGASYEQYF

SEQ ID NO: 611065 - protein, 14 aa, Homo sapiens
  CDR3 for alpha chain variable domain of TCR clone 305533 (TRAV12-2, TRAJ17)
CAVLFKAAGNKQTF

SEQ ID NO: 611066 - protein, 11 aa, Homo sapiens
  CDR3 for beta chain variable domain of TCR clone 305533 (TRBV29-1, TRBJ2-5)
CSEDRTGTQYF

SEQ ID NO: 611067 - protein, 14 aa, Homo sapiens
  CDR3 for alpha chain variable domain of TCR clone 305534 (TRAV26-1, TRAJ40)
SIVRVARGTYKYIL

SEQ ID NO: 611068 - protein, 14 aa, Homo sapiens
  CDR3 for beta chain variable domain of TCR clone 305534 (TRBV7-3, TRBJ2-7)
CASSLKADSYEQYF

SEQ ID NO: 611069 - protein, 16 aa, Homo sapiens
  CDR3 for alpha chain variable domain of TCR clone 305535 (TRAV3, TRAJ27)
CALRDPQGTNAGKSTF

SEQ ID NO: 611070 - protein, 17 aa, Homo sapiens
  CDR3 for beta chain variable domain of TCR clone 305535 (TRBV4-1, TRBJ2-7)
CASSQGRGLQTSYEQYF

SEQ ID NO: 611071 - protein, 17 aa, Homo sapiens
  CDR3 for alpha chain variable domain of TCR clone 305536 (TRAV14/DV4, TRAJ4)
CAMREASGRGGYTKLIF

SEQ ID NO: 611072 - protein, 14 aa, Homo sapiens
  CDR3 for beta chain variable domain of TCR clone 305536 (TRBV19, TRBJ2-7)
CASSMGQGAIEQYF

SEQ ID NO: 611073 - protein, 14 aa, Homo sapiens
  CDR3 for alpha chain variable domain of TCR clone 305537 (TRAV4, TRAJ32)
CLVNYGGATNKLIF

SEQ ID NO: 611074 - protein, 14 aa, Homo sapiens
  CDR3 for beta chain variable domain of TCR clone 305537 (TRBV15, TRBJ2-5)
CATSWGTRTETQYF

SEQ ID NO: 611075 - protein, 14 aa, Homo sapiens
  CDR3 for alpha chain variable domain of TCR clone 305538 (TRAV12-2, TRAJ40)
CAVKIPSGTYKYIV

SEQ ID NO: 611076 - protein, 15 aa, Homo sapiens
  CDR3 for beta chain variable domain of TCR clone 305538 (TRBV20-1, TRBJ1-4)
CSARREWGVNEKLFF

SEQ ID NO: 611077 - protein, 13 aa, Homo sapiens
  CDR3 for alpha chain variable domain of TCR clone 305539 (TRAV8-3, TRAJ28)
CAVGAVGSYQLTF

SEQ ID NO: 611078 - protein, 16 aa, Homo sapiens
  CDR3 for beta chain variable domain of TCR clone 305539 (TRBV19, TRBJ2-1)
CASSKAGASSYNEQFF

SEQ ID NO: 611079 - protein, 14 aa, Homo sapiens
  CDR3 for alpha chain variable domain of TCR clone 305540 (TRAV12-2, TRAJ13)
CAVKKTGGYQKVTF

SEQ ID NO: 611080 - protein, 13 aa, Homo sapiens
  CDR3 for beta chain variable domain of TCR clone 305540 (TRBV28, TRBJ1-2)
CASRPGTPYGYTF

SEQ ID NO: 611081 - protein, 16 aa, Homo sapiens
  CDR3 for alpha chain variable domain of TCR clone 305541 (TRAV17, TRAJ35)
CSTAEGGIGFGNVLHC

SEQ ID NO: 611082 - protein, 16 aa, Homo sapiens
  CDR3 for beta chain variable domain of TCR clone 305541 (TRBV6-5, TRBJ2-7)
CASSSDPTSGFYEQYF

SEQ ID NO: 611083 - protein, 11 aa, Homo sapiens
  CDR3 for alpha chain variable domain of TCR clone 305542 (TRAV2, TRAJ13)
CASRGYQKVTF

SEQ ID NO: 611084 - protein, 16 aa, Homo sapiens
  CDR3 for beta chain variable domain of TCR clone 305542 (TRBV7-3, TRBJ2-2)
CASSLKRGTLSGELFF

SEQ ID NO: 611085 - protein, 13 aa, Homo sapiens
  CDR3 for alpha chain variable domain of TCR clone 305543 (TRAV20, TRAJ37)
CAGCSSNTGKLIF

SEQ ID NO: 611086 - protein, 13 aa, Homo sapiens
  CDR3 for beta chain variable domain of TCR clone 305543 (TRBV4-1, TRBJ2-2)
CASSQENTGELFF

SEQ ID NO: 611087 - protein, 12 aa, Homo sapiens
  CDR3 for alpha chain variable domain of TCR clone 305544 (TRAV3, TRAJ20)
CAVRDPDYKLSF

SEQ ID NO: 611088 - protein, 13 aa, Homo sapiens
  CDR3 for beta chain variable domain of TCR clone 305544 (TRBV7-2, TRBJ2-2)
CASSSVRAGELFF

SEQ ID NO: 611089 - protein, 14 aa, Homo sapiens
  CDR3 for alpha chain variable domain of TCR clone 305545 (TRAV17, TRAJ35)
CATDRPGFGNVLYC

SEQ ID NO: 611090 - protein, 14 aa, Homo sapiens
  CDR3 for beta chain variable domain of TCR clone 305545 (TRBV7-8, TRBJ2-3)
CASSLEAGTDTQYF

SEQ ID NO: 611091 - protein, 14 aa, Homo sapiens
  CDR3 for alpha chain variable domain of TCR clone 305546 (TRAV1-2, TRAJ16)
CAVNRFSDGQKLLF

SEQ ID NO: 611092 - protein, 14 aa, Homo sapiens
  CDR3 for beta chain variable domain of TCR clone 305546 (TRBV12-4, TRBJ1-1)
CASSLDGLSTEAFF

SEQ ID NO: 611093 - protein, 18 aa, Homo sapiens
  CDR3 for alpha chain variable domain of TCR clone 305547 (TRAV26-1, TRAJ37)
CIVRVDMQGSSNTGKLIF

SEQ ID NO: 611094 - protein, 15 aa, Homo sapiens
  CDR3 for beta chain variable domain of TCR clone 305547 (TRBV20-1, TRBJ2-7)
CSARVLASPLYEQYF

SEQ ID NO: 611095 - protein, 16 aa, Homo sapiens
  CDR3 for alpha chain variable domain of TCR clone 305548 (TRAV30, TRAJ24)
CGTEIVDADSWGKFEF

SEQ ID NO: 611096 - protein, 14 aa, Homo sapiens
  CDR3 for beta chain variable domain of TCR clone 305548 (TRBV12-5, TRBJ2-5)
CASGSRTHRETQYF

SEQ ID NO: 611097 - protein, 13 aa, Homo sapiens
  CDR3 for alpha chain variable domain of TCR clone 305549 (TRAV3, TRAJ21)
CSVREPDFNKFYF

SEQ ID NO: 611098 - protein, 15 aa, Homo sapiens
  CDR3 for beta chain variable domain of TCR clone 305549 (TRBV9, TRBJ1-6)
CASSVAGTGDSPLHF

SEQ ID NO: 611099 - protein, 15 aa, Homo sapiens
  CDR3 for alpha chain variable domain of TCR clone 305550 (TRAV35, TRAJ40)
CAGQLGTSGTYRYIS

SEQ ID NO: 611100 - protein, 14 aa, Homo sapiens
  CDR3 for beta chain variable domain of TCR clone 305550 (TRBV7-3, TRBJ2-1)
CASSLAGGTNEQFF

SEQ ID NO: 611101 - protein, 18 aa, Homo sapiens
  CDR3 for alpha chain variable domain of TCR clone 305551 (TRAV1-2, TRAJ8)
CLLPLCCERGHRLSETLF

SEQ ID NO: 611102 - protein, 12 aa, Homo sapiens
  CDR3 for beta chain variable domain of TCR clone 305551 (TRBV11-2, TRBJ2-1)
CASSPGNNEQFF

SEQ ID NO: 611103 - protein, 11 aa, Homo sapiens
  CDR3 for alpha chain variable domain of TCR clone 305552 (TRAV29/DV5, TRAJ47)
CAATYGNKLFF

SEQ ID NO: 611104 - protein, 17 aa, Homo sapiens
  CDR3 for beta chain variable domain of TCR clone 305552 (TRBV7-9, TRBJ2-1)
CASSLVASYPSYNEQFF

SEQ ID NO: 611105 - protein, 14 aa, Homo sapiens
  CDR3 for alpha chain variable domain of TCR clone 305553 (TRAV26-1, TRAJ34)
CIVRVAHNTDKLIF

SEQ ID NO: 611106 - protein, 14 aa, Homo sapiens
  CDR3 for beta chain variable domain of TCR clone 305553 (TRBV20-1, TRBJ2-7)
CSAWTALSSYEQYF

SEQ ID NO: 611107 - protein, 15 aa, Homo sapiens
  CDR3 for alpha chain variable domain of TCR clone 305554 (TRAV12-2, TRAJ43)
CAFDMRFGAGTRLTV

SEQ ID NO: 611108 - protein, 15 aa, Homo sapiens
  CDR3 for beta chain variable domain of TCR clone 305554 (TRBV12-4, TRBJ2-7)
CASSQRTSGNYEQYF

SEQ ID NO: 611109 - protein, 12 aa, Homo sapiens
  CDR3 for alpha chain variable domain of TCR clone 305555 (TRAV8-3, TRAJ26)
CAGDNYGQTFVF

SEQ ID NO: 611110 - protein, 15 aa, Homo sapiens
  CDR3 for beta chain variable domain of TCR clone 305555 (TRBV5-1, TRBJ2-3)
CASSVTSGSTDTQYF

SEQ ID NO: 611111 - protein, 11 aa, Homo sapiens
  CDR3 for alpha chain variable domain of TCR clone 305556 (TRAV1-1, TRAJ16)
CAAGDGQKLLF

SEQ ID NO: 611112 - protein, 15 aa, Homo sapiens
  CDR3 for beta chain variable domain of TCR clone 305556 (TRBV28, TRBJ1-2)
CASIPQGSDVYGYTF

SEQ ID NO: 611113 - protein, 13 aa, Homo sapiens
  CDR3 for alpha chain variable domain of TCR clone 305557 (TRAV12-1, TRAJ15)
CVAQNQAGTALIF

SEQ ID NO: 611114 - protein, 17 aa, Homo sapiens
  CDR3 for beta chain variable domain of TCR clone 305557 (TRBV7-9, TRBJ2-1)
CASSLVASYPSYNEQFF

SEQ ID NO: 611115 - protein, 13 aa, Homo sapiens
  CDR3 for alpha chain variable domain of TCR clone 305558 (TRAV13-1, TRAJ39)
CAASIWAGDMLTF

SEQ ID NO: 611116 - protein, 15 aa, Homo sapiens
  CDR3 for beta chain variable domain of TCR clone 305558 (TRBV7-9, TRBJ1-1)
CAGSLLEQGGTEAFF

SEQ ID NO: 611117 - protein, 14 aa, Homo sapiens
  CDR3 for alpha chain variable domain of TCR clone 305559 (TRAV1-1, TRAJ28)
CAAPSGVGSYQLTF

SEQ ID NO: 611118 - protein, 15 aa, Homo sapiens
  CDR3 for beta chain variable domain of TCR clone 305559 (TRBV7-2, TRBJ1-2)
CASSLVSGGDYGYTF

SEQ ID NO: 611119 - protein, 13 aa, Homo sapiens
  CDR3 for alpha chain variable domain of TCR clone 305560 (TRAV36/DV7, TRAJ7)
CAVERYGNNRLAF

SEQ ID NO: 611120 - protein, 14 aa, Homo sapiens
  CDR3 for beta chain variable domain of TCR clone 305560 (TRBV25-1, TRBJ1-1)
CASTHLGGNTEAFF

SEQ ID NO: 611121 - protein, 13 aa, Homo sapiens
  CDR3 for alpha chain variable domain of TCR clone 305561 (TRAV27, TRAJ28)
CAISGAGSYQLTF

SEQ ID NO: 611122 - protein, 16 aa, Homo sapiens
  CDR3 for beta chain variable domain of TCR clone 305561 (TRBV7-9, TRBJ1-2)
CASSLGFSSGEDGYTF

SEQ ID NO: 611123 - protein, 14 aa, Homo sapiens
  CDR3 for alpha chain variable domain of TCR clone 305562 (TRAV9-2, TRAJ39)
CALYIYNAGNMLTF

SEQ ID NO: 611124 - protein, 12 aa, Homo sapiens
  CDR3 for beta chain variable domain of TCR clone 305562 (TRBV7-6, TRBJ2-7)
CASSLADSEQYF

SEQ ID NO: 611125 - protein, 13 aa, Homo sapiens
  CDR3 for alpha chain variable domain of TCR clone 305563 (TRAV12-1, TRAJ49)
SVVTPFTGNQFYF

SEQ ID NO: 611126 - protein, 13 aa, Homo sapiens
  CDR3 for beta chain variable domain of TCR clone 305563 (TRBV20-1, TRBJ1-1)
CSARGGANTEAFF

SEQ ID NO: 611127 - protein, 17 aa, Homo sapiens
  CDR3 for alpha chain variable domain of TCR clone 305564 (TRAV12-1, TRAJ32)
CVANMQGYGGATNKLIF

SEQ ID NO: 611128 - protein, 13 aa, Homo sapiens
  CDR3 for beta chain variable domain of TCR clone 305564 (TRBV6-6, TRBJ2-1)
CASSLHQGDEQFF

SEQ ID NO: 611129 - protein, 14 aa, Homo sapiens
  CDR3 for alpha chain variable domain of TCR clone 305565 (TRAV3, TRAJ21)
CAVESQVNFNKFYF

SEQ ID NO: 611130 - protein, 18 aa, Homo sapiens
  CDR3 for beta chain variable domain of TCR clone 305565 (TRBV7-9, TRBJ2-1)
CASSLAVSGTSGRNEQFF

SEQ ID NO: 611131 - protein, 17 aa, Homo sapiens
  CDR3 for alpha chain variable domain of TCR clone 305566 (TRAV3, TRAJ28)
CAVREACSGAGSYQLTF

SEQ ID NO: 611132 - protein, 18 aa, Homo sapiens
  CDR3 for beta chain variable domain of TCR clone 305566 (TRBV27, TRBJ2-1)
CASGNRAVGVGSKNEQFF

SEQ ID NO: 611133 - protein, 14 aa, Homo sapiens
  CDR3 for alpha chain variable domain of TCR clone 305567 (TRAV12-3, TRAJ10)
SHLPLTGGGNKLNF

SEQ ID NO: 611134 - protein, 17 aa, Homo sapiens
  CDR3 for beta chain variable domain of TCR clone 305567 (TRBV13, TRBJ2-3)
CASSLSRVAGGRNTQYF

SEQ ID NO: 611135 - protein, 14 aa, Homo sapiens
  CDR3 for alpha chain variable domain of TCR clone 305568 (TRAV1-2, TRAJ16)
CAVNRFSDGQKLLF

SEQ ID NO: 611136 - protein, 14 aa, Homo sapiens
  CDR3 for beta chain variable domain of TCR clone 305568 (TRBV7-8, TRBJ2-3)
CASSFKSSTDTQYF

SEQ ID NO: 611137 - protein, 12 aa, Homo sapiens
  CDR3 for alpha chain variable domain of TCR clone 305569 (TRAV12-3, TRAJ17)
CAMTLTCNKLTF

SEQ ID NO: 611138 - protein, 17 aa, Homo sapiens
  CDR3 for beta chain variable domain of TCR clone 305569 (TRBV7-3, TRBJ2-3)
CASSLMKRMRGADTQYF

SEQ ID NO: 611139 - protein, 15 aa, Homo sapiens
  CDR3 for alpha chain variable domain of TCR clone 305570 (TRAV26-2, TRAJ13)
CILRDLSGGYQKVTF

SEQ ID NO: 611140 - protein, 15 aa, Homo sapiens
  CDR3 for beta chain variable domain of TCR clone 305570 (TRBV13, TRBJ2-1)
CASSLLSGLNNEQFF

SEQ ID NO: 611141 - protein, 14 aa, Homo sapiens
  CDR3 for alpha chain variable domain of TCR clone 305571 (TRAV12-2, TRAJ13)
CAVKKTGGYQKVTF

SEQ ID NO: 611142 - protein, 18 aa, Homo sapiens
  CDR3 for beta chain variable domain of TCR clone 305571 (TRBV28, TRBJ2-6)
CASSLAGRAVSGANVLTF

SEQ ID NO: 611143 - protein, 13 aa, Homo sapiens
  CDR3 for alpha chain variable domain of TCR clone 305572 (TRAV26-1, TRAJ31)
CIVRVDGNDRLMF

SEQ ID NO: 611144 - protein, 17 aa, Homo sapiens
  CDR3 for beta chain variable domain of TCR clone 305572 (TRBV11-2, TRBJ2-1)
CASSLYPPGVEYNEQFF

SEQ ID NO: 611145 - protein, 15 aa, Homo sapiens
  CDR3 for alpha chain variable domain of TCR clone 305573 (TRAV27, TRAJ38)
CAARRNAGNNRKLIW

SEQ ID NO: 611146 - protein, 11 aa, Homo sapiens
  CDR3 for beta chain variable domain of TCR clone 305573 (TRBV19, TRBJ1-2)
CASSISSGYTF

SEQ ID NO: 611147 - protein, 18 aa, Homo sapiens
  CDR3 for alpha chain variable domain of TCR clone 305574 (TRAV29/DV5, TRAJ52)
CAAGFRGAGGTSYGKLTF

SEQ ID NO: 611148 - protein, 16 aa, Homo sapiens
  CDR3 for beta chain variable domain of TCR clone 305574 (TRBV7-3, TRBJ2-2)
SASSLKRGTLSGELFF

SEQ ID NO: 611149 - protein, 14 aa, Homo sapiens
  CDR3 for alpha chain variable domain of TCR clone 305575 (TRAV1-2, TRAJ16)
CAVNRFSNVQKLLF

SEQ ID NO: 611150 - protein, 15 aa, Homo sapiens
  CDR3 for beta chain variable domain of TCR clone 305575 (TRBV9, TRBJ1-6)
CASSVAGTGDSPLHF

SEQ ID NO: 611151 - protein, 13 aa, Homo sapiens
  CDR3 for alpha chain variable domain of TCR clone 305576 (TRAV3, TRAJ21)
CAVREPDFNKFYF

SEQ ID NO: 611152 - protein, 16 aa, Homo sapiens
  CDR3 for beta chain variable domain of TCR clone 305576 (TRBV28, TRBJ2-7)
CASSPCVATGDLSQYF

SEQ ID NO: 611153 - protein, 13 aa, Homo sapiens
  CDR3 for alpha chain variable domain of TCR clone 305577 (TRAV12-2, TRAJ20)
CAVYPSNDYKLSF

SEQ ID NO: 611154 - protein, 15 aa, Homo sapiens
  CDR3 for beta chain variable domain of TCR clone 305577 (TRBV27, TRBJ1-6)
CASSFDRGLGSPLHF

SEQ ID NO: 611155 - protein, 12 aa, Homo sapiens
  CDR3 for alpha chain variable domain of TCR clone 305578 (TRAV12-3, TRAJ17)
CAMTLTGNKLTF

SEQ ID NO: 611156 - protein, 15 aa, Homo sapiens
  CDR3 for beta chain variable domain of TCR clone 305578 (TRBV20-1, TRBJ2-7)
GSARDRVSGMDEHYF

SEQ ID NO: 611157 - protein, 14 aa, Homo sapiens
  CDR3 for alpha chain variable domain of TCR clone 305579 (TRAV12-2, TRAJ11)
CAANRESGYSTLTF

SEQ ID NO: 611158 - protein, 10 aa, Homo sapiens
  CDR3 for beta chain variable domain of TCR clone 305579 (TRBV20-1, TRBJ2-5)
CSARFETQYF

SEQ ID NO: 611159 - protein, 15 aa, Homo sapiens
  CDR3 for alpha chain variable domain of TCR clone 305580 (TRAV8-2, TRAJ16)
CVVSDGFSDVQKLLF

SEQ ID NO: 611160 - protein, 14 aa, Homo sapiens
  CDR3 for beta chain variable domain of TCR clone 305580 (TRBV7-3, TRBJ1-1)
CASSLGAGYTEAFF

SEQ ID NO: 611161 - protein, 14 aa, Homo sapiens
  CDR3 for alpha chain variable domain of TCR clone 305581 (TRAV16, TRAJ26)
CALSSANYGQNFVF

SEQ ID NO: 611162 - protein, 18 aa, Homo sapiens
  CDR3 for beta chain variable domain of TCR clone 305581 (TRBV27, TRBJ2-1)
CASTSGTSGKATYNEQFF

SEQ ID NO: 611163 - protein, 14 aa, Homo sapiens
  CDR3 for alpha chain variable domain of TCR clone 305582 (TRAV12-2, TRAJ13)
CAVKQTGGYQKVTF

SEQ ID NO: 611164 - protein, 14 aa, Homo sapiens
  CDR3 for beta chain variable domain of TCR clone 305582 (TRBV25-1, TRBJ1-1)
CASTHLGGNTEAFF

SEQ ID NO: 611165 - protein, 14 aa, Homo sapiens
  CDR3 for alpha chain variable domain of TCR clone 305583 (TRAV12-1, TRAJ23)
CVVVIYNQGGKLIF

SEQ ID NO: 611166 - protein, 23 aa, Homo sapiens
  CDR3 for beta chain variable domain of TCR clone 305583 (TRBV7-3, TRBJ1-6)
CASSLTSRDEASDPSSYNSPLHF

SEQ ID NO: 611167 - protein, 14 aa, Homo sapiens
  CDR3 for alpha chain variable domain of TCR clone 305584 (TRAV35, TRAJ33)
CAGSSQDSNYQLIW

SEQ ID NO: 611168 - protein, 17 aa, Homo sapiens
  CDR3 for beta chain variable domain of TCR clone 305584 (TRBV20-1, TRBJ2-7)
CSAESGTRGHTSSTSGR

SEQ ID NO: 611169 - protein, 17 aa, Homo sapiens
  CDR3 for alpha chain variable domain of TCR clone 305585 (TRAV38-1, TRAJ45)
CAFMKHYMGGGADVLTF

SEQ ID NO: 611170 - protein, 15 aa, Homo sapiens
  CDR3 for beta chain variable domain of TCR clone 305585 (TRBV28, TRBJ2-1)
CASSPPGLADHEQFF

SEQ ID NO: 611171 - protein, 15 aa, Homo sapiens
  CDR3 for alpha chain variable domain of TCR clone 305586 (TRAV25, TRAJ52)
CSWRPGGTSYAKLTF

SEQ ID NO: 611172 - protein, 17 aa, Homo sapiens
  CDR3 for beta chain variable domain of TCR clone 305586 (TRBV7-8, TRBJ2-6)
CASSAGTGGAGANVLTF

SEQ ID NO: 611173 - protein, 14 aa, Homo sapiens
  CDR3 for alpha chain variable domain of TCR clone 305587 (TRAV35, TRAJ33)
CAGSSQDSNYRLIW

SEQ ID NO: 611174 - protein, 13 aa, Homo sapiens
  CDR3 for beta chain variable domain of TCR clone 305587 (TRBV7-9, TRBJ1-2)
CASSLKQNYGYTF

SEQ ID NO: 611175 - protein, 19 aa, Homo sapiens
  CDR3 for alpha chain variable domain of TCR clone 305588 (TRAV26-1, TRAJ52)
CIARAHRNAGGTSYGKLTF

SEQ ID NO: 611176 - protein, 15 aa, Homo sapiens
  CDR3 for beta chain variable domain of TCR clone 305588 (TRBV12-4, TRBJ2-5)
CASSPPTGLQETQYF

SEQ ID NO: 611177 - protein, 15 aa, Homo sapiens
  CDR3 for alpha chain variable domain of TCR clone 305589 (TRAV8-3, TRAJ23)
CAVGDRYNQGGKLIF

SEQ ID NO: 611178 - protein, 22 aa, Homo sapiens
  CDR3 for beta chain variable domain of TCR clone 305589 (TRBV29-1, TRBJ2-5)
TVSNMSPGDSSIYLCSAGTQYF

SEQ ID NO: 611179 - protein, 12 aa, Homo sapiens
  CDR3 for alpha chain variable domain of TCR clone 305590 (TRAV27, TRAJ58)
CAGARDTSRLTV

SEQ ID NO: 611180 - protein, 14 aa, Homo sapiens
  CDR3 for beta chain variable domain of TCR clone 305590 (TRBV7-3, TRBJ2-1)
CASSLGTSANEQFF

SEQ ID NO: 611181 - protein, 15 aa, Homo sapiens
  CDR3 for alpha chain variable domain of TCR clone 305591 (TRAV8-3, TRAJ45)
CASSYSGGGADGITF

SEQ ID NO: 611182 - protein, 13 aa, Homo sapiens
  CDR3 for beta chain variable domain of TCR clone 305591 (TRBV10-3, TRBJ2-7)
CASKLAVSYEQYF

SEQ ID NO: 611183 - protein, 10 aa, Homo sapiens
  CDR3 for alpha chain variable domain of TCR clone 305592 (TRAV5, TRAJ34)
CAEDTDKLIF

SEQ ID NO: 611184 - protein, 16 aa, Homo sapiens
  CDR3 for beta chain variable domain of TCR clone 305592 (TRBV20-1, TRBJ1-5)
CSARDVGGGWIQPQHF

SEQ ID NO: 611185 - protein, 16 aa, Homo sapiens
  CDR3 for alpha chain variable domain of TCR clone 305593 (TRAV1-2, TRAJ10)
WAVRGVPTGGGNKLTF

SEQ ID NO: 611186 - protein, 12 aa, Homo sapiens
  CDR3 for beta chain variable domain of TCR clone 305593 (TRBV7-8, TRBJ2-7)
CASSLGDREQYF

SEQ ID NO: 611187 - protein, 14 aa, Homo sapiens
  CDR3 for alpha chain variable domain of TCR clone 305594 (TRAV1-2, TRAJ16)
CAVNRFSDGQKLLF

SEQ ID NO: 611188 - protein, 15 aa, Homo sapiens
  CDR3 for beta chain variable domain of TCR clone 305594 (TRBV5-1, TRBJ2-1)
CASSPPRAPYNDQFF

SEQ ID NO: 611189 - protein, 13 aa, Homo sapiens
  CDR3 for alpha chain variable domain of TCR clone 305595 (TRAV12-1, TRAJ16)
CVVNEPDGQKLRF

SEQ ID NO: 611190 - protein, 13 aa, Homo sapiens
  CDR3 for beta chain variable domain of TCR clone 305595 (TRBV2, TRBJ1-1)
CARNPTGGFHAFF

SEQ ID NO: 611191 - protein, 15 aa, Homo sapiens
  CDR3 for alpha chain variable domain of TCR clone 305596 (TRAV3, TRAJ22)
CAVGDRGGSARQLTF

SEQ ID NO: 611192 - protein, 13 aa, Homo sapiens
  CDR3 for beta chain variable domain of TCR clone 305596 (TRBV7-9, TRBJ2-3)
CASSPGSTDTQYF

SEQ ID NO: 611193 - protein, 17 aa, Homo sapiens
  CDR3 for alpha chain variable domain of TCR clone 305597 (TRAV16, TRAJ58)
CIAVLSNGETSGSRLTF

SEQ ID NO: 611194 - protein, 14 aa, Homo sapiens
  CDR3 for beta chain variable domain of TCR clone 305597 (TRBV7-8, TRBJ2-3)
CASSLEAGTDTQYF

SEQ ID NO: 611195 - protein, 15 aa, Homo sapiens
  CDR3 for alpha chain variable domain of TCR clone 305598 (TRAV14/DV4, TRAJ46)
CAMREKKSSGDKLTF

SEQ ID NO: 611196 - protein, 13 aa, Homo sapiens
  CDR3 for beta chain variable domain of TCR clone 305598 (TRBV20-1, TRBJ2-5)
CGAREAFQETQYF

SEQ ID NO: 611197 - protein, 11 aa, Homo sapiens
  CDR3 for alpha chain variable domain of TCR clone 305599 (TRAV12-3, TRAJ43)
CAMSVSNDMRF

SEQ ID NO: 611198 - protein, 13 aa, Homo sapiens
  CDR3 for beta chain variable domain of TCR clone 305599 (TRBV19, TRBJ1-2)
CASSQGQVYGYTF

SEQ ID NO: 611199 - protein, 14 aa, Homo sapiens
  CDR3 for alpha chain variable domain of TCR clone 305600 (TRAV2, TRAJ9)
CAVEDRSGGFKTIF

SEQ ID NO: 611200 - protein, 15 aa, Homo sapiens
  CDR3 for beta chain variable domain of TCR clone 305600 (TRBV7-8, TRBJ2-1)
CASSLAGGLYNEQFF

SEQ ID NO: 611201 - protein, 13 aa, Homo sapiens
  CDR3 for alpha chain variable domain of TCR clone 305601 (TRAV21, TRAJ57)
CAVTQGGSEKLVF

SEQ ID NO: 611202 - protein, 16 aa, Homo sapiens
  CDR3 for beta chain variable domain of TCR clone 305601 (TRBV2, TRBJ2-3)
CASSTSVEGVTDTQYF

SEQ ID NO: 611203 - protein, 14 aa, Homo sapiens
  CDR3 for alpha chain variable domain of TCR clone 305602 (TRAV12-2, TRAJ17)
CAVLFKAAGNKLNF

SEQ ID NO: 611204 - protein, 15 aa, Homo sapiens
  CDR3 for beta chain variable domain of TCR clone 305602 (TRBV20-1, TRBJ2-7)
CSARDRVSGMDEQYF

SEQ ID NO: 611205 - protein, 14 aa, Homo sapiens
  CDR3 for alpha chain variable domain of TCR clone 305603 (TRAV3, TRAJ16)
CCERLKSDGQKLLF

SEQ ID NO: 611206 - protein, 15 aa, Homo sapiens
  CDR3 for beta chain variable domain of TCR clone 305603 (TRBV28, TRBJ2-7)
CASSPGCRGSYEQYF

SEQ ID NO: 611207 - protein, 18 aa, Homo sapiens
  CDR3 for alpha chain variable domain of TCR clone 305604 (TRAV26-1, TRAJ22)
CIVRVALISSGSARQLTF

SEQ ID NO: 611208 - protein, 14 aa, Homo sapiens
  CDR3 for beta chain variable domain of TCR clone 305604 (TRBV19, TRBJ2-7)
CASSIFAGTYEQYF

SEQ ID NO: 611209 - protein, 11 aa, Homo sapiens
  CDR3 for alpha chain variable domain of TCR clone 305605 (TRAV21, TRAJ48)
CAVDGNEKLTF

SEQ ID NO: 611210 - protein, 17 aa, Homo sapiens
  CDR3 for beta chain variable domain of TCR clone 305605 (TRBV4-1, TRBJ2-3)
CASSQGYVSGGTDTQYF

SEQ ID NO: 611211 - protein, 13 aa, Homo sapiens
  CDR3 for alpha chain variable domain of TCR clone 305606 (TRAV8-1, TRAJ47)
FAVGMEYGNKLVF

SEQ ID NO: 611212 - protein, 13 aa, Homo sapiens
  CDR3 for beta chain variable domain of TCR clone 305606 (TRBV20-1, TRBJ2-2)
CSARVANTGELFF

SEQ ID NO: 611213 - protein, 14 aa, Homo sapiens
  CDR3 for alpha chain variable domain of TCR clone 305607 (TRAV13-1, TRAJ20)
CAARPGSNDYKLSF

SEQ ID NO: 611214 - protein, 15 aa, Homo sapiens
  CDR3 for beta chain variable domain of TCR clone 305607 (TRBV4-1, TRBJ2-7)
CASRQQGQGFDEQYF

SEQ ID NO: 611215 - protein, 14 aa, Homo sapiens
  CDR3 for alpha chain variable domain of TCR clone 305608 (TRAV1-2, TRAJ29)
CAVRELTSATPLVF

SEQ ID NO: 611216 - protein, 15 aa, Homo sapiens
  CDR3 for beta chain variable domain of TCR clone 305608 (TRBV2, TRBJ2-3)
CASSDFEKATDTQYF

SEQ ID NO: 611217 - protein, 13 aa, Homo sapiens
  CDR3 for alpha chain variable domain of TCR clone 305609 (TRAV2, TRAJ29)
CAEHNSGNTPLVF

SEQ ID NO: 611218 - protein, 13 aa, Homo sapiens
  CDR3 for beta chain variable domain of TCR clone 305609 (TRBV28, TRBJ1-2)
CASSPGNRNGYTF

SEQ ID NO: 611219 - protein, 11 aa, Homo sapiens
  CDR3 for alpha chain variable domain of TCR clone 305610 (TRAV26-1, TRAJ37)
CIVRVGRKLIL

SEQ ID NO: 611220 - protein, 14 aa, Homo sapiens
  CDR3 for beta chain variable domain of TCR clone 305610 (TRBV9, TRBJ2-7)
CASSVGVGSYEQYF

SEQ ID NO: 611221 - protein, 14 aa, Homo sapiens
  CDR3 for alpha chain variable domain of TCR clone 305611 (TRAV12-1, TRAJ8)
CVVNSNTGFQKLVF

SEQ ID NO: 611222 - protein, 16 aa, Homo sapiens
  CDR3 for beta chain variable domain of TCR clone 305611 (TRBV20-1, TRBJ2-2)
CSAIDDRVGLTGELFF

SEQ ID NO: 611223 - protein, 15 aa, Homo sapiens
  CDR3 for alpha chain variable domain of TCR clone 305612 (TRAV27, TRAJ38)
CAARRNAGNNRKLIW

SEQ ID NO: 611224 - protein, 18 aa, Homo sapiens
  CDR3 for beta chain variable domain of TCR clone 305612 (TRBV11-2, TRBJ2-6)
CASSLNPFLGTGANVLTF

SEQ ID NO: 611225 - protein, 14 aa, Homo sapiens
  CDR3 for alpha chain variable domain of TCR clone 305613 (TRAV23/DV6, TRAJ37)
CAASTSSNTGELIF

SEQ ID NO: 611226 - protein, 16 aa, Homo sapiens
  CDR3 for beta chain variable domain of TCR clone 305613 (TRBV7-9, TRBJ2-1)
CASSDVAGGSYNEQFF

SEQ ID NO: 611227 - protein, 14 aa, Homo sapiens
  CDR3 for alpha chain variable domain of TCR clone 305614 (TRAV35, TRAJ38)
CAHCGAGNNRKLIW

SEQ ID NO: 611228 - protein, 16 aa, Homo sapiens
  CDR3 for beta chain variable domain of TCR clone 305614 (TRBV20-1, TRBJ2-2)
CSASASGILGAGELFF

SEQ ID NO: 611229 - protein, 16 aa, Homo sapiens
  CDR3 for alpha chain variable domain of TCR clone 305615 (TRAV26-2, TRAJ45)
CTTASPIGEGADGLTF

SEQ ID NO: 611230 - protein, 20 aa, Homo sapiens
  CDR3 for beta chain variable domain of TCR clone 305615 (TRBV28, TRBJ2-1)
CASTPIGRSPGLAGGNEQFF

SEQ ID NO: 611231 - protein, 12 aa, Homo sapiens
  CDR3 for alpha chain variable domain of TCR clone 305616 (TRAV3, TRAJ31)
CAVRDGNARLMF

SEQ ID NO: 611232 - protein, 16 aa, Homo sapiens
  CDR3 for beta chain variable domain of TCR clone 305616 (TRBV7-3, TRBJ2-1)
CASSLEGYRSYNEQFF

SEQ ID NO: 611233 - protein, 12 aa, Homo sapiens
  CDR3 for alpha chain variable domain of TCR clone 305617 (TRAV8-3, TRAJ53)
CAVVGSNYKLTF

SEQ ID NO: 611234 - protein, 15 aa, Homo sapiens
  CDR3 for beta chain variable domain of TCR clone 305617 (TRBV27, TRBJ2-1)
CASSNGGGSSNEQFF

SEQ ID NO: 611235 - protein, 14 aa, Homo sapiens
  CDR3 for alpha chain variable domain of TCR clone 305618 (TRAV8-6, TRAJ57)
CAGRLEGGSEKLVF

SEQ ID NO: 611236 - protein, 16 aa, Homo sapiens
  CDR3 for beta chain variable domain of TCR clone 305618 (TRBV4-3, TRBJ2-1)
CASSPALDRGVNEQFF

SEQ ID NO: 611237 - protein, 18 aa, Homo sapiens
  CDR3 for alpha chain variable domain of TCR clone 305619 (TRAV26-2, TRAJ45)
CTRRVDKYSGGGADGLTF

SEQ ID NO: 611238 - protein, 16 aa, Homo sapiens
  CDR3 for beta chain variable domain of TCR clone 305619 (TRBV2, TRBJ1-4)
CASNLLQGATNEKLFF

SEQ ID NO: 611239 - protein, 13 aa, Homo sapiens
  CDR3 for alpha chain variable domain of TCR clone 305620 (TRAV27, TRAJ6)
CAGGTRGSYIPTF

SEQ ID NO: 611240 - protein, 13 aa, Homo sapiens
  CDR3 for beta chain variable domain of TCR clone 305620 (TRBV25-1, TRBJ1-1)
CQHPPGGNTEAFF

SEQ ID NO: 611241 - protein, 18 aa, Homo sapiens
  CDR3 for alpha chain variable domain of TCR clone 305621 (TRAV3, TRAJ17)
CAVRARRGGRSCRQQANF

SEQ ID NO: 611242 - protein, 15 aa, Homo sapiens
  CDR3 for beta chain variable domain of TCR clone 305621 (TRBV7-9, TRBJ1-6)
CASSSPGRGNSPLHF

SEQ ID NO: 611243 - protein, 14 aa, Homo sapiens
  CDR3 for alpha chain variable domain of TCR clone 305622 (TRAV12-2, TRAJ44)
CAVNPAGTASKLTF

SEQ ID NO: 611244 - protein, 14 aa, Homo sapiens
  CDR3 for beta chain variable domain of TCR clone 305622 (TRBV9, TRBJ2-4)
CASSPSGTSGCQYF

SEQ ID NO: 611245 - protein, 12 aa, Homo sapiens
  CDR3 for alpha chain variable domain of TCR clone 305623 (TRAV12-1, TRAJ20)
CVVNPDDYKLSF

SEQ ID NO: 611246 - protein, 12 aa, Homo sapiens
  CDR3 for beta chain variable domain of TCR clone 305623 (TRBV7-8, TRBJ2-7)
CASSLGDREQYF

SEQ ID NO: 611247 - protein, 19 aa, Homo sapiens
  CDR3 for alpha chain variable domain of TCR clone 305624 (TRAV26-1, TRAJ52)
CIVRAHRTAGGTSYGKLTF

SEQ ID NO: 611248 - protein, 15 aa, Homo sapiens
  CDR3 for beta chain variable domain of TCR clone 305624 (TRBV12-4, TRBJ2-5)
CASSPPTGLQETQYF

SEQ ID NO: 611249 - protein, 11 aa, Homo sapiens
  CDR3 for alpha chain variable domain of TCR clone 305625 (TRAV3, TRAJ21)
CAVGNFNKFYF

SEQ ID NO: 611250 - protein, 13 aa, Homo sapiens
  CDR3 for beta chain variable domain of TCR clone 305625 (TRBV7-9, TRBJ1-2)
CASSLKQNYGEPF

SEQ ID NO: 611251 - protein, 14 aa, Homo sapiens
  CDR3 for alpha chain variable domain of TCR clone 305626 (TRAV12-3, TRAJ10)
SHLPLTGGGNKLIF

SEQ ID NO: 611252 - protein, 11 aa, Homo sapiens
  CDR3 for beta chain variable domain of TCR clone 305626 (TRBV29-1, TRBJ2-5)
CSEDRTGTQYF

SEQ ID NO: 611253 - protein, 18 aa, Homo sapiens
  CDR3 for alpha chain variable domain of TCR clone 305627 (TRAV21, TRAJ52)
CAVRPSPAGGTSYGKLTF

SEQ ID NO: 611254 - protein, 13 aa, Homo sapiens
  CDR3 for beta chain variable domain of TCR clone 305627 (TRBV20-1, TRBJ1-5)
CSASGRGNQPQHF

SEQ ID NO: 611255 - protein, 13 aa, Homo sapiens
  CDR3 for alpha chain variable domain of TCR clone 305628 (TRAV8-4, TRAJ30)
CAVSFNRDDKIIF

SEQ ID NO: 611256 - protein, 13 aa, Homo sapiens
  CDR3 for beta chain variable domain of TCR clone 305628 (TRBV3-1, TRBJ2-2)
CASLARGSGELFF

SEQ ID NO: 611257 - protein, 15 aa, Homo sapiens
  CDR3 for alpha chain variable domain of TCR clone 305629 (TRAV20, TRAJ53)
CAVQASGGSNYKLTF

SEQ ID NO: 611258 - protein, 14 aa, Homo sapiens
  CDR3 for beta chain variable domain of TCR clone 305629 (TRBV20-1, TRBJ2-5)
CSAHRQGLWETQYF

SEQ ID NO: 611259 - protein, 15 aa, Homo sapiens
  CDR3 for alpha chain variable domain of TCR clone 305630 (TRAV3, TRAJ4)
CAQNMFSGGYNKLIF

SEQ ID NO: 611260 - protein, 16 aa, Homo sapiens
  CDR3 for beta chain variable domain of TCR clone 305630 (TRBV7-9, TRBJ2-3)
CASSPWREVGTDTQYF

SEQ ID NO: 611261 - protein, 11 aa, Homo sapiens
  CDR3 for alpha chain variable domain of TCR clone 305631 (TRAV4, TRAJ20)
CLVGDKVTTTS

SEQ ID NO: 611262 - protein, 15 aa, Homo sapiens
  CDR3 for beta chain variable domain of TCR clone 305631 (TRBV18, TRBJ2-7)
SASSPSSTGNYEQYF

SEQ ID NO: 611263 - protein, 14 aa, Homo sapiens
  CDR3 for alpha chain variable domain of TCR clone 305632 (TRAV12-1, TRAJ17)
CVVKYKAAGNKLTF

SEQ ID NO: 611264 - protein, 13 aa, Homo sapiens
  CDR3 for beta chain variable domain of TCR clone 305632 (TRBV20-1, TRBJ1-1)
CSARGGGNTEAFF

SEQ ID NO: 611265 - protein, 14 aa, Homo sapiens
  CDR3 for alpha chain variable domain of TCR clone 305633 (TRAV2, TRAJ9)
CAVEDRSGGFKTIF

SEQ ID NO: 611266 - protein, 15 aa, Homo sapiens
  CDR3 for beta chain variable domain of TCR clone 305633 (TRBV28, TRBJ1-5)
CASSRTGGYVQPQHF

SEQ ID NO: 611267 - protein, 16 aa, Homo sapiens
  CDR3 for alpha chain variable domain of TCR clone 305634 (TRAV26-1, TRAJ53)
CIVRVAMGGSNYKLTF

SEQ ID NO: 611268 - protein, 16 aa, Homo sapiens
  CDR3 for beta chain variable domain of TCR clone 305634 (TRBV24-1, TRBJ2-3)
CATSDPGTGATDTQYF

SEQ ID NO: 611269 - protein, 23 aa, Homo sapiens
  CDR3 for alpha chain variable domain of TCR clone 305635 (TRAV26-1, TRAJ38)
CIADNAGNNHIQNPDPAVYQLRV

SEQ ID NO: 611270 - protein, 12 aa, Homo sapiens
  CDR3 for beta chain variable domain of TCR clone 305635 (TRBV11-2, TRBJ2-2)
CASSPGGGELFF

SEQ ID NO: 611271 - protein, 14 aa, Homo sapiens
  CDR3 for alpha chain variable domain of TCR clone 305636 (TRAV12-2, TRAJ13)
CAVKKTGGYQKVTF

SEQ ID NO: 611272 - protein, 16 aa, Homo sapiens
  CDR3 for beta chain variable domain of TCR clone 305636 (TRBV12-5, TRBJ2-7)
CASGSQGAPTSSTSGL

SEQ ID NO: 611273 - protein, 18 aa, Homo sapiens
  CDR3 for alpha chain variable domain of TCR clone 305637 (TRAV3, TRAJ4)
CAVRDITRFSGGYNKLIF

SEQ ID NO: 611274 - protein, 13 aa, Homo sapiens
  CDR3 for beta chain variable domain of TCR clone 305637 (TRBV7-9, TRBJ2-3)
CASSPGSTDTQYF

SEQ ID NO: 611275 - protein, 11 aa, Homo sapiens
  CDR3 for alpha chain variable domain of TCR clone 305638 (TRAV21, TRAJ33)
CAVLGNYQLIW

SEQ ID NO: 611276 - protein, 15 aa, Homo sapiens
  CDR3 for beta chain variable domain of TCR clone 305638 (TRBV11-2, TRBJ2-7)
CASSSMVGGSYEQYF

SEQ ID NO: 611277 - protein, 12 aa, Homo sapiens
  CDR3 for alpha chain variable domain of TCR clone 305639 (TRAV12-2, TRAJ8)
CAVNTGFQKLVF

SEQ ID NO: 611278 - protein, 15 aa, Homo sapiens
  CDR3 for beta chain variable domain of TCR clone 305639 (TRBV7-8, TRBJ1-5)
CASSLESRGLEPQHF

SEQ ID NO: 611279 - protein, 11 aa, Homo sapiens
  CDR3 for alpha chain variable domain of TCR clone 305640 (TRAV3, TRAJ21)
CAVGNFNKFYF

SEQ ID NO: 611280 - protein, 15 aa, Homo sapiens
  CDR3 for beta chain variable domain of TCR clone 305640 (TRBV11-3, TRBJ2-3)
CASSFRAAFPDTQYF

SEQ ID NO: 611281 - protein, 14 aa, Homo sapiens
  CDR3 for alpha chain variable domain of TCR clone 305641 (TRAV26-1, TRAJ34)
CIVRVAYNTDKLIF

SEQ ID NO: 611282 - protein, 12 aa, Homo sapiens
  CDR3 for beta chain variable domain of TCR clone 305641 (TRBV7-9, TRBJ2-7)
CASSLEGYEQYF

SEQ ID NO: 611283 - protein, 14 aa, Homo sapiens
  CDR3 for alpha chain variable domain of TCR clone 305642 (TRAV2, TRAJ16)
CAVERGSDGQGLLF

SEQ ID NO: 611284 - protein, 12 aa, Homo sapiens
  CDR3 for beta chain variable domain of TCR clone 305642 (TRBV6-5, TRBJ2-7)
CASYIYGYEQYF

SEQ ID NO: 611285 - protein, 14 aa, Homo sapiens
  CDR3 for alpha chain variable domain of TCR clone 305643 (TRAV12-2, TRAJ45)
CAVYSGGGADGLTF

SEQ ID NO: 611286 - protein, 14 aa, Homo sapiens
  CDR3 for beta chain variable domain of TCR clone 305643 (TRBV6-5, TRBJ1-2)
CASTRGGGSYGYTF

SEQ ID NO: 611287 - protein, 15 aa, Homo sapiens
  CDR3 for alpha chain variable domain of TCR clone 305644 (TRAV26-1, TRAJ39)
FIVRDGSNAGNMLTF

SEQ ID NO: 611288 - protein, 16 aa, Homo sapiens
  CDR3 for beta chain variable domain of TCR clone 305644 (TRBV7-2, TRBJ1-3)
CASSRLEASSGNTIYF

SEQ ID NO: 611289 - protein, 13 aa, Homo sapiens
  CDR3 for alpha chain variable domain of TCR clone 305645 (TRAV26-2, TRAJ43)
CFLRAVNNNDMRF

SEQ ID NO: 611290 - protein, 11 aa, Homo sapiens
  CDR3 for beta chain variable domain of TCR clone 305645 (TRBV29-1, TRBJ2-5)
CSEDRTGTQYF

SEQ ID NO: 611291 - protein, 15 aa, Homo sapiens
  CDR3 for alpha chain variable domain of TCR clone 305646 (TRAV8-2, TRAJ15)
CVVTMGNQAGTALIF

SEQ ID NO: 611292 - protein, 17 aa, Homo sapiens
  CDR3 for beta chain variable domain of TCR clone 305646 (TRBV28, TRBJ2-5)
CASSTPEGDALQETQYF

SEQ ID NO: 611293 - protein, 12 aa, Homo sapiens
  CDR3 for alpha chain variable domain of TCR clone 305647 (TRAV12-3, TRAJ31)
CAMSGPNARLMF

SEQ ID NO: 611294 - protein, 12 aa, Homo sapiens
  CDR3 for beta chain variable domain of TCR clone 305647 (TRBV11-2, TRBJ2-1)
CASSVQREGQFF

SEQ ID NO: 611295 - protein, 18 aa, Homo sapiens
  CDR3 for alpha chain variable domain of TCR clone 305648 (TRAV16, TRAJ52)
CALSGVDAGGISYGKLTF

SEQ ID NO: 611296 - protein, 15 aa, Homo sapiens
  CDR3 for beta chain variable domain of TCR clone 305648 (TRBV11-3, TRBJ2-3)
CASSAGTVVTNTQYF

SEQ ID NO: 611297 - protein, 13 aa, Homo sapiens
  CDR3 for alpha chain variable domain of TCR clone 305649 (TRAV27, TRAJ45)
CRSSGGGPDGLTF

SEQ ID NO: 611298 - protein, 14 aa, Homo sapiens
  CDR3 for beta chain variable domain of TCR clone 305649 (TRBV7-9, TRBJ2-1)
CASSSMVGFGEQFF

SEQ ID NO: 611299 - protein, 12 aa, Homo sapiens
  CDR3 for alpha chain variable domain of TCR clone 305650 (TRAV12-2, TRAJ47)
CAVAEYGNKLVF

SEQ ID NO: 611300 - protein, 14 aa, Homo sapiens
  CDR3 for beta chain variable domain of TCR clone 305650 (TRBV20-1, TRBJ1-1)
CSAMGGTANTEAFS

SEQ ID NO: 611301 - protein, 15 aa, Homo sapiens
  CDR3 for alpha chain variable domain of TCR clone 305651 (TRAV17, TRAJ13)
CAMDAGSGGYQKVTF

SEQ ID NO: 611302 - protein, 17 aa, Homo sapiens
  CDR3 for beta chain variable domain of TCR clone 305651 (TRBV11-2, TRBJ2-1)
CASSLYPPGVEYNEQFF

SEQ ID NO: 611303 - protein, 11 aa, Homo sapiens
  CDR3 for alpha chain variable domain of TCR clone 305652 (TRAV12-1, TRAJ26)
CVVAYGQNFVF

SEQ ID NO: 611304 - protein, 15 aa, Homo sapiens
  CDR3 for beta chain variable domain of TCR clone 305652 (TRBV12-4, TRBJ2-5)
CASSGTGQAQETQFF

SEQ ID NO: 611305 - protein, 23 aa, Homo sapiens
  CDR3 for alpha chain variable domain of TCR clone 305653 (TRAV1-1, TRAJ11)
LLQELQMKDSASYFCAGYSTLTF

SEQ ID NO: 611306 - protein, 14 aa, Homo sapiens
  CDR3 for beta chain variable domain of TCR clone 305653 (TRBV13, TRBJ2-5)
CASSLERVGETQYF

SEQ ID NO: 611307 - protein, 12 aa, Homo sapiens
  CDR3 for alpha chain variable domain of TCR clone 305654 (TRAV23/DV6, TRAJ16)
CAATGTGQKLLC

SEQ ID NO: 611308 - protein, 15 aa, Homo sapiens
  CDR3 for beta chain variable domain of TCR clone 305654 (TRBV28, TRBJ1-2)
CASSSYRGLVYGYTF

SEQ ID NO: 611309 - protein, 10 aa, Homo sapiens
  CDR3 for alpha chain variable domain of TCR clone 305655 (TRAV8-4, TRAJ43)
CAVSADDMRF

SEQ ID NO: 611310 - protein, 15 aa, Homo sapiens
  CDR3 for beta chain variable domain of TCR clone 305655 (TRBV5-1, TRBJ2-3)
CASSVTSGPTDTQYF

SEQ ID NO: 611311 - protein, 14 aa, Homo sapiens
  CDR3 for alpha chain variable domain of TCR clone 305656 (TRAV1-2, TRAJ16)
CAVNRFSAGQKLLS

SEQ ID NO: 611312 - protein, 14 aa, Homo sapiens
  CDR3 for beta chain variable domain of TCR clone 305656 (TRBV4-1, TRBJ2-2)
CASSQAVNTGELFF

SEQ ID NO: 611313 - protein, 14 aa, Homo sapiens
  CDR3 for alpha chain variable domain of TCR clone 305657 (TRAV26-1, TRAJ38)
CIADNAGNNRKLIW

SEQ ID NO: 611314 - protein, 13 aa, Homo sapiens
  CDR3 for beta chain variable domain of TCR clone 305657 (TRBV20-1, TRBJ1-1)
CSARGGGNTEAFV

SEQ ID NO: 611315 - protein, 15 aa, Homo sapiens
  CDR3 for alpha chain variable domain of TCR clone 305658 (TRAV3, TRAJ22)
CAVRDRGGSARQLTF

SEQ ID NO: 611316 - protein, 15 aa, Homo sapiens
  CDR3 for beta chain variable domain of TCR clone 305658 (TRBV7-3, TRBJ2-2)
CASKANGANTGELFF

SEQ ID NO: 611317 - protein, 15 aa, Homo sapiens
  CDR3 for alpha chain variable domain of TCR clone 305659 (TRAV12-1, TRAJ44)
CVVDTPQCTASKLTF

SEQ ID NO: 611318 - protein, 14 aa, Homo sapiens
  CDR3 for beta chain variable domain of TCR clone 305659 (TRBV7-9, TRBJ2-1)
CASSPRDSLYEQFF

SEQ ID NO: 611319 - protein, 16 aa, Homo sapiens
  CDR3 for alpha chain variable domain of TCR clone 305660 (TRAV14/DV4, TRAJ53)
GGMREGGGGSNYKLTF

SEQ ID NO: 611320 - protein, 14 aa, Homo sapiens
  CDR3 for beta chain variable domain of TCR clone 305660 (TRBV7-2, TRBJ2-7)
CASSPKTSFYEQYF

SEQ ID NO: 611321 - protein, 13 aa, Homo sapiens
  CDR3 for alpha chain variable domain of TCR clone 305661 (TRAV17, TRAJ54)
CAAVIQGAQKLVF

SEQ ID NO: 611322 - protein, 14 aa, Homo sapiens
  CDR3 for beta chain variable domain of TCR clone 305661 (TRBV11-2, TRBJ1-2)
CASSLGTANYGYTF

SEQ ID NO: 611323 - protein, 16 aa, Homo sapiens
  CDR3 for alpha chain variable domain of TCR clone 305662 (TRAV12-2, TRAJ10)
CAVNRVLTGGGNKLTF

SEQ ID NO: 611324 - protein, 16 aa, Homo sapiens
  CDR3 for beta chain variable domain of TCR clone 305662 (TRBV2, TRBJ2-5)
CASSETQGVGEETQYF

SEQ ID NO: 611325 - protein, 17 aa, Homo sapiens
  CDR3 for alpha chain variable domain of TCR clone 305663 (TRAV8-6, TRAJ58)
CAVSSWVGETSGSRLTF

SEQ ID NO: 611326 - protein, 16 aa, Homo sapiens
  CDR3 for beta chain variable domain of TCR clone 305663 (TRBV20-1, TRBJ1-4)
CIAPGQGLLTNEKLFF

SEQ ID NO: 611327 - protein, 14 aa, Homo sapiens
  CDR3 for alpha chain variable domain of TCR clone 305664 (TRAV16, TRAJ17)
CALSGRAAGNKLTF

SEQ ID NO: 611328 - protein, 15 aa, Homo sapiens
  CDR3 for beta chain variable domain of TCR clone 305664 (TRBV3-1, TRBJ1-2)
CASSPTLLPEGGYTF

SEQ ID NO: 611329 - protein, 16 aa, Homo sapiens
  CDR3 for alpha chain variable domain of TCR clone 305665 (TRAV17, TRAJ35)
CATAEGGIGIGNVLHC

SEQ ID NO: 611330 - protein, 16 aa, Homo sapiens
  CDR3 for beta chain variable domain of TCR clone 305665 (TRBV6-5, TRBJ2-7)
CASSSDPTSGFYEQYF

SEQ ID NO: 611331 - protein, 15 aa, Homo sapiens
  CDR3 for alpha chain variable domain of TCR clone 305666 (TRAV17, TRAJ22)
CATVAPSGSARQLTF

SEQ ID NO: 611332 - protein, 16 aa, Homo sapiens
  CDR3 for beta chain variable domain of TCR clone 305666 (TRBV10-3, TRBJ2-7)
CAISADFEDRPYEQYF

SEQ ID NO: 611333 - protein, 13 aa, Homo sapiens
  CDR3 for alpha chain variable domain of TCR clone 305667 (TRAV36/DV7, TRAJ53)
CALSGGSNYKLTF

SEQ ID NO: 611334 - protein, 13 aa, Homo sapiens
  CDR3 for beta chain variable domain of TCR clone 305667 (TRBV28, TRBJ2-4)
CASSLSSKNIQYF

SEQ ID NO: 611335 - protein, 12 aa, Homo sapiens
  CDR3 for alpha chain variable domain of TCR clone 305668 (TRAV29/DV5, TRAJ34)
CAARHNTDKLIF

SEQ ID NO: 611336 - protein, 16 aa, Homo sapiens
  CDR3 for beta chain variable domain of TCR clone 305668 (TRBV2, TRBJ1-1)
CASSPPNRGMNTEAFF

SEQ ID NO: 611337 - protein, 12 aa, Homo sapiens
  CDR3 for alpha chain variable domain of TCR clone 305669 (TRAV12-3, TRAJ17)
CVMTLTGNKLTF

SEQ ID NO: 611338 - protein, 15 aa, Homo sapiens
  CDR3 for beta chain variable domain of TCR clone 305669 (TRBV20-1, TRBJ2-7)
CSARDRVSGMDERYF

SEQ ID NO: 611339 - protein, 13 aa, Homo sapiens
  CDR3 for alpha chain variable domain of TCR clone 305670 (TRAV27, TRAJ45)
CRSSGGGADGLTF

SEQ ID NO: 611340 - protein, 15 aa, Homo sapiens
  CDR3 for beta chain variable domain of TCR clone 305670 (TRBV6-6, TRBJ2-5)
CASSPGGGLEETQYF

SEQ ID NO: 611341 - protein, 14 aa, Homo sapiens
  CDR3 for alpha chain variable domain of TCR clone 305671 (TRAV17, TRAJ12)
CATDGKDSSYKLIF

SEQ ID NO: 611342 - protein, 16 aa, Homo sapiens
  CDR3 for beta chain variable domain of TCR clone 305671 (TRBV11-2, TRBJ2-1)
CASSPRLAGVYNEQFF

SEQ ID NO: 611343 - protein, 11 aa, Homo sapiens
  CDR3 for alpha chain variable domain of TCR clone 305672 (TRAV27, TRAJ20)
CAGLNDYKLSF

SEQ ID NO: 611344 - protein, 13 aa, Homo sapiens
  CDR3 for beta chain variable domain of TCR clone 305672 (TRBV6-1, TRBJ1-1)
CQHPLQMNTEAFF

SEQ ID NO: 611345 - protein, 13 aa, Homo sapiens
  CDR3 for alpha chain variable domain of TCR clone 305673 (TRAV39, TRAJ49)
CAVDRNTGNPFYF

SEQ ID NO: 611346 - protein, 14 aa, Homo sapiens
  CDR3 for beta chain variable domain of TCR clone 305673 (TRBV4-1, TRBJ1-1)
CASSRSGQSFEAFF

SEQ ID NO: 611347 - protein, 12 aa, Homo sapiens
  CDR3 for alpha chain variable domain of TCR clone 305674 (TRAV3, TRAJ43)
CAVRDPNNDMRF

SEQ ID NO: 611348 - protein, 16 aa, Homo sapiens
  CDR3 for beta chain variable domain of TCR clone 305674 (TRBV6-1, TRBJ1-2)
CASSGAWQGRSHGYTF

SEQ ID NO: 611349 - protein, 15 aa, Homo sapiens
  CDR3 for alpha chain variable domain of TCR clone 305675 (TRAV23/DV6, TRAJ13)
CAAWPGGGGSQKVTF

SEQ ID NO: 611350 - protein, 14 aa, Homo sapiens
  CDR3 for beta chain variable domain of TCR clone 305675 (TRBV7-2, TRBJ1-1)
CASSFLTGTTEAFF

SEQ ID NO: 611351 - protein, 16 aa, Homo sapiens
  CDR3 for alpha chain variable domain of TCR clone 305676 (TRAV30, TRAJ24)
CGTEIVHADSWGKFQF

SEQ ID NO: 611352 - protein, 19 aa, Homo sapiens
  CDR3 for beta chain variable domain of TCR clone 305676 (TRBV25-1, TRBJ2-2)
CAILVYRVDRGRKTGELFF

SEQ ID NO: 611353 - protein, 16 aa, Homo sapiens
  CDR3 for alpha chain variable domain of TCR clone 305677 (TRAV12-3, TRAJ53)
CAMSVGSGGSNYKLTF

SEQ ID NO: 611354 - protein, 15 aa, Homo sapiens
  CDR3 for beta chain variable domain of TCR clone 305677 (TRBV20-1, TRBJ2-7)
CSARDRVSGMDEQYF

SEQ ID NO: 611355 - protein, 11 aa, Homo sapiens
  CDR3 for alpha chain variable domain of TCR clone 305678 (TRAV1-2, TRAJ31)
CAVNNNARLMF

SEQ ID NO: 611356 - protein, 15 aa, Homo sapiens
  CDR3 for beta chain variable domain of TCR clone 305678 (TRBV28, TRBJ2-1)
CASSIIAGGRSAQFF

SEQ ID NO: 611357 - protein, 14 aa, Homo sapiens
  CDR3 for alpha chain variable domain of TCR clone 305679 (TRAV26-1, TRAJ38)
CIADNAGNNRKLIW

SEQ ID NO: 611358 - protein, 14 aa, Homo sapiens
  CDR3 for beta chain variable domain of TCR clone 305679 (TRBV4-1, TRBJ2-2)
CDSSQAVNTGELFF

SEQ ID NO: 611359 - protein, 13 aa, Homo sapiens
  CDR3 for alpha chain variable domain of TCR clone 305680 (TRAV1-2, TRAJ9)
CAVLNTGGFNTIF

SEQ ID NO: 611360 - protein, 17 aa, Homo sapiens
  CDR3 for beta chain variable domain of TCR clone 305680 (TRBV7-2, TRBJ2-3)
CASSLAGGLAGTVGQYF

SEQ ID NO: 611361 - protein, 14 aa, Homo sapiens
  CDR3 for alpha chain variable domain of TCR clone 305681 (TRAV13-1, TRAJ44)
CAAKATGAASKLTF

SEQ ID NO: 611362 - protein, 15 aa, Homo sapiens
  CDR3 for beta chain variable domain of TCR clone 305681 (TRBV10-3, TRBJ2-1)
CAISDVQDRAYEQFF

SEQ ID NO: 611363 - protein, 16 aa, Homo sapiens
  CDR3 for alpha chain variable domain of TCR clone 305682 (TRAV12-1, TRAJ42)
CVVTPYYGGSQGNLIF

SEQ ID NO: 611364 - protein, 15 aa, Homo sapiens
  CDR3 for beta chain variable domain of TCR clone 305682 (TRBV4-3, TRBJ2-7)
CASSQGGRGIYEQFF

SEQ ID NO: 611365 - protein, 13 aa, Homo sapiens
  CDR3 for alpha chain variable domain of TCR clone 305683 (TRAV13-1, TRAJ39)
CSKYSNAGNMLTF

SEQ ID NO: 611366 - protein, 16 aa, Homo sapiens
  CDR3 for beta chain variable domain of TCR clone 305683 (TRBV20-1, TRBJ1-4)
CSAPGQGLVTNEKLFF

SEQ ID NO: 611367 - protein, 13 aa, Homo sapiens
  CDR3 for alpha chain variable domain of TCR clone 305684 (TRAV16, TRAJ27)
CALRRTNAGKSTF

SEQ ID NO: 611368 - protein, 15 aa, Homo sapiens
  CDR3 for beta chain variable domain of TCR clone 305684 (TRBV18, TRBJ2-1)
CASSPPSASYNEQSF

SEQ ID NO: 611369 - protein, 14 aa, Homo sapiens
  CDR3 for alpha chain variable domain of TCR clone 305685 (TRAV26-1, TRAJ21)
CIVRVVYNFNKFYF

SEQ ID NO: 611370 - protein, 14 aa, Homo sapiens
  CDR3 for beta chain variable domain of TCR clone 305685 (TRBV7-9, TRBJ2-2)
CASSLVQDTGELFF

SEQ ID NO: 611371 - protein, 14 aa, Homo sapiens
  CDR3 for alpha chain variable domain of TCR clone 305686 (TRAV1-2, TRAJ16)
FAVNRFSDGQKLLF

SEQ ID NO: 611372 - protein, 15 aa, Homo sapiens
  CDR3 for beta chain variable domain of TCR clone 305686 (TRBV7-9, TRBJ1-6)
CASSSPGRGNSPPHF

SEQ ID NO: 611373 - protein, 17 aa, Homo sapiens
  CDR3 for alpha chain variable domain of TCR clone 305687 (TRAV23/DV6, TRAJ57)
CAASSTLSQGGSEKLVF

SEQ ID NO: 611374 - protein, 13 aa, Homo sapiens
  CDR3 for beta chain variable domain of TCR clone 305687 (TRBV19, TRBJ1-2)
CASSVPGQDGYTF

SEQ ID NO: 611375 - protein, 10 aa, Homo sapiens
  CDR3 for alpha chain variable domain of TCR clone 305688 (TRAV17, TRAJ52)
SATSYGNLTF

SEQ ID NO: 611376 - protein, 13 aa, Homo sapiens
  CDR3 for beta chain variable domain of TCR clone 305688 (TRBV29-1, TRBJ2-5)
CSVGGTSAETQYF

SEQ ID NO: 611377 - protein, 10 aa, Homo sapiens
  CDR3 for alpha chain variable domain of TCR clone 305689 (TRAV29/DV5, TRAJ48)
CAAGGEKLTF

SEQ ID NO: 611378 - protein, 13 aa, Homo sapiens
  CDR3 for beta chain variable domain of TCR clone 305689 (TRBV7-9, TRBJ1-2)
CASSLKQNYGYTF

SEQ ID NO: 611379 - protein, 13 aa, Homo sapiens
  CDR3 for alpha chain variable domain of TCR clone 305690 (TRAV21, TRAJ10)
CAVPTGGGKKLTF

SEQ ID NO: 611380 - protein, 22 aa, Homo sapiens
  CDR3 for beta chain variable domain of TCR clone 305690 (TRBV19, TRBJ2-1)
CASSVRDRVTGTSGRIYNEQFF

SEQ ID NO: 611381 - protein, 13 aa, Homo sapiens
  CDR3 for alpha chain variable domain of TCR clone 305691 (TRAV3, TRAJ41)
CAVSSNSGYALNF

SEQ ID NO: 611382 - protein, 12 aa, Homo sapiens
  CDR3 for beta chain variable domain of TCR clone 305691 (TRBV2, TRBJ2-1)
CASRPGPREQCV

SEQ ID NO: 611383 - protein, 16 aa, Homo sapiens
  CDR3 for alpha chain variable domain of TCR clone 305692 (TRAV12-2, TRAJ32)
CAVNLGQGGAINKLIF

SEQ ID NO: 611384 - protein, 14 aa, Homo sapiens
  CDR3 for beta chain variable domain of TCR clone 305692 (TRBV11-2, TRBJ2-3)
CASSRLARTDTQHF

SEQ ID NO: 611385 - protein, 16 aa, Homo sapiens
  CDR3 for alpha chain variable domain of TCR clone 305693 (TRAV3, TRAJ27)
CAVRDPQGTNTGKSTF

SEQ ID NO: 611386 - protein, 17 aa, Homo sapiens
  CDR3 for beta chain variable domain of TCR clone 305693 (TRBV4-1, TRBJ2-7)
CASSQGRGLQTSYEQYF

SEQ ID NO: 611387 - protein, 13 aa, Homo sapiens
  CDR3 for alpha chain variable domain of TCR clone 305694 (TRAV8-3, TRAJ44)
CAVVPGTASKLTF

SEQ ID NO: 611388 - protein, 12 aa, Homo sapiens
  CDR3 for beta chain variable domain of TCR clone 305694 (TRBV7-8, TRBJ2-7)
CASSLADSEQYF

SEQ ID NO: 611389 - protein, 15 aa, Homo sapiens
  CDR3 for alpha chain variable domain of TCR clone 305695 (TRAV12-3, TRAJ10)
CASYIHTGGGNKLTF

SEQ ID NO: 611390 - protein, 15 aa, Homo sapiens
  CDR3 for beta chain variable domain of TCR clone 305695 (TRBV7-2, TRBJ1-6)
CASSLGPDRGMPLHF

SEQ ID NO: 611391 - protein, 12 aa, Homo sapiens
  CDR3 for alpha chain variable domain of TCR clone 305696 (TRAV23/DV6, TRAJ31)
CAARRIGARLMF

SEQ ID NO: 611392 - protein, 17 aa, Homo sapiens
  CDR3 for beta chain variable domain of TCR clone 305696 (TRBV19, TRBJ2-7)
CASSISFYDSYPYEQYF

SEQ ID NO: 611393 - protein, 15 aa, Homo sapiens
  CDR3 for alpha chain variable domain of TCR clone 305697 (TRAV14/DV4, TRAJ26)
CAMREGQNYGQNFVF

SEQ ID NO: 611394 - protein, 13 aa, Homo sapiens
  CDR3 for beta chain variable domain of TCR clone 305697 (TRBV24-1, TRBJ2-2)
CATSDWSTGEMFF

SEQ ID NO: 611395 - protein, 15 aa, Homo sapiens
  CDR3 for alpha chain variable domain of TCR clone 305698 (TRAV12-3, TRAJ27)
CAMRAYNTNAGKSTF

SEQ ID NO: 611396 - protein, 13 aa, Homo sapiens
  CDR3 for beta chain variable domain of TCR clone 305698 (TRBV11-2, TRBJ2-5)
CASSRGPSETQYS

SEQ ID NO: 611397 - protein, 14 aa, Homo sapiens
  CDR3 for alpha chain variable domain of TCR clone 305699 (TRAV23/DV6, TRAJ11)
CAASLESGYSTLTF

SEQ ID NO: 611398 - protein, 14 aa, Homo sapiens
  CDR3 for beta chain variable domain of TCR clone 305699 (TRBV2, TRBJ2-7)
CASSLTSGGYEQYF

SEQ ID NO: 611399 - protein, 16 aa, Homo sapiens
  CDR3 for alpha chain variable domain of TCR clone 305700 (TRAV4, TRAJ22)
CLVGDLYSGSARQLTF

SEQ ID NO: 611400 - protein, 11 aa, Homo sapiens
  CDR3 for beta chain variable domain of TCR clone 305700 (TRBV29-1, TRBJ2-5)
CSEGRTGTQYF

SEQ ID NO: 611401 - protein, 15 aa, Homo sapiens
  CDR3 for alpha chain variable domain of TCR clone 305701 (TRAV29/DV5, TRAJ40)
CAASAQGSGTYKYIF

SEQ ID NO: 611402 - protein, 16 aa, Homo sapiens
  CDR3 for beta chain variable domain of TCR clone 305701 (TRBV12-5, TRBJ2-5)
CASGPRTSGNQETQYF

SEQ ID NO: 611403 - protein, 12 aa, Homo sapiens
  CDR3 for alpha chain variable domain of TCR clone 305702 (TRAV2, TRAJ34)
CAVERNTDKLIF

SEQ ID NO: 611404 - protein, 14 aa, Homo sapiens
  CDR3 for beta chain variable domain of TCR clone 305702 (TRBV7-9, TRBJ2-1)
CASSDNPGYNEQFF

SEQ ID NO: 611405 - protein, 14 aa, Homo sapiens
  CDR3 for alpha chain variable domain of TCR clone 305703 (TRAV1-2, TRAJ8)
CAVREDTGFQNLVF

SEQ ID NO: 611406 - protein, 15 aa, Homo sapiens
  CDR3 for beta chain variable domain of TCR clone 305703 (TRBV20-1, TRBJ1-1)
CSASRGVTGNTEAFF

SEQ ID NO: 611407 - protein, 13 aa, Homo sapiens
  CDR3 for alpha chain variable domain of TCR clone 305704 (TRAV12-2, TRAJ39)
CAVNNNAGNMLTF

SEQ ID NO: 611408 - protein, 16 aa, Homo sapiens
  CDR3 for beta chain variable domain of TCR clone 305704 (TRBV7-2, TRBJ2-1)
CASSLVAGAGYNEQFF

SEQ ID NO: 611409 - protein, 14 aa, Homo sapiens
  CDR3 for alpha chain variable domain of TCR clone 305705 (TRAV26-1, TRAJ38)
CIADNAGNNRKLIL

SEQ ID NO: 611410 - protein, 13 aa, Homo sapiens
  CDR3 for beta chain variable domain of TCR clone 305705 (TRBV20-1, TRBJ1-1)
CSARGGGNAEALF

SEQ ID NO: 611411 - protein, 13 aa, Homo sapiens
  CDR3 for alpha chain variable domain of TCR clone 305706 (TRAV25, TRAJ26)
CAGMDNYGQNFVF

SEQ ID NO: 611412 - protein, 15 aa, Homo sapiens
  CDR3 for beta chain variable domain of TCR clone 305706 (TRBV5-1, TRBJ1-1)
CASSSTTGTNTEAFF

SEQ ID NO: 611413 - protein, 15 aa, Homo sapiens
  CDR3 for alpha chain variable domain of TCR clone 305707 (TRAV27, TRAJ10)
CAGELLTGGGNKLTF

SEQ ID NO: 611414 - protein, 14 aa, Homo sapiens
  CDR3 for beta chain variable domain of TCR clone 305707 (TRBV7-2, TRBJ2-7)
CASSPKTSFYEQYF

SEQ ID NO: 611415 - protein, 21 aa, Homo sapiens
  CDR3 for alpha chain variable domain of TCR clone 305708 (TRAV26-1, TRAJ28)
CCVLLHRQTSYSGAGSYQLTF

SEQ ID NO: 611416 - protein, 12 aa, Homo sapiens
  CDR3 for beta chain variable domain of TCR clone 305708 (TRBV5-1, TRBJ1-2)
CASSLDGKGYTF

SEQ ID NO: 611417 - protein, 13 aa, Homo sapiens
  CDR3 for alpha chain variable domain of TCR clone 305709 (TRAV1-1, TRAJ9)
CAAKNTGGFKTIF

SEQ ID NO: 611418 - protein, 14 aa, Homo sapiens
  CDR3 for beta chain variable domain of TCR clone 305709 (TRBV7-9, TRBJ2-7)
CASSLSQGSYEQYF

SEQ ID NO: 611419 - protein, 10 aa, Homo sapiens
  CDR3 for alpha chain variable domain of TCR clone 305710 (TRAV12-1, TRAJ37)
ARGNTGELIF

SEQ ID NO: 611420 - protein, 15 aa, Homo sapiens
  CDR3 for beta chain variable domain of TCR clone 305710 (TRBV7-2, TRBJ2-3)
CASSLEQVGTDTQYF

SEQ ID NO: 611421 - protein, 16 aa, Homo sapiens
  CDR3 for alpha chain variable domain of TCR clone 305711 (TRAV27, TRAJ52)
CAGAGAGGTSYGKLTF

SEQ ID NO: 611422 - protein, 14 aa, Homo sapiens
  CDR3 for beta chain variable domain of TCR clone 305711 (TRBV20-1, TRBJ1-1)
CSAQTRIGGTEAFF

SEQ ID NO: 611423 - protein, 14 aa, Homo sapiens
  CDR3 for alpha chain variable domain of TCR clone 305712 (TRAV29/DV5, TRAJ36)
CAARRKTGANNLFF

SEQ ID NO: 611424 - protein, 14 aa, Homo sapiens
  CDR3 for beta chain variable domain of TCR clone 305712 (TRBV27, TRBJ2-2)
CASRPGVNTGELFF

SEQ ID NO: 611425 - protein, 11 aa, Homo sapiens
  CDR3 for alpha chain variable domain of TCR clone 305713 (TRAV12-3, TRAJ27)
RAMANAGKSTF

SEQ ID NO: 611426 - protein, 16 aa, Homo sapiens
  CDR3 for beta chain variable domain of TCR clone 305713 (TRBV19, TRBJ2-2)
CASRSPGTGATGELFF

SEQ ID NO: 611427 - protein, 15 aa, Homo sapiens
  CDR3 for alpha chain variable domain of TCR clone 305714 (TRAV29/DV5, TRAJ37)
CAALHGSSNTGKLIF

SEQ ID NO: 611428 - protein, 15 aa, Homo sapiens
  CDR3 for beta chain variable domain of TCR clone 305714 (TRBV12-4, TRBJ2-1)
CASSPLSGRNNEQFF

SEQ ID NO: 611429 - protein, 14 aa, Homo sapiens
  CDR3 for alpha chain variable domain of TCR clone 305715 (TRAV1-1, TRAJ27)
CAVIYNTNAGKSNF

SEQ ID NO: 611430 - protein, 18 aa, Homo sapiens
  CDR3 for beta chain variable domain of TCR clone 305715 (TRBV7-3, TRBJ2-1)
CASSLTLASGRAMVSSSS

SEQ ID NO: 611431 - protein, 14 aa, Homo sapiens
  CDR3 for alpha chain variable domain of TCR clone 305716 (TRAV16, TRAJ39)
CALSKNNAGNMLTF

SEQ ID NO: 611432 - protein, 12 aa, Homo sapiens
  CDR3 for beta chain variable domain of TCR clone 305716 (TRBV19, TRBJ2-1)
CASSIQYNEQFF

SEQ ID NO: 611433 - protein, 16 aa, Homo sapiens
  CDR3 for alpha chain variable domain of TCR clone 305717 (TRAV17, TRAJ28)
CATASVSGAGSSQLTF

SEQ ID NO: 611434 - protein, 11 aa, Homo sapiens
  CDR3 for beta chain variable domain of TCR clone 305717 (TRBV7-9, TRBJ2-5)
CASSLGETQYF

SEQ ID NO: 611435 - protein, 14 aa, Homo sapiens
  CDR3 for alpha chain variable domain of TCR clone 305718 (TRAV12-3, TRAJ57)
CAMSAWGGSEKLVF

SEQ ID NO: 611436 - protein, 15 aa, Homo sapiens
  CDR3 for beta chain variable domain of TCR clone 305718 (TRBV5-1, TRBJ2-1)
CASSPPRAPYNEQFF

SEQ ID NO: 611437 - protein, 13 aa, Homo sapiens
  CDR3 for alpha chain variable domain of TCR clone 305719 (TRAV12-1, TRAJ7)
CVVNMRGNNRLAF

SEQ ID NO: 611438 - protein, 14 aa, Homo sapiens
  CDR3 for beta chain variable domain of TCR clone 305719 (TRBV5-4, TRBJ1-1)
CASSLDSRRDEAFF

SEQ ID NO: 611439 - protein, 18 aa, Homo sapiens
  CDR3 for alpha chain variable domain of TCR clone 305720 (TRAV16, TRAJ52)
CALSGVDAGGTSYGKLTF

SEQ ID NO: 611440 - protein, 15 aa, Homo sapiens
  CDR3 for beta chain variable domain of TCR clone 305720 (TRBV27, TRBJ2-1)
CASSNGGGSSNEQFF

SEQ ID NO: 611441 - protein, 14 aa, Homo sapiens
  CDR3 for alpha chain variable domain of TCR clone 305721 (TRAV26-1, TRAJ45)
CIEVTGGGADGLIF

SEQ ID NO: 611442 - protein, 19 aa, Homo sapiens
  CDR3 for beta chain variable domain of TCR clone 305721 (TRBV19, TRBJ2-2)
CASTRPGLAGGRVTGELFF

SEQ ID NO: 611443 - protein, 14 aa, Homo sapiens
  CDR3 for alpha chain variable domain of TCR clone 305722 (TRAV12-2, TRAJ24)
CAVTPADSWGKLQF

SEQ ID NO: 611444 - protein, 12 aa, Homo sapiens
  CDR3 for beta chain variable domain of TCR clone 305722 (TRBV3-1, TRBJ2-1)
CASSQESSGQFF

SEQ ID NO: 611445 - protein, 13 aa, Homo sapiens
  CDR3 for alpha chain variable domain of TCR clone 305723 (TRAV26-2, TRAJ43)
CILRAVNNNDMRF

SEQ ID NO: 611446 - protein, 12 aa, Homo sapiens
  CDR3 for beta chain variable domain of TCR clone 305723 (TRBV28, TRBJ2-3)
CASSLYRDTQYF

SEQ ID NO: 611447 - protein, 11 aa, Homo sapiens
  CDR3 for alpha chain variable domain of TCR clone 305724 (TRAV1-1, TRAJ23)
CAVRQGGKLIF

SEQ ID NO: 611448 - protein, 15 aa, Homo sapiens
  CDR3 for beta chain variable domain of TCR clone 305724 (TRBV5-8, TRBJ2-2)
CASSLDRGATGELFF

SEQ ID NO: 611449 - protein, 13 aa, Homo sapiens
  CDR3 for alpha chain variable domain of TCR clone 305725 (TRAV20, TRAJ21)
CAVEGYNFNKFYF

SEQ ID NO: 611450 - protein, 16 aa, Homo sapiens
  CDR3 for beta chain variable domain of TCR clone 305725 (TRBV3-1, TRBJ2-5)
CASSPGQFNGFGTQYF

SEQ ID NO: 611451 - protein, 14 aa, Homo sapiens
  CDR3 for alpha chain variable domain of TCR clone 305726 (TRAV12-1, TRAJ9)
CVVTGYTGGFKTIF

SEQ ID NO: 611452 - protein, 13 aa, Homo sapiens
  CDR3 for beta chain variable domain of TCR clone 305726 (TRBV19, TRBJ1-3)
CASRLSLGNTIYF

SEQ ID NO: 611453 - protein, 14 aa, Homo sapiens
  CDR3 for alpha chain variable domain of TCR clone 305727 (TRAV27, TRAJ22)
CAGLPSGSARQLTF

SEQ ID NO: 611454 - protein, 13 aa, Homo sapiens
  CDR3 for beta chain variable domain of TCR clone 305727 (TRBV12-4, TRBJ1-5)
CASSPDRAQPQHF

SEQ ID NO: 611455 - protein, 15 aa, Homo sapiens
  CDR3 for alpha chain variable domain of TCR clone 305728 (TRAV8-2, TRAJ15)
CVVTMGNQAGTALIF

SEQ ID NO: 611456 - protein, 12 aa, Homo sapiens
  CDR3 for beta chain variable domain of TCR clone 305728 (TRBV28, TRBJ2-6)
CAIQAGANVLTF

SEQ ID NO: 611457 - protein, 13 aa, Homo sapiens
  CDR3 for alpha chain variable domain of TCR clone 305729 (TRAV6, TRAJ20)
CALAVSNDYKLSF

SEQ ID NO: 611458 - protein, 17 aa, Homo sapiens
  CDR3 for beta chain variable domain of TCR clone 305729 (TRBV13, TRBJ2-3)
CASSLSRVAGGRNTQYF

SEQ ID NO: 611459 - protein, 18 aa, Homo sapiens
  CDR3 for alpha chain variable domain of TCR clone 305730 (TRAV21, TRAJ52)
CAVRPSPAGGTSFGKLTF

SEQ ID NO: 611460 - protein, 15 aa, Homo sapiens
  CDR3 for beta chain variable domain of TCR clone 305730 (TRBV27, TRBJ2-1)
CASSNGGGSSNEQFF

SEQ ID NO: 611461 - protein, 14 aa, Homo sapiens
  CDR3 for alpha chain variable domain of TCR clone 305731 (TRAV17, TRAJ4)
CATVPSGGYNKLIF

SEQ ID NO: 611462 - protein, 15 aa, Homo sapiens
  CDR3 for beta chain variable domain of TCR clone 305731 (TRBV2, TRBJ2-1)
CASSEEREGDNEQFF

SEQ ID NO: 611463 - protein, 11 aa, Homo sapiens
  CDR3 for alpha chain variable domain of TCR clone 305732 (TRAV1-2, TRAJ31)
CAVNNNARLMF

SEQ ID NO: 611464 - protein, 15 aa, Homo sapiens
  CDR3 for beta chain variable domain of TCR clone 305732 (TRBV28, TRBJ2-1)
CASCIIAGGRSEQFF

SEQ ID NO: 611465 - protein, 13 aa, Homo sapiens
  CDR3 for alpha chain variable domain of TCR clone 305733 (TRAV12-3, TRAJ7)
CAMTPYGNNRLAF

SEQ ID NO: 611466 - protein, 12 aa, Homo sapiens
  CDR3 for beta chain variable domain of TCR clone 305733 (TRBV11-2, TRBJ2-2)
CASSLGGGELFF

SEQ ID NO: 611467 - protein, 13 aa, Homo sapiens
  CDR3 for alpha chain variable domain of TCR clone 305734 (TRAV13-2, TRAJ8)
CAFMTTGFQKLVF

SEQ ID NO: 611468 - protein, 17 aa, Homo sapiens
  CDR3 for beta chain variable domain of TCR clone 305734 (TRBV28, TRBJ2-1)
CASSSARQAITYNEQFF

SEQ ID NO: 611469 - protein, 17 aa, Homo sapiens
  CDR3 for alpha chain variable domain of TCR clone 305735 (TRAV3, TRAJ6)
CAVRDGPKAGGSYIPTF

SEQ ID NO: 611470 - protein, 14 aa, Homo sapiens
  CDR3 for beta chain variable domain of TCR clone 305735 (TRBV7-2, TRBJ2-7)
CASSPNTSFYEQYF

SEQ ID NO: 611471 - protein, 15 aa, Homo sapiens
  CDR3 for alpha chain variable domain of TCR clone 305736 (TRAV3, TRAJ22)
CAVRDRGGSARQLSF

SEQ ID NO: 611472 - protein, 14 aa, Homo sapiens
  CDR3 for beta chain variable domain of TCR clone 305736 (TRBV19, TRBJ1-5)
CASSLGLIGQPQHF

SEQ ID NO: 611473 - protein, 14 aa, Homo sapiens
  CDR3 for alpha chain variable domain of TCR clone 305737 (TRAV12-2, TRAJ4)
CALVLSGGYNKLIF

SEQ ID NO: 611474 - protein, 14 aa, Homo sapiens
  CDR3 for beta chain variable domain of TCR clone 305737 (TRBV7-3, TRBJ1-2)
CASSPVGGTYGYTF

SEQ ID NO: 611475 - protein, 14 aa, Homo sapiens
  CDR3 for alpha chain variable domain of TCR clone 305738 (TRAV12-3, TRAJ9)
CAMSPNTGGFKTIF

SEQ ID NO: 611476 - protein, 20 aa, Homo sapiens
  CDR3 for beta chain variable domain of TCR clone 305738 (TRBV7-8, TRBJ2-2)
CASSHLFPGPTIHITGELFF

SEQ ID NO: 611477 - protein, 13 aa, Homo sapiens
  CDR3 for alpha chain variable domain of TCR clone 305739 (TRAV3, TRAJ15)
CAVRDQAGTALIF

SEQ ID NO: 611478 - protein, 15 aa, Homo sapiens
  CDR3 for beta chain variable domain of TCR clone 305739 (TRBV11-1, TRBJ2-7)
SASSLNYGASYEQYF

SEQ ID NO: 611479 - protein, 16 aa, Homo sapiens
  CDR3 for alpha chain variable domain of TCR clone 305740 (TRAV3, TRAJ28)
CAVLPRSGAGSYQLTF

SEQ ID NO: 611480 - protein, 18 aa, Homo sapiens
  CDR3 for beta chain variable domain of TCR clone 305740 (TRBV23-1, TRBJ2-7)
CASSEYRRTDSTSSTSGR

SEQ ID NO: 611481 - protein, 14 aa, Homo sapiens
  CDR3 for alpha chain variable domain of TCR clone 305741 (TRAV3, TRAJ34)
CAVRAPGNTDNLIF

SEQ ID NO: 611482 - protein, 17 aa, Homo sapiens
  CDR3 for beta chain variable domain of TCR clone 305741 (TRBV20-1, TRBJ2-7)
CSAAPGLARGISYEQYF

SEQ ID NO: 611483 - protein, 17 aa, Homo sapiens
  CDR3 for alpha chain variable domain of TCR clone 305742 (TRAV3, TRAJ6)
CAVRDGPRAGGSYIPTF

SEQ ID NO: 611484 - protein, 16 aa, Homo sapiens
  CDR3 for beta chain variable domain of TCR clone 305742 (TRBV2, TRBJ2-1)
CASSDSPGQPYNEQFF

SEQ ID NO: 611485 - protein, 14 aa, Homo sapiens
  CDR3 for alpha chain variable domain of TCR clone 305743 (TRAV12-1, TRAJ17)
CVVNYKAAGNKLTF

SEQ ID NO: 611486 - protein, 14 aa, Homo sapiens
  CDR3 for beta chain variable domain of TCR clone 305743 (TRBV7-8, TRBJ2-3)
CASSLEAGADTQYF

SEQ ID NO: 611487 - protein, 16 aa, Homo sapiens
  CDR3 for alpha chain variable domain of TCR clone 305744 (TRAV30, TRAJ24)
CGTEIVDADSWWKFQF

SEQ ID NO: 611488 - protein, 13 aa, Homo sapiens
  CDR3 for beta chain variable domain of TCR clone 305744 (TRBV7-2, TRBJ2-7)
CSSPKTSFYEQYF

SEQ ID NO: 611489 - protein, 14 aa, Homo sapiens
  CDR3 for alpha chain variable domain of TCR clone 305745 (TRAV12-2, TRAJ3)
CAVSLYSSASKIIF

SEQ ID NO: 611490 - protein, 14 aa, Homo sapiens
  CDR3 for beta chain variable domain of TCR clone 305745 (TRBV27, TRBJ2-1)
SAGSIAETYNEQFF

SEQ ID NO: 611491 - protein, 13 aa, Homo sapiens
  CDR3 for alpha chain variable domain of TCR clone 305746 (TRAV38-2/DV8, TRAJ34)
CAYRTWNTDKLIF

SEQ ID NO: 611492 - protein, 14 aa, Homo sapiens
  CDR3 for beta chain variable domain of TCR clone 305746 (TRBV4-1, TRBJ2-7)
CASIPSREGFEQYF

SEQ ID NO: 611493 - protein, 11 aa, Homo sapiens
  CDR3 for alpha chain variable domain of TCR clone 305747 (TRAV2, TRAJ33)
CAVASNYQLIW

SEQ ID NO: 611494 - protein, 16 aa, Homo sapiens
  CDR3 for beta chain variable domain of TCR clone 305747 (TRBV28, TRBJ2-1)
CASSSPEYPRDNEQFF

SEQ ID NO: 611495 - protein, 13 aa, Homo sapiens
  CDR3 for alpha chain variable domain of TCR clone 305748 (TRAV17, TRAJ9)
CATDYTGGFKTIF

SEQ ID NO: 611496 - protein, 16 aa, Homo sapiens
  CDR3 for beta chain variable domain of TCR clone 305748 (TRBV7-7, TRBJ2-1)
CASSLASGTSYNDQFF

SEQ ID NO: 611497 - protein, 15 aa, Homo sapiens
  CDR3 for alpha chain variable domain of TCR clone 305749 (TRAV8-4, TRAJ15)
CAVSDPVQAGTALIV

SEQ ID NO: 611498 - protein, 14 aa, Homo sapiens
  CDR3 for beta chain variable domain of TCR clone 305749 (TRBV7-2, TRBJ2-7)
CASSPKTSFYEQYF

SEQ ID NO: 611499 - protein, 12 aa, Homo sapiens
  CDR3 for alpha chain variable domain of TCR clone 305750 (TRAV21, TRAJ11)
CAVRGGNSTLTF

SEQ ID NO: 611500 - protein, 13 aa, Homo sapiens
  CDR3 for beta chain variable domain of TCR clone 305750 (TRBV7-2, TRBJ2-4)
CASSREHANIQYF

SEQ ID NO: 611501 - protein, 16 aa, Homo sapiens
  CDR3 for alpha chain variable domain of TCR clone 305751 (TRAV30, TRAJ24)
CGTEIVDADSWGKCQF

SEQ ID NO: 611502 - protein, 12 aa, Homo sapiens
  CDR3 for beta chain variable domain of TCR clone 305751 (TRBV27, TRBJ2-1)
CASRGLYNEQFF

SEQ ID NO: 611503 - protein, 15 aa, Homo sapiens
  CDR3 for alpha chain variable domain of TCR clone 305752 (TRAV21, TRAJ53)
CATFNSGGSNYKLTF

SEQ ID NO: 611504 - protein, 14 aa, Homo sapiens
  CDR3 for beta chain variable domain of TCR clone 305752 (TRBV7-2, TRBJ2-7)
CASRSQGAAYEQYF

SEQ ID NO: 611505 - protein, 15 aa, Homo sapiens
  CDR3 for alpha chain variable domain of TCR clone 305753 (TRAV13-1, TRAJ11)
CAASNRNSGYSTLTF

SEQ ID NO: 611506 - protein, 12 aa, Homo sapiens
  CDR3 for beta chain variable domain of TCR clone 305753 (TRBV19, TRBJ2-1)
CASSQISNEQFF

SEQ ID NO: 611507 - protein, 14 aa, Homo sapiens
  CDR3 for alpha chain variable domain of TCR clone 305754 (TRAV2, TRAJ21)
CAVEDLNNFNKFYF

SEQ ID NO: 611508 - protein, 11 aa, Homo sapiens
  CDR3 for beta chain variable domain of TCR clone 305754 (TRBV10-3, TRBJ2-1)
CAISDRGLQVF

SEQ ID NO: 611509 - protein, 12 aa, Homo sapiens
  CDR3 for alpha chain variable domain of TCR clone 305755 (TRAV12-3, TRAJ17)
CAMTLTGHKLTF

SEQ ID NO: 611510 - protein, 15 aa, Homo sapiens
  CDR3 for beta chain variable domain of TCR clone 305755 (TRBV20-1, TRBJ2-1)
CSARFSAGGLNEQFF

SEQ ID NO: 611511 - protein, 12 aa, Homo sapiens
  CDR3 for alpha chain variable domain of TCR clone 305756 (TRAV12-2, TRAJ52)
IGGGTSYGKLTF

SEQ ID NO: 611512 - protein, 15 aa, Homo sapiens
  CDR3 for beta chain variable domain of TCR clone 305756 (TRBV18, TRBJ2-1)
CASSPPSASYNEQFF

SEQ ID NO: 611513 - protein, 13 aa, Homo sapiens
  CDR3 for alpha chain variable domain of TCR clone 305757 (TRAV6, TRAJ16)
CSLDDSDGQKLLF

SEQ ID NO: 611514 - protein, 13 aa, Homo sapiens
  CDR3 for beta chain variable domain of TCR clone 305757 (TRBV10-3, TRBJ2-7)
CASKLAVNYEQYF

SEQ ID NO: 611515 - protein, 14 aa, Homo sapiens
  CDR3 for alpha chain variable domain of TCR clone 305758 (TRAV1-2, TRAJ8)
CAVRADTGFQKLVF

SEQ ID NO: 611516 - protein, 16 aa, Homo sapiens
  CDR3 for beta chain variable domain of TCR clone 305758 (TRBV24-1, TRBJ2-3)
CATSDPGTGATDTQYF

SEQ ID NO: 611517 - protein, 12 aa, Homo sapiens
  CDR3 for alpha chain variable domain of TCR clone 305759 (TRAV2, TRAJ36)
CAELTGAINLFF

SEQ ID NO: 611518 - protein, 18 aa, Homo sapiens
  CDR3 for beta chain variable domain of TCR clone 305759 (TRBV19, TRBJ1-1)
CASSIDGGDYTGNTEAFF

SEQ ID NO: 611519 - protein, 13 aa, Homo sapiens
  CDR3 for alpha chain variable domain of TCR clone 305760 (TRAV21, TRAJ57)
CAVTQRGSEKLGF

SEQ ID NO: 611520 - protein, 16 aa, Homo sapiens
  CDR3 for beta chain variable domain of TCR clone 305760 (TRBV29-1, TRBJ2-7)
CSVEDAEDGTAYEQYF

SEQ ID NO: 611521 - protein, 13 aa, Homo sapiens
  CDR3 for alpha chain variable domain of TCR clone 305761 (TRAV23/DV6, )
CAATALIPDIQNL

SEQ ID NO: 611522 - protein, 16 aa, Homo sapiens
  CDR3 for beta chain variable domain of TCR clone 305761 (TRBV24-1, TRBJ2-3)
CATSDPGTGATDTQYF

SEQ ID NO: 611523 - protein, 13 aa, Homo sapiens
  CDR3 for alpha chain variable domain of TCR clone 305762 (TRAV20, TRAJ20)
CAVRWVRDYKLSF

SEQ ID NO: 611524 - protein, 14 aa, Homo sapiens
  CDR3 for beta chain variable domain of TCR clone 305762 (TRBV4-1, TRBJ1-1)
CASSRSGQSFEAVF

SEQ ID NO: 611525 - protein, 16 aa, Homo sapiens
  CDR3 for alpha chain variable domain of TCR clone 305763 (TRAV30, TRAJ24)
CGTEIVDADSCGNFKF

SEQ ID NO: 611526 - protein, 13 aa, Homo sapiens
  CDR3 for beta chain variable domain of TCR clone 305763 (TRBV10-3, TRBJ2-7)
CASKLAVNYEQYF

SEQ ID NO: 611527 - protein, 15 aa, Homo sapiens
  CDR3 for alpha chain variable domain of TCR clone 305764 (TRAV26-1, TRAJ29)
CIVRVEGAGNTPLVF

SEQ ID NO: 611528 - protein, 17 aa, Homo sapiens
  CDR3 for beta chain variable domain of TCR clone 305764 (TRBV11-2, TRBJ2-1)
CASSLYPPGVEYNEQFF

SEQ ID NO: 611529 - protein, 11 aa, Homo sapiens
  CDR3 for alpha chain variable domain of TCR clone 305765 (TRAV3, TRAJ21)
WAVGNFNKFYF

SEQ ID NO: 611530 - protein, 17 aa, Homo sapiens
  CDR3 for beta chain variable domain of TCR clone 305765 (TRBV20-1, TRBJ2-1)
CSASSAGLAGSYNEQFF

SEQ ID NO: 611531 - protein, 13 aa, Homo sapiens
  CDR3 for alpha chain variable domain of TCR clone 305766 (TRAV1-2, TRAJ9)
CAALNTGGFKTIF

SEQ ID NO: 611532 - protein, 16 aa, Homo sapiens
  CDR3 for beta chain variable domain of TCR clone 305766 (TRBV10-3, TRBJ1-1)
CAISTGFPAMNTEAFF

SEQ ID NO: 611533 - protein, 13 aa, Homo sapiens
  CDR3 for alpha chain variable domain of TCR clone 305767 (TRAV3, TRAJ21)
CAVREPDFNKFYF

SEQ ID NO: 611534 - protein, 16 aa, Homo sapiens
  CDR3 for beta chain variable domain of TCR clone 305767 (TRBV12-4, TRBJ2-5)
CASSFFVRGRQETQYF

SEQ ID NO: 611535 - protein, 15 aa, Homo sapiens
  CDR3 for alpha chain variable domain of TCR clone 305768 (TRAV13-2, TRAJ10)
CAENKIGGGGNKLTF

SEQ ID NO: 611536 - protein, 14 aa, Homo sapiens
  CDR3 for beta chain variable domain of TCR clone 305768 (TRBV19, TRBJ2-1)
CASPTFVLSGEQFF

SEQ ID NO: 611537 - protein, 13 aa, Homo sapiens
  CDR3 for alpha chain variable domain of TCR clone 305769 (TRAV3, TRAJ30)
CAVRDRGDDKIIF

SEQ ID NO: 611538 - protein, 14 aa, Homo sapiens
  CDR3 for beta chain variable domain of TCR clone 305769 (TRBV6-1, TRBJ2-2)
CASVEHIESGELFF

SEQ ID NO: 611539 - protein, 14 aa, Homo sapiens
  CDR3 for alpha chain variable domain of TCR clone 305770 (TRAV8-2, TRAJ4)
CVVSHLGGYNKLIF

SEQ ID NO: 611540 - protein, 13 aa, Homo sapiens
  CDR3 for beta chain variable domain of TCR clone 305770 (TRBV7-3, TRBJ1-1)
CASSQDWGAEAFF

SEQ ID NO: 611541 - protein, 18 aa, Homo sapiens
  CDR3 for alpha chain variable domain of TCR clone 305771 (TRAV13-1, TRAJ52)
CAAKNPNAGGTSYGKLTF

SEQ ID NO: 611542 - protein, 16 aa, Homo sapiens
  CDR3 for beta chain variable domain of TCR clone 305771 (TRBV4-2, TRBJ1-1)
CASSRAGFGMNTEAFF

SEQ ID NO: 611543 - protein, 19 aa, Homo sapiens
  CDR3 for alpha chain variable domain of TCR clone 305772 (TRAV26-1, TRAJ28)
CIVRVAHAYSGAGSYQLTF

SEQ ID NO: 611544 - protein, 12 aa, Homo sapiens
  CDR3 for beta chain variable domain of TCR clone 305772 (TRBV28, TRBJ2-3)
CVSSLYRDTQYF

SEQ ID NO: 611545 - protein, 13 aa, Homo sapiens
  CDR3 for alpha chain variable domain of TCR clone 305773 (TRAV35, TRAJ42)
CAGFPGSQGNLIF

SEQ ID NO: 611546 - protein, 14 aa, Homo sapiens
  CDR3 for beta chain variable domain of TCR clone 305773 (TRBV19, TRBJ2-1)
CASPTFVLSGKQFF

SEQ ID NO: 611547 - protein, 13 aa, Homo sapiens
  CDR3 for alpha chain variable domain of TCR clone 305774 (TRAV1-2, TRAJ33)
CAVSEDSNYQLIC

SEQ ID NO: 611548 - protein, 16 aa, Homo sapiens
  CDR3 for beta chain variable domain of TCR clone 305774 (TRBV4-2, TRBJ2-7)
RASSQDGVERGYEQYF

SEQ ID NO: 611549 - protein, 14 aa, Homo sapiens
  CDR3 for alpha chain variable domain of TCR clone 305775 (TRAV1-2, TRAJ16)
CAVNLFSDGQKLLF

SEQ ID NO: 611550 - protein, 12 aa, Homo sapiens
  CDR3 for beta chain variable domain of TCR clone 305775 (TRBV19, TRBJ1-5)
CASSIAQQPQHF

SEQ ID NO: 611551 - protein, 14 aa, Homo sapiens
  CDR3 for alpha chain variable domain of TCR clone 305776 (TRAV1-2, TRAJ16)
CAVNRFSDGQKLVF

SEQ ID NO: 611552 - protein, 14 aa, Homo sapiens
  CDR3 for beta chain variable domain of TCR clone 305776 (TRBV19, TRBJ2-1)
CASPTFVLSGEQFF

SEQ ID NO: 611553 - protein, 17 aa, Homo sapiens
  CDR3 for alpha chain variable domain of TCR clone 305777 (TRAV3, TRAJ42)
CAVRDRDYGGSQGNLIF

SEQ ID NO: 611554 - protein, 13 aa, Homo sapiens
  CDR3 for beta chain variable domain of TCR clone 305777 (TRBV7-2, TRBJ2-4)
CASSREHANIQYF

SEQ ID NO: 611555 - protein, 13 aa, Homo sapiens
  CDR3 for alpha chain variable domain of TCR clone 305778 (TRAV1-1, TRAJ33)
CAVRSDSNYQLIW

SEQ ID NO: 611556 - protein, 16 aa, Homo sapiens
  CDR3 for beta chain variable domain of TCR clone 305778 (TRBV6-1, TRBJ2-2)
CASSAFRGGDTGELFF

SEQ ID NO: 611557 - protein, 15 aa, Homo sapiens
  CDR3 for alpha chain variable domain of TCR clone 305779 (TRAV17, TRAJ42)
CATDHYGGSQGNLIF

SEQ ID NO: 611558 - protein, 14 aa, Homo sapiens
  CDR3 for beta chain variable domain of TCR clone 305779 (TRBV7-2, TRBJ1-1)
CASSFLTGTTEAFF

SEQ ID NO: 611559 - protein, 11 aa, Homo sapiens
  CDR3 for alpha chain variable domain of TCR clone 305780 (TRAV16, TRAJ31)
CALFNNARLMF

SEQ ID NO: 611560 - protein, 13 aa, Homo sapiens
  CDR3 for beta chain variable domain of TCR clone 305780 (TRBV18, TRBJ2-3)
CASSIGRTDTQYF

SEQ ID NO: 611561 - protein, 14 aa, Homo sapiens
  CDR3 for alpha chain variable domain of TCR clone 305781 (TRAV30, TRAJ50)
CGTALKTSYDKVIF

SEQ ID NO: 611562 - protein, 13 aa, Homo sapiens
  CDR3 for beta chain variable domain of TCR clone 305781 (TRBV12-4, TRBJ1-2)
CASSLRQGKGYTF

SEQ ID NO: 611563 - protein, 13 aa, Homo sapiens
  CDR3 for alpha chain variable domain of TCR clone 305782 (TRAV17, TRAJ9)
CATDYTGGFKTIF

SEQ ID NO: 611564 - protein, 15 aa, Homo sapiens
  CDR3 for beta chain variable domain of TCR clone 305782 (TRBV7-2, TRBJ2-1)
CASSLASGRVNERFF

SEQ ID NO: 611565 - protein, 17 aa, Homo sapiens
  CDR3 for alpha chain variable domain of TCR clone 305783 (TRAV13-1, TRAJ52)
CAAGRNDGGTSYGKLTF

SEQ ID NO: 611566 - protein, 15 aa, Homo sapiens
  CDR3 for beta chain variable domain of TCR clone 305783 (TRBV6-3, TRBJ2-7)
CASSSPGTVFYEQYF

SEQ ID NO: 611567 - protein, 14 aa, Homo sapiens
  CDR3 for alpha chain variable domain of TCR clone 305784 (TRAV8-2, TRAJ40)
CVVSDNSGTYKYIF

SEQ ID NO: 611568 - protein, 13 aa, Homo sapiens
  CDR3 for beta chain variable domain of TCR clone 305784 (TRBV2, TRBJ2-7)
CASSVGGSGEQYF

SEQ ID NO: 611569 - protein, 14 aa, Homo sapiens
  CDR3 for alpha chain variable domain of TCR clone 305785 (TRAV13-2, TRAJ43)
CAEIPTYNNSDMRF

SEQ ID NO: 611570 - protein, 15 aa, Homo sapiens
  CDR3 for beta chain variable domain of TCR clone 305785 (TRBV7-9, TRBJ2-2)
CASGPLDTFPGELFF

SEQ ID NO: 611571 - protein, 13 aa, Homo sapiens
  CDR3 for alpha chain variable domain of TCR clone 305786 (TRAV8-6, TRAJ54)
CAVEAQGAQKLVF

SEQ ID NO: 611572 - protein, 15 aa, Homo sapiens
  CDR3 for beta chain variable domain of TCR clone 305786 (TRBV9, TRBJ1-6)
CASSVAGTGDSPLHF

SEQ ID NO: 611573 - protein, 13 aa, Homo sapiens
  CDR3 for alpha chain variable domain of TCR clone 305787 (TRAV20, TRAJ37)
CAGCSSNTGKLIF

SEQ ID NO: 611574 - protein, 16 aa, Homo sapiens
  CDR3 for beta chain variable domain of TCR clone 305787 (TRBV3-1, TRBJ2-5)
CASSPGQFNGFGTQYF

SEQ ID NO: 611575 - protein, 14 aa, Homo sapiens
  CDR3 for alpha chain variable domain of TCR clone 305788 (TRAV9-2, TRAJ12)
CALRGMDSSYKLIF

SEQ ID NO: 611576 - protein, 16 aa, Homo sapiens
  CDR3 for beta chain variable domain of TCR clone 305788 (TRBV27, TRBJ2-2)
CASSFRGLVRTGELFF

SEQ ID NO: 611577 - protein, 12 aa, Homo sapiens
  CDR3 for alpha chain variable domain of TCR clone 305789 (TRAV21, TRAJ13)
PGPSGGYQKVTF

SEQ ID NO: 611578 - protein, 15 aa, Homo sapiens
  CDR3 for beta chain variable domain of TCR clone 305789 (TRBV7-9, TRBJ1-6)
YASSSPGRGNSPLHF

SEQ ID NO: 611579 - protein, 14 aa, Homo sapiens
  CDR3 for alpha chain variable domain of TCR clone 305790 (TRAV9-2, TRAJ39)
CALDIYNAGNMLTF

SEQ ID NO: 611580 - protein, 14 aa, Homo sapiens
  CDR3 for beta chain variable domain of TCR clone 305790 (TRBV6-1, TRBJ1-3)
CASVQGGGGNTIYF

SEQ ID NO: 611581 - protein, 13 aa, Homo sapiens
  CDR3 for alpha chain variable domain of TCR clone 305791 (TRAV8-3, TRAJ4)
WVFYFGGYHKLIF

SEQ ID NO: 611582 - protein, 14 aa, Homo sapiens
  CDR3 for beta chain variable domain of TCR clone 305791 (TRBV7-9, TRBJ2-3)
CASSLEDGTDTQYF

SEQ ID NO: 611583 - protein, 12 aa, Homo sapiens
  CDR3 for alpha chain variable domain of TCR clone 305792 (TRAV26-1, TRAJ17)
CIVRSAGNKLTF

SEQ ID NO: 611584 - protein, 15 aa, Homo sapiens
  CDR3 for beta chain variable domain of TCR clone 305792 (TRBV28, TRBJ2-1)
CASSGLAEVDNEQFF

SEQ ID NO: 611585 - protein, 12 aa, Homo sapiens
  CDR3 for alpha chain variable domain of TCR clone 305793 (TRAV12-3, TRAJ39)
CAMTQAGNMLTF

SEQ ID NO: 611586 - protein, 13 aa, Homo sapiens
  CDR3 for beta chain variable domain of TCR clone 305793 (TRBV20-1, TRBJ1-1)
CSAPGGGNTEAFF

SEQ ID NO: 611587 - protein, 17 aa, Homo sapiens
  CDR3 for alpha chain variable domain of TCR clone 305794 (TRAV3, TRAJ6)
CAVRDGPRAGGSYIPKF

SEQ ID NO: 611588 - protein, 15 aa, Homo sapiens
  CDR3 for beta chain variable domain of TCR clone 305794 (TRBV7-9, TRBJ1-6)
CASSSPGRGNSPLHF

SEQ ID NO: 611589 - protein, 11 aa, Homo sapiens
  CDR3 for alpha chain variable domain of TCR clone 305795 (TRAV39, TRAJ49)
CAVDISTHFYF

SEQ ID NO: 611590 - protein, 11 aa, Homo sapiens
  CDR3 for beta chain variable domain of TCR clone 305795 (TRBV7-8, TRBJ2-7)
CASSLSLEQYF

SEQ ID NO: 611591 - protein, 11 aa, Homo sapiens
  CDR3 for alpha chain variable domain of TCR clone 305796 (TRAV12-1, TRAJ30)
CVVNGQDKIIF

SEQ ID NO: 611592 - protein, 13 aa, Homo sapiens
  CDR3 for beta chain variable domain of TCR clone 305796 (TRBV25-1, TRBJ1-2)
CASSEAGASGYTF

SEQ ID NO: 611593 - protein, 14 aa, Homo sapiens
  CDR3 for alpha chain variable domain of TCR clone 305797 (TRAV12-3, TRAJ42)
CAMNYGGSPGNLIF

SEQ ID NO: 611594 - protein, 12 aa, Homo sapiens
  CDR3 for beta chain variable domain of TCR clone 305797 (TRBV7-9, TRBJ2-7)
CASSLEGYEQYF

SEQ ID NO: 611595 - protein, 10 aa, Homo sapiens
  CDR3 for alpha chain variable domain of TCR clone 305798 (TRAV8-6, TRAJ42)
GGGSQGNLIF

SEQ ID NO: 611596 - protein, 13 aa, Homo sapiens
  CDR3 for beta chain variable domain of TCR clone 305798 (TRBV7-3, TRBJ1-1)
CASSQDWGADAFF

SEQ ID NO: 611597 - protein, 15 aa, Homo sapiens
  CDR3 for alpha chain variable domain of TCR clone 305799 (TRAV17, TRAJ23)
CATDAEDNQGGKLIF

SEQ ID NO: 611598 - protein, 12 aa, Homo sapiens
  CDR3 for beta chain variable domain of TCR clone 305799 (TRBV2, TRBJ2-1)
CAKREGYNEKFF

SEQ ID NO: 611599 - protein, 15 aa, Homo sapiens
  CDR3 for alpha chain variable domain of TCR clone 305800 (TRAV3, TRAJ5)
CAVRDLDTGRRALTF

SEQ ID NO: 611600 - protein, 14 aa, Homo sapiens
  CDR3 for beta chain variable domain of TCR clone 305800 (TRBV10-3, TRBJ2-2)
CAISEVSHSGELFF

SEQ ID NO: 611601 - protein, 14 aa, Homo sapiens
  CDR3 for alpha chain variable domain of TCR clone 305801 (TRAV16, TRAJ33)
CALSTMDSNYQLIW

SEQ ID NO: 611602 - protein, 15 aa, Homo sapiens
  CDR3 for beta chain variable domain of TCR clone 305801 (TRBV28, TRBJ2-7)
CASSLEAYPIYEQYF

SEQ ID NO: 611603 - protein, 12 aa, Homo sapiens
  CDR3 for alpha chain variable domain of TCR clone 305802 (TRAV13-1, TRAJ11)
CAGPSGYSTLTF

SEQ ID NO: 611604 - protein, 15 aa, Homo sapiens
  CDR3 for beta chain variable domain of TCR clone 305802 (TRBV15, TRBJ1-4)
CATSRDMGSYEKLFF

SEQ ID NO: 611605 - protein, 14 aa, Homo sapiens
  CDR3 for alpha chain variable domain of TCR clone 305803 (TRAV38-1, TRAJ29)
CAFITPSGNTPLVF

SEQ ID NO: 611606 - protein, 15 aa, Homo sapiens
  CDR3 for beta chain variable domain of TCR clone 305803 (TRBV11-3, TRBJ2-1)
CASSLAGQTYNEQFF

SEQ ID NO: 611607 - protein, 16 aa, Homo sapiens
  CDR3 for alpha chain variable domain of TCR clone 305804 (TRAV13-1, TRAJ48)
CAASIFGNFGNEELTF

SEQ ID NO: 611608 - protein, 14 aa, Homo sapiens
  CDR3 for beta chain variable domain of TCR clone 305804 (TRBV12-4, TRBJ1-1)
CASSREGLVTEAFF

SEQ ID NO: 611609 - protein, 14 aa, Homo sapiens
  CDR3 for alpha chain variable domain of TCR clone 305805 (TRAV12-2, TRAJ13)
CAVKKTGGNQKVTF

SEQ ID NO: 611610 - protein, 15 aa, Homo sapiens
  CDR3 for beta chain variable domain of TCR clone 305805 (TRBV5-1, TRBJ2-5)
CASSLGLAEQETQYF

SEQ ID NO: 611611 - protein, 14 aa, Homo sapiens
  CDR3 for alpha chain variable domain of TCR clone 305806 (TRAV17, TRAJ35)
CATDRPGFGNVLHC

SEQ ID NO: 611612 - protein, 15 aa, Homo sapiens
  CDR3 for beta chain variable domain of TCR clone 305806 (TRBV28, TRBJ2-5)
CASRPGRVIQETQYF

SEQ ID NO: 611613 - protein, 11 aa, Homo sapiens
  CDR3 for alpha chain variable domain of TCR clone 305807 (TRAV12-1, TRAJ43)
CVEYDNNDTRF

SEQ ID NO: 611614 - protein, 15 aa, Homo sapiens
  CDR3 for beta chain variable domain of TCR clone 305807 (TRBV18, TRBJ2-5)
CASSPRASEAETQYF

SEQ ID NO: 611615 - protein, 14 aa, Homo sapiens
  CDR3 for alpha chain variable domain of TCR clone 305808 (TRAV1-2, TRAJ16)
CAVNRFSDGQKLLF

SEQ ID NO: 611616 - protein, 13 aa, Homo sapiens
  CDR3 for beta chain variable domain of TCR clone 305808 (TRBV7-9, TRBJ2-1)
CASSLVWAGEQFF

SEQ ID NO: 611617 - protein, 14 aa, Homo sapiens
  CDR3 for alpha chain variable domain of TCR clone 305809 (TRAV38-1, TRAJ40)
CALRPTSGTYKYTF

SEQ ID NO: 611618 - protein, 14 aa, Homo sapiens
  CDR3 for beta chain variable domain of TCR clone 305809 (TRBV25-1, TRBJ1-1)
CASTRLGGNTEAFF

SEQ ID NO: 611619 - protein, 14 aa, Homo sapiens
  CDR3 for alpha chain variable domain of TCR clone 305810 (TRAV1-1, TRAJ27)
CAVIYNTNAVKSTF

SEQ ID NO: 611620 - protein, 18 aa, Homo sapiens
  CDR3 for beta chain variable domain of TCR clone 305810 (TRBV7-3, TRBJ2-1)
CASSLTLASGRAMVSSSS

SEQ ID NO: 611621 - protein, 14 aa, Homo sapiens
  CDR3 for alpha chain variable domain of TCR clone 305811 (TRAV35, TRAJ50)
CAGHRKTSYAKVIF

SEQ ID NO: 611622 - protein, 17 aa, Homo sapiens
  CDR3 for beta chain variable domain of TCR clone 305811 (TRBV7-8, TRBJ2-6)
CASSAGTGGAGANVLTF

SEQ ID NO: 611623 - protein, 17 aa, Homo sapiens
  CDR3 for alpha chain variable domain of TCR clone 305812 (TRAV13-1, TRAJ28)
CAASPPYSWAGSYQLTF

SEQ ID NO: 611624 - protein, 12 aa, Homo sapiens
  CDR3 for beta chain variable domain of TCR clone 305812 (TRBV11-2, TRBJ2-2)
CASSLPTGELFF

SEQ ID NO: 611625 - protein, 15 aa, Homo sapiens
  CDR3 for alpha chain variable domain of TCR clone 305813 (TRAV12-3, TRAJ6)
CAMSATTGGSYIPTS

SEQ ID NO: 611626 - protein, 13 aa, Homo sapiens
  CDR3 for beta chain variable domain of TCR clone 305813 (TRBV7-9, TRBJ1-2)
CASSLKQNYGYTF

SEQ ID NO: 611627 - protein, 16 aa, Homo sapiens
  CDR3 for alpha chain variable domain of TCR clone 305814 (TRAV8-3, TRAJ52)
CAVQPAGGTSYGKLPF

SEQ ID NO: 611628 - protein, 15 aa, Homo sapiens
  CDR3 for beta chain variable domain of TCR clone 305814 (TRBV11-2, TRBJ2-7)
CASSLAGGVATEQYF

SEQ ID NO: 611629 - protein, 13 aa, Homo sapiens
  CDR3 for alpha chain variable domain of TCR clone 305815 (TRAV8-3, TRAJ43)
CAVGPDNNNDKRF

SEQ ID NO: 611630 - protein, 13 aa, Homo sapiens
  CDR3 for beta chain variable domain of TCR clone 305815 (TRBV29-1, TRBJ2-1)
CSVEGGRVNEQFF

SEQ ID NO: 611631 - protein, 13 aa, Homo sapiens
  CDR3 for alpha chain variable domain of TCR clone 305816 (TRAV2, TRAJ40)
CAVVTSGTYKYIF

SEQ ID NO: 611632 - protein, 15 aa, Homo sapiens
  CDR3 for beta chain variable domain of TCR clone 305816 (TRBV9, TRBJ1-6)
CASSVAGTGDSTLHF

SEQ ID NO: 611633 - protein, 15 aa, Homo sapiens
  CDR3 for alpha chain variable domain of TCR clone 305817 (TRAV12-1, TRAJ45)
FVVLSGGGGADGLTF

SEQ ID NO: 611634 - protein, 14 aa, Homo sapiens
  CDR3 for beta chain variable domain of TCR clone 305817 (TRBV11-2, TRBJ2-5)
CASSRTGGNETQYF

SEQ ID NO: 611635 - protein, 16 aa, Homo sapiens
  CDR3 for alpha chain variable domain of TCR clone 305818 (TRAV3, TRAJ21)
CAVRDIERGDFNKFYF

SEQ ID NO: 611636 - protein, 16 aa, Homo sapiens
  CDR3 for beta chain variable domain of TCR clone 305818 (TRBV12-4, TRBJ1-5)
CASSRPVGGSNQPQHF

SEQ ID NO: 611637 - protein, 13 aa, Homo sapiens
  CDR3 for alpha chain variable domain of TCR clone 305819 (TRAV21, TRAJ27)
CAARPGNAGKSTF

SEQ ID NO: 611638 - protein, 15 aa, Homo sapiens
  CDR3 for beta chain variable domain of TCR clone 305819 (TRBV7-2, TRBJ2-3)
RASSSTGLETDTQYF

SEQ ID NO: 611639 - protein, 18 aa, Homo sapiens
  CDR3 for alpha chain variable domain of TCR clone 305820 (TRAV21, TRAJ52)
CAVRPSPAGGTSYGDLTF

SEQ ID NO: 611640 - protein, 17 aa, Homo sapiens
  CDR3 for beta chain variable domain of TCR clone 305820 (TRBV13, TRBJ2-3)
CASSLSRVAGGRNTQYF

SEQ ID NO: 611641 - protein, 14 aa, Homo sapiens
  CDR3 for alpha chain variable domain of TCR clone 305821 (TRAV12-2, TRAJ40)
CAGKIPSGTYKYIF

SEQ ID NO: 611642 - protein, 20 aa, Homo sapiens
  CDR3 for beta chain variable domain of TCR clone 305821 (TRBV28, TRBJ2-1)
CAITPIGRSPGLAGGNEQFF

SEQ ID NO: 611643 - protein, 14 aa, Homo sapiens
  CDR3 for alpha chain variable domain of TCR clone 305822 (TRAV8-1, TRAJ34)
CALPRGTTSSSLGL

SEQ ID NO: 611644 - protein, 13 aa, Homo sapiens
  CDR3 for beta chain variable domain of TCR clone 305822 (TRBV7-3, TRBJ1-1)
CASSQDWGAEAFF

SEQ ID NO: 611645 - protein, 14 aa, Homo sapiens
  CDR3 for alpha chain variable domain of TCR clone 305823 (TRAV12-2, TRAJ4)
CAVLIGGGYNKLIF

SEQ ID NO: 611646 - protein, 12 aa, Homo sapiens
  CDR3 for beta chain variable domain of TCR clone 305823 (TRBV7-9, TRBJ2-7)
CATRTDAYEQYF

SEQ ID NO: 611647 - protein, 13 aa, Homo sapiens
  CDR3 for alpha chain variable domain of TCR clone 305824 (TRAV12-1, TRAJ33)
CGDAPDSNYQLIW

SEQ ID NO: 611648 - protein, 12 aa, Homo sapiens
  CDR3 for beta chain variable domain of TCR clone 305824 (TRBV11-2, TRBJ2-2)
CASSLGGVELFF

SEQ ID NO: 611649 - protein, 13 aa, Homo sapiens
  CDR3 for alpha chain variable domain of TCR clone 305825 (TRAV16, TRAJ10)
CSPAREEETNAPL

SEQ ID NO: 611650 - protein, 15 aa, Homo sapiens
  CDR3 for beta chain variable domain of TCR clone 305825 (TRBV6-3, TRBJ2-7)
CASSSPGTVFYEQYF

SEQ ID NO: 611651 - protein, 12 aa, Homo sapiens
  CDR3 for alpha chain variable domain of TCR clone 305826 (TRAV13-1, TRAJ49)
CAPSPMGNQFYF

SEQ ID NO: 611652 - protein, 13 aa, Homo sapiens
  CDR3 for beta chain variable domain of TCR clone 305826 (TRBV20-1, TRBJ2-2)
CSASAAGTGELFF

SEQ ID NO: 611653 - protein, 12 aa, Homo sapiens
  CDR3 for alpha chain variable domain of TCR clone 305827 (TRAV13-1, TRAJ9)
CASHTGGFKTIF

SEQ ID NO: 611654 - protein, 14 aa, Homo sapiens
  CDR3 for beta chain variable domain of TCR clone 305827 (TRBV20-1, TRBJ1-3)
CSASPTGAGNTIYF

SEQ ID NO: 611655 - protein, 13 aa, Homo sapiens
  CDR3 for alpha chain variable domain of TCR clone 305828 (TRAV8-4, TRAJ44)
CAVCNGTASKLTF

SEQ ID NO: 611656 - protein, 15 aa, Homo sapiens
  CDR3 for beta chain variable domain of TCR clone 305828 (TRBV14, TRBJ2-1)
CASSQMGLHFNEQFF

SEQ ID NO: 611657 - protein, 15 aa, Homo sapiens
  CDR3 for alpha chain variable domain of TCR clone 305829 (TRAV17, TRAJ57)
CATGPSQGGSEKLVF

SEQ ID NO: 611658 - protein, 17 aa, Homo sapiens
  CDR3 for beta chain variable domain of TCR clone 305829 (TRBV7-3, TRBJ2-3)
CASSPRGQGYGTDTQYF

SEQ ID NO: 611659 - protein, 14 aa, Homo sapiens
  CDR3 for alpha chain variable domain of TCR clone 305830 (TRAV20, TRAJ56)
CAVQFGGANSKLTF

SEQ ID NO: 611660 - protein, 16 aa, Homo sapiens
  CDR3 for beta chain variable domain of TCR clone 305830 (TRBV18, TRBJ1-4)
CASSPLVGDRAEKLFF

SEQ ID NO: 611661 - protein, 13 aa, Homo sapiens
  CDR3 for alpha chain variable domain of TCR clone 305831 (TRAV13-2, TRAJ54)
CAENYQGAQKLVF

SEQ ID NO: 611662 - protein, 14 aa, Homo sapiens
  CDR3 for beta chain variable domain of TCR clone 305831 (TRBV7-3, TRBJ2-1)
CASSLAGGTNEQFF

SEQ ID NO: 611663 - protein, 14 aa, Homo sapiens
  CDR3 for alpha chain variable domain of TCR clone 305832 (TRAV12-2, TRAJ13)
CAVKKTGGYQKVTF

SEQ ID NO: 611664 - protein, 14 aa, Homo sapiens
  CDR3 for beta chain variable domain of TCR clone 305832 (TRBV25-1, TRBJ1-1)
CASTHLGGNTEAVF

SEQ ID NO: 611665 - protein, 18 aa, Homo sapiens
  CDR3 for alpha chain variable domain of TCR clone 305833 (TRAV26-2, TRAJ45)
CILRLWGYSGGGADGLTF

SEQ ID NO: 611666 - protein, 17 aa, Homo sapiens
  CDR3 for beta chain variable domain of TCR clone 305833 (TRBV28, TRBJ2-3)
CARSPTPAGGRVDTQYF

SEQ ID NO: 611667 - protein, 16 aa, Homo sapiens
  CDR3 for alpha chain variable domain of TCR clone 305834 (TRAV12-3, TRAJ53)
CAMSPGMGGSNYKLTF

SEQ ID NO: 611668 - protein, 11 aa, Homo sapiens
  CDR3 for beta chain variable domain of TCR clone 305834 (TRBV29-1, TRBJ2-5)
CSEDRTGTQYF

SEQ ID NO: 611669 - protein, 14 aa, Homo sapiens
  CDR3 for alpha chain variable domain of TCR clone 305835 (TRAV12-3, TRAJ10)
SHLPLTGGGNKLTF

SEQ ID NO: 611670 - protein, 15 aa, Homo sapiens
  CDR3 for beta chain variable domain of TCR clone 305835 (TRBV4-3, TRBJ2-1)
CASSQESAIYNEQFF

SEQ ID NO: 611671 - protein, 16 aa, Homo sapiens
  CDR3 for alpha chain variable domain of TCR clone 305836 (TRAV21, TRAJ37)
CAVRPRCSSNTGKLIF

SEQ ID NO: 611672 - protein, 13 aa, Homo sapiens
  CDR3 for beta chain variable domain of TCR clone 305836 (TRBV7-9, TRBJ2-5)
CASLSPGQETQYF

SEQ ID NO: 611673 - protein, 12 aa, Homo sapiens
  CDR3 for alpha chain variable domain of TCR clone 305837 (TRAV23/DV6, TRAJ30)
CAASKGDDKIIF

SEQ ID NO: 611674 - protein, 18 aa, Homo sapiens
  CDR3 for beta chain variable domain of TCR clone 305837 (TRBV10-3, TRBJ2-3)
CAISESRVGLMRGDTQYF

SEQ ID NO: 611675 - protein, 11 aa, Homo sapiens
  CDR3 for alpha chain variable domain of TCR clone 305838 (TRAV3, TRAJ17)
CAEAAGNKLTF

SEQ ID NO: 611676 - protein, 13 aa, Homo sapiens
  CDR3 for beta chain variable domain of TCR clone 305838 (TRBV12-4, TRBJ1-4)
CASAMGHNEKLFF

SEQ ID NO: 611677 - protein, 16 aa, Homo sapiens
  CDR3 for alpha chain variable domain of TCR clone 305839 (TRAV23/DV6, TRAJ9)
CAASIGGSTGGFKTIF

SEQ ID NO: 611678 - protein, 13 aa, Homo sapiens
  CDR3 for beta chain variable domain of TCR clone 305839 (TRBV10-3, TRBJ2-7)
CASKLAVNYEQYF

SEQ ID NO: 611679 - protein, 14 aa, Homo sapiens
  CDR3 for alpha chain variable domain of TCR clone 305840 (TRAV13-1, TRAJ44)
CAAKATGTASTLTF

SEQ ID NO: 611680 - protein, 15 aa, Homo sapiens
  CDR3 for beta chain variable domain of TCR clone 305840 (TRBV9, TRBJ2-1)
CASSLAGSSYNEQFF

SEQ ID NO: 611681 - protein, 12 aa, Homo sapiens
  CDR3 for alpha chain variable domain of TCR clone 305841 (TRAV25, TRAJ11)
CAGYSGYSTLTF

SEQ ID NO: 611682 - protein, 14 aa, Homo sapiens
  CDR3 for beta chain variable domain of TCR clone 305841 (TRBV9, TRBJ2-1)
CASSTRKGYNEQFF

SEQ ID NO: 611683 - protein, 18 aa, Homo sapiens
  CDR3 for alpha chain variable domain of TCR clone 305842 (TRAV13-1, TRAJ52)
CAAKNPNAGGTSYGKLTF

SEQ ID NO: 611684 - protein, 18 aa, Homo sapiens
  CDR3 for beta chain variable domain of TCR clone 305842 (TRBV12-4, TRBJ2-4)
CASSSTGAVDVAKNIQYF

SEQ ID NO: 611685 - protein, 16 aa, Homo sapiens
  CDR3 for alpha chain variable domain of TCR clone 305843 (TRAV30, TRAJ24)
CGTEIVDADSWGKFKF

SEQ ID NO: 611686 - protein, 15 aa, Homo sapiens
  CDR3 for beta chain variable domain of TCR clone 305843 (TRBV11-3, TRBJ2-3)
CASLKDGREGDTQYF

SEQ ID NO: 611687 - protein, 14 aa, Homo sapiens
  CDR3 for alpha chain variable domain of TCR clone 305844 (TRAV9-2, TRAJ39)
CALYIYNAGNMLTF

SEQ ID NO: 611688 - protein, 16 aa, Homo sapiens
  CDR3 for beta chain variable domain of TCR clone 305844 (TRBV7-8, TRBJ2-3)
CASSLAVSRAMDTQYF

SEQ ID NO: 611689 - protein, 13 aa, Homo sapiens
  CDR3 for alpha chain variable domain of TCR clone 305845 (TRAV13-2, TRAJ40)
CAENLHYLRNLQI

SEQ ID NO: 611690 - protein, 15 aa, Homo sapiens
  CDR3 for beta chain variable domain of TCR clone 305845 (TRBV11-3, TRBJ2-3)
CASLKDGREGDTQYF

SEQ ID NO: 611691 - protein, 13 aa, Homo sapiens
  CDR3 for alpha chain variable domain of TCR clone 305846 (TRAV21, TRAJ27)
CAARPGNAGKSTF

SEQ ID NO: 611692 - protein, 13 aa, Homo sapiens
  CDR3 for beta chain variable domain of TCR clone 305846 (TRBV13, TRBJ2-1)
CASVLGGRGEQFF

SEQ ID NO: 611693 - protein, 15 aa, Homo sapiens
  CDR3 for alpha chain variable domain of TCR clone 305847 (TRAV2, TRAJ28)
CAVPYSGAGSYQLTF

SEQ ID NO: 611694 - protein, 15 aa, Homo sapiens
  CDR3 for beta chain variable domain of TCR clone 305847 (TRBV11-2, TRBJ2-1)
CASSRNRGLMYEQFF

SEQ ID NO: 611695 - protein, 14 aa, Homo sapiens
  CDR3 for alpha chain variable domain of TCR clone 305848 (TRAV17, TRAJ6)
CATDASGGSYIPTF

SEQ ID NO: 611696 - protein, 19 aa, Homo sapiens
  CDR3 for beta chain variable domain of TCR clone 305848 (TRBV4-3, TRBJ2-7)
CASSQEFIGWQMTPYEQYF

SEQ ID NO: 611697 - protein, 14 aa, Homo sapiens
  CDR3 for alpha chain variable domain of TCR clone 305849 (TRAV12-2, TRAJ3)
CAVNSYSSASKIIF

SEQ ID NO: 611698 - protein, 13 aa, Homo sapiens
  CDR3 for beta chain variable domain of TCR clone 305849 (TRBV28, TRBJ2-1)
CASTLLSVDEQFF

SEQ ID NO: 611699 - protein, 14 aa, Homo sapiens
  CDR3 for alpha chain variable domain of TCR clone 305850 (TRAV12-3, TRAJ42)
WAMNDGGSQGNLIF

SEQ ID NO: 611700 - protein, 15 aa, Homo sapiens
  CDR3 for beta chain variable domain of TCR clone 305850 (TRBV5-7, TRBJ1-5)
CASSYGKLWDQPQHF

SEQ ID NO: 611701 - protein, 11 aa, Homo sapiens
  CDR3 for alpha chain variable domain of TCR clone 305851 (TRAV2, TRAJ33)
CAVDSNYQLIW

SEQ ID NO: 611702 - protein, 12 aa, Homo sapiens
  CDR3 for beta chain variable domain of TCR clone 305851 (TRBV5-1, TRBJ1-2)
CASSQDTYGYTF

SEQ ID NO: 611703 - protein, 15 aa, Homo sapiens
  CDR3 for alpha chain variable domain of TCR clone 305852 (TRAV4, TRAJ12)
CLVGDLMDSSYKLIF

SEQ ID NO: 611704 - protein, 14 aa, Homo sapiens
  CDR3 for beta chain variable domain of TCR clone 305852 (TRBV7-2, TRBJ1-1)
CASSNRQGRTEDFF

SEQ ID NO: 611705 - protein, 13 aa, Homo sapiens
  CDR3 for alpha chain variable domain of TCR clone 305853 (TRAV13-2, TRAJ48)
CAEMDFGNEKLTF

SEQ ID NO: 611706 - protein, 14 aa, Homo sapiens
  CDR3 for beta chain variable domain of TCR clone 305853 (TRBV19, TRBJ2-7)
CASSMGQGASEQYF

SEQ ID NO: 611707 - protein, 17 aa, Homo sapiens
  CDR3 for alpha chain variable domain of TCR clone 305854 (TRAV3, TRAJ6)
CAVRDGPRAGGSYIPTF

SEQ ID NO: 611708 - protein, 13 aa, Homo sapiens
  CDR3 for beta chain variable domain of TCR clone 305854 (TRBV7-8, TRBJ2-1)
CASSLVWAGEQFF

SEQ ID NO: 611709 - protein, 13 aa, Homo sapiens
  CDR3 for alpha chain variable domain of TCR clone 305855 (TRAV21, TRAJ57)
CAVTQGGSEKLVF

SEQ ID NO: 611710 - protein, 15 aa, Homo sapiens
  CDR3 for beta chain variable domain of TCR clone 305855 (TRBV7-9, TRBJ2-5)
CASSLVAGGLETQYF

SEQ ID NO: 611711 - protein, 16 aa, Homo sapiens
  CDR3 for alpha chain variable domain of TCR clone 305856 (TRAV3, TRAJ32)
CWERRNYGGATNKLIF

SEQ ID NO: 611712 - protein, 13 aa, Homo sapiens
  CDR3 for beta chain variable domain of TCR clone 305856 (TRBV2, TRBJ1-1)
CASSEGGNTEAFF

SEQ ID NO: 611713 - protein, 14 aa, Homo sapiens
  CDR3 for alpha chain variable domain of TCR clone 305857 (TRAV1-2, TRAJ33)
CAVRAPDSNYQLIW

SEQ ID NO: 611714 - protein, 15 aa, Homo sapiens
  CDR3 for beta chain variable domain of TCR clone 305857 (TRBV10-3, TRBJ2-3)
CAISLTSRGTDTQYF

SEQ ID NO: 611715 - protein, 17 aa, Homo sapiens
  CDR3 for alpha chain variable domain of TCR clone 305858 (TRAV3, TRAJ38)
CAVRDCLNAGNNRKLIW

SEQ ID NO: 611716 - protein, 18 aa, Homo sapiens
  CDR3 for beta chain variable domain of TCR clone 305858 (TRBV12-4, TRBJ2-4)
CASSRTGAVDVAKNIQYF

SEQ ID NO: 611717 - protein, 17 aa, Homo sapiens
  CDR3 for alpha chain variable domain of TCR clone 305859 (TRAV26-1, TRAJ36)
CIVRPPGHQTGANNLFF

SEQ ID NO: 611718 - protein, 15 aa, Homo sapiens
  CDR3 for beta chain variable domain of TCR clone 305859 (TRBV10-3, TRBJ2-6)
CATPAAASGANVLTF

SEQ ID NO: 611719 - protein, 12 aa, Homo sapiens
  CDR3 for alpha chain variable domain of TCR clone 305860 (TRAV13-2, TRAJ32)
RVYGGATNKLIF

SEQ ID NO: 611720 - protein, 16 aa, Homo sapiens
  CDR3 for beta chain variable domain of TCR clone 305860 (TRBV7-9, TRBJ1-2)
CASTISLDRGGYGYTF

SEQ ID NO: 611721 - protein, 14 aa, Homo sapiens
  CDR3 for alpha chain variable domain of TCR clone 305861 (TRAV4, TRAJ31)
CLVGDRDNNARLMF

SEQ ID NO: 611722 - protein, 15 aa, Homo sapiens
  CDR3 for beta chain variable domain of TCR clone 305861 (TRBV11-3, TRBJ2-1)
CASSLGDSSHNEQFF

SEQ ID NO: 611723 - protein, 16 aa, Homo sapiens
  CDR3 for alpha chain variable domain of TCR clone 305862 (TRAV21, TRAJ52)
CAVTNAGGTSYGKLTF

SEQ ID NO: 611724 - protein, 17 aa, Homo sapiens
  CDR3 for beta chain variable domain of TCR clone 305862 (TRBV28, TRBJ2-5)
CASSRQGGLAGDETQYF

SEQ ID NO: 611725 - protein, 13 aa, Homo sapiens
  CDR3 for alpha chain variable domain of TCR clone 305863 (TRAV12-1, TRAJ11)
CVVNREGYSTLTF

SEQ ID NO: 611726 - protein, 13 aa, Homo sapiens
  CDR3 for beta chain variable domain of TCR clone 305863 (TRBV6-6, TRBJ1-5)
CASRAYQDQPQHF

SEQ ID NO: 611727 - protein, 12 aa, Homo sapiens
  CDR3 for alpha chain variable domain of TCR clone 305864 (TRAV2, TRAJ34)
CAVERNTDKLIF

SEQ ID NO: 611728 - protein, 14 aa, Homo sapiens
  CDR3 for beta chain variable domain of TCR clone 305864 (TRBV7-9, TRBJ2-1)
CASSDNSGYSEQFF

SEQ ID NO: 611729 - protein, 15 aa, Homo sapiens
  CDR3 for alpha chain variable domain of TCR clone 305865 (TRAV3, TRAJ5)
CAVRDLDTGRRALTF

SEQ ID NO: 611730 - protein, 13 aa, Homo sapiens
  CDR3 for beta chain variable domain of TCR clone 305865 (TRBV7-7, TRBJ2-2)
CASSLTSAGELFF

SEQ ID NO: 611731 - protein, 13 aa, Homo sapiens
  CDR3 for alpha chain variable domain of TCR clone 305866 (TRAV3, TRAJ17)
CAVPRAAGNKLTF

SEQ ID NO: 611732 - protein, 14 aa, Homo sapiens
  CDR3 for beta chain variable domain of TCR clone 305866 (TRBV18, TRBJ2-7)
CASSPRGGAYEQYF

SEQ ID NO: 611733 - protein, 12 aa, Homo sapiens
  CDR3 for alpha chain variable domain of TCR clone 305867 (TRAV12-3, TRAJ17)
CAMTLKGNKLTF

SEQ ID NO: 611734 - protein, 16 aa, Homo sapiens
  CDR3 for beta chain variable domain of TCR clone 305867 (TRBV20-1, TRBJ1-4)
CSAPGQGLLTNEKLFF

SEQ ID NO: 611735 - protein, 16 aa, Homo sapiens
  CDR3 for alpha chain variable domain of TCR clone 305868 (TRAV13-1, TRAJ48)
CAASIFGNFGNEKLTF

SEQ ID NO: 611736 - protein, 16 aa, Homo sapiens
  CDR3 for beta chain variable domain of TCR clone 305868 (TRBV19, TRBJ2-1)
CASSMGGGSSYNEQFF

SEQ ID NO: 611737 - protein, 13 aa, Homo sapiens
  CDR3 for alpha chain variable domain of TCR clone 305869 (TRAV27, TRAJ6)
CAGGTRGSYLPTF

SEQ ID NO: 611738 - protein, 15 aa, Homo sapiens
  CDR3 for beta chain variable domain of TCR clone 305869 (TRBV11-2, TRBJ1-3)
CASSLSPLVRDTIYF

SEQ ID NO: 611739 - protein, 14 aa, Homo sapiens
  CDR3 for alpha chain variable domain of TCR clone 305870 (TRAV13-2, TRAJ17)
CAENSKAAGNKLTF

SEQ ID NO: 611740 - protein, 16 aa, Homo sapiens
  CDR3 for beta chain variable domain of TCR clone 305870 (TRBV2, TRBJ2-2)
CASSAFGDANTGELFF

SEQ ID NO: 611741 - protein, 16 aa, Homo sapiens
  CDR3 for alpha chain variable domain of TCR clone 305871 (TRAV30, TRAJ28)
CGPPPYSGAGSYQLTF

SEQ ID NO: 611742 - protein, 14 aa, Homo sapiens
  CDR3 for beta chain variable domain of TCR clone 305871 (TRBV25-1, TRBJ1-1)
CASTHLGGNTEAFF

SEQ ID NO: 611743 - protein, 16 aa, Homo sapiens
  CDR3 for alpha chain variable domain of TCR clone 305872 (TRAV38-1, TRAJ56)
CAFTKRQTGANSKLTF

SEQ ID NO: 611744 - protein, 15 aa, Homo sapiens
  CDR3 for beta chain variable domain of TCR clone 305872 (TRBV20-1, TRBJ2-7)
CSARDRVSGMDEQYF

SEQ ID NO: 611745 - protein, 14 aa, Homo sapiens
  CDR3 for alpha chain variable domain of TCR clone 305873 (TRAV16, TRAJ42)
CALSGMGSQGNLIF

SEQ ID NO: 611746 - protein, 14 aa, Homo sapiens
  CDR3 for beta chain variable domain of TCR clone 305873 (TRBV19, TRBJ2-1)
CASPTFVLSGEQFF

SEQ ID NO: 611747 - protein, 14 aa, Homo sapiens
  CDR3 for alpha chain variable domain of TCR clone 305874 (TRAV25, TRAJ35)
CARRMEGFGNVLHC

SEQ ID NO: 611748 - protein, 13 aa, Homo sapiens
  CDR3 for beta chain variable domain of TCR clone 305874 (TRBV7-2, TRBJ1-4)
CASSLAGFEKLFF

SEQ ID NO: 611749 - protein, 14 aa, Homo sapiens
  CDR3 for alpha chain variable domain of TCR clone 305875 (TRAV17, TRAJ12)
CATDEKDSSYKLIF

SEQ ID NO: 611750 - protein, 16 aa, Homo sapiens
  CDR3 for beta chain variable domain of TCR clone 305875 (TRBV11-2, TRBJ2-1)
CASSPRLAGAYNEQFF

SEQ ID NO: 611751 - protein, 16 aa, Homo sapiens
  CDR3 for alpha chain variable domain of TCR clone 305876 (TRAV4, TRAJ22)
CLVGDLYSGSARQLTF

SEQ ID NO: 611752 - protein, 12 aa, Homo sapiens
  CDR3 for beta chain variable domain of TCR clone 305876 (TRBV7-9, TRBJ2-1)
CASSPGNNEQFF

SEQ ID NO: 611753 - protein, 15 aa, Homo sapiens
  CDR3 for alpha chain variable domain of TCR clone 305877 (TRAV12-1, TRAJ44)
CVADLPTGTASKLTF

SEQ ID NO: 611754 - protein, 13 aa, Homo sapiens
  CDR3 for beta chain variable domain of TCR clone 305877 (TRBV12-4, TRBJ2-2)
CASSITGSGELFF

SEQ ID NO: 611755 - protein, 17 aa, Homo sapiens
  CDR3 for alpha chain variable domain of TCR clone 305878 (TRAV12-1, TRAJ8)
CVVNPKRVNTGFQELVF

SEQ ID NO: 611756 - protein, 14 aa, Homo sapiens
  CDR3 for beta chain variable domain of TCR clone 305878 (TRBV3-1, TRBJ2-7)
CASSRTSGKEEQYF

SEQ ID NO: 611757 - protein, 13 aa, Homo sapiens
  CDR3 for alpha chain variable domain of TCR clone 305879 (TRAV12-2, TRAJ18)
CAVRGSTLGRLYF

SEQ ID NO: 611758 - protein, 20 aa, Homo sapiens
  CDR3 for beta chain variable domain of TCR clone 305879 (TRBV7-8, TRBJ2-2)
CASSHLFPGPTIRITGELFF

SEQ ID NO: 611759 - protein, 14 aa, Homo sapiens
  CDR3 for alpha chain variable domain of TCR clone 305880 (TRAV12-2, TRAJ44)
CAVNPAGTASKLTF

SEQ ID NO: 611760 - protein, 16 aa, Homo sapiens
  CDR3 for beta chain variable domain of TCR clone 305880 (TRBV3-1, TRBJ2-5)
CASSQDWASGQETQYF

SEQ ID NO: 611761 - protein, 12 aa, Homo sapiens
  CDR3 for alpha chain variable domain of TCR clone 305881 (TRAV12-1, TRAJ34)
CVVAGDTDKLIF

SEQ ID NO: 611762 - protein, 12 aa, Homo sapiens
  CDR3 for beta chain variable domain of TCR clone 305881 (TRBV7-9, TRBJ1-1)
CASSLVRGEAFF

SEQ ID NO: 611763 - protein, 14 aa, Homo sapiens
  CDR3 for alpha chain variable domain of TCR clone 305882 (TRAV9-2, TRAJ39)
CALYIYNAGNMFTF

SEQ ID NO: 611764 - protein, 14 aa, Homo sapiens
  CDR3 for beta chain variable domain of TCR clone 305882 (TRBV20-1, TRBJ1-1)
CSAQTRIGGTEAFF

SEQ ID NO: 611765 - protein, 15 aa, Homo sapiens
  CDR3 for alpha chain variable domain of TCR clone 305883 (TRAV3, TRAJ4)
CAQNMFSGGYNKLIF

SEQ ID NO: 611766 - protein, 16 aa, Homo sapiens
  CDR3 for beta chain variable domain of TCR clone 305883 (TRBV19, TRBJ2-1)
CASSKAGPSSYNEQFF

SEQ ID NO: 611767 - protein, 11 aa, Homo sapiens
  CDR3 for alpha chain variable domain of TCR clone 305884 (TRAV1-1, TRAJ20)
CVVFNDYKLSF

SEQ ID NO: 611768 - protein, 16 aa, Homo sapiens
  CDR3 for beta chain variable domain of TCR clone 305884 (TRBV29-1, TRBJ2-2)
CSVEKTSEGNTGELFF

SEQ ID NO: 611769 - protein, 10 aa, Homo sapiens
  CDR3 for alpha chain variable domain of TCR clone 305885 (TRAV12-3, TRAJ49)
CAMNDDQFYF

SEQ ID NO: 611770 - protein, 14 aa, Homo sapiens
  CDR3 for beta chain variable domain of TCR clone 305885 (TRBV11-2, TRBJ2-3)
CASSLGGGANTQYF

SEQ ID NO: 611771 - protein, 16 aa, Homo sapiens
  CDR3 for alpha chain variable domain of TCR clone 305886 (TRAV22, TRAJ45)
CAVARGKRGGAEGLTF

SEQ ID NO: 611772 - protein, 14 aa, Homo sapiens
  CDR3 for beta chain variable domain of TCR clone 305886 (TRBV7-2, TRBJ1-1)
CASSFLTGTTEAFF

SEQ ID NO: 611773 - protein, 14 aa, Homo sapiens
  CDR3 for alpha chain variable domain of TCR clone 305887 (TRAV14/DV4, TRAJ15)
CAMRRDQAGNALIF

SEQ ID NO: 611774 - protein, 16 aa, Homo sapiens
  CDR3 for beta chain variable domain of TCR clone 305887 (TRBV12-5, TRBJ2-5)
CASGPRTSGNQETQYF

SEQ ID NO: 611775 - protein, 13 aa, Homo sapiens
  CDR3 for alpha chain variable domain of TCR clone 305888 (TRAV8-3, TRAJ43)
CAVVPYNNNDMRF

SEQ ID NO: 611776 - protein, 13 aa, Homo sapiens
  CDR3 for beta chain variable domain of TCR clone 305888 (TRBV7-8, TRBJ2-7)
CASSLTGGREQYF

SEQ ID NO: 611777 - protein, 15 aa, Homo sapiens
  CDR3 for alpha chain variable domain of TCR clone 305889 (TRAV3, TRAJ29)
CAVRAPLSGNTPLVC

SEQ ID NO: 611778 - protein, 15 aa, Homo sapiens
  CDR3 for beta chain variable domain of TCR clone 305889 (TRBV28, TRBJ1-1)
CASRIKGGLNTEAFF

SEQ ID NO: 611779 - protein, 13 aa, Homo sapiens
  CDR3 for alpha chain variable domain of TCR clone 305890 (TRAV13-2, TRAJ13)
CAGRPGGYQKVTF

SEQ ID NO: 611780 - protein, 15 aa, Homo sapiens
  CDR3 for beta chain variable domain of TCR clone 305890 (TRBV4-1, TRBJ1-4)
CASSDTGGTNEQLFF

SEQ ID NO: 611781 - protein, 10 aa, Homo sapiens
  CDR3 for alpha chain variable domain of TCR clone 305891 (TRAV12-3, TRAJ49)
CAMNDDQFYF

SEQ ID NO: 611782 - protein, 14 aa, Homo sapiens
  CDR3 for beta chain variable domain of TCR clone 305891 (TRBV7-9, TRBJ2-3)
CASSPSGRAGTQYF

SEQ ID NO: 611783 - protein, 12 aa, Homo sapiens
  CDR3 for alpha chain variable domain of TCR clone 305892 (TRAV21, TRAJ23)
CAVMLPGGKLIF

SEQ ID NO: 611784 - protein, 14 aa, Homo sapiens
  CDR3 for beta chain variable domain of TCR clone 305892 (TRBV7-9, TRBJ1-4)
CAITAGEANEKLFF

SEQ ID NO: 611785 - protein, 15 aa, Homo sapiens
  CDR3 for alpha chain variable domain of TCR clone 305893 (TRAV16, TRAJ39)
CDLSPSNNAGNMLTF

SEQ ID NO: 611786 - protein, 14 aa, Homo sapiens
  CDR3 for beta chain variable domain of TCR clone 305893 (TRBV7-7, TRBJ2-7)
CASSPGGPTYEQYF

SEQ ID NO: 611787 - protein, 13 aa, Homo sapiens
  CDR3 for alpha chain variable domain of TCR clone 305894 (TRAV17, TRAJ8)
CATGPVGFQQLVF

SEQ ID NO: 611788 - protein, 15 aa, Homo sapiens
  CDR3 for beta chain variable domain of TCR clone 305894 (TRBV20-1, TRBJ2-5)
CSAGRLPSGQETQYF

SEQ ID NO: 611789 - protein, 12 aa, Homo sapiens
  CDR3 for alpha chain variable domain of TCR clone 305895 (TRAV16, TRAJ9)
CALSSGGFKTIF

SEQ ID NO: 611790 - protein, 14 aa, Homo sapiens
  CDR3 for beta chain variable domain of TCR clone 305895 (TRBV18, TRBJ2-5)
CASSPGVSQETQYF

SEQ ID NO: 611791 - protein, 12 aa, Homo sapiens
  CDR3 for alpha chain variable domain of TCR clone 305896 (TRAV13-1, TRAJ21)
CAAKEGFNKFYF

SEQ ID NO: 611792 - protein, 14 aa, Homo sapiens
  CDR3 for beta chain variable domain of TCR clone 305896 (TRBV5-4, TRBJ1-1)
CASNLDSRRDEAFF

SEQ ID NO: 611793 - protein, 16 aa, Homo sapiens
  CDR3 for alpha chain variable domain of TCR clone 305897 (TRAV8-4, TRAJ5)
CAVSPLTDTGRRALTL

SEQ ID NO: 611794 - protein, 14 aa, Homo sapiens
  CDR3 for beta chain variable domain of TCR clone 305897 (TRBV19, TRBJ1-6)
CASSTDGWNSPLHF

SEQ ID NO: 611795 - protein, 14 aa, Homo sapiens
  CDR3 for alpha chain variable domain of TCR clone 305898 (TRAV12-2, TRAJ17)
CAVLFKAAGNKLTF

SEQ ID NO: 611796 - protein, 16 aa, Homo sapiens
  CDR3 for beta chain variable domain of TCR clone 305898 (TRBV11-2, TRBJ1-1)
CASSLRQGGEHSKAFF

SEQ ID NO: 611797 - protein, 13 aa, Homo sapiens
  CDR3 for alpha chain variable domain of TCR clone 305899 (TRAV22, TRAJ26)
CAVEHNYGQNFVF

SEQ ID NO: 611798 - protein, 16 aa, Homo sapiens
  CDR3 for beta chain variable domain of TCR clone 305899 (TRBV7-2, TRBJ2-6)
CASSERRASGANVVTF

SEQ ID NO: 611799 - protein, 15 aa, Homo sapiens
  CDR3 for alpha chain variable domain of TCR clone 305900 (TRAV12-3, TRAJ42)
CAMSGHGGSQGNLIF

SEQ ID NO: 611800 - protein, 14 aa, Homo sapiens
  CDR3 for beta chain variable domain of TCR clone 305900 (TRBV28, TRBJ2-3)
CASSWRGRADTQYF

SEQ ID NO: 611801 - protein, 15 aa, Homo sapiens
  CDR3 for alpha chain variable domain of TCR clone 305901 (TRAV21, TRAJ32)
CAVNSYGGAKNKLIF

SEQ ID NO: 611802 - protein, 15 aa, Homo sapiens
  CDR3 for beta chain variable domain of TCR clone 305901 (TRBV5-1, TRBJ1-1)
CASSLSDLGGTEAFF

SEQ ID NO: 611803 - protein, 13 aa, Homo sapiens
  CDR3 for alpha chain variable domain of TCR clone 305902 (TRAV29/DV5, TRAJ31)
CAASRNNNARLMF

SEQ ID NO: 611804 - protein, 12 aa, Homo sapiens
  CDR3 for beta chain variable domain of TCR clone 305902 (TRBV14, TRBJ2-5)
CASIQLKETQYF

SEQ ID NO: 611805 - protein, 13 aa, Homo sapiens
  CDR3 for alpha chain variable domain of TCR clone 305903 (TRAV35, TRAJ43)
CAGYPYNNNDMRF

SEQ ID NO: 611806 - protein, 19 aa, Homo sapiens
  CDR3 for beta chain variable domain of TCR clone 305903 (TRBV7-9, TRBJ2-6)
CASSLESATVLPGANVLTF

SEQ ID NO: 611807 - protein, 13 aa, Homo sapiens
  CDR3 for alpha chain variable domain of TCR clone 305904 (TRAV12-2, TRAJ20)
CAVYPSNDYKLSF

SEQ ID NO: 611808 - protein, 13 aa, Homo sapiens
  CDR3 for beta chain variable domain of TCR clone 305904 (TRBV19, TRBJ2-7)
CASSPRQSYEQYF

SEQ ID NO: 611809 - protein, 13 aa, Homo sapiens
  CDR3 for alpha chain variable domain of TCR clone 305905 (TRAV21, TRAJ20)
CAVGLRVDYKLSF

SEQ ID NO: 611810 - protein, 15 aa, Homo sapiens
  CDR3 for beta chain variable domain of TCR clone 305905 (TRBV18, TRBJ2-1)
CASSPPSASYNEQFF

SEQ ID NO: 611811 - protein, 14 aa, Homo sapiens
  CDR3 for alpha chain variable domain of TCR clone 305906 (TRAV9-2, TRAJ39)
CALYIYNAGNMLTF

SEQ ID NO: 611812 - protein, 15 aa, Homo sapiens
  CDR3 for beta chain variable domain of TCR clone 305906 (TRBV12-4, TRBJ2-2)
CASSLGVRHTGELFF

SEQ ID NO: 611813 - protein, 13 aa, Homo sapiens
  CDR3 for alpha chain variable domain of TCR clone 305907 (TRAV21, TRAJ27)
CAARPGNAGKSTF

SEQ ID NO: 611814 - protein, 15 aa, Homo sapiens
  CDR3 for beta chain variable domain of TCR clone 305907 (TRBV5-1, TRBJ2-1)
CASSPPRAPYNERFF

SEQ ID NO: 611815 - protein, 14 aa, Homo sapiens
  CDR3 for alpha chain variable domain of TCR clone 305908 (TRAV26-1, TRAJ34)
CIVRVAYNTDKLLF

SEQ ID NO: 611816 - protein, 13 aa, Homo sapiens
  CDR3 for beta chain variable domain of TCR clone 305908 (TRBV6-5, TRBJ1-2)
CASSYSQGVRYTF

SEQ ID NO: 611817 - protein, 14 aa, Homo sapiens
  CDR3 for alpha chain variable domain of TCR clone 305909 (TRAV8-4, TRAJ47)
CAVSIMEYGNKLVF

SEQ ID NO: 611818 - protein, 16 aa, Homo sapiens
  CDR3 for beta chain variable domain of TCR clone 305909 (TRBV14, TRBJ1-2)
CASSQGPTTANYGDTF

SEQ ID NO: 611819 - protein, 14 aa, Homo sapiens
  CDR3 for alpha chain variable domain of TCR clone 305910 (TRAV3, TRAJ21)
CALGRGSTNFTLAL

SEQ ID NO: 611820 - protein, 14 aa, Homo sapiens
  CDR3 for beta chain variable domain of TCR clone 305910 (TRBV7-9, TRBJ2-4)
CASSLAMGGNIQYF

SEQ ID NO: 611821 - protein, 15 aa, Homo sapiens
  CDR3 for alpha chain variable domain of TCR clone 305911 (TRAV13-1, TRAJ32)
CAASNGWWCYKQAHL

SEQ ID NO: 611822 - protein, 12 aa, Homo sapiens
  CDR3 for beta chain variable domain of TCR clone 305911 (TRBV24-1, TRBJ1-1)
CATLYPDTEAVF

SEQ ID NO: 611823 - protein, 13 aa, Homo sapiens
  CDR3 for alpha chain variable domain of TCR clone 305912 (TRAV2, TRAJ40)
CTVVTSGTSKYIF

SEQ ID NO: 611824 - protein, 14 aa, Homo sapiens
  CDR3 for beta chain variable domain of TCR clone 305912 (TRBV19, TRBJ2-1)
CASPTFVLSGEQFF

SEQ ID NO: 611825 - protein, 13 aa, Homo sapiens
  CDR3 for alpha chain variable domain of TCR clone 305913 (TRAV12-3, TRAJ33)
CAMSVNSNYQLIR

SEQ ID NO: 611826 - protein, 16 aa, Homo sapiens
  CDR3 for beta chain variable domain of TCR clone 305913 (TRBV13, TRBJ2-5)
CASSLRTGGSWETQYF

SEQ ID NO: 611827 - protein, 14 aa, Homo sapiens
  CDR3 for alpha chain variable domain of TCR clone 305914 (TRAV2, TRAJ9)
CAVEDWSGGFKTIF

SEQ ID NO: 611828 - protein, 13 aa, Homo sapiens
  CDR3 for beta chain variable domain of TCR clone 305914 (TRBV7-3, TRBJ1-1)
CASSQDWGAEAFF

SEQ ID NO: 611829 - protein, 16 aa, Homo sapiens
  CDR3 for alpha chain variable domain of TCR clone 305915 (TRAV12-2, TRAJ32)
CAVNLGQGGATNKLIS

SEQ ID NO: 611830 - protein, 15 aa, Homo sapiens
  CDR3 for beta chain variable domain of TCR clone 305915 (TRBV20-1, TRBJ2-7)
CSARGPLAGGREQYF

SEQ ID NO: 611831 - protein, 16 aa, Homo sapiens
  CDR3 for alpha chain variable domain of TCR clone 305916 (TRAV16, TRAJ4)
CALSRMFSGGYNKLIF

SEQ ID NO: 611832 - protein, 12 aa, Homo sapiens
  CDR3 for beta chain variable domain of TCR clone 305916 (TRBV18, TRBJ2-3)
CASSPLSNTQYF

SEQ ID NO: 611833 - protein, 13 aa, Homo sapiens
  CDR3 for alpha chain variable domain of TCR clone 305917 (TRAV27, TRAJ45)
CRSSGGGADGLTF

SEQ ID NO: 611834 - protein, 15 aa, Homo sapiens
  CDR3 for beta chain variable domain of TCR clone 305917 (TRBV7-9, TRBJ1-4)
CASSARTGGNEKLFF

SEQ ID NO: 611835 - protein, 14 aa, Homo sapiens
  CDR3 for alpha chain variable domain of TCR clone 305918 (TRAV17, TRAJ57)
CATDPQGGSEKLVL

SEQ ID NO: 611836 - protein, 14 aa, Homo sapiens
  CDR3 for beta chain variable domain of TCR clone 305918 (TRBV7-8, TRBJ2-7)
CASSPRDRVYEQYF

SEQ ID NO: 611837 - protein, 12 aa, Homo sapiens
  CDR3 for alpha chain variable domain of TCR clone 305919 (TRAV13-2, TRAJ23)
CAERHRGGKLIF

SEQ ID NO: 611838 - protein, 16 aa, Homo sapiens
  CDR3 for beta chain variable domain of TCR clone 305919 (TRBV7-9, TRBJ2-7)
CASTSPKGQPSGEQYF

SEQ ID NO: 611839 - protein, 14 aa, Homo sapiens
  CDR3 for alpha chain variable domain of TCR clone 305920 (TRAV8-3, TRAJ39)
CAVGANNACNMLTF

SEQ ID NO: 611840 - protein, 15 aa, Homo sapiens
  CDR3 for beta chain variable domain of TCR clone 305920 (TRBV4-3, TRBJ1-1)
CASSPELGRGTEAFF

SEQ ID NO: 611841 - protein, 15 aa, Homo sapiens
  CDR3 for alpha chain variable domain of TCR clone 305921 (TRAV4, TRAJ39)
CLVGPNNNAGNMLTF

SEQ ID NO: 611842 - protein, 14 aa, Homo sapiens
  CDR3 for beta chain variable domain of TCR clone 305921 (TRBV11-2, TRBJ2-5)
CASSRTGGSETQYF

SEQ ID NO: 611843 - protein, 14 aa, Homo sapiens
  CDR3 for alpha chain variable domain of TCR clone 305922 (TRAV12-3, TRAJ10)
SHLPLTGGGNKLTF

SEQ ID NO: 611844 - protein, 16 aa, Homo sapiens
  CDR3 for beta chain variable domain of TCR clone 305922 (TRBV2, TRBJ1-1)
CASSPPNRGMNTEAFF

SEQ ID NO: 611845 - protein, 14 aa, Homo sapiens
  CDR3 for alpha chain variable domain of TCR clone 305923 (TRAV1-2, TRAJ16)
CAVNRFSDGQKLLF

SEQ ID NO: 611846 - protein, 13 aa, Homo sapiens
  CDR3 for beta chain variable domain of TCR clone 305923 (TRBV12-4, TRBJ2-3)
CASSLSRADTQYF

SEQ ID NO: 611847 - protein, 15 aa, Homo sapiens
  CDR3 for alpha chain variable domain of TCR clone 305924 (TRAV16, TRAJ48)
CALFITNFGNEKLTF

SEQ ID NO: 611848 - protein, 15 aa, Homo sapiens
  CDR3 for beta chain variable domain of TCR clone 305924 (TRBV5-4, TRBJ2-7)
CASSRFGTGSYEQYF

SEQ ID NO: 611849 - protein, 16 aa, Homo sapiens
  CDR3 for alpha chain variable domain of TCR clone 305925 (TRAV26-1, TRAJ13)
CIVSPKDSGGYQKVTF

SEQ ID NO: 611850 - protein, 14 aa, Homo sapiens
  CDR3 for beta chain variable domain of TCR clone 305925 (TRBV19, TRBJ2-1)
CASPTFVLSGEQFF

SEQ ID NO: 611851 - protein, 11 aa, Homo sapiens
  CDR3 for alpha chain variable domain of TCR clone 305926 (TRAV3, TRAJ21)
CAVGNFNKFYF

SEQ ID NO: 611852 - protein, 16 aa, Homo sapiens
  CDR3 for beta chain variable domain of TCR clone 305926 (TRBV27, TRBJ2-2)
CASSCRGLVRTGELFF

SEQ ID NO: 611853 - protein, 13 aa, Homo sapiens
  CDR3 for alpha chain variable domain of TCR clone 305927 (TRAV30, TRAJ6)
CGFIEGGSYIPTF

SEQ ID NO: 611854 - protein, 13 aa, Homo sapiens
  CDR3 for beta chain variable domain of TCR clone 305927 (TRBV19, TRBJ1-2)
CASSVPGQDGYTF

SEQ ID NO: 611855 - protein, 13 aa, Homo sapiens
  CDR3 for alpha chain variable domain of TCR clone 305928 (TRAV35, TRAJ44)
CAGLSGTASKLTF

SEQ ID NO: 611856 - protein, 17 aa, Homo sapiens
  CDR3 for beta chain variable domain of TCR clone 305928 (TRBV7-8, TRBJ1-2)
CASSLRPLQGHLDGYTF

SEQ ID NO: 611857 - protein, 14 aa, Homo sapiens
  CDR3 for alpha chain variable domain of TCR clone 305929 (TRAV26-1, TRAJ38)
CIADNAGNNRKLIW

SEQ ID NO: 611858 - protein, 13 aa, Homo sapiens
  CDR3 for beta chain variable domain of TCR clone 305929 (TRBV7-9, TRBJ1-2)
CASSLKQNYGYTY

SEQ ID NO: 611859 - protein, 11 aa, Homo sapiens
  CDR3 for alpha chain variable domain of TCR clone 305930 (TRAV1-2, TRAJ40)
CAVPGTYKYIF

SEQ ID NO: 611860 - protein, 15 aa, Homo sapiens
  CDR3 for beta chain variable domain of TCR clone 305930 (TRBV7-2, TRBJ2-1)
CASSFSGGIYNEQFF

SEQ ID NO: 611861 - protein, 11 aa, Homo sapiens
  CDR3 for alpha chain variable domain of TCR clone 305931 (TRAV1-2, TRAJ11)
CAVRGYSTLTF

SEQ ID NO: 611862 - protein, 10 aa, Homo sapiens
  CDR3 for beta chain variable domain of TCR clone 305931 (TRBV28, TRBJ2-2)
CASTVAEQTP

SEQ ID NO: 611863 - protein, 10 aa, Homo sapiens
  CDR3 for alpha chain variable domain of TCR clone 305932 (TRAV20, TRAJ22)
CAAPARQLTF

SEQ ID NO: 611864 - protein, 16 aa, Homo sapiens
  CDR3 for beta chain variable domain of TCR clone 305932 (TRBV6-6, TRBJ2-1)
CASSWGGQGPYNEQFF

SEQ ID NO: 611865 - protein, 12 aa, Homo sapiens
  CDR3 for alpha chain variable domain of TCR clone 305933 (TRAV2, TRAJ5)
CALDTGRRALTF

SEQ ID NO: 611866 - protein, 15 aa, Homo sapiens
  CDR3 for beta chain variable domain of TCR clone 305933 (TRBV10-3, TRBJ2-1)
CAISDVQDRAYEQSF

SEQ ID NO: 611867 - protein, 14 aa, Homo sapiens
  CDR3 for alpha chain variable domain of TCR clone 305934 (TRAV12-3, TRAJ10)
SHLPLTGGGNKLTF

SEQ ID NO: 611868 - protein, 15 aa, Homo sapiens
  CDR3 for beta chain variable domain of TCR clone 305934 (TRBV10-3, TRBJ1-3)
CAISDSQGAGNTMYF

SEQ ID NO: 611869 - protein, 12 aa, Homo sapiens
  CDR3 for alpha chain variable domain of TCR clone 305935 (TRAV21, TRAJ8)
CAVNTGFQKLVF

SEQ ID NO: 611870 - protein, 13 aa, Homo sapiens
  CDR3 for beta chain variable domain of TCR clone 305935 (TRBV6-3, TRBJ2-1)
CAISYDNYNEQFF

SEQ ID NO: 611871 - protein, 12 aa, Homo sapiens
  CDR3 for alpha chain variable domain of TCR clone 305936 (TRAV12-2, TRAJ42)
CAVGGSQGNLIF

SEQ ID NO: 611872 - protein, 16 aa, Homo sapiens
  CDR3 for beta chain variable domain of TCR clone 305936 (TRBV7-3, TRBJ2-2)
CASSLKRGILSGELFF

SEQ ID NO: 611873 - protein, 15 aa, Homo sapiens
  CDR3 for alpha chain variable domain of TCR clone 305937 (TRAV8-1, TRAJ8)
CAVNAMNTGFQKLVF

SEQ ID NO: 611874 - protein, 16 aa, Homo sapiens
  CDR3 for beta chain variable domain of TCR clone 305937 (TRBV10-3, TRBJ2-7)
CAISADFADRPYEQYF

SEQ ID NO: 611875 - protein, 15 aa, Homo sapiens
  CDR3 for alpha chain variable domain of TCR clone 305938 (TRAV9-2, TRAJ8)
CALSGLNTGLQKLVF

SEQ ID NO: 611876 - protein, 12 aa, Homo sapiens
  CDR3 for beta chain variable domain of TCR clone 305938 (TRBV12-5, TRBJ2-5)
CASGQGVETQYF

SEQ ID NO: 611877 - protein, 14 aa, Homo sapiens
  CDR3 for alpha chain variable domain of TCR clone 305939 (TRAV35, TRAJ42)
CAGRYGGSQGNLIF

SEQ ID NO: 611878 - protein, 14 aa, Homo sapiens
  CDR3 for beta chain variable domain of TCR clone 305939 (TRBV7-9, TRBJ2-5)
CASSLDTAQETQYF

SEQ ID NO: 611879 - protein, 12 aa, Homo sapiens
  CDR3 for alpha chain variable domain of TCR clone 305940 (TRAV12-3, TRAJ17)
CAMTLTGNKLTF

SEQ ID NO: 611880 - protein, 15 aa, Homo sapiens
  CDR3 for beta chain variable domain of TCR clone 305940 (TRBV7-6, TRBJ2-5)
CASSSGLAGVETQYF

SEQ ID NO: 611881 - protein, 12 aa, Homo sapiens
  CDR3 for alpha chain variable domain of TCR clone 305941 (TRAV12-1, TRAJ30)
CVVNPRDDKIIF

SEQ ID NO: 611882 - protein, 18 aa, Homo sapiens
  CDR3 for beta chain variable domain of TCR clone 305941 (TRBV2, TRBJ2-1)
CASRGLAGGPRTYNEQFF

SEQ ID NO: 611883 - protein, 12 aa, Homo sapiens
  CDR3 for alpha chain variable domain of TCR clone 305942 (TRAV12-3, TRAJ32)
CAGGGATNKLIF

SEQ ID NO: 611884 - protein, 15 aa, Homo sapiens
  CDR3 for beta chain variable domain of TCR clone 305942 (TRBV4-3, TRBJ2-1)
CASSQDSAIYNEQFF

SEQ ID NO: 611885 - protein, 14 aa, Homo sapiens
  CDR3 for alpha chain variable domain of TCR clone 305943 (TRAV16, TRAJ28)
CALSSGAGIYQLTF

SEQ ID NO: 611886 - protein, 16 aa, Homo sapiens
  CDR3 for beta chain variable domain of TCR clone 305943 (TRBV5-1, TRBJ2-1)
CASSLLPSGRPEEQFF

SEQ ID NO: 611887 - protein, 14 aa, Homo sapiens
  CDR3 for alpha chain variable domain of TCR clone 305944 (TRAV29/DV5, TRAJ48)
CAAMALFGNEKLTF

SEQ ID NO: 611888 - protein, 18 aa, Homo sapiens
  CDR3 for beta chain variable domain of TCR clone 305944 (TRBV7-2, TRBJ2-3)
CASSLETSRGRKADTQYF

SEQ ID NO: 611889 - protein, 15 aa, Homo sapiens
  CDR3 for alpha chain variable domain of TCR clone 305945 (TRAV27, TRAJ33)
CAGADIMDSNYQLIC

SEQ ID NO: 611890 - protein, 13 aa, Homo sapiens
  CDR3 for beta chain variable domain of TCR clone 305945 (TRBV28, TRBJ1-2)
CASSLQGRGGYTF

SEQ ID NO: 611891 - protein, 15 aa, Homo sapiens
  CDR3 for alpha chain variable domain of TCR clone 305946 (TRAV8-2, TRAJ40)
CVVLGTTSGTYKDIF

SEQ ID NO: 611892 - protein, 15 aa, Homo sapiens
  CDR3 for beta chain variable domain of TCR clone 305946 (TRBV6-3, TRBJ2-7)
CASSSPGTVFYEQYF

SEQ ID NO: 611893 - protein, 14 aa, Homo sapiens
  CDR3 for alpha chain variable domain of TCR clone 305947 (TRAV26-1, TRAJ40)
CIVRLLPGTYKYIF

SEQ ID NO: 611894 - protein, 13 aa, Homo sapiens
  CDR3 for beta chain variable domain of TCR clone 305947 (TRBV3-1, TRBJ1-1)
CASSQLQGAEAFF

SEQ ID NO: 611895 - protein, 17 aa, Homo sapiens
  CDR3 for alpha chain variable domain of TCR clone 305948 (TRAV3, TRAJ42)
CAVRDRDYGGSQGNLIF

SEQ ID NO: 611896 - protein, 14 aa, Homo sapiens
  CDR3 for beta chain variable domain of TCR clone 305948 (TRBV7-2, TRBJ2-5)
CASSRRGSSETQCF

SEQ ID NO: 611897 - protein, 12 aa, Homo sapiens
  CDR3 for alpha chain variable domain of TCR clone 305949 (TRAV22, TRAJ29)
CAPPSGNTPLVF

SEQ ID NO: 611898 - protein, 14 aa, Homo sapiens
  CDR3 for beta chain variable domain of TCR clone 305949 (TRBV11-2, TRBJ2-7)
CASSLGSGAYEQYF

SEQ ID NO: 611899 - protein, 12 aa, Homo sapiens
  CDR3 for alpha chain variable domain of TCR clone 305950 (TRAV13-1, TRAJ27)
CAAHTNAGKSTF

SEQ ID NO: 611900 - protein, 17 aa, Homo sapiens
  CDR3 for beta chain variable domain of TCR clone 305950 (TRBV13, TRBJ2-3)
CASSLSRVAGGRNTQYF

SEQ ID NO: 611901 - protein, 12 aa, Homo sapiens
  CDR3 for alpha chain variable domain of TCR clone 305951 (TRAV30, TRAJ39)
CGRGNAGNMLTF

SEQ ID NO: 611902 - protein, 13 aa, Homo sapiens
  CDR3 for beta chain variable domain of TCR clone 305951 (TRBV20-1, TRBJ2-5)
CSARLAGVETQYF

SEQ ID NO: 611903 - protein, 14 aa, Homo sapiens
  CDR3 for alpha chain variable domain of TCR clone 305952 (TRAV9-2, TRAJ39)
CALYIYNAGNMLTF

SEQ ID NO: 611904 - protein, 16 aa, Homo sapiens
  CDR3 for beta chain variable domain of TCR clone 305952 (TRBV7-6, TRBJ2-1)
CIAVPAAWGGADEQFF

SEQ ID NO: 611905 - protein, 12 aa, Homo sapiens
  CDR3 for alpha chain variable domain of TCR clone 305953 (TRAV8-3, TRAJ41)
CAVALSGYALNF

SEQ ID NO: 611906 - protein, 16 aa, Homo sapiens
  CDR3 for beta chain variable domain of TCR clone 305953 (TRBV27, TRBJ2-7)
CASSSERRDSDYEQYF

SEQ ID NO: 611907 - protein, 11 aa, Homo sapiens
  CDR3 for alpha chain variable domain of TCR clone 305954 (TRAV2, TRAJ13)
RASGGYQKVTF

SEQ ID NO: 611908 - protein, 15 aa, Homo sapiens
  CDR3 for beta chain variable domain of TCR clone 305954 (TRBV29-1, TRBJ2-1)
CSGRDRKSSYNEQFF

SEQ ID NO: 611909 - protein, 13 aa, Homo sapiens
  CDR3 for alpha chain variable domain of TCR clone 305955 (TRAV26-1, TRAJ48)
CIVRVVGDEKLTF

SEQ ID NO: 611910 - protein, 19 aa, Homo sapiens
  CDR3 for beta chain variable domain of TCR clone 305955 (TRBV11-3, TRBJ2-2)
CASSTRPGAKTANTGELFF

SEQ ID NO: 611911 - protein, 14 aa, Homo sapiens
  CDR3 for alpha chain variable domain of TCR clone 305956 (TRAV26-1, TRAJ48)
CIVRVGFGNEKLTF

SEQ ID NO: 611912 - protein, 16 aa, Homo sapiens
  CDR3 for beta chain variable domain of TCR clone 305956 (TRBV18, TRBJ1-1)
CASSPGVGGRGGEAFF

SEQ ID NO: 611913 - protein, 18 aa, Homo sapiens
  CDR3 for alpha chain variable domain of TCR clone 305957 (TRAV12-3, TRAJ52)
CAMSVGGAGGTSYGKRTF

SEQ ID NO: 611914 - protein, 16 aa, Homo sapiens
  CDR3 for beta chain variable domain of TCR clone 305957 (TRBV7-9, TRBJ1-2)
CASSISLDRGGYGYTF

SEQ ID NO: 611915 - protein, 14 aa, Homo sapiens
  CDR3 for alpha chain variable domain of TCR clone 305958 (TRAV1-2, TRAJ16)
CAVNRFSDGQKLLV

SEQ ID NO: 611916 - protein, 16 aa, Homo sapiens
  CDR3 for beta chain variable domain of TCR clone 305958 (TRBV20-1, TRBJ1-4)
CSAPGQGLLTNEKLFF

SEQ ID NO: 611917 - protein, 14 aa, Homo sapiens
  CDR3 for alpha chain variable domain of TCR clone 305959 (TRAV8-3, TRAJ4)
CAVGAAGGYNKLIF

SEQ ID NO: 611918 - protein, 15 aa, Homo sapiens
  CDR3 for beta chain variable domain of TCR clone 305959 (TRBV19, TRBJ2-7)
CASSIASGGFYEQYF

SEQ ID NO: 611919 - protein, 13 aa, Homo sapiens
  CDR3 for alpha chain variable domain of TCR clone 305960 (TRAV21, TRAJ27)
CAARPGNAGRSPF

SEQ ID NO: 611920 - protein, 14 aa, Homo sapiens
  CDR3 for beta chain variable domain of TCR clone 305960 (TRBV11-2, TRBJ2-7)
CASSLGAGAYEQYF

SEQ ID NO: 611921 - protein, 11 aa, Homo sapiens
  CDR3 for alpha chain variable domain of TCR clone 305961 (TRAV12-1, TRAJ8)
CVVTGFQKLVC

SEQ ID NO: 611922 - protein, 14 aa, Homo sapiens
  CDR3 for beta chain variable domain of TCR clone 305961 (TRBV19, TRBJ2-1)
CASGKSTQYNEQFF

SEQ ID NO: 611923 - protein, 13 aa, Homo sapiens
  CDR3 for alpha chain variable domain of TCR clone 305962 (TRAV12-1, TRAJ29)
CVVDTSGNTPLVF

SEQ ID NO: 611924 - protein, 15 aa, Homo sapiens
  CDR3 for beta chain variable domain of TCR clone 305962 (TRBV7-3, TRBJ2-2)
CASSETGQGTGELFF

SEQ ID NO: 611925 - protein, 12 aa, Homo sapiens
  CDR3 for alpha chain variable domain of TCR clone 305963 (TRAV1-1, TRAJ43)
CAPRVSSNDMRF

SEQ ID NO: 611926 - protein, 14 aa, Homo sapiens
  CDR3 for beta chain variable domain of TCR clone 305963 (TRBV25-1, TRBJ1-1)
CASTHLGGNTEAFF

SEQ ID NO: 611927 - protein, 14 aa, Homo sapiens
  CDR3 for alpha chain variable domain of TCR clone 305964 (TRAV12-2, TRAJ13)
CAGKKTGGYQKVTF

SEQ ID NO: 611928 - protein, 11 aa, Homo sapiens
  CDR3 for beta chain variable domain of TCR clone 305964 (TRBV12-4, TRBJ2-2)
CASSSAGELFF

SEQ ID NO: 611929 - protein, 12 aa, Homo sapiens
  CDR3 for alpha chain variable domain of TCR clone 305965 (TRAV1-1, TRAJ9)
CAVDTGGFKTIF

SEQ ID NO: 611930 - protein, 15 aa, Homo sapiens
  CDR3 for beta chain variable domain of TCR clone 305965 (TRBV6-3, TRBJ2-7)
CASSSPGTVFYKQYF

SEQ ID NO: 611931 - protein, 13 aa, Homo sapiens
  CDR3 for alpha chain variable domain of TCR clone 305966 (TRAV13-1, TRAJ9)
CAASGTGGFKNIF

SEQ ID NO: 611932 - protein, 13 aa, Homo sapiens
  CDR3 for beta chain variable domain of TCR clone 305966 (TRBV12-4, TRBJ2-7)
CASSLERVRGQYF

SEQ ID NO: 611933 - protein, 14 aa, Homo sapiens
  CDR3 for alpha chain variable domain of TCR clone 305967 (TRAV22, TRAJ6)
CAGVGPGGSYIPTF

SEQ ID NO: 611934 - protein, 13 aa, Homo sapiens
  CDR3 for beta chain variable domain of TCR clone 305967 (TRBV7-9, TRBJ2-2)
CASSLDPTGELFF

SEQ ID NO: 611935 - protein, 20 aa, Homo sapiens
  CDR3 for alpha chain variable domain of TCR clone 305968 (TRAV12-1, TRAJ42)
SSVIQPPTSVKGGSQGNLIF

SEQ ID NO: 611936 - protein, 18 aa, Homo sapiens
  CDR3 for beta chain variable domain of TCR clone 305968 (TRBV11-2, TRBJ2-3)
CASSLGGASRGAPNTQYC

SEQ ID NO: 611937 - protein, 16 aa, Homo sapiens
  CDR3 for alpha chain variable domain of TCR clone 305969 (TRAV30, TRAJ24)
CGTEIVDADSWGKFQF

SEQ ID NO: 611938 - protein, 16 aa, Homo sapiens
  CDR3 for beta chain variable domain of TCR clone 305969 (TRBV24-1, TRBJ2-3)
CAASDPGTGATDTQYF

SEQ ID NO: 611939 - protein, 15 aa, Homo sapiens
  CDR3 for alpha chain variable domain of TCR clone 305970 (TRAV1-2, TRAJ18)
CAVSDRGSTLGRLYF

SEQ ID NO: 611940 - protein, 13 aa, Homo sapiens
  CDR3 for beta chain variable domain of TCR clone 305970 (TRBV20-1, TRBJ2-5)
CSAREAFQETQYF

SEQ ID NO: 611941 - protein, 13 aa, Homo sapiens
  CDR3 for alpha chain variable domain of TCR clone 305971 (TRAV27, TRAJ57)
CAGFQGGSEKLVV

SEQ ID NO: 611942 - protein, 14 aa, Homo sapiens
  CDR3 for beta chain variable domain of TCR clone 305971 (TRBV20-1, TRBJ1-2)
CSGRKDGRAYGYTF

SEQ ID NO: 611943 - protein, 17 aa, Homo sapiens
  CDR3 for alpha chain variable domain of TCR clone 305972 (TRAV12-3, TRAJ31)
CAMKDRLMFGDGTQLVV

SEQ ID NO: 611944 - protein, 12 aa, Homo sapiens
  CDR3 for beta chain variable domain of TCR clone 305972 (TRBV19, TRBJ2-7)
CASTSGTYEQYF

SEQ ID NO: 611945 - protein, 16 aa, Homo sapiens
  CDR3 for alpha chain variable domain of TCR clone 305973 (TRAV30, TRAJ24)
CGTEIVDADSWGKFQF

SEQ ID NO: 611946 - protein, 12 aa, Homo sapiens
  CDR3 for beta chain variable domain of TCR clone 305973 (TRBV5-1, TRBJ2-7)
CASSFRGYEQYF

SEQ ID NO: 611947 - protein, 13 aa, Homo sapiens
  CDR3 for alpha chain variable domain of TCR clone 305974 (TRAV13-2, TRAJ13)
CAERPGGYQKVTF

SEQ ID NO: 611948 - protein, 16 aa, Homo sapiens
  CDR3 for beta chain variable domain of TCR clone 305974 (TRBV7-3, TRBJ2-3)
CASSLSGYRPEDTQYF

SEQ ID NO: 611949 - protein, 14 aa, Homo sapiens
  CDR3 for alpha chain variable domain of TCR clone 305975 (TRAV30, TRAJ26)
CGTESVSYGQNFVF

SEQ ID NO: 611950 - protein, 13 aa, Homo sapiens
  CDR3 for beta chain variable domain of TCR clone 305975 (TRBV7-3, TRBJ1-1)
CASSQDWGAEAFF

SEQ ID NO: 611951 - protein, 16 aa, Homo sapiens
  CDR3 for alpha chain variable domain of TCR clone 305976 (TRAV30, TRAJ24)
CGTETVDADSWGKFQV

SEQ ID NO: 611952 - protein, 14 aa, Homo sapiens
  CDR3 for beta chain variable domain of TCR clone 305976 (TRBV12-5, TRBJ2-5)
CASGSRTHQETQYF

SEQ ID NO: 611953 - protein, 13 aa, Homo sapiens
  CDR3 for alpha chain variable domain of TCR clone 305977 (TRAV1-2, TRAJ9)
CAALNTGGFKNIF

SEQ ID NO: 611954 - protein, 13 aa, Homo sapiens
  CDR3 for beta chain variable domain of TCR clone 305977 (TRBV15, TRBJ1-6)
CATSGGLNSPLHF

SEQ ID NO: 611955 - protein, 13 aa, Homo sapiens
  CDR3 for alpha chain variable domain of TCR clone 305978 (TRAV21, TRAJ45)
CAVMGGGADGLAF

SEQ ID NO: 611956 - protein, 16 aa, Homo sapiens
  CDR3 for beta chain variable domain of TCR clone 305978 (TRBV20-1, TRBJ2-1)
CSARDHLAVGRGEQFF

SEQ ID NO: 611957 - protein, 12 aa, Homo sapiens
  CDR3 for alpha chain variable domain of TCR clone 305979 (TRAV38-1, TRAJ28)
CAAGAGSYQLTF

SEQ ID NO: 611958 - protein, 14 aa, Homo sapiens
  CDR3 for beta chain variable domain of TCR clone 305979 (TRBV7-6, TRBJ2-3)
CASSLGTVTDTQYF

SEQ ID NO: 611959 - protein, 13 aa, Homo sapiens
  CDR3 for alpha chain variable domain of TCR clone 305980 (TRAV3, TRAJ21)
CAVREPDFNKFYF

SEQ ID NO: 611960 - protein, 15 aa, Homo sapiens
  CDR3 for beta chain variable domain of TCR clone 305980 (TRBV19, TRBJ2-1)
CASSIQATSYNEQFF

SEQ ID NO: 611961 - protein, 17 aa, Homo sapiens
  CDR3 for alpha chain variable domain of TCR clone 305981 (TRAV2, TRAJ36)
NTVLWRIGETGANNLFF

SEQ ID NO: 611962 - protein, 14 aa, Homo sapiens
  CDR3 for beta chain variable domain of TCR clone 305981 (TRBV7-9, TRBJ2-5)
CASSLDTAQETQYF

SEQ ID NO: 611963 - protein, 13 aa, Homo sapiens
  CDR3 for alpha chain variable domain of TCR clone 305982 (TRAV2, TRAJ15)
CAVASQAGTALIF

SEQ ID NO: 611964 - protein, 14 aa, Homo sapiens
  CDR3 for beta chain variable domain of TCR clone 305982 (TRBV20-1, TRBJ1-1)
CSAQTRIGGTEDFF

SEQ ID NO: 611965 - protein, 23 aa, Homo sapiens
  CDR3 for alpha chain variable domain of TCR clone 305983 (TRAV1-1, TRAJ29)
LLQELQKKDSASYFLGGNTSLVF

SEQ ID NO: 611966 - protein, 13 aa, Homo sapiens
  CDR3 for beta chain variable domain of TCR clone 305983 (TRBV25-1, TRBJ2-7)
CASSEGGDYEQYF

SEQ ID NO: 611967 - protein, 11 aa, Homo sapiens
  CDR3 for alpha chain variable domain of TCR clone 305984 (TRAV1-2, TRAJ40)
CAVPGTYKYIF

SEQ ID NO: 611968 - protein, 15 aa, Homo sapiens
  CDR3 for beta chain variable domain of TCR clone 305984 (TRBV7-3, TRBJ2-2)
CQQLKAGTLSGELFF

SEQ ID NO: 611969 - protein, 16 aa, Homo sapiens
  CDR3 for alpha chain variable domain of TCR clone 305985 (TRAV3, TRAJ21)
CSVRDIERGNFNKFYF

SEQ ID NO: 611970 - protein, 13 aa, Homo sapiens
  CDR3 for beta chain variable domain of TCR clone 305985 (TRBV28, TRBJ2-5)
CASSSRNQETQYF

SEQ ID NO: 611971 - protein, 12 aa, Homo sapiens
  CDR3 for alpha chain variable domain of TCR clone 305986 (TRAV12-2, TRAJ36)
CAAPRGANNLFF

SEQ ID NO: 611972 - protein, 15 aa, Homo sapiens
  CDR3 for beta chain variable domain of TCR clone 305986 (TRBV11-3, TRBJ1-3)
CASSLDGTVGNTIYF

SEQ ID NO: 611973 - protein, 11 aa, Homo sapiens
  CDR3 for alpha chain variable domain of TCR clone 305987 (TRAV27, TRAJ47)
SIVEYGNKQVF

SEQ ID NO: 611974 - protein, 18 aa, Homo sapiens
  CDR3 for beta chain variable domain of TCR clone 305987 (TRBV2, TRBJ2-1)
CASRGLAGGPRTYNEQFF

SEQ ID NO: 611975 - protein, 18 aa, Homo sapiens
  CDR3 for alpha chain variable domain of TCR clone 305988 (TRAV2, TRAJ32)
CAFTMVVLQTSSSLELAF

SEQ ID NO: 611976 - protein, 16 aa, Homo sapiens
  CDR3 for beta chain variable domain of TCR clone 305988 (TRBV7-9, TRBJ2-7)
CASSYPDREGGYEQYF

SEQ ID NO: 611977 - protein, 14 aa, Homo sapiens
  CDR3 for alpha chain variable domain of TCR clone 305989 (TRAV25, TRAJ20)
CAGNGRWDDYTLSF

SEQ ID NO: 611978 - protein, 12 aa, Homo sapiens
  CDR3 for beta chain variable domain of TCR clone 305989 (TRBV12-5, TRBJ2-3)
CASQASTDTQYF

SEQ ID NO: 611979 - protein, 19 aa, Homo sapiens
  CDR3 for alpha chain variable domain of TCR clone 305990 (TRAV1-2, TRAJ26)
CLLPLCCERPDNYGQNFVF

SEQ ID NO: 611980 - protein, 12 aa, Homo sapiens
  CDR3 for beta chain variable domain of TCR clone 305990 (TRBV20-1, TRBJ2-1)
CSAQYAYNEQFF

SEQ ID NO: 611981 - protein, 13 aa, Homo sapiens
  CDR3 for alpha chain variable domain of TCR clone 305991 (TRAV21, TRAJ27)
CAARPGNAGKSTF

SEQ ID NO: 611982 - protein, 14 aa, Homo sapiens
  CDR3 for beta chain variable domain of TCR clone 305991 (TRBV11-1, TRBJ2-2)
CASSTLAGTGELFF

SEQ ID NO: 611983 - protein, 12 aa, Homo sapiens
  CDR3 for alpha chain variable domain of TCR clone 305992 (TRAV41, TRAJ58)
CAVKTSGSRLTF

SEQ ID NO: 611984 - protein, 12 aa, Homo sapiens
  CDR3 for beta chain variable domain of TCR clone 305992 (TRBV11-2, TRBJ2-2)
CASSLGGGELFF

SEQ ID NO: 611985 - protein, 22 aa, Homo sapiens
  CDR3 for alpha chain variable domain of TCR clone 305993 (TRAV2, TRAJ38)
CAVEDFPNAGNNHIQNPDPAVY

SEQ ID NO: 611986 - protein, 14 aa, Homo sapiens
  CDR3 for beta chain variable domain of TCR clone 305993 (TRBV29-1, TRBJ1-4)
CSVSGRQGSEKLFF

SEQ ID NO: 611987 - protein, 16 aa, Homo sapiens
  CDR3 for alpha chain variable domain of TCR clone 305994 (TRAV30, TRAJ24)
CGTEIVDADSCGKFQF

SEQ ID NO: 611988 - protein, 14 aa, Homo sapiens
  CDR3 for beta chain variable domain of TCR clone 305994 (TRBV12-5, TRBJ2-5)
CASGSRTHQETQYY

SEQ ID NO: 611989 - protein, 14 aa, Homo sapiens
  CDR3 for alpha chain variable domain of TCR clone 305995 (TRAV17, TRAJ35)
CATDRPGFGNVLHC

SEQ ID NO: 611990 - protein, 18 aa, Homo sapiens
  CDR3 for beta chain variable domain of TCR clone 305995 (TRBV18, TRBJ1-3)
CASSPRGGAGPSGNTIYF

SEQ ID NO: 611991 - protein, 14 aa, Homo sapiens
  CDR3 for alpha chain variable domain of TCR clone 305996 (TRAV12-2, TRAJ5)
CAVNRSTDRRALTF

SEQ ID NO: 611992 - protein, 12 aa, Homo sapiens
  CDR3 for beta chain variable domain of TCR clone 305996 (TRBV19, TRBJ1-5)
CASSIAQQPQHF

SEQ ID NO: 611993 - protein, 15 aa, Homo sapiens
  CDR3 for alpha chain variable domain of TCR clone 305997 (TRAV17, TRAJ16)
CATALRFSHGRKLLF

SEQ ID NO: 611994 - protein, 15 aa, Homo sapiens
  CDR3 for beta chain variable domain of TCR clone 305997 (TRBV20-1, TRBJ1-1)
CSASRGVTGNTEAFF

SEQ ID NO: 611995 - protein, 14 aa, Homo sapiens
  CDR3 for alpha chain variable domain of TCR clone 305998 (TRAV8-3, TRAJ6)
CAVGASGGSYIPTF

SEQ ID NO: 611996 - protein, 17 aa, Homo sapiens
  CDR3 for beta chain variable domain of TCR clone 305998 (TRBV18, TRBJ2-2)
CASSPSDPWENTGELFF

SEQ ID NO: 611997 - protein, 15 aa, Homo sapiens
  CDR3 for alpha chain variable domain of TCR clone 305999 (TRAV4, TRAJ39)
CLVGPNNNAGNMLTF

SEQ ID NO: 611998 - protein, 15 aa, Homo sapiens
  CDR3 for beta chain variable domain of TCR clone 305999 (TRBV19, TRBJ1-6)
CASSTQGAVGSPLPF

SEQ ID NO: 611999 - protein, 11 aa, Homo sapiens
  CDR3 for alpha chain variable domain of TCR clone 306000 (TRAV29/DV5, TRAJ49)
CAAVPGNQFYF

SEQ ID NO: 612000 - protein, 15 aa, Homo sapiens
  CDR3 for beta chain variable domain of TCR clone 306000 (TRBV6-3, TRBJ2-7)
CASSSPGTVFYEQYF

SEQ ID NO: 612001 - protein, 16 aa, Homo sapiens
  CDR3 for alpha chain variable domain of TCR clone 306001 (TRAV26-1, TRAJ53)
CIVRVAMGGSNYKLTF

SEQ ID NO: 612002 - protein, 14 aa, Homo sapiens
  CDR3 for beta chain variable domain of TCR clone 306001 (TRBV6-1, TRBJ1-3)
CASVQGGGGNTIYF

SEQ ID NO: 612003 - protein, 17 aa, Homo sapiens
  CDR3 for alpha chain variable domain of TCR clone 306002 (TRAV26-1, TRAJ58)
CIVRVGAEETSGSRLTL

SEQ ID NO: 612004 - protein, 18 aa, Homo sapiens
  CDR3 for beta chain variable domain of TCR clone 306002 (TRBV7-9, TRBJ2-7)
CASSLTTSGSRTWYEQYF

SEQ ID NO: 612005 - protein, 13 aa, Homo sapiens
  CDR3 for alpha chain variable domain of TCR clone 306003 (TRAV38-2/DV8, TRAJ34)
CAYRTWNTDKLIF

SEQ ID NO: 612006 - protein, 15 aa, Homo sapiens
  CDR3 for beta chain variable domain of TCR clone 306003 (TRBV4-1, TRBJ2-5)
CASSQWDLYQETQYF

SEQ ID NO: 612007 - protein, 17 aa, Homo sapiens
  CDR3 for alpha chain variable domain of TCR clone 306004 (TRAV26-1, TRAJ37)
CIVRVITVSSNTGKLIF

SEQ ID NO: 612008 - protein, 20 aa, Homo sapiens
  CDR3 for beta chain variable domain of TCR clone 306004 (TRBV28, TRBJ2-1)
CASTPIGRSPGLAGGNEQFF

SEQ ID NO: 612009 - protein, 14 aa, Homo sapiens
  CDR3 for alpha chain variable domain of TCR clone 306005 (TRAV21, TRAJ15)
CAVSLNQAGTALIF

SEQ ID NO: 612010 - protein, 11 aa, Homo sapiens
  CDR3 for beta chain variable domain of TCR clone 306005 (TRBV20-1, TRBJ2-7)
CSARASYEQYF

SEQ ID NO: 612011 - protein, 16 aa, Homo sapiens
  CDR3 for alpha chain variable domain of TCR clone 306006 (TRAV1-2, TRAJ10)
CAVRGVLTGGGNKLTF

SEQ ID NO: 612012 - protein, 16 aa, Homo sapiens
  CDR3 for beta chain variable domain of TCR clone 306006 (TRBV25-1, TRBJ1-3)
CQQCSRDILSGNTIYF

SEQ ID NO: 612013 - protein, 12 aa, Homo sapiens
  CDR3 for alpha chain variable domain of TCR clone 306007 (TRAV12-3, TRAJ17)
CAMTLTVNKLTF

SEQ ID NO: 612014 - protein, 16 aa, Homo sapiens
  CDR3 for beta chain variable domain of TCR clone 306007 (TRBV12-4, TRBJ1-5)
CASSRPVGGSNQHQHF

SEQ ID NO: 612015 - protein, 13 aa, Homo sapiens
  CDR3 for alpha chain variable domain of TCR clone 306008 (TRAV1-2, TRAJ7)
CAGPYYGNNRLAF

SEQ ID NO: 612016 - protein, 16 aa, Homo sapiens
  CDR3 for beta chain variable domain of TCR clone 306008 (TRBV19, TRBJ1-1)
CASSPTRFWPGTEAFF
